United States Patent Application Publication US 2022/0259616 A1 - sequence listing, part 2

SEQ ID NO: 25818 - DNA, 20 bp, Artificial Sequence
  MKO10025818_A_Il1rl1
  gRNA
ttgatgtactcgacagtacg

SEQ ID NO: 25819 - DNA, 20 bp, Artificial Sequence
  MKO10025819_A_Il1rl2
  gRNA
tccttccccagatacgtgtg

SEQ ID NO: 25820 - DNA, 20 bp, Artificial Sequence
  MKO10025820_A_Il1rl2
  gRNA
tttactgccccgtttgtttc

SEQ ID NO: 25821 - DNA, 20 bp, Artificial Sequence
  MKO10025821_A_Il1rl2
  gRNA
tcttgtgaacaacgttgctg

SEQ ID NO: 25822 - DNA, 20 bp, Artificial Sequence
  MKO10025822_A_Il1rn
  gRNA
agatgatatcaagctccagc

SEQ ID NO: 25823 - DNA, 20 bp, Artificial Sequence
  MKO10025823_A_Il1rn
  gRNA
agtagaacttcgtgactata

SEQ ID NO: 25824 - DNA, 20 bp, Artificial Sequence
  MKO10025824_A_Il1rn
  gRNA
cttgatatcatctccagact

SEQ ID NO: 25825 - DNA, 20 bp, Artificial Sequence
  MKO10025825_A_Il20ra
  gRNA
ctaaatgcgggagtatcaac

SEQ ID NO: 25826 - DNA, 20 bp, Artificial Sequence
  MKO10025826_A_Il20ra
  gRNA
gcgttccgtctcggcccatt

SEQ ID NO: 25827 - DNA, 20 bp, Artificial Sequence
  MKO10025827_A_Il20ra
  gRNA
gaagcagtgcatcagtactt

SEQ ID NO: 25828 - DNA, 20 bp, Artificial Sequence
  MKO10025828_A_Il20rb
  gRNA
cttacttgcatttcggttaa

SEQ ID NO: 25829 - DNA, 20 bp, Artificial Sequence
  MKO10025829_A_Il20rb
  gRNA
ggaagcctcaccgcggcgcc

SEQ ID NO: 25830 - DNA, 20 bp, Artificial Sequence
  MKO10025830_A_Il20rb
  gRNA
ccacagtgccatataacttc

SEQ ID NO: 25831 - DNA, 20 bp, Artificial Sequence
  MKO10025831_A_Il20
  gRNA
agaatctcactagatgacga

SEQ ID NO: 25832 - DNA, 20 bp, Artificial Sequence
  MKO10025832_A_Il20
  gRNA
tcatctagtgagattctatc

SEQ ID NO: 25833 - DNA, 20 bp, Artificial Sequence
  MKO10025833_A_Il20
  gRNA
ctatgaagtgactcagaatt

SEQ ID NO: 25834 - DNA, 20 bp, Artificial Sequence
  MKO10025834_A_Il21r
  gRNA
caggacgctatgatatctcc

SEQ ID NO: 25835 - DNA, 20 bp, Artificial Sequence
  MKO10025835_A_Il21r
  gRNA
gatatcatagcgtcctgaga

SEQ ID NO: 25836 - DNA, 20 bp, Artificial Sequence
  MKO10025836_A_Il21r
  gRNA
ggaattgagacaagcgcata

SEQ ID NO: 25837 - DNA, 20 bp, Artificial Sequence
  MKO10025837_A_Il21
  gRNA
cctgtgattcgtatgagaaa

SEQ ID NO: 25838 - DNA, 20 bp, Artificial Sequence
  MKO10025838_A_Il21
  gRNA
gacattcatcattgacctcg

SEQ ID NO: 25839 - DNA, 20 bp, Artificial Sequence
  MKO10025839_A_Il21
  gRNA
gatcttacctttacatcttg

SEQ ID NO: 25840 - DNA, 20 bp, Artificial Sequence
  MKO10025840_A_Il22ra1
  gRNA
ggagctctaagcggtagaac

SEQ ID NO: 25841 - DNA, 20 bp, Artificial Sequence
  MKO10025841_A_Il22ra1
  gRNA
tgccgagtgaagacgctgcc

SEQ ID NO: 25842 - DNA, 20 bp, Artificial Sequence
  MKO10025842_A_Il22ra1
  gRNA
actggaatttcacgtgttga

SEQ ID NO: 25843 - DNA, 20 bp, Artificial Sequence
  MKO10025843_A_Il22ra2
  gRNA
cccgcaaagatgcgttaact

SEQ ID NO: 25844 - DNA, 20 bp, Artificial Sequence
  MKO10025844_A_Il22ra2
  gRNA
cccgagttaacgcatctttg

SEQ ID NO: 25845 - DNA, 20 bp, Artificial Sequence
  MKO10025845_A_Il22ra2
  gRNA
ctcccgtaatacagctcgta

SEQ ID NO: 25846 - DNA, 20 bp, Artificial Sequence
  MKO10025846_A_Il22
  gRNA
gatcaaggcgattggggaac

SEQ ID NO: 25847 - DNA, 20 bp, Artificial Sequence
  MKO10025847_A_Il22
  gRNA
catctgtgttgttatctgca

SEQ ID NO: 25848 - DNA, 20 bp, Artificial Sequence
  MKO10025848_A_Il22
  gRNA
cagataacaacacagatgtc

SEQ ID NO: 25849 - DNA, 20 bp, Artificial Sequence
  MKO10025849_A_Il23a
  gRNA
acacttaccatatgtcccgc

SEQ ID NO: 25850 - DNA, 20 bp, Artificial Sequence
  MKO10025850_A_Il23a
  gRNA
ccgggcagctatggccaaaa

SEQ ID NO: 25851 - DNA, 20 bp, Artificial Sequence
  MKO10025851_A_Il23a
  gRNA
ctggaacgcacatgcaccag

SEQ ID NO: 25852 - DNA, 20 bp, Artificial Sequence
  MKO10025852_A_Il23r
  gRNA
atagaacaacagctcggatt

SEQ ID NO: 25853 - DNA, 20 bp, Artificial Sequence
  MKO10025853_A_Il23r
  gRNA
acaacaactacacgtccatc

SEQ ID NO: 25854 - DNA, 20 bp, Artificial Sequence
  MKO10025854_A_Il23r
  gRNA
cccttaagcactgccgacca

SEQ ID NO: 25855 - DNA, 20 bp, Artificial Sequence
  MKO10025855_A_Il24
  gRNA
gttccgcagagcattcaaac

SEQ ID NO: 25856 - DNA, 20 bp, Artificial Sequence
  MKO10025856_A_Il24
  gRNA
ggagaaccacccctgtcact

SEQ ID NO: 25857 - DNA, 20 bp, Artificial Sequence
  MKO10025857_A_Il24
  gRNA
tgacctcaagaccttgaatt

SEQ ID NO: 25858 - DNA, 20 bp, Artificial Sequence
  MKO10025858_A_Il25
  gRNA
tacccatcgccgctactgct

SEQ ID NO: 25859 - DNA, 20 bp, Artificial Sequence
  MKO10025859_A_Il25
  gRNA
gccgccggtagaagaccgtc

SEQ ID NO: 25860 - DNA, 20 bp, Artificial Sequence
  MKO10025860_A_Il25
  gRNA
gaacccacaccgtcagcttg

SEQ ID NO: 25861 - DNA, 20 bp, Artificial Sequence
  MKO10025861_A_Il27ra
  gRNA
ccgacgctgtagcactgcag

SEQ ID NO: 25862 - DNA, 20 bp, Artificial Sequence
  MKO10025862_A_Il27ra
  gRNA
ggcgaactccactcgcccca

SEQ ID NO: 25863 - DNA, 20 bp, Artificial Sequence
  MKO10025863_A_Il27ra
  gRNA
tgcagtgggcgccgcccgtg

SEQ ID NO: 25864 - DNA, 20 bp, Artificial Sequence
  MKO10025864_A_Il27
  gRNA
caggctgaatctcgattgcc

SEQ ID NO: 25865 - DNA, 20 bp, Artificial Sequence
  MKO10025865_A_Il27
  gRNA
tgagccttcaagagctgcgc

SEQ ID NO: 25866 - DNA, 20 bp, Artificial Sequence
  MKO10025866_A_Il27
  gRNA
ttgtcctgtctcgggctgtt

SEQ ID NO: 25867 - DNA, 20 bp, Artificial Sequence
  MKO10025867_A_Il2ra
  gRNA
acaacttacccagaaatcgg

SEQ ID NO: 25868 - DNA, 20 bp, Artificial Sequence
  MKO10025868_A_Il2ra
  gRNA
aagagaacaccaccgatttc

SEQ ID NO: 25869 - DNA, 20 bp, Artificial Sequence
  MKO10025869_A_Il2ra
  gRNA
atgcaccaagagaaccttac

SEQ ID NO: 25870 - DNA, 20 bp, Artificial Sequence
  MKO10025870_A_Il2rb
  gRNA
cactcaccgcaggttcgact

SEQ ID NO: 25871 - DNA, 20 bp, Artificial Sequence
  MKO10025871_A_Il2rb
  gRNA
tgaggcccgtagacgtcttc

SEQ ID NO: 25872 - DNA, 20 bp, Artificial Sequence
  MKO10025872_A_Il2rb
  gRNA
tccatactcacggttgtcaa

SEQ ID NO: 25873 - DNA, 20 bp, Artificial Sequence
  MKO10025873_A_Il2rg
  gRNA
catacctatagtgcagcgtg

SEQ ID NO: 25874 - DNA, 20 bp, Artificial Sequence
  MKO10025874_A_Il2rg
  gRNA
gcttctgtacagctcgcctc

SEQ ID NO: 25875 - DNA, 20 bp, Artificial Sequence
  MKO10025875_A_Il2rg
  gRNA
ctgggggagtcatactgtag

SEQ ID NO: 25876 - DNA, 20 bp, Artificial Sequence
  MKO10025876_A_Il2
  gRNA
aagtgggtgcgctgttgaca

SEQ ID NO: 25877 - DNA, 20 bp, Artificial Sequence
  MKO10025877_A_Il2
  gRNA
ttgctgactcatcatcgaat

SEQ ID NO: 25878 - DNA, 20 bp, Artificial Sequence
  MKO10025878_A_Il2
  gRNA
cgatgatgagtcagcaactg

SEQ ID NO: 25879 - DNA, 20 bp, Artificial Sequence
  MKO10025879_A_Il31ra
  gRNA
aaaccgcgtgaaaagactcg

SEQ ID NO: 25880 - DNA, 20 bp, Artificial Sequence
  MKO10025880_A_Il31ra
  gRNA
atgtcctggctctacgattc

SEQ ID NO: 25881 - DNA, 20 bp, Artificial Sequence
  MKO10025881_A_Il31ra
  gRNA
tgttctctggcttagtcggc

SEQ ID NO: 25882 - DNA, 20 bp, Artificial Sequence
  MKO10025882_A_Il31
  gRNA
cttaagtcttccttcgatat

SEQ ID NO: 25883 - DNA, 20 bp, Artificial Sequence
  MKO10025883_A_Il31
  gRNA
ttgtaaagtgttcgtgctta

SEQ ID NO: 25884 - DNA, 20 bp, Artificial Sequence
  MKO10025884_A_Il31
  gRNA
aggaacaacgaagcctaccc

SEQ ID NO: 25885 - DNA, 20 bp, Artificial Sequence
  MKO10025885_A_Il33
  gRNA
catagtagcgtagtagcacc

SEQ ID NO: 25886 - DNA, 20 bp, Artificial Sequence
  MKO10025886_A_Il33
  gRNA
gtgatcaatgttgacgactc

SEQ ID NO: 25887 - DNA, 20 bp, Artificial Sequence
  MKO10025887_A_Il33
  gRNA
ccctgtcctgcaagtcaatc

SEQ ID NO: 25888 - DNA, 20 bp, Artificial Sequence
  MKO10025888_A_Il34
  gRNA
tcttgggatcctacttgacg

SEQ ID NO: 25889 - DNA, 20 bp, Artificial Sequence
  MKO10025889_A_Il34
  gRNA
ttcccaaagccacgtcaagt

SEQ ID NO: 25890 - DNA, 20 bp, Artificial Sequence
  MKO10025890_A_Il34
  gRNA
acgtgagtgagcgagagctt

SEQ ID NO: 25891 - DNA, 20 bp, Artificial Sequence
  MKO10025891_A_Il3ra
  gRNA
ccctgtcgtgatgtcagcgc

SEQ ID NO: 25892 - DNA, 20 bp, Artificial Sequence
  MKO10025892_A_Il3ra
  gRNA
gagcggggtccgaaagcaac

SEQ ID NO: 25893 - DNA, 20 bp, Artificial Sequence
  MKO10025893_A_Il3ra
  gRNA
cccggcgctgacatcacgac

SEQ ID NO: 25894 - DNA, 20 bp, Artificial Sequence
  MKO10025894_A_Il3
  gRNA
aggggtcttcattcgagatc

SEQ ID NO: 25895 - DNA, 20 bp, Artificial Sequence
  MKO10025895_A_Il3
  gRNA
agaccacctcagcccgcatc

SEQ ID NO: 25896 - DNA, 20 bp, Artificial Sequence
  MKO10025896_A_Il3
  gRNA
agtaaacctgtccaaattcg

SEQ ID NO: 25897 - DNA, 20 bp, Artificial Sequence
  MKO10025897_A_Il4i1
  gRNA
ggggccgtatcttcactttc

SEQ ID NO: 25898 - DNA, 20 bp, Artificial Sequence
  MKO10025898_A_Il4i1
  gRNA
tgagtagctgctcataatcg

SEQ ID NO: 25899 - DNA, 20 bp, Artificial Sequence
  MKO10025899_A_Il4i1
  gRNA
gttcaacaagcatacgcttc

SEQ ID NO: 25900 - DNA, 20 bp, Artificial Sequence
  MKO10025900_A_Il4ra
  gRNA
tctactatacggcgcgtgtg

SEQ ID NO: 25901 - DNA, 20 bp, Artificial Sequence
  MKO10025901_A_Il4ra
  gRNA
acaccaatgtgtccgacgaa

SEQ ID NO: 25902 - DNA, 20 bp, Artificial Sequence
  MKO10025902_A_Il4ra
  gRNA
ccaggtcagcagccattcgt

SEQ ID NO: 25903 - DNA, 20 bp, Artificial Sequence
  MKO10025903_A_Il4
  gRNA
ctccgcttaccgatgaatcc

SEQ ID NO: 25904 - DNA, 20 bp, Artificial Sequence
  MKO10025904_A_Il4
  gRNA
aaacgtcctcacagcaacga

SEQ ID NO: 25905 - DNA, 20 bp, Artificial Sequence
  MKO10025905_A_Il4
  gRNA
ctgcatcaagacgccatgca

SEQ ID NO: 25906 - DNA, 20 bp, Artificial Sequence
  MKO10025906_A_Il5ra
  gRNA
acaagttaaattcgtaaccg

SEQ ID NO: 25907 - DNA, 20 bp, Artificial Sequence
  MKO10025907_A_Il5ra
  gRNA
aagtgtcccttcgttgcacc

SEQ ID NO: 25908 - DNA, 20 bp, Artificial Sequence
  MKO10025908_A_Il5ra
  gRNA
aagaacttgagctaatccag

SEQ ID NO: 25909 - DNA, 20 bp, Artificial Sequence
  MKO10025909_A_Il5
  gRNA
acggaggacgaggcagttcc

SEQ ID NO: 25910 - DNA, 20 bp, Artificial Sequence
  MKO10025910_A_Il5
  gRNA
ttcacaggagaagtgtggcg

SEQ ID NO: 25911 - DNA, 20 bp, Artificial Sequence
  MKO10025911_A_Il5
  gRNA
ctgaagaatcaaactgtccg

SEQ ID NO: 25912 - DNA, 20 bp, Artificial Sequence
  MKO10025912_A_Il6ra
  gRNA
agcttcgataccgacctgta

SEQ ID NO: 25913 - DNA, 20 bp, Artificial Sequence
  MKO10025913_A_Il6ra
  gRNA
gacgtgcagctcagcgacac

SEQ ID NO: 25914 - DNA, 20 bp, Artificial Sequence
  MKO10025914_A_Il6ra
  gRNA
cgttgacaagggggttcttc

SEQ ID NO: 25915 - DNA, 20 bp, Artificial Sequence
  MKO10025915_A_Il6st
  gRNA
cagtgaagttcgagccgcgc

SEQ ID NO: 25916 - DNA, 20 bp, Artificial Sequence
  MKO10025916_A_Il6st
  gRNA
ggtcttccacacgatgtagc

SEQ ID NO: 25917 - DNA, 20 bp, Artificial Sequence
  MKO10025917_A_Il6st
  gRNA
taaagtctgacatccaatat

SEQ ID NO: 25918 - DNA, 20 bp, Artificial Sequence
  MKO10025918_A_Il6
  gRNA
ctaccaaactggatataatc

SEQ ID NO: 25919 - DNA, 20 bp, Artificial Sequence
  MKO10025919_A_Il6
  gRNA
tctggagtaccatagctacc

SEQ ID NO: 25920 - DNA, 20 bp, Artificial Sequence
  MKO10025920_A_Il6
  gRNA
agttgttcttcatgtactcc

SEQ ID NO: 25921 - DNA, 20 bp, Artificial Sequence
  MKO10025921_A_Il7r
  gRNA
cgtccgcgtctgcatcttct

SEQ ID NO: 25922 - DNA, 20 bp, Artificial Sequence
  MKO10025922_A_Il7r
  gRNA
ctttgcgataaacgactttc

SEQ ID NO: 25923 - DNA, 20 bp, Artificial Sequence
  MKO10025923_A_Il7r
  gRNA
ccccataacgattacttcaa

SEQ ID NO: 25924 - DNA, 20 bp, Artificial Sequence
  MKO10025924_A_Il7
  gRNA
actggtgaactgcacaagta

SEQ ID NO: 25925 - DNA, 20 bp, Artificial Sequence
  MKO10025925_A_Il7
  gRNA
gatgatcagcatcgatgaat

SEQ ID NO: 25926 - DNA, 20 bp, Artificial Sequence
  MKO10025926_A_Il7
  gRNA
cttgtgatactgttagtaag

SEQ ID NO: 25927 - DNA, 20 bp, Artificial Sequence
  MKO10025927_A_Il9r
  gRNA
tggcggtgaaacaggtctcc

SEQ ID NO: 25928 - DNA, 20 bp, Artificial Sequence
  MKO10025928_A_Il9r
  gRNA
cacacttcaccgctgcatca

SEQ ID NO: 25929 - DNA, 20 bp, Artificial Sequence
  MKO10025929_A_Il9r
  gRNA
ccactggtcggctccagagc

SEQ ID NO: 25930 - DNA, 20 bp, Artificial Sequence
  MKO10025930_A_Il9
  gRNA
attgtaccacaccgtgctac

SEQ ID NO: 25931 - DNA, 20 bp, Artificial Sequence
  MKO10025931_A_Il9
  gRNA
cctaaagaacatcacgtgtc

SEQ ID NO: 25932 - DNA, 20 bp, Artificial Sequence
  MKO10025932_A_Il9
  gRNA
aaagccatgcaaccagacca

SEQ ID NO: 25933 - DNA, 20 bp, Artificial Sequence
  MKO10025933_A_Ildr1
  gRNA
aagttcgcatcgtggcgcag

SEQ ID NO: 25934 - DNA, 20 bp, Artificial Sequence
  MKO10025934_A_Ildr1
  gRNA
ccggtaatccacccccagca

SEQ ID NO: 25935 - DNA, 20 bp, Artificial Sequence
  MKO10025935_A_Ildr1
  gRNA
gccatgtcacaaccacgtcc

SEQ ID NO: 25936 - DNA, 20 bp, Artificial Sequence
  MKO10025936_A_Ildr2
  gRNA
cagcagaaggaccgtccgag

SEQ ID NO: 25937 - DNA, 20 bp, Artificial Sequence
  MKO10025937_A_Ildr2
  gRNA
tccccaccagcacgaagaag

SEQ ID NO: 25938 - DNA, 20 bp, Artificial Sequence
  MKO10025938_A_Ildr2
  gRNA
tcccatgcgatcctggcagt

SEQ ID NO: 25939 - DNA, 20 bp, Artificial Sequence
  MKO10025939_A_Ilf2
  gRNA
cgtggtcgtggtgggcgctt

SEQ ID NO: 25940 - DNA, 20 bp, Artificial Sequence
  MKO10025940_A_Ilf2
  gRNA
catacctgctcagcagaatt

SEQ ID NO: 25941 - DNA, 20 bp, Artificial Sequence
  MKO10025941_A_Ilf2
  gRNA
tgcccctaattctgctgagc

SEQ ID NO: 25942 - DNA, 20 bp, Artificial Sequence
  MKO10025942_A_Ilf3
  gRNA
cgacccgcatcacgcccctc

SEQ ID NO: 25943 - DNA, 20 bp, Artificial Sequence
  MKO10025943_A_Ilf3
  gRNA
ccatactgagcgggccctga

SEQ ID NO: 25944 - DNA, 20 bp, Artificial Sequence
  MKO10025944_A_Ilf3
  gRNA
gaatgatgatcgccacgtga

SEQ ID NO: 25945 - DNA, 20 bp, Artificial Sequence
  MKO10025945_A_Ilkap
  gRNA
actcctgagtgatatcgttc

SEQ ID NO: 25946 - DNA, 20 bp, Artificial Sequence
  MKO10025946_A_Ilkap
  gRNA
catcctgaacgatatcactc

SEQ ID NO: 25947 - DNA, 20 bp, Artificial Sequence
  MKO10025947_A_Ilkap
  gRNA
ttgcctacctgaattgccac

SEQ ID NO: 25948 - DNA, 20 bp, Artificial Sequence
  MKO10025948_A_Ilk
  gRNA
cggattaatgtgatgaatcg

SEQ ID NO: 25949 - DNA, 20 bp, Artificial Sequence
  MKO10025949_A_Ilk
  gRNA
ctcacggggccttgtgcgag

SEQ ID NO: 25950 - DNA, 20 bp, Artificial Sequence
  MKO10025950_A_Ilk
  gRNA
ggatgatacccccctgcacc

SEQ ID NO: 25951 - DNA, 20 bp, Artificial Sequence
  MKO10025951_A_Iltifb
  gRNA
gatcaaagcgatcggggaac

SEQ ID NO: 25952 - DNA, 20 bp, Artificial Sequence
  MKO10025952_A_Iltifb
  gRNA
cagataacaacacagacgtc

SEQ ID NO: 25953 - DNA, 20 bp, Artificial Sequence
  MKO10025953_A_Iltifb
  gRNA
cgtctgtgttgttatctgca

SEQ ID NO: 25954 - DNA, 20 bp, Artificial Sequence
  MKO10025954_A_Ilvbl
  gRNA
ccagaaacggggcgcacttc

SEQ ID NO: 25955 - DNA, 20 bp, Artificial Sequence
  MKO10025955_A_Ilvbl
  gRNA
gcaatagctgctgcccagtc

SEQ ID NO: 25956 - DNA, 20 bp, Artificial Sequence
  MKO10025956_A_Ilvbl
  gRNA
tgaagacaaagcgtacacca

SEQ ID NO: 25957 - DNA, 20 bp, Artificial Sequence
  MKO10025957_A_Immp1l
  gRNA
aagaggacgtatcttcttta

SEQ ID NO: 25958 - DNA, 20 bp, Artificial Sequence
  MKO10025958_A_Immp1l
  gRNA
tcagtgttctggaccatcaa

SEQ ID NO: 25959 - DNA, 20 bp, Artificial Sequence
  MKO10025959_A_Immp1l
  gRNA
cgtcctcttattagtccata

SEQ ID NO: 25960 - DNA, 20 bp, Artificial Sequence
  MKO10025960_A_Immp2l
  gRNA
agtcactttcttggatcgcg

SEQ ID NO: 25961 - DNA, 20 bp, Artificial Sequence
  MKO10025961_A_Immp2l
  gRNA
tattgtaccctcgcccaatt

SEQ ID NO: 25962 - DNA, 20 bp, Artificial Sequence
  MKO10025962_A_Immp2l
  gRNA
ggtggaaggctcgtcaatgc

SEQ ID NO: 25963 - DNA, 20 bp, Artificial Sequence
  MKO10025963_A_Immt
  gRNA
tatctacggcatggtcgtag

SEQ ID NO: 25964 - DNA, 20 bp, Artificial Sequence
  MKO10025964_A_Immt
  gRNA
gggaatcccatttggcatac

SEQ ID NO: 25965 - DNA, 20 bp, Artificial Sequence
  MKO10025965_A_Immt
  gRNA
ctgcgggcctgtcagttatc

SEQ ID NO: 25966 - DNA, 20 bp, Artificial Sequence
  MKO10025966_A_Imp3
  gRNA
cccattccgcgtgcgcgcct

SEQ ID NO: 25967 - DNA, 20 bp, Artificial Sequence
  MKO10025967_A_Imp3
  gRNA
gccgcagcacacgcagttcg

SEQ ID NO: 25968 - DNA, 20 bp, Artificial Sequence
  MKO10025968_A_Imp3
  gRNA
gctgcgccatgcgtagcttg

SEQ ID NO: 25969 - DNA, 20 bp, Artificial Sequence
  MKO10025969_A_Imp4
  gRNA
ggaggcgcagcgatccgttc

SEQ ID NO: 25970 - DNA, 20 bp, Artificial Sequence
  MKO10025970_A_Imp4
  gRNA
caacaggtcggtgaccccgt

SEQ ID NO: 25971 - DNA, 20 bp, Artificial Sequence
  MKO10025971_A_Imp4
  gRNA
ggtgcccagcgcatgaaccg

SEQ ID NO: 25972 - DNA, 20 bp, Artificial Sequence
  MKO10025972_A_Impa1
  gRNA
gaacgactaacttcgtgcat

SEQ ID NO: 25973 - DNA, 20 bp, Artificial Sequence
  MKO10025973_A_Impa1
  gRNA
gtaactgttaccaagtcggc

SEQ ID NO: 25974 - DNA, 20 bp, Artificial Sequence
  MKO10025974_A_Impa1
  gRNA
taaaagttctccagccgact

SEQ ID NO: 25975 - DNA, 20 bp, Artificial Sequence
  MKO10025975_A_Impa2
  gRNA
gtcgatggggtcgatgatcc

SEQ ID NO: 25976 - DNA, 20 bp, Artificial Sequence
  MKO10025976_A_Impa2
  gRNA
agcggctgtacaccggcagg

SEQ ID NO: 25977 - DNA, 20 bp, Artificial Sequence
  MKO10025977_A_Impa2
  gRNA
catcggatttgctgttcacc

SEQ ID NO: 25978 - DNA, 20 bp, Artificial Sequence
  MKO10025978_A_Impact
  gRNA
gctgtacccgggtactcact

SEQ ID NO: 25979 - DNA, 20 bp, Artificial Sequence
  MKO10025979_A_Impact
  gRNA
acaccactcctcgccataaa

SEQ ID NO: 25980 - DNA, 20 bp, Artificial Sequence
  MKO10025980_A_Impact
  gRNA
agacttatcgaacagccttg

SEQ ID NO: 25981 - DNA, 20 bp, Artificial Sequence
  MKO10025981_A_Impad1
  gRNA
attgtgtctcgctctcatgc

SEQ ID NO: 25982 - DNA, 20 bp, Artificial Sequence
  MKO10025982_A_Impad1
  gRNA
cttccggatttagaaaagtc

SEQ ID NO: 25983 - DNA, 20 bp, Artificial Sequence
  MKO10025983_A_Impad1
  gRNA
tgacccacttgatgctacac

SEQ ID NO: 25984 - DNA, 20 bp, Artificial Sequence
  MKO10025984_A_Impdh1
  gRNA
tggtatccccatcaccgcga

SEQ ID NO: 25985 - DNA, 20 bp, Artificial Sequence
  MKO10025985_A_Impdh1
  gRNA
cttgaccttccgtacttcat

SEQ ID NO: 25986 - DNA, 20 bp, Artificial Sequence
  MKO10025986_A_Impdh1
  gRNA
accattgatctcgtctccca

SEQ ID NO: 25987 - DNA, 20 bp, Artificial Sequence
  MKO10025987_A_Impdh2
  gRNA
aagccttaccgccatcgcga

SEQ ID NO: 25988 - DNA, 20 bp, Artificial Sequence
  MKO10025988_A_Impdh2
  gRNA
tggaatggccatcgcgatgg

SEQ ID NO: 25989 - DNA, 20 bp, Artificial Sequence
  MKO10025989_A_Impdh2
  gRNA
ttccttccagaaatacgaac

SEQ ID NO: 25990 - DNA, 20 bp, Artificial Sequence
  MKO10025990_A_Impg1
  gRNA
cagtatgtcaagaagtcgtg

SEQ ID NO: 25991 - DNA, 20 bp, Artificial Sequence
  MKO10025991_A_Impg1
  gRNA
caaatcgaatattcgtttca

SEQ ID NO: 25992 - DNA, 20 bp, Artificial Sequence
  MKO10025992_A_Impg1
  gRNA
aacttacctgtgggtaccac

SEQ ID NO: 25993 - DNA, 20 bp, Artificial Sequence
  MKO10025993_A_Impg2
  gRNA
tcgatcccaaaacgtcctga

SEQ ID NO: 25994 - DNA, 20 bp, Artificial Sequence
  MKO10025994_A_Impg2
  gRNA
tgacgatattcatcacgccc

SEQ ID NO: 25995 - DNA, 20 bp, Artificial Sequence
  MKO10025995_A_Impg2
  gRNA
agcctctgcaacggtttcac

SEQ ID NO: 25996 - DNA, 20 bp, Artificial Sequence
  MKO10025996_A_Inadl
  gRNA
aatcttacctcaacaggcga

SEQ ID NO: 25997 - DNA, 20 bp, Artificial Sequence
  MKO10025997_A_Inadl
  gRNA
gtctcgctggcaataaggac

SEQ ID NO: 25998 - DNA, 20 bp, Artificial Sequence
  MKO10025998_A_Inadl
  gRNA
agaactacacattatcgaac

SEQ ID NO: 25999 - DNA, 20 bp, Artificial Sequence
  MKO10025999_A_Ina
  gRNA
cacgccgagccgtcgcgcgt

SEQ ID NO: 26000 - DNA, 20 bp, Artificial Sequence
  MKO10026000_A_Ina
  gRNA
aagagctcgccgacgcgcga

SEQ ID NO: 26001 - DNA, 20 bp, Artificial Sequence
  MKO10026001_A_Ina
  gRNA
ccccgagatgcttaacccgc

SEQ ID NO: 26002 - DNA, 20 bp, Artificial Sequence
  MKO10026002_A_Inca1
  gRNA
ggagcccctcaagagggtgc

SEQ ID NO: 26003 - DNA, 20 bp, Artificial Sequence
  MKO10026003_A_Inca1
  gRNA
gtactgttctaccatccaat

SEQ ID NO: 26004 - DNA, 20 bp, Artificial Sequence
  MKO10026004_A_Inca1
  gRNA
agaccaatgcctcagccgta

SEQ ID NO: 26005 - DNA, 20 bp, Artificial Sequence
  MKO10026005_A_Incenp
  gRNA
cgggttatccgctgcaacac

SEQ ID NO: 26006 - DNA, 20 bp, Artificial Sequence
  MKO10026006_A_Incenp
  gRNA
actagcctcgaagtataatt

SEQ ID NO: 26007 - DNA, 20 bp, Artificial Sequence
  MKO10026007_A_Incenp
  gRNA
ctccttctcagaaaaaccgt

SEQ ID NO: 26008 - DNA, 20 bp, Artificial Sequence
  MKO10026008_A_Inf2
  gRNA
gaacttcagcgaattagcga

SEQ ID NO: 26009 - DNA, 20 bp, Artificial Sequence
  MKO10026009_A_Inf2
  gRNA
cgcactgacgctcgatgccc

SEQ ID NO: 26010 - DNA, 20 bp, Artificial Sequence
  MKO10026010_A_Inf2
  gRNA
cagtgacaacgtgccctatg

SEQ ID NO: 26011 - DNA, 20 bp, Artificial Sequence
  MKO10026011_A_Ing1
  gRNA
gagatcgacgccaaatacca

SEQ ID NO: 26012 - DNA, 20 bp, Artificial Sequence
  MKO10026012_A_Ing1
  gRNA
gcagtgactcgattgagtcc

SEQ ID NO: 26013 - DNA, 20 bp, Artificial Sequence
  MKO10026013_A_Ing1
  gRNA
cagacggcacccagaagcgc

SEQ ID NO: 26014 - DNA, 20 bp, Artificial Sequence
  MKO10026014_A_Ing2
  gRNA
ccgcgctcctgaccggagag

SEQ ID NO: 26015 - DNA, 20 bp, Artificial Sequence
  MKO10026015_A_Ing2
  gRNA
ggatcgatggcaaactcgac

SEQ ID NO: 26016 - DNA, 20 bp, Artificial Sequence
  MKO10026016_A_Ing2
  gRNA
ccgctctccggtcaggagcg

SEQ ID NO: 26017 - DNA, 20 bp, Artificial Sequence
  MKO10026017_A_Ing3
  gRNA
tctcgcgcatctccgtgaag

SEQ ID NO: 26018 - DNA, 20 bp, Artificial Sequence
  MKO10026018_A_Ing3
  gRNA
cttcacggagatgcgcgaga

SEQ ID NO: 26019 - DNA, 20 bp, Artificial Sequence
  MKO10026019_A_Ing3
  gRNA
agatcgccacttgagaaagc

SEQ ID NO: 26020 - DNA, 20 bp, Artificial Sequence
  MKO10026020_A_Ing4
  gRNA
cctagaaggccggacccaaa

SEQ ID NO: 26021 - DNA, 20 bp, Artificial Sequence
  MKO10026021_A_Ing4
  gRNA
ggcgctactcatatattcag

SEQ ID NO: 26022 - DNA, 20 bp, Artificial Sequence
  MKO10026022_A_Ing4
  gRNA
tatggcaagtgcaaggaatt

SEQ ID NO: 26023 - DNA, 20 bp, Artificial Sequence
  MKO10026023_A_Ing5
  gRNA
ccgaagacttgatgctgacc

SEQ ID NO: 26024 - DNA, 20 bp, Artificial Sequence
  MKO10026024_A_Ing5
  gRNA
tctggaggtgctccacacgc

SEQ ID NO: 26025 - DNA, 20 bp, Artificial Sequence
  MKO10026025_A_Ing5
  gRNA
gaaagcagagatcgacatcc

SEQ ID NO: 26026 - DNA, 20 bp, Artificial Sequence
  MKO10026026_A_Inha
  gRNA
tgcgcccctgctagatcttc

SEQ ID NO: 26027 - DNA, 20 bp, Artificial Sequence
  MKO10026027_A_Inha
  gRNA
cgcgtccgaaccacctcaga

SEQ ID NO: 26028 - DNA, 20 bp, Artificial Sequence
  MKO10026028_A_Inha
  gRNA
gccagggacccgaacttgtc

SEQ ID NO: 26029 - DNA, 20 bp, Artificial Sequence
  MKO10026029_A_Inhba
  gRNA
tcattaaccactaccgcatg

SEQ ID NO: 26030 - DNA, 20 bp, Artificial Sequence
  MKO10026030_A_Inhba
  gRNA
ctatcacgccaattattgtg

SEQ ID NO: 26031 - DNA, 20 bp, Artificial Sequence
  MKO10026031_A_Inhba
  gRNA
gcacccacctgactcggcaa

SEQ ID NO: 26032 - DNA, 20 bp, Artificial Sequence
  MKO10026032_A_Inhbb
  gRNA
gccgccaccgcacgacgtac

SEQ ID NO: 26033 - DNA, 20 bp, Artificial Sequence
  MKO10026033_A_Inhbb
  gRNA
tatgccagccgctacgtttc

SEQ ID NO: 26034 - DNA, 20 bp, Artificial Sequence
  MKO10026034_A_Inhbb
  gRNA
caggacacctgtacgtcgtg

SEQ ID NO: 26035 - DNA, 20 bp, Artificial Sequence
  MKO10026035_A_Inhbc
  gRNA
tccaacagggtttcccgtcg

SEQ ID NO: 26036 - DNA, 20 bp, Artificial Sequence
  MKO10026036_A_Inhbc
  gRNA
ccggcgaggtatcgattgcc

SEQ ID NO: 26037 - DNA, 20 bp, Artificial Sequence
  MKO10026037_A_Inhbc
  gRNA
gcgggagctgcttctcgatt

SEQ ID NO: 26038 - DNA, 20 bp, Artificial Sequence
  MKO10026038_A_Inhbe
  gRNA
ggaccttaacagcaccgctg

SEQ ID NO: 26039 - DNA, 20 bp, Artificial Sequence
  MKO10026039_A_Inhbe
  gRNA
gcggaatcctcggcacctag

SEQ ID NO: 26040 - DNA, 20 bp, Artificial Sequence
  MKO10026040_A_Inhbe
  gRNA
accagagcgcgttctccttg

SEQ ID NO: 26041 - DNA, 20 bp, Artificial Sequence
  MKO10026041_A_Inip
  gRNA
acggccaatacctagctcca

SEQ ID NO: 26042 - DNA, 20 bp, Artificial Sequence
  MKO10026042_A_Inip
  gRNA
catgcattaccttgtcctga

SEQ ID NO: 26043 - DNA, 20 bp, Artificial Sequence
  MKO10026043_A_Inip
  gRNA
ccggaagtccttggtaagag

SEQ ID NO: 26044 - DNA, 20 bp, Artificial Sequence
  MKO10026044_A_Inmt
  gRNA
ccacaaagcacaaaccgtcg

SEQ ID NO: 26045 - DNA, 20 bp, Artificial Sequence
  MKO10026045_A_Inmt
  gRNA
tgtgaccaagacacccccgc

SEQ ID NO: 26046 - DNA, 20 bp, Artificial Sequence
  MKO10026046_A_Inmt
  gRNA
tatctccccaggaggtgtag

SEQ ID NO: 26047 - DNA, 20 bp, Artificial Sequence
  MKO10026047_A_Ino80b
  gRNA
cgttcccacacccacggcgg

SEQ ID NO: 26048 - DNA, 20 bp, Artificial Sequence
  MKO10026048_A_Ino80b
  gRNA
gcggctgcttacagcgagac

SEQ ID NO: 26049 - DNA, 20 bp, Artificial Sequence
  MKO10026049_A_Ino80b
  gRNA
tccagaggtacgccttccat

SEQ ID NO: 26050 - DNA, 20 bp, Artificial Sequence
  MKO10026050_A_Ino80c
  gRNA
tgccagctacagcgccgcca

SEQ ID NO: 26051 - DNA, 20 bp, Artificial Sequence
  MKO10026051_A_Ino80c
  gRNA
ctgccttcggatgtggtcac

SEQ ID NO: 26052 - DNA, 20 bp, Artificial Sequence
  MKO10026052_A_Ino80c
  gRNA
aggaattctcctacattcgc

SEQ ID NO: 26053 - DNA, 20 bp, Artificial Sequence
  MKO10026053_A_Ino80d
  gRNA
gtgcacccaaaagcgtcagc

SEQ ID NO: 26054 - DNA, 20 bp, Artificial Sequence
  MKO10026054_A_Ino80d
  gRNA
atggaccatgcgacttgata

SEQ ID NO: 26055 - DNA, 20 bp, Artificial Sequence
  MKO10026055_A_Ino80d
  gRNA
cttcgccatatcaagtcgca

SEQ ID NO: 26056 - DNA, 20 bp, Artificial Sequence
  MKO10026056_A_Ino80e
  gRNA
agaaacggccccgcctaccc

SEQ ID NO: 26057 - DNA, 20 bp, Artificial Sequence
  MKO10026057_A_Ino80e
  gRNA
actctggaatgtcgatcacc

SEQ ID NO: 26058 - DNA, 20 bp, Artificial Sequence
  MKO10026058_A_Ino80e
  gRNA
cctgcttacctcttaggggc

SEQ ID NO: 26059 - DNA, 20 bp, Artificial Sequence
  MKO10026059_A_Ino80
  gRNA
agaacgccgttcagtgaata

SEQ ID NO: 26060 - DNA, 20 bp, Artificial Sequence
  MKO10026060_A_Ino80
  gRNA
aatcccttattgcctgagtc

SEQ ID NO: 26061 - DNA, 20 bp, Artificial Sequence
  MKO10026061_A_Ino80
  gRNA
gcaggcctgcactgtagtac

SEQ ID NO: 26062 - DNA, 20 bp, Artificial Sequence
  MKO10026062_A_Inpp1
  gRNA
catgccggcatcggaagcgc

SEQ ID NO: 26063 - DNA, 20 bp, Artificial Sequence
  MKO10026063_A_Inpp1
  gRNA
ggtagcgtcttccccgcggc

SEQ ID NO: 26064 - DNA, 20 bp, Artificial Sequence
  MKO10026064_A_Inpp1
  gRNA
gctgctctttcgcgcgtgtg

SEQ ID NO: 26065 - DNA, 20 bp, Artificial Sequence
  MKO10026065_A_Inpp4a
  gRNA
aactacgatgtcgtcactat

SEQ ID NO: 26066 - DNA, 20 bp, Artificial Sequence
  MKO10026066_A_Inpp4a
  gRNA
ctcgcatccgttgtatgtgc

SEQ ID NO: 26067 - DNA, 20 bp, Artificial Sequence
  MKO10026067_A_Inpp4a
  gRNA
cgccggaggctctcccagca

SEQ ID NO: 26068 - DNA, 20 bp, Artificial Sequence
  MKO10026068_A_Inpp4b
  gRNA
gattccgaacgagccacagt

SEQ ID NO: 26069 - DNA, 20 bp, Artificial Sequence
  MKO10026069_A_Inpp4b
  gRNA
gtgggaatgtgacacccgtt

SEQ ID NO: 26070 - DNA, 20 bp, Artificial Sequence
  MKO10026070_A_Inpp4b
  gRNA
actgacagtctacgatgtca

SEQ ID NO: 26071 - DNA, 20 bp, Artificial Sequence
  MKO10026071_A_Inpp5a
  gRNA
gtcgaagagcgagcccacgt

SEQ ID NO: 26072 - DNA, 20 bp, Artificial Sequence
  MKO10026072_A_Inpp5a
  gRNA
gtattctttcattgcgtcac

SEQ ID NO: 26073 - DNA, 20 bp, Artificial Sequence
  MKO10026073_A_Inpp5a
  gRNA
gaccagcaggaccgcggtgc

SEQ ID NO: 26074 - DNA, 20 bp, Artificial Sequence
  MKO10026074_A_Inpp5b
  gRNA
gccctacttacgcatgctcc

SEQ ID NO: 26075 - DNA, 20 bp, Artificial Sequence
  MKO10026075_A_Inpp5b
  gRNA
ccggctggaaaatgacgccc

SEQ ID NO: 26076 - DNA, 20 bp, Artificial Sequence
  MKO10026076_A_Inpp5b
  gRNA
agatacatcgtctcctgtga

SEQ ID NO: 26077 - DNA, 20 bp, Artificial Sequence
  MKO10026077_A_Inpp5d
  gRNA
gctcccgtccttgccggctc

SEQ ID NO: 26078 - DNA, 20 bp, Artificial Sequence
  MKO10026078_A_Inpp5d
  gRNA
agtgaatttatcgtcctcat

SEQ ID NO: 26079 - DNA, 20 bp, Artificial Sequence
  MKO10026079_A_Inpp5d
  gRNA
gtgccagcgagtccatcccc

SEQ ID NO: 26080 - DNA, 20 bp, Artificial Sequence
  MKO10026080_A_Inpp5e
  gRNA
cacgatgcgtgtagttactg

SEQ ID NO: 26081 - DNA, 20 bp, Artificial Sequence
  MKO10026081_A_Inpp5e
  gRNA
gtacttcccagaccgaaaca

SEQ ID NO: 26082 - DNA, 20 bp, Artificial Sequence
  MKO10026082_A_Inpp5e
  gRNA
ggagtgggagacacgcctgc

SEQ ID NO: 26083 - DNA, 20 bp, Artificial Sequence
  MKO10026083_A_Inpp5f
  gRNA
tttaattcggcagaaagcgt

SEQ ID NO: 26084 - DNA, 20 bp, Artificial Sequence
  MKO10026084_A_Inpp5f
  gRNA
actggagcggcgtttgcttg

SEQ ID NO: 26085 - DNA, 20 bp, Artificial Sequence
  MKO10026085_A_Inpp5f
  gRNA
gtgggtataccttctgccac

SEQ ID NO: 26086 - DNA, 20 bp, Artificial Sequence
  MKO10026086_A_Inpp5j
  gRNA
cctacttgcaagagcgaccc

SEQ ID NO: 26087 - DNA, 20 bp, Artificial Sequence
  MKO10026087_A_Inpp5j
  gRNA
actaccacctaccgttccta

SEQ ID NO: 26088 - DNA, 20 bp, Artificial Sequence
  MKO10026088_A_Inpp5j
  gRNA
agtctgtctgcacgtcccgt

SEQ ID NO: 26089 - DNA, 20 bp, Artificial Sequence
  MKO10026089_A_Inpp5k
  gRNA
acagcgtacatgttgtgacg

SEQ ID NO: 26090 - DNA, 20 bp, Artificial Sequence
  MKO10026090_A_Inpp5k
  gRNA
gatctctcaagtccgtatgc

SEQ ID NO: 26091 - DNA, 20 bp, Artificial Sequence
  MKO10026091_A_Inpp5k
  gRNA
cgtagtagccataaagcttc

SEQ ID NO: 26092 - DNA, 20 bp, Artificial Sequence
  MKO10026092_A_Inppl1
  gRNA
cccttgtcacctcgtgccga

SEQ ID NO: 26093 - DNA, 20 bp, Artificial Sequence
  MKO10026093_A_Inppl1
  gRNA
tgtgcgtcgcttccagaccc

SEQ ID NO: 26094 - DNA, 20 bp, Artificial Sequence
  MKO10026094_A_Inppl1
  gRNA
cccccactacccccgcgctc

SEQ ID NO: 26095 - DNA, 20 bp, Artificial Sequence
  MKO10026095_A_Ins1
  gRNA
ggacccacaagtggaacaac

SEQ ID NO: 26096 - DNA, 20 bp, Artificial Sequence
  MKO10026096_A_Ins1
  gRNA
ggggtaggaagtgcaccaac

SEQ ID NO: 26097 - DNA, 20 bp, Artificial Sequence
  MKO10026097_A_Ins1
  gRNA
ctccacttcacggcgggact

SEQ ID NO: 26098 - DNA, 20 bp, Artificial Sequence
  MKO10026098_A_Ins2
  gRNA
ggggcaggaagcgcatccac

SEQ ID NO: 26099 - DNA, 20 bp, Artificial Sequence
  MKO10026099_A_Ins2
  gRNA
ctgggtggaggcccgggagc

SEQ ID NO: 26100 - DNA, 20 bp, Artificial Sequence
  MKO10026100_A_Ins2
  gRNA
tttgtcaagcagcacctttg

SEQ ID NO: 26101 - DNA, 20 bp, Artificial Sequence
  MKO10026101_A_Insc
  gRNA
ctgcccgatccttcgaagct

SEQ ID NO: 26102 - DNA, 20 bp, Artificial Sequence
  MKO10026102_A_Insc
  gRNA
gaccaaagtgctcgcccagc

SEQ ID NO: 26103 - DNA, 20 bp, Artificial Sequence
  MKO10026103_A_Insc
  gRNA
ttgcaggctacacttcatgc

SEQ ID NO: 26104 - DNA, 20 bp, Artificial Sequence
  MKO10026104_A_Insig1
  gRNA
ggcaatacagcgcataacgc

SEQ ID NO: 26105 - DNA, 20 bp, Artificial Sequence
  MKO10026105_A_Insig1
  gRNA
acatttgatcgttcccgaag

SEQ ID NO: 26106 - DNA, 20 bp, Artificial Sequence
  MKO10026106_A_Insig1
  gRNA
cgctgtattgccgtgttcgt

SEQ ID NO: 26107 - DNA, 20 bp, Artificial Sequence
  MKO10026107_A_Insig2
  gRNA
cgccacgcagcgcatgacac

SEQ ID NO: 26108 - DNA, 20 bp, Artificial Sequence
  MKO10026108_A_Insig2
  gRNA
cagtgtcatgcgctgcgtgg

SEQ ID NO: 26109 - DNA, 20 bp, Artificial Sequence
  MKO10026109_A_Insig2
  gRNA
ggcataacgatgggaaacat

SEQ ID NO: 26110 - DNA, 20 bp, Artificial Sequence
  MKO10026110_A_Insl3
  gRNA
gagacatctcctgcacgcgc

SEQ ID NO: 26111 - DNA, 20 bp, Artificial Sequence
  MKO10026111_A_Insl3
  gRNA
gtggcctcgggcgaccagcg

SEQ ID NO: 26112 - DNA, 20 bp, Artificial Sequence
  MKO10026112_A_Insl3
  gRNA
cggcccacgctggtcgcccg

SEQ ID NO: 26113 - DNA, 20 bp, Artificial Sequence
  MKO10026113_A_Insl5
  gRNA
ggagcttgttcgagatccac

SEQ ID NO: 26114 - DNA, 20 bp, Artificial Sequence
  MKO10026114_A_Insl5
  gRNA
cttcccaagacggatctctc

SEQ ID NO: 26115 - DNA, 20 bp, Artificial Sequence
  MKO10026115_A_Insl5
  gRNA
atgtctcctccaccgtgagc

SEQ ID NO: 26116 - DNA, 20 bp, Artificial Sequence
  MKO10026116_A_Insl6
  gRNA
aagttgtacgctcttaacat

SEQ ID NO: 26117 - DNA, 20 bp, Artificial Sequence
  MKO10026117_A_Insl6
  gRNA
tgactggagccggttcgaga

SEQ ID NO: 26118 - DNA, 20 bp, Artificial Sequence
  MKO10026118_A_Insl6
  gRNA
cgcgacggccatctcttctt

SEQ ID NO: 26119 - DNA, 20 bp, Artificial Sequence
  MKO10026119_A_Insm1
  gRNA
cgctcccgccgagctcaaga

SEQ ID NO: 26120 - DNA, 20 bp, Artificial Sequence
  MKO10026120_A_Insm1
  gRNA
cctgactcggatacgccgcc

SEQ ID NO: 26121 - DNA, 20 bp, Artificial Sequence
  MKO10026121_A_Insm1
  gRNA
agtccacgcccgtgtcctac

SEQ ID NO: 26122 - DNA, 20 bp, Artificial Sequence
  MKO10026122_A_Insm2
  gRNA
ctcggacgtcgctcctgcgc

SEQ ID NO: 26123 - DNA, 20 bp, Artificial Sequence
  MKO10026123_A_Insm2
  gRNA
cgcgtggggaggtttactcg

SEQ ID NO: 26124 - DNA, 20 bp, Artificial Sequence
  MKO10026124_A_Insm2
  gRNA
gaccgacgatcagcacccgc

SEQ ID NO: 26125 - DNA, 20 bp, Artificial Sequence
  MKO10026125_A_Insrr
  gRNA
acggcagcccgacgtcccgt

SEQ ID NO: 26126 - DNA, 20 bp, Artificial Sequence
  MKO10026126_A_Insrr
  gRNA
gacgtcgggctgccgtcgct

SEQ ID NO: 26127 - DNA, 20 bp, Artificial Sequence
  MKO10026127_A_Insrr
  gRNA
gccagagcttcaacgcaacc

SEQ ID NO: 26128 - DNA, 20 bp, Artificial Sequence
  MKO10026128_A_Insr
  gRNA
tatagccagacgggcactcg

SEQ ID NO: 26129 - DNA, 20 bp, Artificial Sequence
  MKO10026129_A_Insr
  gRNA
tatcgactggtcccgtatcc

SEQ ID NO: 26130 - DNA, 20 bp, Artificial Sequence
  MKO10026130_A_Insr
  gRNA
gatccgccgctcctatgctc

SEQ ID NO: 26131 - DNA, 20 bp, Artificial Sequence
  MKO10026131_A_Ints10
  gRNA
cctctcggcattccgttcga

SEQ ID NO: 26132 - DNA, 20 bp, Artificial Sequence
  MKO10026132_A_Ints10
  gRNA
ccgtgttgcaccactgtctc

SEQ ID NO: 26133 - DNA, 20 bp, Artificial Sequence
  MKO10026133_A_Ints10
  gRNA
atgaaatgtacaccatcgaa

SEQ ID NO: 26134 - DNA, 20 bp, Artificial Sequence
  MKO10026134_A_Ints12
  gRNA
agaagtgaatgaccctcgcc

SEQ ID NO: 26135 - DNA, 20 bp, Artificial Sequence
  MKO10026135_A_Ints12
  gRNA
ttgccgttactactgccgga

SEQ ID NO: 26136 - DNA, 20 bp, Artificial Sequence
  MKO10026136_A_Ints12
  gRNA
gcaaagcttaccttatcagc

SEQ ID NO: 26137 - DNA, 20 bp, Artificial Sequence
  MKO10026137_A_Ints1
  gRNA
ccctcactgccgcaccttcg

SEQ ID NO: 26138 - DNA, 20 bp, Artificial Sequence
  MKO10026138_A_Ints1
  gRNA
ccttctcatggccgcgtacg

SEQ ID NO: 26139 - DNA, 20 bp, Artificial Sequence
  MKO10026139_A_Ints1
  gRNA
gttctcgtcctcctcgtacg

SEQ ID NO: 26140 - DNA, 20 bp, Artificial Sequence
  MKO10026140_A_Ints2
  gRNA
gtgattcccctcgtcgattg

SEQ ID NO: 26141 - DNA, 20 bp, Artificial Sequence
  MKO10026141_A_Ints2
  gRNA
agcacaagccgcaatcgacg

SEQ ID NO: 26142 - DNA, 20 bp, Artificial Sequence
  MKO10026142_A_Ints2
  gRNA
ttaccttcgttaaaactatc

SEQ ID NO: 26143 - DNA, 20 bp, Artificial Sequence
  MKO10026143_A_Ints3
  gRNA
gcaagatacctgccgtactc

SEQ ID NO: 26144 - DNA, 20 bp, Artificial Sequence
  MKO10026144_A_Ints3
  gRNA
attgtcacatcgatgaccgc

SEQ ID NO: 26145 - DNA, 20 bp, Artificial Sequence
  MKO10026145_A_Ints3
  gRNA
tggcctcacctgagtacggc

SEQ ID NO: 26146 - DNA, 20 bp, Artificial Sequence
  MKO10026146_A_Ints4
  gRNA
agctacccaagtgcgattag

SEQ ID NO: 26147 - DNA, 20 bp, Artificial Sequence
  MKO10026147_A_Ints4
  gRNA
ccacatccactaatcgcact

SEQ ID NO: 26148 - DNA, 20 bp, Artificial Sequence
  MKO10026148_A_Ints4
  gRNA
atagctgctgttctgacccg

SEQ ID NO: 26149 - DNA, 20 bp, Artificial Sequence
  MKO10026149_A_Ints5
  gRNA
ccaccgcaacatcgatcgcc

SEQ ID NO: 26150 - DNA, 20 bp, Artificial Sequence
  MKO10026150_A_Ints5
  gRNA
tccgcgttgtgcgaccctcc

SEQ ID NO: 26151 - DNA, 20 bp, Artificial Sequence
  MKO10026151_A_Ints5
  gRNA
acagcgagcgtgagggttgc

SEQ ID NO: 26152 - DNA, 20 bp, Artificial Sequence
  MKO10026152_A_Ints6
  gRNA
cctctgaattcgccgttgcc

SEQ ID NO: 26153 - DNA, 20 bp, Artificial Sequence
  MKO10026153_A_Ints6
  gRNA
agagccgccctatgctatca

SEQ ID NO: 26154 - DNA, 20 bp, Artificial Sequence
  MKO10026154_A_Ints6
  gRNA
gttcattcataaacgttgca

SEQ ID NO: 26155 - DNA, 20 bp, Artificial Sequence
  MKO10026155_A_Ints7
  gRNA
gatccacagtaacgaccccg

SEQ ID NO: 26156 - DNA, 20 bp, Artificial Sequence
  MKO10026156_A_Ints7
  gRNA
tggccacggggtcgttactg

SEQ ID NO: 26157 - DNA, 20 bp, Artificial Sequence
  MKO10026157_A_Ints7
  gRNA
tcacagtatccgccagagtc

SEQ ID NO: 26158 - DNA, 20 bp, Artificial Sequence
  MKO10026158_A_Ints8
  gRNA
acgcgatttctcttgttatc

SEQ ID NO: 26159 - DNA, 20 bp, Artificial Sequence
  MKO10026159_A_Ints8
  gRNA
gagggaccttactgatgcac

SEQ ID NO: 26160 - DNA, 20 bp, Artificial Sequence
  MKO10026160_A_Ints8
  gRNA
ccctcccgggaccaagcacg

SEQ ID NO: 26161 - DNA, 20 bp, Artificial Sequence
  MKO10026161_A_Ints9
  gRNA
ccctacatcaccgagcacac

SEQ ID NO: 26162 - DNA, 20 bp, Artificial Sequence
  MKO10026162_A_Ints9
  gRNA
ttgaatttgagtacgttgca

SEQ ID NO: 26163 - DNA, 20 bp, Artificial Sequence
  MKO10026163_A_Ints9
  gRNA
ctctcacctgccgatctgca

SEQ ID NO: 26164 - DNA, 20 bp, Artificial Sequence
  MKO10026164_A_Intu
  gRNA
cgaaccacgtgaaccacgtg

SEQ ID NO: 26165 - DNA, 20 bp, Artificial Sequence
  MKO10026165_A_Intu
  gRNA
caccgtgcagcagcggtaca

SEQ ID NO: 26166 - DNA, 20 bp, Artificial Sequence
  MKO10026166_A_Intu
  gRNA
acagtcgagcacccaagatt

SEQ ID NO: 26167 - DNA, 20 bp, Artificial Sequence
  MKO10026167_A_Invs
  gRNA
gatgagtagcttcgcgtgct

SEQ ID NO: 26168 - DNA, 20 bp, Artificial Sequence
  MKO10026168_A_Invs
  gRNA
tacttactcgaagagcaaac

SEQ ID NO: 26169 - DNA, 20 bp, Artificial Sequence
  MKO10026169_A_Invs
  gRNA
tcaagacatccaccaccgtt

SEQ ID NO: 26170 - DNA, 20 bp, Artificial Sequence
  MKO10026170_A_Ip6k1
  gRNA
ctcggcgcaaacactcccgc

SEQ ID NO: 26171 - DNA, 20 bp, Artificial Sequence
  MKO10026171_A_Ip6k1
  gRNA
cggcgggagtgtttgcgccg

SEQ ID NO: 26172 - DNA, 20 bp, Artificial Sequence
  MKO10026172_A_Ip6k1
  gRNA
ccgcatgcgctccgagtcca

SEQ ID NO: 26173 - DNA, 20 bp, Artificial Sequence
  MKO10026173_A_Ip6k2
  gRNA
ccgaagcatcatcgccatgc

SEQ ID NO: 26174 - DNA, 20 bp, Artificial Sequence
  MKO10026174_A_Ip6k2
  gRNA
tgttcgagtgtgcggcatgc

SEQ ID NO: 26175 - DNA, 20 bp, Artificial Sequence
  MKO10026175_A_Ip6k2
  gRNA
actgtactggtttcgatgct

SEQ ID NO: 26176 - DNA, 20 bp, Artificial Sequence
  MKO10026176_A_Ip6k3
  gRNA
cggatgcatcgtccccatgc

SEQ ID NO: 26177 - DNA, 20 bp, Artificial Sequence
  MKO10026177_A_Ip6k3
  gRNA
acttctggcggcgtcacttc

SEQ ID NO: 26178 - DNA, 20 bp, Artificial Sequence
  MKO10026178_A_Ip6k3
  gRNA
tgtgagcgaagtcaatcatc

SEQ ID NO: 26179 - DNA, 20 bp, Artificial Sequence
  MKO10026179_A_Ipcef1
  gRNA
cttaggtggttaaacaaact

SEQ ID NO: 26180 - DNA, 20 bp, Artificial Sequence
  MKO10026180_A_Ipcef1
  gRNA
agatcctgaagttgccgtgg

SEQ ID NO: 26181 - DNA, 20 bp, Artificial Sequence
  MKO10026181_A_Ipcef1
  gRNA
attctctgctgcaaagtaga

SEQ ID NO: 26182 - DNA, 20 bp, Artificial Sequence
  MKO10026182_A_Ipmk
  gRNA
ggaccagacgccgtagtatt

SEQ ID NO: 26183 - DNA, 20 bp, Artificial Sequence
  MKO10026183_A_Ipmk
  gRNA
aatcttctctgatgacgcaa

SEQ ID NO: 26184 - DNA, 20 bp, Artificial Sequence
  MKO10026184_A_Ipmk
  gRNA
aaatgcattaccgtttggtg

SEQ ID NO: 26185 - DNA, 20 bp, Artificial Sequence
  MKO10026185_A_Ipo11
  gRNA
ctaccatgtcaccaagacgc

SEQ ID NO: 26186 - DNA, 20 bp, Artificial Sequence
  MKO10026186_A_Ipo11
  gRNA
aaaagtcaacattgcgtgca

SEQ ID NO: 26187 - DNA, 20 bp, Artificial Sequence
  MKO10026187_A_Ipo11
  gRNA
ttgctcggttagactgtcct

SEQ ID NO: 26188 - DNA, 20 bp, Artificial Sequence
  MKO10026188_A_Ipo13
  gRNA
cgcttgccccagtaccgcaa

SEQ ID NO: 26189 - DNA, 20 bp, Artificial Sequence
  MKO10026189_A_Ipo13
  gRNA
cgctggcaaagcgggtgatc

SEQ ID NO: 26190 - DNA, 20 bp, Artificial Sequence
  MKO10026190_A_Ipo13
  gRNA
accgagagtggttctcgccc

SEQ ID NO: 26191 - DNA, 20 bp, Artificial Sequence
  MKO10026191_A_Ipo4
  gRNA
gcccgcactcttcgatctgc

SEQ ID NO: 26192 - DNA, 20 bp, Artificial Sequence
  MKO10026192_A_Ipo4
  gRNA
ttcccatagccccgagaaag

SEQ ID NO: 26193 - DNA, 20 bp, Artificial Sequence
  MKO10026193_A_Ipo4
  gRNA
tgccagcagatcgaagagtg

SEQ ID NO: 26194 - DNA, 20 bp, Artificial Sequence
  MKO10026194_A_Ipo5
  gRNA
cgtccaaatagtgctgttgt

SEQ ID NO: 26195 - DNA, 20 bp, Artificial Sequence
  MKO10026195_A_Ipo5
  gRNA
cagaaacacaaccgctgccg

SEQ ID NO: 26196 - DNA, 20 bp, Artificial Sequence
  MKO10026196_A_Ipo5
  gRNA
aggaatcacctcctcggcag

SEQ ID NO: 26197 - DNA, 20 bp, Artificial Sequence
  MKO10026197_A_Ipo7
  gRNA
agaagagcgaagtccgttag

SEQ ID NO: 26198 - DNA, 20 bp, Artificial Sequence
  MKO10026198_A_Ipo7
  gRNA
aacatgactatccaagccgc

SEQ ID NO: 26199 - DNA, 20 bp, Artificial Sequence
  MKO10026199_A_Ipo7
  gRNA
gttgttctgacatagtaatc

SEQ ID NO: 26200 - DNA, 20 bp, Artificial Sequence
  MKO10026200_A_Ipo8
  gRNA
aacttacctgcctgacgcac

SEQ ID NO: 26201 - DNA, 20 bp, Artificial Sequence
  MKO10026201_A_Ipo8
  gRNA
gcagatccgtgacaacattg

SEQ ID NO: 26202 - DNA, 20 bp, Artificial Sequence
  MKO10026202_A_Ipo8
  gRNA
tctatcttgtcgaccactgc

SEQ ID NO: 26203 - DNA, 20 bp, Artificial Sequence
  MKO10026203_A_Ipo9
  gRNA
ggtacctgtcaacacacgca

SEQ ID NO: 26204 - DNA, 20 bp, Artificial Sequence
  MKO10026204_A_Ipo9
  gRNA
ggagacttaaatgccgtcca

SEQ ID NO: 26205 - DNA, 20 bp, Artificial Sequence
  MKO10026205_A_Ipo9
  gRNA
cggattgccagtgccccctg

SEQ ID NO: 26206 - DNA, 20 bp, Artificial Sequence
  MKO10026206_A_Ippk
  gRNA
tccagagtcccgttgtgaca

SEQ ID NO: 26207 - DNA, 20 bp, Artificial Sequence
  MKO10026207_A_Ippk
  gRNA
ctgcagaacatagtagactt

SEQ ID NO: 26208 - DNA, 20 bp, Artificial Sequence
  MKO10026208_A_Ippk
  gRNA
gaagtctggttaaattggga

SEQ ID NO: 26209 - DNA, 20 bp, Artificial Sequence
  MKO10026209_A_Ipp
  gRNA
tcaatgaatcacccccgctg

SEQ ID NO: 26210 - DNA, 20 bp, Artificial Sequence
  MKO10026210_A_Ipp
  gRNA
agacatctaaagttcgacct

SEQ ID NO: 26211 - DNA, 20 bp, Artificial Sequence
  MKO10026211_A_Ipp
  gRNA
caaaacgttctacgcagctg

SEQ ID NO: 26212 - DNA, 20 bp, Artificial Sequence
  MKO10026212_A_Iqca
  gRNA
gtcttgcacgctccgctatc

SEQ ID NO: 26213 - DNA, 20 bp, Artificial Sequence
  MKO10026213_A_Iqca
  gRNA
gaaacgcatgctgatccgca

SEQ ID NO: 26214 - DNA, 20 bp, Artificial Sequence
  MKO10026214_A_Iqca
  gRNA
attcagttaagatccgagcc

SEQ ID NO: 26215 - DNA, 20 bp, Artificial Sequence
  MKO10026215_A_Iqcb1
  gRNA
tcaagattcttctcgaatcc

SEQ ID NO: 26216 - DNA, 20 bp, Artificial Sequence
  MKO10026216_A_Iqcb1
  gRNA
atgtttcatcaatgcaacta

SEQ ID NO: 26217 - DNA, 20 bp, Artificial Sequence
  MKO10026217_A_Iqcb1
  gRNA
cctcattcagtattgtctat

SEQ ID NO: 26218 - DNA, 20 bp, Artificial Sequence
  MKO10026218_A_Iqcc
  gRNA
aacgcagcttgagtgcaacg

SEQ ID NO: 26219 - DNA, 20 bp, Artificial Sequence
  MKO10026219_A_Iqcc
  gRNA
ctacattaggccggcttccg

SEQ ID NO: 26220 - DNA, 20 bp, Artificial Sequence
  MKO10026220_A_Iqcc
  gRNA
gagccttcgagccgagtatg

SEQ ID NO: 26221 - DNA, 20 bp, Artificial Sequence
  MKO10026221_A_Iqcd
  gRNA
cctcgcataggacgaatacg

SEQ ID NO: 26222 - DNA, 20 bp, Artificial Sequence
  MKO10026222_A_Iqcd
  gRNA
gaagctccaccagaccgtcg

SEQ ID NO: 26223 - DNA, 20 bp, Artificial Sequence
  MKO10026223_A_Iqcd
  gRNA
aattgatctcgctctcggcc

SEQ ID NO: 26224 - DNA, 20 bp, Artificial Sequence
  MKO10026224_A_Iqce
  gRNA
gagccacataccctgtttcg

SEQ ID NO: 26225 - DNA, 20 bp, Artificial Sequence
  MKO10026225_A_Iqce
  gRNA
tgccgtcttcagagatcgcc

SEQ ID NO: 26226 - DNA, 20 bp, Artificial Sequence
  MKO10026226_A_Iqce
  gRNA
gtgggtccacgcgtgctccg

SEQ ID NO: 26227 - DNA, 20 bp, Artificial Sequence
  MKO10026227_A_Iqcf1
  gRNA
tccggacagccttaagcaac

SEQ ID NO: 26228 - DNA, 20 bp, Artificial Sequence
  MKO10026228_A_Iqcf1
  gRNA
cagtcgtcaggttgcagtcc

SEQ ID NO: 26229 - DNA, 20 bp, Artificial Sequence
  MKO10026229_A_Iqcf1
  gRNA
acctactgacgatgctcctc

SEQ ID NO: 26230 - DNA, 20 bp, Artificial Sequence
  MKO10026230_A_Iqcf3
  gRNA
tagatctgagggaaccgagt

SEQ ID NO: 26231 - DNA, 20 bp, Artificial Sequence
  MKO10026231_A_Iqcf3
  gRNA
agagtgaagtttccccaact

SEQ ID NO: 26232 - DNA, 20 bp, Artificial Sequence
  MKO10026232_A_Iqcf3
  gRNA
tgaatcactcctctcaagta

SEQ ID NO: 26233 - DNA, 20 bp, Artificial Sequence
  MKO10026233_A_Iqcf4
  gRNA
tccggacccacgactgaata

SEQ ID NO: 26234 - DNA, 20 bp, Artificial Sequence
  MKO10026234_A_Iqcf4
  gRNA
tggtataactgccgcacccg

SEQ ID NO: 26235 - DNA, 20 bp, Artificial Sequence
  MKO10026235_A_Iqcf4
  gRNA
cacgtggccctcgaagttag

SEQ ID NO: 26236 - DNA, 20 bp, Artificial Sequence
  MKO10026236_A_Iqcf5
  gRNA
agttatacgctcgaaaaacg

SEQ ID NO: 26237 - DNA, 20 bp, Artificial Sequence
  MKO10026237_A_Iqcf5
  gRNA
tatgccaacgccaataaacc

SEQ ID NO: 26238 - DNA, 20 bp, Artificial Sequence
  MKO10026238_A_Iqcf5
  gRNA
actgaatgatccacgcgctg

SEQ ID NO: 26239 - DNA, 20 bp, Artificial Sequence
  MKO10026239_A_Iqcf6
  gRNA
catggtccgccgaacactac

SEQ ID NO: 26240 - DNA, 20 bp, Artificial Sequence
  MKO10026240_A_Iqcf6
  gRNA
tatgatccacagccgctatg

SEQ ID NO: 26241 - DNA, 20 bp, Artificial Sequence
  MKO10026241_A_Iqcf6
  gRNA
tagcctaaatgacggatgag

SEQ ID NO: 26242 - DNA, 20 bp, Artificial Sequence
  MKO10026242_A_Iqcg
  gRNA
acaccctcagcacgtctaga

SEQ ID NO: 26243 - DNA, 20 bp, Artificial Sequence
  MKO10026243_A_Iqcg
  gRNA
taatcatagatgctccttcg

SEQ ID NO: 26244 - DNA, 20 bp, Artificial Sequence
  MKO10026244_A_Iqcg
  gRNA
agatctagattacgaagaag

SEQ ID NO: 26245 - DNA, 20 bp, Artificial Sequence
  MKO10026245_A_Iqch
  gRNA
attagtaaaattctcagccg

SEQ ID NO: 26246 - DNA, 20 bp, Artificial Sequence
  MKO10026246_A_Iqch
  gRNA
attcacatcgacaagtatct

SEQ ID NO: 26247 - DNA, 20 bp, Artificial Sequence
  MKO10026247_A_Iqch
  gRNA
aaagatacagttgactacga

SEQ ID NO: 26248 - DNA, 20 bp, Artificial Sequence
  MKO10026248_A_Iqcj
  gRNA
agtactctcgccatgctcgc

SEQ ID NO: 26249 - DNA, 20 bp, Artificial Sequence
  MKO10026249_A_Iqcj
  gRNA
cctttagaacaagttgacga

SEQ ID NO: 26250 - DNA, 20 bp, Artificial Sequence
  MKO10026250_A_Iqcj
  gRNA
ccatcgtcaacttgttctaa

SEQ ID NO: 26251 - DNA, 20 bp, Artificial Sequence
  MKO10026251_A_Iqck
  gRNA
ccacctgcaggtcacgccct

SEQ ID NO: 26252 - DNA, 20 bp, Artificial Sequence
  MKO10026252_A_Iqck
  gRNA
gagcagccgacctttccaga

SEQ ID NO: 26253 - DNA, 20 bp, Artificial Sequence
  MKO10026253_A_Iqck
  gRNA
aggttcacccagagattatc

SEQ ID NO: 26254 - DNA, 20 bp, Artificial Sequence
  MKO10026254_A_Iqgap1
  gRNA
tagccgtcctggataatgag

SEQ ID NO: 26255 - DNA, 20 bp, Artificial Sequence
  MKO10026255_A_Iqgap1
  gRNA
gccgcccaccacagagctag

SEQ ID NO: 26256 - DNA, 20 bp, Artificial Sequence
  MKO10026256_A_Iqgap1
  gRNA
tctactgtatccacgccctc

SEQ ID NO: 26257 - DNA, 20 bp, Artificial Sequence
  MKO10026257_A_Iqgap2
  gRNA
tctattgcattcacgcgcta

SEQ ID NO: 26258 - DNA, 20 bp, Artificial Sequence
  MKO10026258_A_Iqgap2
  gRNA
aaacaacagatgtctacgat

SEQ ID NO: 26259 - DNA, 20 bp, Artificial Sequence
  MKO10026259_A_Iqgap2
  gRNA
gcttaccttgggcagcccga

SEQ ID NO: 26260 - DNA, 20 bp, Artificial Sequence
  MKO10026260_A_Iqgap3
  gRNA
ttaccgaaggcagaccgatg

SEQ ID NO: 26261 - DNA, 20 bp, Artificial Sequence
  MKO10026261_A_Iqgap3
  gRNA
cctgaagaagatctacgacg

SEQ ID NO: 26262 - DNA, 20 bp, Artificial Sequence
  MKO10026262_A_Iqgap3
  gRNA
tgaatgcagtagatcacccg

SEQ ID NO: 26263 - DNA, 20 bp, Artificial Sequence
  MKO10026263_A_Iqsec1
  gRNA
gcaacgatgtcatccgtaag

SEQ ID NO: 26264 - DNA, 20 bp, Artificial Sequence
  MKO10026264_A_Iqsec1
  gRNA
ttggcggaacgccgtctgga

SEQ ID NO: 26265 - DNA, 20 bp, Artificial Sequence
  MKO10026265_A_Iqsec1
  gRNA
gcgcctatgggctgtacgca

SEQ ID NO: 26266 - DNA, 20 bp, Artificial Sequence
  MKO10026266_A_Iqsec2
  gRNA
atccagtatttgatcgaacg

SEQ ID NO: 26267 - DNA, 20 bp, Artificial Sequence
  MKO10026267_A_Iqsec2
  gRNA
cttgaacggggcctccctta

SEQ ID NO: 26268 - DNA, 20 bp, Artificial Sequence
  MKO10026268_A_Iqsec2
  gRNA
agcctcgttcgatcaaatac

SEQ ID NO: 26269 - DNA, 20 bp, Artificial Sequence
  MKO10026269_A_Iqsec3
  gRNA
tgcggtacagccgcttgcgc

SEQ ID NO: 26270 - DNA, 20 bp, Artificial Sequence
  MKO10026270_A_Iqsec3
  gRNA
acgcggcgcgtcgggatacc

SEQ ID NO: 26271 - DNA, 20 bp, Artificial Sequence
  MKO10026271_A_Iqsec3
  gRNA
aagggagagttcgtattcgg

SEQ ID NO: 26272 - DNA, 20 bp, Artificial Sequence
  MKO10026272_A_Iqub
  gRNA
ccgcatgcaaccgtcgagcg

SEQ ID NO: 26273 - DNA, 20 bp, Artificial Sequence
  MKO10026273_A_Iqub
  gRNA
cagcagagtaccacgctcga

SEQ ID NO: 26274 - DNA, 20 bp, Artificial Sequence
  MKO10026274_A_Iqub
  gRNA
cttaggcatcgatcgctatg

SEQ ID NO: 26275 - DNA, 20 bp, Artificial Sequence
  MKO10026275_A_Irak1bp1
  gRNA
gaagagtgtgtgtcgccgcc

SEQ ID NO: 26276 - DNA, 20 bp, Artificial Sequence
  MKO10026276_A_Irak1bp1
  gRNA
tccatgaacacccgcgatgc

SEQ ID NO: 26277 - DNA, 20 bp, Artificial Sequence
  MKO10026277_A_Irak1bp1
  gRNA
ataactgatgatcatccgtt

SEQ ID NO: 26278 - DNA, 20 bp, Artificial Sequence
  MKO10026278_A_Irak1
  gRNA
ggtcagctacgcgcgcgttg

SEQ ID NO: 26279 - DNA, 20 bp, Artificial Sequence
  MKO10026279_A_Irak1
  gRNA
acgccctggagcccgccgac

SEQ ID NO: 26280 - DNA, 20 bp, Artificial Sequence
  MKO10026280_A_Irak1
  gRNA
cgcccagcacttcttgtacg

SEQ ID NO: 26281 - DNA, 20 bp, Artificial Sequence
  MKO10026281_A_Irak2
  gRNA
gcggcagcgtccgtgcgaga

SEQ ID NO: 26282 - DNA, 20 bp, Artificial Sequence
  MKO10026282_A_Irak2
  gRNA
caaaggtgccctcgctgatt

SEQ ID NO: 26283 - DNA, 20 bp, Artificial Sequence
  MKO10026283_A_Irak2
  gRNA
atatcgacacgctcagtgag

SEQ ID NO: 26284 - DNA, 20 bp, Artificial Sequence
  MKO10026284_A_Irak3
  gRNA
cggagcgactttcaaacagc

SEQ ID NO: 26285 - DNA, 20 bp, Artificial Sequence
  MKO10026285_A_Irak3
  gRNA
ctgcacgcatgcttcacctc

SEQ ID NO: 26286 - DNA, 20 bp, Artificial Sequence
  MKO10026286_A_Irak3
  gRNA
agtgtgcgcaccagaggtcc

SEQ ID NO: 26287 - DNA, 20 bp, Artificial Sequence
  MKO10026287_A_Irak4
  gRNA
gtgctacgtacgagtgtcgc

SEQ ID NO: 26288 - DNA, 20 bp, Artificial Sequence
  MKO10026288_A_Irak4
  gRNA
gtcgccaactgtgcagttcg

SEQ ID NO: 26289 - DNA, 20 bp, Artificial Sequence
  MKO10026289_A_Irak4
  gRNA
gacgagcaacccgcgtctgc

SEQ ID NO: 26290 - DNA, 20 bp, Artificial Sequence
  MKO10026290_A_Ireb2
  gRNA
tacttggtgccgccaagttt

SEQ ID NO: 26291 - DNA, 20 bp, Artificial Sequence
  MKO10026291_A_Ireb2
  gRNA
cactgtgagatctgtcggac

SEQ ID NO: 26292 - DNA, 20 bp, Artificial Sequence
  MKO10026292_A_Ireb2
  gRNA
tttcagtggaataccggcaa

SEQ ID NO: 26293 - DNA, 20 bp, Artificial Sequence
  MKO10026293_A_Irf1
  gRNA
ctcatccgcattcgagtgat

SEQ ID NO: 26294 - DNA, 20 bp, Artificial Sequence
  MKO10026294_A_Irf1
  gRNA
cctgtaggccgatacaaagc

SEQ ID NO: 26295 - DNA, 20 bp, Artificial Sequence
  MKO10026295_A_Irf1
  gRNA
ccatgccaatcactcgaatg

SEQ ID NO: 26296 - DNA, 20 bp, Artificial Sequence
  MKO10026296_A_Irf2bp1
  gRNA
catggcgccgttcatactcg

SEQ ID NO: 26297 - DNA, 20 bp, Artificial Sequence
  MKO10026297_A_Irf2bp1
  gRNA
ccgcgggtgcgtgaatttcg

SEQ ID NO: 26298 - DNA, 20 bp, Artificial Sequence
  MKO10026298_A_Irf2bp1
  gRNA
cctcgaaattcacgcacccg

SEQ ID NO: 26299 - DNA, 20 bp, Artificial Sequence
  MKO10026299_A_Irf2bp2
  gRNA
caggatgccgttcgccggcg

SEQ ID NO: 26300 - DNA, 20 bp, Artificial Sequence
  MKO10026300_A_Irf2bp2
  gRNA
ctacgagggagccgaccgcg

SEQ ID NO: 26301 - DNA, 20 bp, Artificial Sequence
  MKO10026301_A_Irf2bp2
  gRNA
gtcgggccccctaagatcaa

SEQ ID NO: 26302 - DNA, 20 bp, Artificial Sequence
  MKO10026302_A_Irf2bpl
  gRNA
ccgtccggtctggagcgtta

SEQ ID NO: 26303 - DNA, 20 bp, Artificial Sequence
  MKO10026303_A_Irf2bpl
  gRNA
tctcggcgtgggacgcatag

SEQ ID NO: 26304 - DNA, 20 bp, Artificial Sequence
  MKO10026304_A_Irf2bpl
  gRNA
tcgcgtctttgccttcgacg

SEQ ID NO: 26305 - DNA, 20 bp, Artificial Sequence
  MKO10026305_A_Irf2
  gRNA
tccgaacgaccttccaagaa

SEQ ID NO: 26306 - DNA, 20 bp, Artificial Sequence
  MKO10026306_A_Irf2
  gRNA
gtgccgagccgcatgcatcc

SEQ ID NO: 26307 - DNA, 20 bp, Artificial Sequence
  MKO10026307_A_Irf2
  gRNA
tgcatgcggctcggcacgga

SEQ ID NO: 26308 - DNA, 20 bp, Artificial Sequence
  MKO10026308_A_Irf3
  gRNA
cgtgggagtggcctaggcgc

SEQ ID NO: 26309 - DNA, 20 bp, Artificial Sequence
  MKO10026309_A_Irf3
  gRNA
ggcgcgggacttcgtacatc

SEQ ID NO: 26310 - DNA, 20 bp, Artificial Sequence
  MKO10026310_A_Irf3
  gRNA
acggagccgtgttcgacctc

SEQ ID NO: 26311 - DNA, 20 bp, Artificial Sequence
  MKO10026311_A_Irf4
  gRNA
ccttgccagtggtggcctcg

SEQ ID NO: 26312 - DNA, 20 bp, Artificial Sequence
  MKO10026312_A_Irf4
  gRNA
tatcaatgtcctgtgacgtt

SEQ ID NO: 26313 - DNA, 20 bp, Artificial Sequence
  MKO10026313_A_Irf4
  gRNA
agaccttatgcttggctcaa

SEQ ID NO: 26314 - DNA, 20 bp, Artificial Sequence
  MKO10026314_A_Irf5
  gRNA
acccactgatgattacgttc

SEQ ID NO: 26315 - DNA, 20 bp, Artificial Sequence
  MKO10026315_A_Irf5
  gRNA
tcagccgtacaagatctacg

SEQ ID NO: 26316 - DNA, 20 bp, Artificial Sequence
  MKO10026316_A_Irf5
  gRNA
cagacctcgtagatcttgta

SEQ ID NO: 26317 - DNA, 20 bp, Artificial Sequence
  MKO10026317_A_Irf6
  gRNA
cccactcaccgttgatgttc

SEQ ID NO: 26318 - DNA, 20 bp, Artificial Sequence
  MKO10026318_A_Irf6
  gRNA
tgtgccagtgcaaagtgtac

SEQ ID NO: 26319 - DNA, 20 bp, Artificial Sequence
  MKO10026319_A_Irf6
  gRNA
gagttcaacttgatgtacga

SEQ ID NO: 26320 - DNA, 20 bp, Artificial Sequence
  MKO10026320_A_Irf7
  gRNA
gcacagtcttccgcgtaccc

SEQ ID NO: 26321 - DNA, 20 bp, Artificial Sequence
  MKO10026321_A_Irf7
  gRNA
gcatttcggtcgtagggatc

SEQ ID NO: 26322 - DNA, 20 bp, Artificial Sequence
  MKO10026322_A_Irf7
  gRNA
ggatccagttgatccgcata

SEQ ID NO: 26323 - DNA, 20 bp, Artificial Sequence
  MKO10026323_A_Irf8
  gRNA
agtttaccgaattgtccccg

SEQ ID NO: 26324 - DNA, 20 bp, Artificial Sequence
  MKO10026324_A_Irf8
  gRNA
catatccggtcaccagtggc

SEQ ID NO: 26325 - DNA, 20 bp, Artificial Sequence
  MKO10026325_A_Irf8
  gRNA
acaattcggtaaactttata

SEQ ID NO: 26326 - DNA, 20 bp, Artificial Sequence
  MKO10026326_A_Irf9
  gRNA
tacgctgcacccgaaagctg

SEQ ID NO: 26327 - DNA, 20 bp, Artificial Sequence
  MKO10026327_A_Irf9
  gRNA
caaattcggaactcttgttg

SEQ ID NO: 26328 - DNA, 20 bp, Artificial Sequence
  MKO10026328_A_Irf9
  gRNA
caactgatacttcgcttgca

SEQ ID NO: 26329 - DNA, 20 bp, Artificial Sequence
  MKO10026329_A_Irg1
  gRNA
cagtatagcgtgtcgaagct

SEQ ID NO: 26330 - DNA, 20 bp, Artificial Sequence
  MKO10026330_A_Irg1
  gRNA
ctgacgtccagtacgtaaac

SEQ ID NO: 26331 - DNA, 20 bp, Artificial Sequence
  MKO10026331_A_Irg1
  gRNA
ctgctgctggcgttcaacgt

SEQ ID NO: 26332 - DNA, 20 bp, Artificial Sequence
  MKO10026332_A_Irgc1
  gRNA
cggcctagacgacgactcgc

SEQ ID NO: 26333 - DNA, 20 bp, Artificial Sequence
  MKO10026333_A_Irgc1
  gRNA
ggcggctggtgacaatttag

SEQ ID NO: 26334 - DNA, 20 bp, Artificial Sequence
  MKO10026334_A_Irgc1
  gRNA
tggccagcgagtcgtcgtct

SEQ ID NO: 26335 - DNA, 20 bp, Artificial Sequence
  MKO10026335_A_Irgm1
  gRNA
gtactcagtccgcgtcttcg

SEQ ID NO: 26336 - DNA, 20 bp, Artificial Sequence
  MKO10026336_A_Irgm1
  gRNA
ggccacagcccaaaccgtag

SEQ ID NO: 26337 - DNA, 20 bp, Artificial Sequence
  MKO10026337_A_Irgm1
  gRNA
acctcgcaggaactgtgtga

SEQ ID NO: 26338 - DNA, 20 bp, Artificial Sequence
  MKO10026338_A_Irgm2
  gRNA
cgggtaacgcgatagagatt

SEQ ID NO: 26339 - DNA, 20 bp, Artificial Sequence
  MKO10026339_A_Irgm2
  gRNA
cgaatctctatcgcgttacc

SEQ ID NO: 26340 - DNA, 20 bp, Artificial Sequence
  MKO10026340_A_Irgm2
  gRNA
aaagggtttcgacgaggccg

SEQ ID NO: 26341 - DNA, 20 bp, Artificial Sequence
  MKO10026341_A_Irgq
  gRNA
aacggtccagagcactacgt

SEQ ID NO: 26342 - DNA, 20 bp, Artificial Sequence
  MKO10026342_A_Irgq
  gRNA
agcacgacgtgagcgcgcct

SEQ ID NO: 26343 - DNA, 20 bp, Artificial Sequence
  MKO10026343_A_Irgq
  gRNA
gccctgatcgccgcgttatg

SEQ ID NO: 26344 - DNA, 20 bp, Artificial Sequence
  MKO10026344_A_Irs1
  gRNA
ctatttggcaccgaacgggt

SEQ ID NO: 26345 - DNA, 20 bp, Artificial Sequence
  MKO10026345_A_Irs1
  gRNA
acccacgcccatcggcatcg

SEQ ID NO: 26346 - DNA, 20 bp, Artificial Sequence
  MKO10026346_A_Irs1
  gRNA
ttacgctattgacgatcctc

SEQ ID NO: 26347 - DNA, 20 bp, Artificial Sequence
  MKO10026347_A_Irs2
  gRNA
cctgatcgccctctacacca

SEQ ID NO: 26348 - DNA, 20 bp, Artificial Sequence
  MKO10026348_A_Irs2
  gRNA
tcgagcgcgatcactcgctt

SEQ ID NO: 26349 - DNA, 20 bp, Artificial Sequence
  MKO10026349_A_Irs2
  gRNA
agccgcacttgcgcacgctg

SEQ ID NO: 26350 - DNA, 20 bp, Artificial Sequence
  MKO10026350_A_Irs3
  gRNA
cggtggcgcgcacctcgagc

SEQ ID NO: 26351 - DNA, 20 bp, Artificial Sequence
  MKO10026351_A_Irs3
  gRNA
cctccaggctaacggtacgc

SEQ ID NO: 26352 - DNA, 20 bp, Artificial Sequence
  MKO10026352_A_Irs3
  gRNA
ttgctcagtgtgcgccgctg

SEQ ID NO: 26353 - DNA, 20 bp, Artificial Sequence
  MKO10026353_A_Irs4
  gRNA
acgctaggcgcactgccgga

SEQ ID NO: 26354 - DNA, 20 bp, Artificial Sequence
  MKO10026354_A_Irs4
  gRNA
ccatcgcgaagtattcgtcc

SEQ ID NO: 26355 - DNA, 20 bp, Artificial Sequence
  MKO10026355_A_Irs4
  gRNA
gttgactccgcctccgctcg

SEQ ID NO: 26356 - DNA, 20 bp, Artificial Sequence
  MKO10026356_A_Irx1
  gRNA
cccgcaatacctaagcgccg

SEQ ID NO: 26357 - DNA, 20 bp, Artificial Sequence
  MKO10026357_A_Irx1
  gRNA
tgccgcggcgggaccgtacg

SEQ ID NO: 26358 - DNA, 20 bp, Artificial Sequence
  MKO10026358_A_Irx1
  gRNA
gatcagatcgacgagcgtga

SEQ ID NO: 26359 - DNA, 20 bp, Artificial Sequence
  MKO10026359_A_Irx2
  gRNA
gtaccaagcgcccggctcgc

SEQ ID NO: 26360 - DNA, 20 bp, Artificial Sequence
  MKO10026360_A_Irx2
  gRNA
cgtaccgtaagaacgctacg

SEQ ID NO: 26361 - DNA, 20 bp, Artificial Sequence
  MKO10026361_A_Irx2
  gRNA
cgtcccgcgtagcgttctta

SEQ ID NO: 26362 - DNA, 20 bp, Artificial Sequence
  MKO10026362_A_Irx3
  gRNA
tccccgtagtcgcacggacg

SEQ ID NO: 26363 - DNA, 20 bp, Artificial Sequence
  MKO10026363_A_Irx3
  gRNA
cctcctcgtccgtgcgacta

SEQ ID NO: 26364 - DNA, 20 bp, Artificial Sequence
  MKO10026364_A_Irx3
  gRNA
tctctacccacccgaacgcc

SEQ ID NO: 26365 - DNA, 20 bp, Artificial Sequence
  MKO10026365_A_Irx4
  gRNA
agcagccggctctcgtagac

SEQ ID NO: 26366 - DNA, 20 bp, Artificial Sequence
  MKO10026366_A_Irx4
  gRNA
cggccctctaggacgcaatc

SEQ ID NO: 26367 - DNA, 20 bp, Artificial Sequence
  MKO10026367_A_Irx4
  gRNA
gcagatgagaagcgccccta

SEQ ID NO: 26368 - DNA, 20 bp, Artificial Sequence
  MKO10026368_A_Irx5
  gRNA
tccgcgttctcgccctacgc

SEQ ID NO: 26369 - DNA, 20 bp, Artificial Sequence
  MKO10026369_A_Irx5
  gRNA
cggtacgcggggtccccata

SEQ ID NO: 26370 - DNA, 20 bp, Artificial Sequence
  MKO10026370_A_Irx5
  gRNA
tgggcccgcaaccgctcgtc

SEQ ID NO: 26371 - DNA, 20 bp, Artificial Sequence
  MKO10026371_A_Irx6
  gRNA
acgggttcttgcggtgctcg

SEQ ID NO: 26372 - DNA, 20 bp, Artificial Sequence
  MKO10026372_A_Irx6
  gRNA
aggggccgtttcgcagcaag

SEQ ID NO: 26373 - DNA, 20 bp, Artificial Sequence
  MKO10026373_A_Irx6
  gRNA
tgaactgtgcaccatacccg

SEQ ID NO: 26374 - DNA, 20 bp, Artificial Sequence
  MKO10026374_A_Isca1
  gRNA
tttcaggtgggtctgaaagt

SEQ ID NO: 26375 - DNA, 20 bp, Artificial Sequence
  MKO10026375_A_Isca1
  gRNA
cgtggacatgtcggcgtcgt

SEQ ID NO: 26376 - DNA, 20 bp, Artificial Sequence
  MKO10026376_A_Isca1
  gRNA
cagtgtgagggccgcccgcg

SEQ ID NO: 26377 - DNA, 20 bp, Artificial Sequence
  MKO10026377_A_Isca2
  gRNA
gtcctccttgcctgtcgtcg

SEQ ID NO: 26378 - DNA, 20 bp, Artificial Sequence
  MKO10026378_A_Isca2
  gRNA
cagttattaaccccgacgac

SEQ ID NO: 26379 - DNA, 20 bp, Artificial Sequence
  MKO10026379_A_Isca2
  gRNA
cttgtccctaactgccgagg

SEQ ID NO: 26380 - DNA, 20 bp, Artificial Sequence
  MKO10026380_A_Iscu
  gRNA
tggtgacgtcatgaaactgc

SEQ ID NO: 26381 - DNA, 20 bp, Artificial Sequence
  MKO10026381_A_Iscu
  gRNA
ctagatccaggtggatgaaa

SEQ ID NO: 26382 - DNA, 20 bp, Artificial Sequence
  MKO10026382_A_Iscu
  gRNA
tttcccctttacccactctg

SEQ ID NO: 26383 - DNA, 20 bp, Artificial Sequence
  MKO10026383_A_Isg15
  gRNA
gctggggggtaacgatttcc

SEQ ID NO: 26384 - DNA, 20 bp, Artificial Sequence
  MKO10026384_A_Isg15
  gRNA
aagtccacgaagaccagttc

SEQ ID NO: 26385 - DNA, 20 bp, Artificial Sequence
  MKO10026385_A_Isg15
  gRNA
cagcagcacagtgatgctag

SEQ ID NO: 26386 - DNA, 20 bp, Artificial Sequence
  MKO10026386_A_Isg20l2
  gRNA
aacgctttgtcaagaagcga

SEQ ID NO: 26387 - DNA, 20 bp, Artificial Sequence
  MKO10026387_A_Isg20l2
  gRNA
cctgctacatcgtcaactac

SEQ ID NO: 26388 - DNA, 20 bp, Artificial Sequence
  MKO10026388_A_Isg20l2
  gRNA
ttacctggatgtcccgactc

SEQ ID NO: 26389 - DNA, 20 bp, Artificial Sequence
  MKO10026389_A_Isg20
  gRNA
tgacaagtacatccgacccg

SEQ ID NO: 26390 - DNA, 20 bp, Artificial Sequence
  MKO10026390_A_Isg20
  gRNA
gcacgacttcaatgccctga

SEQ ID NO: 26391 - DNA, 20 bp, Artificial Sequence
  MKO10026391_A_Isg20
  gRNA
gcgaggccactcaccctttg

SEQ ID NO: 26392 - DNA, 20 bp, Artificial Sequence
  MKO10026392_A_Isl1
  gRNA
cgtgatgcgtgcccgctcta

SEQ ID NO: 26393 - DNA, 20 bp, Artificial Sequence
  MKO10026393_A_Isl1
  gRNA
agacgaattcgccctgcggg

SEQ ID NO: 26394 - DNA, 20 bp, Artificial Sequence
  MKO10026394_A_Isl1
  gRNA
ccccgtagccgaacccatct

SEQ ID NO: 26395 - DNA, 20 bp, Artificial Sequence
  MKO10026395_A_Isl2
  gRNA
cgtgctacgccgccaatccg

SEQ ID NO: 26396 - DNA, 20 bp, Artificial Sequence
  MKO10026396_A_Isl2
  gRNA
gcccgcgggtcatccgcgtg

SEQ ID NO: 26397 - DNA, 20 bp, Artificial Sequence
  MKO10026397_A_Isl2
  gRNA
actgcaagcgggactacgtc

SEQ ID NO: 26398 - DNA, 20 bp, Artificial Sequence
  MKO10026398_A_Islr2
  gRNA
gccgcgatgcgtttctccat

SEQ ID NO: 26399 - DNA, 20 bp, Artificial Sequence
  MKO10026399_A_Islr2
  gRNA
atgttacattgcgtcgccga

SEQ ID NO: 26400 - DNA, 20 bp, Artificial Sequence
  MKO10026400_A_Islr2
  gRNA
cttagactgtcacctgagtc

SEQ ID NO: 26401 - DNA, 20 bp, Artificial Sequence
  MKO10026401_A_Islr
  gRNA
tgccctcggccaacgcgtgc

SEQ ID NO: 26402 - DNA, 20 bp, Artificial Sequence
  MKO10026402_A_Islr
  gRNA
ccacaaccgcctgcacgcgt

SEQ ID NO: 26403 - DNA, 20 bp, Artificial Sequence
  MKO10026403_A_Islr
  gRNA
cttgaaccacacgatgccac

SEQ ID NO: 26404 - DNA, 20 bp, Artificial Sequence
  MKO10026404_A_Ism1
  gRNA
cagaaacggacccgttcttg

SEQ ID NO: 26405 - DNA, 20 bp, Artificial Sequence
  MKO10026405_A_Ism1
  gRNA
ctctggagggaatcgctgtc

SEQ ID NO: 26406 - DNA, 20 bp, Artificial Sequence
  MKO10026406_A_Ism1
  gRNA
ccaatcaccctccccgtctg

SEQ ID NO: 26407 - DNA, 20 bp, Artificial Sequence
  MKO10026407_A_Isoc1
  gRNA
gctaacgctgcttcgacttc

SEQ ID NO: 26408 - DNA, 20 bp, Artificial Sequence
  MKO10026408_A_Isoc1
  gRNA
ttctagcgtcttgcccgcac

SEQ ID NO: 26409 - DNA, 20 bp, Artificial Sequence
  MKO10026409_A_Isoc1
  gRNA
gcagcgttagccgagattcc

SEQ ID NO: 26410 - DNA, 20 bp, Artificial Sequence
  MKO10026410_A_Isoc2a
  gRNA
ctgcagaatgagcgattcgc

SEQ ID NO: 26411 - DNA, 20 bp, Artificial Sequence
  MKO10026411_A_Isoc2a
  gRNA
cgctcattctgcagctcgtg

SEQ ID NO: 26412 - DNA, 20 bp, Artificial Sequence
  MKO10026412_A_Isoc2a
  gRNA
cctacttcaccggggactgc

SEQ ID NO: 26413 - DNA, 20 bp, Artificial Sequence
  MKO10026413_A_Isoc2b
  gRNA
cgtctttctgtccacgagcg

SEQ ID NO: 26414 - DNA, 20 bp, Artificial Sequence
  MKO10026414_A_Isoc2b
  gRNA
ccctccgcagtgagatgaac

SEQ ID NO: 26415 - DNA, 20 bp, Artificial Sequence
  MKO10026415_A_Isoc2b
  gRNA
gtcacagacatcggactgtt

SEQ ID NO: 26416 - DNA, 20 bp, Artificial Sequence
  MKO10026416_A_Ispd
  gRNA
cactggaccgtgccaagcat

SEQ ID NO: 26417 - DNA, 20 bp, Artificial Sequence
  MKO10026417_A_Ispd
  gRNA
tgcgcttatgcccatacctc

SEQ ID NO: 26418 - DNA, 20 bp, Artificial Sequence
  MKO10026418_A_Ispd
  gRNA
taagcgcatctcactagctg

SEQ ID NO: 26419 - DNA, 20 bp, Artificial Sequence
  MKO10026419_A_Ist1
  gRNA
tgagcgagcacgcatccgtg

SEQ ID NO: 26420 - DNA, 20 bp, Artificial Sequence
  MKO10026420_A_Ist1
  gRNA
aatccgtgtctacactgatc

SEQ ID NO: 26421 - DNA, 20 bp, Artificial Sequence
  MKO10026421_A_Ist1
  gRNA
aatccgggaggactacctcg

SEQ ID NO: 26422 - DNA, 20 bp, Artificial Sequence
  MKO10026422_A_Isx
  gRNA
tggcaggccctacgatccac

SEQ ID NO: 26423 - DNA, 20 bp, Artificial Sequence
  MKO10026423_A_Isx
  gRNA
catccatgtccgttcccaat

SEQ ID NO: 26424 - DNA, 20 bp, Artificial Sequence
  MKO10026424_A_Isx
  gRNA
tgtacctgtactcgagcttc

SEQ ID NO: 26425 - DNA, 20 bp, Artificial Sequence
  MKO10026425_A_Isy1
  gRNA
atgtactgagttgccgaaag

SEQ ID NO: 26426 - DNA, 20 bp, Artificial Sequence
  MKO10026426_A_Isy1
  gRNA
gagcttgacgaaacctcgcc

SEQ ID NO: 26427 - DNA, 20 bp, Artificial Sequence
  MKO10026427_A_Isy1
  gRNA
cgtctccacttctccgcttt

SEQ ID NO: 26428 - DNA, 20 bp, Artificial Sequence
  MKO10026428_A_Isyna1
  gRNA
gccccgactcggggtcatgt

SEQ ID NO: 26429 - DNA, 20 bp, Artificial Sequence
  MKO10026429_A_Isyna1
  gRNA
ctcgcagaagcgctccgtat

SEQ ID NO: 26430 - DNA, 20 bp, Artificial Sequence
  MKO10026430_A_Isyna1
  gRNA
cgaggccatgcggcgcgcgc

SEQ ID NO: 26431 - DNA, 20 bp, Artificial Sequence
  MKO10026431_A_Itch
  gRNA
cgaaaacataatttactcgt

SEQ ID NO: 26432 - DNA, 20 bp, Artificial Sequence
  MKO10026432_A_Itch
  gRNA
gaagctgaggttgttactaa

SEQ ID NO: 26433 - DNA, 20 bp, Artificial Sequence
  MKO10026433_A_Itch
  gRNA
aaatctcccatcgtctctgt

SEQ ID NO: 26434 - DNA, 20 bp, Artificial Sequence
  MKO10026434_A_Itfg1
  gRNA
ctttaggactttgagtgcgt

SEQ ID NO: 26435 - DNA, 20 bp, Artificial Sequence
  MKO10026435_A_Itfg1
  gRNA
tcatgaccaaccactgatta

SEQ ID NO: 26436 - DNA, 20 bp, Artificial Sequence
  MKO10026436_A_Itfg1
  gRNA
cttcagggatacctttacct

SEQ ID NO: 26437 - DNA, 20 bp, Artificial Sequence
  MKO10026437_A_Itfg2
  gRNA
gtcatgctgatcagcgacat

SEQ ID NO: 26438 - DNA, 20 bp, Artificial Sequence
  MKO10026438_A_Itfg2
  gRNA
tggagatgggtgttacgagc

SEQ ID NO: 26439 - DNA, 20 bp, Artificial Sequence
  MKO10026439_A_Itfg2
  gRNA
tgtataagaatgacgacagc

SEQ ID NO: 26440 - DNA, 20 bp, Artificial Sequence
  MKO10026440_A_Itfg3
  gRNA
agctcttcccacaacgatac

SEQ ID NO: 26441 - DNA, 20 bp, Artificial Sequence
  MKO10026441_A_Itfg3
  gRNA
actttacaagggcgacatct

SEQ ID NO: 26442 - DNA, 20 bp, Artificial Sequence
  MKO10026442_A_Itfg3
  gRNA
tccagtcatgtacgacttcc

SEQ ID NO: 26443 - DNA, 20 bp, Artificial Sequence
  MKO10026443_A_Itga10
  gRNA
aacgataaacatcccctctc

SEQ ID NO: 26444 - DNA, 20 bp, Artificial Sequence
  MKO10026444_A_Itga10
  gRNA
cactggctcacgttgggcgg

SEQ ID NO: 26445 - DNA, 20 bp, Artificial Sequence
  MKO10026445_A_Itga10
  gRNA
caaccaggtgactatcaact

SEQ ID NO: 26446 - DNA, 20 bp, Artificial Sequence
  MKO10026446_A_Itga11
  gRNA
atacaaatgtccggtaaccc

SEQ ID NO: 26447 - DNA, 20 bp, Artificial Sequence
  MKO10026447_A_Itga11
  gRNA
ccacactcgtgcgaccagag

SEQ ID NO: 26448 - DNA, 20 bp, Artificial Sequence
  MKO10026448_A_Itga11
  gRNA
attcacggacaccttcaata

SEQ ID NO: 26449 - DNA, 20 bp, Artificial Sequence
  MKO10026449_A_Itga1
  gRNA
aactttagtcaccaatccga

SEQ ID NO: 26450 - DNA, 20 bp, Artificial Sequence
  MKO10026450_A_Itga1
  gRNA
aactcgttcgcccctgtaca

SEQ ID NO: 26451 - DNA, 20 bp, Artificial Sequence
  MKO10026451_A_Itga1
  gRNA
cccttgtatgcctatagatg

SEQ ID NO: 26452 - DNA, 20 bp, Artificial Sequence
  MKO10026452_A_Itga2b
  gRNA
tgtcctggaaaagcgcgatg

SEQ ID NO: 26453 - DNA, 20 bp, Artificial Sequence
  MKO10026453_A_Itga2b
  gRNA
ttggggcgtcggtcgtcagc

SEQ ID NO: 26454 - DNA, 20 bp, Artificial Sequence
  MKO10026454_A_Itga2b
  gRNA
actctgcgcggcccccgctt

SEQ ID NO: 26455 - DNA, 20 bp, Artificial Sequence
  MKO10026455_A_Itga2
  gRNA
cagcagcttacgaacccaca

SEQ ID NO: 26456 - DNA, 20 bp, Artificial Sequence
  MKO10026456_A_Itga2
  gRNA
catgacttaccctgaactgc

SEQ ID NO: 26457 - DNA, 20 bp, Artificial Sequence
  MKO10026457_A_Itga2
  gRNA
tacccaaactgttcacttga

SEQ ID NO: 26458 - DNA, 20 bp, Artificial Sequence
  MKO10026458_A_Itga3
  gRNA
acttgcccaccatgcgccgc

SEQ ID NO: 26459 - DNA, 20 bp, Artificial Sequence
  MKO10026459_A_Itga3
  gRNA
gttctgggtgaagccgccgc

SEQ ID NO: 26460 - DNA, 20 bp, Artificial Sequence
  MKO10026460_A_Itga3
  gRNA
tccgttcacagtcgtccttg

SEQ ID NO: 26461 - DNA, 20 bp, Artificial Sequence
  MKO10026461_A_Itga4
  gRNA
ccgcatctgtaaatcgcccc

SEQ ID NO: 26462 - DNA, 20 bp, Artificial Sequence
  MKO10026462_A_Itga4
  gRNA
tcttgctttaggctcatcgt

SEQ ID NO: 26463 - DNA, 20 bp, Artificial Sequence
  MKO10026463_A_Itga4
  gRNA
catgacgtagcaaatgccag

SEQ ID NO: 26464 - DNA, 20 bp, Artificial Sequence
  MKO10026464_A_Itga5
  gRNA
tccccaaggctcccggattc

SEQ ID NO: 26465 - DNA, 20 bp, Artificial Sequence
  MKO10026465_A_Itga5
  gRNA
gagtacgcaccttgccgctc

SEQ ID NO: 26466 - DNA, 20 bp, Artificial Sequence
  MKO10026466_A_Itga5
  gRNA
gcaccaccttgcagtacacc

SEQ ID NO: 26467 - DNA, 20 bp, Artificial Sequence
  MKO10026467_A_Itga6
  gRNA
tcaaattcaatccgtgtaca

SEQ ID NO: 26468 - DNA, 20 bp, Artificial Sequence
  MKO10026468_A_Itga6
  gRNA
ggagactggagtttctgcga

SEQ ID NO: 26469 - DNA, 20 bp, Artificial Sequence
  MKO10026469_A_Itga6
  gRNA
cttaccaccactttgccccc

SEQ ID NO: 26470 - DNA, 20 bp, Artificial Sequence
  MKO10026470_A_Itga7
  gRNA
tgcctcagctaacgtgcaga

SEQ ID NO: 26471 - DNA, 20 bp, Artificial Sequence
  MKO10026471_A_Itga7
  gRNA
cctggccatccgtgatgagc

SEQ ID NO: 26472 - DNA, 20 bp, Artificial Sequence
  MKO10026472_A_Itga7
  gRNA
cagcaggcaaaccgcaccgg

SEQ ID NO: 26473 - DNA, 20 bp, Artificial Sequence
  MKO10026473_A_Itga8
  gRNA
gctcccccttctacgatatc

SEQ ID NO: 26474 - DNA, 20 bp, Artificial Sequence
  MKO10026474_A_Itga8
  gRNA
gtttagcctagacttctata

SEQ ID NO: 26475 - DNA, 20 bp, Artificial Sequence
  MKO10026475_A_Itga8
  gRNA
ccaggcaatgctgatcccga

SEQ ID NO: 26476 - DNA, 20 bp, Artificial Sequence
  MKO10026476_A_Itga9
  gRNA
aaaggacacgttggcatcat

SEQ ID NO: 26477 - DNA, 20 bp, Artificial Sequence
  MKO10026477_A_Itga9
  gRNA
acctgacaccagtgcttcgc

SEQ ID NO: 26478 - DNA, 20 bp, Artificial Sequence
  MKO10026478_A_Itga9
  gRNA
gtcgtctccaaggttggaga

SEQ ID NO: 26479 - DNA, 20 bp, Artificial Sequence
  MKO10026479_A_Itgad
  gRNA
gaagcccgtcgtgttcaaag

SEQ ID NO: 26480 - DNA, 20 bp, Artificial Sequence
  MKO10026480_A_Itgad
  gRNA
gcggtggcagtcaaccaaac

SEQ ID NO: 26481 - DNA, 20 bp, Artificial Sequence
  MKO10026481_A_Itgad
  gRNA
caccacagtctgtccgaagc

SEQ ID NO: 26482 - DNA, 20 bp, Artificial Sequence
  MKO10026482_A_Itgae
  gRNA
attcctgttggagctgcgtc

SEQ ID NO: 26483 - DNA, 20 bp, Artificial Sequence
  MKO10026483_A_Itgae
  gRNA
tggatatagcgcatcgatac

SEQ ID NO: 26484 - DNA, 20 bp, Artificial Sequence
  MKO10026484_A_Itgae
  gRNA
tactcaccaaaacaccattg

SEQ ID NO: 26485 - DNA, 20 bp, Artificial Sequence
  MKO10026485_A_Itgal
  gRNA
tgtgtccaggttgtagctcc

SEQ ID NO: 26486 - DNA, 20 bp, Artificial Sequence
  MKO10026486_A_Itgal
  gRNA
ggcagaactcgctgcttgtt

SEQ ID NO: 26487 - DNA, 20 bp, Artificial Sequence
  MKO10026487_A_Itgal
  gRNA
cctaagcgcagatgagtttc

SEQ ID NO: 26488 - DNA, 20 bp, Artificial Sequence
  MKO10026488_A_Itgam
  gRNA
tttacctggttccgccaagc

SEQ ID NO: 26489 - DNA, 20 bp, Artificial Sequence
  MKO10026489_A_Itgam
  gRNA
tgtggttgttgcagcccccc

SEQ ID NO: 26490 - DNA, 20 bp, Artificial Sequence
  MKO10026490_A_Itgam
  gRNA
gcaaaggctgttaaccagac

SEQ ID NO: 26491 - DNA, 20 bp, Artificial Sequence
  MKO10026491_A_Itgav
  gRNA
gtgaatgctcatccagccgc

SEQ ID NO: 26492 - DNA, 20 bp, Artificial Sequence
  MKO10026492_A_Itgav
  gRNA
ccgttgagtatgctccatgc

SEQ ID NO: 26493 - DNA, 20 bp, Artificial Sequence
  MKO10026493_A_Itgav
  gRNA
ctgggtcgtgttcgctttgg

SEQ ID NO: 26494 - DNA, 20 bp, Artificial Sequence
  MKO10026494_A_Itgax
  gRNA
tgctccagtatgatagttcc

SEQ ID NO: 26495 - DNA, 20 bp, Artificial Sequence
  MKO10026495_A_Itgax
  gRNA
gaacttcccaactgcacagc

SEQ ID NO: 26496 - DNA, 20 bp, Artificial Sequence
  MKO10026496_A_Itgax
  gRNA
ctcaccaggaactatcatac

SEQ ID NO: 26497 - DNA, 20 bp, Artificial Sequence
  MKO10026497_A_Itgb1bp1
  gRNA
ggtgtgttacgatgacggcc

SEQ ID NO: 26498 - DNA, 20 bp, Artificial Sequence
  MKO10026498_A_Itgb1bp1
  gRNA
atcgaggctggcgacagtgc

SEQ ID NO: 26499 - DNA, 20 bp, Artificial Sequence
  MKO10026499_A_Itgb1bp1
  gRNA
tgcacttacatgctgatccg

SEQ ID NO: 26500 - DNA, 20 bp, Artificial Sequence
  MKO10026500_A_Itgb1bp2
  gRNA
caccccagggtgatagcgac

SEQ ID NO: 26501 - DNA, 20 bp, Artificial Sequence
  MKO10026501_A_Itgb1bp2
  gRNA
ccctgccacaagttcacttc

SEQ ID NO: 26502 - DNA, 20 bp, Artificial Sequence
  MKO10026502_A_Itgb1bp2
  gRNA
agaaatctacagttcgcttt

SEQ ID NO: 26503 - DNA, 20 bp, Artificial Sequence
  MKO10026503_A_Itgb1
  gRNA
aatgtcaccaatcgcagcaa

SEQ ID NO: 26504 - DNA, 20 bp, Artificial Sequence
  MKO10026504_A_Itgb1
  gRNA
gtgcttagtcttactgacag

SEQ ID NO: 26505 - DNA, 20 bp, Artificial Sequence
  MKO10026505_A_Itgb1
  gRNA
tgccatccctttgctgcgat

SEQ ID NO: 26506 - DNA, 20 bp, Artificial Sequence
  MKO10026506_A_Itgb2l
  gRNA
ctcaccgattcggcctgacc

SEQ ID NO: 26507 - DNA, 20 bp, Artificial Sequence
  MKO10026507_A_Itgb2l
  gRNA
ctgcacatctgagtacctcg

SEQ ID NO: 26508 - DNA, 20 bp, Artificial Sequence
  MKO10026508_A_Itgb2l
  gRNA
caagactcttggggtccacg

SEQ ID NO: 26509 - DNA, 20 bp, Artificial Sequence
  MKO10026509_A_Itgb2
  gRNA
gactgtatccagtcggggcc

SEQ ID NO: 26510 - DNA, 20 bp, Artificial Sequence
  MKO10026510_A_Itgb2
  gRNA
taacttgagcacgtgccgaa

SEQ ID NO: 26511 - DNA, 20 bp, Artificial Sequence
  MKO10026511_A_Itgb2
  gRNA
ttgtccagccgatgatatca

SEQ ID NO: 26512 - DNA, 20 bp, Artificial Sequence
  MKO10026512_A_Itgb3bp
  gRNA
cttgagctcacctgtaagac

SEQ ID NO: 26513 - DNA, 20 bp, Artificial Sequence
  MKO10026513_A_Itgb3bp
  gRNA
cacagaaacggaccatcaaa

SEQ ID NO: 26514 - DNA, 20 bp, Artificial Sequence
  MKO10026514_A_Itgb3bp
  gRNA
gaaaaatctaagtagtatac

SEQ ID NO: 26515 - DNA, 20 bp, Artificial Sequence
  MKO10026515_A_Itgb3
  gRNA
attgcccttcgactacggcc

SEQ ID NO: 26516 - DNA, 20 bp, Artificial Sequence
  MKO10026516_A_Itgb3
  gRNA
ctcaccccgatgtaacctga

SEQ ID NO: 26517 - DNA, 20 bp, Artificial Sequence
  MKO10026517_A_Itgb3
  gRNA
cgatacaggcttgtccacga

SEQ ID NO: 26518 - DNA, 20 bp, Artificial Sequence
  MKO10026518_A_Itgb4
  gRNA
agagctgtaccgagtgcatc

SEQ ID NO: 26519 - DNA, 20 bp, Artificial Sequence
  MKO10026519_A_Itgb4
  gRNA
accagccaaccgctgcaaga

SEQ ID NO: 26520 - DNA, 20 bp, Artificial Sequence
  MKO10026520_A_Itgb4
  gRNA
caactccatgtctgacgatc

SEQ ID NO: 26521 - DNA, 20 bp, Artificial Sequence
  MKO10026521_A_Itgb5
  gRNA
cacttacccaatacacggat

SEQ ID NO: 26522 - DNA, 20 bp, Artificial Sequence
  MKO10026522_A_Itgb5
  gRNA
gcgctcgttccgcgcctcgc

SEQ ID NO: 26523 - DNA, 20 bp, Artificial Sequence
  MKO10026523_A_Itgb5
  gRNA
ctggtatctcggtgccgtgt

SEQ ID NO: 26524 - DNA, 20 bp, Artificial Sequence
  MKO10026524_A_Itgb6
  gRNA
cctttggctaaaagattcgc

SEQ ID NO: 26525 - DNA, 20 bp, Artificial Sequence
  MKO10026525_A_Itgb6
  gRNA
cgtcatccatagaggcggag

SEQ ID NO: 26526 - DNA, 20 bp, Artificial Sequence
  MKO10026526_A_Itgb6
  gRNA
tcaaaataagcctctcagcg

SEQ ID NO: 26527 - DNA, 20 bp, Artificial Sequence
  MKO10026527_A_Itgb7
  gRNA
cacctggtcgcagcgtgacg

SEQ ID NO: 26528 - DNA, 20 bp, Artificial Sequence
  MKO10026528_A_Itgb7
  gRNA
atccgcgtcacgctgcgacc

SEQ ID NO: 26529 - DNA, 20 bp, Artificial Sequence
  MKO10026529_A_Itgb7
  gRNA
cgctcaagccttcgagagag

SEQ ID NO: 26530 - DNA, 20 bp, Artificial Sequence
  MKO10026530_A_Itgb8
  gRNA
gccatacattagtatccacc

SEQ ID NO: 26531 - DNA, 20 bp, Artificial Sequence
  MKO10026531_A_Itgb8
  gRNA
tgaacacaccatccgcattc

SEQ ID NO: 26532 - DNA, 20 bp, Artificial Sequence
  MKO10026532_A_Itgb8
  gRNA
tccgggtggatactaatgta

SEQ ID NO: 26533 - DNA, 20 bp, Artificial Sequence
  MKO10026533_A_Itgbl1
  gRNA
aggtgcacgacatctgcgtt

SEQ ID NO: 26534 - DNA, 20 bp, Artificial Sequence
  MKO10026534_A_Itgbl1
  gRNA
tgccgcagtcacaattaccg

SEQ ID NO: 26535 - DNA, 20 bp, Artificial Sequence
  MKO10026535_A_Itgbl1
  gRNA
agcgctctgtgccatgaccg

SEQ ID NO: 26536 - DNA, 20 bp, Artificial Sequence
  MKO10026536_A_Itih1
  gRNA
gccggaacgtggccttgctc

SEQ ID NO: 26537 - DNA, 20 bp, Artificial Sequence
  MKO10026537_A_Itih1
  gRNA
gacgtagtgggcaaagcgag

SEQ ID NO: 26538 - DNA, 20 bp, Artificial Sequence
  MKO10026538_A_Itih1
  gRNA
cctatgaggaggtactaaag

SEQ ID NO: 26539 - DNA, 20 bp, Artificial Sequence
  MKO10026539_A_Itih2
  gRNA
ggccacccgagaagtaatag

SEQ ID NO: 26540 - DNA, 20 bp, Artificial Sequence
  MKO10026540_A_Itih2
  gRNA
acatcgaacacgacactctg

SEQ ID NO: 26541 - DNA, 20 bp, Artificial Sequence
  MKO10026541_A_Itih2
  gRNA
gaaactcaccgtctcctctc

SEQ ID NO: 26542 - DNA, 20 bp, Artificial Sequence
  MKO10026542_A_Itih3
  gRNA
cacctaccccgggaacgtca

SEQ ID NO: 26543 - DNA, 20 bp, Artificial Sequence
  MKO10026543_A_Itih3
  gRNA
caagtacgagatgtacctta

SEQ ID NO: 26544 - DNA, 20 bp, Artificial Sequence
  MKO10026544_A_Itih3
  gRNA
cttgggcagttccacatcaa

SEQ ID NO: 26545 - DNA, 20 bp, Artificial Sequence
  MKO10026545_A_Itih4
  gRNA
gaaacaatacagtgccgccg

SEQ ID NO: 26546 - DNA, 20 bp, Artificial Sequence
  MKO10026546_A_Itih4
  gRNA
gtttgaagtgtcagtcaacg

SEQ ID NO: 26547 - DNA, 20 bp, Artificial Sequence
  MKO10026547_A_Itih4
  gRNA
tgctaccttctcggcagtag

SEQ ID NO: 26548 - DNA, 20 bp, Artificial Sequence
  MKO10026548_A_Itih5
  gRNA
atgtgatgcccgatcgctcc

SEQ ID NO: 26549 - DNA, 20 bp, Artificial Sequence
  MKO10026549_A_Itih5
  gRNA
gcgatcgggcatcacatcct

SEQ ID NO: 26550 - DNA, 20 bp, Artificial Sequence
  MKO10026550_A_Itih5
  gRNA
tctctttgcaggtcgtgctc

SEQ ID NO: 26551 - DNA, 20 bp, Artificial Sequence
  MKO10026551_A_Itk
  gRNA
acagaagaagcgcacgttga

SEQ ID NO: 26552 - DNA, 20 bp, Artificial Sequence
  MKO10026552_A_Itk
  gRNA
cgctgccgactctcacagtc

SEQ ID NO: 26553 - DNA, 20 bp, Artificial Sequence
  MKO10026553_A_Itk
  gRNA
cgcccatccatccagaaatt

SEQ ID NO: 26554 - DNA, 20 bp, Artificial Sequence
  MKO10026554_A_Itln1
  gRNA
tgacaccattcttcgtgcgc

SEQ ID NO: 26555 - DNA, 20 bp, Artificial Sequence
  MKO10026555_A_Itln1
  gRNA
tatttcctgcgcacgaagaa

SEQ ID NO: 26556 - DNA, 20 bp, Artificial Sequence
  MKO10026556_A_Itln1
  gRNA
gaaagaattgccccacctgt

SEQ ID NO: 26557 - DNA, 20 bp, Artificial Sequence
  MKO10026557_A_Itm2a
  gRNA
aagtcgtgaataattgccgc

SEQ ID NO: 26558 - DNA, 20 bp, Artificial Sequence
  MKO10026558_A_Itm2a
  gRNA
tagacgcagagaccttctgc

SEQ ID NO: 26559 - DNA, 20 bp, Artificial Sequence
  MKO10026559_A_Itm2a
  gRNA
gcagaaggtctctgcgtcta

SEQ ID NO: 26560 - DNA, 20 bp, Artificial Sequence
  MKO10026560_A_Itm2b
  gRNA
caccgaccgcatcgagaacg

SEQ ID NO: 26561 - DNA, 20 bp, Artificial Sequence
  MKO10026561_A_Itm2b
  gRNA
agacctacaaactgcagcgc

SEQ ID NO: 26562 - DNA, 20 bp, Artificial Sequence
  MKO10026562_A_Itm2b
  gRNA
tatgccgcccaaaaacctgc

SEQ ID NO: 26563 - DNA, 20 bp, Artificial Sequence
  MKO10026563_A_Itm2c
  gRNA
gacagagcatgtccgcgaca

SEQ ID NO: 26564 - DNA, 20 bp, Artificial Sequence
  MKO10026564_A_Itm2c
  gRNA
tgctacccccacgaaacttc

SEQ ID NO: 26565 - DNA, 20 bp, Artificial Sequence
  MKO10026565_A_Itm2c
  gRNA
aggtgtccttcccgttgcac

SEQ ID NO: 26566 - DNA, 20 bp, Artificial Sequence
  MKO10026566_A_Itpa
  gRNA
agtactcacatgtaggggcc

SEQ ID NO: 26567 - DNA, 20 bp, Artificial Sequence
  MKO10026567_A_Itpa
  gRNA
ctgataagtgcctgagtacc

SEQ ID NO: 26568 - DNA, 20 bp, Artificial Sequence
  MKO10026568_A_Itpa
  gRNA
gaacaggtcattcagattct

SEQ ID NO: 26569 - DNA, 20 bp, Artificial Sequence
  MKO10026569_A_Itpk1
  gRNA
cgaacttatccgaaagatcg

SEQ ID NO: 26570 - DNA, 20 bp, Artificial Sequence
  MKO10026570_A_Itpk1
  gRNA
gcgagggatagaagtcgtgc

SEQ ID NO: 26571 - DNA, 20 bp, Artificial Sequence
  MKO10026571_A_Itpk1
  gRNA
gaacctcagcagaccgattg

SEQ ID NO: 26572 - DNA, 20 bp, Artificial Sequence
  MKO10026572_A_Itpka
  gRNA
catcccgctcgactatgcca

SEQ ID NO: 26573 - DNA, 20 bp, Artificial Sequence
  MKO10026573_A_Itpka
  gRNA
acctgctcgatggcttcgat

SEQ ID NO: 26574 - DNA, 20 bp, Artificial Sequence
  MKO10026574_A_Itpka
  gRNA
tcgcgccattgcatgtagcg

SEQ ID NO: 26575 - DNA, 20 bp, Artificial Sequence
  MKO10026575_A_Itpkb
  gRNA
cttcgattcgccctgcgtga

SEQ ID NO: 26576 - DNA, 20 bp, Artificial Sequence
  MKO10026576_A_Itpkb
  gRNA
tcagcacatccgccattaac

SEQ ID NO: 26577 - DNA, 20 bp, Artificial Sequence
  MKO10026577_A_Itpkb
  gRNA
tacatgtccttccgcaagct

SEQ ID NO: 26578 - DNA, 20 bp, Artificial Sequence
  MKO10026578_A_Itpkc
  gRNA
gtccagctttccggacacgc

SEQ ID NO: 26579 - DNA, 20 bp, Artificial Sequence
  MKO10026579_A_Itpkc
  gRNA
tctgaagtactcgcccttcg

SEQ ID NO: 26580 - DNA, 20 bp, Artificial Sequence
  MKO10026580_A_Itpkc
  gRNA
cctgagttcaacttccacgc

SEQ ID NO: 26581 - DNA, 20 bp, Artificial Sequence
  MKO10026581_A_Itpr1
  gRNA
cctggatcacgttgccatat

SEQ ID NO: 26582 - DNA, 20 bp, Artificial Sequence
  MKO10026582_A_Itpr1
  gRNA
ttgttaaggtccccggcttc

SEQ ID NO: 26583 - DNA, 20 bp, Artificial Sequence
  MKO10026583_A_Itpr1
  gRNA
ttggggaccgtcatccaata

SEQ ID NO: 26584 - DNA, 20 bp, Artificial Sequence
  MKO10026584_A_Itpr2
  gRNA
ggacatcgtgtccctgtacg

SEQ ID NO: 26585 - DNA, 20 bp, Artificial Sequence
  MKO10026585_A_Itpr2
  gRNA
tgaccgagccctccgcgtac

SEQ ID NO: 26586 - DNA, 20 bp, Artificial Sequence
  MKO10026586_A_Itpr2
  gRNA
gttcccctgtttcgcctgct

SEQ ID NO: 26587 - DNA, 20 bp, Artificial Sequence
  MKO10026587_A_Itpr3
  gRNA
agcatccagcgtcacccgca

SEQ ID NO: 26588 - DNA, 20 bp, Artificial Sequence
  MKO10026588_A_Itpr3
  gRNA
gctggatgctacgggcaatg

SEQ ID NO: 26589 - DNA, 20 bp, Artificial Sequence
  MKO10026589_A_Itpr3
  gRNA
ggtcttacctcggaacttct

SEQ ID NO: 26590 - DNA, 20 bp, Artificial Sequence
  MKO10026590_A_Itpripl1
  gRNA
gcacggtcttacacacgtcc

SEQ ID NO: 26591 - DNA, 20 bp, Artificial Sequence
  MKO10026591_A_Itpripl1
  gRNA
ccggctctgggccgtcgttg

SEQ ID NO: 26592 - DNA, 20 bp, Artificial Sequence
  MKO10026592_A_Itpripl1
  gRNA
gactcctagctagcgtgtcc

SEQ ID NO: 26593 - DNA, 20 bp, Artificial Sequence
  MKO10026593_A_Itpripl2
  gRNA
acccgacagcttcgacgtgt

SEQ ID NO: 26594 - DNA, 20 bp, Artificial Sequence
  MKO10026594_A_Itpripl2
  gRNA
gaaaccgctgtctgcgccgt

SEQ ID NO: 26595 - DNA, 20 bp, Artificial Sequence
  MKO10026595_A_Itpripl2
  gRNA
agtgcgggtcgaaaggcgcc

SEQ ID NO: 26596 - DNA, 20 bp, Artificial Sequence
  MKO10026596_A_Itprip
  gRNA
gtcgcaacacctcgatgatc

SEQ ID NO: 26597 - DNA, 20 bp, Artificial Sequence
  MKO10026597_A_Itprip
  gRNA
tgccacgattcccgagaacg

SEQ ID NO: 26598 - DNA, 20 bp, Artificial Sequence
  MKO10026598_A_Itprip
  gRNA
gaatcgtggcattctcccgt

SEQ ID NO: 26599 - DNA, 20 bp, Artificial Sequence
  MKO10026599_A_Itsn1
  gRNA
ccagtaataaatcccgctat

SEQ ID NO: 26600 - DNA, 20 bp, Artificial Sequence
  MKO10026600_A_Itsn1
  gRNA
ccttagcctgaagccgatag

SEQ ID NO: 26601 - DNA, 20 bp, Artificial Sequence
  MKO10026601_A_Itsn1
  gRNA
ctagcggacatgaataacga

SEQ ID NO: 26602 - DNA, 20 bp, Artificial Sequence
  MKO10026602_A_Itsn2
  gRNA
atagggggttgtttcatgat

SEQ ID NO: 26603 - DNA, 20 bp, Artificial Sequence
  MKO10026603_A_Itsn2
  gRNA
tagctatagagaactcttgc

SEQ ID NO: 26604 - DNA, 20 bp, Artificial Sequence
  MKO10026604_A_Itsn2
  gRNA
gatgtaatagcccacatatt

SEQ ID NO: 26605 - DNA, 20 bp, Artificial Sequence
  MKO10026605_A_Ivd
  gRNA
gtcaaccagattgttcgaaa

SEQ ID NO: 26606 - DNA, 20 bp, Artificial Sequence
  MKO10026606_A_Ivd
  gRNA
ggaagagatatcccgggctt

SEQ ID NO: 26607 - DNA, 20 bp, Artificial Sequence
  MKO10026607_A_Ivd
  gRNA
ctgtgatgcccagtacgccc

SEQ ID NO: 26608 - DNA, 20 bp, Artificial Sequence
  MKO10026608_A_Ivl
  gRNA
tgttcctgctggatatgatc

SEQ ID NO: 26609 - DNA, 20 bp, Artificial Sequence
  MKO10026609_A_Ivl
  gRNA
gcaagacatgctagtaccac

SEQ ID NO: 26610 - DNA, 20 bp, Artificial Sequence
  MKO10026610_A_Ivl
  gRNA
cagcaacagatagagcgtga

SEQ ID NO: 26611 - DNA, 20 bp, Artificial Sequence
  MKO10026611_A_Ivns1abp
  gRNA
gttctgtgatgttcgacttc

SEQ ID NO: 26612 - DNA, 20 bp, Artificial Sequence
  MKO10026612_A_Ivns1abp
  gRNA
aatacgctacctgcttgact

SEQ ID NO: 26613 - DNA, 20 bp, Artificial Sequence
  MKO10026613_A_Ivns1abp
  gRNA
tcttaagcttccgagactaa

SEQ ID NO: 26614 - DNA, 20 bp, Artificial Sequence
  MKO10026614_A_Iws1
  gRNA
ctctccgagtcacttatccg

SEQ ID NO: 26615 - DNA, 20 bp, Artificial Sequence
  MKO10026615_A_Iws1
  gRNA
tacacttccagtgtcggatc

SEQ ID NO: 26616 - DNA, 20 bp, Artificial Sequence
  MKO10026616_A_Iws1
  gRNA
gaatcccgctcgtcctgtac

SEQ ID NO: 26617 - DNA, 20 bp, Artificial Sequence
  MKO10026617_A_Iyd
  gRNA
cagcagcgagcacgtcccaa

SEQ ID NO: 26618 - DNA, 20 bp, Artificial Sequence
  MKO10026618_A_Iyd
  gRNA
tcacacccgatacccagaac

SEQ ID NO: 26619 - DNA, 20 bp, Artificial Sequence
  MKO10026619_A_Iyd
  gRNA
atcagtgtgtccatcgcctg

SEQ ID NO: 26620 - DNA, 20 bp, Artificial Sequence
  MKO10026620_A_Izumo1
  gRNA
tgatgtcgcagactttgatc

SEQ ID NO: 26621 - DNA, 20 bp, Artificial Sequence
  MKO10026621_A_Izumo1
  gRNA
attggacttaccgcatttgt

SEQ ID NO: 26622 - DNA, 20 bp, Artificial Sequence
  MKO10026622_A_Izumo1
  gRNA
catcctcacctccacaatct

SEQ ID NO: 26623 - DNA, 20 bp, Artificial Sequence
  MKO10026623_A_Izumo2
  gRNA
gtctgcagtcgtggatcaac

SEQ ID NO: 26624 - DNA, 20 bp, Artificial Sequence
  MKO10026624_A_Izumo2
  gRNA
ccgcatgactctgaagttcc

SEQ ID NO: 26625 - DNA, 20 bp, Artificial Sequence
  MKO10026625_A_Izumo2
  gRNA
cgcaatcaggatgaccaaga

SEQ ID NO: 26626 - DNA, 20 bp, Artificial Sequence
  MKO10026626_A_Izumo3
  gRNA
atgaccactcggtgtttcaa

SEQ ID NO: 26627 - DNA, 20 bp, Artificial Sequence
  MKO10026627_A_Izumo3
  gRNA
tctggagatccgccaaaact

SEQ ID NO: 26628 - DNA, 20 bp, Artificial Sequence
  MKO10026628_A_Izumo3
  gRNA
gtctcctttgaaacaccgag

SEQ ID NO: 26629 - DNA, 20 bp, Artificial Sequence
  MKO10026629_A_Izumo4
  gRNA
aagatggcccgcagctcatt

SEQ ID NO: 26630 - DNA, 20 bp, Artificial Sequence
  MKO10026630_A_Izumo4
  gRNA
tagcagaagccgtgtaccag

SEQ ID NO: 26631 - DNA, 20 bp, Artificial Sequence
  MKO10026631_A_Izumo4
  gRNA
agtgacgctgacagtcaatg

SEQ ID NO: 26632 - DNA, 20 bp, Artificial Sequence
  MKO10026632_A_Jade1
  gRNA
cgttaggctacgtcgatatc

SEQ ID NO: 26633 - DNA, 20 bp, Artificial Sequence
  MKO10026633_A_Jade1
  gRNA
atatcgacgtagcctaacgc

SEQ ID NO: 26634 - DNA, 20 bp, Artificial Sequence
  MKO10026634_A_Jade1
  gRNA
actacgtgctggctgatccc

SEQ ID NO: 26635 - DNA, 20 bp, Artificial Sequence
  MKO10026635_A_Jade2
  gRNA
tggatgagatcgatgcgtac

SEQ ID NO: 26636 - DNA, 20 bp, Artificial Sequence
  MKO10026636_A_Jade2
  gRNA
actacatcctggcggacccg

SEQ ID NO: 26637 - DNA, 20 bp, Artificial Sequence
  MKO10026637_A_Jade2
  gRNA
aacgttagagcgtgttctag

SEQ ID NO: 26638 - DNA, 20 bp, Artificial Sequence
  MKO10026638_A_Jade3
  gRNA
agcggagcgagacgctgcgc

SEQ ID NO: 26639 - DNA, 20 bp, Artificial Sequence
  MKO10026639_A_Jade3
  gRNA
ctcaacgtgccgggcgagtc

SEQ ID NO: 26640 - DNA, 20 bp, Artificial Sequence
  MKO10026640_A_Jade3
  gRNA
atcagactttgaccttacgt

SEQ ID NO: 26641 - DNA, 20 bp, Artificial Sequence
  MKO10026641_A_Jag1
  gRNA
tatcagtcccgcgtcactgc

SEQ ID NO: 26642 - DNA, 20 bp, Artificial Sequence
  MKO10026642_A_Jag1
  gRNA
aaggtgttacccccgatgac

SEQ ID NO: 26643 - DNA, 20 bp, Artificial Sequence
  MKO10026643_A_Jag1
  gRNA
ctcggatctgatactcgaag

SEQ ID NO: 26644 - DNA, 20 bp, Artificial Sequence
  MKO10026644_A_Jag2
  gRNA
ctacggcgccacgcccgtgc

SEQ ID NO: 26645 - DNA, 20 bp, Artificial Sequence
  MKO10026645_A_Jag2
  gRNA
agccccccgcgcgcgtcgtc

SEQ ID NO: 26646 - DNA, 20 bp, Artificial Sequence
  MKO10026646_A_Jag2
  gRNA
cttgttgccgtactggtcgc

SEQ ID NO: 26647 - DNA, 20 bp, Artificial Sequence
  MKO10026647_A_Jagn1
  gRNA
ccgcgagcggccggcaccga

SEQ ID NO: 26648 - DNA, 20 bp, Artificial Sequence
  MKO10026648_A_Jagn1
  gRNA
tctacgtgcatctcgtcata

SEQ ID NO: 26649 - DNA, 20 bp, Artificial Sequence
  MKO10026649_A_Jagn1
  gRNA
gtgctgaaagtcgctgccgt

SEQ ID NO: 26650 - DNA, 20 bp, Artificial Sequence
  MKO10026650_A_Jak1
  gRNA
tccggctccactaccgcatg

SEQ ID NO: 26651 - DNA, 20 bp, Artificial Sequence
  MKO10026651_A_Jak1
  gRNA
gcttggtgctctcatcgtac

SEQ ID NO: 26652 - DNA, 20 bp, Artificial Sequence
  MKO10026652_A_Jak1
  gRNA
atgacaacgaacagtctgta

SEQ ID NO: 26653 - DNA, 20 bp, Artificial Sequence
  MKO10026653_A_Jak2
  gRNA
atcttcgctcgaacgcactt

SEQ ID NO: 26654 - DNA, 20 bp, Artificial Sequence
  MKO10026654_A_Jak2
  gRNA
acgggacactccgtatctgt

SEQ ID NO: 26655 - DNA, 20 bp, Artificial Sequence
  MKO10026655_A_Jak2
  gRNA
tccacatagacgagtcaacc

SEQ ID NO: 26656 - DNA, 20 bp, Artificial Sequence
  MKO10026656_A_Jak3
  gRNA
tgagcgcgtagcggtcggcc

SEQ ID NO: 26657 - DNA, 20 bp, Artificial Sequence
  MKO10026657_A_Jak3
  gRNA
gcctgcgtgtcacgaagttc

SEQ ID NO: 26658 - DNA, 20 bp, Artificial Sequence
  MKO10026658_A_Jak3
  gRNA
ctggagacatgtcaccgctt

SEQ ID NO: 26659 - DNA, 20 bp, Artificial Sequence
  MKO10026659_A_Jakmip1
  gRNA
cgacctgcgcgctgcgtacc

SEQ ID NO: 26660 - DNA, 20 bp, Artificial Sequence
  MKO10026660_A_Jakmip1
  gRNA
gcgcgcctcctcgcgcgcgt

SEQ ID NO: 26661 - DNA, 20 bp, Artificial Sequence
  MKO10026661_A_Jakmip1
  gRNA
cgttcctctcgtcagccagc

SEQ ID NO: 26662 - DNA, 20 bp, Artificial Sequence
  MKO10026662_A_Jakmip2
  gRNA
aatccgaacgggatatacgg

SEQ ID NO: 26663 - DNA, 20 bp, Artificial Sequence
  MKO10026663_A_Jakmip2
  gRNA
atgcccagttaaaacgcgtg

SEQ ID NO: 26664 - DNA, 20 bp, Artificial Sequence
  MKO10026664_A_Jakmip2
  gRNA
cagcctccgtatatcccgtt

SEQ ID NO: 26665 - DNA, 20 bp, Artificial Sequence
  MKO10026665_A_Jakmip3
  gRNA
tcgcaacagtgcctcgcgca

SEQ ID NO: 26666 - DNA, 20 bp, Artificial Sequence
  MKO10026666_A_Jakmip3
  gRNA
cgttgcggtcttctagctta

SEQ ID NO: 26667 - DNA, 20 bp, Artificial Sequence
  MKO10026667_A_Jakmip3
  gRNA
gcacgaacagcgcaagcacg

SEQ ID NO: 26668 - DNA, 20 bp, Artificial Sequence
  MKO10026668_A_Jam2
  gRNA
tgtggtggagctacgatgcc

SEQ ID NO: 26669 - DNA, 20 bp, Artificial Sequence
  MKO10026669_A_Jam2
  gRNA
gtcagcgctccgactgagca

SEQ ID NO: 26670 - DNA, 20 bp, Artificial Sequence
  MKO10026670_A_Jam2
  gRNA
ttgttgtgtgtgccgccttt

SEQ ID NO: 26671 - DNA, 20 bp, Artificial Sequence
  MKO10026671_A_Jam3
  gRNA
aacgacctcacagcgataga

SEQ ID NO: 26672 - DNA, 20 bp, Artificial Sequence
  MKO10026672_A_Jam3
  gRNA
ggggatagccctcgctctct

SEQ ID NO: 26673 - DNA, 20 bp, Artificial Sequence
  MKO10026673_A_Jam3
  gRNA
ggaattgtcttgcatcatta

SEQ ID NO: 26674 - DNA, 20 bp, Artificial Sequence
  MKO10026674_A_Jarid2
  gRNA
actaacatcgttgctagtag

SEQ ID NO: 26675 - DNA, 20 bp, Artificial Sequence
  MKO10026675_A_Jarid2
  gRNA
cttcgtgccagtcaaccccc

SEQ ID NO: 26676 - DNA, 20 bp, Artificial Sequence
  MKO10026676_A_Jarid2
  gRNA
agtcctgtatttgtccctaa

SEQ ID NO: 26677 - DNA, 20 bp, Artificial Sequence
  MKO10026677_A_Jazf1
  gRNA
aggctgccactgctatgtcg

SEQ ID NO: 26678 - DNA, 20 bp, Artificial Sequence
  MKO10026678_A_Jazf1
  gRNA
tgcggacgcgaatctgtgtt

SEQ ID NO: 26679 - DNA, 20 bp, Artificial Sequence
  MKO10026679_A_Jazf1
  gRNA
ctgtccagctccgtgtctcg

SEQ ID NO: 26680 - DNA, 20 bp, Artificial Sequence
  MKO10026680_A_Jdp2
  gRNA
tacgctgacatccgcaacat

SEQ ID NO: 26681 - DNA, 20 bp, Artificial Sequence
  MKO10026681_A_Jdp2
  gRNA
gctatctgtgcgcacgatgc

SEQ ID NO: 26682 - DNA, 20 bp, Artificial Sequence
  MKO10026682_A_Jdp2
  gRNA
gccccaacccgtgaagagtg

SEQ ID NO: 26683 - DNA, 20 bp, Artificial Sequence
  MKO10026683_A_Jkamp
  gRNA
cgcgctctttgaatgcacca

SEQ ID NO: 26684 - DNA, 20 bp, Artificial Sequence
  MKO10026684_A_Jkamp
  gRNA
agtccccagaactttacgac

SEQ ID NO: 26685 - DNA, 20 bp, Artificial Sequence
  MKO10026685_A_Jkamp
  gRNA
cttactcgtgagtgatcccg

SEQ ID NO: 26686 - DNA, 20 bp, Artificial Sequence
  MKO10026686_A_Jmjd1c
  gRNA
gaagtattcgtccaaataag

SEQ ID NO: 26687 - DNA, 20 bp, Artificial Sequence
  MKO10026687_A_Jmjd1c
  gRNA
gtcgttcactctttgttaaa

SEQ ID NO: 26688 - DNA, 20 bp, Artificial Sequence
  MKO10026688_A_Jmjd1c
  gRNA
gtgaacgacatcatctagaa

SEQ ID NO: 26689 - DNA, 20 bp, Artificial Sequence
  MKO10026689_A_Jmjd4
  gRNA
tccgcgactatatcagttac

SEQ ID NO: 26690 - DNA, 20 bp, Artificial Sequence
  MKO10026690_A_Jmjd4
  gRNA
gttctgggacgtcctcaatg

SEQ ID NO: 26691 - DNA, 20 bp, Artificial Sequence
  MKO10026691_A_Jmjd4
  gRNA
gaggtcccggtagtaccgct

SEQ ID NO: 26692 - DNA, 20 bp, Artificial Sequence
  MKO10026692_A_Jmjd6
  gRNA
tgcgtttctcccccgcgtat

SEQ ID NO: 26693 - DNA, 20 bp, Artificial Sequence
  MKO10026693_A_Jmjd6
  gRNA
agttcgtggagcgctacgag

SEQ ID NO: 26694 - DNA, 20 bp, Artificial Sequence
  MKO10026694_A_Jmjd6
  gRNA
ctcctggaggtcaactgcgt

SEQ ID NO: 26695 - DNA, 20 bp, Artificial Sequence
  MKO10026695_A_Jmjd7
  gRNA
ttatgcggacgcggtgcgag

SEQ ID NO: 26696 - DNA, 20 bp, Artificial Sequence
  MKO10026696_A_Jmjd7
  gRNA
accgcgtccgcataaccatc

SEQ ID NO: 26697 - DNA, 20 bp, Artificial Sequence
  MKO10026697_A_Jmjd7
  gRNA
acctcgtgttgtgccctacc

SEQ ID NO: 26698 - DNA, 20 bp, Artificial Sequence
  MKO10026698_A_Jmjd8
  gRNA
aacaatgttgtccccgaacg

SEQ ID NO: 26699 - DNA, 20 bp, Artificial Sequence
  MKO10026699_A_Jmjd8
  gRNA
gaaaacctgctagcctcgtt

SEQ ID NO: 26700 - DNA, 20 bp, Artificial Sequence
  MKO10026700_A_Jmjd8
  gRNA
gtctggctcaccattgccta

SEQ ID NO: 26701 - DNA, 20 bp, Artificial Sequence
  MKO10026701_A_Jmy
  gRNA
attccgagacatgcgagaac

SEQ ID NO: 26702 - DNA, 20 bp, Artificial Sequence
  MKO10026702_A_Jmy
  gRNA
agcatcaagagacttatatc

SEQ ID NO: 26703 - DNA, 20 bp, Artificial Sequence
  MKO10026703_A_Jmy
  gRNA
tacagaagctatagctcgat

SEQ ID NO: 26704 - DNA, 20 bp, Artificial Sequence
  MKO10026704_A_Josd1
  gRNA
agatttgtgggggcgctgct

SEQ ID NO: 26705 - DNA, 20 bp, Artificial Sequence
  MKO10026705_A_Josd1
  gRNA
taggctgtctccgaacacta

SEQ ID NO: 26706 - DNA, 20 bp, Artificial Sequence
  MKO10026706_A_Josd1
  gRNA
tgcctctcaaaagacagcac

SEQ ID NO: 26707 - DNA, 20 bp, Artificial Sequence
  MKO10026707_A_Josd2
  gRNA
ccaccaatagcacctcgcac

SEQ ID NO: 26708 - DNA, 20 bp, Artificial Sequence
  MKO10026708_A_Josd2
  gRNA
tcacctcttgcagatttcgt

SEQ ID NO: 26709 - DNA, 20 bp, Artificial Sequence
  MKO10026709_A_Josd2
  gRNA
ctgccgacgaaatctgcaag

SEQ ID NO: 26710 - DNA, 20 bp, Artificial Sequence
  MKO10026710_A_Jph1
  gRNA
tggaagaacgataagcgcaa

SEQ ID NO: 26711 - DNA, 20 bp, Artificial Sequence
  MKO10026711_A_Jph1
  gRNA
gcggaccgagctgcgcttgc

SEQ ID NO: 26712 - DNA, 20 bp, Artificial Sequence
  MKO10026712_A_Jph1
  gRNA
agagtgcagctccccgttgc

SEQ ID NO: 26713 - DNA, 20 bp, Artificial Sequence
  MKO10026713_A_Jph2
  gRNA
gtgagcgcgaaaccaccgcg

SEQ ID NO: 26714 - DNA, 20 bp, Artificial Sequence
  MKO10026714_A_Jph2
  gRNA
cgaggtccggcgatccgact

SEQ ID NO: 26715 - DNA, 20 bp, Artificial Sequence
  MKO10026715_A_Jph2
  gRNA
gaagggcgcagccgcgtcgt

SEQ ID NO: 26716 - DNA, 20 bp, Artificial Sequence
  MKO10026716_A_Jph3
  gRNA
cgggtgcagtgccgccccgt

SEQ ID NO: 26717 - DNA, 20 bp, Artificial Sequence
  MKO10026717_A_Jph3
  gRNA
acttaagcccgtccgagcgc

SEQ ID NO: 26718 - DNA, 20 bp, Artificial Sequence
  MKO10026718_A_Jph3
  gRNA
tcgtcagactcgagtgcaac

SEQ ID NO: 26719 - DNA, 20 bp, Artificial Sequence
  MKO10026719_A_Jph4
  gRNA
gcaaccgacgccacggatac

SEQ ID NO: 26720 - DNA, 20 bp, Artificial Sequence
  MKO10026720_A_Jph4
  gRNA
tggcgtgcggaccggcgcag

SEQ ID NO: 26721 - DNA, 20 bp, Artificial Sequence
  MKO10026721_A_Jph4
  gRNA
agtccattctcgtatacccc

SEQ ID NO: 26722 - DNA, 20 bp, Artificial Sequence
  MKO10026722_A_Jrkl
  gRNA
cttaagtactctcgaacctg

SEQ ID NO: 26723 - DNA, 20 bp, Artificial Sequence
  MKO10026723_A_Jrkl
  gRNA
ttacgtattaccagtctgtc

SEQ ID NO: 26724 - DNA, 20 bp, Artificial Sequence
  MKO10026724_A_Jrkl
  gRNA
ctggaccaatttgtgccaaa

SEQ ID NO: 26725 - DNA, 20 bp, Artificial Sequence
  MKO10026725_A_Jrk
  gRNA
tgccctcagcgcgctttacc

SEQ ID NO: 26726 - DNA, 20 bp, Artificial Sequence
  MKO10026726_A_Jrk
  gRNA
atgagcatagggcccgacac

SEQ ID NO: 26727 - DNA, 20 bp, Artificial Sequence
  MKO10026727_A_Jrk
  gRNA
ttcctggtaaagcgcgctga

SEQ ID NO: 26728 - DNA, 20 bp, Artificial Sequence
  MKO10026728_A_Jsrp1
  gRNA
cccggatcgttcctgcacgt

SEQ ID NO: 26729 - DNA, 20 bp, Artificial Sequence
  MKO10026729_A_Jsrp1
  gRNA
tcctacgtgcaggaacgatc

SEQ ID NO: 26730 - DNA, 20 bp, Artificial Sequence
  MKO10026730_A_Jsrp1
  gRNA
tacttacagggacatccagg

SEQ ID NO: 26731 - DNA, 20 bp, Artificial Sequence
  MKO10026731_A_Jtb
  gRNA
gatagcttctcctcgcgcac

SEQ ID NO: 26732 - DNA, 20 bp, Artificial Sequence
  MKO10026732_A_Jtb
  gRNA
catcgttcgtcagcgacaac

SEQ ID NO: 26733 - DNA, 20 bp, Artificial Sequence
  MKO10026733_A_Jtb
  gRNA
gtcgctgacgaacgatgaca

SEQ ID NO: 26734 - DNA, 20 bp, Artificial Sequence
  MKO10026734_A_Junb
  gRNA
cgcccggatgtgcacgaaaa

SEQ ID NO: 26735 - DNA, 20 bp, Artificial Sequence
  MKO10026735_A_Junb
  gRNA
tcacgacgactcttacgcag

SEQ ID NO: 26736 - DNA, 20 bp, Artificial Sequence
  MKO10026736_A_Junb
  gRNA
cgtgatcacgccgttgctgt

SEQ ID NO: 26737 - DNA, 20 bp, Artificial Sequence
  MKO10026737_A_Jund
  gRNA
cgcgctcgggctcagtacgc

SEQ ID NO: 26738 - DNA, 20 bp, Artificial Sequence
  MKO10026738_A_Jund
  gRNA
ccgtcggggcgcagcgcaga

SEQ ID NO: 26739 - DNA, 20 bp, Artificial Sequence
  MKO10026739_A_Jund
  gRNA
cgctcgacgcacccgcagcc

SEQ ID NO: 26740 - DNA, 20 bp, Artificial Sequence
  MKO10026740_A_Jun
  gRNA
cttctcacgtcgcccgacgt

SEQ ID NO: 26741 - DNA, 20 bp, Artificial Sequence
  MKO10026741_A_Jun
  gRNA
gcgccctcctatggcgcggc

SEQ ID NO: 26742 - DNA, 20 bp, Artificial Sequence
  MKO10026742_A_Jun
  gRNA
cagcttgagcagcccgacgt

SEQ ID NO: 26743 - DNA, 20 bp, Artificial Sequence
  MKO10026743_A_Jup
  gRNA
gcgagcccattagagcccgg

SEQ ID NO: 26744 - DNA, 20 bp, Artificial Sequence
  MKO10026744_A_Jup
  gRNA
ttgctcgccatattcaagtc

SEQ ID NO: 26745 - DNA, 20 bp, Artificial Sequence
  MKO10026745_A_Jup
  gRNA
cgccaagatggcggtgcgtc

SEQ ID NO: 26746 - DNA, 20 bp, Artificial Sequence
  MKO10026746_A_Kalrn
  gRNA
aatacgtcacaagtttccgt

SEQ ID NO: 26747 - DNA, 20 bp, Artificial Sequence
  MKO10026747_A_Kalrn
  gRNA
gctttcgcacgtgccacatt

SEQ ID NO: 26748 - DNA, 20 bp, Artificial Sequence
  MKO10026748_A_Kalrn
  gRNA
tcaccgtcatcatcgacatg

SEQ ID NO: 26749 - DNA, 20 bp, Artificial Sequence
  MKO10026749_A_Kank1
  gRNA
cacccgctccagattcgtgc

SEQ ID NO: 26750 - DNA, 20 bp, Artificial Sequence
  MKO10026750_A_Kank1
  gRNA
ccgccattccccgagtgtcg

SEQ ID NO: 26751 - DNA, 20 bp, Artificial Sequence
  MKO10026751_A_Kank1
  gRNA
cgatggaccgcacgtctttg

SEQ ID NO: 26752 - DNA, 20 bp, Artificial Sequence
  MKO10026752_A_Kank2
  gRNA
aatcggctccaaccctcgtg

SEQ ID NO: 26753 - DNA, 20 bp, Artificial Sequence
  MKO10026753_A_Kank2
  gRNA
accccggtggcacccagcgc

SEQ ID NO: 26754 - DNA, 20 bp, Artificial Sequence
  MKO10026754_A_Kank2
  gRNA
tcgggtcctgacgccacctc

SEQ ID NO: 26755 - DNA, 20 bp, Artificial Sequence
  MKO10026755_A_Kank3
  gRNA
aagagcgtgtgctcaacgcg

SEQ ID NO: 26756 - DNA, 20 bp, Artificial Sequence
  MKO10026756_A_Kank3
  gRNA
aggcccgttcgagacgcgcg

SEQ ID NO: 26757 - DNA, 20 bp, Artificial Sequence
  MKO10026757_A_Kank3
  gRNA
gtgaactgaacccccgtttg

SEQ ID NO: 26758 - DNA, 20 bp, Artificial Sequence
  MKO10026758_A_Kank4
  gRNA
gaatatttacctggcggcgg

SEQ ID NO: 26759 - DNA, 20 bp, Artificial Sequence
  MKO10026759_A_Kank4
  gRNA
actggtctcctcgctagacg

SEQ ID NO: 26760 - DNA, 20 bp, Artificial Sequence
  MKO10026760_A_Kank4
  gRNA
ctatgagaccacgtctagcg

SEQ ID NO: 26761 - DNA, 20 bp, Artificial Sequence
  MKO10026761_A_Kansl1l
  gRNA
tgagtacagctgcgcgaaca

SEQ ID NO: 26762 - DNA, 20 bp, Artificial Sequence
  MKO10026762_A_Kansl1l
  gRNA
ctcgggagtccagtaaaaag

SEQ ID NO: 26763 - DNA, 20 bp, Artificial Sequence
  MKO10026763_A_Kansl1l
  gRNA
gacatctcaaaatcgtgttc

SEQ ID NO: 26764 - DNA, 20 bp, Artificial Sequence
  MKO10026764_A_Kansl1
  gRNA
tcgcggtgctccacatgatt

SEQ ID NO: 26765 - DNA, 20 bp, Artificial Sequence
  MKO10026765_A_Kansl1
  gRNA
cgtgtgtcgcagcccgaacc

SEQ ID NO: 26766 - DNA, 20 bp, Artificial Sequence
  MKO10026766_A_Kansl1
  gRNA
caaacagatacgtgctaata

SEQ ID NO: 26767 - DNA, 20 bp, Artificial Sequence
  MKO10026767_A_Kansl2
  gRNA
atccttacccagtatccggc

SEQ ID NO: 26768 - DNA, 20 bp, Artificial Sequence
  MKO10026768_A_Kansl2
  gRNA
tacctgttgagcagccccat

SEQ ID NO: 26769 - DNA, 20 bp, Artificial Sequence
  MKO10026769_A_Kansl2
  gRNA
ttgcctcagatgaagacagc

SEQ ID NO: 26770 - DNA, 20 bp, Artificial Sequence
  MKO10026770_A_Kansl3
  gRNA
cttgcacgattggccaatga

SEQ ID NO: 26771 - DNA, 20 bp, Artificial Sequence
  MKO10026771_A_Kansl3
  gRNA
cattggccaatcgtgcaagc

SEQ ID NO: 26772 - DNA, 20 bp, Artificial Sequence
  MKO10026772_A_Kansl3
  gRNA
tgagcctgtgctgcgtcgcg

SEQ ID NO: 26773 - DNA, 20 bp, Artificial Sequence
  MKO10026773_A_Kap
  gRNA
tccctctgtatgatcccagt

SEQ ID NO: 26774 - DNA, 20 bp, Artificial Sequence
  MKO10026774_A_Kap
  gRNA
acagtgaaaattccattagc

SEQ ID NO: 26775 - DNA, 20 bp, Artificial Sequence
  MKO10026775_A_Kap
  gRNA
aaactcagtctttgaccaac

SEQ ID NO: 26776 - DNA, 20 bp, Artificial Sequence
  MKO10026776_A_Kars
  gRNA
taggccgcatccacgccaag

SEQ ID NO: 26777 - DNA, 20 bp, Artificial Sequence
  MKO10026777_A_Kars
  gRNA
atatcaataacaaactgcgc

SEQ ID NO: 26778 - DNA, 20 bp, Artificial Sequence
  MKO10026778_A_Kars
  gRNA
tcaagccgtccagcagctga

SEQ ID NO: 26779 - DNA, 20 bp, Artificial Sequence
  MKO10026779_A_Kat2a
  gRNA
gctgaagccggactgggcgc

SEQ ID NO: 26780 - DNA, 20 bp, Artificial Sequence
  MKO10026780_A_Kat2a
  gRNA
ttcgactcctgcgcccagtc

SEQ ID NO: 26781 - DNA, 20 bp, Artificial Sequence
  MKO10026781_A_Kat2a
  gRNA
tgtcagaggacgagattaac

SEQ ID NO: 26782 - DNA, 20 bp, Artificial Sequence
  MKO10026782_A_Kat2b
  gRNA
gaccgtagtctccgctgaga

SEQ ID NO: 26783 - DNA, 20 bp, Artificial Sequence
  MKO10026783_A_Kat2b
  gRNA
agtgtacttctacctattca

SEQ ID NO: 26784 - DNA, 20 bp, Artificial Sequence
  MKO10026784_A_Kat2b
  gRNA
cgaagctgtagccatgccct

SEQ ID NO: 26785 - DNA, 20 bp, Artificial Sequence
  MKO10026785_A_Kat5
  gRNA
ctgagggtaccgttgagcgg

SEQ ID NO: 26786 - DNA, 20 bp, Artificial Sequence
  MKO10026786_A_Kat5
  gRNA
atgaatgggtgactcacgag

SEQ ID NO: 26787 - DNA, 20 bp, Artificial Sequence
  MKO10026787_A_Kat5
  gRNA
gattggcaaggtcttcccgc

SEQ ID NO: 26788 - DNA, 20 bp, Artificial Sequence
  MKO10026788_A_Kat6a
  gRNA
cggcgctatgctaatccaat

SEQ ID NO: 26789 - DNA, 20 bp, Artificial Sequence
  MKO10026789_A_Kat6a
  gRNA
tatgtcagatatgccgacct

SEQ ID NO: 26790 - DNA, 20 bp, Artificial Sequence
  MKO10026790_A_Kat6a
  gRNA
ctcaatgcactgccaccgta

SEQ ID NO: 26791 - DNA, 20 bp, Artificial Sequence
  MKO10026791_A_Kat6b
  gRNA
gtgcagcgcatgtcgagtcc

SEQ ID NO: 26792 - DNA, 20 bp, Artificial Sequence
  MKO10026792_A_Kat6b
  gRNA
tgagttaaccgcaaatgtga

SEQ ID NO: 26793 - DNA, 20 bp, Artificial Sequence
  MKO10026793_A_Kat6b
  gRNA
gtgggtcacagcactccata

SEQ ID NO: 26794 - DNA, 20 bp, Artificial Sequence
  MKO10026794_A_Kat7
  gRNA
ttcgtgaaatcgacgtcgct

SEQ ID NO: 26795 - DNA, 20 bp, Artificial Sequence
  MKO10026795_A_Kat7
  gRNA
agccgccggcaatgccgcga

SEQ ID NO: 26796 - DNA, 20 bp, Artificial Sequence
  MKO10026796_A_Kat7
  gRNA
gcatttccggttggagttcg

SEQ ID NO: 26797 - DNA, 20 bp, Artificial Sequence
  MKO10026797_A_Kat8
  gRNA
cctaacagttaacaggcgac

SEQ ID NO: 26798 - DNA, 20 bp, Artificial Sequence
  MKO10026798_A_Kat8
  gRNA
cctggtcattcactcgagac

SEQ ID NO: 26799 - DNA, 20 bp, Artificial Sequence
  MKO10026799_A_Kat8
  gRNA
gtactcgcagagccaaagct

SEQ ID NO: 26800 - DNA, 20 bp, Artificial Sequence
  MKO10026800_A_Katna1
  gRNA
tccactcaccttcgctcaac

SEQ ID NO: 26801 - DNA, 20 bp, Artificial Sequence
  MKO10026801_A_Katna1
  gRNA
tatgactcaccaccgaacgt

SEQ ID NO: 26802 - DNA, 20 bp, Artificial Sequence
  MKO10026802_A_Katna1
  gRNA
gtgttgtttagacccttacc

SEQ ID NO: 26803 - DNA, 20 bp, Artificial Sequence
  MKO10026803_A_Katnal1
  gRNA
cgccgggtatgataaggatc

SEQ ID NO: 26804 - DNA, 20 bp, Artificial Sequence
  MKO10026804_A_Katnal1
  gRNA
cggttcatctcggcaagaca

SEQ ID NO: 26805 - DNA, 20 bp, Artificial Sequence
  MKO10026805_A_Katnal1
  gRNA
atcgcgaagtgaggcctctg

SEQ ID NO: 26806 - DNA, 20 bp, Artificial Sequence
  MKO10026806_A_Katnal2
  gRNA
aaagcgccgtaatcccagtt

SEQ ID NO: 26807 - DNA, 20 bp, Artificial Sequence
  MKO10026807_A_Katnal2
  gRNA
aataatttaccgtcacgaag

SEQ ID NO: 26808 - DNA, 20 bp, Artificial Sequence
  MKO10026808_A_Katnal2
  gRNA
agtttgtgacaacgttgacc

SEQ ID NO: 26809 - DNA, 20 bp, Artificial Sequence
  MKO10026809_A_Katnb1
  gRNA
agacgcggatggagcccgac

SEQ ID NO: 26810 - DNA, 20 bp, Artificial Sequence
  MKO10026810_A_Katnb1
  gRNA
aaggctgtgtcttccgatat

SEQ ID NO: 26811 - DNA, 20 bp, Artificial Sequence
  MKO10026811_A_Katnb1
  gRNA
catcgtagctggttcccagt

SEQ ID NO: 26812 - DNA, 20 bp, Artificial Sequence
  MKO10026812_A_Katnbl1
  gRNA
tgacaaatgtccgactgtcg

SEQ ID NO: 26813 - DNA, 20 bp, Artificial Sequence
  MKO10026813_A_Katnbl1
  gRNA
aaaatttacgccacgacagt

SEQ ID NO: 26814 - DNA, 20 bp, Artificial Sequence
  MKO10026814_A_Katnbl1
  gRNA
gccttcctgttctaaccaat

SEQ ID NO: 26815 - DNA, 20 bp, Artificial Sequence
  MKO10026815_A_Kazald1
  gRNA
cggccgtccgaaccacagag

SEQ ID NO: 26816 - DNA, 20 bp, Artificial Sequence
  MKO10026816_A_Kazald1
  gRNA
cgcggcgcagcgcactcttc

SEQ ID NO: 26817 - DNA, 20 bp, Artificial Sequence
  MKO10026817_A_Kazald1
  gRNA
accggacaggatgtgatctt

SEQ ID NO: 26818 - DNA, 20 bp, Artificial Sequence
  MKO10026818_A_Kazn
  gRNA
gacggtgctcaatggcaacc

SEQ ID NO: 26819 - DNA, 20 bp, Artificial Sequence
  MKO10026819_A_Kazn
  gRNA
tctcgccctttaagcgcttc

SEQ ID NO: 26820 - DNA, 20 bp, Artificial Sequence
  MKO10026820_A_Kazn
  gRNA
caactatgagcagcaccgca

SEQ ID NO: 26821 - DNA, 20 bp, Artificial Sequence
  MKO10026821_A_Kbtbd11
  gRNA
ctgcgcgagcccgccgtatt

SEQ ID NO: 26822 - DNA, 20 bp, Artificial Sequence
  MKO10026822_A_Kbtbd11
  gRNA
taccggccgcgcttgtctgc

SEQ ID NO: 26823 - DNA, 20 bp, Artificial Sequence
  MKO10026823_A_Kbtbd11
  gRNA
agtcgaccgcagagcccgtc

SEQ ID NO: 26824 - DNA, 20 bp, Artificial Sequence
  MKO10026824_A_Kbtbd12
  gRNA
tttataccagcacttcgccg

SEQ ID NO: 26825 - DNA, 20 bp, Artificial Sequence
  MKO10026825_A_Kbtbd12
  gRNA
catggctacggtctgaacgt

SEQ ID NO: 26826 - DNA, 20 bp, Artificial Sequence
  MKO10026826_A_Kbtbd12
  gRNA
tctgtcctcctatgacatag

SEQ ID NO: 26827 - DNA, 20 bp, Artificial Sequence
  MKO10026827_A_Kbtbd13
  gRNA
gccagcgccatatcatagcg

SEQ ID NO: 26828 - DNA, 20 bp, Artificial Sequence
  MKO10026828_A_Kbtbd13
  gRNA
tcaccaaccgcgctatgata

SEQ ID NO: 26829 - DNA, 20 bp, Artificial Sequence
  MKO10026829_A_Kbtbd13
  gRNA
cgctgtggagcacgtcgcgc

SEQ ID NO: 26830 - DNA, 20 bp, Artificial Sequence
  MKO10026830_A_Kbtbd2
  gRNA
ataatagcttacgcgtacac

SEQ ID NO: 26831 - DNA, 20 bp, Artificial Sequence
  MKO10026831_A_Kbtbd2
  gRNA
gttcacggctgtgtaccgcc

SEQ ID NO: 26832 - DNA, 20 bp, Artificial Sequence
  MKO10026832_A_Kbtbd2
  gRNA
aaccacaacagacttatcgt

SEQ ID NO: 26833 - DNA, 20 bp, Artificial Sequence
  MKO10026833_A_Kbtbd3
  gRNA
cccatgtcatcgttgtgtgt

SEQ ID NO: 26834 - DNA, 20 bp, Artificial Sequence
  MKO10026834_A_Kbtbd3
  gRNA
gccaacacacaacgatgaca

SEQ ID NO: 26835 - DNA, 20 bp, Artificial Sequence
  MKO10026835_A_Kbtbd3
  gRNA
ctcaatcgattatttgttat

SEQ ID NO: 26836 - DNA, 20 bp, Artificial Sequence
  MKO10026836_A_Kbtbd4
  gRNA
gtcatcccgcacgcactcat

SEQ ID NO: 26837 - DNA, 20 bp, Artificial Sequence
  MKO10026837_A_Kbtbd4
  gRNA
agtagataactgcattcgag

SEQ ID NO: 26838 - DNA, 20 bp, Artificial Sequence
  MKO10026838_A_Kbtbd4
  gRNA
ttctcggtttctggcacgca

SEQ ID NO: 26839 - DNA, 20 bp, Artificial Sequence
  MKO10026839_A_Kbtbd7
  gRNA
ctctgttacgacccttattc

SEQ ID NO: 26840 - DNA, 20 bp, Artificial Sequence
  MKO10026840_A_Kbtbd7
  gRNA
agaccgcttgctgtgtcgag

SEQ ID NO: 26841 - DNA, 20 bp, Artificial Sequence
  MKO10026841_A_Kbtbd7
  gRNA
gcggattagtaatatcccac

SEQ ID NO: 26842 - DNA, 20 bp, Artificial Sequence
  MKO10026842_A_Kbtbd8
  gRNA
ccttgtctagatatcgtcac

SEQ ID NO: 26843 - DNA, 20 bp, Artificial Sequence
  MKO10026843_A_Kbtbd8
  gRNA
cgtcgtcatacctgaagtag

SEQ ID NO: 26844 - DNA, 20 bp, Artificial Sequence
  MKO10026844_A_Kbtbd8
  gRNA
acgccacccacctgccgacg

SEQ ID NO: 26845 - DNA, 20 bp, Artificial Sequence
  MKO10026845_A_Kcmf1
  gRNA
ttgagttacgatgaatcgag

SEQ ID NO: 26846 - DNA, 20 bp, Artificial Sequence
  MKO10026846_A_Kcmf1
  gRNA
atgtttgatctccgagcacg

SEQ ID NO: 26847 - DNA, 20 bp, Artificial Sequence
  MKO10026847_A_Kcmf1
  gRNA
cccatatgtgcagcgttacc

SEQ ID NO: 26848 - DNA, 20 bp, Artificial Sequence
  MKO10026848_A_Kcna10
  gRNA
tcatcagcgaaaacatcgat

SEQ ID NO: 26849 - DNA, 20 bp, Artificial Sequence
  MKO10026849_A_Kcna10
  gRNA
gcgaggccatggaccagttc

SEQ ID NO: 26850 - DNA, 20 bp, Artificial Sequence
  MKO10026850_A_Kcna10
  gRNA
tggagtccacctgcatcgtg

SEQ ID NO: 26851 - DNA, 20 bp, Artificial Sequence
  MKO10026851_A_Kcna1
  gRNA
ctacgcgctcgcagcattcg

SEQ ID NO: 26852 - DNA, 20 bp, Artificial Sequence
  MKO10026852_A_Kcna1
  gRNA
gacgaggcttcgaccgctcc

SEQ ID NO: 26853 - DNA, 20 bp, Artificial Sequence
  MKO10026853_A_Kcna1
  gRNA
cgcgtagtaatcaacatctc

SEQ ID NO: 26854 - DNA, 20 bp, Artificial Sequence
  MKO10026854_A_Kcna2
  gRNA
ttagctgagtttcgaaccgc

SEQ ID NO: 26855 - DNA, 20 bp, Artificial Sequence
  MKO10026855_A_Kcna2
  gRNA
tcaggggaggacgggatctt

SEQ ID NO: 26856 - DNA, 20 bp, Artificial Sequence
  MKO10026856_A_Kcna2
  gRNA
cattctccgtgtcatccggt

SEQ ID NO: 26857 - DNA, 20 bp, Artificial Sequence
  MKO10026857_A_Kcna3
  gRNA
aaagtaccgcatgcgccgct

SEQ ID NO: 26858 - DNA, 20 bp, Artificial Sequence
  MKO10026858_A_Kcna3
  gRNA
gcgaccccaagcggcgcatg

SEQ ID NO: 26859 - DNA, 20 bp, Artificial Sequence
  MKO10026859_A_Kcna3
  gRNA
cgttgaccggccggcgaatg

SEQ ID NO: 26860 - DNA, 20 bp, Artificial Sequence
  MKO10026860_A_Kcna4
  gRNA
ttcgtctggtccgagtattc

SEQ ID NO: 26861 - DNA, 20 bp, Artificial Sequence
  MKO10026861_A_Kcna4
  gRNA
aatggttaagacacccgcaa

SEQ ID NO: 26862 - DNA, 20 bp, Artificial Sequence
  MKO10026862_A_Kcna4
  gRNA
agccctgctcaagttccggg

SEQ ID NO: 26863 - DNA, 20 bp, Artificial Sequence
  MKO10026863_A_Kcna5
  gRNA
gcgcgccacacacgaggatg

SEQ ID NO: 26864 - DNA, 20 bp, Artificial Sequence
  MKO10026864_A_Kcna5
  gRNA
aagtagcgcaggcgtttgac

SEQ ID NO: 26865 - DNA, 20 bp, Artificial Sequence
  MKO10026865_A_Kcna5
  gRNA
aatgaccaagaccgacacga

SEQ ID NO: 26866 - DNA, 20 bp, Artificial Sequence
  MKO10026866_A_Kcna6
  gRNA
ccggcgttcccgtgaagcct

SEQ ID NO: 26867 - DNA, 20 bp, Artificial Sequence
  MKO10026867_A_Kcna6
  gRNA
cggcgccgggggaggtccgt

SEQ ID NO: 26868 - DNA, 20 bp, Artificial Sequence
  MKO10026868_A_Kcna6
  gRNA
atcggagaaatccctgacgc

SEQ ID NO: 26869 - DNA, 20 bp, Artificial Sequence
  MKO10026869_A_Kcna7
  gRNA
cgccgcagccgcttctacga

SEQ ID NO: 26870 - DNA, 20 bp, Artificial Sequence
  MKO10026870_A_Kcna7
  gRNA
ggacatggcacccgtcaccg

SEQ ID NO: 26871 - DNA, 20 bp, Artificial Sequence
  MKO10026871_A_Kcna7
  gRNA
ccgcgacgaccgcgatgacc

SEQ ID NO: 26872 - DNA, 20 bp, Artificial Sequence
  MKO10026872_A_Kcnab1
  gRNA
atgacaattgcctacgaaag

SEQ ID NO: 26873 - DNA, 20 bp, Artificial Sequence
  MKO10026873_A_Kcnab1
  gRNA
gagattaactccactttcgt

SEQ ID NO: 26874 - DNA, 20 bp, Artificial Sequence
  MKO10026874_A_Kcnab1
  gRNA
cttcagggctgaggtgattc

SEQ ID NO: 26875 - DNA, 20 bp, Artificial Sequence
  MKO10026875_A_Kcnab2
  gRNA
agacctccgccgtatcgaac

SEQ ID NO: 26876 - DNA, 20 bp, Artificial Sequence
  MKO10026876_A_Kcnab2
  gRNA
gctcccccgggatgatctac

SEQ ID NO: 26877 - DNA, 20 bp, Artificial Sequence
  MKO10026877_A_Kcnab2
  gRNA
cgtggttgattccggataca

SEQ ID NO: 26878 - DNA, 20 bp, Artificial Sequence
  MKO10026878_A_Kcnab3
  gRNA
tgacactgctgaagtgtacg

SEQ ID NO: 26879 - DNA, 20 bp, Artificial Sequence
  MKO10026879_A_Kcnab3
  gRNA
gcaggtacctgggtcacgtt

SEQ ID NO: 26880 - DNA, 20 bp, Artificial Sequence
  MKO10026880_A_Kcnab3
  gRNA
cgtgctcataggcaactgtc

SEQ ID NO: 26881 - DNA, 20 bp, Artificial Sequence
  MKO10026881_A_Kcnb1
  gRNA
tgctctggccgaattcgtcc

SEQ ID NO: 26882 - DNA, 20 bp, Artificial Sequence
  MKO10026882_A_Kcnb1
  gRNA
cttggcggccaccgatgagt

SEQ ID NO: 26883 - DNA, 20 bp, Artificial Sequence
  MKO10026883_A_Kcnb1
  gRNA
gcgcctcaacgtcgggggcc

SEQ ID NO: 26884 - DNA, 20 bp, Artificial Sequence
  MKO10026884_A_Kcnb2
  gRNA
gttccagaatgttagacgag

SEQ ID NO: 26885 - DNA, 20 bp, Artificial Sequence
  MKO10026885_A_Kcnb2
  gRNA
ataaccgtgaacctcgatgc

SEQ ID NO: 26886 - DNA, 20 bp, Artificial Sequence
  MKO10026886_A_Kcnb2
  gRNA
tgtagtcatcgcacacctcc

SEQ ID NO: 26887 - DNA, 20 bp, Artificial Sequence
  MKO10026887_A_Kcnc1
  gRNA
agtcacttacccgcgcgtag

SEQ ID NO: 26888 - DNA, 20 bp, Artificial Sequence
  MKO10026888_A_Kcnc1
  gRNA
cctactcatcccgctacgcg

SEQ ID NO: 26889 - DNA, 20 bp, Artificial Sequence
  MKO10026889_A_Kcnc1
  gRNA
ccatgatctactacgccgag

SEQ ID NO: 26890 - DNA, 20 bp, Artificial Sequence
  MKO10026890_A_Kcnc2
  gRNA
gatccgtttcgatttcgtac

SEQ ID NO: 26891 - DNA, 20 bp, Artificial Sequence
  MKO10026891_A_Kcnc2
  gRNA
gtacatatccccgtaaccta

SEQ ID NO: 26892 - DNA, 20 bp, Artificial Sequence
  MKO10026892_A_Kcnc2
  gRNA
aacggcggcagcgaccaccc

SEQ ID NO: 26893 - DNA, 20 bp, Artificial Sequence
  MKO10026893_A_Kcnc3
  gRNA
cgcgcgctttgactacgacc

SEQ ID NO: 26894 - DNA, 20 bp, Artificial Sequence
  MKO10026894_A_Kcnc3
  gRNA
ggcgcagggacaccccgctc

SEQ ID NO: 26895 - DNA, 20 bp, Artificial Sequence
  MKO10026895_A_Kcnc3
  gRNA
cctgaacatcatcgactgcg

SEQ ID NO: 26896 - DNA, 20 bp, Artificial Sequence
  MKO10026896_A_Kcnc4
  gRNA
atctattatgccgagcgaat

SEQ ID NO: 26897 - DNA, 20 bp, Artificial Sequence
  MKO10026897_A_Kcnc4
  gRNA
cccgcgtgcctgagcgtctc

SEQ ID NO: 26898 - DNA, 20 bp, Artificial Sequence
  MKO10026898_A_Kcnc4
  gRNA
cggcgggggtcggccagagt

SEQ ID NO: 26899 - DNA, 20 bp, Artificial Sequence
  MKO10026899_A_Kcnd1
  gRNA
tggtaccactctttgccaaa

SEQ ID NO: 26900 - DNA, 20 bp, Artificial Sequence
  MKO10026900_A_Kcnd1
  gRNA
acggacaaatgctgtgcgtt

SEQ ID NO: 26901 - DNA, 20 bp, Artificial Sequence
  MKO10026901_A_Kcnd1
  gRNA
atatagttacctgctgtgcc

SEQ ID NO: 26902 - DNA, 20 bp, Artificial Sequence
  MKO10026902_A_Kcnd2
  gRNA
cccttcgtttgtctgctcgt

SEQ ID NO: 26903 - DNA, 20 bp, Artificial Sequence
  MKO10026903_A_Kcnd2
  gRNA
ctcacccaggtatggcgaca

SEQ ID NO: 26904 - DNA, 20 bp, Artificial Sequence
  MKO10026904_A_Kcnd2
  gRNA
gtgacttgatgggcgattga

SEQ ID NO: 26905 - DNA, 20 bp, Artificial Sequence
  MKO10026905_A_Kcnd3
  gRNA
accgtcgtccacttacgttg

SEQ ID NO: 26906 - DNA, 20 bp, Artificial Sequence
  MKO10026906_A_Kcnd3
  gRNA
ctgatcgtcctcaacgtaag

SEQ ID NO: 26907 - DNA, 20 bp, Artificial Sequence
  MKO10026907_A_Kcnd3
  gRNA
ccacccggatcctggcaagg

SEQ ID NO: 26908 - DNA, 20 bp, Artificial Sequence
  MKO10026908_A_Kcne1l
  gRNA
gtcgcctcgcggcccacgaa

SEQ ID NO: 26909 - DNA, 20 bp, Artificial Sequence
  MKO10026909_A_Kcne1l
  gRNA
ccgctcccgcaagctcgtcg

SEQ ID NO: 26910 - DNA, 20 bp, Artificial Sequence
  MKO10026910_A_Kcne1l
  gRNA
ggtcgtccctgaccctttcg

SEQ ID NO: 26911 - DNA, 20 bp, Artificial Sequence
  MKO10026911_A_Kcne1
  gRNA
caggctgctctacggccgcc

SEQ ID NO: 26912 - DNA, 20 bp, Artificial Sequence
  MKO10026912_A_Kcne1
  gRNA
gactcgatgtacacgttgaa

SEQ ID NO: 26913 - DNA, 20 bp, Artificial Sequence
  MKO10026913_A_Kcne1
  gRNA
gggtgtggggttcacgacaa

SEQ ID NO: 26914 - DNA, 20 bp, Artificial Sequence
  MKO10026914_A_Kcne2
  gRNA
gccaatcttccacgatgtac

SEQ ID NO: 26915 - DNA, 20 bp, Artificial Sequence
  MKO10026915_A_Kcne2
  gRNA
cccgtaccaccagtacatcg

SEQ ID NO: 26916 - DNA, 20 bp, Artificial Sequence
  MKO10026916_A_Kcne2
  gRNA
ctacgtcatcctgtacctca

SEQ ID NO: 26917 - DNA, 20 bp, Artificial Sequence
  MKO10026917_A_Kcne3
  gRNA
atatacccgttcacgcaaag

SEQ ID NO: 26918 - DNA, 20 bp, Artificial Sequence
  MKO10026918_A_Kcne3
  gRNA
gtttgtccactttgcgtgaa

SEQ ID NO: 26919 - DNA, 20 bp, Artificial Sequence
  MKO10026919_A_Kcne3
  gRNA
gttcctatttgccgtcactg

SEQ ID NO: 26920 - DNA, 20 bp, Artificial Sequence
  MKO10026920_A_Kcne4
  gRNA
aagccgctacctatgatgtc

SEQ ID NO: 26921 - DNA, 20 bp, Artificial Sequence
  MKO10026921_A_Kcne4
  gRNA
agcccagcatgattccgatc

SEQ ID NO: 26922 - DNA, 20 bp, Artificial Sequence
  MKO10026922_A_Kcne4
  gRNA
gtcctgcactctttgctcga

SEQ ID NO: 26923 - DNA, 20 bp, Artificial Sequence
  MKO10026923_A_Kcnf1
  gRNA
tctgtgcgacgattacgatc

SEQ ID NO: 26924 - DNA, 20 bp, Artificial Sequence
  MKO10026924_A_Kcnf1
  gRNA
catcgcacgcatcttcaaac

SEQ ID NO: 26925 - DNA, 20 bp, Artificial Sequence
  MKO10026925_A_Kcnf1
  gRNA
aagtagaattcgcgcttgcc

SEQ ID NO: 26926 - DNA, 20 bp, Artificial Sequence
  MKO10026926_A_Kcng1
  gRNA
cgtcctgcggccgcaatcgt

SEQ ID NO: 26927 - DNA, 20 bp, Artificial Sequence
  MKO10026927_A_Kcng1
  gRNA
cggcgctgcacgcgtgaatt

SEQ ID NO: 26928 - DNA, 20 bp, Artificial Sequence
  MKO10026928_A_Kcng1
  gRNA
tgttgccggtgctcggcttg

SEQ ID NO: 26929 - DNA, 20 bp, Artificial Sequence
  MKO10026929_A_Kcng2
  gRNA
ccccgacgttgataatgacg

SEQ ID NO: 26930 - DNA, 20 bp, Artificial Sequence
  MKO10026930_A_Kcng2
  gRNA
gtgcgctttccgcgccatcg

SEQ ID NO: 26931 - DNA, 20 bp, Artificial Sequence
  MKO10026931_A_Kcng2
  gRNA
cttcgcgccgctcgtgcacc

SEQ ID NO: 26932 - DNA, 20 bp, Artificial Sequence
  MKO10026932_A_Kcng3
  gRNA
tgtcggacatgcggtcgtct

SEQ ID NO: 26933 - DNA, 20 bp, Artificial Sequence
  MKO10026933_A_Kcng3
  gRNA
gcgcatgcggcggaccttcg

SEQ ID NO: 26934 - DNA, 20 bp, Artificial Sequence
  MKO10026934_A_Kcng3
  gRNA
gaaccgcacgatgcactccg

SEQ ID NO: 26935 - DNA, 20 bp, Artificial Sequence
  MKO10026935_A_Kcng4
  gRNA
ctcccgttcgctggccgaat

SEQ ID NO: 26936 - DNA, 20 bp, Artificial Sequence
  MKO10026936_A_Kcng4
  gRNA
cctgagtgacgtagatgatc

SEQ ID NO: 26937 - DNA, 20 bp, Artificial Sequence
  MKO10026937_A_Kcng4
  gRNA
gctctgcgatgactacgatg

SEQ ID NO: 26938 - DNA, 20 bp, Artificial Sequence
  MKO10026938_A_Kcnh1
  gRNA
aacatcgtgcggcggtccaa

SEQ ID NO: 26939 - DNA, 20 bp, Artificial Sequence
  MKO10026939_A_Kcnh1
  gRNA
ggaatgcccagatagtcgac

SEQ ID NO: 26940 - DNA, 20 bp, Artificial Sequence
  MKO10026940_A_Kcnh1
  gRNA
ttgtgaagatcgctccgatc

SEQ ID NO: 26941 - DNA, 20 bp, Artificial Sequence
  MKO10026941_A_Kcnh2
  gRNA
cgtgcgccgcgcatcatccg

SEQ ID NO: 26942 - DNA, 20 bp, Artificial Sequence
  MKO10026942_A_Kcnh2
  gRNA
tgccgccgcgcagatcgcgc

SEQ ID NO: 26943 - DNA, 20 bp, Artificial Sequence
  MKO10026943_A_Kcnh2
  gRNA
gcgcgatctgcgcggcggca

SEQ ID NO: 26944 - DNA, 20 bp, Artificial Sequence
  MKO10026944_A_Kcnh3
  gRNA
tggatccggcccgaccatat

SEQ ID NO: 26945 - DNA, 20 bp, Artificial Sequence
  MKO10026945_A_Kcnh3
  gRNA
ggcggtggccggcgccgata

SEQ ID NO: 26946 - DNA, 20 bp, Artificial Sequence
  MKO10026946_A_Kcnh3
  gRNA
ccttaccactcttccggtac

SEQ ID NO: 26947 - DNA, 20 bp, Artificial Sequence
  MKO10026947_A_Kcnh4
  gRNA
agtgaccgcgacgtagaatg

SEQ ID NO: 26948 - DNA, 20 bp, Artificial Sequence
  MKO10026948_A_Kcnh4
  gRNA
gaccaaagtggccagtcaac

SEQ ID NO: 26949 - DNA, 20 bp, Artificial Sequence
  MKO10026949_A_Kcnh4
  gRNA
tgactggccactttggtcgc

SEQ ID NO: 26950 - DNA, 20 bp, Artificial Sequence
  MKO10026950_A_Kcnh5
  gRNA
cgaagtttgcccgattgaca

SEQ ID NO: 26951 - DNA, 20 bp, Artificial Sequence
  MKO10026951_A_Kcnh5
  gRNA
ttcgttgagtcatcctctat

SEQ ID NO: 26952 - DNA, 20 bp, Artificial Sequence
  MKO10026952_A_Kcnh5
  gRNA
cccctacaggtacccctgtt

SEQ ID NO: 26953 - DNA, 20 bp, Artificial Sequence
  MKO10026953_A_Kcnh6
  gRNA
actcttcggctactcccgtg

SEQ ID NO: 26954 - DNA, 20 bp, Artificial Sequence
  MKO10026954_A_Kcnh6
  gRNA
caccatccttgcgatagtag

SEQ ID NO: 26955 - DNA, 20 bp, Artificial Sequence
  MKO10026955_A_Kcnh6
  gRNA
ctcgtcattagtgttgacgt

SEQ ID NO: 26956 - DNA, 20 bp, Artificial Sequence
  MKO10026956_A_Kcnh7
  gRNA
atgccctccgtatgctacag

SEQ ID NO: 26957 - DNA, 20 bp, Artificial Sequence
  MKO10026957_A_Kcnh7
  gRNA
aatatcgggttgaccctctc

SEQ ID NO: 26958 - DNA, 20 bp, Artificial Sequence
  MKO10026958_A_Kcnh7
  gRNA
tctcccttagtgaacatatc

SEQ ID NO: 26959 - DNA, 20 bp, Artificial Sequence
  MKO10026959_A_Kcnh8
  gRNA
gacttcagttcgtgcaaacc

SEQ ID NO: 26960 - DNA, 20 bp, Artificial Sequence
  MKO10026960_A_Kcnh8
  gRNA
gtctccgggctgagtcaaag

SEQ ID NO: 26961 - DNA, 20 bp, Artificial Sequence
  MKO10026961_A_Kcnh8
  gRNA
actgaccgttgtgctccgag

SEQ ID NO: 26962 - DNA, 20 bp, Artificial Sequence
  MKO10026962_A_Kcnip1
  gRNA
gagaactgcaagtcttgtac

SEQ ID NO: 26963 - DNA, 20 bp, Artificial Sequence
  MKO10026963_A_Kcnip1
  gRNA
gccttcgacaccacccagac

SEQ ID NO: 26964 - DNA, 20 bp, Artificial Sequence
  MKO10026964_A_Kcnip1
  gRNA
cgctgccatgggggccgtca

SEQ ID NO: 26965 - DNA, 20 bp, Artificial Sequence
  MKO10026965_A_Kcnip2
  gRNA
gccgtccaaatctcgggatt

SEQ ID NO: 26966 - DNA, 20 bp, Artificial Sequence
  MKO10026966_A_Kcnip2
  gRNA
tttgtccgaatcccgagatt

SEQ ID NO: 26967 - DNA, 20 bp, Artificial Sequence
  MKO10026967_A_Kcnip2
  gRNA
aactatccacggtgtgccac

SEQ ID NO: 26968 - DNA, 20 bp, Artificial Sequence
  MKO10026968_A_Kcnip3
  gRNA
ctctggctgatggcgcaccg

SEQ ID NO: 26969 - DNA, 20 bp, Artificial Sequence
  MKO10026969_A_Kcnip3
  gRNA
catggaccgtccctcgaagc

SEQ ID NO: 26970 - DNA, 20 bp, Artificial Sequence
  MKO10026970_A_Kcnip3
  gRNA
cccgttcccatcagcatcga

SEQ ID NO: 26971 - DNA, 20 bp, Artificial Sequence
  MKO10026971_A_Kcnip4
  gRNA
tctcttcaatgcattcgaca

SEQ ID NO: 26972 - DNA, 20 bp, Artificial Sequence
  MKO10026972_A_Kcnip4
  gRNA
tactgtccctcgaagcaaaa

SEQ ID NO: 26973 - DNA, 20 bp, Artificial Sequence
  MKO10026973_A_Kcnip4
  gRNA
agatggctactgtcaggcat

SEQ ID NO: 26974 - DNA, 20 bp, Artificial Sequence
  MKO10026974_A_Kcnj10
  gRNA
gcagatgacgtcggtcgcta

SEQ ID NO: 26975 - DNA, 20 bp, Artificial Sequence
  MKO10026975_A_Kcnj10
  gRNA
catagcgtacggtgctatcg

SEQ ID NO: 26976 - DNA, 20 bp, Artificial Sequence
  MKO10026976_A_Kcnj10
  gRNA
cgtattcctggggccactag

SEQ ID NO: 26977 - DNA, 20 bp, Artificial Sequence
  MKO10026977_A_Kcnj11
  gRNA
cccgcgacgaggcgagggtc

SEQ ID NO: 26978 - DNA, 20 bp, Artificial Sequence
  MKO10026978_A_Kcnj11
  gRNA
catgcgcccgccgaaaccaa

SEQ ID NO: 26979 - DNA, 20 bp, Artificial Sequence
  MKO10026979_A_Kcnj11
  gRNA
caacagcccgctctacgacc

SEQ ID NO: 26980 - DNA, 20 bp, Artificial Sequence
  MKO10026980_A_Kcnj12
  gRNA
aatctccgactcccgtctgt

SEQ ID NO: 26981 - DNA, 20 bp, Artificial Sequence
  MKO10026981_A_Kcnj12
  gRNA
aggttggggtactcagacgc

SEQ ID NO: 26982 - DNA, 20 bp, Artificial Sequence
  MKO10026982_A_Kcnj12
  gRNA
agccgacatcgatgtcaatc

SEQ ID NO: 26983 - DNA, 20 bp, Artificial Sequence
  MKO10026983_A_Kcnj13
  gRNA
agcgccagcgcatgtccatt

SEQ ID NO: 26984 - DNA, 20 bp, Artificial Sequence
  MKO10026984_A_Kcnj13
  gRNA
gaatcctaatggacatgcgc

SEQ ID NO: 26985 - DNA, 20 bp, Artificial Sequence
  MKO10026985_A_Kcnj13
  gRNA
ccgtgcaatcttcgccacaa

SEQ ID NO: 26986 - DNA, 20 bp, Artificial Sequence
  MKO10026986_A_Kcnj14
  gRNA
tccccagctcgactgtttcc

SEQ ID NO: 26987 - DNA, 20 bp, Artificial Sequence
  MKO10026987_A_Kcnj14
  gRNA
cggctcccagctaccggtcc

SEQ ID NO: 26988 - DNA, 20 bp, Artificial Sequence
  MKO10026988_A_Kcnj14
  gRNA
cctcatatgttcgatggaag

SEQ ID NO: 26989 - DNA, 20 bp, Artificial Sequence
  MKO10026989_A_Kcnj15
  gRNA
tcgccacttcatgtcgatga

SEQ ID NO: 26990 - DNA, 20 bp, Artificial Sequence
  MKO10026990_A_Kcnj15
  gRNA
ggccttgagtccaaccccgt

SEQ ID NO: 26991 - DNA, 20 bp, Artificial Sequence
  MKO10026991_A_Kcnj15
  gRNA
agcagagccccatggtagcc

SEQ ID NO: 26992 - DNA, 20 bp, Artificial Sequence
  MKO10026992_A_Kcnj16
  gRNA
gtccttcagcgcagttgccg

SEQ ID NO: 26993 - DNA, 20 bp, Artificial Sequence
  MKO10026993_A_Kcnj16
  gRNA
acagcggtaaccgtatccaa

SEQ ID NO: 26994 - DNA, 20 bp, Artificial Sequence
  MKO10026994_A_Kcnj16
  gRNA
ttgcggtcaagggcatacag

SEQ ID NO: 26995 - DNA, 20 bp, Artificial Sequence
  MKO10026995_A_Kcnj1
  gRNA
cataggctacgacataccac

SEQ ID NO: 26996 - DNA, 20 bp, Artificial Sequence
  MKO10026996_A_Kcnj1
  gRNA
aaacctgaatccgtaaccta

SEQ ID NO: 26997 - DNA, 20 bp, Artificial Sequence
  MKO10026997_A_Kcnj1
  gRNA
ccagcatggatgcttcagat

SEQ ID NO: 26998 - DNA, 20 bp, Artificial Sequence
  MKO10026998_A_Kcnj2
  gRNA
tatctccgattctcgcctta

SEQ ID NO: 26999 - DNA, 20 bp, Artificial Sequence
  MKO10026999_A_Kcnj2
  gRNA
tatttcgtgaacgatagtga

SEQ ID NO: 27000 - DNA, 20 bp, Artificial Sequence
  MKO10027000_A_Kcnj2
  gRNA
ccgctacagcatcgtctctt

SEQ ID NO: 27001 - DNA, 20 bp, Artificial Sequence
  MKO10027001_A_Kcnj3
  gRNA
gcccgaaccgctcgacgaag

SEQ ID NO: 27002 - DNA, 20 bp, Artificial Sequence
  MKO10027002_A_Kcnj3
  gRNA
ataagcgatcacccaccaca

SEQ ID NO: 27003 - DNA, 20 bp, Artificial Sequence
  MKO10027003_A_Kcnj3
  gRNA
gttcagtttgcatgcttcgc

SEQ ID NO: 27004 - DNA, 20 bp, Artificial Sequence
  MKO10027004_A_Kcnj4
  gRNA
accaccgcaatgaccgccaa

SEQ ID NO: 27005 - DNA, 20 bp, Artificial Sequence
  MKO10027005_A_Kcnj4
  gRNA
ccctgtatcatgcacgtaaa

SEQ ID NO: 27006 - DNA, 20 bp, Artificial Sequence
  MKO10027006_A_Kcnj4
  gRNA
catagtgcatgaaatcgacg

SEQ ID NO: 27007 - DNA, 20 bp, Artificial Sequence
  MKO10027007_A_Kcnj5
  gRNA
agcgccatttgaggtccacc

SEQ ID NO: 27008 - DNA, 20 bp, Artificial Sequence
  MKO10027008_A_Kcnj5
  gRNA
gaagccacgccagcgctaca

SEQ ID NO: 27009 - DNA, 20 bp, Artificial Sequence
  MKO10027009_A_Kcnj5
  gRNA
ccatgtaagagctccgtgct

SEQ ID NO: 27010 - DNA, 20 bp, Artificial Sequence
  MKO10027010_A_Kcnj6
  gRNA
acgtctcccgcacattgccg

SEQ ID NO: 27011 - DNA, 20 bp, Artificial Sequence
  MKO10027011_A_Kcnj6
  gRNA
gacccggtagccataaccga

SEQ ID NO: 27012 - DNA, 20 bp, Artificial Sequence
  MKO10027012_A_Kcnj6
  gRNA
agccagctccgctagctctt

SEQ ID NO: 27013 - DNA, 20 bp, Artificial Sequence
  MKO10027013_A_Kcnj8
  gRNA
gaccacctggatgcgcaccg

SEQ ID NO: 27014 - DNA, 20 bp, Artificial Sequence
  MKO10027014_A_Kcnj8
  gRNA
gctgtgattgccgtccgcaa

SEQ ID NO: 27015 - DNA, 20 bp, Artificial Sequence
  MKO10027015_A_Kcnj8
  gRNA
gggagacggtcgcggatgcg

SEQ ID NO: 27016 - DNA, 20 bp, Artificial Sequence
  MKO10027016_A_Kcnj9
  gRNA
tctcgaagtcgtccctctcg

SEQ ID NO: 27017 - DNA, 20 bp, Artificial Sequence
  MKO10027017_A_Kcnj9
  gRNA
gcgatcctcgcacatcgtcg

SEQ ID NO: 27018 - DNA, 20 bp, Artificial Sequence
  MKO10027018_A_Kcnj9
  gRNA
tgagcaccgatgtgaaccgg

SEQ ID NO: 27019 - DNA, 20 bp, Artificial Sequence
  MKO10027019_A_Kcnk10
  gRNA
aacagggtgatgcccgttag

SEQ ID NO: 27020 - DNA, 20 bp, Artificial Sequence
  MKO10027020_A_Kcnk10
  gRNA
gtcgtggtctacctcgtcac

SEQ ID NO: 27021 - DNA, 20 bp, Artificial Sequence
  MKO10027021_A_Kcnk10
  gRNA
tgcactcgatgctgataacg

SEQ ID NO: 27022 - DNA, 20 bp, Artificial Sequence
  MKO10027022_A_Kcnk12
  gRNA
gtacatggccgaggcgcaac

SEQ ID NO: 27023 - DNA, 20 bp, Artificial Sequence
  MKO10027023_A_Kcnk12
  gRNA
gtgttgacgcacacgctgcg

SEQ ID NO: 27024 - DNA, 20 bp, Artificial Sequence
  MKO10027024_A_Kcnk12
  gRNA
cgcaacttcagcgctgcgca

SEQ ID NO: 27025 - DNA, 20 bp, Artificial Sequence
  MKO10027025_A_Kcnk13
  gRNA
agcgcgcgttgtcctcgttc

SEQ ID NO: 27026 - DNA, 20 bp, Artificial Sequence
  MKO10027026_A_Kcnk13
  gRNA
cgcccgtgaagtcccagcga

SEQ ID NO: 27027 - DNA, 20 bp, Artificial Sequence
  MKO10027027_A_Kcnk13
  gRNA
tgccgggtaacatccggaac

SEQ ID NO: 27028 - DNA, 20 bp, Artificial Sequence
  MKO10027028_A_Kcnk15
  gRNA
cgccgacgactaccgcgagc

SEQ ID NO: 27029 - DNA, 20 bp, Artificial Sequence
  MKO10027029_A_Kcnk15
  gRNA
agggtatggtcatgccgcgc

SEQ ID NO: 27030 - DNA, 20 bp, Artificial Sequence
  MKO10027030_A_Kcnk15
  gRNA
cggcggtggactgcgcgttc

SEQ ID NO: 27031 - DNA, 20 bp, Artificial Sequence
  MKO10027031_A_Kcnk16
  gRNA
agcattacatcgctgtgtat

SEQ ID NO: 27032 - DNA, 20 bp, Artificial Sequence
  MKO10027032_A_Kcnk16
  gRNA
gcagctatatggatcctcct

SEQ ID NO: 27033 - DNA, 20 bp, Artificial Sequence
  MKO10027033_A_Kcnk16
  gRNA
gcgggcccacctgaccacat

SEQ ID NO: 27034 - DNA, 20 bp, Artificial Sequence
  MKO10027034_A_Kcnk18
  gRNA
acaaccacccacgcgtcccg

SEQ ID NO: 27035 - DNA, 20 bp, Artificial Sequence
  MKO10027035_A_Kcnk18
  gRNA
ctttgcatacatctcctgcg

SEQ ID NO: 27036 - DNA, 20 bp, Artificial Sequence
  MKO10027036_A_Kcnk18
  gRNA
tgctctcttctccgctgtcg

SEQ ID NO: 27037 - DNA, 20 bp, Artificial Sequence
  MKO10027037_A_Kcnk1
  gRNA
agaccacggcgccgaacacc

SEQ ID NO: 27038 - DNA, 20 bp, Artificial Sequence
  MKO10027038_A_Kcnk1
  gRNA
cgccgtggtcttctcgtccg

SEQ ID NO: 27039 - DNA, 20 bp, Artificial Sequence
  MKO10027039_A_Kcnk1
  gRNA
catctgacaggggcaccgtg

SEQ ID NO: 27040 - DNA, 20 bp, Artificial Sequence
  MKO10027040_A_Kcnk2
  gRNA
atagtggcagcaataaacgc

SEQ ID NO: 27041 - DNA, 20 bp, Artificial Sequence
  MKO10027041_A_Kcnk2
  gRNA
atgtgcttgaatatgaccgc

SEQ ID NO: 27042 - DNA, 20 bp, Artificial Sequence
  MKO10027042_A_Kcnk2
  gRNA
ccacaaaatagatagcgtcc

SEQ ID NO: 27043 - DNA, 20 bp, Artificial Sequence
  MKO10027043_A_Kcnk3
  gRNA
cgcatcacgcttctcgtcct

SEQ ID NO: 27044 - DNA, 20 bp, Artificial Sequence
  MKO10027044_A_Kcnk3
  gRNA
cgccgcggtgttcgacgcac

SEQ ID NO: 27045 - DNA, 20 bp, Artificial Sequence
  MKO10027045_A_Kcnk3
  gRNA
cacagccactcgtcgccggg

SEQ ID NO: 27046 - DNA, 20 bp, Artificial Sequence
  MKO10027046_A_Kcnk4
  gRNA
gaaatacctctgcccgagtt

SEQ ID NO: 27047 - DNA, 20 bp, Artificial Sequence
  MKO10027047_A_Kcnk4
  gRNA
gagcagtgtcccgccgaact

SEQ ID NO: 27048 - DNA, 20 bp, Artificial Sequence
  MKO10027048_A_Kcnk4
  gRNA
cccaccgatggtagtgatga

SEQ ID NO: 27049 - DNA, 20 bp, Artificial Sequence
  MKO10027049_A_Kcnk5
  gRNA
tagggcgtggtagttggcac

SEQ ID NO: 27050 - DNA, 20 bp, Artificial Sequence
  MKO10027050_A_Kcnk5
  gRNA
aaggtggactcatcggatga

SEQ ID NO: 27051 - DNA, 20 bp, Artificial Sequence
  MKO10027051_A_Kcnk5
  gRNA
gtacagccatcttcatcgtg

SEQ ID NO: 27052 - DNA, 20 bp, Artificial Sequence
  MKO10027052_A_Kcnk6
  gRNA
tggagcggcctcacgaagcc

SEQ ID NO: 27053 - DNA, 20 bp, Artificial Sequence
  MKO10027053_A_Kcnk6
  gRNA
ccaacgcttcggaccctgcg

SEQ ID NO: 27054 - DNA, 20 bp, Artificial Sequence
  MKO10027054_A_Kcnk6
  gRNA
actcatcttgctgcccgatc

SEQ ID NO: 27055 - DNA, 20 bp, Artificial Sequence
  MKO10027055_A_Kcnk7
  gRNA
ggaagtcagctcgatcgtgt

SEQ ID NO: 27056 - DNA, 20 bp, Artificial Sequence
  MKO10027056_A_Kcnk7
  gRNA
tcactcagcacgatcggcct

SEQ ID NO: 27057 - DNA, 20 bp, Artificial Sequence
  MKO10027057_A_Kcnk7
  gRNA
ctgggtgcaggccacgtcca

SEQ ID NO: 27058 - DNA, 20 bp, Artificial Sequence
  MKO10027058_A_Kcnk9
  gRNA
aaacggtgtggacggtagcc

SEQ ID NO: 27059 - DNA, 20 bp, Artificial Sequence
  MKO10027059_A_Kcnk9
  gRNA
acgcacgttctgccgcttca

SEQ ID NO: 27060 - DNA, 20 bp, Artificial Sequence
  MKO10027060_A_Kcnk9
  gRNA
gtgcgcctcagagacgcaag

SEQ ID NO: 27061 - DNA, 20 bp, Artificial Sequence
  MKO10027061_A_Kcnma1
  gRNA
ctcgtggaccgaggacgagg

SEQ ID NO: 27062 - DNA, 20 bp, Artificial Sequence
  MKO10027062_A_Kcnma1
  gRNA
gatggatgcgctcatcatac

SEQ ID NO: 27063 - DNA, 20 bp, Artificial Sequence
  MKO10027063_A_Kcnma1
  gRNA
agatgtcatccagccgacct

SEQ ID NO: 27064 - DNA, 20 bp, Artificial Sequence
  MKO10027064_A_Kcnmb1
  gRNA
gtcgtgtaccagcgcctcta

SEQ ID NO: 27065 - DNA, 20 bp, Artificial Sequence
  MKO10027065_A_Kcnmb1
  gRNA
agttgtacccaggacgtagt

SEQ ID NO: 27066 - DNA, 20 bp, Artificial Sequence
  MKO10027066_A_Kcnmb1
  gRNA
ctcgtgtctctccgcgcttc

SEQ ID NO: 27067 - DNA, 20 bp, Artificial Sequence
  MKO10027067_A_Kcnmb2
  gRNA
gtctctcgtgagtgtcgtca

SEQ ID NO: 27068 - DNA, 20 bp, Artificial Sequence
  MKO10027068_A_Kcnmb2
  gRNA
gcctctccccggaagatgtc

SEQ ID NO: 27069 - DNA, 20 bp, Artificial Sequence
  MKO10027069_A_Kcnmb2
  gRNA
gacgacactcacgagagaca

SEQ ID NO: 27070 - DNA, 20 bp, Artificial Sequence
  MKO10027070_A_Kcnmb3
  gRNA
gcttctccactacgacgacg

SEQ ID NO: 27071 - DNA, 20 bp, Artificial Sequence
  MKO10027071_A_Kcnmb3
  gRNA
ccctgtttctacagtcccga

SEQ ID NO: 27072 - DNA, 20 bp, Artificial Sequence
  MKO10027072_A_Kcnmb3
  gRNA
gttcgtaaacctgagccact

SEQ ID NO: 27073 - DNA, 20 bp, Artificial Sequence
  MKO10027073_A_Kcnmb4
  gRNA
tctcgtcgtgtgtgcgctgt

SEQ ID NO: 27074 - DNA, 20 bp, Artificial Sequence
  MKO10027074_A_Kcnmb4
  gRNA
ctcgcagtatccctgcgtcc

SEQ ID NO: 27075 - DNA, 20 bp, Artificial Sequence
  MKO10027075_A_Kcnmb4
  gRNA
cggagttgttcacgtacacc

SEQ ID NO: 27076 - DNA, 20 bp, Artificial Sequence
  MKO10027076_A_Kcnn1
  gRNA
aaccaggtaccacgataagc

SEQ ID NO: 27077 - DNA, 20 bp, Artificial Sequence
  MKO10027077_A_Kcnn1
  gRNA
ccgtccacgtgaagcgatag

SEQ ID NO: 27078 - DNA, 20 bp, Artificial Sequence
  MKO10027078_A_Kcnn1
  gRNA
cgaccaactccagcgagatc

SEQ ID NO: 27079 - DNA, 20 bp, Artificial Sequence
  MKO10027079_A_Kcnn2
  gRNA
tgatcatcgtgtaccacgcc

SEQ ID NO: 27080 - DNA, 20 bp, Artificial Sequence
  MKO10027080_A_Kcnn2
  gRNA
ggactgtccgagcttgtgaa

SEQ ID NO: 27081 - DNA, 20 bp, Artificial Sequence
  MKO10027081_A_Kcnn2
  gRNA
actttaatgactatctgccc

SEQ ID NO: 27082 - DNA, 20 bp, Artificial Sequence
  MKO10027082_A_Kcnn3
  gRNA
tgcgcctgtacctgatcgcc

SEQ ID NO: 27083 - DNA, 20 bp, Artificial Sequence
  MKO10027083_A_Kcnn3
  gRNA
gcagcatgacccgggcgatc

SEQ ID NO: 27084 - DNA, 20 bp, Artificial Sequence
  MKO10027084_A_Kcnn3
  gRNA
tgatcatcgcctatcacaca

SEQ ID NO: 27085 - DNA, 20 bp, Artificial Sequence
  MKO10027085_A_Kcnn4
  gRNA
aacgcgtcctaccgcagcat

SEQ ID NO: 27086 - DNA, 20 bp, Artificial Sequence
  MKO10027086_A_Kcnn4
  gRNA
accaagtccgcttccgccac

SEQ ID NO: 27087 - DNA, 20 bp, Artificial Sequence
  MKO10027087_A_Kcnn4
  gRNA
tcaccatgactccggtgcac

SEQ ID NO: 27088 - DNA, 20 bp, Artificial Sequence
  MKO10027088_A_Kcnq1
  gRNA
gatcgacatgcagcatccgc

SEQ ID NO: 27089 - DNA, 20 bp, Artificial Sequence
  MKO10027089_A_Kcnq1
  gRNA
atgctgcatgtcgatcgcca

SEQ ID NO: 27090 - DNA, 20 bp, Artificial Sequence
  MKO10027090_A_Kcnq1
  gRNA
tgttcgccacatcagctatc

SEQ ID NO: 27091 - DNA, 20 bp, Artificial Sequence
  MKO10027091_A_Kcnq2
  gRNA
gcgcccgactccacacgcga

SEQ ID NO: 27092 - DNA, 20 bp, Artificial Sequence
  MKO10027092_A_Kcnq2
  gRNA
gagtagcgcgccgtcgcgtg

SEQ ID NO: 27093 - DNA, 20 bp, Artificial Sequence
  MKO10027093_A_Kcnq2
  gRNA
atgatccgtatggaccggag

SEQ ID NO: 27094 - DNA, 20 bp, Artificial Sequence
  MKO10027094_A_Kcnq3
  gRNA
tatccattcgaagcatgcgc

SEQ ID NO: 27095 - DNA, 20 bp, Artificial Sequence
  MKO10027095_A_Kcnq3
  gRNA
ggatgttgctgtcgatacaa

SEQ ID NO: 27096 - DNA, 20 bp, Artificial Sequence
  MKO10027096_A_Kcnq3
  gRNA
gatcctgcgcatgcttcgaa

SEQ ID NO: 27097 - DNA, 20 bp, Artificial Sequence
  MKO10027097_A_Kcnq4
  gRNA
gaagcgcatactgcgcaacg

SEQ ID NO: 27098 - DNA, 20 bp, Artificial Sequence
  MKO10027098_A_Kcnq4
  gRNA
agggacgctttcgcttcgcc

SEQ ID NO: 27099 - DNA, 20 bp, Artificial Sequence
  MKO10027099_A_Kcnq4
  gRNA
cctcctatgccgactcgctc

SEQ ID NO: 27100 - DNA, 20 bp, Artificial Sequence
  MKO10027100_A_Kcnq5
  gRNA
tgacgttgcgccgacagctc

SEQ ID NO: 27101 - DNA, 20 bp, Artificial Sequence
  MKO10027101_A_Kcnq5
  gRNA
caacagcaggccgtcgcccc

SEQ ID NO: 27102 - DNA, 20 bp, Artificial Sequence
  MKO10027102_A_Kcnq5
  gRNA
tgtccatgcgcaccatacgc

SEQ ID NO: 27103 - DNA, 20 bp, Artificial Sequence
  MKO10027103_A_Kcnrg
  gRNA
ctcccacattcaaagtgacg

SEQ ID NO: 27104 - DNA, 20 bp, Artificial Sequence
  MKO10027104_A_Kcnrg
  gRNA
aaagcctgataatcgaaaat

SEQ ID NO: 27105 - DNA, 20 bp, Artificial Sequence
  MKO10027105_A_Kcnrg
  gRNA
taacatgcctgccaagcgag

SEQ ID NO: 27106 - DNA, 20 bp, Artificial Sequence
  MKO10027106_A_Kcns1
  gRNA
ctgcacgtccgagatctcgt

SEQ ID NO: 27107 - DNA, 20 bp, Artificial Sequence
  MKO10027107_A_Kcns1
  gRNA
ctgcgtcgtagtcgtcgcac

SEQ ID NO: 27108 - DNA, 20 bp, Artificial Sequence
  MKO10027108_A_Kcns1
  gRNA
cagcggtcagcgcgagtttg

SEQ ID NO: 27109 - DNA, 20 bp, Artificial Sequence
  MKO10027109_A_Kcns2
  gRNA
tgtgtccgataccgacgtcg

SEQ ID NO: 27110 - DNA, 20 bp, Artificial Sequence
  MKO10027110_A_Kcns2
  gRNA
tagtcccttaaattgaccga

SEQ ID NO: 27111 - DNA, 20 bp, Artificial Sequence
  MKO10027111_A_Kcns2
  gRNA
gtgctccacaatttcgaacc

SEQ ID NO: 27112 - DNA, 20 bp, Artificial Sequence
  MKO10027112_A_Kcns3
  gRNA
ttcaacgctcgaagcatctg

SEQ ID NO: 27113 - DNA, 20 bp, Artificial Sequence
  MKO10027113_A_Kcns3
  gRNA
tggcaatgagcttggccgac

SEQ ID NO: 27114 - DNA, 20 bp, Artificial Sequence
  MKO10027114_A_Kcns3
  gRNA
agctaccgtactttaacatt

SEQ ID NO: 27115 - DNA, 20 bp, Artificial Sequence
  MKO10027115_A_Kcnt1
  gRNA
tcacccaccatccgatgccc

SEQ ID NO: 27116 - DNA, 20 bp, Artificial Sequence
  MKO10027116_A_Kcnt1
  gRNA
cagcttgagccgctctttga

SEQ ID NO: 27117 - DNA, 20 bp, Artificial Sequence
  MKO10027117_A_Kcnt1
  gRNA
cctgcttgacaacccagacc

SEQ ID NO: 27118 - DNA, 20 bp, Artificial Sequence
  MKO10027118_A_Kcnt2
  gRNA
gttgcttgagaaaccgtcac

SEQ ID NO: 27119 - DNA, 20 bp, Artificial Sequence
  MKO10027119_A_Kcnt2
  gRNA
cgttcatgtagaattcaact

SEQ ID NO: 27120 - DNA, 20 bp, Artificial Sequence
  MKO10027120_A_Kcnt2
  gRNA
ttaaccgaagtctaccttta

SEQ ID NO: 27121 - DNA, 20 bp, Artificial Sequence
  MKO10027121_A_Kcnu1
  gRNA
attctcatcacgtagaatcg

SEQ ID NO: 27122 - DNA, 20 bp, Artificial Sequence
  MKO10027122_A_Kcnu1
  gRNA
caccaacacttgccccacga

SEQ ID NO: 27123 - DNA, 20 bp, Artificial Sequence
  MKO10027123_A_Kcnu1
  gRNA
tatgaagaacaccttcgaac

SEQ ID NO: 27124 - DNA, 20 bp, Artificial Sequence
  MKO10027124_A_Kcnv1
  gRNA
gctactggactcgtcgtcgc

SEQ ID NO: 27125 - DNA, 20 bp, Artificial Sequence
  MKO10027125_A_Kcnv1
  gRNA
gaccagtgcgatagtagtgc

SEQ ID NO: 27126 - DNA, 20 bp, Artificial Sequence
  MKO10027126_A_Kcnv1
  gRNA
acacttgtgaaggttgtatc

SEQ ID NO: 27127 - DNA, 20 bp, Artificial Sequence
  MKO10027127_A_Kcnv2
  gRNA
gctcgagtgcttcacgagcg

SEQ ID NO: 27128 - DNA, 20 bp, Artificial Sequence
  MKO10027128_A_Kcnv2
  gRNA
tttcgggacatgcgcttcta

SEQ ID NO: 27129 - DNA, 20 bp, Artificial Sequence
  MKO10027129_A_Kcnv2
  gRNA
cttacgagtacaccgccatc

SEQ ID NO: 27130 - DNA, 20 bp, Artificial Sequence
  MKO10027130_A_Kcp
  gRNA
acagcctgcgtgtgccgtga

SEQ ID NO: 27131 - DNA, 20 bp, Artificial Sequence
  MKO10027131_A_Kcp
  gRNA
ccagcgagctccttcgggac

SEQ ID NO: 27132 - DNA, 20 bp, Artificial Sequence
  MKO10027132_A_Kcp
  gRNA
gaggtcacctggccggcaga

SEQ ID NO: 27133 - DNA, 20 bp, Artificial Sequence
  MKO10027133_A_Kctd10
  gRNA
gcttatagcgacgtcaaata

SEQ ID NO: 27134 - DNA, 20 bp, Artificial Sequence
  MKO10027134_A_Kctd10
  gRNA
agggtacacccccgtctcgc

SEQ ID NO: 27135 - DNA, 20 bp, Artificial Sequence
  MKO10027135_A_Kctd10
  gRNA
gaagtgctcacggacagcga

SEQ ID NO: 27136 - DNA, 20 bp, Artificial Sequence
  MKO10027136_A_Kctd11
  gRNA
ttcgagcggagaagtgcacc

SEQ ID NO: 27137 - DNA, 20 bp, Artificial Sequence
  MKO10027137_A_Kctd11
  gRNA
gagaggcttccaattcccgc

SEQ ID NO: 27138 - DNA, 20 bp, Artificial Sequence
  MKO10027138_A_Kctd11
  gRNA
gcccactctagccgaaaatg

SEQ ID NO: 27139 - DNA, 20 bp, Artificial Sequence
  MKO10027139_A_Kctd12b
  gRNA
aagtgatgtcaaaccgaccg

SEQ ID NO: 27140 - DNA, 20 bp, Artificial Sequence
  MKO10027140_A_Kctd12b
  gRNA
agatgccaaattccgccgtg

SEQ ID NO: 27141 - DNA, 20 bp, Artificial Sequence
  MKO10027141_A_Kctd12b
  gRNA
tatcgagaagtatatcgctc

SEQ ID NO: 27142 - DNA, 20 bp, Artificial Sequence
  MKO10027142_A_Kctd12
  gRNA
cgcctgagcgtcgcgcccga

SEQ ID NO: 27143 - DNA, 20 bp, Artificial Sequence
  MKO10027143_A_Kctd12
  gRNA
gctccccgataagagccgct

SEQ ID NO: 27144 - DNA, 20 bp, Artificial Sequence
  MKO10027144_A_Kctd12
  gRNA
acggtgtccggcgtgcagtt

SEQ ID NO: 27145 - DNA, 20 bp, Artificial Sequence
  MKO10027145_A_Kctd13
  gRNA
gcagggccgaaaaattgccg

SEQ ID NO: 27146 - DNA, 20 bp, Artificial Sequence
  MKO10027146_A_Kctd13
  gRNA
gtggcaccgacccgtcccgc

SEQ ID NO: 27147 - DNA, 20 bp, Artificial Sequence
  MKO10027147_A_Kctd13
  gRNA
aggtgaagcccgatactacc

SEQ ID NO: 27148 - DNA, 20 bp, Artificial Sequence
  MKO10027148_A_Kctd14
  gRNA
tgtggcgatgcggtcgtcaa

SEQ ID NO: 27149 - DNA, 20 bp, Artificial Sequence
  MKO10027149_A_Kctd14
  gRNA
cgcttcttcatcgatcggcc

SEQ ID NO: 27150 - DNA, 20 bp, Artificial Sequence
  MKO10027150_A_Kctd14
  gRNA
gaagtgcttgaatgagttcc

SEQ ID NO: 27151 - DNA, 20 bp, Artificial Sequence
  MKO10027151_A_Kctd15
  gRNA
agcggaaaatctccccatcg

SEQ ID NO: 27152 - DNA, 20 bp, Artificial Sequence
  MKO10027152_A_Kctd15
  gRNA
cattatttcatcgaccgcga

SEQ ID NO: 27153 - DNA, 20 bp, Artificial Sequence
  MKO10027153_A_Kctd15
  gRNA
agtctacagtagccgttgag

SEQ ID NO: 27154 - DNA, 20 bp, Artificial Sequence
  MKO10027154_A_Kctd16
  gRNA
tgcttcctcacgaccgcaag

SEQ ID NO: 27155 - DNA, 20 bp, Artificial Sequence
  MKO10027155_A_Kctd16
  gRNA
gccaggagtttgacgaggtc

SEQ ID NO: 27156 - DNA, 20 bp, Artificial Sequence
  MKO10027156_A_Kctd16
  gRNA
gctgcttatgttcgactccc

SEQ ID NO: 27157 - DNA, 20 bp, Artificial Sequence
  MKO10027157_A_Kctd17
  gRNA
ctgctcgaagcgccagccgt

SEQ ID NO: 27158 - DNA, 20 bp, Artificial Sequence
  MKO10027158_A_Kctd17
  gRNA
attcaggatgggcccgaagt

SEQ ID NO: 27159 - DNA, 20 bp, Artificial Sequence
  MKO10027159_A_Kctd17
  gRNA
gcgaagagcttcaatcggac

SEQ ID NO: 27160 - DNA, 20 bp, Artificial Sequence
  MKO10027160_A_Kctd18
  gRNA
gcgtgcattattaaccgtga

SEQ ID NO: 27161 - DNA, 20 bp, Artificial Sequence
  MKO10027161_A_Kctd18
  gRNA
atcttcaaggggtaagctac

SEQ ID NO: 27162 - DNA, 20 bp, Artificial Sequence
  MKO10027162_A_Kctd18
  gRNA
ccaggcggctgatagccctc

SEQ ID NO: 27163 - DNA, 20 bp, Artificial Sequence
  MKO10027163_A_Kctd19
  gRNA
cgctgcattcgcactcgatc

SEQ ID NO: 27164 - DNA, 20 bp, Artificial Sequence
  MKO10027164_A_Kctd19
  gRNA
agttcccagactcgctgttg

SEQ ID NO: 27165 - DNA, 20 bp, Artificial Sequence
  MKO10027165_A_Kctd19
  gRNA
aggagagcttggacgtgtag

SEQ ID NO: 27166 - DNA, 20 bp, Artificial Sequence
  MKO10027166_A_Kctd1
  gRNA
acggccctgcgagtgcctcg

SEQ ID NO: 27167 - DNA, 20 bp, Artificial Sequence
  MKO10027167_A_Kctd1
  gRNA
gcacatcacatcgccgatct

SEQ ID NO: 27168 - DNA, 20 bp, Artificial Sequence
  MKO10027168_A_Kctd1
  gRNA
gtgtccgcctcagttcccgt

SEQ ID NO: 27169 - DNA, 20 bp, Artificial Sequence
  MKO10027169_A_Kctd20
  gRNA
gcagtttgaccactacctcg

SEQ ID NO: 27170 - DNA, 20 bp, Artificial Sequence
  MKO10027170_A_Kctd20
  gRNA
cttcaacactatccgatgtc

SEQ ID NO: 27171 - DNA, 20 bp, Artificial Sequence
  MKO10027171_A_Kctd20
  gRNA
ctgcttgtgggcaccatcgt

SEQ ID NO: 27172 - DNA, 20 bp, Artificial Sequence
  MKO10027172_A_Kctd21
  gRNA
ccgtctgcacgcgctgcttc

SEQ ID NO: 27173 - DNA, 20 bp, Artificial Sequence
  MKO10027173_A_Kctd21
  gRNA
gatctgtggtgcctcccgca

SEQ ID NO: 27174 - DNA, 20 bp, Artificial Sequence
  MKO10027174_A_Kctd21
  gRNA
cctcgatcaggggctgtacc

SEQ ID NO: 27175 - DNA, 20 bp, Artificial Sequence
  MKO10027175_A_Kctd2
  gRNA
cgtcatagagccgagcgaaa

SEQ ID NO: 27176 - DNA, 20 bp, Artificial Sequence
  MKO10027176_A_Kctd2
  gRNA
atcctaaactacctccgcca

SEQ ID NO: 27177 - DNA, 20 bp, Artificial Sequence
  MKO10027177_A_Kctd2
  gRNA
gccccgtgaagcacgtgtac

SEQ ID NO: 27178 - DNA, 20 bp, Artificial Sequence
  MKO10027178_A_Kctd3
  gRNA
cctctagacagacgctcatg

SEQ ID NO: 27179 - DNA, 20 bp, Artificial Sequence
  MKO10027179_A_Kctd3
  gRNA
tcaacacttcgagatgaaac

SEQ ID NO: 27180 - DNA, 20 bp, Artificial Sequence
  MKO10027180_A_Kctd3
  gRNA
ccacatgagcgtctgtctag

SEQ ID NO: 27181 - DNA, 20 bp, Artificial Sequence
  MKO10027181_A_Kctd4
  gRNA
gataatcacgatcgctcaca

SEQ ID NO: 27182 - DNA, 20 bp, Artificial Sequence
  MKO10027182_A_Kctd4
  gRNA
ataaatatccaccaacgttg

SEQ ID NO: 27183 - DNA, 20 bp, Artificial Sequence
  MKO10027183_A_Kctd4
  gRNA
cccccgagagactactttct

SEQ ID NO: 27184 - DNA, 20 bp, Artificial Sequence
  MKO10027184_A_Kctd5
  gRNA
tattaacaaagacctcgcag

SEQ ID NO: 27185 - DNA, 20 bp, Artificial Sequence
  MKO10027185_A_Kctd5
  gRNA
gggatctctgtcgattaaat

SEQ ID NO: 27186 - DNA, 20 bp, Artificial Sequence
  MKO10027186_A_Kctd5
  gRNA
acacggtacacatgcttcac

SEQ ID NO: 27187 - DNA, 20 bp, Artificial Sequence
  MKO10027187_A_Kctd6
  gRNA
gcagtcagtcgtccgtcttg

SEQ ID NO: 27188 - DNA, 20 bp, Artificial Sequence
  MKO10027188_A_Kctd6
  gRNA
ctgtagactggcccgcaaga

SEQ ID NO: 27189 - DNA, 20 bp, Artificial Sequence
  MKO10027189_A_Kctd6
  gRNA
tgctggagcagatggataat

SEQ ID NO: 27190 - DNA, 20 bp, Artificial Sequence
  MKO10027190_A_Kctd7
  gRNA
cggtacttcatcgatcgaga

SEQ ID NO: 27191 - DNA, 20 bp, Artificial Sequence
  MKO10027191_A_Kctd7
  gRNA
tccgctgtactgcgcgaagc

SEQ ID NO: 27192 - DNA, 20 bp, Artificial Sequence
  MKO10027192_A_Kctd7
  gRNA
catctcgatcgatgaagtac

SEQ ID NO: 27193 - DNA, 20 bp, Artificial Sequence
  MKO10027193_A_Kctd8
  gRNA
gcggacaccatctcgctgat

SEQ ID NO: 27194 - DNA, 20 bp, Artificial Sequence
  MKO10027194_A_Kctd8
  gRNA
cgcttcttcatcgaccgcga

SEQ ID NO: 27195 - DNA, 20 bp, Artificial Sequence
  MKO10027195_A_Kctd8
  gRNA
tgccactggcgtttgcgctc

SEQ ID NO: 27196 - DNA, 20 bp, Artificial Sequence
  MKO10027196_A_Kctd9
  gRNA
cgggtcacgctgttcttgaa

SEQ ID NO: 27197 - DNA, 20 bp, Artificial Sequence
  MKO10027197_A_Kctd9
  gRNA
gacgatacttcacaacaaca

SEQ ID NO: 27198 - DNA, 20 bp, Artificial Sequence
  MKO10027198_A_Kctd9
  gRNA
gcctttcccattatatacac

SEQ ID NO: 27199 - DNA, 20 bp, Artificial Sequence
  MKO10027199_A_Kdelc1
  gRNA
ggtaggcatcacaatatccc

SEQ ID NO: 27200 - DNA, 20 bp, Artificial Sequence
  MKO10027200_A_Kdelc1
  gRNA
tgcctctgcccaaatcgttt

SEQ ID NO: 27201 - DNA, 20 bp, Artificial Sequence
  MKO10027201_A_Kdelc1
  gRNA
gatgagcagttcacgagagt

SEQ ID NO: 27202 - DNA, 20 bp, Artificial Sequence
  MKO10027202_A_Kdelc2
  gRNA
gtcacagtactcgtggtaca

SEQ ID NO: 27203 - DNA, 20 bp, Artificial Sequence
  MKO10027203_A_Kdelc2
  gRNA
acccctcattgcttcgagtg

SEQ ID NO: 27204 - DNA, 20 bp, Artificial Sequence
  MKO10027204_A_Kdelc2
  gRNA
ccgctcgtccccaaatcttg

SEQ ID NO: 27205 - DNA, 20 bp, Artificial Sequence
  MKO10027205_A_Kdelr1
  gRNA
caaccacgacactttccggg

SEQ ID NO: 27206 - DNA, 20 bp, Artificial Sequence
  MKO10027206_A_Kdelr1
  gRNA
gacctcatcgccatcgttgc

SEQ ID NO: 27207 - DNA, 20 bp, Artificial Sequence
  MKO10027207_A_Kdelr1
  gRNA
actccacccggaaagtgtcg

SEQ ID NO: 27208 - DNA, 20 bp, Artificial Sequence
  MKO10027208_A_Kdelr2
  gRNA
tcgtgaagaccagtgcgaac

SEQ ID NO: 27209 - DNA, 20 bp, Artificial Sequence
  MKO10027209_A_Kdelr2
  gRNA
aaatcacgataccttccgag

SEQ ID NO: 27210 - DNA, 20 bp, Artificial Sequence
  MKO10027210_A_Kdelr2
  gRNA
gatctggcgcttctacttcg

SEQ ID NO: 27211 - DNA, 20 bp, Artificial Sequence
  MKO10027211_A_Kdelr3
  gRNA
gaactacagttacacgccga

SEQ ID NO: 27212 - DNA, 20 bp, Artificial Sequence
  MKO10027212_A_Kdelr3
  gRNA
ctggtaccgcctgatccagt

SEQ ID NO: 27213 - DNA, 20 bp, Artificial Sequence
  MKO10027213_A_Kdelr3
  gRNA
gctctatcggctcctctatc

SEQ ID NO: 27214 - DNA, 20 bp, Artificial Sequence
  MKO10027214_A_Kdm1a
  gRNA
tcaacttcggcatctacaag

SEQ ID NO: 27215 - DNA, 20 bp, Artificial Sequence
  MKO10027215_A_Kdm1a
  gRNA
gagtggcttcaaacgtcagc

SEQ ID NO: 27216 - DNA, 20 bp, Artificial Sequence
  MKO10027216_A_Kdm1a
  gRNA
cacagttacttagagcgcca

SEQ ID NO: 27217 - DNA, 20 bp, Artificial Sequence
  MKO10027217_A_Kdm1b
  gRNA
cggtaagtcctcgccatgtg

SEQ ID NO: 27218 - DNA, 20 bp, Artificial Sequence
  MKO10027218_A_Kdm1b
  gRNA
cagtgcacaaaacccgagtg

SEQ ID NO: 27219 - DNA, 20 bp, Artificial Sequence
  MKO10027219_A_Kdm1b
  gRNA
gccatgaacgccttggggct

SEQ ID NO: 27220 - DNA, 20 bp, Artificial Sequence
  MKO10027220_A_Kdm2a
  gRNA
atcttcatagcgacgacgca

SEQ ID NO: 27221 - DNA, 20 bp, Artificial Sequence
  MKO10027221_A_Kdm2a
  gRNA
tcatgtagggagtcgtcgga

SEQ ID NO: 27222 - DNA, 20 bp, Artificial Sequence
  MKO10027222_A_Kdm2a
  gRNA
cgtcgtcgctatgaagatga

SEQ ID NO: 27223 - DNA, 20 bp, Artificial Sequence
  MKO10027223_A_Kdm2b
  gRNA
cgcacttgcggcatcgcgtc

SEQ ID NO: 27224 - DNA, 20 bp, Artificial Sequence
  MKO10027224_A_Kdm2b
  gRNA
actctccacactccgtccgc

SEQ ID NO: 27225 - DNA, 20 bp, Artificial Sequence
  MKO10027225_A_Kdm2b
  gRNA
tacaagcaaaagcgtggccc

SEQ ID NO: 27226 - DNA, 20 bp, Artificial Sequence
  MKO10027226_A_Kdm3a
  gRNA
ttacctgtataggtttcaaa

SEQ ID NO: 27227 - DNA, 20 bp, Artificial Sequence
  MKO10027227_A_Kdm3a
  gRNA
tacaggatgttaacagtctt

SEQ ID NO: 27228 - DNA, 20 bp, Artificial Sequence
  MKO10027228_A_Kdm3a
  gRNA
ggccactgaataacttgctc

SEQ ID NO: 27229 - DNA, 20 bp, Artificial Sequence
  MKO10027229_A_Kdm3b
  gRNA
gtcaaggtctaccaacccga

SEQ ID NO: 27230 - DNA, 20 bp, Artificial Sequence
  MKO10027230_A_Kdm3b
  gRNA
ttcagcgtgaaccttaaccc

SEQ ID NO: 27231 - DNA, 20 bp, Artificial Sequence
  MKO10027231_A_Kdm3b
  gRNA
agacgtgcttgcgcttctgc

SEQ ID NO: 27232 - DNA, 20 bp, Artificial Sequence
  MKO10027232_A_Kdm4a
  gRNA
tagatcatcaatatcgtcgt

SEQ ID NO: 27233 - DNA, 20 bp, Artificial Sequence
  MKO10027233_A_Kdm4a
  gRNA
gatcttgcggaactcacgaa

SEQ ID NO: 27234 - DNA, 20 bp, Artificial Sequence
  MKO10027234_A_Kdm4a
  gRNA
cggccggctgaagaccatcc

SEQ ID NO: 27235 - DNA, 20 bp, Artificial Sequence
  MKO10027235_A_Kdm4b
  gRNA
gggcacttacatcgtcgtac

SEQ ID NO: 27236 - DNA, 20 bp, Artificial Sequence
  MKO10027236_A_Kdm4b
  gRNA
cgaatgcgggaccatcattg

SEQ ID NO: 27237 - DNA, 20 bp, Artificial Sequence
  MKO10027237_A_Kdm4b
  gRNA
atgtcatcatacgtctgccg

SEQ ID NO: 27238 - DNA, 20 bp, Artificial Sequence
  MKO10027238_A_Kdm4c
  gRNA
cgacttgaaagactagccca

SEQ ID NO: 27239 - DNA, 20 bp, Artificial Sequence
  MKO10027239_A_Kdm4c
  gRNA
tcaagtcgctttccatgctc

SEQ ID NO: 27240 - DNA, 20 bp, Artificial Sequence
  MKO10027240_A_Kdm4c
  gRNA
agctcgcctaaatacagtct

SEQ ID NO: 27241 - DNA, 20 bp, Artificial Sequence
  MKO10027241_A_Kdm4d
  gRNA
acgttacttaccgtggctat

SEQ ID NO: 27242 - DNA, 20 bp, Artificial Sequence
  MKO10027242_A_Kdm4d
  gRNA
tgctttggtcacccgccggg

SEQ ID NO: 27243 - DNA, 20 bp, Artificial Sequence
  MKO10027243_A_Kdm4d
  gRNA
gaagcgtctccggcttcgcc

SEQ ID NO: 27244 - DNA, 20 bp, Artificial Sequence
  MKO10027244_A_Kdm5a
  gRNA
tctaaagtgggtagccgctt

SEQ ID NO: 27245 - DNA, 20 bp, Artificial Sequence
  MKO10027245_A_Kdm5a
  gRNA
aacaagacgagttaagtctc

SEQ ID NO: 27246 - DNA, 20 bp, Artificial Sequence
  MKO10027246_A_Kdm5a
  gRNA
ttcattcttgttccccgctc

SEQ ID NO: 27247 - DNA, 20 bp, Artificial Sequence
  MKO10027247_A_Kdm5b
  gRNA
ttatcgacatcacaagcgaa

SEQ ID NO: 27248 - DNA, 20 bp, Artificial Sequence
  MKO10027248_A_Kdm5b
  gRNA
taacctgacctccgacacaa

SEQ ID NO: 27249 - DNA, 20 bp, Artificial Sequence
  MKO10027249_A_Kdm5b
  gRNA
tactctgaagattccccacg

SEQ ID NO: 27250 - DNA, 20 bp, Artificial Sequence
  MKO10027250_A_Kdm5c
  gRNA
caagatccgccgttctacat

SEQ ID NO: 27251 - DNA, 20 bp, Artificial Sequence
  MKO10027251_A_Kdm5c
  gRNA
aaggctgcacagactgtcga

SEQ ID NO: 27252 - DNA, 20 bp, Artificial Sequence
  MKO10027252_A_Kdm5c
  gRNA
ctggcagccaccctttgccg

SEQ ID NO: 27253 - DNA, 20 bp, Artificial Sequence
  MKO10027253_A_Kdm5d
  gRNA
gtaaatgatccgttcgtagt

SEQ ID NO: 27254 - DNA, 20 bp, Artificial Sequence
  MKO10027254_A_Kdm5d
  gRNA
ggacctttacagccttaata

SEQ ID NO: 27255 - DNA, 20 bp, Artificial Sequence
  MKO10027255_A_Kdm5d
  gRNA
ttcagttgctacagtagacg

SEQ ID NO: 27256 - DNA, 20 bp, Artificial Sequence
  MKO10027256_A_Kdm6a
  gRNA
ttggataatcttccaataag

SEQ ID NO: 27257 - DNA, 20 bp, Artificial Sequence
  MKO10027257_A_Kdm6a
  gRNA
tagcattatctgcataccag

SEQ ID NO: 27258 - DNA, 20 bp, Artificial Sequence
  MKO10027258_A_Kdm6a
  gRNA
gaaacctcacgaacccgaaa

SEQ ID NO: 27259 - DNA, 20 bp, Artificial Sequence
  MKO10027259_A_Kdm6b
  gRNA
gggattccaacttcccgtga

SEQ ID NO: 27260 - DNA, 20 bp, Artificial Sequence
  MKO10027260_A_Kdm6b
  gRNA
tggaggaagcttcgccgagc

SEQ ID NO: 27261 - DNA, 20 bp, Artificial Sequence
  MKO10027261_A_Kdm6b
  gRNA
ccggagctactgccatgaga

SEQ ID NO: 27262 - DNA, 20 bp, Artificial Sequence
  MKO10027262_A_Kdm7a
  gRNA
ttgtcttagctgtgttggcg

SEQ ID NO: 27263 - DNA, 20 bp, Artificial Sequence
  MKO10027263_A_Kdm7a
  gRNA
ccgtgtagagctgcacagtc

SEQ ID NO: 27264 - DNA, 20 bp, Artificial Sequence
  MKO10027264_A_Kdm7a
  gRNA
ctgatcacatttagcacttt

SEQ ID NO: 27265 - DNA, 20 bp, Artificial Sequence
  MKO10027265_A_Kdm8
  gRNA
tcgtagtctgcagtacatcc

SEQ ID NO: 27266 - DNA, 20 bp, Artificial Sequence
  MKO10027266_A_Kdm8
  gRNA
tggctgccgcaccgtccccg

SEQ ID NO: 27267 - DNA, 20 bp, Artificial Sequence
  MKO10027267_A_Kdm8
  gRNA
gactcacctggtcgaagagc

SEQ ID NO: 27268 - DNA, 20 bp, Artificial Sequence
  MKO10027268_A_Kdr
  gRNA
gtcccggtacgagcacttgt

SEQ ID NO: 27269 - DNA, 20 bp, Artificial Sequence
  MKO10027269_A_Kdr
  gRNA
tgatgtacacgatgccatgc

SEQ ID NO: 27270 - DNA, 20 bp, Artificial Sequence
  MKO10027270_A_Kdr
  gRNA
caacccttcagattacttgc

SEQ ID NO: 27271 - DNA, 20 bp, Artificial Sequence
  MKO10027271_A_Kdsr
  gRNA
aactctggttgcacgaaatg

SEQ ID NO: 27272 - DNA, 20 bp, Artificial Sequence
  MKO10027272_A_Kdsr
  gRNA
cagttgaccagcatgtccac

SEQ ID NO: 27273 - DNA, 20 bp, Artificial Sequence
  MKO10027273_A_Kdsr
  gRNA
gtctcaagactataaccaag

SEQ ID NO: 27274 - DNA, 20 bp, Artificial Sequence
  MKO10027274_A_Keap1
  gRNA
agcgtgccacgcaaccgcat

SEQ ID NO: 27275 - DNA, 20 bp, Artificial Sequence
  MKO10027275_A_Keap1
  gRNA
aacccccgactgcgtagatg

SEQ ID NO: 27276 - DNA, 20 bp, Artificial Sequence
  MKO10027276_A_Keap1
  gRNA
gaggcatcaccgtagtgcgc

SEQ ID NO: 27277 - DNA, 20 bp, Artificial Sequence
  MKO10027277_A_Keg1
  gRNA
tactgttgttattcgacccc

SEQ ID NO: 27278 - DNA, 20 bp, Artificial Sequence
  MKO10027278_A_Keg1
  gRNA
tacagcgttcaatgaacttc

SEQ ID NO: 27279 - DNA, 20 bp, Artificial Sequence
  MKO10027279_A_Keg1
  gRNA
gaggcaccttgcctaagtac

SEQ ID NO: 27280 - DNA, 20 bp, Artificial Sequence
  MKO10027280_A_Kel
  gRNA
cgtagataggctcggaagaa

SEQ ID NO: 27281 - DNA, 20 bp, Artificial Sequence
  MKO10027281_A_Kel
  gRNA
tccacatacaccaatcatcc

SEQ ID NO: 27282 - DNA, 20 bp, Artificial Sequence
  MKO10027282_A_Kel
  gRNA
ccatgcaggagttataaaat

SEQ ID NO: 27283 - DNA, 20 bp, Artificial Sequence
  MKO10027283_A_Kera
  gRNA
gccaccgatcccgatagatt

SEQ ID NO: 27284 - DNA, 20 bp, Artificial Sequence
  MKO10027284_A_Kera
  gRNA
gacacatcaaaacccctcga

SEQ ID NO: 27285 - DNA, 20 bp, Artificial Sequence
  MKO10027285_A_Kera
  gRNA
tttcattcccatccagacgc

SEQ ID NO: 27286 - DNA, 20 bp, Artificial Sequence
  MKO10027286_A_Khdc1a
  gRNA
tcttccatgtcaaacaccag

SEQ ID NO: 27287 - DNA, 20 bp, Artificial Sequence
  MKO10027287_A_Khdc1a
  gRNA
caggaatgagtgacctccgc

SEQ ID NO: 27288 - DNA, 20 bp, Artificial Sequence
  MKO10027288_A_Khdc1a
  gRNA
acccacagccttgccttaag

SEQ ID NO: 27289 - DNA, 20 bp, Artificial Sequence
  MKO10027289_A_Khdc1b
  gRNA
agttgatgctactccatatc

SEQ ID NO: 27290 - DNA, 20 bp, Artificial Sequence
  MKO10027290_A_Khdc1b
  gRNA
gatccgtcagaggatgactc

SEQ ID NO: 27291 - DNA, 20 bp, Artificial Sequence
  MKO10027291_A_Khdc1b
  gRNA
aacactctcgataaaattaa

SEQ ID NO: 27292 - DNA, 20 bp, Artificial Sequence
  MKO10027292_A_Khdc1c
  gRNA
tcttccatgtcaaacaccag

SEQ ID NO: 27293 - DNA, 20 bp, Artificial Sequence
  MKO10027293_A_Khdc1c
  gRNA
caggaatgagtgacctccgc

SEQ ID NO: 27294 - DNA, 20 bp, Artificial Sequence
  MKO10027294_A_Khdc1c
  gRNA
acccacagccttgccttaag

SEQ ID NO: 27295 - DNA, 20 bp, Artificial Sequence
  MKO10027295_A_Khdc3
  gRNA
tcggaccgccgcctttccga

SEQ ID NO: 27296 - DNA, 20 bp, Artificial Sequence
  MKO10027296_A_Khdc3
  gRNA
tggagttgagcgtcgtcgta

SEQ ID NO: 27297 - DNA, 20 bp, Artificial Sequence
  MKO10027297_A_Khdc3
  gRNA
tcaacgtcccttcggaaagg

SEQ ID NO: 27298 - DNA, 20 bp, Artificial Sequence
  MKO10027298_A_Khdrbs1
  gRNA
cctgaaccctctcgtggtcg

SEQ ID NO: 27299 - DNA, 20 bp, Artificial Sequence
  MKO10027299_A_Khdrbs1
  gRNA
agataccccacgaccacgag

SEQ ID NO: 27300 - DNA, 20 bp, Artificial Sequence
  MKO10027300_A_Khdrbs1
  gRNA
ataggaggaagagttgcgca

SEQ ID NO: 27301 - DNA, 20 bp, Artificial Sequence
  MKO10027301_A_Khdrbs2
  gRNA
ttcacggatgagtcatgcct

SEQ ID NO: 27302 - DNA, 20 bp, Artificial Sequence
  MKO10027302_A_Khdrbs2
  gRNA
tacctttgtcttatctcgca

SEQ ID NO: 27303 - DNA, 20 bp, Artificial Sequence
  MKO10027303_A_Khdrbs2
  gRNA
catccgtgaataagcttccc

SEQ ID NO: 27304 - DNA, 20 bp, Artificial Sequence
  MKO10027304_A_Khdrbs3
  gRNA
gtagatttccctcgaaccac

SEQ ID NO: 27305 - DNA, 20 bp, Artificial Sequence
  MKO10027305_A_Khdrbs3
  gRNA
aaatctactttgcgtacgag

SEQ ID NO: 27306 - DNA, 20 bp, Artificial Sequence
  MKO10027306_A_Khdrbs3
  gRNA
tttcttcttgtaagcgcttc

SEQ ID NO: 27307 - DNA, 20 bp, Artificial Sequence
  MKO10027307_A_Khk
  gRNA
tctaaacttactcggcaacg

SEQ ID NO: 27308 - DNA, 20 bp, Artificial Sequence
  MKO10027308_A_Khk
  gRNA
ttacgtgtcgtagagtataa

SEQ ID NO: 27309 - DNA, 20 bp, Artificial Sequence
  MKO10027309_A_Khk
  gRNA
ttgagaaggtcgatctgacc

SEQ ID NO: 27310 - DNA, 20 bp, Artificial Sequence
  MKO10027310_A_Khnyn
  gRNA
agcgagagcaataccccgac

SEQ ID NO: 27311 - DNA, 20 bp, Artificial Sequence
  MKO10027311_A_Khnyn
  gRNA
cctaaccgaggcgtttgtga

SEQ ID NO: 27312 - DNA, 20 bp, Artificial Sequence
  MKO10027312_A_Khnyn
  gRNA
gactggcacgcagcgtttcc

SEQ ID NO: 27313 - DNA, 20 bp, Artificial Sequence
  MKO10027313_A_Khsrp
  gRNA
cccagcgattggttctcaac

SEQ ID NO: 27314 - DNA, 20 bp, Artificial Sequence
  MKO10027314_A_Khsrp
  gRNA
agcagcatcacctccgattt

SEQ ID NO: 27315 - DNA, 20 bp, Artificial Sequence
  MKO10027315_A_Khsrp
  gRNA
ccgcttacctggggggagga

SEQ ID NO: 27316 - DNA, 20 bp, Artificial Sequence
  MKO10027316_A_Kidins220
  gRNA
caatctggagcaccgtgaca

SEQ ID NO: 27317 - DNA, 20 bp, Artificial Sequence
  MKO10027317_A_Kidins220
  gRNA
ctgcccgctgcccagatgat

SEQ ID NO: 27318 - DNA, 20 bp, Artificial Sequence
  MKO10027318_A_Kidins220
  gRNA
acagtgtctacccaatcatc

SEQ ID NO: 27319 - DNA, 20 bp, Artificial Sequence
  MKO10027319_A_Kif11
  gRNA
ccctgagttaccttgttccg

SEQ ID NO: 27320 - DNA, 20 bp, Artificial Sequence
  MKO10027320_A_Kif11
  gRNA
cactgacttctttccgtgca

SEQ ID NO: 27321 - DNA, 20 bp, Artificial Sequence
  MKO10027321_A_Kif11
  gRNA
ttccgctctgccagattaaa

SEQ ID NO: 27322 - DNA, 20 bp, Artificial Sequence
  MKO10027322_A_Kif12
  gRNA
cgtgcgcgccccgtccagta

SEQ ID NO: 27323 - DNA, 20 bp, Artificial Sequence
  MKO10027323_A_Kif12
  gRNA
gccaaagcggaacgccacat

SEQ ID NO: 27324 - DNA, 20 bp, Artificial Sequence
  MKO10027324_A_Kif12
  gRNA
tctgactggacctcctccgc

SEQ ID NO: 27325 - DNA, 20 bp, Artificial Sequence
  MKO10027325_A_Kif13a
  gRNA
tgttgtgttcgattcatcca

SEQ ID NO: 27326 - DNA, 20 bp, Artificial Sequence
  MKO10027326_A_Kif13a
  gRNA
ggaactgaacaccaagtgcg

SEQ ID NO: 27327 - DNA, 20 bp, Artificial Sequence
  MKO10027327_A_Kif13a
  gRNA
tcgaacacaacaaaatatgc

SEQ ID NO: 27328 - DNA, 20 bp, Artificial Sequence
  MKO10027328_A_Kif13b
  gRNA
aacttaccgggcatctcctt

SEQ ID NO: 27329 - DNA, 20 bp, Artificial Sequence
  MKO10027329_A_Kif13b
  gRNA
tctgtccgagagaagtatgc

SEQ ID NO: 27330 - DNA, 20 bp, Artificial Sequence
  MKO10027330_A_Kif13b
  gRNA
ttcaacatccaccacacatt

SEQ ID NO: 27331 - DNA, 20 bp, Artificial Sequence
  MKO10027331_A_Kif14
  gRNA
gtttctggaccgtatgttga

SEQ ID NO: 27332 - DNA, 20 bp, Artificial Sequence
  MKO10027332_A_Kif14
  gRNA
tctccccccagctgcgcgcg

SEQ ID NO: 27333 - DNA, 20 bp, Artificial Sequence
  MKO10027333_A_Kif14
  gRNA
atggggcttaatgaagaacc

SEQ ID NO: 27334 - DNA, 20 bp, Artificial Sequence
  MKO10027334_A_Kif15
  gRNA
ctgctctccatccgctgatc

SEQ ID NO: 27335 - DNA, 20 bp, Artificial Sequence
  MKO10027335_A_Kif15
  gRNA
gcgaattcgtcctgctgaag

SEQ ID NO: 27336 - DNA, 20 bp, Artificial Sequence
  MKO10027336_A_Kif15
  gRNA
tgggaagacatttactatga

SEQ ID NO: 27337 - DNA, 20 bp, Artificial Sequence
  MKO10027337_A_Kif16b
  gRNA
gcgattctggcttaatacct

SEQ ID NO: 27338 - DNA, 20 bp, Artificial Sequence
  MKO10027338_A_Kif16b
  gRNA
aagagagcttcacagatccg

SEQ ID NO: 27339 - DNA, 20 bp, Artificial Sequence
  MKO10027339_A_Kif16b
  gRNA
aacgacaatcacaaacttaa

SEQ ID NO: 27340 - DNA, 20 bp, Artificial Sequence
  MKO10027340_A_Kif17
  gRNA
caacgagatcgcctacccgc

SEQ ID NO: 27341 - DNA, 20 bp, Artificial Sequence
  MKO10027341_A_Kif17
  gRNA
gtgacggtggacagtgcgcg

SEQ ID NO: 27342 - DNA, 20 bp, Artificial Sequence
  MKO10027342_A_Kif17
  gRNA
gcacgtgtttgagagcgttc

SEQ ID NO: 27343 - DNA, 20 bp, Artificial Sequence
  MKO10027343_A_Kif18a
  gRNA
atgtcactcatcgacctcgc

SEQ ID NO: 27344 - DNA, 20 bp, Artificial Sequence
  MKO10027344_A_Kif18a
  gRNA
attgtcaggtacatgacccc

SEQ ID NO: 27345 - DNA, 20 bp, Artificial Sequence
  MKO10027345_A_Kif18a
  gRNA
gaggtcgatgagtgacattt

SEQ ID NO: 27346 - DNA, 20 bp, Artificial Sequence
  MKO10027346_A_Kif18b
  gRNA
ggatgtggcgttggcatccg

SEQ ID NO: 27347 - DNA, 20 bp, Artificial Sequence
  MKO10027347_A_Kif18b
  gRNA
caagatgagcttgattgacc

SEQ ID NO: 27348 - DNA, 20 bp, Artificial Sequence
  MKO10027348_A_Kif18b
  gRNA
ctcccgcagccgctctcctt

SEQ ID NO: 27349 - DNA, 20 bp, Artificial Sequence
  MKO10027349_A_Kif19a
  gRNA
tgacctgttccgagccatcg

SEQ ID NO: 27350 - DNA, 20 bp, Artificial Sequence
  MKO10027350_A_Kif19a
  gRNA
ctgagatgacgccctcgatg

SEQ ID NO: 27351 - DNA, 20 bp, Artificial Sequence
  MKO10027351_A_Kif19a
  gRNA
gaagtcatacctctttgacg

SEQ ID NO: 27352 - DNA, 20 bp, Artificial Sequence
  MKO10027352_A_Kif1a
  gRNA
tgtcgttgattcgagagaag

SEQ ID NO: 27353 - DNA, 20 bp, Artificial Sequence
  MKO10027353_A_Kif1a
  gRNA
cgacaacatgtcctactctg

SEQ ID NO: 27354 - DNA, 20 bp, Artificial Sequence
  MKO10027354_A_Kif1a
  gRNA
gccggcccccgtctgcccat

SEQ ID NO: 27355 - DNA, 20 bp, Artificial Sequence
  MKO10027355_A_Kif1b
  gRNA
tcgaacagcgaccttcacag

SEQ ID NO: 27356 - DNA, 20 bp, Artificial Sequence
  MKO10027356_A_Kif1b
  gRNA
acgattctgcgatgcaaaac

SEQ ID NO: 27357 - DNA, 20 bp, Artificial Sequence
  MKO10027357_A_Kif1b
  gRNA
gctggtctctcgagaattga

SEQ ID NO: 27358 - DNA, 20 bp, Artificial Sequence
  MKO10027358_A_Kif1c
  gRNA
ttgcacgtacgggcctagga

SEQ ID NO: 27359 - DNA, 20 bp, Artificial Sequence
  MKO10027359_A_Kif1c
  gRNA
cgtgcaagacctgtctaaac

SEQ ID NO: 27360 - DNA, 20 bp, Artificial Sequence
  MKO10027360_A_Kif1c
  gRNA
cgaccagtaagaatagtcga

SEQ ID NO: 27361 - DNA, 20 bp, Artificial Sequence
  MKO10027361_A_Kif20a
  gRNA
gtctagccagattacttcat

SEQ ID NO: 27362 - DNA, 20 bp, Artificial Sequence
  MKO10027362_A_Kif20a
  gRNA
gggaaaacgtacaccattca

SEQ ID NO: 27363 - DNA, 20 bp, Artificial Sequence
  MKO10027363_A_Kif20a
  gRNA
ttggaggcctccaattagca

SEQ ID NO: 27364 - DNA, 20 bp, Artificial Sequence
  MKO10027364_A_Kif20b
  gRNA
gtcgactgtgtccttctaag

SEQ ID NO: 27365 - DNA, 20 bp, Artificial Sequence
  MKO10027365_A_Kif20b
  gRNA
agtcgactgatcttcacata

SEQ ID NO: 27366 - DNA, 20 bp, Artificial Sequence
  MKO10027366_A_Kif20b
  gRNA
tacattgctgcgacaaatta

SEQ ID NO: 27367 - DNA, 20 bp, Artificial Sequence
  MKO10027367_A_Kif21a
  gRNA
catgatgttcacgtcaaatc

SEQ ID NO: 27368 - DNA, 20 bp, Artificial Sequence
  MKO10027368_A_Kif21a
  gRNA
cctttgttcagaccggagct

SEQ ID NO: 27369 - DNA, 20 bp, Artificial Sequence
  MKO10027369_A_Kif21a
  gRNA
tgcatcgaaaagctcattga

SEQ ID NO: 27370 - DNA, 20 bp, Artificial Sequence
  MKO10027370_A_Kif21b
  gRNA
gcatcgacgaacgcaagcgg

SEQ ID NO: 27371 - DNA, 20 bp, Artificial Sequence
  MKO10027371_A_Kif21b
  gRNA
gatccggccccagctgtcaa

SEQ ID NO: 27372 - DNA, 20 bp, Artificial Sequence
  MKO10027372_A_Kif21b
  gRNA
accccgatgcccgacaccgc

SEQ ID NO: 27373 - DNA, 20 bp, Artificial Sequence
  MKO10027373_A_Kif22
  gRNA
gtccgcctctagctcgagta

SEQ ID NO: 27374 - DNA, 20 bp, Artificial Sequence
  MKO10027374_A_Kif22
  gRNA
tgtgcggctgcgcccgttta

SEQ ID NO: 27375 - DNA, 20 bp, Artificial Sequence
  MKO10027375_A_Kif22
  gRNA
gtgatccgcgaagactgccg

SEQ ID NO: 27376 - DNA, 20 bp, Artificial Sequence
  MKO10027376_A_Kif23
  gRNA
aagatcatattcaaacaacg

SEQ ID NO: 27377 - DNA, 20 bp, Artificial Sequence
  MKO10027377_A_Kif23
  gRNA
tgatgttgtagctaatccct

SEQ ID NO: 27378 - DNA, 20 bp, Artificial Sequence
  MKO10027378_A_Kif23
  gRNA
gctatcgactcaacagaaat

SEQ ID NO: 27379 - DNA, 20 bp, Artificial Sequence
  MKO10027379_A_Kif24
  gRNA
ggtgtaagggaagtacgtcg

SEQ ID NO: 27380 - DNA, 20 bp, Artificial Sequence
  MKO10027380_A_Kif24
  gRNA
cgtacttcccttacacctaa

SEQ ID NO: 27381 - DNA, 20 bp, Artificial Sequence
  MKO10027381_A_Kif24
  gRNA
cagtgtggagctactcctac

SEQ ID NO: 27382 - DNA, 20 bp, Artificial Sequence
  MKO10027382_A_Kif26a
  gRNA
ttgcgcggggatacctcaag

SEQ ID NO: 27383 - DNA, 20 bp, Artificial Sequence
  MKO10027383_A_Kif26a
  gRNA
ctgaacgtatgtcgaaggcg

SEQ ID NO: 27384 - DNA, 20 bp, Artificial Sequence
  MKO10027384_A_Kif26a
  gRNA
ccactgccacacgaagctcg

SEQ ID NO: 27385 - DNA, 20 bp, Artificial Sequence
  MKO10027385_A_Kif26b
  gRNA
cgagaactgtaacgcccgct

SEQ ID NO: 27386 - DNA, 20 bp, Artificial Sequence
  MKO10027386_A_Kif26b
  gRNA
agttctcgcaccagacgccg

SEQ ID NO: 27387 - DNA, 20 bp, Artificial Sequence
  MKO10027387_A_Kif26b
  gRNA
ggttaccctgtacccctacc

SEQ ID NO: 27388 - DNA, 20 bp, Artificial Sequence
  MKO10027388_A_Kif27
  gRNA
ggaaacgtaataagcgccct

SEQ ID NO: 27389 - DNA, 20 bp, Artificial Sequence
  MKO10027389_A_Kif27
  gRNA
tactggagtgctcgttcatc

SEQ ID NO: 27390 - DNA, 20 bp, Artificial Sequence
  MKO10027390_A_Kif27
  gRNA
tgctctggccgccgaccaag

SEQ ID NO: 27391 - DNA, 20 bp, Artificial Sequence
  MKO10027391_A_Kif2a
  gRNA
cctcccccgagagataatag

SEQ ID NO: 27392 - DNA, 20 bp, Artificial Sequence
  MKO10027392_A_Kif2a
  gRNA
tctgtagaaccggcggactg

SEQ ID NO: 27393 - DNA, 20 bp, Artificial Sequence
  MKO10027393_A_Kif2a
  gRNA
tggttggttcagcacgcgca

SEQ ID NO: 27394 - DNA, 20 bp, Artificial Sequence
  MKO10027394_A_Kif2b
  gRNA
tgtcgcgatcatgcacgtat

SEQ ID NO: 27395 - DNA, 20 bp, Artificial Sequence
  MKO10027395_A_Kif2b
  gRNA
gaatccgtttgtcactgcgc

SEQ ID NO: 27396 - DNA, 20 bp, Artificial Sequence
  MKO10027396_A_Kif2b
  gRNA
tgaccacgccttcgacgaca

SEQ ID NO: 27397 - DNA, 20 bp, Artificial Sequence
  MKO10027397_A_Kif2c
  gRNA
tgcgagtggagcggcttcga

SEQ ID NO: 27398 - DNA, 20 bp, Artificial Sequence
  MKO10027398_A_Kif2c
  gRNA
gcttcttcccttacgaccga

SEQ ID NO: 27399 - DNA, 20 bp, Artificial Sequence
  MKO10027399_A_Kif2c
  gRNA
cagactgtccttcggtcgta

SEQ ID NO: 27400 - DNA, 20 bp, Artificial Sequence
  MKO10027400_A_Kif3a
  gRNA
aaggcgttcgagcagtaccg

SEQ ID NO: 27401 - DNA, 20 bp, Artificial Sequence
  MKO10027401_A_Kif3a
  gRNA
cgttggaggaatcggtctta

SEQ ID NO: 27402 - DNA, 20 bp, Artificial Sequence
  MKO10027402_A_Kif3a
  gRNA
ccgtcagcgtggatgaaatg

SEQ ID NO: 27403 - DNA, 20 bp, Artificial Sequence
  MKO10027403_A_Kif3b
  gRNA
acgccaggagatcgcagagc

SEQ ID NO: 27404 - DNA, 20 bp, Artificial Sequence
  MKO10027404_A_Kif3b
  gRNA
gtcgtggatctcggccttca

SEQ ID NO: 27405 - DNA, 20 bp, Artificial Sequence
  MKO10027405_A_Kif3b
  gRNA
acttactccagtctggttat

SEQ ID NO: 27406 - DNA, 20 bp, Artificial Sequence
  MKO10027406_A_Kif3c
  gRNA
cgcggatgtactcttcgtgt

SEQ ID NO: 27407 - DNA, 20 bp, Artificial Sequence
  MKO10027407_A_Kif3c
  gRNA
tgccctagaaacgccgtgaa

SEQ ID NO: 27408 - DNA, 20 bp, Artificial Sequence
  MKO10027408_A_Kif3c
  gRNA
acgaagagtacatccgcgtg

SEQ ID NO: 27409 - DNA, 20 bp, Artificial Sequence
  MKO10027409_A_Kif4
  gRNA
gaagagcagttgtattaccc

SEQ ID NO: 27410 - DNA, 20 bp, Artificial Sequence
  MKO10027410_A_Kif4
  gRNA
gttgttaccctgctctagac

SEQ ID NO: 27411 - DNA, 20 bp, Artificial Sequence
  MKO10027411_A_Kif4
  gRNA
tctcacgagatgaacataga

SEQ ID NO: 27412 - DNA, 20 bp, Artificial Sequence
  MKO10027412_A_Kif5a
  gRNA
tgaagatgtctcgagcgatc

SEQ ID NO: 27413 - DNA, 20 bp, Artificial Sequence
  MKO10027413_A_Kif5a
  gRNA
atcttacttcgagatttacc

SEQ ID NO: 27414 - DNA, 20 bp, Artificial Sequence
  MKO10027414_A_Kif5a
  gRNA
aagacgcggtcaaagacata

SEQ ID NO: 27415 - DNA, 20 bp, Artificial Sequence
  MKO10027415_A_Kif5b
  gRNA
atctgggaagacccacacga

SEQ ID NO: 27416 - DNA, 20 bp, Artificial Sequence
  MKO10027416_A_Kif5b
  gRNA
gctcttgagatgtgcttgac

SEQ ID NO: 27417 - DNA, 20 bp, Artificial Sequence
  MKO10027417_A_Kif5b
  gRNA
aacacacgatcaaaggcata

SEQ ID NO: 27418 - DNA, 20 bp, Artificial Sequence
  MKO10027418_A_Kif5c
  gRNA
atcaggaaaaactcatacca

SEQ ID NO: 27419 - DNA, 20 bp, Artificial Sequence
  MKO10027419_A_Kif5c
  gRNA
agcactcggtcaaagacata

SEQ ID NO: 27420 - DNA, 20 bp, Artificial Sequence
  MKO10027420_A_Kif5c
  gRNA
gtccaagtagatctcaaaat

SEQ ID NO: 27421 - DNA, 20 bp, Artificial Sequence
  MKO10027421_A_Kif6
  gRNA
ttgccaaaccagtcgccgag

SEQ ID NO: 27422 - DNA, 20 bp, Artificial Sequence
  MKO10027422_A_Kif6
  gRNA
caatcctacctctcggcgac

SEQ ID NO: 27423 - DNA, 20 bp, Artificial Sequence
  MKO10027423_A_Kif6
  gRNA
cgtctgcccatatgcgaaga

SEQ ID NO: 27424 - DNA, 20 bp, Artificial Sequence
  MKO10027424_A_Kif7
  gRNA
gcgctgccgcccgcaaagtg

SEQ ID NO: 27425 - DNA, 20 bp, Artificial Sequence
  MKO10027425_A_Kif7
  gRNA
agcgctttcgatgccgctgt

SEQ ID NO: 27426 - DNA, 20 bp, Artificial Sequence
  MKO10027426_A_Kif7
  gRNA
cgcttgcctcgacccgccgc

SEQ ID NO: 27427 - DNA, 20 bp, Artificial Sequence
  MKO10027427_A_Kif9
  gRNA
ttcaagcgtttgttcgagtc

SEQ ID NO: 27428 - DNA, 20 bp, Artificial Sequence
  MKO10027428_A_Kif9
  gRNA
acggactgtgatggcgtgcg

SEQ ID NO: 27429 - DNA, 20 bp, Artificial Sequence
  MKO10027429_A_Kif9
  gRNA
ccacgtagggcagagtggac

SEQ ID NO: 27430 - DNA, 20 bp, Artificial Sequence
  MKO10027430_A_Kifap3
  gRNA
gcagaaccccgaaccttatc

SEQ ID NO: 27431 - DNA, 20 bp, Artificial Sequence
  MKO10027431_A_Kifap3
  gRNA
gaaccgccgagactcattgc

SEQ ID NO: 27432 - DNA, 20 bp, Artificial Sequence
  MKO10027432_A_Kifap3
  gRNA
tctgtttcagattgacgaag

SEQ ID NO: 27433 - DNA, 20 bp, Artificial Sequence
  MKO10027433_A_Kifc1
  gRNA
tcaacagaggccacctttgt

SEQ ID NO: 27434 - DNA, 20 bp, Artificial Sequence
  MKO10027434_A_Kifc1
  gRNA
gagtgcccctgtcagcaagc

SEQ ID NO: 27435 - DNA, 20 bp, Artificial Sequence
  MKO10027435_A_Kifc1
  gRNA
cctcgtgggtgctctgctat

SEQ ID NO: 27436 - DNA, 20 bp, Artificial Sequence
  MKO10027436_A_Kifc2
  gRNA
ctgcgggacgactcctgacc

SEQ ID NO: 27437 - DNA, 20 bp, Artificial Sequence
  MKO10027437_A_Kifc2
  gRNA
gctccgtgtccatgccagta

SEQ ID NO: 27438 - DNA, 20 bp, Artificial Sequence
  MKO10027438_A_Kifc2
  gRNA
agaaaagcggcggccaacct

SEQ ID NO: 27439 - DNA, 20 bp, Artificial Sequence
  MKO10027439_A_Kifc3
  gRNA
tgcgcacctgagcccgcaac

SEQ ID NO: 27440 - DNA, 20 bp, Artificial Sequence
  MKO10027440_A_Kifc3
  gRNA
gcgctgtgaggtcgaactgc

SEQ ID NO: 27441 - DNA, 20 bp, Artificial Sequence
  MKO10027441_A_Kifc3
  gRNA
tccgggtctgggactcgctg

SEQ ID NO: 27442 - DNA, 20 bp, Artificial Sequence
  MKO10027442_A_Kifc5b
  gRNA
cacgtactgccaggcttcgc

SEQ ID NO: 27443 - DNA, 20 bp, Artificial Sequence
  MKO10027443_A_Kifc5b
  gRNA
cccgctgctcctgcgaagcc

SEQ ID NO: 27444 - DNA, 20 bp, Artificial Sequence
  MKO10027444_A_Kifc5b
  gRNA
tctggtcaggacccctcttg

SEQ ID NO: 27445 - DNA, 20 bp, Artificial Sequence
  MKO10027445_A_Kin
  gRNA
gccgacttcttcttcttcgc

SEQ ID NO: 27446 - DNA, 20 bp, Artificial Sequence
  MKO10027446_A_Kin
  gRNA
ggaccgcacggacagacgcc

SEQ ID NO: 27447 - DNA, 20 bp, Artificial Sequence
  MKO10027447_A_Kin
  gRNA
cactgaccgactttaccaag

SEQ ID NO: 27448 - DNA, 20 bp, Artificial Sequence
  MKO10027448_A_Kir3dl1
  gRNA
cataacttggccaggcagat

SEQ ID NO: 27449 - DNA, 20 bp, Artificial Sequence
  MKO10027449_A_Kir3dl1
  gRNA
gaaggggtgcctcggggaca

SEQ ID NO: 27450 - DNA, 20 bp, Artificial Sequence
  MKO10027450_A_Kir3dl1
  gRNA
gcaggcatcccctgtccccg

SEQ ID NO: 27451 - DNA, 20 bp, Artificial Sequence
  MKO10027451_A_Kir3dl2
  gRNA
tgtcatgggacctattgagt

SEQ ID NO: 27452 - DNA, 20 bp, Artificial Sequence
  MKO10027452_A_Kir3dl2
  gRNA
cataacttggccaggcatat

SEQ ID NO: 27453 - DNA, 20 bp, Artificial Sequence
  MKO10027453_A_Kir3dl2
  gRNA
cattccctcctgaattcacc

SEQ ID NO: 27454 - DNA, 20 bp, Artificial Sequence
  MKO10027454_A_Kirrel2
  gRNA
aattccccgatatccagtac

SEQ ID NO: 27455 - DNA, 20 bp, Artificial Sequence
  MKO10027455_A_Kirrel2
  gRNA
tgaatccccacgactccgac

SEQ ID NO: 27456 - DNA, 20 bp, Artificial Sequence
  MKO10027456_A_Kirrel2
  gRNA
cctgtacgcgcccagagcgc

SEQ ID NO: 27457 - DNA, 20 bp, Artificial Sequence
  MKO10027457_A_Kirrel3
  gRNA
tgagggggtcccctgcccga

SEQ ID NO: 27458 - DNA, 20 bp, Artificial Sequence
  MKO10027458_A_Kirrel3
  gRNA
tgatgccgtgtatgagtgcc

SEQ ID NO: 27459 - DNA, 20 bp, Artificial Sequence
  MKO10027459_A_Kirrel3
  gRNA
ccctgcacgcctcaccgtcc

SEQ ID NO: 27460 - DNA, 20 bp, Artificial Sequence
  MKO10027460_A_Kirrel
  gRNA
tactgcgacaggtgaatacg

SEQ ID NO: 27461 - DNA, 20 bp, Artificial Sequence
  MKO10027461_A_Kirrel
  gRNA
gtcgtgggctctgcggatgc

SEQ ID NO: 27462 - DNA, 20 bp, Artificial Sequence
  MKO10027462_A_Kirrel
  gRNA
cattaaatgctctgcacgtg

SEQ ID NO: 27463 - DNA, 20 bp, Artificial Sequence
  MKO10027463_A_Kiss1r
  gRNA
tcgaagctatgccgcctacg

SEQ ID NO: 27464 - DNA, 20 bp, Artificial Sequence
  MKO10027464_A_Kiss1r
  gRNA
agcccagatcttgaccgcgt

SEQ ID NO: 27465 - DNA, 20 bp, Artificial Sequence
  MKO10027465_A_Kiss1r
  gRNA
cggcggtgaagtgcacgcag

SEQ ID NO: 27466 - DNA, 20 bp, Artificial Sequence
  MKO10027466_A_Kiss1
  gRNA
gtcgccatgcccgccggttg

SEQ ID NO: 27467 - DNA, 20 bp, Artificial Sequence
  MKO10027467_A_Kiss1
  gRNA
gcgcagggatcaggcgactg

SEQ ID NO: 27468 - DNA, 20 bp, Artificial Sequence
  MKO10027468_A_Kiss1
  gRNA
ctcctctgtgtcgccaccta

SEQ ID NO: 27469 - DNA, 20 bp, Artificial Sequence
  MKO10027469_A_Kitl
  gRNA
ggatgacctcgtgttatgca

SEQ ID NO: 27470 - DNA, 20 bp, Artificial Sequence
  MKO10027470_A_Kitl
  gRNA
actcagcttgactactcttc

SEQ ID NO: 27471 - DNA, 20 bp, Artificial Sequence
  MKO10027471_A_Kitl
  gRNA
ataaccctcaactatgtcgc

SEQ ID NO: 27472 - DNA, 20 bp, Artificial Sequence
  MKO10027472_A_Kit
  gRNA
acgtgaagcgcgcctaccac

SEQ ID NO: 27473 - DNA, 20 bp, Artificial Sequence
  MKO10027473_A_Kit
  gRNA
acacgtaaatagaactcgtg

SEQ ID NO: 27474 - DNA, 20 bp, Artificial Sequence
  MKO10027474_A_Kit
  gRNA
gatcaatgcacgtcaggctg

SEQ ID NO: 27475 - DNA, 20 bp, Artificial Sequence
  MKO10027475_A_Klb
  gRNA
ggtaggtgtcattactcgtg

SEQ ID NO: 27476 - DNA, 20 bp, Artificial Sequence
  MKO10027476_A_Klb
  gRNA
cgactatccatcggttatga

SEQ ID NO: 27477 - DNA, 20 bp, Artificial Sequence
  MKO10027477_A_Klb
  gRNA
ccgacccttcatgtctggcg

SEQ ID NO: 27478 - DNA, 20 bp, Artificial Sequence
  MKO10027478_A_Klc1
  gRNA
gatctcgtagccgccctgct

SEQ ID NO: 27479 - DNA, 20 bp, Artificial Sequence
  MKO10027479_A_Klc1
  gRNA
acagccgtcgaacctgagcg

SEQ ID NO: 27480 - DNA, 20 bp, Artificial Sequence
  MKO10027480_A_Klc1
  gRNA
gaagcaaaagctccgcgctc

SEQ ID NO: 27481 - DNA, 20 bp, Artificial Sequence
  MKO10027481_A_Klc2
  gRNA
cttaccgataaaccagtgcc

SEQ ID NO: 27482 - DNA, 20 bp, Artificial Sequence
  MKO10027482_A_Klc2
  gRNA
agcggccttgtgaagcatac

SEQ ID NO: 27483 - DNA, 20 bp, Artificial Sequence
  MKO10027483_A_Klc2
  gRNA
cctggcattatcaagccatc

SEQ ID NO: 27484 - DNA, 20 bp, Artificial Sequence
  MKO10027484_A_Klc3
  gRNA
ttcacgacgccctgcagatc

SEQ ID NO: 27485 - DNA, 20 bp, Artificial Sequence
  MKO10027485_A_Klc3
  gRNA
ctgccacctcatagcggccc

SEQ ID NO: 27486 - DNA, 20 bp, Artificial Sequence
  MKO10027486_A_Klc3
  gRNA
ggcagttcccctatgtcgcc

SEQ ID NO: 27487 - DNA, 20 bp, Artificial Sequence
  MKO10027487_A_Klc4
  gRNA
cctggcatagccgccgcact

SEQ ID NO: 27488 - DNA, 20 bp, Artificial Sequence
  MKO10027488_A_Klc4
  gRNA
ggcaaactcacagtcgttgc

SEQ ID NO: 27489 - DNA, 20 bp, Artificial Sequence
  MKO10027489_A_Klc4
  gRNA
tgagttagtgtcccgtggtc

SEQ ID NO: 27490 - DNA, 20 bp, Artificial Sequence
  MKO10027490_A_Klf10
  gRNA
agaagcgccgaagttgagca

SEQ ID NO: 27491 - DNA, 20 bp, Artificial Sequence
  MKO10027491_A_Klf10
  gRNA
gagtagcctcaacatttccg

SEQ ID NO: 27492 - DNA, 20 bp, Artificial Sequence
  MKO10027492_A_Klf10
  gRNA
tgagggcaccgtcgtgtttg

SEQ ID NO: 27493 - DNA, 20 bp, Artificial Sequence
  MKO10027493_A_Klf11
  gRNA
acttaccgcgcgcccgtcgc

SEQ ID NO: 27494 - DNA, 20 bp, Artificial Sequence
  MKO10027494_A_Klf11
  gRNA
ggtcactccgcatgaagcgc

SEQ ID NO: 27495 - DNA, 20 bp, Artificial Sequence
  MKO10027495_A_Klf11
  gRNA
aaggtccacatgcagcgtcc

SEQ ID NO: 27496 - DNA, 20 bp, Artificial Sequence
  MKO10027496_A_Klf12
  gRNA
cgtccacaactaccccgata

SEQ ID NO: 27497 - DNA, 20 bp, Artificial Sequence
  MKO10027497_A_Klf12
  gRNA
cactattgttgtaccgctcc

SEQ ID NO: 27498 - DNA, 20 bp, Artificial Sequence
  MKO10027498_A_Klf12
  gRNA
cattcgatttcctcggaccc

SEQ ID NO: 27499 - DNA, 20 bp, Artificial Sequence
  MKO10027499_A_Klf13
  gRNA
cgtcgcggcgctcgtcaacg

SEQ ID NO: 27500 - DNA, 20 bp, Artificial Sequence
  MKO10027500_A_Klf13
  gRNA
ctttctcgcagcccgcgtag

SEQ ID NO: 27501 - DNA, 20 bp, Artificial Sequence
  MKO10027501_A_Klf13
  gRNA
caacaagaagttcgcacgct

SEQ ID NO: 27502 - DNA, 20 bp, Artificial Sequence
  MKO10027502_A_Klf14
  gRNA
cccgacatgatcgagtaccg

SEQ ID NO: 27503 - DNA, 20 bp, Artificial Sequence
  MKO10027503_A_Klf14
  gRNA
gtcgcagtcgagccaatcac

SEQ ID NO: 27504 - DNA, 20 bp, Artificial Sequence
  MKO10027504_A_Klf14
  gRNA
cgcgggtggacatagacacc

SEQ ID NO: 27505 - DNA, 20 bp, Artificial Sequence
  MKO10027505_A_Klf15
  gRNA
cgcaattcgcacaaactttg

SEQ ID NO: 27506 - DNA, 20 bp, Artificial Sequence
  MKO10027506_A_Klf15
  gRNA
cgcgaatttcttctcgcaca

SEQ ID NO: 27507 - DNA, 20 bp, Artificial Sequence
  MKO10027507_A_Klf15
  gRNA
tcacacccgagtgagatcgc

SEQ ID NO: 27508 - DNA, 20 bp, Artificial Sequence
  MKO10027508_A_Klf16
  gRNA
tcgggagccgtggtgcatcg

SEQ ID NO: 27509 - DNA, 20 bp, Artificial Sequence
  MKO10027509_A_Klf16
  gRNA
ccggaactcctgcgacgacc

SEQ ID NO: 27510 - DNA, 20 bp, Artificial Sequence
  MKO10027510_A_Klf16
  gRNA
gggtcgtccgcgatgcacca

SEQ ID NO: 27511 - DNA, 20 bp, Artificial Sequence
  MKO10027511_A_Klf17
  gRNA
gtgggcggctcacgtacgaa

SEQ ID NO: 27512 - DNA, 20 bp, Artificial Sequence
  MKO10027512_A_Klf17
  gRNA
actcacaaggtgagagcgct

SEQ ID NO: 27513 - DNA, 20 bp, Artificial Sequence
  MKO10027513_A_Klf17
  gRNA
tccgttccagtcacatgcga

SEQ ID NO: 27514 - DNA, 20 bp, Artificial Sequence
  MKO10027514_A_Klf1
  gRNA
ctcgtactccgactcgcgag

SEQ ID NO: 27515 - DNA, 20 bp, Artificial Sequence
  MKO10027515_A_Klf1
  gRNA
gacggccccgtgggattcgg

SEQ ID NO: 27516 - DNA, 20 bp, Artificial Sequence
  MKO10027516_A_Klf1
  gRNA
tcagagcgtgaaaaagcacg

SEQ ID NO: 27517 - DNA, 20 bp, Artificial Sequence
  MKO10027517_A_Klf2
  gRNA
cgcgtcctcgaaaagaccga

SEQ ID NO: 27518 - DNA, 20 bp, Artificial Sequence
  MKO10027518_A_Klf2
  gRNA
ctggccgcgaaatgaacccg

SEQ ID NO: 27519 - DNA, 20 bp, Artificial Sequence
  MKO10027519_A_Klf2
  gRNA
gataggctcgctgagcgcca

SEQ ID NO: 27520 - DNA, 20 bp, Artificial Sequence
  MKO10027520_A_Klf3
  gRNA
ccccgtcattcagcccgtcg

SEQ ID NO: 27521 - DNA, 20 bp, Artificial Sequence
  MKO10027521_A_Klf3
  gRNA
gaaggagaaccgcccgcagc

SEQ ID NO: 27522 - DNA, 20 bp, Artificial Sequence
  MKO10027522_A_Klf3
  gRNA
gctgcacgtggaagttcgct

SEQ ID NO: 27523 - DNA, 20 bp, Artificial Sequence
  MKO10027523_A_Klf4
  gRNA
tccttctccacgttcgcgtc

SEQ ID NO: 27524 - DNA, 20 bp, Artificial Sequence
  MKO10027524_A_Klf4
  gRNA
gcagcttcagctatccgatc

SEQ ID NO: 27525 - DNA, 20 bp, Artificial Sequence
  MKO10027525_A_Klf4
  gRNA
gccggacgcgaacgtggaga

SEQ ID NO: 27526 - DNA, 20 bp, Artificial Sequence
  MKO10027526_A_Klf5
  gRNA
cgcgtgtttcagatcgtctc

SEQ ID NO: 27527 - DNA, 20 bp, Artificial Sequence
  MKO10027527_A_Klf5
  gRNA
tgcgaacccggcccgcgacg

SEQ ID NO: 27528 - DNA, 20 bp, Artificial Sequence
  MKO10027528_A_Klf5
  gRNA
gaggggccgtcgactcgctc

SEQ ID NO: 27529 - DNA, 20 bp, Artificial Sequence
  MKO10027529_A_Klf6
  gRNA
cgtgcacaatctgtagttcc

SEQ ID NO: 27530 - DNA, 20 bp, Artificial Sequence
  MKO10027530_A_Klf6
  gRNA
atcagaggtaaatttggtcg

SEQ ID NO: 27531 - DNA, 20 bp, Artificial Sequence
  MKO10027531_A_Klf6
  gRNA
actacagattgtgcacgaaa

SEQ ID NO: 27532 - DNA, 20 bp, Artificial Sequence
  MKO10027532_A_Klf7
  gRNA
acccgttaaactgacagcga

SEQ ID NO: 27533 - DNA, 20 bp, Artificial Sequence
  MKO10027533_A_Klf7
  gRNA
agatccgccggggttctgtc

SEQ ID NO: 27534 - DNA, 20 bp, Artificial Sequence
  MKO10027534_A_Klf7
  gRNA
atgagctcacaaggcactac

SEQ ID NO: 27535 - DNA, 20 bp, Artificial Sequence
  MKO10027535_A_Klf8
  gRNA
atccgagcgagcaaatttcc

SEQ ID NO: 27536 - DNA, 20 bp, Artificial Sequence
  MKO10027536_A_Klf8
  gRNA
ttcacatggtgtcatgacgc

SEQ ID NO: 27537 - DNA, 20 bp, Artificial Sequence
  MKO10027537_A_Klf8
  gRNA
ttgccgtctcctccaatgag

SEQ ID NO: 27538 - DNA, 20 bp, Artificial Sequence
  MKO10027538_A_Klf9
  gRNA
ctccaaccgcgccgccgtgc

SEQ ID NO: 27539 - DNA, 20 bp, Artificial Sequence
  MKO10027539_A_Klf9
  gRNA
catgtccgcggccgcctaca

SEQ ID NO: 27540 - DNA, 20 bp, Artificial Sequence
  MKO10027540_A_Klf9
  gRNA
gatggaactcggtgtgacgc

SEQ ID NO: 27541 - DNA, 20 bp, Artificial Sequence
  MKO10027541_A_Klhdc10
  gRNA
gcagtacctgtccgtatata

SEQ ID NO: 27542 - DNA, 20 bp, Artificial Sequence
  MKO10027542_A_Klhdc10
  gRNA
ctgtacctccgaacactaac

SEQ ID NO: 27543 - DNA, 20 bp, Artificial Sequence
  MKO10027543_A_Klhdc10
  gRNA
tgaatgaagcgcctcctaac

SEQ ID NO: 27544 - DNA, 20 bp, Artificial Sequence
  MKO10027544_A_Klhdc1
  gRNA
cagcccactatcaatatcgt

SEQ ID NO: 27545 - DNA, 20 bp, Artificial Sequence
  MKO10027545_A_Klhdc1
  gRNA
agccccgcagcttcccgaca

SEQ ID NO: 27546 - DNA, 20 bp, Artificial Sequence
  MKO10027546_A_Klhdc1
  gRNA
tttggaggctatgacgacaa

SEQ ID NO: 27547 - DNA, 20 bp, Artificial Sequence
  MKO10027547_A_Klhdc2
  gRNA
gacgttcccccgtctatgtc

SEQ ID NO: 27548 - DNA, 20 bp, Artificial Sequence
  MKO10027548_A_Klhdc2
  gRNA
gctgcgctgtgtgcgtggac

SEQ ID NO: 27549 - DNA, 20 bp, Artificial Sequence
  MKO10027549_A_Klhdc2
  gRNA
tgggaaaggatcgactgcca

SEQ ID NO: 27550 - DNA, 20 bp, Artificial Sequence
  MKO10027550_A_Klhdc3
  gRNA
gtcgttccctacatgcgcta

SEQ ID NO: 27551 - DNA, 20 bp, Artificial Sequence
  MKO10027551_A_Klhdc3
  gRNA
tatccacagtgtccttgcgt

SEQ ID NO: 27552 - DNA, 20 bp, Artificial Sequence
  MKO10027552_A_Klhdc3
  gRNA
gctagggcaatcctgcacgt

SEQ ID NO: 27553 - DNA, 20 bp, Artificial Sequence
  MKO10027553_A_Klhdc4
  gRNA
ggggagtttgcatctcccga

SEQ ID NO: 27554 - DNA, 20 bp, Artificial Sequence
  MKO10027554_A_Klhdc4
  gRNA
atggtagaactgctcgccat

SEQ ID NO: 27555 - DNA, 20 bp, Artificial Sequence
  MKO10027555_A_Klhdc4
  gRNA
tacctgatgagcacagcgcc

SEQ ID NO: 27556 - DNA, 20 bp, Artificial Sequence
  MKO10027556_A_Klhdc7a
  gRNA
tgccttccagtgcgccgttg

SEQ ID NO: 27557 - DNA, 20 bp, Artificial Sequence
  MKO10027557_A_Klhdc7a
  gRNA
attctccagcgcaggttccg

SEQ ID NO: 27558 - DNA, 20 bp, Artificial Sequence
  MKO10027558_A_Klhdc7a
  gRNA
tgtaagatcagtccaaccgt

SEQ ID NO: 27559 - DNA, 20 bp, Artificial Sequence
  MKO10027559_A_Klhdc7b
  gRNA
cttgctgcatgggccgaatc

SEQ ID NO: 27560 - DNA, 20 bp, Artificial Sequence
  MKO10027560_A_Klhdc7b
  gRNA
cgtttcctcctccgttgccg

SEQ ID NO: 27561 - DNA, 20 bp, Artificial Sequence
  MKO10027561_A_Klhdc7b
  gRNA
ggaccgggctgtgccgaaac

SEQ ID NO: 27562 - DNA, 20 bp, Artificial Sequence
  MKO10027562_A_Klhdc8a
  gRNA
gcccaagttcctccggacaa

SEQ ID NO: 27563 - DNA, 20 bp, Artificial Sequence
  MKO10027563_A_Klhdc8a
  gRNA
tgcgccagggccgtctgtac

SEQ ID NO: 27564 - DNA, 20 bp, Artificial Sequence
  MKO10027564_A_Klhdc8a
  gRNA
gattatcgagtgtatgccgc

SEQ ID NO: 27565 - DNA, 20 bp, Artificial Sequence
  MKO10027565_A_Klhdc8b
  gRNA
tcctttgacaggaggccgcc

SEQ ID NO: 27566 - DNA, 20 bp, Artificial Sequence
  MKO10027566_A_Klhdc8b
  gRNA
tactggtatatgagccccgc

SEQ ID NO: 27567 - DNA, 20 bp, Artificial Sequence
  MKO10027567_A_Klhdc8b
  gRNA
ggggctcatataccagtacc

SEQ ID NO: 27568 - DNA, 20 bp, Artificial Sequence
  MKO10027568_A_Klhdc9
  gRNA
cgggtcacgtcgcttatcca

SEQ ID NO: 27569 - DNA, 20 bp, Artificial Sequence
  MKO10027569_A_Klhdc9
  gRNA
tccgccaaatagtacagcga

SEQ ID NO: 27570 - DNA, 20 bp, Artificial Sequence
  MKO10027570_A_Klhdc9
  gRNA
agaagcacgtctcgcgccac

SEQ ID NO: 27571 - DNA, 20 bp, Artificial Sequence
  MKO10027571_A_Klhl10
  gRNA
gtgcgccaagtattagccac

SEQ ID NO: 27572 - DNA, 20 bp, Artificial Sequence
  MKO10027572_A_Klhl10
  gRNA
gcgagcgccacaacactcta

SEQ ID NO: 27573 - DNA, 20 bp, Artificial Sequence
  MKO10027573_A_Klhl10
  gRNA
tatgccatcctattcgctat

SEQ ID NO: 27574 - DNA, 20 bp, Artificial Sequence
  MKO10027574_A_Klhl11
  gRNA
cgagttccgtgcccaccgct

SEQ ID NO: 27575 - DNA, 20 bp, Artificial Sequence
  MKO10027575_A_Klhl11
  gRNA
cgctcccgcccgtgtcgacg

SEQ ID NO: 27576 - DNA, 20 bp, Artificial Sequence
  MKO10027576_A_Klhl11
  gRNA
ctggtttgacatgccgtgta

SEQ ID NO: 27577 - DNA, 20 bp, Artificial Sequence
  MKO10027577_A_Klhl12
  gRNA
aatcaagtgcgacgagattc

SEQ ID NO: 27578 - DNA, 20 bp, Artificial Sequence
  MKO10027578_A_Klhl12
  gRNA
acctagccgggcccttgttc

SEQ ID NO: 27579 - DNA, 20 bp, Artificial Sequence
  MKO10027579_A_Klhl12
  gRNA
tcctcgtgctgcaccacttc

SEQ ID NO: 27580 - DNA, 20 bp, Artificial Sequence
  MKO10027580_A_Klhl13
  gRNA
gttggtggacgaaatgcagc

SEQ ID NO: 27581 - DNA, 20 bp, Artificial Sequence
  MKO10027581_A_Klhl13
  gRNA
gacaaaggcaaggcgctcga

SEQ ID NO: 27582 - DNA, 20 bp, Artificial Sequence
  MKO10027582_A_Klhl13
  gRNA
gcaatccatcaagccgaagc

SEQ ID NO: 27583 - DNA, 20 bp, Artificial Sequence
  MKO10027583_A_Klhl14
  gRNA
tgcccaccactgcgttgtag

SEQ ID NO: 27584 - DNA, 20 bp, Artificial Sequence
  MKO10027584_A_Klhl14
  gRNA
atgatccccgatttaatagt

SEQ ID NO: 27585 - DNA, 20 bp, Artificial Sequence
  MKO10027585_A_Klhl14
  gRNA
gattgcctcccggaccagac

SEQ ID NO: 27586 - DNA, 20 bp, Artificial Sequence
  MKO10027586_A_Klhl15
  gRNA
ggctgcgacatgatagacga

SEQ ID NO: 27587 - DNA, 20 bp, Artificial Sequence
  MKO10027587_A_Klhl15
  gRNA
atacctgaacactttcgaag

SEQ ID NO: 27588 - DNA, 20 bp, Artificial Sequence
  MKO10027588_A_Klhl15
  gRNA
ccccaaactacagtattccg

SEQ ID NO: 27589 - DNA, 20 bp, Artificial Sequence
  MKO10027589_A_Klhl17
  gRNA
gtgcgacatcgtcctgcatg

SEQ ID NO: 27590 - DNA, 20 bp, Artificial Sequence
  MKO10027590_A_Klhl17
  gRNA
cccgcaagccttagaccagc

SEQ ID NO: 27591 - DNA, 20 bp, Artificial Sequence
  MKO10027591_A_Klhl17
  gRNA
ctgcaaatcctcgaatgccc

SEQ ID NO: 27592 - DNA, 20 bp, Artificial Sequence
  MKO10027592_A_Klhl18
  gRNA
atttgtgacagcaccgtacc

SEQ ID NO: 27593 - DNA, 20 bp, Artificial Sequence
  MKO10027593_A_Klhl18
  gRNA
gctgcacgttcctccgagaa

SEQ ID NO: 27594 - DNA, 20 bp, Artificial Sequence
  MKO10027594_A_Klhl18
  gRNA
tggaggccgctaagacgatc

SEQ ID NO: 27595 - DNA, 20 bp, Artificial Sequence
  MKO10027595_A_Klhl1
  gRNA
atcgaaagatacctgctcat

SEQ ID NO: 27596 - DNA, 20 bp, Artificial Sequence
  MKO10027596_A_Klhl1
  gRNA
tctttcgatttccaactatc

SEQ ID NO: 27597 - DNA, 20 bp, Artificial Sequence
  MKO10027597_A_Klhl1
  gRNA
caacacacttcgaccacttg

SEQ ID NO: 27598 - DNA, 20 bp, Artificial Sequence
  MKO10027598_A_Klhl20
  gRNA
aggtgtaccaacattcgacc

SEQ ID NO: 27599 - DNA, 20 bp, Artificial Sequence
  MKO10027599_A_Klhl20
  gRNA
ccacggaaacctatccgatg

SEQ ID NO: 27600 - DNA, 20 bp, Artificial Sequence
  MKO10027600_A_Klhl20
  gRNA
tgcattagtggtcgttcttg

SEQ ID NO: 27601 - DNA, 20 bp, Artificial Sequence
  MKO10027601_A_Klhl21
  gRNA
ctgcgctacctgcgcgacga

SEQ ID NO: 27602 - DNA, 20 bp, Artificial Sequence
  MKO10027602_A_Klhl21
  gRNA
atgcgtccgcgcccgtccac

SEQ ID NO: 27603 - DNA, 20 bp, Artificial Sequence
  MKO10027603_A_Klhl21
  gRNA
gtcatagcgctccgtgctgt

SEQ ID NO: 27604 - DNA, 20 bp, Artificial Sequence
  MKO10027604_A_Klhl22
  gRNA
ttcgagctgagtcccgatgc

SEQ ID NO: 27605 - DNA, 20 bp, Artificial Sequence
  MKO10027605_A_Klhl22
  gRNA
ccatgccaggcccgtcgcac

SEQ ID NO: 27606 - DNA, 20 bp, Artificial Sequence
  MKO10027606_A_Klhl22
  gRNA
ccagtgcccttatgtaccac

SEQ ID NO: 27607 - DNA, 20 bp, Artificial Sequence
  MKO10027607_A_Klhl23
  gRNA
ggtgtgggctcgcagtaata

SEQ ID NO: 27608 - DNA, 20 bp, Artificial Sequence
  MKO10027608_A_Klhl23
  gRNA
ggctgtgtctacgcactagg

SEQ ID NO: 27609 - DNA, 20 bp, Artificial Sequence
  MKO10027609_A_Klhl23
  gRNA
gcaatctcccgagtgccatg

SEQ ID NO: 27610 - DNA, 20 bp, Artificial Sequence
  MKO10027610_A_Klhl24
  gRNA
gcccaccagctacgtagatc

SEQ ID NO: 27611 - DNA, 20 bp, Artificial Sequence
  MKO10027611_A_Klhl24
  gRNA
acgatcccgttgaagactac

SEQ ID NO: 27612 - DNA, 20 bp, Artificial Sequence
  MKO10027612_A_Klhl24
  gRNA
gttggaggctgtgaacgagt

SEQ ID NO: 27613 - DNA, 20 bp, Artificial Sequence
  MKO10027613_A_Klhl25
  gRNA
gctcctgcgtaacgtgcgac

SEQ ID NO: 27614 - DNA, 20 bp, Artificial Sequence
  MKO10027614_A_Klhl25
  gRNA
gggccagtcgcacgttacgc

SEQ ID NO: 27615 - DNA, 20 bp, Artificial Sequence
  MKO10027615_A_Klhl25
  gRNA
ttctcgcatcgtcatcaatg

SEQ ID NO: 27616 - DNA, 20 bp, Artificial Sequence
  MKO10027616_A_Klhl26
  gRNA
gcgctctgatgtagcgtccc

SEQ ID NO: 27617 - DNA, 20 bp, Artificial Sequence
  MKO10027617_A_Klhl26
  gRNA
atgatccacagcgcaatcgc

SEQ ID NO: 27618 - DNA, 20 bp, Artificial Sequence
  MKO10027618_A_Klhl26
  gRNA
gactcacctgctcgggcgct

SEQ ID NO: 27619 - DNA, 20 bp, Artificial Sequence
  MKO10027619_A_Klhl28
  gRNA
ggagcgttacgatccgagta

SEQ ID NO: 27620 - DNA, 20 bp, Artificial Sequence
  MKO10027620_A_Klhl28
  gRNA
cattgtggagtacgcctata

SEQ ID NO: 27621 - DNA, 20 bp, Artificial Sequence
  MKO10027621_A_Klhl28
  gRNA
attgaaactagcgtgcgtcc

SEQ ID NO: 27622 - DNA, 20 bp, Artificial Sequence
  MKO10027622_A_Klhl29
  gRNA
tcaccccgatgacgggggcc

SEQ ID NO: 27623 - DNA, 20 bp, Artificial Sequence
  MKO10027623_A_Klhl29
  gRNA
aacttacctttagggtgccc

SEQ ID NO: 27624 - DNA, 20 bp, Artificial Sequence
  MKO10027624_A_Klhl29
  gRNA
actcacgaccagcatccgat

SEQ ID NO: 27625 - DNA, 20 bp, Artificial Sequence
  MKO10027625_A_Klhl2
  gRNA
tgcacacctgctcgatgccg

SEQ ID NO: 27626 - DNA, 20 bp, Artificial Sequence
  MKO10027626_A_Klhl2
  gRNA
ccacgataaggacgtaagac

SEQ ID NO: 27627 - DNA, 20 bp, Artificial Sequence
  MKO10027627_A_Klhl2
  gRNA
cctgtcttacgtccttatcg

SEQ ID NO: 27628 - DNA, 20 bp, Artificial Sequence
  MKO10027628_A_Klhl30
  gRNA
cagttgggctcccgtcggcc

SEQ ID NO: 27629 - DNA, 20 bp, Artificial Sequence
  MKO10027629_A_Klhl30
  gRNA
gggagcccaactgtccgtgt

SEQ ID NO: 27630 - DNA, 20 bp, Artificial Sequence
  MKO10027630_A_Klhl30
  gRNA
gttcgtacgggccttcagca

SEQ ID NO: 27631 - DNA, 20 bp, Artificial Sequence
  MKO10027631_A_Klhl31
  gRNA
gatcacgcggccgtcggcca

SEQ ID NO: 27632 - DNA, 20 bp, Artificial Sequence
  MKO10027632_A_Klhl31
  gRNA
acgaccccgcgctcgacgcg

SEQ ID NO: 27633 - DNA, 20 bp, Artificial Sequence
  MKO10027633_A_Klhl31
  gRNA
agtgatcgcgtatgcttaca

SEQ ID NO: 27634 - DNA, 20 bp, Artificial Sequence
  MKO10027634_A_Klhl32
  gRNA
ctaggaccgccttgtgagcg

SEQ ID NO: 27635 - DNA, 20 bp, Artificial Sequence
  MKO10027635_A_Klhl32
  gRNA
gccgatgaagtaaatttacg

SEQ ID NO: 27636 - DNA, 20 bp, Artificial Sequence
  MKO10027636_A_Klhl32
  gRNA
tttgctgattcagcgccgcc

SEQ ID NO: 27637 - DNA, 20 bp, Artificial Sequence
  MKO10027637_A_Klhl33
  gRNA
gctccgtgccgaaagcgccc

SEQ ID NO: 27638 - DNA, 20 bp, Artificial Sequence
  MKO10027638_A_Klhl33
  gRNA
ggctgtagccccctagtacc

SEQ ID NO: 27639 - DNA, 20 bp, Artificial Sequence
  MKO10027639_A_Klhl33
  gRNA
tgagtccagctatcgctctt

SEQ ID NO: 27640 - DNA, 20 bp, Artificial Sequence
  MKO10027640_A_Klhl34
  gRNA
cgggtcataacggtgcacta

SEQ ID NO: 27641 - DNA, 20 bp, Artificial Sequence
  MKO10027641_A_Klhl34
  gRNA
gcgaccgcaaccgagtccac

SEQ ID NO: 27642 - DNA, 20 bp, Artificial Sequence
  MKO10027642_A_Klhl34
  gRNA
acaagaagccctcagcgcgt

SEQ ID NO: 27643 - DNA, 20 bp, Artificial Sequence
  MKO10027643_A_Klhl35
  gRNA
ctatacgtgattgggggcgc

SEQ ID NO: 27644 - DNA, 20 bp, Artificial Sequence
  MKO10027644_A_Klhl35
  gRNA
cattggcgggtgtgaccgaa

SEQ ID NO: 27645 - DNA, 20 bp, Artificial Sequence
  MKO10027645_A_Klhl35
  gRNA
cgcccccaatcacgtatagc

SEQ ID NO: 27646 - DNA, 20 bp, Artificial Sequence
  MKO10027646_A_Klhl36
  gRNA
atgacccccgccgtaaacag

SEQ ID NO: 27647 - DNA, 20 bp, Artificial Sequence
  MKO10027647_A_Klhl36
  gRNA
cagtacgaagctatcgatga

SEQ ID NO: 27648 - DNA, 20 bp, Artificial Sequence
  MKO10027648_A_Klhl36
  gRNA
gtggtcgtcactgcccccga

SEQ ID NO: 27649 - DNA, 20 bp, Artificial Sequence
  MKO10027649_A_Klhl38
  gRNA
attacctggataaggcgtac

SEQ ID NO: 27650 - DNA, 20 bp, Artificial Sequence
  MKO10027650_A_Klhl38
  gRNA
atgacagcatccgtgacgtc

SEQ ID NO: 27651 - DNA, 20 bp, Artificial Sequence
  MKO10027651_A_Klhl38
  gRNA
gggaacaagctgtacgtgac

SEQ ID NO: 27652 - DNA, 20 bp, Artificial Sequence
  MKO10027652_A_Klhl3
  gRNA
aacgtggccttatgcttcgt

SEQ ID NO: 27653 - DNA, 20 bp, Artificial Sequence
  MKO10027653_A_Klhl3
  gRNA
aaccgtcaacgctgcccaca

SEQ ID NO: 27654 - DNA, 20 bp, Artificial Sequence
  MKO10027654_A_Klhl3
  gRNA
gctgtgtgacgtgatgatcg

SEQ ID NO: 27655 - DNA, 20 bp, Artificial Sequence
  MKO10027655_A_Klhl40
  gRNA
actcagtcctgtgctacgac

SEQ ID NO: 27656 - DNA, 20 bp, Artificial Sequence
  MKO10027656_A_Klhl40
  gRNA
ccgctgccctacgccgtgta

SEQ ID NO: 27657 - DNA, 20 bp, Artificial Sequence
  MKO10027657_A_Klhl40
  gRNA
cagacagcccgatcgctctt

SEQ ID NO: 27658 - DNA, 20 bp, Artificial Sequence
  MKO10027658_A_Klhl41
  gRNA
gcgggagccctgtacgccat

SEQ ID NO: 27659 - DNA, 20 bp, Artificial Sequence
  MKO10027659_A_Klhl41
  gRNA
caaagccaccgatggcgtac

SEQ ID NO: 27660 - DNA, 20 bp, Artificial Sequence
  MKO10027660_A_Klhl41
  gRNA
gccacgccaaacatggaacg

SEQ ID NO: 27661 - DNA, 20 bp, Artificial Sequence
  MKO10027661_A_Klhl42
  gRNA
cgtagcccctgacgttcacc

SEQ ID NO: 27662 - DNA, 20 bp, Artificial Sequence
  MKO10027662_A_Klhl42
  gRNA
ttccgcgcgctctaccgctc

SEQ ID NO: 27663 - DNA, 20 bp, Artificial Sequence
  MKO10027663_A_Klhl42
  gRNA
attggcggatataccacccg

SEQ ID NO: 27664 - DNA, 20 bp, Artificial Sequence
  MKO10027664_A_Klhl4
  gRNA
ttagtgcagtatgcttatac

SEQ ID NO: 27665 - DNA, 20 bp, Artificial Sequence
  MKO10027665_A_Klhl4
  gRNA
tcgctcatttggagatgcac

SEQ ID NO: 27666 - DNA, 20 bp, Artificial Sequence
  MKO10027666_A_Klhl4
  gRNA
tgtgatgtgctacttattgc

SEQ ID NO: 27667 - DNA, 20 bp, Artificial Sequence
  MKO10027667_A_Klhl5
  gRNA
ttaattcagtacgcgtacac

SEQ ID NO: 27668 - DNA, 20 bp, Artificial Sequence
  MKO10027668_A_Klhl5
  gRNA
tgtgtacgcgtactgaatta

SEQ ID NO: 27669 - DNA, 20 bp, Artificial Sequence
  MKO10027669_A_Klhl5
  gRNA
tactgaacgcgcttctcacc

SEQ ID NO: 27670 - DNA, 20 bp, Artificial Sequence
  MKO10027670_A_Klhl6
  gRNA
gtggtaaacgcacattctcg

SEQ ID NO: 27671 - DNA, 20 bp, Artificial Sequence
  MKO10027671_A_Klhl6
  gRNA
tttcggagcgcaccaagccc

SEQ ID NO: 27672 - DNA, 20 bp, Artificial Sequence
  MKO10027672_A_Klhl6
  gRNA
cctccaggcgactgcgcctc

SEQ ID NO: 27673 - DNA, 20 bp, Artificial Sequence
  MKO10027673_A_Klhl7
  gRNA
ccccgctcaccgcgttgtcc

SEQ ID NO: 27674 - DNA, 20 bp, Artificial Sequence
  MKO10027674_A_Klhl7
  gRNA
agccaggacaacgcggtgag

SEQ ID NO: 27675 - DNA, 20 bp, Artificial Sequence
  MKO10027675_A_Klhl7
  gRNA
acctgatattattgaacaac

SEQ ID NO: 27676 - DNA, 20 bp, Artificial Sequence
  MKO10027676_A_Klhl8
  gRNA
gatctcgattaacgcctgct

SEQ ID NO: 27677 - DNA, 20 bp, Artificial Sequence
  MKO10027677_A_Klhl8
  gRNA
tcacaaccgaatagacctaa

SEQ ID NO: 27678 - DNA, 20 bp, Artificial Sequence
  MKO10027678_A_Klhl8
  gRNA
acacagtcaggacgaccccg

SEQ ID NO: 27679 - DNA, 20 bp, Artificial Sequence
  MKO10027679_A_Klhl9
  gRNA
agttacgaatgtacgacgaa

SEQ ID NO: 27680 - DNA, 20 bp, Artificial Sequence
  MKO10027680_A_Klhl9
  gRNA
cctactttgtgacgtgacgc

SEQ ID NO: 27681 - DNA, 20 bp, Artificial Sequence
  MKO10027681_A_Klhl9
  gRNA
attcgccaactcttgaccag

SEQ ID NO: 27682 - DNA, 20 bp, Artificial Sequence
  MKO10027682_A_Klk10
  gRNA
cgccacgcgcgtggacctcg

SEQ ID NO: 27683 - DNA, 20 bp, Artificial Sequence
  MKO10027683_A_Klk10
  gRNA
gatgatagtcacgctcgcac

SEQ ID NO: 27684 - DNA, 20 bp, Artificial Sequence
  MKO10027684_A_Klk10
  gRNA
tcgtgttcatctgagcgatg

SEQ ID NO: 27685 - DNA, 20 bp, Artificial Sequence
  MKO10027685_A_Klk11
  gRNA
gcccccttcagggcacgtag

SEQ ID NO: 27686 - DNA, 20 bp, Artificial Sequence
  MKO10027686_A_Klk11
  gRNA
cttgccctctttccgaacac

SEQ ID NO: 27687 - DNA, 20 bp, Artificial Sequence
  MKO10027687_A_Klk11
  gRNA
acactccttgtgttcgatga

SEQ ID NO: 27688 - DNA, 20 bp, Artificial Sequence
  MKO10027688_A_Klk12
  gRNA
caaggacaccgccacagcgc

SEQ ID NO: 27689 - DNA, 20 bp, Artificial Sequence
  MKO10027689_A_Klk12
  gRNA
cacagcccggcacgtctcat

SEQ ID NO: 27690 - DNA, 20 bp, Artificial Sequence
  MKO10027690_A_Klk12
  gRNA
ctgtctccaatgagacgtgc

SEQ ID NO: 27691 - DNA, 20 bp, Artificial Sequence
  MKO10027691_A_Klk13
  gRNA
gagactcgtgtgtaaacgcc

SEQ ID NO: 27692 - DNA, 20 bp, Artificial Sequence
  MKO10027692_A_Klk13
  gRNA
tgatctcccggatccaacgc

SEQ ID NO: 27693 - DNA, 20 bp, Artificial Sequence
  MKO10027693_A_Klk13
  gRNA
ctccacagagaagtcgtccg

SEQ ID NO: 27694 - DNA, 20 bp, Artificial Sequence
  MKO10027694_A_Klk14
  gRNA
ctccctgccgagtgtcgggc

SEQ ID NO: 27695 - DNA, 20 bp, Artificial Sequence
  MKO10027695_A_Klk14
  gRNA
atggaacgttgtgctatgcc

SEQ ID NO: 27696 - DNA, 20 bp, Artificial Sequence
  MKO10027696_A_Klk14
  gRNA
cgtgggcctggggttgatac

SEQ ID NO: 27697 - DNA, 20 bp, Artificial Sequence
  MKO10027697_A_Klk15
  gRNA
cacaatctccgcaagttcga

SEQ ID NO: 27698 - DNA, 20 bp, Artificial Sequence
  MKO10027698_A_Klk15
  gRNA
atggtgggcaacactcgacc

SEQ ID NO: 27699 - DNA, 20 bp, Artificial Sequence
  MKO10027699_A_Klk15
  gRNA
cgtgccaccgccttcgacgc

SEQ ID NO: 27700 - DNA, 20 bp, Artificial Sequence
  MKO10027700_A_Klk1b11
  gRNA
tcattgctctcatcgtcctc

SEQ ID NO: 27701 - DNA, 20 bp, Artificial Sequence
  MKO10027701_A_Klk1b11
  gRNA
aacttattaagtttaccaac

SEQ ID NO: 27702 - DNA, 20 bp, Artificial Sequence
  MKO10027702_A_Klk1b11
  gRNA
gcatggggccctatcccatg

SEQ ID NO: 27703 - DNA, 20 bp, Artificial Sequence
  MKO10027703_A_Klk1b16
  gRNA
ggccaattgatacggttcct

SEQ ID NO: 27704 - DNA, 20 bp, Artificial Sequence
  MKO10027704_A_Klk1b16
  gRNA
gatacaccaggtataccgca

SEQ ID NO: 27705 - DNA, 20 bp, Artificial Sequence
  MKO10027705_A_Klk1b16
  gRNA
acctttgaaaagttacctcc

SEQ ID NO: 27706 - DNA, 20 bp, Artificial Sequence
  MKO10027706_A_Klk1b1
  gRNA
tttggatgcggttccgatgg

SEQ ID NO: 27707 - DNA, 20 bp, Artificial Sequence
  MKO10027707_A_Klk1b1
  gRNA
gctacaacatgagcctccat

SEQ ID NO: 27708 - DNA, 20 bp, Artificial Sequence
  MKO10027708_A_Klk1b1
  gRNA
tgtggctgtgtaccgctaca

SEQ ID NO: 27709 - DNA, 20 bp, Artificial Sequence
  MKO10027709_A_Klk1b21
  gRNA
tgctgaggcgtagtaacatc

SEQ ID NO: 27710 - DNA, 20 bp, Artificial Sequence
  MKO10027710_A_Klk1b21
  gRNA
atcccaaatgatctccagtg

SEQ ID NO: 27711 - DNA, 20 bp, Artificial Sequence
  MKO10027711_A_Klk1b21
  gRNA
aacccacactggagatcatt

SEQ ID NO: 27712 - DNA, 20 bp, Artificial Sequence
  MKO10027712_A_Klk1b22
  gRNA
ccaacaggactcccccgcat

SEQ ID NO: 27713 - DNA, 20 bp, Artificial Sequence
  MKO10027713_A_Klk1b22
  gRNA
ttgcttaagtcggccccagt

SEQ ID NO: 27714 - DNA, 20 bp, Artificial Sequence
  MKO10027714_A_Klk1b22
  gRNA
ctcctccaaagtgtacctac

SEQ ID NO: 27715 - DNA, 20 bp, Artificial Sequence
  MKO10027715_A_Klk1b24
  gRNA
tgatgacatcccgcaaccta

SEQ ID NO: 27716 - DNA, 20 bp, Artificial Sequence
  MKO10027716_A_Klk1b24
  gRNA
tcatggggtcctgtcccatg

SEQ ID NO: 27717 - DNA, 20 bp, Artificial Sequence
  MKO10027717_A_Klk1b24
  gRNA
ggcgcattgggtttaccaca

SEQ ID NO: 27718 - DNA, 20 bp, Artificial Sequence
  MKO10027718_A_Klk1b26
  gRNA
atgcttcaaacaacacctcc

SEQ ID NO: 27719 - DNA, 20 bp, Artificial Sequence
  MKO10027719_A_Klk1b26
  gRNA
tcaaatggccctgaaccatg

SEQ ID NO: 27720 - DNA, 20 bp, Artificial Sequence
  MKO10027720_A_Klk1b26
  gRNA
gtgttgtttgaagcatcagg

SEQ ID NO: 27721 - DNA, 20 bp, Artificial Sequence
  MKO10027721_A_Klk1b27
  gRNA
tcccccgcatatatatttgt

SEQ ID NO: 27722 - DNA, 20 bp, Artificial Sequence
  MKO10027722_A_Klk1b27
  gRNA
cctgtccagtctagaataat

SEQ ID NO: 27723 - DNA, 20 bp, Artificial Sequence
  MKO10027723_A_Klk1b27
  gRNA
tgcgctaaacccaatgcgcc

SEQ ID NO: 27724 - DNA, 20 bp, Artificial Sequence
  MKO10027724_A_Klk1b3
  gRNA
ggacacccccgcataaatat

SEQ ID NO: 27725 - DNA, 20 bp, Artificial Sequence
  MKO10027725_A_Klk1b3
  gRNA
catatcaggttcaccgcatg

SEQ ID NO: 27726 - DNA, 20 bp, Artificial Sequence
  MKO10027726_A_Klk1b3
  gRNA
atcggatgtgcttcctcatg

SEQ ID NO: 27727 - DNA, 20 bp, Artificial Sequence
  MKO10027727_A_Klk1b4
  gRNA
tcatggggccctgaaccatg

SEQ ID NO: 27728 - DNA, 20 bp, Artificial Sequence
  MKO10027728_A_Klk1b4
  gRNA
atgaaccttctgaccaacac

SEQ ID NO: 27729 - DNA, 20 bp, Artificial Sequence
  MKO10027729_A_Klk1b4
  gRNA
tctcacagtccacttgagac

SEQ ID NO: 27730 - DNA, 20 bp, Artificial Sequence
  MKO10027730_A_Klk1b5
  gRNA
gagtcctgctgaacgccaac

SEQ ID NO: 27731 - DNA, 20 bp, Artificial Sequence
  MKO10027731_A_Klk1b5
  gRNA
aacttattaagtttaactct

SEQ ID NO: 27732 - DNA, 20 bp, Artificial Sequence
  MKO10027732_A_Klk1b5
  gRNA
cgcattgatatttggtgaag

SEQ ID NO: 27733 - DNA, 20 bp, Artificial Sequence
  MKO10027733_A_Klk1b8
  gRNA
acactcaaagagatacctcc

SEQ ID NO: 27734 - DNA, 20 bp, Artificial Sequence
  MKO10027734_A_Klk1b8
  gRNA
ggcctgttgatgtgatacct

SEQ ID NO: 27735 - DNA, 20 bp, Artificial Sequence
  MKO10027735_A_Klk1b8
  gRNA
tcaacaggccctataccatg

SEQ ID NO: 27736 - DNA, 20 bp, Artificial Sequence
  MKO10027736_A_Klk1b9
  gRNA
gtcggatgtggtttctatgg

SEQ ID NO: 27737 - DNA, 20 bp, Artificial Sequence
  MKO10027737_A_Klk1b9
  gRNA
cgcatatatattcgttgtaa

SEQ ID NO: 27738 - DNA, 20 bp, Artificial Sequence
  MKO10027738_A_Klk1b9
  gRNA
aaaaaacaacctatacgaag

SEQ ID NO: 27739 - DNA, 20 bp, Artificial Sequence
  MKO10027739_A_Klk1
  gRNA
gtatcctgctgaacgccaac

SEQ ID NO: 27740 - DNA, 20 bp, Artificial Sequence
  MKO10027740_A_Klk1
  gRNA
aaaactctggtgtagatacc

SEQ ID NO: 27741 - DNA, 20 bp, Artificial Sequence
  MKO10027741_A_Klk1
  gRNA
cccccagcaagtaccaggtg

SEQ ID NO: 27742 - DNA, 20 bp, Artificial Sequence
  MKO10027742_A_Klk4
  gRNA
gcctggcagccggatgttag

SEQ ID NO: 27743 - DNA, 20 bp, Artificial Sequence
  MKO10027743_A_Klk4
  gRNA
cacctcagtatgttctgcgc

SEQ ID NO: 27744 - DNA, 20 bp, Artificial Sequence
  MKO10027744_A_Klk4
  gRNA
caggcccagtcccacgatgt

SEQ ID NO: 27745 - DNA, 20 bp, Artificial Sequence
  MKO10027745_A_Klk5
  gRNA
acctgtgtgagttcgttaag

SEQ ID NO: 27746 - DNA, 20 bp, Artificial Sequence
  MKO10027746_A_Klk5
  gRNA
gacaagaccatgttctgcgc

SEQ ID NO: 27747 - DNA, 20 bp, Artificial Sequence
  MKO10027747_A_Klk5
  gRNA
aggtgtaaaaactcctaccc

SEQ ID NO: 27748 - DNA, 20 bp, Artificial Sequence
  MKO10027748_A_Klk6
  gRNA
aggcgacccccacatactag

SEQ ID NO: 27749 - DNA, 20 bp, Artificial Sequence
  MKO10027749_A_Klk6
  gRNA
gtatgtgggggtcgcctccg

SEQ ID NO: 27750 - DNA, 20 bp, Artificial Sequence
  MKO10027750_A_Klk6
  gRNA
cagtgtgagcgtgcctaccc

SEQ ID NO: 27751 - DNA, 20 bp, Artificial Sequence
  MKO10027751_A_Klk7
  gRNA
acaaagtcattccggcaccc

SEQ ID NO: 27752 - DNA, 20 bp, Artificial Sequence
  MKO10027752_A_Klk7
  gRNA
cgtcatgtaccgtctctgga

SEQ ID NO: 27753 - DNA, 20 bp, Artificial Sequence
  MKO10027753_A_Klk7
  gRNA
gtacaccttcttgcactccc

SEQ ID NO: 27754 - DNA, 20 bp, Artificial Sequence
  MKO10027754_A_Klk8
  gRNA
aaatctgccgctacactacc

SEQ ID NO: 27755 - DNA, 20 bp, Artificial Sequence
  MKO10027755_A_Klk8
  gRNA
ccggcttcaccttgtccccg

SEQ ID NO: 27756 - DNA, 20 bp, Artificial Sequence
  MKO10027756_A_Klk8
  gRNA
caggaagtactccgtgcgtc

SEQ ID NO: 27757 - DNA, 20 bp, Artificial Sequence
  MKO10027757_A_Klk9
  gRNA
gagagttgcgtacgcattcc

SEQ ID NO: 27758 - DNA, 20 bp, Artificial Sequence
  MKO10027758_A_Klk9
  gRNA
ggagctgacacccgtgccgt

SEQ ID NO: 27759 - DNA, 20 bp, Artificial Sequence
  MKO10027759_A_Klk9
  gRNA
gccggaccttccgaggtagc

SEQ ID NO: 27760 - DNA, 20 bp, Artificial Sequence
  MKO10027760_A_Klkb1
  gRNA
acctatctccgaaagcgcac

SEQ ID NO: 27761 - DNA, 20 bp, Artificial Sequence
  MKO10027761_A_Klkb1
  gRNA
ttgccaagaatacaccggac

SEQ ID NO: 27762 - DNA, 20 bp, Artificial Sequence
  MKO10027762_A_Klkb1
  gRNA
acccaccagcataaagtcag

SEQ ID NO: 27763 - DNA, 20 bp, Artificial Sequence
  MKO10027763_A_Klra10
  gRNA
tttaagagtgttcaatatac

SEQ ID NO: 27764 - DNA, 20 bp, Artificial Sequence
  MKO10027764_A_Klra10
  gRNA
taggcggaggtgttaaatac

SEQ ID NO: 27765 - DNA, 20 bp, Artificial Sequence
  MKO10027765_A_Klra10
  gRNA
caacatacctgtgtcccgtg

SEQ ID NO: 27766 - DNA, 20 bp, Artificial Sequence
  MKO10027766_A_Klra12
  gRNA
ctgagacaattaccagtcga

SEQ ID NO: 27767 - DNA, 20 bp, Artificial Sequence
  MKO10027767_A_Klra12
  gRNA
ctgtaaaagtcttggtttca

SEQ ID NO: 27768 - DNA, 20 bp, Artificial Sequence
  MKO10027768_A_Klra12
  gRNA
gattccagaagatcagtgcc

SEQ ID NO: 27769 - DNA, 20 bp, Artificial Sequence
  MKO10027769_A_Klra15
  gRNA
tttaagggtgttcattccac

SEQ ID NO: 27770 - DNA, 20 bp, Artificial Sequence
  MKO10027770_A_Klra15
  gRNA
gtctatagagtgtgatcttc

SEQ ID NO: 27771 - DNA, 20 bp, Artificial Sequence
  MKO10027771_A_Klra15
  gRNA
atctgttctgatccctgttg

SEQ ID NO: 27772 - DNA, 20 bp, Artificial Sequence
  MKO10027772_A_Klra17
  gRNA
tctcctgtactacactctag

SEQ ID NO: 27773 - DNA, 20 bp, Artificial Sequence
  MKO10027773_A_Klra17
  gRNA
gcaaaatgacatcaacgcaa

SEQ ID NO: 27774 - DNA, 20 bp, Artificial Sequence
  MKO10027774_A_Klra17
  gRNA
tttaagagtgctctatcccc

SEQ ID NO: 27775 - DNA, 20 bp, Artificial Sequence
  MKO10027775_A_Klra18
  gRNA
cctgaaaaagctcgcctcag

SEQ ID NO: 27776 - DNA, 20 bp, Artificial Sequence
  MKO10027776_A_Klra18
  gRNA
acatactgtgtgataaaacc

SEQ ID NO: 27777 - DNA, 20 bp, Artificial Sequence
  MKO10027777_A_Klra18
  gRNA
gtctatagagtgtaatcttc

SEQ ID NO: 27778 - DNA, 20 bp, Artificial Sequence
  MKO10027778_A_Klra19
  gRNA
caaataggtctatagactct

SEQ ID NO: 27779 - DNA, 20 bp, Artificial Sequence
  MKO10027779_A_Klra19
  gRNA
gatagacgatgaaaatgaac

SEQ ID NO: 27780 - DNA, 20 bp, Artificial Sequence
  MKO10027780_A_Klra19
  gRNA
ttagagtttcatggatttct

SEQ ID NO: 27781 - DNA, 20 bp, Artificial Sequence
  MKO10027781_A_Klra1
  gRNA
tttaagggtgttcattccac

SEQ ID NO: 27782 - DNA, 20 bp, Artificial Sequence
  MKO10027782_A_Klra1
  gRNA
gtctatagagtgtgatcttc

SEQ ID NO: 27783 - DNA, 20 bp, Artificial Sequence
  MKO10027783_A_Klra1
  gRNA
atctgttctgatccctgttg

SEQ ID NO: 27784 - DNA, 20 bp, Artificial Sequence
  MKO10027784_A_Klra21
  gRNA
aatcctctgttcccttcggc

SEQ ID NO: 27785 - DNA, 20 bp, Artificial Sequence
  MKO10027785_A_Klra21
  gRNA
tcatcatgaataaaactaca

SEQ ID NO: 27786 - DNA, 20 bp, Artificial Sequence
  MKO10027786_A_Klra21
  gRNA
tattccagaagttcatagct

SEQ ID NO: 27787 - DNA, 20 bp, Artificial Sequence
  MKO10027787_A_Klra22
  gRNA
tttaagggtgttcattccac

SEQ ID NO: 27788 - DNA, 20 bp, Artificial Sequence
  MKO10027788_A_Klra22
  gRNA
gtctatagagtgtgatcttc

SEQ ID NO: 27789 - DNA, 20 bp, Artificial Sequence
  MKO10027789_A_Klra22
  gRNA
atctgttctgatccctgttg

SEQ ID NO: 27790 - DNA, 20 bp, Artificial Sequence
  MKO10027790_A_Klra23
  gRNA
acagggaagcctcgaaaagc

SEQ ID NO: 27791 - DNA, 20 bp, Artificial Sequence
  MKO10027791_A_Klra23
  gRNA
ctgagacaattaccagtcga

SEQ ID NO: 27792 - DNA, 20 bp, Artificial Sequence
  MKO10027792_A_Klra23
  gRNA
ctgtaaaagtcttggtttca

SEQ ID NO: 27793 - DNA, 20 bp, Artificial Sequence
  MKO10027793_A_Klra2
  gRNA
taacctccgtcaagagtacc

SEQ ID NO: 27794 - DNA, 20 bp, Artificial Sequence
  MKO10027794_A_Klra2
  gRNA
catgtttctcttgtccatcc

SEQ ID NO: 27795 - DNA, 20 bp, Artificial Sequence
  MKO10027795_A_Klra2
  gRNA
aggatgtaaacagatctgcc

SEQ ID NO: 27796 - DNA, 20 bp, Artificial Sequence
  MKO10027796_A_Klra33
  gRNA
acatactgtgtgataaaacc

SEQ ID NO: 27797 - DNA, 20 bp, Artificial Sequence
  MKO10027797_A_Klra33
  gRNA
gtctatagagtgtaatcttc

SEQ ID NO: 27798 - DNA, 20 bp, Artificial Sequence
  MKO10027798_A_Klra33
  gRNA
ctgcaacagttaccagtcga

SEQ ID NO: 27799 - DNA, 20 bp, Artificial Sequence
  MKO10027799_A_Klra3
  gRNA
tttaagagtgttcagcaccc

SEQ ID NO: 27800 - DNA, 20 bp, Artificial Sequence
  MKO10027800_A_Klra3
  gRNA
atgttattccagagaattac

SEQ ID NO: 27801 - DNA, 20 bp, Artificial Sequence
  MKO10027801_A_Klra3
  gRNA
tattccagagtttcattgct

SEQ ID NO: 27802 - DNA, 20 bp, Artificial Sequence
  MKO10027802_A_Klra4
  gRNA
acatactgtgtgataaaacc

SEQ ID NO: 27803 - DNA, 20 bp, Artificial Sequence
  MKO10027803_A_Klra4
  gRNA
gtctatagagtgtaatcttc

SEQ ID NO: 27804 - DNA, 20 bp, Artificial Sequence
  MKO10027804_A_Klra4
  gRNA
ctgcaacagttaccagtcga

SEQ ID NO: 27805 - DNA, 20 bp, Artificial Sequence
  MKO10027805_A_Klra5
  gRNA
gattccagaagttcctcacc

SEQ ID NO: 27806 - DNA, 20 bp, Artificial Sequence
  MKO10027806_A_Klra5
  gRNA
aagtctatagattgcagtcc

SEQ ID NO: 27807 - DNA, 20 bp, Artificial Sequence
  MKO10027807_A_Klra5
  gRNA
cagctcactgtgagatcgct

SEQ ID NO: 27808 - DNA, 20 bp, Artificial Sequence
  MKO10027808_A_Klra6
  gRNA
caaataggtctatagactct

SEQ ID NO: 27809 - DNA, 20 bp, Artificial Sequence
  MKO10027809_A_Klra6
  gRNA
gatagacgatgaaaatgaac

SEQ ID NO: 27810 - DNA, 20 bp, Artificial Sequence
  MKO10027810_A_Klra6
  gRNA
acagaaattccttcaattcc

SEQ ID NO: 27811 - DNA, 20 bp, Artificial Sequence
  MKO10027811_A_Klra7
  gRNA
ccaacaatgcaacagttacc

SEQ ID NO: 27812 - DNA, 20 bp, Artificial Sequence
  MKO10027812_A_Klra7
  gRNA
caagttgacgtcactttgcg

SEQ ID NO: 27813 - DNA, 20 bp, Artificial Sequence
  MKO10027813_A_Klra7
  gRNA
atctgttctgatccctgctg

SEQ ID NO: 27814 - DNA, 20 bp, Artificial Sequence
  MKO10027814_A_Klra8
  gRNA
aatcctctgttcccttcggc

SEQ ID NO: 27815 - DNA, 20 bp, Artificial Sequence
  MKO10027815_A_Klra8
  gRNA
agtaactctctagaataaca

SEQ ID NO: 27816 - DNA, 20 bp, Artificial Sequence
  MKO10027816_A_Klra8
  gRNA
tcatcatgaataaaactaca

SEQ ID NO: 27817 - DNA, 20 bp, Artificial Sequence
  MKO10027817_A_Klra9
  gRNA
tttaagagtgttcagtatcc

SEQ ID NO: 27818 - DNA, 20 bp, Artificial Sequence
  MKO10027818_A_Klra9
  gRNA
atggaacagtgaaaccaaga

SEQ ID NO: 27819 - DNA, 20 bp, Artificial Sequence
  MKO10027819_A_Klra9
  gRNA
taggcagaggtgttaaacac

SEQ ID NO: 27820 - DNA, 20 bp, Artificial Sequence
  MKO10027820_A_Klrb1a
  gRNA
gatgcatctcctatgcacaa

SEQ ID NO: 27821 - DNA, 20 bp, Artificial Sequence
  MKO10027821_A_Klrb1a
  gRNA
gaaggtctagttgattgtga

SEQ ID NO: 27822 - DNA, 20 bp, Artificial Sequence
  MKO10027822_A_Klrb1a
  gRNA
actttggtttaaagccaccc

SEQ ID NO: 27823 - DNA, 20 bp, Artificial Sequence
  MKO10027823_A_Klrb1b
  gRNA
acacctgtcggtgccctcgc

SEQ ID NO: 27824 - DNA, 20 bp, Artificial Sequence
  MKO10027824_A_Klrb1b
  gRNA
atcagtacaaaaaatctgcg

SEQ ID NO: 27825 - DNA, 20 bp, Artificial Sequence
  MKO10027825_A_Klrb1b
  gRNA
caatcacgaccagcacaaga

SEQ ID NO: 27826 - DNA, 20 bp, Artificial Sequence
  MKO10027826_A_Klrb1c
  gRNA
atgccaagcccccagtgtcc

SEQ ID NO: 27827 - DNA, 20 bp, Artificial Sequence
  MKO10027827_A_Klrb1c
  gRNA
acctcggtttaaagccaccc

SEQ ID NO: 27828 - DNA, 20 bp, Artificial Sequence
  MKO10027828_A_Klrb1c
  gRNA
atttagagtgcccacaagac

SEQ ID NO: 27829 - DNA, 20 bp, Artificial Sequence
  MKO10027829_A_Klrb1f
  gRNA
tactagagtgcccgagatat

SEQ ID NO: 27830 - DNA, 20 bp, Artificial Sequence
  MKO10027830_A_Klrb1f
  gRNA
atatctcgggcactctagta

SEQ ID NO: 27831 - DNA, 20 bp, Artificial Sequence
  MKO10027831_A_Klrb1f
  gRNA
ctaagacactgagtccaatc

SEQ ID NO: 27832 - DNA, 20 bp, Artificial Sequence
  MKO10027832_A_Klrb1
  gRNA
tcaaccagaccgtcagccca

SEQ ID NO: 27833 - DNA, 20 bp, Artificial Sequence
  MKO10027833_A_Klrb1
  gRNA
cactagagtgcccgagagac

SEQ ID NO: 27834 - DNA, 20 bp, Artificial Sequence
  MKO10027834_A_Klrb1
  gRNA
catcgggtggctctgaaact

SEQ ID NO: 27835 - DNA, 20 bp, Artificial Sequence
  MKO10027835_A_Klrc1
  gRNA
ctccatttcagtcatcgagc

SEQ ID NO: 27836 - DNA, 20 bp, Artificial Sequence
  MKO10027836_A_Klrc1
  gRNA
gtaccagcaatgagtttctc

SEQ ID NO: 27837 - DNA, 20 bp, Artificial Sequence
  MKO10027837_A_Klrc1
  gRNA
tgcaggaattgcccctgcaa

SEQ ID NO: 27838 - DNA, 20 bp, Artificial Sequence
  MKO10027838_A_Klrc2
  gRNA
gcttcacatagatagtgaag

SEQ ID NO: 27839 - DNA, 20 bp, Artificial Sequence
  MKO10027839_A_Klrc2
  gRNA
ttccgtttcagtaatgcagc

SEQ ID NO: 27840 - DNA, 20 bp, Artificial Sequence
  MKO10027840_A_Klrc2
  gRNA
gcagaggtcaggcctgggac

SEQ ID NO: 27841 - DNA, 20 bp, Artificial Sequence
  MKO10027841_A_Klrc3
  gRNA
gaatataagatccattcctt

SEQ ID NO: 27842 - DNA, 20 bp, Artificial Sequence
  MKO10027842_A_Klrc3
  gRNA
tttgtgctgaagatagactg

SEQ ID NO: 27843 - DNA, 20 bp, Artificial Sequence
  MKO10027843_A_Klrc3
  gRNA
cagtccatgagaccagtgaa

SEQ ID NO: 27844 - DNA, 20 bp, Artificial Sequence
  MKO10027844_A_Klrd1
  gRNA
gatgcccaacccacttgtcc

SEQ ID NO: 27845 - DNA, 20 bp, Artificial Sequence
  MKO10027845_A_Klrd1
  gRNA
gccccaatccagaaatgaat

SEQ ID NO: 27846 - DNA, 20 bp, Artificial Sequence
  MKO10027846_A_Klrd1
  gRNA
tgtgccatcctcccatagcc

SEQ ID NO: 27847 - DNA, 20 bp, Artificial Sequence
  MKO10027847_A_Klre1
  gRNA
gaccattcggttctaccctc

SEQ ID NO: 27848 - DNA, 20 bp, Artificial Sequence
  MKO10027848_A_Klre1
  gRNA
gcccagagggtagaaccgaa

SEQ ID NO: 27849 - DNA, 20 bp, Artificial Sequence
  MKO10027849_A_Klre1
  gRNA
acactcgagagaagcctcca

SEQ ID NO: 27850 - DNA, 20 bp, Artificial Sequence
  MKO10027850_A_Klrg1
  gRNA
ctttacctcaagctgagcgc

SEQ ID NO: 27851 - DNA, 20 bp, Artificial Sequence
  MKO10027851_A_Klrg1
  gRNA
tttaccactccctggttgtc

SEQ ID NO: 27852 - DNA, 20 bp, Artificial Sequence
  MKO10027852_A_Klrg1
  gRNA
tgagtctactgatgtatcaa

SEQ ID NO: 27853 - DNA, 20 bp, Artificial Sequence
  MKO10027853_A_Klrg2
  gRNA
gcctcgtcgggcccccaccc

SEQ ID NO: 27854 - DNA, 20 bp, Artificial Sequence
  MKO10027854_A_Klrg2
  gRNA
cccgacgaggccctgaaggc

SEQ ID NO: 27855 - DNA, 20 bp, Artificial Sequence
  MKO10027855_A_Klrg2
  gRNA
agtacatgaagtctctgcgc

SEQ ID NO: 27856 - DNA, 20 bp, Artificial Sequence
  MKO10027856_A_Klri1
  gRNA
ccatcctttggacaccgaag

SEQ ID NO: 27857 - DNA, 20 bp, Artificial Sequence
  MKO10027857_A_Klri1
  gRNA
caggccccaaatcaacagta

SEQ ID NO: 27858 - DNA, 20 bp, Artificial Sequence
  MKO10027858_A_Klri1
  gRNA
atgagaattcagctcctcac

SEQ ID NO: 27859 - DNA, 20 bp, Artificial Sequence
  MKO10027859_A_Klri2
  gRNA
tagatccctggctgacaaca

SEQ ID NO: 27860 - DNA, 20 bp, Artificial Sequence
  MKO10027860_A_Klri2
  gRNA
agcaacgttatgcattattt

SEQ ID NO: 27861 - DNA, 20 bp, Artificial Sequence
  MKO10027861_A_Klri2
  gRNA
ttcttgatcctctatgtgac

SEQ ID NO: 27862 - DNA, 20 bp, Artificial Sequence
  MKO10027862_A_Klrk1
  gRNA
tatccactaggtatcataag

SEQ ID NO: 27863 - DNA, 20 bp, Artificial Sequence
  MKO10027863_A_Klrk1
  gRNA
gcactaactaccagtcaacc

SEQ ID NO: 27864 - DNA, 20 bp, Artificial Sequence
  MKO10027864_A_Klrk1
  gRNA
gaattgccaaggctatagca

SEQ ID NO: 27865 - DNA, 20 bp, Artificial Sequence
  MKO10027865_A_Kl
  gRNA
acgtcattgggtacaccgcg

SEQ ID NO: 27866 - DNA, 20 bp, Artificial Sequence
  MKO10027866_A_Kl
  gRNA
caacgtagaagagtcctcgc

SEQ ID NO: 27867 - DNA, 20 bp, Artificial Sequence
  MKO10027867_A_Kl
  gRNA
ccgctgcatgatcagcgagc

SEQ ID NO: 27868 - DNA, 20 bp, Artificial Sequence
  MKO10027868_A_Kmo
  gRNA
cctttcttatagaggacggc

SEQ ID NO: 27869 - DNA, 20 bp, Artificial Sequence
  MKO10027869_A_Kmo
  gRNA
aagttgatgtgtacgaagct

SEQ ID NO: 27870 - DNA, 20 bp, Artificial Sequence
  MKO10027870_A_Kmo
  gRNA
cctgccgtcctctataagaa

SEQ ID NO: 27871 - DNA, 20 bp, Artificial Sequence
  MKO10027871_A_Kmt2a
  gRNA
ctgaccggtttaatccttcg

SEQ ID NO: 27872 - DNA, 20 bp, Artificial Sequence
  MKO10027872_A_Kmt2a
  gRNA
gatcgccgccctttcttcac

SEQ ID NO: 27873 - DNA, 20 bp, Artificial Sequence
  MKO10027873_A_Kmt2a
  gRNA
gtgcagattgtaagacggcg

SEQ ID NO: 27874 - DNA, 20 bp, Artificial Sequence
  MKO10027874_A_Kmt2b
  gRNA
gggccttccccgagaccgtc

SEQ ID NO: 27875 - DNA, 20 bp, Artificial Sequence
  MKO10027875_A_Kmt2b
  gRNA
ggggggtcgtcttatgcttg

SEQ ID NO: 27876 - DNA, 20 bp, Artificial Sequence
  MKO10027876_A_Kmt2b
  gRNA
tcggcaggacctcgccactg

SEQ ID NO: 27877 - DNA, 20 bp, Artificial Sequence
  MKO10027877_A_Kmt2c
  gRNA
tgctgtaggcctcgaagtag

SEQ ID NO: 27878 - DNA, 20 bp, Artificial Sequence
  MKO10027878_A_Kmt2c
  gRNA
caagccttatttgattccac

SEQ ID NO: 27879 - DNA, 20 bp, Artificial Sequence
  MKO10027879_A_Kmt2c
  gRNA
catcccataacttgcccgcc

SEQ ID NO: 27880 - DNA, 20 bp, Artificial Sequence
  MKO10027880_A_Kmt2d
  gRNA
catcaacaggtctccccgag

SEQ ID NO: 27881 - DNA, 20 bp, Artificial Sequence
  MKO10027881_A_Kmt2d
  gRNA
aatttgtgatgcgtcctcct

SEQ ID NO: 27882 - DNA, 20 bp, Artificial Sequence
  MKO10027882_A_Kmt2d
  gRNA
gaggtctccgtccccggttc

SEQ ID NO: 27883 - DNA, 20 bp, Artificial Sequence
  MKO10027883_A_Kmt2e
  gRNA
gaggacgagcaccataatta

SEQ ID NO: 27884 - DNA, 20 bp, Artificial Sequence
  MKO10027884_A_Kmt2e
  gRNA
tgggctgacaacgttcacat

SEQ ID NO: 27885 - DNA, 20 bp, Artificial Sequence
  MKO10027885_A_Kmt2e
  gRNA
ctcattagcaaaaacgaagt

SEQ ID NO: 27886 - DNA, 20 bp, Artificial Sequence
  MKO10027886_A_Kncn
  gRNA
catcggtgtctccgtgtcca

SEQ ID NO: 27887 - DNA, 20 bp, Artificial Sequence
  MKO10027887_A_Kncn
  gRNA
ccaggttgaaccgagccttc

SEQ ID NO: 27888 - DNA, 20 bp, Artificial Sequence
  MKO10027888_A_Kncn
  gRNA
ctgcaggcagcggaagtctc

SEQ ID NO: 27889 - DNA, 20 bp, Artificial Sequence
  MKO10027889_A_Kndc1
  gRNA
tgcgtgggcgacactccgca

SEQ ID NO: 27890 - DNA, 20 bp, Artificial Sequence
  MKO10027890_A_Kndc1
  gRNA
tattctccaagatgaccccg

SEQ ID NO: 27891 - DNA, 20 bp, Artificial Sequence
  MKO10027891_A_Kndc1
  gRNA
tgggagcttaccgccaggtc

SEQ ID NO: 27892 - DNA, 20 bp, Artificial Sequence
  MKO10027892_A_Kng1
  gRNA
tatgttgcaccgagtgatcg

SEQ ID NO: 27893 - DNA, 20 bp, Artificial Sequence
  MKO10027893_A_Kng1
  gRNA
ggcatgcacacaaccaatac

SEQ ID NO: 27894 - DNA, 20 bp, Artificial Sequence
  MKO10027894_A_Kng1
  gRNA
tctctgaagcagtttaaccc

SEQ ID NO: 27895 - DNA, 20 bp, Artificial Sequence
  MKO10027895_A_Kng2
  gRNA
agtgaccaagcgcgctaaaa

SEQ ID NO: 27896 - DNA, 20 bp, Artificial Sequence
  MKO10027896_A_Kng2
  gRNA
tctggattatctgccgatat

SEQ ID NO: 27897 - DNA, 20 bp, Artificial Sequence
  MKO10027897_A_Kng2
  gRNA
tcactcggtacaacacaaac

SEQ ID NO: 27898 - DNA, 20 bp, Artificial Sequence
  MKO10027898_A_Knop1
  gRNA
actatgaccgggccatgagc

SEQ ID NO: 27899 - DNA, 20 bp, Artificial Sequence
  MKO10027899_A_Knop1
  gRNA
cacgtccccttctaacaatg

SEQ ID NO: 27900 - DNA, 20 bp, Artificial Sequence
  MKO10027900_A_Knop1
  gRNA
gttggacctgatagtcatgc

SEQ ID NO: 27901 - DNA, 20 bp, Artificial Sequence
  MKO10027901_A_Knstrn
  gRNA
atcgcacaccgtcttagcac

SEQ ID NO: 27902 - DNA, 20 bp, Artificial Sequence
  MKO10027902_A_Knstrn
  gRNA
accaaatcgagacgagagaa

SEQ ID NO: 27903 - DNA, 20 bp, Artificial Sequence
  MKO10027903_A_Knstrn
  gRNA
cccattctctcgtctcgatt

SEQ ID NO: 27904 - DNA, 20 bp, Artificial Sequence
  MKO10027904_A_Kntc1
  gRNA
gcttcgatgtgacgtagata

SEQ ID NO: 27905 - DNA, 20 bp, Artificial Sequence
  MKO10027905_A_Kntc1
  gRNA
acgagagtcagcgaacgtac

SEQ ID NO: 27906 - DNA, 20 bp, Artificial Sequence
  MKO10027906_A_Kntc1
  gRNA
cgttagaagcaacatataat

SEQ ID NO: 27907 - DNA, 20 bp, Artificial Sequence
  MKO10027907_A_Kpna1
  gRNA
tcagacccggaatgtgattc

SEQ ID NO: 27908 - DNA, 20 bp, Artificial Sequence
  MKO10027908_A_Kpna1
  gRNA
gatgaagtcatcaacacacc

SEQ ID NO: 27909 - DNA, 20 bp, Artificial Sequence
  MKO10027909_A_Kpna1
  gRNA
tgaggcccagataaataaca

SEQ ID NO: 27910 - DNA, 20 bp, Artificial Sequence
  MKO10027910_A_Kpna2
  gRNA
aggtagtcacctggttgttc

SEQ ID NO: 27911 - DNA, 20 bp, Artificial Sequence
  MKO10027911_A_Kpna2
  gRNA
tactgccaaggtagacagat

SEQ ID NO: 27912 - DNA, 20 bp, Artificial Sequence
  MKO10027912_A_Kpna2
  gRNA
accgagcagcttgagtagct

SEQ ID NO: 27913 - DNA, 20 bp, Artificial Sequence
  MKO10027913_A_Kpna3
  gRNA
ctgcctgcacagcactcaac

SEQ ID NO: 27914 - DNA, 20 bp, Artificial Sequence
  MKO10027914_A_Kpna3
  gRNA
agtccagttgagtgctgtgc

SEQ ID NO: 27915 - DNA, 20 bp, Artificial Sequence
  MKO10027915_A_Kpna3
  gRNA
atgaagtgacagttgaactc

SEQ ID NO: 27916 - DNA, 20 bp, Artificial Sequence
  MKO10027916_A_Kpna4
  gRNA
tgtgaagactccgatataga

SEQ ID NO: 27917 - DNA, 20 bp, Artificial Sequence
  MKO10027917_A_Kpna4
  gRNA
tctataatcaccatctatat

SEQ ID NO: 27918 - DNA, 20 bp, Artificial Sequence
  MKO10027918_A_Kpna4
  gRNA
taagtgcagttcaagctgct

SEQ ID NO: 27919 - DNA, 20 bp, Artificial Sequence
  MKO10027919_A_Kpna6
  gRNA
cccagttgtagagctcacgt

SEQ ID NO: 27920 - DNA, 20 bp, Artificial Sequence
  MKO10027920_A_Kpna6
  gRNA
tcctacgtgagctctacaac

SEQ ID NO: 27921 - DNA, 20 bp, Artificial Sequence
  MKO10027921_A_Kpna6
  gRNA
acaaaccgatcaactactcc

SEQ ID NO: 27922 - DNA, 20 bp, Artificial Sequence
  MKO10027922_A_Kpna7
  gRNA
gcacagggaaatgatctcgc

SEQ ID NO: 27923 - DNA, 20 bp, Artificial Sequence
  MKO10027923_A_Kpna7
  gRNA
gtagcccgaaaatgcaggat

SEQ ID NO: 27924 - DNA, 20 bp, Artificial Sequence
  MKO10027924_A_Kpna7
  gRNA
tgcggcctcgaactgcagct

SEQ ID NO: 27925 - DNA, 20 bp, Artificial Sequence
  MKO10027925_A_Kpnb1
  gRNA
agaaacgtaccggcctagtt

SEQ ID NO: 27926 - DNA, 20 bp, Artificial Sequence
  MKO10027926_A_Kpnb1
  gRNA
gcagaagttcctcgagcgtg

SEQ ID NO: 27927 - DNA, 20 bp, Artificial Sequence
  MKO10027927_A_Kpnb1
  gRNA
ctattgatgctaatgctcga

SEQ ID NO: 27928 - DNA, 20 bp, Artificial Sequence
  MKO10027928_A_Kprp
  gRNA
caacgaacgggttgcccaca

SEQ ID NO: 27929 - DNA, 20 bp, Artificial Sequence
  MKO10027929_A_Kprp
  gRNA
aggtagccccggaccgacgc

SEQ ID NO: 27930 - DNA, 20 bp, Artificial Sequence
  MKO10027930_A_Kprp
  gRNA
ccacctcggggccgcccttc

SEQ ID NO: 27931 - DNA, 20 bp, Artificial Sequence
  MKO10027931_A_Kptn
  gRNA
tgacttgttgaaagtgtcga

SEQ ID NO: 27932 - DNA, 20 bp, Artificial Sequence
  MKO10027932_A_Kptn
  gRNA
gcagaaacaccgtctccagc

SEQ ID NO: 27933 - DNA, 20 bp, Artificial Sequence
  MKO10027933_A_Kptn
  gRNA
ctcactctgcgtggcacagc

SEQ ID NO: 27934 - DNA, 20 bp, Artificial Sequence
  MKO10027934_A_Kras
  gRNA
tgagtatgaccctacgatag

SEQ ID NO: 27935 - DNA, 20 bp, Artificial Sequence
  MKO10027935_A_Kras
  gRNA
agcagcgttacctctatcgt

SEQ ID NO: 27936 - DNA, 20 bp, Artificial Sequence
  MKO10027936_A_Kras
  gRNA
tagaacagtagacacgaaac

SEQ ID NO: 27937 - DNA, 20 bp, Artificial Sequence
  MKO10027937_A_Krba1
  gRNA
cctcaccgcattagtgcagc

SEQ ID NO: 27938 - DNA, 20 bp, Artificial Sequence
  MKO10027938_A_Krba1
  gRNA
aggcctgctcaattctcttc

SEQ ID NO: 27939 - DNA, 20 bp, Artificial Sequence
  MKO10027939_A_Krba1
  gRNA
actgaggactactccgagag

SEQ ID NO: 27940 - DNA, 20 bp, Artificial Sequence
  MKO10027940_A_Krcc1
  gRNA
tgagctactgtcaattcacc

SEQ ID NO: 27941 - DNA, 20 bp, Artificial Sequence
  MKO10027941_A_Krcc1
  gRNA
aagaacggcccaaacatgag

SEQ ID NO: 27942 - DNA, 20 bp, Artificial Sequence
  MKO10027942_A_Krcc1
  gRNA
ctgatcaaacattctatacc

SEQ ID NO: 27943 - DNA, 20 bp, Artificial Sequence
  MKO10027943_A_Kremen1
  gRNA
tcccctgtaatctgcaccgt

SEQ ID NO: 27944 - DNA, 20 bp, Artificial Sequence
  MKO10027944_A_Kremen1
  gRNA
cgtgagcccttggtgctacg

SEQ ID NO: 27945 - DNA, 20 bp, Artificial Sequence
  MKO10027945_A_Kremen1
  gRNA
aatcctgccgtccccaccgc

SEQ ID NO: 27946 - DNA, 20 bp, Artificial Sequence
  MKO10027946_A_Kremen2
  gRNA
caagggcgtccagctccgcg

SEQ ID NO: 27947 - DNA, 20 bp, Artificial Sequence
  MKO10027947_A_Kremen2
  gRNA
ccttcgattctgccgcatga

SEQ ID NO: 27948 - DNA, 20 bp, Artificial Sequence
  MKO10027948_A_Kremen2
  gRNA
tgggtgcgcataacttctgt

SEQ ID NO: 27949 - DNA, 20 bp, Artificial Sequence
  MKO10027949_A_Kri1
  gRNA
ctggagtcgccaccgacgtc

SEQ ID NO: 27950 - DNA, 20 bp, Artificial Sequence
  MKO10027950_A_Kri1
  gRNA
atggggagaccgttgaccac

SEQ ID NO: 27951 - DNA, 20 bp, Artificial Sequence
  MKO10027951_A_Kri1
  gRNA
tccacagtgaaagatcgcta

SEQ ID NO: 27952 - DNA, 20 bp, Artificial Sequence
  MKO10027952_A_Krit1
  gRNA
ttgtttattagggaaacgag

SEQ ID NO: 27953 - DNA, 20 bp, Artificial Sequence
  MKO10027953_A_Krit1
  gRNA
atcgtgccatcagttgtcaa

SEQ ID NO: 27954 - DNA, 20 bp, Artificial Sequence
  MKO10027954_A_Krit1
  gRNA
aggacttagctctatactcc

SEQ ID NO: 27955 - DNA, 20 bp, Artificial Sequence
  MKO10027955_A_Krr1
  gRNA
cttgttcccgaaataccgcg

SEQ ID NO: 27956 - DNA, 20 bp, Artificial Sequence
  MKO10027956_A_Krr1
  gRNA
cctgacaaactgctacgtca

SEQ ID NO: 27957 - DNA, 20 bp, Artificial Sequence
  MKO10027957_A_Krr1
  gRNA
ctcgcggtatttcgggaaca

SEQ ID NO: 27958 - DNA, 20 bp, Artificial Sequence
  MKO10027958_A_Krt10
  gRNA
tgaattgagacgtactgttc

SEQ ID NO: 27959 - DNA, 20 bp, Artificial Sequence
  MKO10027959_A_Krt10
  gRNA
gtcaatctgcagcagcacgt

SEQ ID NO: 27960 - DNA, 20 bp, Artificial Sequence
  MKO10027960_A_Krt10
  gRNA
gattgaactacagtcccagc

SEQ ID NO: 27961 - DNA, 20 bp, Artificial Sequence
  MKO10027961_A_Krt12
  gRNA
gtcacgctaccatggcgagc

SEQ ID NO: 27962 - DNA, 20 bp, Artificial Sequence
  MKO10027962_A_Krt12
  gRNA
gcttcagtccagcaagagcg

SEQ ID NO: 27963 - DNA, 20 bp, Artificial Sequence
  MKO10027963_A_Krt12
  gRNA
tcctgcagattgacaacgca

SEQ ID NO: 27964 - DNA, 20 bp, Artificial Sequence
  MKO10027964_A_Krt13
  gRNA
cattgatctgacccgtgtgc

SEQ ID NO: 27965 - DNA, 20 bp, Artificial Sequence
  MKO10027965_A_Krt13
  gRNA
tgtcaatctccaggatgatc

SEQ ID NO: 27966 - DNA, 20 bp, Artificial Sequence
  MKO10027966_A_Krt13
  gRNA
ctggatcatttcagcgttgg

SEQ ID NO: 27967 - DNA, 20 bp, Artificial Sequence
  MKO10027967_A_Krt14
  gRNA
gacattggcattgtccacgg

SEQ ID NO: 27968 - DNA, 20 bp, Artificial Sequence
  MKO10027968_A_Krt14
  gRNA
gcagagcctgcgcatgagcg

SEQ ID NO: 27969 - DNA, 20 bp, Artificial Sequence
  MKO10027969_A_Krt14
  gRNA
ggtgggtggagacgtcaatg

SEQ ID NO: 27970 - DNA, 20 bp, Artificial Sequence
  MKO10027970_A_Krt15
  gRNA
gacaacgcgcgagttgtcaa

SEQ ID NO: 27971 - DNA, 20 bp, Artificial Sequence
  MKO10027971_A_Krt15
  gRNA
tgacaactcgcgcgttgtcc

SEQ ID NO: 27972 - DNA, 20 bp, Artificial Sequence
  MKO10027972_A_Krt15
  gRNA
ggtggacctgacccgcatgc

SEQ ID NO: 27973 - DNA, 20 bp, Artificial Sequence
  MKO10027973_A_Krt16
  gRNA
ctagatcattattgccaccc

SEQ ID NO: 27974 - DNA, 20 bp, Artificial Sequence
  MKO10027974_A_Krt16
  gRNA
ctttgcagattgacaatgcc

SEQ ID NO: 27975 - DNA, 20 bp, Artificial Sequence
  MKO10027975_A_Krt16
  gRNA
gctcatctagcaccttgcgc

SEQ ID NO: 27976 - DNA, 20 bp, Artificial Sequence
  MKO10027976_A_Krt17
  gRNA
ggtgggcggcgaaatcaacg

SEQ ID NO: 27977 - DNA, 20 bp, Artificial Sequence
  MKO10027977_A_Krt17
  gRNA
ccagacgagcattgtcaatc

SEQ ID NO: 27978 - DNA, 20 bp, Artificial Sequence
  MKO10027978_A_Krt17
  gRNA
cgttgatttcgccgcccacc

SEQ ID NO: 27979 - DNA, 20 bp, Artificial Sequence
  MKO10027979_A_Krt18
  gRNA
gcgtctcagctccgtgagtg

SEQ ID NO: 27980 - DNA, 20 bp, Artificial Sequence
  MKO10027980_A_Krt18
  gRNA
tgtcgatctgcaagacgatg

SEQ ID NO: 27981 - DNA, 20 bp, Artificial Sequence
  MKO10027981_A_Krt18
  gRNA
ccgcgcccagtatgaagcgc

SEQ ID NO: 27982 - DNA, 20 bp, Artificial Sequence
  MKO10027982_A_Krt19
  gRNA
acacgccttgcgtctgagcg

SEQ ID NO: 27983 - DNA, 20 bp, Artificial Sequence
  MKO10027983_A_Krt19
  gRNA
ccgtcgaaggtccgtgactt

SEQ ID NO: 27984 - DNA, 20 bp, Artificial Sequence
  MKO10027984_A_Krt19
  gRNA
agacacgtaccatgctgagc

SEQ ID NO: 27985 - DNA, 20 bp, Artificial Sequence
  MKO10027985_A_Krt1
  gRNA
cacgaactcattctctgcgt

SEQ ID NO: 27986 - DNA, 20 bp, Artificial Sequence
  MKO10027986_A_Krt1
  gRNA
caacaaccgcagtttggatc

SEQ ID NO: 27987 - DNA, 20 bp, Artificial Sequence
  MKO10027987_A_Krt1
  gRNA
gctcagaatccatccgtgac

SEQ ID NO: 27988 - DNA, 20 bp, Artificial Sequence
  MKO10027988_A_Krt20
  gRNA
gcttagcattgtcaattcgc

SEQ ID NO: 27989 - DNA, 20 bp, Artificial Sequence
  MKO10027989_A_Krt20
  gRNA
gcgaattgacaatgctaagc

SEQ ID NO: 27990 - DNA, 20 bp, Artificial Sequence
  MKO10027990_A_Krt20
  gRNA
gctgggcaacaatgtcaacg

SEQ ID NO: 27991 - DNA, 20 bp, Artificial Sequence
  MKO10027991_A_Krt222
  gRNA
gtaccgccgcctgctagaac

SEQ ID NO: 27992 - DNA, 20 bp, Artificial Sequence
  MKO10027992_A_Krt222
  gRNA
gagactcgatttccacttgc

SEQ ID NO: 27993 - DNA, 20 bp, Artificial Sequence
  MKO10027993_A_Krt222
  gRNA
aatcgagtctctccacgctg

SEQ ID NO: 27994 - DNA, 20 bp, Artificial Sequence
  MKO10027994_A_Krt23
  gRNA
tcgtgctcattgacaacgcc

SEQ ID NO: 27995 - DNA, 20 bp, Artificial Sequence
  MKO10027995_A_Krt23
  gRNA
tgagggcctccgaaagacct

SEQ ID NO: 27996 - DNA, 20 bp, Artificial Sequence
  MKO10027996_A_Krt23
  gRNA
ggccagtccagcgcctgtac

SEQ ID NO: 27997 - DNA, 20 bp, Artificial Sequence
  MKO10027997_A_Krt24
  gRNA
cggcctccaagcactctcga

SEQ ID NO: 27998 - DNA, 20 bp, Artificial Sequence
  MKO10027998_A_Krt24
  gRNA
tttcgtccagcactttgcgc

SEQ ID NO: 27999 - DNA, 20 bp, Artificial Sequence
  MKO10027999_A_Krt24
  gRNA
ctgagagacagttcaacgag

SEQ ID NO: 28000 - DNA, 20 bp, Artificial Sequence
  MKO10028000_A_Krt25
  gRNA
ttgcaggtacgaaaacgagc

SEQ ID NO: 28001 - DNA, 20 bp, Artificial Sequence
  MKO10028001_A_Krt25
  gRNA
ttggagcgttcgcttcattt

SEQ ID NO: 28002 - DNA, 20 bp, Artificial Sequence
  MKO10028002_A_Krt25
  gRNA
tcagtacgaaaccctgagcg

SEQ ID NO: 28003 - DNA, 20 bp, Artificial Sequence
  MKO10028003_A_Krt26
  gRNA
gacgctgtctacaaccgact

SEQ ID NO: 28004 - DNA, 20 bp, Artificial Sequence
  MKO10028004_A_Krt26
  gRNA
cagttccatcagttcgtttc

SEQ ID NO: 28005 - DNA, 20 bp, Artificial Sequence
  MKO10028005_A_Krt26
  gRNA
ctcacgtaccatagccgtga

SEQ ID NO: 28006 - DNA, 20 bp, Artificial Sequence
  MKO10028006_A_Krt27
  gRNA
tgatgtcagcatcgacgctc

SEQ ID NO: 28007 - DNA, 20 bp, Artificial Sequence
  MKO10028007_A_Krt27
  gRNA
cctgtgcagaaccgaccttg

SEQ ID NO: 28008 - DNA, 20 bp, Artificial Sequence
  MKO10028008_A_Krt27
  gRNA
catctctgtaagttcgttcc

SEQ ID NO: 28009 - DNA, 20 bp, Artificial Sequence
  MKO10028009_A_Krt28
  gRNA
ctttagtcggaaatcgtctg

SEQ ID NO: 28010 - DNA, 20 bp, Artificial Sequence
  MKO10028010_A_Krt28
  gRNA
ggtggcggcgcccaagtcat

SEQ ID NO: 28011 - DNA, 20 bp, Artificial Sequence
  MKO10028011_A_Krt28
  gRNA
gcaaattgataacgccagac

SEQ ID NO: 28012 - DNA, 20 bp, Artificial Sequence
  MKO10028012_A_Krt2
  gRNA
gatcaacaagcgcacgtctg

SEQ ID NO: 28013 - DNA, 20 bp, Artificial Sequence
  MKO10028013_A_Krt2
  gRNA
cccatttggtccgcaacacc

SEQ ID NO: 28014 - DNA, 20 bp, Artificial Sequence
  MKO10028014_A_Krt2
  gRNA
cctgagaacactctacgatg

SEQ ID NO: 28015 - DNA, 20 bp, Artificial Sequence
  MKO10028015_A_Krt31
  gRNA
tctcgttgagcacacggttc

SEQ ID NO: 28016 - DNA, 20 bp, Artificial Sequence
  MKO10028016_A_Krt31
  gRNA
gctcatccaagatccttcgc

SEQ ID NO: 28017 - DNA, 20 bp, Artificial Sequence
  MKO10028017_A_Krt31
  gRNA
atctatctgcaccaccaacc

SEQ ID NO: 28018 - DNA, 20 bp, Artificial Sequence
  MKO10028018_A_Krt32
  gRNA
ggtccccgagctgttgtcga

SEQ ID NO: 28019 - DNA, 20 bp, Artificial Sequence
  MKO10028019_A_Krt32
  gRNA
ggtgtccttcgacaacagct

SEQ ID NO: 28020 - DNA, 20 bp, Artificial Sequence
  MKO10028020_A_Krt32
  gRNA
gagacgaacagtcaatactc

SEQ ID NO: 28021 - DNA, 20 bp, Artificial Sequence
  MKO10028021_A_Krt33a
  gRNA
cactacacaccagttcatgc

SEQ ID NO: 28022 - DNA, 20 bp, Artificial Sequence
  MKO10028022_A_Krt33a
  gRNA
cctcaagcagaatcacgagc

SEQ ID NO: 28023 - DNA, 20 bp, Artificial Sequence
  MKO10028023_A_Krt33a
  gRNA
cctgctcgtgattctgcttg

SEQ ID NO: 28024 - DNA, 20 bp, Artificial Sequence
  MKO10028024_A_Krt33b
  gRNA
cagcgtccacctctacgttg

SEQ ID NO: 28025 - DNA, 20 bp, Artificial Sequence
  MKO10028025_A_Krt33b
  gRNA
ctgactccaccagctgccgc

SEQ ID NO: 28026 - DNA, 20 bp, Artificial Sequence
  MKO10028026_A_Krt33b
  gRNA
agaccgcctcaacgtagagg

SEQ ID NO: 28027 - DNA, 20 bp, Artificial Sequence
  MKO10028027_A_Krt34
  gRNA
gtgctaagtctgagaacgcc

SEQ ID NO: 28028 - DNA, 20 bp, Artificial Sequence
  MKO10028028_A_Krt34
  gRNA
ttagctcgatgatctcagcc

SEQ ID NO: 28029 - DNA, 20 bp, Artificial Sequence
  MKO10028029_A_Krt34
  gRNA
accagactgagctgtccatg

SEQ ID NO: 28030 - DNA, 20 bp, Artificial Sequence
  MKO10028030_A_Krt35
  gRNA
cgatcggctcaatgttgagg

SEQ ID NO: 28031 - DNA, 20 bp, Artificial Sequence
  MKO10028031_A_Krt35
  gRNA
cgttgacctgaaccgcgttc

SEQ ID NO: 28032 - DNA, 20 bp, Artificial Sequence
  MKO10028032_A_Krt35
  gRNA
cggtgcttaccatgctctgc

SEQ ID NO: 28033 - DNA, 20 bp, Artificial Sequence
  MKO10028033_A_Krt36
  gRNA
ctgacatcaatggtctacgc

SEQ ID NO: 28034 - DNA, 20 bp, Artificial Sequence
  MKO10028034_A_Krt36
  gRNA
gtcaatttgtaatatcagcc

SEQ ID NO: 28035 - DNA, 20 bp, Artificial Sequence
  MKO10028035_A_Krt36
  gRNA
agtggatctcaacaagatac

SEQ ID NO: 28036 - DNA, 20 bp, Artificial Sequence
  MKO10028036_A_Krt39
  gRNA
tctccatgatggactcgtac

SEQ ID NO: 28037 - DNA, 20 bp, Artificial Sequence
  MKO10028037_A_Krt39
  gRNA
gaagttcctccgtcagagac

SEQ ID NO: 28038 - DNA, 20 bp, Artificial Sequence
  MKO10028038_A_Krt39
  gRNA
accgtaaagacgtagaagaa

SEQ ID NO: 28039 - DNA, 20 bp, Artificial Sequence
  MKO10028039_A_Krt40
  gRNA
agatgcgatgtcaatacgag

SEQ ID NO: 28040 - DNA, 20 bp, Artificial Sequence
  MKO10028040_A_Krt40
  gRNA
cgaactgtccctgcgccagc

SEQ ID NO: 28041 - DNA, 20 bp, Artificial Sequence
  MKO10028041_A_Krt40
  gRNA
gaattctagacttgccgttc

SEQ ID NO: 28042 - DNA, 20 bp, Artificial Sequence
  MKO10028042_A_Krt42
  gRNA
cattgacgtccccgcccacc

SEQ ID NO: 28043 - DNA, 20 bp, Artificial Sequence
  MKO10028043_A_Krt42
  gRNA
cgttgtcgattgtggctgcc

SEQ ID NO: 28044 - DNA, 20 bp, Artificial Sequence
  MKO10028044_A_Krt42
  gRNA
gctgaacctgcgcatgagcg

SEQ ID NO: 28045 - DNA, 20 bp, Artificial Sequence
  MKO10028045_A_Krt4
  gRNA
ggggcctcaccgcttcatag

SEQ ID NO: 28046 - DNA, 20 bp, Artificial Sequence
  MKO10028046_A_Krt4
  gRNA
agacttacatcaacgccttg

SEQ ID NO: 28047 - DNA, 20 bp, Artificial Sequence
  MKO10028047_A_Krt4
  gRNA
cacgagagtcctctatgaag

SEQ ID NO: 28048 - DNA, 20 bp, Artificial Sequence
  MKO10028048_A_Krt5
  gRNA
tgaagttgatctcgtccatc

SEQ ID NO: 28049 - DNA, 20 bp, Artificial Sequence
  MKO10028049_A_Krt5
  gRNA
tgagatcaacaagcgtacca

SEQ ID NO: 28050 - DNA, 20 bp, Artificial Sequence
  MKO10028050_A_Krt5
  gRNA
gaaccccgtccagctgtcta

SEQ ID NO: 28051 - DNA, 20 bp, Artificial Sequence
  MKO10028051_A_Krt6a
  gRNA
cccccaccaggtgcggttcc

SEQ ID NO: 28052 - DNA, 20 bp, Artificial Sequence
  MKO10028052_A_Krt6a
  gRNA
atctgttagactgtctgcct

SEQ ID NO: 28053 - DNA, 20 bp, Artificial Sequence
  MKO10028053_A_Krt6a
  gRNA
cagttcaactttgttcatgt

SEQ ID NO: 28054 - DNA, 20 bp, Artificial Sequence
  MKO10028054_A_Krt6b
  gRNA
ccacacacaggtccggttcc

SEQ ID NO: 28055 - DNA, 20 bp, Artificial Sequence
  MKO10028055_A_Krt6b
  gRNA
cttcctgagagttatttatg

SEQ ID NO: 28056 - DNA, 20 bp, Artificial Sequence
  MKO10028056_A_Krt6b
  gRNA
ctgcctcataaataactctc

SEQ ID NO: 28057 - DNA, 20 bp, Artificial Sequence
  MKO10028057_A_Krt71
  gRNA
gcttccgcatgttgctgatg

SEQ ID NO: 28058 - DNA, 20 bp, Artificial Sequence
  MKO10028058_A_Krt71
  gRNA
tgaggttcgcgctcagtatg

SEQ ID NO: 28059 - DNA, 20 bp, Artificial Sequence
  MKO10028059_A_Krt71
  gRNA
tgacggacatgtcgctgatg

SEQ ID NO: 28060 - DNA, 20 bp, Artificial Sequence
  MKO10028060_A_Krt72
  gRNA
caataaccggcagctggacc

SEQ ID NO: 28061 - DNA, 20 bp, Artificial Sequence
  MKO10028061_A_Krt72
  gRNA
cagcaccacgaactcgttct

SEQ ID NO: 28062 - DNA, 20 bp, Artificial Sequence
  MKO10028062_A_Krt72
  gRNA
ggtggagattaacagacgca

SEQ ID NO: 28063 - DNA, 20 bp, Artificial Sequence
  MKO10028063_A_Krt73
  gRNA
tcaggccaaggtggacgccc

SEQ ID NO: 28064 - DNA, 20 bp, Artificial Sequence
  MKO10028064_A_Krt73
  gRNA
ggatgccgcatacatgagca

SEQ ID NO: 28065 - DNA, 20 bp, Artificial Sequence
  MKO10028065_A_Krt73
  gRNA
ccacagaggtgtcacttatg

SEQ ID NO: 28066 - DNA, 20 bp, Artificial Sequence
  MKO10028066_A_Krt75
  gRNA
ttgacatatgtatcgaagaa

SEQ ID NO: 28067 - DNA, 20 bp, Artificial Sequence
  MKO10028067_A_Krt75
  gRNA
tcccctgtaggtacgcttcc

SEQ ID NO: 28068 - DNA, 20 bp, Artificial Sequence
  MKO10028068_A_Krt75
  gRNA
ttactgcctcatagatcatc

SEQ ID NO: 28069 - DNA, 20 bp, Artificial Sequence
  MKO10028069_A_Krt76
  gRNA
gtgaatctaactgcttgcgc

SEQ ID NO: 28070 - DNA, 20 bp, Artificial Sequence
  MKO10028070_A_Krt76
  gRNA
cagcagcagaccatacgctc

SEQ ID NO: 28071 - DNA, 20 bp, Artificial Sequence
  MKO10028071_A_Krt76
  gRNA
gtcctaccttggtctggtac

SEQ ID NO: 28072 - DNA, 20 bp, Artificial Sequence
  MKO10028072_A_Krt77
  gRNA
cgagcagttgcgccagaaca

SEQ ID NO: 28073 - DNA, 20 bp, Artificial Sequence
  MKO10028073_A_Krt77
  gRNA
cactgacgtgggtttgtatc

SEQ ID NO: 28074 - DNA, 20 bp, Artificial Sequence
  MKO10028074_A_Krt77
  gRNA
ccgtatcaaatagatatttc

SEQ ID NO: 28075 - DNA, 20 bp, Artificial Sequence
  MKO10028075_A_Krt78
  gRNA
tccgcgtgatctcctcgtaa

SEQ ID NO: 28076 - DNA, 20 bp, Artificial Sequence
  MKO10028076_A_Krt78
  gRNA
ctggttataggtgcgcttcc

SEQ ID NO: 28077 - DNA, 20 bp, Artificial Sequence
  MKO10028077_A_Krt78
  gRNA
cccgttacgaggagatcacg

SEQ ID NO: 28078 - DNA, 20 bp, Artificial Sequence
  MKO10028078_A_Krt79
  gRNA
gtccatggacagtatcacgt

SEQ ID NO: 28079 - DNA, 20 bp, Artificial Sequence
  MKO10028079_A_Krt79
  gRNA
tcctggcgacccccgtgttc

SEQ ID NO: 28080 - DNA, 20 bp, Artificial Sequence
  MKO10028080_A_Krt79
  gRNA
ccctggtcaggtacgcttcc

SEQ ID NO: 28081 - DNA, 20 bp, Artificial Sequence
  MKO10028081_A_Krt7
  gRNA
agaggagatcaaccgacgca

SEQ ID NO: 28082 - DNA, 20 bp, Artificial Sequence
  MKO10028082_A_Krt7
  gRNA
cattctcagcagccgtgcgt

SEQ ID NO: 28083 - DNA, 20 bp, Artificial Sequence
  MKO10028083_A_Krt7
  gRNA
ggttggccatctcctcatac

SEQ ID NO: 28084 - DNA, 20 bp, Artificial Sequence
  MKO10028084_A_Krt80
  gRNA
aggtggaggagtttcgcgtc

SEQ ID NO: 28085 - DNA, 20 bp, Artificial Sequence
  MKO10028085_A_Krt80
  gRNA
cgctgccacatcgacctgag

SEQ ID NO: 28086 - DNA, 20 bp, Artificial Sequence
  MKO10028086_A_Krt80
  gRNA
cttcctccacgatgccgctc

SEQ ID NO: 28087 - DNA, 20 bp, Artificial Sequence
  MKO10028087_A_Krt81
  gRNA
tgctgagctcaaccatgcac

SEQ ID NO: 28088 - DNA, 20 bp, Artificial Sequence
  MKO10028088_A_Krt81
  gRNA
ggaagtttctctgagagcca

SEQ ID NO: 28089 - DNA, 20 bp, Artificial Sequence
  MKO10028089_A_Krt81
  gRNA
gaggcgggaagctgagtgtg

SEQ ID NO: 28090 - DNA, 20 bp, Artificial Sequence
  MKO10028090_A_Krt82
  gRNA
cacagtccagctgtcgccgc

SEQ ID NO: 28091 - DNA, 20 bp, Artificial Sequence
  MKO10028091_A_Krt82
  gRNA
tataaccctccagcgcctcc

SEQ ID NO: 28092 - DNA, 20 bp, Artificial Sequence
  MKO10028092_A_Krt82
  gRNA
cggcatcgtagccgagatca

SEQ ID NO: 28093 - DNA, 20 bp, Artificial Sequence
  MKO10028093_A_Krt83
  gRNA
ccaaacacaggtgcgcttcc

SEQ ID NO: 28094 - DNA, 20 bp, Artificial Sequence
  MKO10028094_A_Krt83
  gRNA
ctgtgtcagcgcttctgcgt

SEQ ID NO: 28095 - DNA, 20 bp, Artificial Sequence
  MKO10028095_A_Krt83
  gRNA
caacgcagaagcgctgacac

SEQ ID NO: 28096 - DNA, 20 bp, Artificial Sequence
  MKO10028096_A_Krt84
  gRNA
gaggcggagtcgtgcagatg

SEQ ID NO: 28097 - DNA, 20 bp, Artificial Sequence
  MKO10028097_A_Krt84
  gRNA
gtgatatagttatcgaagag

SEQ ID NO: 28098 - DNA, 20 bp, Artificial Sequence
  MKO10028098_A_Krt84
  gRNA
cttcagctatgatcccatct

SEQ ID NO: 28099 - DNA, 20 bp, Artificial Sequence
  MKO10028099_A_Krt85
  gRNA
cacatctgtcatcgtcaaga

SEQ ID NO: 28100 - DNA, 20 bp, Artificial Sequence
  MKO10028100_A_Krt85
  gRNA
atgaagaagaagttgcactc

SEQ ID NO: 28101 - DNA, 20 bp, Artificial Sequence
  MKO10028101_A_Krt85
  gRNA
tgcatggcaggtgcgcttcc

SEQ ID NO: 28102 - DNA, 20 bp, Artificial Sequence
  MKO10028102_A_Krt86
  gRNA
agccgagctcaaccatgcgc

SEQ ID NO: 28103 - DNA, 20 bp, Artificial Sequence
  MKO10028103_A_Krt86
  gRNA
ctacctgcgcaagtcagacc

SEQ ID NO: 28104 - DNA, 20 bp, Artificial Sequence
  MKO10028104_A_Krt86
  gRNA
tacagctgagaatgagtttg

SEQ ID NO: 28105 - DNA, 20 bp, Artificial Sequence
  MKO10028105_A_Krt8
  gRNA
tgaaaccatgtaccagatta

SEQ ID NO: 28106 - DNA, 20 bp, Artificial Sequence
  MKO10028106_A_Krt8
  gRNA
ccgacgagatcaacttcctc

SEQ ID NO: 28107 - DNA, 20 bp, Artificial Sequence
  MKO10028107_A_Krt8
  gRNA
gtacctcttcatggatctgc

SEQ ID NO: 28108 - DNA, 20 bp, Artificial Sequence
  MKO10028108_A_Krt9
  gRNA
cgacaatactcgcatgacta

SEQ ID NO: 28109 - DNA, 20 bp, Artificial Sequence
  MKO10028109_A_Krt9
  gRNA
gctcatttctaagaaccgcc

SEQ ID NO: 28110 - DNA, 20 bp, Artificial Sequence
  MKO10028110_A_Krt9
  gRNA
ctcctagcacagatctcacc

SEQ ID NO: 28111 - DNA, 20 bp, Artificial Sequence
  MKO10028111_A_Krtap1-3
  gRNA
caacctgggtcttaacaggt

SEQ ID NO: 28112 - DNA, 20 bp, Artificial Sequence
  MKO10028112_A_Krtap1-3
  gRNA
tgctgccgtccatcctattg

SEQ ID NO: 28113 - DNA, 20 bp, Artificial Sequence
  MKO10028113_A_Krtap1-3
  gRNA
tttcccacatgttccactgg

SEQ ID NO: 28114 - DNA, 20 bp, Artificial Sequence
  MKO10028114_A_Krtap1-4
  gRNA
agaaccacatgtgccgccag

SEQ ID NO: 28115 - DNA, 20 bp, Artificial Sequence
  MKO10028115_A_Krtap1-4
  gRNA
tgctgcgctactagtttctg

SEQ ID NO: 28116 - DNA, 20 bp, Artificial Sequence
  MKO10028116_A_Krtap1-4
  gRNA
ccgccctgactgccgtgtgg

SEQ ID NO: 28117 - DNA, 20 bp, Artificial Sequence
  MKO10028117_A_Krtap1-5
  gRNA
ctgccagctgcaccacgccc

SEQ ID NO: 28118 - DNA, 20 bp, Artificial Sequence
  MKO10028118_A_Krtap1-5
  gRNA
acaggctatggcattggggg

SEQ ID NO: 28119 - DNA, 20 bp, Artificial Sequence
  MKO10028119_A_Krtap1-5
  gRNA
cacctccaaagccaccctcc

SEQ ID NO: 28120 - DNA, 20 bp, Artificial Sequence
  MKO10028120_A_Krtap10-10
  gRNA
ggaggcggccatggcgggtt

SEQ ID NO: 28121 - DNA, 20 bp, Artificial Sequence
  MKO10028121_A_Krtap10-10
  gRNA
acagcttgtcagctgatcac

SEQ ID NO: 28122 - DNA, 20 bp, Artificial Sequence
  MKO10028122_A_Krtap10-10
  gRNA
gagcctggccggcctaactg

SEQ ID NO: 28123 - DNA, 20 bp, Artificial Sequence
  MKO10028123_A_Krtap10-4
  gRNA
ctcctccagcctacccgcca

SEQ ID NO: 28124 - DNA, 20 bp, Artificial Sequence
  MKO10028124_A_Krtap10-4
  gRNA
tggaggcagccatggcgggt

SEQ ID NO: 28125 - DNA, 20 bp, Artificial Sequence
  MKO10028125_A_Krtap10-4
  gRNA
gacctaagtcagctgtcacc

SEQ ID NO: 28126 - DNA, 20 bp, Artificial Sequence
  MKO10028126_A_Krtap11-1
  gRNA
cggctacagggcgtagagca

SEQ ID NO: 28127 - DNA, 20 bp, Artificial Sequence
  MKO10028127_A_Krtap11-1
  gRNA
cttgctctacgccctgtagc

SEQ ID NO: 28128 - DNA, 20 bp, Artificial Sequence
  MKO10028128_A_Krtap11-1
  gRNA
aggacgttacactgctccag

SEQ ID NO: 28129 - DNA, 20 bp, Artificial Sequence
  MKO10028129_A_Krtap12-1
  gRNA
gacaggcttgcagaccagag

SEQ ID NO: 28130 - DNA, 20 bp, Artificial Sequence
  MKO10028130_A_Krtap12-1
  gRNA
ttgtgtgtctagtccctgcc

SEQ ID NO: 28131 - DNA, 20 bp, Artificial Sequence
  MKO10028131_A_Krtap12-1
  gRNA
agagcctgatcaacagcaag

SEQ ID NO: 28132 - DNA, 20 bp, Artificial Sequence
  MKO10028132_A_Krtap13-1
  gRNA
atgtcctacggctgctattc

SEQ ID NO: 28133 - DNA, 20 bp, Artificial Sequence
  MKO10028133_A_Krtap13-1
  gRNA
agcactcgcttctactcccc

SEQ ID NO: 28134 - DNA, 20 bp, Artificial Sequence
  MKO10028134_A_Krtap13-1
  gRNA
tagacccataaccctgagag

SEQ ID NO: 28135 - DNA, 20 bp, Artificial Sequence
  MKO10028135_A_Krtap13
  gRNA
gacaacagatctgtgatatc

SEQ ID NO: 28136 - DNA, 20 bp, Artificial Sequence
  MKO10028136_A_Krtap13
  gRNA
cagaagcgagatgtgtagag

SEQ ID NO: 28137 - DNA, 20 bp, Artificial Sequence
  MKO10028137_A_Krtap13
  gRNA
caagaatagaaatccctaga

SEQ ID NO: 28138 - DNA, 20 bp, Artificial Sequence
  MKO10028138_A_Krtap14
  gRNA
agtgctgtagaagacgttgt

SEQ ID NO: 28139 - DNA, 20 bp, Artificial Sequence
  MKO10028139_A_Krtap14
  gRNA
gaggaaccgcatgaagagat

SEQ ID NO: 28140 - DNA, 20 bp, Artificial Sequence
  MKO10028140_A_Krtap14
  gRNA
aaaagctggatccacaattt

SEQ ID NO: 28141 - DNA, 20 bp, Artificial Sequence
  MKO10028141_A_Krtap15
  gRNA
ggatccaacttctaccgtcc

SEQ ID NO: 28142 - DNA, 20 bp, Artificial Sequence
  MKO10028142_A_Krtap15
  gRNA
atgaaggtttcgctacctga

SEQ ID NO: 28143 - DNA, 20 bp, Artificial Sequence
  MKO10028143_A_Krtap15
  gRNA
gtattgcttaggccggaaac

SEQ ID NO: 28144 - DNA, 20 bp, Artificial Sequence
  MKO10028144_A_Krtap16-1
  gRNA
atcctccacagcatgaagag

SEQ ID NO: 28145 - DNA, 20 bp, Artificial Sequence
  MKO10028145_A_Krtap16-1
  gRNA
tgccgccgctcttcatgctg

SEQ ID NO: 28146 - DNA, 20 bp, Artificial Sequence
  MKO10028146_A_Krtap16-1
  gRNA
aaaatcatgagctactacag

SEQ ID NO: 28147 - DNA, 20 bp, Artificial Sequence
  MKO10028147_A_Krtap16-3
  gRNA
taatcttcccatcgaattta

SEQ ID NO: 28148 - DNA, 20 bp, Artificial Sequence
  MKO10028148_A_Krtap16-3
  gRNA
ctgtagtagctcatgatatc

SEQ ID NO: 28149 - DNA, 20 bp, Artificial Sequence
  MKO10028149_A_Krtap16-3
  gRNA
gcagttcactcagtagaagc

SEQ ID NO: 28150 - DNA, 20 bp, Artificial Sequence
  MKO10028150_A_Krtap17-1
  gRNA
ggctccggatgctgcggtgg

SEQ ID NO: 28151 - DNA, 20 bp, Artificial Sequence
  MKO10028151_A_Krtap17-1
  gRNA
agaacctccgcagccacagc

SEQ ID NO: 28152 - DNA, 20 bp, Artificial Sequence
  MKO10028152_A_Krtap17-1
  gRNA
tgaggagtgttgctgccagc

SEQ ID NO: 28153 - DNA, 20 bp, Artificial Sequence
  MKO10028153_A_Krtap19-1
  gRNA
gcaattcactcagtagaagt

SEQ ID NO: 28154 - DNA, 20 bp, Artificial Sequence
  MKO10028154_A_Krtap19-1
  gRNA
ccatatcttccacagcatga

SEQ ID NO: 28155 - DNA, 20 bp, Artificial Sequence
  MKO10028155_A_Krtap19-1
  gRNA
ggctctagctatggaggcta

SEQ ID NO: 28156 - DNA, 20 bp, Artificial Sequence
  MKO10028156_A_Krtap19-3
  gRNA
ggctacggctatggcagctt

SEQ ID NO: 28157 - DNA, 20 bp, Artificial Sequence
  MKO10028157_A_Krtap19-3
  gRNA
ctccatagtagctgctgtag

SEQ ID NO: 28158 - DNA, 20 bp, Artificial Sequence
  MKO10028158_A_Krtap19-3
  gRNA
agccaaagcccaccagtctg

SEQ ID NO: 28159 - DNA, 20 bp, Artificial Sequence
  MKO10028159_A_Krtap19-4
  gRNA
tacaggcgccccctttccta

SEQ ID NO: 28160 - DNA, 20 bp, Artificial Sequence
  MKO10028160_A_Krtap19-4
  gRNA
atccatatcccccataggaa

SEQ ID NO: 28161 - DNA, 20 bp, Artificial Sequence
  MKO10028161_A_Krtap19-4
  gRNA
ctgtggcagtttccgcagac

SEQ ID NO: 28162 - DNA, 20 bp, Artificial Sequence
  MKO10028162_A_Krtap19-5
  gRNA
taccgccgccccctttatta

SEQ ID NO: 28163 - DNA, 20 bp, Artificial Sequence
  MKO10028163_A_Krtap19-5
  gRNA
catccgaggctttgggaacc

SEQ ID NO: 28164 - DNA, 20 bp, Artificial Sequence
  MKO10028164_A_Krtap19-5
  gRNA
ggaggttacggatatggatc

SEQ ID NO: 28165 - DNA, 20 bp, Artificial Sequence
  MKO10028165_A_Krtap19-9b
  gRNA
tggaaccatagccatatccc

SEQ ID NO: 28166 - DNA, 20 bp, Artificial Sequence
  MKO10028166_A_Krtap19-9b
  gRNA
aacacaatgagctactacta

SEQ ID NO: 28167 - DNA, 20 bp, Artificial Sequence
  MKO10028167_A_Krtap19-9b
  gRNA
caaatatcctccatagaaag

SEQ ID NO: 28168 - DNA, 20 bp, Artificial Sequence
  MKO10028168_A_Krtap2-4
  gRNA
ggctcagcagcaggtgttac

SEQ ID NO: 28169 - DNA, 20 bp, Artificial Sequence
  MKO10028169_A_Krtap2-4
  gRNA
accatgacaggctcctgctg

SEQ ID NO: 28170 - DNA, 20 bp, Artificial Sequence
  MKO10028170_A_Krtap2-4
  gRNA
cctggtgcagtggggcacac

SEQ ID NO: 28171 - DNA, 20 bp, Artificial Sequence
  MKO10028171_A_Krtap20-2
  gRNA
cagtatcttctatagcagag

SEQ ID NO: 28172 - DNA, 20 bp, Artificial Sequence
  MKO10028172_A_Krtap20-2
  gRNA
agctcttcagtagaagccac

SEQ ID NO: 28173 - DNA, 20 bp, Artificial Sequence
  MKO10028173_A_Krtap20-2
  gRNA
cactctgctatagaagatac

SEQ ID NO: 28174 - DNA, 20 bp, Artificial Sequence
  MKO10028174_A_Krtap21-1
  gRNA
tccgtagtagttgcagcaca

SEQ ID NO: 28175 - DNA, 20 bp, Artificial Sequence
  MKO10028175_A_Krtap21-1
  gRNA
tggtacagactagcagcaag

SEQ ID NO: 28176 - DNA, 20 bp, Artificial Sequence
  MKO10028176_A_Krtap21-1
  gRNA
gccgtatccacagcctccac

SEQ ID NO: 28177 - DNA, 20 bp, Artificial Sequence
  MKO10028177_A_Krtap22-2
  gRNA
atgtgctacggaaactactt

SEQ ID NO: 28178 - DNA, 20 bp, Artificial Sequence
  MKO10028178_A_Krtap22-2
  gRNA
acctatcgcccatgctgcta

SEQ ID NO: 28179 - DNA, 20 bp, Artificial Sequence
  MKO10028179_A_Krtap22-2
  gRNA
gaaagtcttccatagcagca

SEQ ID NO: 28180 - DNA, 20 bp, Artificial Sequence
  MKO10028180_A_Krtap24-1
  gRNA
gcgtcacggggatgtagcag

SEQ ID NO: 28181 - DNA, 20 bp, Artificial Sequence
  MKO10028181_A_Krtap24-1
  gRNA
aagcttgaaggcacgtaatt

SEQ ID NO: 28182 - DNA, 20 bp, Artificial Sequence
  MKO10028182_A_Krtap24-1
  gRNA
gcagttggatacataccctt

SEQ ID NO: 28183 - DNA, 20 bp, Artificial Sequence
  MKO10028183_A_Krtap26-1
  gRNA
gctatgtatctagcagttgc

SEQ ID NO: 28184 - DNA, 20 bp, Artificial Sequence
  MKO10028184_A_Krtap26-1
  gRNA
cggcagctattggatccaca

SEQ ID NO: 28185 - DNA, 20 bp, Artificial Sequence
  MKO10028185_A_Krtap26-1
  gRNA
ccaccagatacacagcttac

SEQ ID NO: 28186 - DNA, 20 bp, Artificial Sequence
  MKO10028186_A_Krtap27-1
  gRNA
atagccattgccagtcattc

SEQ ID NO: 28187 - DNA, 20 bp, Artificial Sequence
  MKO10028187_A_Krtap27-1
  gRNA
tggattcaaactccaacgtc

SEQ ID NO: 28188 - DNA, 20 bp, Artificial Sequence
  MKO10028188_A_Krtap27-1
  gRNA
acctgccaaccagccaattg

SEQ ID NO: 28189 - DNA, 20 bp, Artificial Sequence
  MKO10028189_A_Krtap3-1
  gRNA
aagtgtacgtgccaacctgc

SEQ ID NO: 28190 - DNA, 20 bp, Artificial Sequence
  MKO10028190_A_Krtap3-1
  gRNA
ttggcacgtacacttcaggc

SEQ ID NO: 28191 - DNA, 20 bp, Artificial Sequence
  MKO10028191_A_Krtap3-1
  gRNA
gacttgactgcttaacagca

SEQ ID NO: 28192 - DNA, 20 bp, Artificial Sequence
  MKO10028192_A_Krtap3-2
  gRNA
cgctgctgcagtgtccccac

SEQ ID NO: 28193 - DNA, 20 bp, Artificial Sequence
  MKO10028193_A_Krtap3-2
  gRNA
gccacaggtcagcagcacct

SEQ ID NO: 28194 - DNA, 20 bp, Artificial Sequence
  MKO10028194_A_Krtap3-2
  gRNA
cggtggggacactgcagcag

SEQ ID NO: 28195 - DNA, 20 bp, Artificial Sequence
  MKO10028195_A_Krtap3-3
  gRNA
cgctgctgcagtgtccccac

SEQ ID NO: 28196 - DNA, 20 bp, Artificial Sequence
  MKO10028196_A_Krtap3-3
  gRNA
gccacaggtcagcagcacct

SEQ ID NO: 28197 - DNA, 20 bp, Artificial Sequence
  MKO10028197_A_Krtap3-3
  gRNA
cggtggggacactgcagcag

SEQ ID NO: 28198 - DNA, 20 bp, Artificial Sequence
  MKO10028198_A_Krtap31-1
  gRNA
cgctgataaccagctcccaa

SEQ ID NO: 28199 - DNA, 20 bp, Artificial Sequence
  MKO10028199_A_Krtap31-1
  gRNA
ctttgggagctggttatcag

SEQ ID NO: 28200 - DNA, 20 bp, Artificial Sequence
  MKO10028200_A_Krtap31-1
  gRNA
gctgcaaccaatgatcacac

SEQ ID NO: 28201 - DNA, 20 bp, Artificial Sequence
  MKO10028201_A_Krtap31-2
  gRNA
cactgatgaccagctcccaa

SEQ ID NO: 28202 - DNA, 20 bp, Artificial Sequence
  MKO10028202_A_Krtap31-2
  gRNA
ctttgggagctggtcatcag

SEQ ID NO: 28203 - DNA, 20 bp, Artificial Sequence
  MKO10028203_A_Krtap31-2
  gRNA
ggagatggtcttgcagcagc

SEQ ID NO: 28204 - DNA, 20 bp, Artificial Sequence
  MKO10028204_A_Krtap4-13
  gRNA
accatggtcagctcctgctg

SEQ ID NO: 28205 - DNA, 20 bp, Artificial Sequence
  MKO10028205_A_Krtap4-13
  gRNA
gcagcaagaaccactagaac

SEQ ID NO: 28206 - DNA, 20 bp, Artificial Sequence
  MKO10028206_A_Krtap4-13
  gRNA
cagctggaaatgcagcagct

SEQ ID NO: 28207 - DNA, 20 bp, Artificial Sequence
  MKO10028207_A_Krtap4-16
  gRNA
gcaagttgtacggcagcaag

SEQ ID NO: 28208 - DNA, 20 bp, Artificial Sequence
  MKO10028208_A_Krtap4-16
  gRNA
tgctgccgtacaacttgctg

SEQ ID NO: 28209 - DNA, 20 bp, Artificial Sequence
  MKO10028209_A_Krtap4-16
  gRNA
ctgtgatcaaagtccctgcc

SEQ ID NO: 28210 - DNA, 20 bp, Artificial Sequence
  MKO10028210_A_Krtap4-1
  gRNA
agctgctgtcgaccttcctg

SEQ ID NO: 28211 - DNA, 20 bp, Artificial Sequence
  MKO10028211_A_Krtap4-1
  gRNA
acaatggtcaactcttgttg

SEQ ID NO: 28212 - DNA, 20 bp, Artificial Sequence
  MKO10028212_A_Krtap4-1
  gRNA
ttagggatctcagcagcagc

SEQ ID NO: 28213 - DNA, 20 bp, Artificial Sequence
  MKO10028213_A_Krtap4-2
  gRNA
ttcaaagagatttagcagca

SEQ ID NO: 28214 - DNA, 20 bp, Artificial Sequence
  MKO10028214_A_Krtap4-2
  gRNA
agagccacaagagctgacca

SEQ ID NO: 28215 - DNA, 20 bp, Artificial Sequence
  MKO10028215_A_Krtap4-2
  gRNA
gacaccatggtcagctcttg

SEQ ID NO: 28216 - DNA, 20 bp, Artificial Sequence
  MKO10028216_A_Krtap4-6
  gRNA
gacagagccacaacaagagt

SEQ ID NO: 28217 - DNA, 20 bp, Artificial Sequence
  MKO10028217_A_Krtap4-6
  gRNA
accatggccaactcttgttg

SEQ ID NO: 28218 - DNA, 20 bp, Artificial Sequence
  MKO10028218_A_Krtap4-6
  gRNA
caagaaccactagagcacgc

SEQ ID NO: 28219 - DNA, 20 bp, Artificial Sequence
  MKO10028219_A_Krtap4-7
  gRNA
agctgctgccaaccatcttg

SEQ ID NO: 28220 - DNA, 20 bp, Artificial Sequence
  MKO10028220_A_Krtap4-7
  gRNA
ggcatggaggctcagcaaca

SEQ ID NO: 28221 - DNA, 20 bp, Artificial Sequence
  MKO10028221_A_Krtap4-7
  gRNA
cagctagaaccaccacaaga

SEQ ID NO: 28222 - DNA, 20 bp, Artificial Sequence
  MKO10028222_A_Krtap4-8
  gRNA
caagagccactagagcatgc

SEQ ID NO: 28223 - DNA, 20 bp, Artificial Sequence
  MKO10028223_A_Krtap4-8
  gRNA
ccctgctgtcgtccctgctg

SEQ ID NO: 28224 - DNA, 20 bp, Artificial Sequence
  MKO10028224_A_Krtap4-8
  gRNA
acagctagaactaccacagc

SEQ ID NO: 28225 - DNA, 20 bp, Artificial Sequence
  MKO10028225_A_Krtap4-9
  gRNA
caagaaccactagagcatga

SEQ ID NO: 28226 - DNA, 20 bp, Artificial Sequence
  MKO10028226_A_Krtap4-9
  gRNA
gcagctagaactaccacagc

SEQ ID NO: 28227 - DNA, 20 bp, Artificial Sequence
  MKO10028227_A_Krtap4-9
  gRNA
tgccgcccatcatgctctag

SEQ ID NO: 28228 - DNA, 20 bp, Artificial Sequence
  MKO10028228_A_Krtap5-1
  gRNA
tgcaagccctgttgctcttc

SEQ ID NO: 28229 - DNA, 20 bp, Artificial Sequence
  MKO10028229_A_Krtap5-1
  gRNA
ggctctggctgtgggggatg

SEQ ID NO: 28230 - DNA, 20 bp, Artificial Sequence
  MKO10028230_A_Krtap5-1
  gRNA
gcagctagactgacaacagc

SEQ ID NO: 28231 - DNA, 20 bp, Artificial Sequence
  MKO10028231_A_Krtap5-2
  gRNA
ggtggagagacaagatgtgt

SEQ ID NO: 28232 - DNA, 20 bp, Artificial Sequence
  MKO10028232_A_Krtap5-2
  gRNA
tgccctgatgctttcctgac

SEQ ID NO: 28233 - DNA, 20 bp, Artificial Sequence
  MKO10028233_A_Krtap5-2
  gRNA
acagctggattggcaacaac

SEQ ID NO: 28234 - DNA, 20 bp, Artificial Sequence
  MKO10028234_A_Krtap5-3
  gRNA
cattcttccatgccaatagc

SEQ ID NO: 28235 - DNA, 20 bp, Artificial Sequence
  MKO10028235_A_Krtap5-3
  gRNA
ggatctgggtttcctattag

SEQ ID NO: 28236 - DNA, 20 bp, Artificial Sequence
  MKO10028236_A_Krtap5-3
  gRNA
ccataaggtatgttcaccac

SEQ ID NO: 28237 - DNA, 20 bp, Artificial Sequence
  MKO10028237_A_Krtap5-4
  gRNA
gcagcccccacagctagagc

SEQ ID NO: 28238 - DNA, 20 bp, Artificial Sequence
  MKO10028238_A_Krtap5-4
  gRNA
gtctgttcctgctctagctg

SEQ ID NO: 28239 - DNA, 20 bp, Artificial Sequence
  MKO10028239_A_Krtap5-4
  gRNA
gcacacaggggcacagcagc

SEQ ID NO: 28240 - DNA, 20 bp, Artificial Sequence
  MKO10028240_A_Krtap5-5
  gRNA
cccacaacctgaagaacagc

SEQ ID NO: 28241 - DNA, 20 bp, Artificial Sequence
  MKO10028241_A_Krtap5-5
  gRNA
tgcaaaccctgctgttcttc

SEQ ID NO: 28242 - DNA, 20 bp, Artificial Sequence
  MKO10028242_A_Krtap5-5
  gRNA
acccttgcagcccccacagc

SEQ ID NO: 28243 - DNA, 20 bp, Artificial Sequence
  MKO10028243_A_Krtap6-1
  gRNA
tgtggctatggatgcggctc

SEQ ID NO: 28244 - DNA, 20 bp, Artificial Sequence
  MKO10028244_A_Krtap6-1
  gRNA
agaaccatgtgtggctacta

SEQ ID NO: 28245 - DNA, 20 bp, Artificial Sequence
  MKO10028245_A_Krtap6-1
  gRNA
catagccacagcccagtcca

SEQ ID NO: 28246 - DNA, 20 bp, Artificial Sequence
  MKO10028246_A_Krtap6-2
  gRNA
gccttctaaaaatgtgcagc

SEQ ID NO: 28247 - DNA, 20 bp, Artificial Sequence
  MKO10028247_A_Krtap6-2
  gRNA
aacatgtgttgtaactacta

SEQ ID NO: 28248 - DNA, 20 bp, Artificial Sequence
  MKO10028248_A_Krtap6-2
  gRNA
acaacacatgttgtcaatag

SEQ ID NO: 28249 - DNA, 20 bp, Artificial Sequence
  MKO10028249_A_Krtap6-5
  gRNA
ggatttggctactactactg

SEQ ID NO: 28250 - DNA, 20 bp, Artificial Sequence
  MKO10028250_A_Krtap6-5
  gRNA
ggctatggaggcttgggctg

SEQ ID NO: 28251 - DNA, 20 bp, Artificial Sequence
  MKO10028251_A_Krtap6-5
  gRNA
ctgctgtggctgtggaggcc

SEQ ID NO: 28252 - DNA, 20 bp, Artificial Sequence
  MKO10028252_A_Krtap7-1
  gRNA
atgactcgctatttctgctg

SEQ ID NO: 28253 - DNA, 20 bp, Artificial Sequence
  MKO10028253_A_Krtap7-1
  gRNA
tgtacatggttccgcagcca

SEQ ID NO: 28254 - DNA, 20 bp, Artificial Sequence
  MKO10028254_A_Krtap7-1
  gRNA
agctcccgcaacttctgcta

SEQ ID NO: 28255 - DNA, 20 bp, Artificial Sequence
  MKO10028255_A_Krtap8-1
  gRNA
cctgacatcatgtactacac

SEQ ID NO: 28256 - DNA, 20 bp, Artificial Sequence
  MKO10028256_A_Krtap8-1
  gRNA
cagccaacactgtaccccag

SEQ ID NO: 28257 - DNA, 20 bp, Artificial Sequence
  MKO10028257_A_Krtap8-1
  gRNA
gggcagctatggctaccctc

SEQ ID NO: 28258 - DNA, 20 bp, Artificial Sequence
  MKO10028258_A_Krtap9-1
  gRNA
aataattcatcaacagccac

SEQ ID NO: 28259 - DNA, 20 bp, Artificial Sequence
  MKO10028259_A_Krtap9-1
  gRNA
agtccagctgctgccagcct

SEQ ID NO: 28260 - DNA, 20 bp, Artificial Sequence
  MKO10028260_A_Krtap9-1
  gRNA
agtccagctgctgccagccc

SEQ ID NO: 28261 - DNA, 20 bp, Artificial Sequence
  MKO10028261_A_Krtap9-3
  gRNA
cagccaagctgttgcgagac

SEQ ID NO: 28262 - DNA, 20 bp, Artificial Sequence
  MKO10028262_A_Krtap9-3
  gRNA
aagccagtctcgcaacagct

SEQ ID NO: 28263 - DNA, 20 bp, Artificial Sequence
  MKO10028263_A_Krtap9-3
  gRNA
ccagaaggctttcaacagct

SEQ ID NO: 28264 - DNA, 20 bp, Artificial Sequence
  MKO10028264_A_Krtap9-5
  gRNA
cagcagctagttatacagat

SEQ ID NO: 28265 - DNA, 20 bp, Artificial Sequence
  MKO10028265_A_Krtap9-5
  gRNA
tggactgcaactggtcacat

SEQ ID NO: 28266 - DNA, 20 bp, Artificial Sequence
  MKO10028266_A_Krtap9-5
  gRNA
gcaggtggtttcacacatgc

SEQ ID NO: 28267 - DNA, 20 bp, Artificial Sequence
  MKO10028267_A_Krtcap2
  gRNA
tcatttatagtagtcggtac

SEQ ID NO: 28268 - DNA, 20 bp, Artificial Sequence
  MKO10028268_A_Krtcap2
  gRNA
gcagatctacagccgccagc

SEQ ID NO: 28269 - DNA, 20 bp, Artificial Sequence
  MKO10028269_A_Krtcap2
  gRNA
gatatcgtccactctgtacc

SEQ ID NO: 28270 - DNA, 20 bp, Artificial Sequence
  MKO10028270_A_Krtcap3
  gRNA
actcaggagtgaccgcgcct

SEQ ID NO: 28271 - DNA, 20 bp, Artificial Sequence
  MKO10028271_A_Krtcap3
  gRNA
cgtggccaacccccgaggcg

SEQ ID NO: 28272 - DNA, 20 bp, Artificial Sequence
  MKO10028272_A_Krtcap3
  gRNA
gatggatccttccataccgc

SEQ ID NO: 28273 - DNA, 20 bp, Artificial Sequence
  MKO10028273_A_Krtdap
  gRNA
taattaccctaccgcaacag

SEQ ID NO: 28274 - DNA, 20 bp, Artificial Sequence
  MKO10028274_A_Krtdap
  gRNA
gtgtttacctctgttgcggt

SEQ ID NO: 28275 - DNA, 20 bp, Artificial Sequence
  MKO10028275_A_Krtdap
  gRNA
cagtgatgacgtgccagttc

SEQ ID NO: 28276 - DNA, 20 bp, Artificial Sequence
  MKO10028276_A_Ksr1
  gRNA
tcggggtgacgtcgtcgatt

SEQ ID NO: 28277 - DNA, 20 bp, Artificial Sequence
  MKO10028277_A_Ksr1
  gRNA
gcttggcgtgccgtcgtagc

SEQ ID NO: 28278 - DNA, 20 bp, Artificial Sequence
  MKO10028278_A_Ksr1
  gRNA
agctcggcggtcctgtcgct

SEQ ID NO: 28279 - DNA, 20 bp, Artificial Sequence
  MKO10028279_A_Ksr2
  gRNA
accgcaaggagcgctcggac

SEQ ID NO: 28280 - DNA, 20 bp, Artificial Sequence
  MKO10028280_A_Ksr2
  gRNA
cgtctacacggttcccgagc

SEQ ID NO: 28281 - DNA, 20 bp, Artificial Sequence
  MKO10028281_A_Ksr2
  gRNA
tgcggactacgtgccgctgc

SEQ ID NO: 28282 - DNA, 20 bp, Artificial Sequence
  MKO10028282_A_Kti12
  gRNA
cgtccgctggctcttgccgc

SEQ ID NO: 28283 - DNA, 20 bp, Artificial Sequence
  MKO10028283_A_Kti12
  gRNA
ggagatcatgccgctcgtcg

SEQ ID NO: 28284 - DNA, 20 bp, Artificial Sequence
  MKO10028284_A_Kti12
  gRNA
agcccgcaaaccacgacgag

SEQ ID NO: 28285 - DNA, 20 bp, Artificial Sequence
  MKO10028285_A_Ktn1
  gRNA
gcgctgtaagcagttgactc

SEQ ID NO: 28286 - DNA, 20 bp, Artificial Sequence
  MKO10028286_A_Ktn1
  gRNA
tgcaactacttacattcctt

SEQ ID NO: 28287 - DNA, 20 bp, Artificial Sequence
  MKO10028287_A_Ktn1
  gRNA
tgctaactcaaatctcatga

SEQ ID NO: 28288 - DNA, 20 bp, Artificial Sequence
  MKO10028288_A_Kxd1
  gRNA
catctgttgcagccgcacac

SEQ ID NO: 28289 - DNA, 20 bp, Artificial Sequence
  MKO10028289_A_Kxd1
  gRNA
catgcaccatacccgcacct

SEQ ID NO: 28290 - DNA, 20 bp, Artificial Sequence
  MKO10028290_A_Kxd1
  gRNA
cacttacggctgaaggcctc

SEQ ID NO: 28291 - DNA, 20 bp, Artificial Sequence
  MKO10028291_A_Kynu
  gRNA
ccttggccttcaaccgaaaa

SEQ ID NO: 28292 - DNA, 20 bp, Artificial Sequence
  MKO10028292_A_Kynu
  gRNA
gagtattgtaagccttatga

SEQ ID NO: 28293 - DNA, 20 bp, Artificial Sequence
  MKO10028293_A_Kynu
  gRNA
atgatgtaggcaaacgccct

SEQ ID NO: 28294 - DNA, 20 bp, Artificial Sequence
  MKO10028294_A_Ky
  gRNA
aacatgagaccccggcagcc

SEQ ID NO: 28295 - DNA, 20 bp, Artificial Sequence
  MKO10028295_A_Ky
  gRNA
atcacctcctacgacaacca

SEQ ID NO: 28296 - DNA, 20 bp, Artificial Sequence
  MKO10028296_A_Ky
  gRNA
tctcttaccttggttgtcgt

SEQ ID NO: 28297 - DNA, 20 bp, Artificial Sequence
  MKO10028297_A_L1cam
  gRNA
aggttccgctggacgaaaga

SEQ ID NO: 28298 - DNA, 20 bp, Artificial Sequence
  MKO10028298_A_L1cam
  gRNA
gtcgcatgagatccagctcg

SEQ ID NO: 28299 - DNA, 20 bp, Artificial Sequence
  MKO10028299_A_L1cam
  gRNA
gctagagccacctgtcatca

SEQ ID NO: 28300 - DNA, 20 bp, Artificial Sequence
  MKO10028300_A_L1td1
  gRNA
cccaaagagagcccgcccga

SEQ ID NO: 28301 - DNA, 20 bp, Artificial Sequence
  MKO10028301_A_L1td1
  gRNA
gatgagcgctgacaatctcg

SEQ ID NO: 28302 - DNA, 20 bp, Artificial Sequence
  MKO10028302_A_L1td1
  gRNA
ttccttagcttgcacgattg

SEQ ID NO: 28303 - DNA, 20 bp, Artificial Sequence
  MKO10028303_A_L2hgdh
  gRNA
tagttcacaatgccggtgta

SEQ ID NO: 28304 - DNA, 20 bp, Artificial Sequence
  MKO10028304_A_L2hgdh
  gRNA
cagacactcaccctgcaata

SEQ ID NO: 28305 - DNA, 20 bp, Artificial Sequence
  MKO10028305_A_L2hgdh
  gRNA
caccgctgttgtgtccagtc

SEQ ID NO: 28306 - DNA, 20 bp, Artificial Sequence
  MKO10028306_A_L3hypdh
  gRNA
atgtgtgttctgcgaagacg

SEQ ID NO: 28307 - DNA, 20 bp, Artificial Sequence
  MKO10028307_A_L3hypdh
  gRNA
ctgcgtgtttgccgatgaac

SEQ ID NO: 28308 - DNA, 20 bp, Artificial Sequence
  MKO10028308_A_L3hypdh
  gRNA
ctgtcactcccgagccggtg

SEQ ID NO: 28309 - DNA, 20 bp, Artificial Sequence
  MKO10028309_A_L3mbtl1
  gRNA
tacgcgccactgaacatgat

SEQ ID NO: 28310 - DNA, 20 bp, Artificial Sequence
  MKO10028310_A_L3mbtl1
  gRNA
ctcccgatgaaccaacgtct

SEQ ID NO: 28311 - DNA, 20 bp, Artificial Sequence
  MKO10028311_A_L3mbtl1
  gRNA
agtggagcgaccacgaagcc

SEQ ID NO: 28312 - DNA, 20 bp, Artificial Sequence
  MKO10028312_A_L3mbtl2
  gRNA
ctctgcgaacaaccgctcct

SEQ ID NO: 28313 - DNA, 20 bp, Artificial Sequence
  MKO10028313_A_L3mbtl2
  gRNA
acttgccccagtcgaagccc

SEQ ID NO: 28314 - DNA, 20 bp, Artificial Sequence
  MKO10028314_A_L3mbtl2
  gRNA
tctgcagcgtctcgtgttcc

SEQ ID NO: 28315 - DNA, 20 bp, Artificial Sequence
  MKO10028315_A_L3mbtl3
  gRNA
tggcatgccgagcacaattc

SEQ ID NO: 28316 - DNA, 20 bp, Artificial Sequence
  MKO10028316_A_L3mbtl3
  gRNA
aaatacgggcctggagctcg

SEQ ID NO: 28317 - DNA, 20 bp, Artificial Sequence
  MKO10028317_A_L3mbtl3
  gRNA
cagtttcgagtaaatgagtt

SEQ ID NO: 28318 - DNA, 20 bp, Artificial Sequence
  MKO10028318_A_L3mbtl4
  gRNA
gtctacagagcgcatgaatc

SEQ ID NO: 28319 - DNA, 20 bp, Artificial Sequence
  MKO10028319_A_L3mbtl4
  gRNA
ctattattacctcgctttga

SEQ ID NO: 28320 - DNA, 20 bp, Artificial Sequence
  MKO10028320_A_L3mbtl4
  gRNA
agagtgagataagaacgcgc

SEQ ID NO: 28321 - DNA, 20 bp, Artificial Sequence
  MKO10028321_A_LOC100038947
  gRNA
ataaggtggttcaagggtgt

SEQ ID NO: 28322 - DNA, 20 bp, Artificial Sequence
  MKO10028322_A_LOC100038947
  gRNA
tacacccttgaaccacctta

SEQ ID NO: 28323 - DNA, 20 bp, Artificial Sequence
  MKO10028323_A_LOC100038947
  gRNA
cttacgcatgtaaatgacag

SEQ ID NO: 28324 - DNA, 20 bp, Artificial Sequence
  MKO10028324_A_LOC100040786
  gRNA
gttctcgtagagaagagtct

SEQ ID NO: 28325 - DNA, 20 bp, Artificial Sequence
  MKO10028325_A_LOC100040786
  gRNA
gtaatgagcctgtcacccat

SEQ ID NO: 28326 - DNA, 20 bp, Artificial Sequence
  MKO10028326_A_LOC100040786
  gRNA
tgtcacagagcactggctgg

SEQ ID NO: 28327 - DNA, 20 bp, Artificial Sequence
  MKO10028327_A_LOC100048884
  gRNA
tattacagattaatggggaa

SEQ ID NO: 28328 - DNA, 20 bp, Artificial Sequence
  MKO10028328_A_LOC100048884
  gRNA
agtatggaatttaagaacta

SEQ ID NO: 28329 - DNA, 20 bp, Artificial Sequence
  MKO10028329_A_LOC100048884
  gRNA
agagtgctccgaattatcta

SEQ ID NO: 28330 - DNA, 20 bp, Artificial Sequence
  MKO10028330_A_LOC100502896
  gRNA
cgttacaaagacttgtgtgc

SEQ ID NO: 28331 - DNA, 20 bp, Artificial Sequence
  MKO10028331_A_LOC100502896
  gRNA
acacaagtctttgtaacgag

SEQ ID NO: 28332 - DNA, 20 bp, Artificial Sequence
  MKO10028332_A_LOC100502896
  gRNA
tctgaatacctgaggaactt

SEQ ID NO: 28333 - DNA, 20 bp, Artificial Sequence
  MKO10028333_A_LOC100503280
  gRNA
ctcatgcagctgtaccgctg

SEQ ID NO: 28334 - DNA, 20 bp, Artificial Sequence
  MKO10028334_A_LOC100503280
  gRNA
gacaacgcaggtggcagtac

SEQ ID NO: 28335 - DNA, 20 bp, Artificial Sequence
  MKO10028335_A_LOC100503280
  gRNA
agcacaggctacacttcatg

SEQ ID NO: 28336 - DNA, 20 bp, Artificial Sequence
  MKO10028336_A_LOC100504608
  gRNA
ggccagctctcgcaccgatc

SEQ ID NO: 28337 - DNA, 20 bp, Artificial Sequence
  MKO10028337_A_LOC100504608
  gRNA
aggcaagaaggtgatcgaac

SEQ ID NO: 28338 - DNA, 20 bp, Artificial Sequence
  MKO10028338_A_LOC100504608
  gRNA
acaaggcgcacacccgagcc

SEQ ID NO: 28339 - DNA, 20 bp, Artificial Sequence
  MKO10028339_A_LOC100861615
  gRNA
tgaactagaagaactgaaat

SEQ ID NO: 28340 - DNA, 20 bp, Artificial Sequence
  MKO10028340_A_LOC100861615
  gRNA
tcaaatcctcatacatgtaa

SEQ ID NO: 28341 - DNA, 20 bp, Artificial Sequence
  MKO10028341_A_LOC100861615
  gRNA
acaacatgagaagacaatgt

SEQ ID NO: 28342 - DNA, 20 bp, Artificial Sequence
  MKO10028342_A_LOC100862015
  gRNA
tctgaatacctgaggaactt

SEQ ID NO: 28343 - DNA, 20 bp, Artificial Sequence
  MKO10028343_A_LOC100862015
  gRNA
gaaatgacaaagaagccaat

SEQ ID NO: 28344 - DNA, 20 bp, Artificial Sequence
  MKO10028344_A_LOC100862015
  gRNA
cacctggcacatagcctccc

SEQ ID NO: 28345 - DNA, 20 bp, Artificial Sequence
  MKO10028345_A_LOC101055863
  gRNA
tctgaatacctgaggaactt

SEQ ID NO: 28346 - DNA, 20 bp, Artificial Sequence
  MKO10028346_A_LOC101055863
  gRNA
gaaatgacaaagaagccaat

SEQ ID NO: 28347 - DNA, 20 bp, Artificial Sequence
  MKO10028347_A_LOC101055863
  gRNA
cacctggcacatagcctccc

SEQ ID NO: 28348 - DNA, 20 bp, Artificial Sequence
  MKO10028348_A_LOC102308570
  gRNA
gtacgtacgcccgcttcttg

SEQ ID NO: 28349 - DNA, 20 bp, Artificial Sequence
  MKO10028349_A_LOC102308570
  gRNA
tattaagcagggatcggcga

SEQ ID NO: 28350 - DNA, 20 bp, Artificial Sequence
  MKO10028350_A_LOC102308570
  gRNA
catctatagaacacgattta

SEQ ID NO: 28351 - DNA, 20 bp, Artificial Sequence
  MKO10028351_A_LOC666331
  gRNA
atcgaccagagcaatatgcg

SEQ ID NO: 28352 - DNA, 20 bp, Artificial Sequence
  MKO10028352_A_LOC666331
  gRNA
ccacaccacgcatattgctc

SEQ ID NO: 28353 - DNA, 20 bp, Artificial Sequence
  MKO10028353_A_LOC666331
  gRNA
gcttgccacctataccccaa

SEQ ID NO: 28354 - DNA, 20 bp, Artificial Sequence
  MKO10028354_A_Lacc1
  gRNA
caatctgtgtaccgaagtta

SEQ ID NO: 28355 - DNA, 20 bp, Artificial Sequence
  MKO10028355_A_Lacc1
  gRNA
aaggagcctgaatcttacga

SEQ ID NO: 28356 - DNA, 20 bp, Artificial Sequence
  MKO10028356_A_Lacc1
  gRNA
acgatcccatcgtaagattc

SEQ ID NO: 28357 - DNA, 20 bp, Artificial Sequence
  MKO10028357_A_Lace1
  gRNA
cccgatagctcccatagccg

SEQ ID NO: 28358 - DNA, 20 bp, Artificial Sequence
  MKO10028358_A_Lace1
  gRNA
ggcgtacaccctcggatgtc

SEQ ID NO: 28359 - DNA, 20 bp, Artificial Sequence
  MKO10028359_A_Lace1
  gRNA
acgcccaacagccgcttctg

SEQ ID NO: 28360 - DNA, 20 bp, Artificial Sequence
  MKO10028360_A_Lactb2
  gRNA
tgagaaatcatttaccgtaa

SEQ ID NO: 28361 - DNA, 20 bp, Artificial Sequence
  MKO10028361_A_Lactb2
  gRNA
cattgtcctaagttccgtta

SEQ ID NO: 28362 - DNA, 20 bp, Artificial Sequence
  MKO10028362_A_Lactb2
  gRNA
actgcattaaaaaacttcga

SEQ ID NO: 28363 - DNA, 20 bp, Artificial Sequence
  MKO10028363_A_Lactbl1
  gRNA
cggtacatggtatactcatt

SEQ ID NO: 28364 - DNA, 20 bp, Artificial Sequence
  MKO10028364_A_Lactbl1
  gRNA
gtgctggcatagcgctccag

SEQ ID NO: 28365 - DNA, 20 bp, Artificial Sequence
  MKO10028365_A_Lactbl1
  gRNA
ggtggatgggattctgcgca

SEQ ID NO: 28366 - DNA, 20 bp, Artificial Sequence
  MKO10028366_A_Lactb
  gRNA
agatgccgcagcgcgaagcc

SEQ ID NO: 28367 - DNA, 20 bp, Artificial Sequence
  MKO10028367_A_Lactb
  gRNA
ttcgctgtcctgctcgactt

SEQ ID NO: 28368 - DNA, 20 bp, Artificial Sequence
  MKO10028368_A_Lactb
  gRNA
tcgggaacatagtgctgcac

SEQ ID NO: 28369 - DNA, 20 bp, Artificial Sequence
  MKO10028369_A_Lad1
  gRNA
cagaaacacccttaacccgc

SEQ ID NO: 28370 - DNA, 20 bp, Artificial Sequence
  MKO10028370_A_Lad1
  gRNA
cgttcttcgtcctgggccca

SEQ ID NO: 28371 - DNA, 20 bp, Artificial Sequence
  MKO10028371_A_Lad1
  gRNA
cgtcctccaaagtccgctgt

SEQ ID NO: 28372 - DNA, 20 bp, Artificial Sequence
  MKO10028372_A_Lag3
  gRNA
tcgaggcctggccgacgcgc

SEQ ID NO: 28373 - DNA, 20 bp, Artificial Sequence
  MKO10028373_A_Lag3
  gRNA
tgtagacaggcactcggttc

SEQ ID NO: 28374 - DNA, 20 bp, Artificial Sequence
  MKO10028374_A_Lag3
  gRNA
gctcagcaccgtgtagcgac

SEQ ID NO: 28375 - DNA, 20 bp, Artificial Sequence
  MKO10028375_A_Lage3
  gRNA
cactcttagacgctggatcg

SEQ ID NO: 28376 - DNA, 20 bp, Artificial Sequence
  MKO10028376_A_Lage3
  gRNA
acagcggctagtctgaccat

SEQ ID NO: 28377 - DNA, 20 bp, Artificial Sequence
  MKO10028377_A_Lage3
  gRNA
ccagatgtcgaaccacatcg

SEQ ID NO: 28378 - DNA, 20 bp, Artificial Sequence
  MKO10028378_A_Lair1
  gRNA
acttcatccagttatcctgc

SEQ ID NO: 28379 - DNA, 20 bp, Artificial Sequence
  MKO10028379_A_Lair1
  gRNA
aggactcaccaagcaccagc

SEQ ID NO: 28380 - DNA, 20 bp, Artificial Sequence
  MKO10028380_A_Lair1
  gRNA
atggaaaattaacacacagg

SEQ ID NO: 28381 - DNA, 20 bp, Artificial Sequence
  MKO10028381_A_Lalba
  gRNA
ctatcaaaggaatcgactac

SEQ ID NO: 28382 - DNA, 20 bp, Artificial Sequence
  MKO10028382_A_Lalba
  gRNA
caagctgttgtcaacgacaa

SEQ ID NO: 28383 - DNA, 20 bp, Artificial Sequence
  MKO10028383_A_Lalba
  gRNA
gccacagatgttctccgact

SEQ ID NO: 28384 - DNA, 20 bp, Artificial Sequence
  MKO10028384_A_Lama1
  gRNA
attgggcgtgtcgaacaggc

SEQ ID NO: 28385 - DNA, 20 bp, Artificial Sequence
  MKO10028385_A_Lama1
  gRNA
ccgatatcacacgcaatcga

SEQ ID NO: 28386 - DNA, 20 bp, Artificial Sequence
  MKO10028386_A_Lama1
  gRNA
actcacacgtcttgtgacaa

SEQ ID NO: 28387 - DNA, 20 bp, Artificial Sequence
  MKO10028387_A_Lama2
  gRNA
ccgattacgaatgctattga

SEQ ID NO: 28388 - DNA, 20 bp, Artificial Sequence
  MKO10028388_A_Lama2
  gRNA
ccatcaatagcattcgtaat

SEQ ID NO: 28389 - DNA, 20 bp, Artificial Sequence
  MKO10028389_A_Lama2
  gRNA
tacaatatctatccccgcac

SEQ ID NO: 28390 - DNA, 20 bp, Artificial Sequence
  MKO10028390_A_Lama3
  gRNA
actcacccggcgcgtgacag

SEQ ID NO: 28391 - DNA, 20 bp, Artificial Sequence
  MKO10028391_A_Lama3
  gRNA
gtattcccgtatcgtgcctc

SEQ ID NO: 28392 - DNA, 20 bp, Artificial Sequence
  MKO10028392_A_Lama3
  gRNA
gagaccccactgtcacgcgc

SEQ ID NO: 28393 - DNA, 20 bp, Artificial Sequence
  MKO10028393_A_Lama4
  gRNA
gctctcctgttgtgttccgc

SEQ ID NO: 28394 - DNA, 20 bp, Artificial Sequence
  MKO10028394_A_Lama4
  gRNA
gctttgcagaatcctgctac

SEQ ID NO: 28395 - DNA, 20 bp, Artificial Sequence
  MKO10028395_A_Lama4
  gRNA
ttcgtaagcagttcctgcac

SEQ ID NO: 28396 - DNA, 20 bp, Artificial Sequence
  MKO10028396_A_Lama5
  gRNA
gtgatgcgctctagagtccg

SEQ ID NO: 28397 - DNA, 20 bp, Artificial Sequence
  MKO10028397_A_Lama5
  gRNA
atactcgcgaatagtgcctt

SEQ ID NO: 28398 - DNA, 20 bp, Artificial Sequence
  MKO10028398_A_Lama5
  gRNA
tctgcgaaccaacacgctac

SEQ ID NO: 28399 - DNA, 20 bp, Artificial Sequence
  MKO10028399_A_Lamb1
  gRNA
cgcacactcgggtgccccat

SEQ ID NO: 28400 - DNA, 20 bp, Artificial Sequence
  MKO10028400_A_Lamb1
  gRNA
ctctccgtgacttcgacatg

SEQ ID NO: 28401 - DNA, 20 bp, Artificial Sequence
  MKO10028401_A_Lamb1
  gRNA
gggttgagggtctcgtgata

SEQ ID NO: 28402 - DNA, 20 bp, Artificial Sequence
  MKO10028402_A_Lamb2
  gRNA
ccggcgttgtggcgcaaagc

SEQ ID NO: 28403 - DNA, 20 bp, Artificial Sequence
  MKO10028403_A_Lamb2
  gRNA
cttacctcgccttccgtaga

SEQ ID NO: 28404 - DNA, 20 bp, Artificial Sequence
  MKO10028404_A_Lamb2
  gRNA
accgttctccgattgccacc

SEQ ID NO: 28405 - DNA, 20 bp, Artificial Sequence
  MKO10028405_A_Lamb3
  gRNA
gagacctattgcacccaata

SEQ ID NO: 28406 - DNA, 20 bp, Artificial Sequence
  MKO10028406_A_Lamb3
  gRNA
cgtcttcaggccccatgcgc

SEQ ID NO: 28407 - DNA, 20 bp, Artificial Sequence
  MKO10028407_A_Lamb3
  gRNA
cgtcctgccagttcttgggc

SEQ ID NO: 28408 - DNA, 20 bp, Artificial Sequence
  MKO10028408_A_Lamc1
  gRNA
gcactcacgaaggcactcgc

SEQ ID NO: 28409 - DNA, 20 bp, Artificial Sequence
  MKO10028409_A_Lamc1
  gRNA
ccgggagaatttcttccgcc

SEQ ID NO: 28410 - DNA, 20 bp, Artificial Sequence
  MKO10028410_A_Lamc1
  gRNA
ctcccggcacctctcgcact

SEQ ID NO: 28411 - DNA, 20 bp, Artificial Sequence
  MKO10028411_A_Lamc2
  gRNA
gggttcactgcgagcggtgc

SEQ ID NO: 28412 - DNA, 20 bp, Artificial Sequence
  MKO10028412_A_Lamc2
  gRNA
ttccatatgctcaccgatgc

SEQ ID NO: 28413 - DNA, 20 bp, Artificial Sequence
  MKO10028413_A_Lamc2
  gRNA
acccgctgcctgtctgtcga

SEQ ID NO: 28414 - DNA, 20 bp, Artificial Sequence
  MKO10028414_A_Lamc3
  gRNA
tgagggccactacctgcgac

SEQ ID NO: 28415 - DNA, 20 bp, Artificial Sequence
  MKO10028415_A_Lamc3
  gRNA
ggcgtacgtgcgcttgtaga

SEQ ID NO: 28416 - DNA, 20 bp, Artificial Sequence
  MKO10028416_A_Lamc3
  gRNA
acacagcgtagtagtaagac

SEQ ID NO: 28417 - DNA, 20 bp, Artificial Sequence
  MKO10028417_A_Lamp1
  gRNA
agaaccattcgcagtctcgt

SEQ ID NO: 28418 - DNA, 20 bp, Artificial Sequence
  MKO10028418_A_Lamp1
  gRNA
tgctgaagttgccactcgac

SEQ ID NO: 28419 - DNA, 20 bp, Artificial Sequence
  MKO10028419_A_Lamp1
  gRNA
attcagttgcagtgccatag

SEQ ID NO: 28420 - DNA, 20 bp, Artificial Sequence
  MKO10028420_A_Lamp2
  gRNA
atgagctttgcgcctttaac

SEQ ID NO: 28421 - DNA, 20 bp, Artificial Sequence
  MKO10028421_A_Lamp2
  gRNA
ccccaatatttctgaacgac

SEQ ID NO: 28422 - DNA, 20 bp, Artificial Sequence
  MKO10028422_A_Lamp2
  gRNA
ccatcgtgtgtcgccttgtc

SEQ ID NO: 28423 - DNA, 20 bp, Artificial Sequence
  MKO10028423_A_Lamp3
  gRNA
tcataagttccgatcttggc

SEQ ID NO: 28424 - DNA, 20 bp, Artificial Sequence
  MKO10028424_A_Lamp3
  gRNA
gatttcgaaggagactcctt

SEQ ID NO: 28425 - DNA, 20 bp, Artificial Sequence
  MKO10028425_A_Lamp3
  gRNA
tcatctactgacgataccat

SEQ ID NO: 28426 - DNA, 20 bp, Artificial Sequence
  MKO10028426_A_Lamp5
  gRNA
agatgtaatggtccaaaccg

SEQ ID NO: 28427 - DNA, 20 bp, Artificial Sequence
  MKO10028427_A_Lamp5
  gRNA
gctggatgtgcactgcggac

SEQ ID NO: 28428 - DNA, 20 bp, Artificial Sequence
  MKO10028428_A_Lamp5
  gRNA
ttcagattccaagtcgcctc

SEQ ID NO: 28429 - DNA, 20 bp, Artificial Sequence
  MKO10028429_A_Lamtor1
  gRNA
gctcttctttcgcatccacg

SEQ ID NO: 28430 - DNA, 20 bp, Artificial Sequence
  MKO10028430_A_Lamtor1
  gRNA
tgacactcacctagctgtct

SEQ ID NO: 28431 - DNA, 20 bp, Artificial Sequence
  MKO10028431_A_Lamtor1
  gRNA
ccatccttgccaagacagct

SEQ ID NO: 28432 - DNA, 20 bp, Artificial Sequence
  MKO10028432_A_Lamtor2
  gRNA
acatctgggccgcgtatgat

SEQ ID NO: 28433 - DNA, 20 bp, Artificial Sequence
  MKO10028433_A_Lamtor2
  gRNA
ccaccctcgtaatggctaca

SEQ ID NO: 28434 - DNA, 20 bp, Artificial Sequence
  MKO10028434_A_Lamtor2
  gRNA
atacgcggcccagatgttac

SEQ ID NO: 28435 - DNA, 20 bp, Artificial Sequence
  MKO10028435_A_Lamtor3
  gRNA
tcctgtacaaaaagttgcca

SEQ ID NO: 28436 - DNA, 20 bp, Artificial Sequence
  MKO10028436_A_Lamtor3
  gRNA
ttagctttacctttaataac

SEQ ID NO: 28437 - DNA, 20 bp, Artificial Sequence
  MKO10028437_A_Lamtor3
  gRNA
acctgtgttggcactgctgc

SEQ ID NO: 28438 - DNA, 20 bp, Artificial Sequence
  MKO10028438_A_Lamtor4
  gRNA
tgttcgtgccatggtgcaac

SEQ ID NO: 28439 - DNA, 20 bp, Artificial Sequence
  MKO10028439_A_Lamtor4
  gRNA
atccctttcaaacgcctgtc

SEQ ID NO: 28440 - DNA, 20 bp, Artificial Sequence
  MKO10028440_A_Lamtor4
  gRNA
ctgggattcgctccagccct

SEQ ID NO: 28441 - DNA, 20 bp, Artificial Sequence
  MKO10028441_A_Lamtor5
  gRNA
cgtccgcgctctttacgaaa

SEQ ID NO: 28442 - DNA, 20 bp, Artificial Sequence
  MKO10028442_A_Lamtor5
  gRNA
cgcgctgaatttcgtccctc

SEQ ID NO: 28443 - DNA, 20 bp, Artificial Sequence
  MKO10028443_A_Lamtor5
  gRNA
tctaggccgtggtaccctgt

SEQ ID NO: 28444 - DNA, 20 bp, Artificial Sequence
  MKO10028444_A_Lancl1
  gRNA
cgatgcgggccccctggctg

SEQ ID NO: 28445 - DNA, 20 bp, Artificial Sequence
  MKO10028445_A_Lancl1
  gRNA
tattacgtgggggctgctca

SEQ ID NO: 28446 - DNA, 20 bp, Artificial Sequence
  MKO10028446_A_Lancl1
  gRNA
ctgggtccccaaacacattg

SEQ ID NO: 28447 - DNA, 20 bp, Artificial Sequence
  MKO10028447_A_Lancl2
  gRNA
gtgttctcttcacgtaatcc

SEQ ID NO: 28448 - DNA, 20 bp, Artificial Sequence
  MKO10028448_A_Lancl2
  gRNA
ctggatacgctttatgaagt

SEQ ID NO: 28449 - DNA, 20 bp, Artificial Sequence
  MKO10028449_A_Lancl2
  gRNA
gacctacctgcttcgatccc

SEQ ID NO: 28450 - DNA, 20 bp, Artificial Sequence
  MKO10028450_A_Lancl3
  gRNA
atgggagacctggagcgccg

SEQ ID NO: 28451 - DNA, 20 bp, Artificial Sequence
  MKO10028451_A_Lancl3
  gRNA
agcatctacagcttgtacga

SEQ ID NO: 28452 - DNA, 20 bp, Artificial Sequence
  MKO10028452_A_Lancl3
  gRNA
cttcttctgtaccgtcttac

SEQ ID NO: 28453 - DNA, 20 bp, Artificial Sequence
  MKO10028453_A_Lao1
  gRNA
tgaccaccctacctccgatg

SEQ ID NO: 28454 - DNA, 20 bp, Artificial Sequence
  MKO10028454_A_Lao1
  gRNA
gaatcttgggctaccccctg

SEQ ID NO: 28455 - DNA, 20 bp, Artificial Sequence
  MKO10028455_A_Lao1
  gRNA
gatagcgttgtccattgagt

SEQ ID NO: 28456 - DNA, 20 bp, Artificial Sequence
  MKO10028456_A_Lap3
  gRNA
ggtcggccttggcaagcgat

SEQ ID NO: 28457 - DNA, 20 bp, Artificial Sequence
  MKO10028457_A_Lap3
  gRNA
gctgtgtcggcgaagctcca

SEQ ID NO: 28458 - DNA, 20 bp, Artificial Sequence
  MKO10028458_A_Lap3
  gRNA
ctccagccgatcgcttgcca

SEQ ID NO: 28459 - DNA, 20 bp, Artificial Sequence
  MKO10028459_A_Laptm4a
  gRNA
tgacttcgttctcagttgtc

SEQ ID NO: 28460 - DNA, 20 bp, Artificial Sequence
  MKO10028460_A_Laptm4a
  gRNA
tcaggtggtcaacctgttga

SEQ ID NO: 28461 - DNA, 20 bp, Artificial Sequence
  MKO10028461_A_Laptm4a
  gRNA
ttctgcagtatcaagtgggc

SEQ ID NO: 28462 - DNA, 20 bp, Artificial Sequence
  MKO10028462_A_Laptm4b
  gRNA
gtatgcaccgtaagtagcca

SEQ ID NO: 28463 - DNA, 20 bp, Artificial Sequence
  MKO10028463_A_Laptm4b
  gRNA
gtccgtgaatcctacctgtt

SEQ ID NO: 28464 - DNA, 20 bp, Artificial Sequence
  MKO10028464_A_Laptm4b
  gRNA
tgtctatccgaactccattc

SEQ ID NO: 28465 - DNA, 20 bp, Artificial Sequence
  MKO10028465_A_Laptm5
  gRNA
gtacgctggcaattcgatgt

SEQ ID NO: 28466 - DNA, 20 bp, Artificial Sequence
  MKO10028466_A_Laptm5
  gRNA
cccgcggtaaagtgtcctgt

SEQ ID NO: 28467 - DNA, 20 bp, Artificial Sequence
  MKO10028467_A_Laptm5
  gRNA
ccttgaccacgccgaacagc

SEQ ID NO: 28468 - DNA, 20 bp, Artificial Sequence
  MKO10028468_A_Large
  gRNA
cagggtgacaacgtccctgc

SEQ ID NO: 28469 - DNA, 20 bp, Artificial Sequence
  MKO10028469_A_Large
  gRNA
cttctcgaacacgcacttcc

SEQ ID NO: 28470 - DNA, 20 bp, Artificial Sequence
  MKO10028470_A_Large
  gRNA
tagaagtctactcgcactgc

SEQ ID NO: 28471 - DNA, 20 bp, Artificial Sequence
  MKO10028471_A_Larp1b
  gRNA
ataaaccaacgcacagtaat

SEQ ID NO: 28472 - DNA, 20 bp, Artificial Sequence
  MKO10028472_A_Larp1b
  gRNA
accatccgaggttccactag

SEQ ID NO: 28473 - DNA, 20 bp, Artificial Sequence
  MKO10028473_A_Larp1b
  gRNA
tcatacatcgagggttccct

SEQ ID NO: 28474 - DNA, 20 bp, Artificial Sequence
  MKO10028474_A_Larp1
  gRNA
agctgctcctaaaccgcgta

SEQ ID NO: 28475 - DNA, 20 bp, Artificial Sequence
  MKO10028475_A_Larp1
  gRNA
agacatacacccgctgtccg

SEQ ID NO: 28476 - DNA, 20 bp, Artificial Sequence
  MKO10028476_A_Larp1
  gRNA
tcgtaagttgccacctaaga

SEQ ID NO: 28477 - DNA, 20 bp, Artificial Sequence
  MKO10028477_A_Larp4b
  gRNA
ttacccgtatcgttgttctc

SEQ ID NO: 28478 - DNA, 20 bp, Artificial Sequence
  MKO10028478_A_Larp4b
  gRNA
tcgagagaatgcagcgctcc

SEQ ID NO: 28479 - DNA, 20 bp, Artificial Sequence
  MKO10028479_A_Larp4b
  gRNA
ggggactcatatgttacatt

SEQ ID NO: 28480 - DNA, 20 bp, Artificial Sequence
  MKO10028480_A_Larp4
  gRNA
gtgatcagttcgtcccaata

SEQ ID NO: 28481 - DNA, 20 bp, Artificial Sequence
  MKO10028481_A_Larp4
  gRNA
taccagaaacatcatagagt

SEQ ID NO: 28482 - DNA, 20 bp, Artificial Sequence
  MKO10028482_A_Larp4
  gRNA
aacatctgcagtattccttg

SEQ ID NO: 28483 - DNA, 20 bp, Artificial Sequence
  MKO10028483_A_Larp6
  gRNA
gcagatccgtgtcgccatcc

SEQ ID NO: 28484 - DNA, 20 bp, Artificial Sequence
  MKO10028484_A_Larp6
  gRNA
gttctcgcccccacttgtcg

SEQ ID NO: 28485 - DNA, 20 bp, Artificial Sequence
  MKO10028485_A_Larp6
  gRNA
ttggcgtcatctcatcggtg

SEQ ID NO: 28486 - DNA, 20 bp, Artificial Sequence
  MKO10028486_A_Larp7
  gRNA
gtgcgttcctcctcgtcctt

SEQ ID NO: 28487 - DNA, 20 bp, Artificial Sequence
  MKO10028487_A_Larp7
  gRNA
gaaaagctcatctgttgtag

SEQ ID NO: 28488 - DNA, 20 bp, Artificial Sequence
  MKO10028488_A_Larp7
  gRNA
gcactcacctgctactcgta

SEQ ID NO: 28489 - DNA, 20 bp, Artificial Sequence
  MKO10028489_A_Lars2
  gRNA
accgtgcaatggtgtcgctg

SEQ ID NO: 28490 - DNA, 20 bp, Artificial Sequence
  MKO10028490_A_Lars2
  gRNA
cttcatagagtttgataaac

SEQ ID NO: 28491 - DNA, 20 bp, Artificial Sequence
  MKO10028491_A_Lars2
  gRNA
tgagtccatttgtagtaatc

SEQ ID NO: 28492 - DNA, 20 bp, Artificial Sequence
  MKO10028492_A_Lars
  gRNA
ctgtactggtatgcctatta

SEQ ID NO: 28493 - DNA, 20 bp, Artificial Sequence
  MKO10028493_A_Lars
  gRNA
gaagaaagcagtgctaaacc

SEQ ID NO: 28494 - DNA, 20 bp, Artificial Sequence
  MKO10028494_A_Lars
  gRNA
cgtccattcatgtatggata

SEQ ID NO: 28495 - DNA, 20 bp, Artificial Sequence
  MKO10028495_A_Las1l
  gRNA
catataaatgagtgccgcag

SEQ ID NO: 28496 - DNA, 20 bp, Artificial Sequence
  MKO10028496_A_Las1l
  gRNA
cgaagttcaacaatccagtc

SEQ ID NO: 28497 - DNA, 20 bp, Artificial Sequence
  MKO10028497_A_Las1l
  gRNA
gacatactggagccgtcaac

SEQ ID NO: 28498 - DNA, 20 bp, Artificial Sequence
  MKO10028498_A_Lasp1
  gRNA
ttccggagtgtcggccacca

SEQ ID NO: 28499 - DNA, 20 bp, Artificial Sequence
  MKO10028499_A_Lasp1
  gRNA
tggcctccaggtgcgctaca

SEQ ID NO: 28500 - DNA, 20 bp, Artificial Sequence
  MKO10028500_A_Lasp1
  gRNA
ctggcactcaccgggggcac

SEQ ID NO: 28501 - DNA, 20 bp, Artificial Sequence
  MKO10028501_A_Lat2
  gRNA
acgtacctggacgggagcag

SEQ ID NO: 28502 - DNA, 20 bp, Artificial Sequence
  MKO10028502_A_Lat2
  gRNA
agccaacatgagtgccgagc

SEQ ID NO: 28503 - DNA, 20 bp, Artificial Sequence
  MKO10028503_A_Lat2
  gRNA
atgagaaaatctacgagcag

SEQ ID NO: 28504 - DNA, 20 bp, Artificial Sequence
  MKO10028504_A_Lats1
  gRNA
agacgttctgctccgaaatc

SEQ ID NO: 28505 - DNA, 20 bp, Artificial Sequence
  MKO10028505_A_Lats1
  gRNA
gcggaccacccactcattgt

SEQ ID NO: 28506 - DNA, 20 bp, Artificial Sequence
  MKO10028506_A_Lats1
  gRNA
gctccaccatcattcgccaa

SEQ ID NO: 28507 - DNA, 20 bp, Artificial Sequence
  MKO10028507_A_Lats2
  gRNA
cgggtgcccaacacatgtaa

SEQ ID NO: 28508 - DNA, 20 bp, Artificial Sequence
  MKO10028508_A_Lats2
  gRNA
agaagcctcgcggccgcatg

SEQ ID NO: 28509 - DNA, 20 bp, Artificial Sequence
  MKO10028509_A_Lats2
  gRNA
gcgattgcaagagattcgag

SEQ ID NO: 28510 - DNA, 20 bp, Artificial Sequence
  MKO10028510_A_Lat
  gRNA
actcacgaggtggcttgatg

SEQ ID NO: 28511 - DNA, 20 bp, Artificial Sequence
  MKO10028511_A_Lat
  gRNA
gcatccgatgggaaccccca

SEQ ID NO: 28512 - DNA, 20 bp, Artificial Sequence
  MKO10028512_A_Lat
  gRNA
atactcacgggatggggagc

SEQ ID NO: 28513 - DNA, 20 bp, Artificial Sequence
  MKO10028513_A_Lax1
  gRNA
gggaatgccacggaccacga

SEQ ID NO: 28514 - DNA, 20 bp, Artificial Sequence
  MKO10028514_A_Lax1
  gRNA
tatgcgagttagagtctcac

SEQ ID NO: 28515 - DNA, 20 bp, Artificial Sequence
  MKO10028515_A_Lax1
  gRNA
ggtggaggcagagtcaacga

SEQ ID NO: 28516 - DNA, 20 bp, Artificial Sequence
  MKO10028516_A_Layn
  gRNA
catgtacgagcccccgatgc

SEQ ID NO: 28517 - DNA, 20 bp, Artificial Sequence
  MKO10028517_A_Layn
  gRNA
ggggctcgtacatgttccag

SEQ ID NO: 28518 - DNA, 20 bp, Artificial Sequence
  MKO10028518_A_Layn
  gRNA
caagtacaacaccctctatt

SEQ ID NO: 28519 - DNA, 20 bp, Artificial Sequence
  MKO10028519_A_Lbh
  gRNA
gattggtctcagcccccgca

SEQ ID NO: 28520 - DNA, 20 bp, Artificial Sequence
  MKO10028520_A_Lbh
  gRNA
ccgcctgccctccatagtgg

SEQ ID NO: 28521 - DNA, 20 bp, Artificial Sequence
  MKO10028521_A_Lbh
  gRNA
tggagcgttcatcatcacct

SEQ ID NO: 28522 - DNA, 20 bp, Artificial Sequence
  MKO10028522_A_Lbp
  gRNA
gcttcgactcgatctggttg

SEQ ID NO: 28523 - DNA, 20 bp, Artificial Sequence
  MKO10028523_A_Lbp
  gRNA
ctcgtactgcccacgaccca

SEQ ID NO: 28524 - DNA, 20 bp, Artificial Sequence
  MKO10028524_A_Lbp
  gRNA
gtgggcagtacgagtttcat

SEQ ID NO: 28525 - DNA, 20 bp, Artificial Sequence
  MKO10028525_A_Lbr
  gRNA
aagatcacgttcccgatccc

SEQ ID NO: 28526 - DNA, 20 bp, Artificial Sequence
  MKO10028526_A_Lbr
  gRNA
caccaaaggacccgcacctt

SEQ ID NO: 28527 - DNA, 20 bp, Artificial Sequence
  MKO10028527_A_Lbr
  gRNA
agctctccctctcgacgccg

SEQ ID NO: 28528 - DNA, 20 bp, Artificial Sequence
  MKO10028528_A_Lbx1
  gRNA
tcctcaacaagccgtccgtg

SEQ ID NO: 28529 - DNA, 20 bp, Artificial Sequence
  MKO10028529_A_Lbx1
  gRNA
ctccgagttctgctcgagtt

SEQ ID NO: 28530 - DNA, 20 bp, Artificial Sequence
  MKO10028530_A_Lbx1
  gRNA
cgaccaaattgcgcagcagc

SEQ ID NO: 28531 - DNA, 20 bp, Artificial Sequence
  MKO10028531_A_Lbx2
  gRNA
cgcgtcaccactgtgtgcgc

SEQ ID NO: 28532 - DNA, 20 bp, Artificial Sequence
  MKO10028532_A_Lbx2
  gRNA
gcaagtccgtcgcgctctga

SEQ ID NO: 28533 - DNA, 20 bp, Artificial Sequence
  MKO10028533_A_Lbx2
  gRNA
tccctatgcgggttgtcccc

SEQ ID NO: 28534 - DNA, 20 bp, Artificial Sequence
  MKO10028534_A_Lca5l
  gRNA
ggtcctcagtaactcgccgt

SEQ ID NO: 28535 - DNA, 20 bp, Artificial Sequence
  MKO10028535_A_Lca5l
  gRNA
gctgtaatccacgctcccat

SEQ ID NO: 28536 - DNA, 20 bp, Artificial Sequence
  MKO10028536_A_Lca5l
  gRNA
aaaccgacggcgagttactg

SEQ ID NO: 28537 - DNA, 20 bp, Artificial Sequence
  MKO10028537_A_Lca5
  gRNA
cctaccggagcgagacgatt

SEQ ID NO: 28538 - DNA, 20 bp, Artificial Sequence
  MKO10028538_A_Lca5
  gRNA
cgtcgtgttgacaggtgatg

SEQ ID NO: 28539 - DNA, 20 bp, Artificial Sequence
  MKO10028539_A_Lca5
  gRNA
ccaaatcgtctcgctccggt

SEQ ID NO: 28540 - DNA, 20 bp, Artificial Sequence
  MKO10028540_A_Lcat
  gRNA
gaccgaatctgttgagtacg

SEQ ID NO: 28541 - DNA, 20 bp, Artificial Sequence
  MKO10028541_A_Lcat
  gRNA
atccacgtactcaacagatt

SEQ ID NO: 28542 - DNA, 20 bp, Artificial Sequence
  MKO10028542_A_Lcat
  gRNA
ttatctctctcggggctccg

SEQ ID NO: 28543 - DNA, 20 bp, Artificial Sequence
  MKO10028543_A_Lce1a1
  gRNA
actgcagcatcccccagagc

SEQ ID NO: 28544 - DNA, 20 bp, Artificial Sequence
  MKO10028544_A_Lce1a1
  gRNA
gaggacacttgggagggggc

SEQ ID NO: 28545 - DNA, 20 bp, Artificial Sequence
  MKO10028545_A_Lce1a1
  gRNA
tgtgtcttcctgctgtagtc

SEQ ID NO: 28546 - DNA, 20 bp, Artificial Sequence
  MKO10028546_A_Lce1a2
  gRNA
gctgcaacagcccccagagc

SEQ ID NO: 28547 - DNA, 20 bp, Artificial Sequence
  MKO10028547_A_Lce1a2
  gRNA
gagggggctgacactgctgc

SEQ ID NO: 28548 - DNA, 20 bp, Artificial Sequence
  MKO10028548_A_Lce1a2
  gRNA
gcacttgggaggacacttag

SEQ ID NO: 28549 - DNA, 20 bp, Artificial Sequence
  MKO10028549_A_Lce1b
  gRNA
cacaacaacccccagaaccc

SEQ ID NO: 28550 - DNA, 20 bp, Artificial Sequence
  MKO10028550_A_Lce1b
  gRNA
tgtgtcttcctgctgtagcc

SEQ ID NO: 28551 - DNA, 20 bp, Artificial Sequence
  MKO10028551_A_Lce1b
  gRNA
agcagcagcccccagactgc

SEQ ID NO: 28552 - DNA, 20 bp, Artificial Sequence
  MKO10028552_A_Lce1c
  gRNA
agcagcagtctccagactgc

SEQ ID NO: 28553 - DNA, 20 bp, Artificial Sequence
  MKO10028553_A_Lce1c
  gRNA
tgtgtcttcctgctgtagcc

SEQ ID NO: 28554 - DNA, 20 bp, Artificial Sequence
  MKO10028554_A_Lce1c
  gRNA
gggtgcacttgggaggaggc

SEQ ID NO: 28555 - DNA, 20 bp, Artificial Sequence
  MKO10028555_A_Lce1d
  gRNA
gcatttgggaggacacttag

SEQ ID NO: 28556 - DNA, 20 bp, Artificial Sequence
  MKO10028556_A_Lce1d
  gRNA
tgtgtcttcctgctgtagcc

SEQ ID NO: 28557 - DNA, 20 bp, Artificial Sequence
  MKO10028557_A_Lce1d
  gRNA
agcagcagtccccagactgt

SEQ ID NO: 28558 - DNA, 20 bp, Artificial Sequence
  MKO10028558_A_Lce1e
  gRNA
gcactttgggatctggcatt

SEQ ID NO: 28559 - DNA, 20 bp, Artificial Sequence
  MKO10028559_A_Lce1e
  gRNA
agctgctgcagctctggggg

SEQ ID NO: 28560 - DNA, 20 bp, Artificial Sequence
  MKO10028560_A_Lce1e
  gRNA
tgtgtcttcctgctgtagct

SEQ ID NO: 28561 - DNA, 20 bp, Artificial Sequence
  MKO10028561_A_Lce1f
  gRNA
ttggagggcactttggagtc

SEQ ID NO: 28562 - DNA, 20 bp, Artificial Sequence
  MKO10028562_A_Lce1f
  gRNA
tctggaggatgctgcagctc

SEQ ID NO: 28563 - DNA, 20 bp, Artificial Sequence
  MKO10028563_A_Lce1f
  gRNA
agcagcaatccccagactgc

SEQ ID NO: 28564 - DNA, 20 bp, Artificial Sequence
  MKO10028564_A_Lce1g
  gRNA
gcacttgggaggacatttag

SEQ ID NO: 28565 - DNA, 20 bp, Artificial Sequence
  MKO10028565_A_Lce1g
  gRNA
ctgacacttgggagggcact

SEQ ID NO: 28566 - DNA, 20 bp, Artificial Sequence
  MKO10028566_A_Lce1g
  gRNA
tgtgtcttcctgctgtagcc

SEQ ID NO: 28567 - DNA, 20 bp, Artificial Sequence
  MKO10028567_A_Lce1h
  gRNA
gaagagatctgtggggtctg

SEQ ID NO: 28568 - DNA, 20 bp, Artificial Sequence
  MKO10028568_A_Lce1h
  gRNA
accagaacccaagctacagc

SEQ ID NO: 28569 - DNA, 20 bp, Artificial Sequence
  MKO10028569_A_Lce1h
  gRNA
tgtagcagtggtggcaacag

SEQ ID NO: 28570 - DNA, 20 bp, Artificial Sequence
  MKO10028570_A_Lce1i
  gRNA
ctggggcctgacactgctgc

SEQ ID NO: 28571 - DNA, 20 bp, Artificial Sequence
  MKO10028571_A_Lce1i
  gRNA
gcagagccagcagcagtgtc

SEQ ID NO: 28572 - DNA, 20 bp, Artificial Sequence
  MKO10028572_A_Lce1i
  gRNA
ggcagtagtggtggcagtag

SEQ ID NO: 28573 - DNA, 20 bp, Artificial Sequence
  MKO10028573_A_Lce1j
  gRNA
ggctgctgtagctctggtgg

SEQ ID NO: 28574 - DNA, 20 bp, Artificial Sequence
  MKO10028574_A_Lce1j
  gRNA
ggagagatctgtggtgtctg

SEQ ID NO: 28575 - DNA, 20 bp, Artificial Sequence
  MKO10028575_A_Lce1j
  gRNA
gctgcagcagcacccagagc

SEQ ID NO: 28576 - DNA, 20 bp, Artificial Sequence
  MKO10028576_A_Lce1k
  gRNA
ttgggggcctggcactttga

SEQ ID NO: 28577 - DNA, 20 bp, Artificial Sequence
  MKO10028577_A_Lce1k
  gRNA
caaatgcccttcaaagtgcc

SEQ ID NO: 28578 - DNA, 20 bp, Artificial Sequence
  MKO10028578_A_Lce1k
  gRNA
cgtcgtcatcgccatagctc

SEQ ID NO: 28579 - DNA, 20 bp, Artificial Sequence
  MKO10028579_A_Lce1l
  gRNA
ttggggggcatttaggagtc

SEQ ID NO: 28580 - DNA, 20 bp, Artificial Sequence
  MKO10028580_A_Lce1l
  gRNA
ggtggtagcagtgactgttg

SEQ ID NO: 28581 - DNA, 20 bp, Artificial Sequence
  MKO10028581_A_Lce1l
  gRNA
tgtggtggtaaccagcagtc

SEQ ID NO: 28582 - DNA, 20 bp, Artificial Sequence
  MKO10028582_A_Lce1m
  gRNA
tagagcccccagactgctga

SEQ ID NO: 28583 - DNA, 20 bp, Artificial Sequence
  MKO10028583_A_Lce1m
  gRNA
gcactttggggtcttgcatt

SEQ ID NO: 28584 - DNA, 20 bp, Artificial Sequence
  MKO10028584_A_Lce1m
  gRNA
aacctcttcctgctgtagcc

SEQ ID NO: 28585 - DNA, 20 bp, Artificial Sequence
  MKO10028585_A_Lce3a
  gRNA
gcttgtagcacagcacgaag

SEQ ID NO: 28586 - DNA, 20 bp, Artificial Sequence
  MKO10028586_A_Lce3a
  gRNA
tcgtgctgtgctacaagctc

SEQ ID NO: 28587 - DNA, 20 bp, Artificial Sequence
  MKO10028587_A_Lce3a
  gRNA
acagcagcctccctcagagc

SEQ ID NO: 28588 - DNA, 20 bp, Artificial Sequence
  MKO10028588_A_Lce3b
  gRNA
agtgctccccaaagtgcccc

SEQ ID NO: 28589 - DNA, 20 bp, Artificial Sequence
  MKO10028589_A_Lce3b
  gRNA
ggtcagcagtctggggggtc

SEQ ID NO: 28590 - DNA, 20 bp, Artificial Sequence
  MKO10028590_A_Lce3b
  gRNA
ctgcagtctccccagatctg

SEQ ID NO: 28591 - DNA, 20 bp, Artificial Sequence
  MKO10028591_A_Lce3c
  gRNA
agacactgtgctgtgctctt

SEQ ID NO: 28592 - DNA, 20 bp, Artificial Sequence
  MKO10028592_A_Lce3c
  gRNA
agggacacttgggaggaggc

SEQ ID NO: 28593 - DNA, 20 bp, Artificial Sequence
  MKO10028593_A_Lce3c
  gRNA
agcagcagcccccagagctg

SEQ ID NO: 28594 - DNA, 20 bp, Artificial Sequence
  MKO10028594_A_Lce3d
  gRNA
agcagcagcccccagagctg

SEQ ID NO: 28595 - DNA, 20 bp, Artificial Sequence
  MKO10028595_A_Lce3d
  gRNA
tcctgctgtgctacaaactc

SEQ ID NO: 28596 - DNA, 20 bp, Artificial Sequence
  MKO10028596_A_Lce3d
  gRNA
ctgcttctggctctgctggc

SEQ ID NO: 28597 - DNA, 20 bp, Artificial Sequence
  MKO10028597_A_Lce3e
  gRNA
agcagcagcccccagagctg

SEQ ID NO: 28598 - DNA, 20 bp, Artificial Sequence
  MKO10028598_A_Lce3e
  gRNA
tcctgctgtgctacaagctc

SEQ ID NO: 28599 - DNA, 20 bp, Artificial Sequence
  MKO10028599_A_Lce3e
  gRNA
ctgcttctggctctgctggc

SEQ ID NO: 28600 - DNA, 20 bp, Artificial Sequence
  MKO10028600_A_Lce3f
  gRNA
agcagcagcccccagagctg

SEQ ID NO: 28601 - DNA, 20 bp, Artificial Sequence
  MKO10028601_A_Lce3f
  gRNA
tcctgctgtgctacaagctc

SEQ ID NO: 28602 - DNA, 20 bp, Artificial Sequence
  MKO10028602_A_Lce3f
  gRNA
ctgcttctggctctgctggc

SEQ ID NO: 28603 - DNA, 20 bp, Artificial Sequence
  MKO10028603_A_Lce6a
  gRNA
gtactacccctaagacagcg

SEQ ID NO: 28604 - DNA, 20 bp, Artificial Sequence
  MKO10028604_A_Lce6a
  gRNA
acccacaacctcgctgtctt

SEQ ID NO: 28605 - DNA, 20 bp, Artificial Sequence
  MKO10028605_A_Lce6a
  gRNA
agtcccacaagaagttgaac

SEQ ID NO: 28606 - DNA, 20 bp, Artificial Sequence
  MKO10028606_A_Lck
  gRNA
gggtgaacagctccgaatcc

SEQ ID NO: 28607 - DNA, 20 bp, Artificial Sequence
  MKO10028607_A_Lck
  gRNA
tgctttcgccacgaagttga

SEQ ID NO: 28608 - DNA, 20 bp, Artificial Sequence
  MKO10028608_A_Lck
  gRNA
aactgtgcagggcgataacc

SEQ ID NO: 28609 - DNA, 20 bp, Artificial Sequence
  MKO10028609_A_Lclat1
  gRNA
attataaaataccaccgaac

SEQ ID NO: 28610 - DNA, 20 bp, Artificial Sequence
  MKO10028610_A_Lclat1
  gRNA
atgatgacgctccgctctcc

SEQ ID NO: 28611 - DNA, 20 bp, Artificial Sequence
  MKO10028611_A_Lclat1
  gRNA
gtggtggaccgcctaagaga

SEQ ID NO: 28612 - DNA, 20 bp, Artificial Sequence
  MKO10028612_A_Lcmt1
  gRNA
cttacaagatgctcgatgta

SEQ ID NO: 28613 - DNA, 20 bp, Artificial Sequence
  MKO10028613_A_Lcmt1
  gRNA
cgtacatcgagcatcttgta

SEQ ID NO: 28614 - DNA, 20 bp, Artificial Sequence
  MKO10028614_A_Lcmt1
  gRNA
cccatttgaagcgtgtcctc

SEQ ID NO: 28615 - DNA, 20 bp, Artificial Sequence
  MKO10028615_A_Lcmt2
  gRNA
gataagcggcgtgcgccgca

SEQ ID NO: 28616 - DNA, 20 bp, Artificial Sequence
  MKO10028616_A_Lcmt2
  gRNA
gtcgcgcacgtatccgtgtg

SEQ ID NO: 28617 - DNA, 20 bp, Artificial Sequence
  MKO10028617_A_Lcmt2
  gRNA
tcactagcgcgctcccgtcc

SEQ ID NO: 28618 - DNA, 20 bp, Artificial Sequence
  MKO10028618_A_Lcn10
  gRNA
ctgtccacggactacacgta

SEQ ID NO: 28619 - DNA, 20 bp, Artificial Sequence
  MKO10028619_A_Lcn10
  gRNA
caggccgtacgtgtagtccg

SEQ ID NO: 28620 - DNA, 20 bp, Artificial Sequence
  MKO10028620_A_Lcn10
  gRNA
atgtggtaccgtctttcgga

SEQ ID NO: 28621 - DNA, 20 bp, Artificial Sequence
  MKO10028621_A_Lcn11
  gRNA
gtcagtcatgaagcaccgat

SEQ ID NO: 28622 - DNA, 20 bp, Artificial Sequence
  MKO10028622_A_Lcn11
  gRNA
ctcgttcacacacgcagaag

SEQ ID NO: 28623 - DNA, 20 bp, Artificial Sequence
  MKO10028623_A_Lcn11
  gRNA
tgaatgtcacctacttccac

SEQ ID NO: 28624 - DNA, 20 bp, Artificial Sequence
  MKO10028624_A_Lcn12
  gRNA
acaagttcatctgcctgacc

SEQ ID NO: 28625 - DNA, 20 bp, Artificial Sequence
  MKO10028625_A_Lcn12
  gRNA
agactacatcacgtttgccc

SEQ ID NO: 28626 - DNA, 20 bp, Artificial Sequence
  MKO10028626_A_Lcn12
  gRNA
aggtgttgtctgccagaccg

SEQ ID NO: 28627 - DNA, 20 bp, Artificial Sequence
  MKO10028627_A_Lcn2
  gRNA
ggactacaaccagttcgcca

SEQ ID NO: 28628 - DNA, 20 bp, Artificial Sequence
  MKO10028628_A_Lcn2
  gRNA
ggcgaactggttgtagtccg

SEQ ID NO: 28629 - DNA, 20 bp, Artificial Sequence
  MKO10028629_A_Lcn2
  gRNA
tggtacgttgtgggcctggc

SEQ ID NO: 28630 - DNA, 20 bp, Artificial Sequence
  MKO10028630_A_Lcn3
  gRNA
aatacttacaggcaaggtac

SEQ ID NO: 28631 - DNA, 20 bp, Artificial Sequence
  MKO10028631_A_Lcn3
  gRNA
ccatctgctcaagtatgacc

SEQ ID NO: 28632 - DNA, 20 bp, Artificial Sequence
  MKO10028632_A_Lcn3
  gRNA
tcttgaagtgaccaccatct

SEQ ID NO: 28633 - DNA, 20 bp, Artificial Sequence
  MKO10028633_A_Lcn4
  gRNA
cacctatgagatatccaaat

SEQ ID NO: 28634 - DNA, 20 bp, Artificial Sequence
  MKO10028634_A_Lcn4
  gRNA
aagggagagtgcattaatgt

SEQ ID NO: 28635 - DNA, 20 bp, Artificial Sequence
  MKO10028635_A_Lcn4
  gRNA
tcacaggcactgtattgacc

SEQ ID NO: 28636 - DNA, 20 bp, Artificial Sequence
  MKO10028636_A_Lcn5
  gRNA
cgctgaaccgtccacctgag

SEQ ID NO: 28637 - DNA, 20 bp, Artificial Sequence
  MKO10028637_A_Lcn5
  gRNA
caagccgtatgcacccatct

SEQ ID NO: 28638 - DNA, 20 bp, Artificial Sequence
  MKO10028638_A_Lcn5
  gRNA
tgcatacggcttggcacaca

SEQ ID NO: 28639 - DNA, 20 bp, Artificial Sequence
  MKO10028639_A_Lcn6
  gRNA
ggctgtggcctcccgtgcaa

SEQ ID NO: 28640 - DNA, 20 bp, Artificial Sequence
  MKO10028640_A_Lcn6
  gRNA
cggatgtcatcagagcaccg

SEQ ID NO: 28641 - DNA, 20 bp, Artificial Sequence
  MKO10028641_A_Lcn6
  gRNA
accaactcacccatgccgag

SEQ ID NO: 28642 - DNA, 20 bp, Artificial Sequence
  MKO10028642_A_Lcn8
  gRNA
catgtcgggccaacatgtaa

SEQ ID NO: 28643 - DNA, 20 bp, Artificial Sequence
  MKO10028643_A_Lcn8
  gRNA
catagtccgtgtccagcacg

SEQ ID NO: 28644 - DNA, 20 bp, Artificial Sequence
  MKO10028644_A_Lcn8
  gRNA
ctgtgaaagccgtgtacaac

SEQ ID NO: 28645 - DNA, 20 bp, Artificial Sequence
  MKO10028645_A_Lcn9
  gRNA
ggaatcgaggtaccaggtcc

SEQ ID NO: 28646 - DNA, 20 bp, Artificial Sequence
  MKO10028646_A_Lcn9
  gRNA
aatgcgagtcatgttatctg

SEQ ID NO: 28647 - DNA, 20 bp, Artificial Sequence
  MKO10028647_A_Lcn9
  gRNA
atgagtcttgtcaagcagta

SEQ ID NO: 28648 - DNA, 20 bp, Artificial Sequence
  MKO10028648_A_Lcorl
  gRNA
cttgcgttcgagtcacagtg

SEQ ID NO: 28649 - DNA, 20 bp, Artificial Sequence
  MKO10028649_A_Lcorl
  gRNA
ttcacagtcaacgccaacag

SEQ ID NO: 28650 - DNA, 20 bp, Artificial Sequence
  MKO10028650_A_Lcorl
  gRNA
tctttcgaaagagtgcattt

SEQ ID NO: 28651 - DNA, 20 bp, Artificial Sequence
  MKO10028651_A_Lcor
  gRNA
gcgcgcttagtaaaaaatta

SEQ ID NO: 28652 - DNA, 20 bp, Artificial Sequence
  MKO10028652_A_Lcor
  gRNA
gtctccttcttgatccgatg

SEQ ID NO: 28653 - DNA, 20 bp, Artificial Sequence
  MKO10028653_A_Lcor
  gRNA
gttctgagtagttgcagccg

SEQ ID NO: 28654 - DNA, 20 bp, Artificial Sequence
  MKO10028654_A_Lcp1
  gRNA
tggagaatgaccccgactgc

SEQ ID NO: 28655 - DNA, 20 bp, Artificial Sequence
  MKO10028655_A_Lcp1
  gRNA
gcttacctgagtaagagtgc

SEQ ID NO: 28656 - DNA, 20 bp, Artificial Sequence
  MKO10028656_A_Lcp1
  gRNA
gttctctcgtcaatcgtgtc

SEQ ID NO: 28657 - DNA, 20 bp, Artificial Sequence
  MKO10028657_A_Lcp2
  gRNA
aaaaccgagcaccatcaatg

SEQ ID NO: 28658 - DNA, 20 bp, Artificial Sequence
  MKO10028658_A_Lcp2
  gRNA
actcacggcatcctcagctt

SEQ ID NO: 28659 - DNA, 20 bp, Artificial Sequence
  MKO10028659_A_Lcp2
  gRNA
cctgtctcctcaagaaaccg

SEQ ID NO: 28660 - DNA, 20 bp, Artificial Sequence
  MKO10028660_A_Lctl
  gRNA
gccacccgccgtatgctacc

SEQ ID NO: 28661 - DNA, 20 bp, Artificial Sequence
  MKO10028661_A_Lctl
  gRNA
ccgttgtgaccttgcaccac

SEQ ID NO: 28662 - DNA, 20 bp, Artificial Sequence
  MKO10028662_A_Lctl
  gRNA
cgggggtgatgttgctcttc

SEQ ID NO: 28663 - DNA, 20 bp, Artificial Sequence
  MKO10028663_A_Lct
  gRNA
cggggctcattccagtcgat

SEQ ID NO: 28664 - DNA, 20 bp, Artificial Sequence
  MKO10028664_A_Lct
  gRNA
cgtctacaccctaaaacctc

SEQ ID NO: 28665 - DNA, 20 bp, Artificial Sequence
  MKO10028665_A_Lct
  gRNA
taccttgacgagagccgctg

SEQ ID NO: 28666 - DNA, 20 bp, Artificial Sequence
  MKO10028666_A_Ldb1
  gRNA
accccggcaccatgctggat

SEQ ID NO: 28667 - DNA, 20 bp, Artificial Sequence
  MKO10028667_A_Ldb1
  gRNA
gggcacttactatatctctt

SEQ ID NO: 28668 - DNA, 20 bp, Artificial Sequence
  MKO10028668_A_Ldb1
  gRNA
gaatatttgagcttaacaaa

SEQ ID NO: 28669 - DNA, 20 bp, Artificial Sequence
  MKO10028669_A_Ldb2
  gRNA
gtcttaccctgaggtagttg

SEQ ID NO: 28670 - DNA, 20 bp, Artificial Sequence
  MKO10028670_A_Ldb2
  gRNA
attccataccttggtaaaca

SEQ ID NO: 28671 - DNA, 20 bp, Artificial Sequence
  MKO10028671_A_Ldb2
  gRNA
tgctaaaataacggggaatg

SEQ ID NO: 28672 - DNA, 20 bp, Artificial Sequence
  MKO10028672_A_Ldb3
  gRNA
gtctcgctccttccgcatcc

SEQ ID NO: 28673 - DNA, 20 bp, Artificial Sequence
  MKO10028673_A_Ldb3
  gRNA
ccggcacctaccttctggtg

SEQ ID NO: 28674 - DNA, 20 bp, Artificial Sequence
  MKO10028674_A_Ldb3
  gRNA
aggctgatgagtgggcccgc

SEQ ID NO: 28675 - DNA, 20 bp, Artificial Sequence
  MKO10028675_A_Ldhal6b
  gRNA
ccacaacggcggccgttgct

SEQ ID NO: 28676 - DNA, 20 bp, Artificial Sequence
  MKO10028676_A_Ldhal6b
  gRNA
gcctttcgctatgatgccga

SEQ ID NO: 28677 - DNA, 20 bp, Artificial Sequence
  MKO10028677_A_Ldhal6b
  gRNA
gccatcggcatcatagcgaa

SEQ ID NO: 28678 - DNA, 20 bp, Artificial Sequence
  MKO10028678_A_Ldha
  gRNA
ctgctgatcgtctccaatcc

SEQ ID NO: 28679 - DNA, 20 bp, Artificial Sequence
  MKO10028679_A_Ldha
  gRNA
tttcccaaaaaccgagtaat

SEQ ID NO: 28680 - DNA, 20 bp, Artificial Sequence
  MKO10028680_A_Ldha
  gRNA
ggagaacatggcgactccag

SEQ ID NO: 28681 - DNA, 20 bp, Artificial Sequence
  MKO10028681_A_Ldhb
  gRNA
gacggcaggagtccgccagc

SEQ ID NO: 28682 - DNA, 20 bp, Artificial Sequence
  MKO10028682_A_Ldhb
  gRNA
atattctgacttacgtcacc

SEQ ID NO: 28683 - DNA, 20 bp, Artificial Sequence
  MKO10028683_A_Ldhb
  gRNA
tgtcttccaacacatccacc

SEQ ID NO: 28684 - DNA, 20 bp, Artificial Sequence
  MKO10028684_A_Ldhc
  gRNA
tcatgatagcgacattacgt

SEQ ID NO: 28685 - DNA, 20 bp, Artificial Sequence
  MKO10028685_A_Ldhc
  gRNA
tgttcgtatcagcgtcaaca

SEQ ID NO: 28686 - DNA, 20 bp, Artificial Sequence
  MKO10028686_A_Ldhc
  gRNA
ttggacaatgcccggaacaa

SEQ ID NO: 28687 - DNA, 20 bp, Artificial Sequence
  MKO10028687_A_Ldhd
  gRNA
gttaatcacgttgtcccgca

SEQ ID NO: 28688 - DNA, 20 bp, Artificial Sequence
  MKO10028688_A_Ldhd
  gRNA
ggctgcttcacaccgcaggc

SEQ ID NO: 28689 - DNA, 20 bp, Artificial Sequence
  MKO10028689_A_Ldhd
  gRNA
ctgtattcagctccgtgatc

SEQ ID NO: 28690 - DNA, 20 bp, Artificial Sequence
  MKO10028690_A_Ldlrad1
  gRNA
ggttcttgtgccacgaccga

SEQ ID NO: 28691 - DNA, 20 bp, Artificial Sequence
  MKO10028691_A_Ldlrad1
  gRNA
cctgttggctagtgtcacgc

SEQ ID NO: 28692 - DNA, 20 bp, Artificial Sequence
  MKO10028692_A_Ldlrad1
  gRNA
ccactctgctgctcacgccg

SEQ ID NO: 28693 - DNA, 20 bp, Artificial Sequence
  MKO10028693_A_Ldlrad2
  gRNA
ccccctaacgatgacctccc

SEQ ID NO: 28694 - DNA, 20 bp, Artificial Sequence
  MKO10028694_A_Ldlrad2
  gRNA
aatgtttgtcacctatgtcc

SEQ ID NO: 28695 - DNA, 20 bp, Artificial Sequence
  MKO10028695_A_Ldlrad2
  gRNA
tggaggggtccgctcagctg

SEQ ID NO: 28696 - DNA, 20 bp, Artificial Sequence
  MKO10028696_A_Ldlrad3
  gRNA
ctgtcccgacggcagcgacg

SEQ ID NO: 28697 - DNA, 20 bp, Artificial Sequence
  MKO10028697_A_Ldlrad3
  gRNA
atcggccgcttccgctgcaa

SEQ ID NO: 28698 - DNA, 20 bp, Artificial Sequence
  MKO10028698_A_Ldlrad3
  gRNA
agcatcacgtacgccatcat

SEQ ID NO: 28699 - DNA, 20 bp, Artificial Sequence
  MKO10028699_A_Ldlrad4
  gRNA
aagatacaagcatttaccgc

SEQ ID NO: 28700 - DNA, 20 bp, Artificial Sequence
  MKO10028700_A_Ldlrad4
  gRNA
gatagctccgtgcagcgccc

SEQ ID NO: 28701 - DNA, 20 bp, Artificial Sequence
  MKO10028701_A_Ldlrad4
  gRNA
tcgattgggcggggccctca

SEQ ID NO: 28702 - DNA, 20 bp, Artificial Sequence
  MKO10028702_A_Ldlrap1
  gRNA
tggacacgttctcgatgagc

SEQ ID NO: 28703 - DNA, 20 bp, Artificial Sequence
  MKO10028703_A_Ldlrap1
  gRNA
gctccaccagcgtcatacca

SEQ ID NO: 28704 - DNA, 20 bp, Artificial Sequence
  MKO10028704_A_Ldlrap1
  gRNA
cgcgtgtccgtccagttctc

SEQ ID NO: 28705 - DNA, 20 bp, Artificial Sequence
  MKO10028705_A_Ldlr
  gRNA
gacgagctcggctgcgtcaa

SEQ ID NO: 28706 - DNA, 20 bp, Artificial Sequence
  MKO10028706_A_Ldlr
  gRNA
acagtcgacatccccgtcgc

SEQ ID NO: 28707 - DNA, 20 bp, Artificial Sequence
  MKO10028707_A_Ldlr
  gRNA
ctggcggctaccgtgaatgc

SEQ ID NO: 28708 - DNA, 20 bp, Artificial Sequence
  MKO10028708_A_Ldoc1l
  gRNA
cgcacccgagcgcgcatccc

SEQ ID NO: 28709 - DNA, 20 bp, Artificial Sequence
  MKO10028709_A_Ldoc1l
  gRNA
tacgtcatccatctgagcgc

SEQ ID NO: 28710 - DNA, 20 bp, Artificial Sequence
  MKO10028710_A_Ldoc1l
  gRNA
gcctcaccaactccgcgctg

SEQ ID NO: 28711 - DNA, 20 bp, Artificial Sequence
  MKO10028711_A_Ldoc1
  gRNA
actctcgccgctaaaccgtg

SEQ ID NO: 28712 - DNA, 20 bp, Artificial Sequence
  MKO10028712_A_Ldoc1
  gRNA
tagggcaccggacagctcgg

SEQ ID NO: 28713 - DNA, 20 bp, Artificial Sequence
  MKO10028713_A_Ldoc1
  gRNA
ggtaccgacgacgaagatga

SEQ ID NO: 28714 - DNA, 20 bp, Artificial Sequence
  MKO10028714_A_Leap2
  gRNA
ggcccattggtgcctcgtgc

SEQ ID NO: 28715 - DNA, 20 bp, Artificial Sequence
  MKO10028715_A_Leap2
  gRNA
aagacgctgttccctaagtg

SEQ ID NO: 28716 - DNA, 20 bp, Artificial Sequence
  MKO10028716_A_Leap2
  gRNA
atcactcctgggccacactt

SEQ ID NO: 28717 - DNA, 20 bp, Artificial Sequence
  MKO10028717_A_Lect1
  gRNA
gagttctcttcgtagttagc

SEQ ID NO: 28718 - DNA, 20 bp, Artificial Sequence
  MKO10028718_A_Lect1
  gRNA
acgaagagaactcgctgatt

SEQ ID NO: 28719 - DNA, 20 bp, Artificial Sequence
  MKO10028719_A_Lect1
  gRNA
gcagtaccgcgccagaaatg

SEQ ID NO: 28720 - DNA, 20 bp, Artificial Sequence
  MKO10028720_A_Lect2
  gRNA
gcaaatcttccaacgagatc

SEQ ID NO: 28721 - DNA, 20 bp, Artificial Sequence
  MKO10028721_A_Lect2
  gRNA
ctggcacatatgttagccca

SEQ ID NO: 28722 - DNA, 20 bp, Artificial Sequence
  MKO10028722_A_Lect2
  gRNA
tttcaacgtgtacatgcgac

SEQ ID NO: 28723 - DNA, 20 bp, Artificial Sequence
  MKO10028723_A_Lef1
  gRNA
gtgatctgtccaacgccgcc

SEQ ID NO: 28724 - DNA, 20 bp, Artificial Sequence
  MKO10028724_A_Lef1
  gRNA
cgcgtgagagggctgcacca

SEQ ID NO: 28725 - DNA, 20 bp, Artificial Sequence
  MKO10028725_A_Lef1
  gRNA
agaaaagtgctcgtcgctgt

SEQ ID NO: 28726 - DNA, 20 bp, Artificial Sequence
  MKO10028726_A_Lefty1
  gRNA
tgcggttggagccgtcgtcg

SEQ ID NO: 28727 - DNA, 20 bp, Artificial Sequence
  MKO10028727_A_Lefty1
  gRNA
tggctgcgcttccgcgacga

SEQ ID NO: 28728 - DNA, 20 bp, Artificial Sequence
  MKO10028728_A_Lefty1
  gRNA
agccatgccagccgctcccg

SEQ ID NO: 28729 - DNA, 20 bp, Artificial Sequence
  MKO10028729_A_Lefty2
  gRNA
agtcacgctgaccgctcccg

SEQ ID NO: 28730 - DNA, 20 bp, Artificial Sequence
  MKO10028730_A_Lefty2
  gRNA
tcccctacctagagtcgatg

SEQ ID NO: 28731 - DNA, 20 bp, Artificial Sequence
  MKO10028731_A_Lefty2
  gRNA
caccctggacagcgcggatg

SEQ ID NO: 28732 - DNA, 20 bp, Artificial Sequence
  MKO10028732_A_Lekr1
  gRNA
ggtccgactactggaatttc

SEQ ID NO: 28733 - DNA, 20 bp, Artificial Sequence
  MKO10028733_A_Lekr1
  gRNA
atactccgaccttgccttct

SEQ ID NO: 28734 - DNA, 20 bp, Artificial Sequence
  MKO10028734_A_Lekr1
  gRNA
cttacctgaagaaatccaaa

SEQ ID NO: 28735 - DNA, 20 bp, Artificial Sequence
  MKO10028735_A_Lelp1
  gRNA
ccatgcctaccccgaaagtg

SEQ ID NO: 28736 - DNA, 20 bp, Artificial Sequence
  MKO10028736_A_Lelp1
  gRNA
cccatggtgcctcactttcg

SEQ ID NO: 28737 - DNA, 20 bp, Artificial Sequence
  MKO10028737_A_Lelp1
  gRNA
atgatggtggacaacatgcc

SEQ ID NO: 28738 - DNA, 20 bp, Artificial Sequence
  MKO10028738_A_Lemd1
  gRNA
gctccgagaacaacgtccca

SEQ ID NO: 28739 - DNA, 20 bp, Artificial Sequence
  MKO10028739_A_Lemd1
  gRNA
gacatacgtagtattgggcc

SEQ ID NO: 28740 - DNA, 20 bp, Artificial Sequence
  MKO10028740_A_Lemd1
  gRNA
ctggcatggaaagttgttcc

SEQ ID NO: 28741 - DNA, 20 bp, Artificial Sequence
  MKO10028741_A_Lemd2
  gRNA
ctatgtactcctgcgcctcc

SEQ ID NO: 28742 - DNA, 20 bp, Artificial Sequence
  MKO10028742_A_Lemd2
  gRNA
cgcagccttaaacctcgaag

SEQ ID NO: 28743 - DNA, 20 bp, Artificial Sequence
  MKO10028743_A_Lemd2
  gRNA
ccacgtccttgttgctgctc

SEQ ID NO: 28744 - DNA, 20 bp, Artificial Sequence
  MKO10028744_A_Lemd3
  gRNA
gtacaaacttcatgatcgat

SEQ ID NO: 28745 - DNA, 20 bp, Artificial Sequence
  MKO10028745_A_Lemd3
  gRNA
gactagaactgccacattca

SEQ ID NO: 28746 - DNA, 20 bp, Artificial Sequence
  MKO10028746_A_Lemd3
  gRNA
aacccctttgatgaaacatt

SEQ ID NO: 28747 - DNA, 20 bp, Artificial Sequence
  MKO10028747_A_Lenep
  gRNA
cctggaggccagtgcctcga

SEQ ID NO: 28748 - DNA, 20 bp, Artificial Sequence
  MKO10028748_A_Lenep
  gRNA
accaacgcagcccctgaccc

SEQ ID NO: 28749 - DNA, 20 bp, Artificial Sequence
  MKO10028749_A_Lenep
  gRNA
gggcatgtatcgaaccctga

SEQ ID NO: 28750 - DNA, 20 bp, Artificial Sequence
  MKO10028750_A_Leng1
  gRNA
aggacaatgttgcccgcgtg

SEQ ID NO: 28751 - DNA, 20 bp, Artificial Sequence
  MKO10028751_A_Leng1
  gRNA
aggcccgtacggaattccta

SEQ ID NO: 28752 - DNA, 20 bp, Artificial Sequence
  MKO10028752_A_Leng1
  gRNA
tcttccgtaggaattccgta

SEQ ID NO: 28753 - DNA, 20 bp, Artificial Sequence
  MKO10028753_A_Leng8
  gRNA
cactaacttacgtttcatgc

SEQ ID NO: 28754 - DNA, 20 bp, Artificial Sequence
  MKO10028754_A_Leng8
  gRNA
cgagcctgccaaacctaaga

SEQ ID NO: 28755 - DNA, 20 bp, Artificial Sequence
  MKO10028755_A_Leng8
  gRNA
gtatagctactactacccca

SEQ ID NO: 28756 - DNA, 20 bp, Artificial Sequence
  MKO10028756_A_Leng9
  gRNA
acgtcatccgacgcatccgc

SEQ ID NO: 28757 - DNA, 20 bp, Artificial Sequence
  MKO10028757_A_Leng9
  gRNA
ctagagggccgctgtcgctt

SEQ ID NO: 28758 - DNA, 20 bp, Artificial Sequence
  MKO10028758_A_Leng9
  gRNA
agcgcgcaccgaagcgacag

SEQ ID NO: 28759 - DNA, 20 bp, Artificial Sequence
  MKO10028759_A_Leo1
  gRNA
gaccaggacaacggcgcttc

SEQ ID NO: 28760 - DNA, 20 bp, Artificial Sequence
  MKO10028760_A_Leo1
  gRNA
ttccgagcgctctgaccacg

SEQ ID NO: 28761 - DNA, 20 bp, Artificial Sequence
  MKO10028761_A_Leo1
  gRNA
gcgcaagaacgcgattccat

SEQ ID NO: 28762 - DNA, 20 bp, Artificial Sequence
  MKO10028762_A_Lepre1
  gRNA
gggggtacgactctactcag

SEQ ID NO: 28763 - DNA, 20 bp, Artificial Sequence
  MKO10028763_A_Lepre1
  gRNA
gttgtagccgtcgtagtcat

SEQ ID NO: 28764 - DNA, 20 bp, Artificial Sequence
  MKO10028764_A_Lepre1
  gRNA
tctcgaggccaagccccata

SEQ ID NO: 28765 - DNA, 20 bp, Artificial Sequence
  MKO10028765_A_Leprel1
  gRNA
gaaagttctcgattggtgag

SEQ ID NO: 28766 - DNA, 20 bp, Artificial Sequence
  MKO10028766_A_Leprel1
  gRNA
gtataaaggtggtctttacg

SEQ ID NO: 28767 - DNA, 20 bp, Artificial Sequence
  MKO10028767_A_Leprel1
  gRNA
ctggaggtagtcgtaatgca

SEQ ID NO: 28768 - DNA, 20 bp, Artificial Sequence
  MKO10028768_A_Leprel2
  gRNA
ctgcacgaggcgtatgctca

SEQ ID NO: 28769 - DNA, 20 bp, Artificial Sequence
  MKO10028769_A_Leprel2
  gRNA
acctggtgacgcccctatac

SEQ ID NO: 28770 - DNA, 20 bp, Artificial Sequence
  MKO10028770_A_Leprel2
  gRNA
actggctctaccccaactag

SEQ ID NO: 28771 - DNA, 20 bp, Artificial Sequence
  MKO10028771_A_Leprel4
  gRNA
accaatctcacccccaacgt

SEQ ID NO: 28772 - DNA, 20 bp, Artificial Sequence
  MKO10028772_A_Leprel4
  gRNA
tggtatatacctgctatcgc

SEQ ID NO: 28773 - DNA, 20 bp, Artificial Sequence
  MKO10028773_A_Leprel4
  gRNA
ttcagtgaatgatgtacgcc

SEQ ID NO: 28774 - DNA, 20 bp, Artificial Sequence
  MKO10028774_A_Leprotl1
  gRNA
cgccatgagcaacgcgtgta

SEQ ID NO: 28775 - DNA, 20 bp, Artificial Sequence
  MKO10028775_A_Leprotl1
  gRNA
tgacgtacttgtatatcgga

SEQ ID NO: 28776 - DNA, 20 bp, Artificial Sequence
  MKO10028776_A_Leprotl1
  gRNA
gtcatcttcgcgactattct

SEQ ID NO: 28777 - DNA, 20 bp, Artificial Sequence
  MKO10028777_A_Leprot
  gRNA
gaaatacgccagttcccgac

SEQ ID NO: 28778 - DNA, 20 bp, Artificial Sequence
  MKO10028778_A_Leprot
  gRNA
agagacatggcgggcgttaa

SEQ ID NO: 28779 - DNA, 20 bp, Artificial Sequence
  MKO10028779_A_Leprot
  gRNA
gatgtgcgttggaggactat

SEQ ID NO: 28780 - DNA, 20 bp, Artificial Sequence
  MKO10028780_A_Lepr
  gRNA
ggcgaatcatctatgacttc

SEQ ID NO: 28781 - DNA, 20 bp, Artificial Sequence
  MKO10028781_A_Lepr
  gRNA
aaacaatgcctcggctttga

SEQ ID NO: 28782 - DNA, 20 bp, Artificial Sequence
  MKO10028782_A_Lepr
  gRNA
agaagcccccttcaaagccg

SEQ ID NO: 28783 - DNA, 20 bp, Artificial Sequence
  MKO10028783_A_Lep
  gRNA
agtcggtatccgccaagcag

SEQ ID NO: 28784 - DNA, 20 bp, Artificial Sequence
  MKO10028784_A_Lep
  gRNA
gactctggcagtctatcaac

SEQ ID NO: 28785 - DNA, 20 bp, Artificial Sequence
  MKO10028785_A_Lep
  gRNA
aaagccacaggaaccgacac

SEQ ID NO: 28786 - DNA, 20 bp, Artificial Sequence
  MKO10028786_A_Letm1
  gRNA
tcgacaccaagatcgctgcc

SEQ ID NO: 28787 - DNA, 20 bp, Artificial Sequence
  MKO10028787_A_Letm1
  gRNA
actcacggctcgtcaacccc

SEQ ID NO: 28788 - DNA, 20 bp, Artificial Sequence
  MKO10028788_A_Letm1
  gRNA
gggtcagcgtatggccattg

SEQ ID NO: 28789 - DNA, 20 bp, Artificial Sequence
  MKO10028789_A_Letm2
  gRNA
atgcgctaaccagacgagag

SEQ ID NO: 28790 - DNA, 20 bp, Artificial Sequence
  MKO10028790_A_Letm2
  gRNA
gtgtgccgatgtcttccgct

SEQ ID NO: 28791 - DNA, 20 bp, Artificial Sequence
  MKO10028791_A_Letm2
  gRNA
ggggccggtctaagtgttcc

SEQ ID NO: 28792 - DNA, 20 bp, Artificial Sequence
  MKO10028792_A_Letmd1
  gRNA
accaagacaagagcgattaa

SEQ ID NO: 28793 - DNA, 20 bp, Artificial Sequence
  MKO10028793_A_Letmd1
  gRNA
acgtttatcatggtctccgg

SEQ ID NO: 28794 - DNA, 20 bp, Artificial Sequence
  MKO10028794_A_Letmd1
  gRNA
aagttcttcacgtccgcctt

SEQ ID NO: 28795 - DNA, 20 bp, Artificial Sequence
  MKO10028795_A_Lfng
  gRNA
tatgaccgattcattgagtc

SEQ ID NO: 28796 - DNA, 20 bp, Artificial Sequence
  MKO10028796_A_Lfng
  gRNA
gtgctcgctgatccgttctg

SEQ ID NO: 28797 - DNA, 20 bp, Artificial Sequence
  MKO10028797_A_Lfng
  gRNA
gcttgccgatgtacacgtct

SEQ ID NO: 28798 - DNA, 20 bp, Artificial Sequence
  MKO10028798_A_Lgals12
  gRNA
actttcttcactaccgctac

SEQ ID NO: 28799 - DNA, 20 bp, Artificial Sequence
  MKO10028799_A_Lgals12
  gRNA
gtagatacccttgacatatc

SEQ ID NO: 28800 - DNA, 20 bp, Artificial Sequence
  MKO10028800_A_Lgals12
  gRNA
cctctctgcagggcgacccc

SEQ ID NO: 28801 - DNA, 20 bp, Artificial Sequence
  MKO10028801_A_Lgals1
  gRNA
gtctcacctcttggcgtccg

SEQ ID NO: 28802 - DNA, 20 bp, Artificial Sequence
  MKO10028802_A_Lgals1
  gRNA
agacttcaagattaagtgcg

SEQ ID NO: 28803 - DNA, 20 bp, Artificial Sequence
  MKO10028803_A_Lgals1
  gRNA
cctccatgttgaggcggttg

SEQ ID NO: 28804 - DNA, 20 bp, Artificial Sequence
  MKO10028804_A_Lgals2
  gRNA
cgaagcgagggttaaaatgc

SEQ ID NO: 28805 - DNA, 20 bp, Artificial Sequence
  MKO10028805_A_Lgals2
  gRNA
cgtaccggtccacatcattg

SEQ ID NO: 28806 - DNA, 20 bp, Artificial Sequence
  MKO10028806_A_Lgals2
  gRNA
ccatgctcaagtagtgcagt

SEQ ID NO: 28807 - DNA, 20 bp, Artificial Sequence
  MKO10028807_A_Lgals3bp
  gRNA
agctactccaatccgacaat

SEQ ID NO: 28808 - DNA, 20 bp, Artificial Sequence
  MKO10028808_A_Lgals3bp
  gRNA
tgaataggtcgcagccctgc

SEQ ID NO: 28809 - DNA, 20 bp, Artificial Sequence
  MKO10028809_A_Lgals3bp
  gRNA
tggatgcccacgtcgtctgc

SEQ ID NO: 28810 - DNA, 20 bp, Artificial Sequence
  MKO10028810_A_Lgals3
  gRNA
cccggaggttcttcatccga

SEQ ID NO: 28811 - DNA, 20 bp, Artificial Sequence
  MKO10028811_A_Lgals3
  gRNA
ttctggcttagatcatggcg

SEQ ID NO: 28812 - DNA, 20 bp, Artificial Sequence
  MKO10028812_A_Lgals3
  gRNA
acccttgtacctgtttgcgt

SEQ ID NO: 28813 - DNA, 20 bp, Artificial Sequence
  MKO10028813_A_Lgals4
  gRNA
gttccacgtgaacttcgctg

SEQ ID NO: 28814 - DNA, 20 bp, Artificial Sequence
  MKO10028814_A_Lgals4
  gRNA
aaacggacatcccgacactg

SEQ ID NO: 28815 - DNA, 20 bp, Artificial Sequence
  MKO10028815_A_Lgals4
  gRNA
gccccacagcgaagttcacg

SEQ ID NO: 28816 - DNA, 20 bp, Artificial Sequence
  MKO10028816_A_Lgals6
  gRNA
gttccacgtgaacttcgctg

SEQ ID NO: 28817 - DNA, 20 bp, Artificial Sequence
  MKO10028817_A_Lgals6
  gRNA
aaacggacatcccgacactg

SEQ ID NO: 28818 - DNA, 20 bp, Artificial Sequence
  MKO10028818_A_Lgals6
  gRNA
gacgttccataccggatatg

SEQ ID NO: 28819 - DNA, 20 bp, Artificial Sequence
  MKO10028819_A_Lgals7
  gRNA
ccgccttgcactttaacccg

SEQ ID NO: 28820 - DNA, 20 bp, Artificial Sequence
  MKO10028820_A_Lgals7
  gRNA
accggcatccccttcgagcg

SEQ ID NO: 28821 - DNA, 20 bp, Artificial Sequence
  MKO10028821_A_Lgals7
  gRNA
ctccaccaagcgcacgcgcg

SEQ ID NO: 28822 - DNA, 20 bp, Artificial Sequence
  MKO10028822_A_Lgals8
  gRNA
atgttctgctgtacgcccac

SEQ ID NO: 28823 - DNA, 20 bp, Artificial Sequence
  MKO10028823_A_Lgals8
  gRNA
caccatgaacacgatctcaa

SEQ ID NO: 28824 - DNA, 20 bp, Artificial Sequence
  MKO10028824_A_Lgals8
  gRNA
cgagctgaatctgaacccga

SEQ ID NO: 28825 - DNA, 20 bp, Artificial Sequence
  MKO10028825_A_Lgals9
  gRNA
ccgcgtaccctaccacctcg

SEQ ID NO: 28826 - DNA, 20 bp, Artificial Sequence
  MKO10028826_A_Lgals9
  gRNA
caactcaccgggttaatgta

SEQ ID NO: 28827 - DNA, 20 bp, Artificial Sequence
  MKO10028827_A_Lgals9
  gRNA
ccacgaggtggtagggtacg

SEQ ID NO: 28828 - DNA, 20 bp, Artificial Sequence
  MKO10028828_A_Lgalsl
  gRNA
cgacgtgtacttcccacgac

SEQ ID NO: 28829 - DNA, 20 bp, Artificial Sequence
  MKO10028829_A_Lgalsl
  gRNA
tcgtagatctcaaccccgaa

SEQ ID NO: 28830 - DNA, 20 bp, Artificial Sequence
  MKO10028830_A_Lgalsl
  gRNA
aggtacctaccctgaacggc

SEQ ID NO: 28831 - DNA, 20 bp, Artificial Sequence
  MKO10028831_A_Lgi1
  gRNA
ccatttcaagacatactttc

SEQ ID NO: 28832 - DNA, 20 bp, Artificial Sequence
  MKO10028832_A_Lgi1
  gRNA
acttacaaatattctagatg

SEQ ID NO: 28833 - DNA, 20 bp, Artificial Sequence
  MKO10028833_A_Lgi1
  gRNA
tctcacaagagctgcagcga

SEQ ID NO: 28834 - DNA, 20 bp, Artificial Sequence
  MKO10028834_A_Lgi2
  gRNA
gactatgagtgtaccaccac

SEQ ID NO: 28835 - DNA, 20 bp, Artificial Sequence
  MKO10028835_A_Lgi2
  gRNA
atccgggacgatgcctttgc

SEQ ID NO: 28836 - DNA, 20 bp, Artificial Sequence
  MKO10028836_A_Lgi2
  gRNA
ggtacactcatagtcaaagc

SEQ ID NO: 28837 - DNA, 20 bp, Artificial Sequence
  MKO10028837_A_Lgi3
  gRNA
cagagacatcttccgtcccc

SEQ ID NO: 28838 - DNA, 20 bp, Artificial Sequence
  MKO10028838_A_Lgi3
  gRNA
caggggacggaagatgtctc

SEQ ID NO: 28839 - DNA, 20 bp, Artificial Sequence
  MKO10028839_A_Lgi3
  gRNA
tctaacaagttcacactgat

SEQ ID NO: 28840 - DNA, 20 bp, Artificial Sequence
  MKO10028840_A_Lgi4
  gRNA
ggggtctcccggctgaaggc

SEQ ID NO: 28841 - DNA, 20 bp, Artificial Sequence
  MKO10028841_A_Lgi4
  gRNA
tgagtgagcgaagtcccctc

SEQ ID NO: 28842 - DNA, 20 bp, Artificial Sequence
  MKO10028842_A_Lgi4
  gRNA
ttcattgaggacaacaagat

SEQ ID NO: 28843 - DNA, 20 bp, Artificial Sequence
  MKO10028843_A_Lgmn
  gRNA
gttgtgatcaaccgacctaa

SEQ ID NO: 28844 - DNA, 20 bp, Artificial Sequence
  MKO10028844_A_Lgmn
  gRNA
tcccgttccggtggatgatc

SEQ ID NO: 28845 - DNA, 20 bp, Artificial Sequence
  MKO10028845_A_Lgmn
  gRNA
ttcatttacttcaccgacca

SEQ ID NO: 28846 - DNA, 20 bp, Artificial Sequence
  MKO10028846_A_Lgr4
  gRNA
caaagcactcagtccacgaa

SEQ ID NO: 28847 - DNA, 20 bp, Artificial Sequence
  MKO10028847_A_Lgr4
  gRNA
acagcactaccaagcttgaa

SEQ ID NO: 28848 - DNA, 20 bp, Artificial Sequence
  MKO10028848_A_Lgr4
  gRNA
gtacccagtgaagccattcg

SEQ ID NO: 28849 - DNA, 20 bp, Artificial Sequence
  MKO10028849_A_Lgr5
  gRNA
caaaggcgtagtctgctatg

SEQ ID NO: 28850 - DNA, 20 bp, Artificial Sequence
  MKO10028850_A_Lgr5
  gRNA
cacatagcagactacgcctt

SEQ ID NO: 28851 - DNA, 20 bp, Artificial Sequence
  MKO10028851_A_Lgr5
  gRNA
aaggcccgtgaacgctccct

SEQ ID NO: 28852 - DNA, 20 bp, Artificial Sequence
  MKO10028852_A_Lgr6
  gRNA
gcggatatggttgagagcca

SEQ ID NO: 28853 - DNA, 20 bp, Artificial Sequence
  MKO10028853_A_Lgr6
  gRNA
ttgatttgcaggcggctctc

SEQ ID NO: 28854 - DNA, 20 bp, Artificial Sequence
  MKO10028854_A_Lgr6
  gRNA
caatgactcacagcgactgc

SEQ ID NO: 28855 - DNA, 20 bp, Artificial Sequence
  MKO10028855_A_Lgsn
  gRNA
cgcttgcgacagttgaccgc

SEQ ID NO: 28856 - DNA, 20 bp, Artificial Sequence
  MKO10028856_A_Lgsn
  gRNA
tgcaaccgcgaacccttacc

SEQ ID NO: 28857 - DNA, 20 bp, Artificial Sequence
  MKO10028857_A_Lgsn
  gRNA
tgcctaccacccgacaccag

SEQ ID NO: 28858 - DNA, 20 bp, Artificial Sequence
  MKO10028858_A_Lhb
  gRNA
gcggccagagttgcgttgac

SEQ ID NO: 28859 - DNA, 20 bp, Artificial Sequence
  MKO10028859_A_Lhb
  gRNA
cactcaggtccgagtactgc

SEQ ID NO: 28860 - DNA, 20 bp, Artificial Sequence
  MKO10028860_A_Lhb
  gRNA
tctacacccggtgggcagcc

SEQ ID NO: 28861 - DNA, 20 bp, Artificial Sequence
  MKO10028861_A_Lhcgr
  gRNA
aacctgctatacattgaacc

SEQ ID NO: 28862 - DNA, 20 bp, Artificial Sequence
  MKO10028862_A_Lhcgr
  gRNA
caccgggttcaatgtatagc

SEQ ID NO: 28863 - DNA, 20 bp, Artificial Sequence
  MKO10028863_A_Lhcgr
  gRNA
aagagatcttcgaaacatct

SEQ ID NO: 28864 - DNA, 20 bp, Artificial Sequence
  MKO10028864_A_Lhfpl1
  gRNA
ccacagcggtaactagggac

SEQ ID NO: 28865 - DNA, 20 bp, Artificial Sequence
  MKO10028865_A_Lhfpl1
  gRNA
cctgtccctagttaccgctg

SEQ ID NO: 28866 - DNA, 20 bp, Artificial Sequence
  MKO10028866_A_Lhfpl1
  gRNA
ccggaggtaatgcaaacatg

SEQ ID NO: 28867 - DNA, 20 bp, Artificial Sequence
  MKO10028867_A_Lhfpl2
  gRNA
ttgccttcatgagcgccgac

SEQ ID NO: 28868 - DNA, 20 bp, Artificial Sequence
  MKO10028868_A_Lhfpl2
  gRNA
tatgcgtccccctacaaacc

SEQ ID NO: 28869 - DNA, 20 bp, Artificial Sequence
  MKO10028869_A_Lhfpl2
  gRNA
ctccccgaagctcttggcgt

SEQ ID NO: 28870 - DNA, 20 bp, Artificial Sequence
  MKO10028870_A_Lhfpl3
  gRNA
agccgttgccgatgcagtag

SEQ ID NO: 28871 - DNA, 20 bp, Artificial Sequence
  MKO10028871_A_Lhfpl3
  gRNA
gtacgcccagcggaccgagc

SEQ ID NO: 28872 - DNA, 20 bp, Artificial Sequence
  MKO10028872_A_Lhfpl3
  gRNA
gtttgtacgacttatcacga

SEQ ID NO: 28873 - DNA, 20 bp, Artificial Sequence
  MKO10028873_A_Lhfpl4
  gRNA
ctacagtaagttccgtgctg

SEQ ID NO: 28874 - DNA, 20 bp, Artificial Sequence
  MKO10028874_A_Lhfpl4
  gRNA
ctgccggttgcccagcacga

SEQ ID NO: 28875 - DNA, 20 bp, Artificial Sequence
  MKO10028875_A_Lhfpl4
  gRNA
agtgcgctgggcgtacattc

SEQ ID NO: 28876 - DNA, 20 bp, Artificial Sequence
  MKO10028876_A_Lhfpl5
  gRNA
tgtgcgaaactcgcgcgctg

SEQ ID NO: 28877 - DNA, 20 bp, Artificial Sequence
  MKO10028877_A_Lhfpl5
  gRNA
agactagacatccgatcatt

SEQ ID NO: 28878 - DNA, 20 bp, Artificial Sequence
  MKO10028878_A_Lhfpl5
  gRNA
cagcacgttgcccacgcagt

SEQ ID NO: 28879 - DNA, 20 bp, Artificial Sequence
  MKO10028879_A_Lhfp
  gRNA
tgccgactctcatcgtgaac

SEQ ID NO: 28880 - DNA, 20 bp, Artificial Sequence
  MKO10028880_A_Lhfp
  gRNA
ccgacacgcagcaacccatc

SEQ ID NO: 28881 - DNA, 20 bp, Artificial Sequence
  MKO10028881_A_Lhfp
  gRNA
ccctgccccggtgcagtagt

SEQ ID NO: 28882 - DNA, 20 bp, Artificial Sequence
  MKO10028882_A_Lhpp
  gRNA
ctcttgcagacgctattaca

SEQ ID NO: 28883 - DNA, 20 bp, Artificial Sequence
  MKO10028883_A_Lhpp
  gRNA
tctggcctgatgctggacgt

SEQ ID NO: 28884 - DNA, 20 bp, Artificial Sequence
  MKO10028884_A_Lhpp
  gRNA
aaaccccgtgctcatatccc

SEQ ID NO: 28885 - DNA, 20 bp, Artificial Sequence
  MKO10028885_A_Lhx1
  gRNA
accagcggccgcatccgacg

SEQ ID NO: 28886 - DNA, 20 bp, Artificial Sequence
  MKO10028886_A_Lhx1
  gRNA
ggtccggggtcccctacgtt

SEQ ID NO: 28887 - DNA, 20 bp, Artificial Sequence
  MKO10028887_A_Lhx1
  gRNA
tgtttcggtaccaaatgcgc

SEQ ID NO: 28888 - DNA, 20 bp, Artificial Sequence
  MKO10028888_A_Lhx2
  gRNA
tcttccctactacaacggcg

SEQ ID NO: 28889 - DNA, 20 bp, Artificial Sequence
  MKO10028889_A_Lhx2
  gRNA
ctcagccggggctaatccgc

SEQ ID NO: 28890 - DNA, 20 bp, Artificial Sequence
  MKO10028890_A_Lhx2
  gRNA
gacgccgtcagggcccgcct

SEQ ID NO: 28891 - DNA, 20 bp, Artificial Sequence
  MKO10028891_A_Lhx3
  gRNA
cgcaatatgaagcgctcccg

SEQ ID NO: 28892 - DNA, 20 bp, Artificial Sequence
  MKO10028892_A_Lhx3
  gRNA
gcgcggcgcaccacctgcgt

SEQ ID NO: 28893 - DNA, 20 bp, Artificial Sequence
  MKO10028893_A_Lhx3
  gRNA
tgtcggacttggaactgccg

SEQ ID NO: 28894 - DNA, 20 bp, Artificial Sequence
  MKO10028894_A_Lhx4
  gRNA
cccgacccaggtggtccgca

SEQ ID NO: 28895 - DNA, 20 bp, Artificial Sequence
  MKO10028895_A_Lhx4
  gRNA
ctgccggttgcagatgatgc

SEQ ID NO: 28896 - DNA, 20 bp, Artificial Sequence
  MKO10028896_A_Lhx4
  gRNA
cctggacatgagagtagtac

SEQ ID NO: 28897 - DNA, 20 bp, Artificial Sequence
  MKO10028897_A_Lhx5
  gRNA
ccccgcagtgtcgtcctgta

SEQ ID NO: 28898 - DNA, 20 bp, Artificial Sequence
  MKO10028898_A_Lhx5
  gRNA
gaccgacaattcgacctcat

SEQ ID NO: 28899 - DNA, 20 bp, Artificial Sequence
  MKO10028899_A_Lhx5
  gRNA
acggccgcttcgttgagctc

SEQ ID NO: 28900 - DNA, 20 bp, Artificial Sequence
  MKO10028900_A_Lhx6
  gRNA
gcgaccacccgctgtctcga

SEQ ID NO: 28901 - DNA, 20 bp, Artificial Sequence
  MKO10028901_A_Lhx6
  gRNA
tgcgcgccgcacccagtcac

SEQ ID NO: 28902 - DNA, 20 bp, Artificial Sequence
  MKO10028902_A_Lhx6
  gRNA
gatttggaaccaagtgcgcc

SEQ ID NO: 28903 - DNA, 20 bp, Artificial Sequence
  MKO10028903_A_Lhx8
  gRNA
caaggcgaactcctctcccg

SEQ ID NO: 28904 - DNA, 20 bp, Artificial Sequence
  MKO10028904_A_Lhx8
  gRNA
caagggcaacgtgtatcacc

SEQ ID NO: 28905 - DNA, 20 bp, Artificial Sequence
  MKO10028905_A_Lhx8
  gRNA
gggaggacccgcaaaggcgc

SEQ ID NO: 28906 - DNA, 20 bp, Artificial Sequence
  MKO10028906_A_Lhx9
  gRNA
catcccgaaatggtcgcccg

SEQ ID NO: 28907 - DNA, 20 bp, Artificial Sequence
  MKO10028907_A_Lhx9
  gRNA
agtgtgcgcggcagtacacc

SEQ ID NO: 28908 - DNA, 20 bp, Artificial Sequence
  MKO10028908_A_Lhx9
  gRNA
gaaagaagttcgcatccgtt

SEQ ID NO: 28909 - DNA, 20 bp, Artificial Sequence
  MKO10028909_A_Lias
  gRNA
catctcgatccaccgacgtc

SEQ ID NO: 28910 - DNA, 20 bp, Artificial Sequence
  MKO10028910_A_Lias
  gRNA
atttggaagatatgcgttca

SEQ ID NO: 28911 - DNA, 20 bp, Artificial Sequence
  MKO10028911_A_Lias
  gRNA
ttatgttgtcctgacgtcgg

SEQ ID NO: 28912 - DNA, 20 bp, Artificial Sequence
  MKO10028912_A_Lifr
  gRNA
attgtgacttcgtgatcacc

SEQ ID NO: 28913 - DNA, 20 bp, Artificial Sequence
  MKO10028913_A_Lifr
  gRNA
ctcaaacttacgagtgctac

SEQ ID NO: 28914 - DNA, 20 bp, Artificial Sequence
  MKO10028914_A_Lifr
  gRNA
gtcccacactcgcatgttgt

SEQ ID NO: 28915 - DNA, 20 bp, Artificial Sequence
  MKO10028915_A_Lif
  gRNA
ggagccgtttcccaacaacg

SEQ ID NO: 28916 - DNA, 20 bp, Artificial Sequence
  MKO10028916_A_Lif
  gRNA
tctgtgcaacaagtaccgtg

SEQ ID NO: 28917 - DNA, 20 bp, Artificial Sequence
  MKO10028917_A_Lif
  gRNA
gaaccagatcaagaatcaac

SEQ ID NO: 28918 - DNA, 20 bp, Artificial Sequence
  MKO10028918_A_Lig1
  gRNA
tccttaccagttcgacgctt

SEQ ID NO: 28919 - DNA, 20 bp, Artificial Sequence
  MKO10028919_A_Lig1
  gRNA
ggattcccaaagcgtcgaac

SEQ ID NO: 28920 - DNA, 20 bp, Artificial Sequence
  MKO10028920_A_Lig1
  gRNA
gacttccagggtggcgctga

SEQ ID NO: 28921 - DNA, 20 bp, Artificial Sequence
  MKO10028921_A_Lig3
  gRNA
ttattaccagtaccaatcct

SEQ ID NO: 28922 - DNA, 20 bp, Artificial Sequence
  MKO10028922_A_Lig3
  gRNA
accgggaggctatgtcctgc

SEQ ID NO: 28923 - DNA, 20 bp, Artificial Sequence
  MKO10028923_A_Lig3
  gRNA
gtctgacctgttctaggtcc

SEQ ID NO: 28924 - DNA, 20 bp, Artificial Sequence
  MKO10028924_A_Lig4
  gRNA
agcatccgtgcgagctccac

SEQ ID NO: 28925 - DNA, 20 bp, Artificial Sequence
  MKO10028925_A_Lig4
  gRNA
atgatgttgtcaagcccgag

SEQ ID NO: 28926 - DNA, 20 bp, Artificial Sequence
  MKO10028926_A_Lig4
  gRNA
ccatttattcacaatgcgtt

SEQ ID NO: 28927 - DNA, 20 bp, Artificial Sequence
  MKO10028927_A_Lilra5
  gRNA
tcacggggcccacagtaaat

SEQ ID NO: 28928 - DNA, 20 bp, Artificial Sequence
  MKO10028928_A_Lilra5
  gRNA
ccatcaattgaacaacgatc

SEQ ID NO: 28929 - DNA, 20 bp, Artificial Sequence
  MKO10028929_A_Lilra5
  gRNA
caagagacctccatgtcgga

SEQ ID NO: 28930 - DNA, 20 bp, Artificial Sequence
  MKO10028930_A_Lilra6
  gRNA
cacctgtcactactagcacc

SEQ ID NO: 28931 - DNA, 20 bp, Artificial Sequence
  MKO10028931_A_Lilra6
  gRNA
tcacagtataacatctctac

SEQ ID NO: 28932 - DNA, 20 bp, Artificial Sequence
  MKO10028932_A_Lilra6
  gRNA
accaccatcaaagctgaacc

SEQ ID NO: 28933 - DNA, 20 bp, Artificial Sequence
  MKO10028933_A_Lilrb4
  gRNA
tgcagctcatccatagtatt

SEQ ID NO: 28934 - DNA, 20 bp, Artificial Sequence
  MKO10028934_A_Lilrb4
  gRNA
cgtatacatctgtgattacc

SEQ ID NO: 28935 - DNA, 20 bp, Artificial Sequence
  MKO10028935_A_Lilrb4
  gRNA
agcatgacaacctcatatgc

SEQ ID NO: 28936 - DNA, 20 bp, Artificial Sequence
  MKO10028936_A_Lim2
  gRNA
ggcgccggcactcatgcatc

SEQ ID NO: 28937 - DNA, 20 bp, Artificial Sequence
  MKO10028937_A_Lim2
  gRNA
gtcggggtccttcgcacacc

SEQ ID NO: 28938 - DNA, 20 bp, Artificial Sequence
  MKO10028938_A_Lim2
  gRNA
tcaaggctcaccgatgctct

SEQ ID NO: 28939 - DNA, 20 bp, Artificial Sequence
  MKO10028939_A_Lima1
  gRNA
ctggacccaaagccgaaatg

SEQ ID NO: 28940 - DNA, 20 bp, Artificial Sequence
  MKO10028940_A_Lima1
  gRNA
tttctccgagttgaatgcag

SEQ ID NO: 28941 - DNA, 20 bp, Artificial Sequence
  MKO10028941_A_Lima1
  gRNA
acgctgcaggcctcgggacc

SEQ ID NO: 28942 - DNA, 20 bp, Artificial Sequence
  MKO10028942_A_Limch1
  gRNA
aagatgatatgtccgcacga

SEQ ID NO: 28943 - DNA, 20 bp, Artificial Sequence
  MKO10028943_A_Limch1
  gRNA
ctgaatcagacttgccgcac

SEQ ID NO: 28944 - DNA, 20 bp, Artificial Sequence
  MKO10028944_A_Limch1
  gRNA
tcatcccgtccgtggcgagg

SEQ ID NO: 28945 - DNA, 20 bp, Artificial Sequence
  MKO10028945_A_Limd1
  gRNA
cggggtgataggacttccct

SEQ ID NO: 28946 - DNA, 20 bp, Artificial Sequence
  MKO10028946_A_Limd1
  gRNA
atcgtggtagagatctccca

SEQ ID NO: 28947 - DNA, 20 bp, Artificial Sequence
  MKO10028947_A_Limd1
  gRNA
cgtcatctgtaatgaatgtc

SEQ ID NO: 28948 - DNA, 20 bp, Artificial Sequence
  MKO10028948_A_Limd2
  gRNA
cacctgagcccgcaagctaa

SEQ ID NO: 28949 - DNA, 20 bp, Artificial Sequence
  MKO10028949_A_Limd2
  gRNA
cagcacggtacagcggtcta

SEQ ID NO: 28950 - DNA, 20 bp, Artificial Sequence
  MKO10028950_A_Limd2
  gRNA
aaaggggtctcaggccgtct

SEQ ID NO: 28951 - DNA, 20 bp, Artificial Sequence
  MKO10028951_A_Lime1
  gRNA
atgcaggcatattcggcccc

SEQ ID NO: 28952 - DNA, 20 bp, Artificial Sequence
  MKO10028952_A_Lime1
  gRNA
gcagacgttacctgagtagc

SEQ ID NO: 28953 - DNA, 20 bp, Artificial Sequence
  MKO10028953_A_Lime1
  gRNA
agatggacgtcctatactct

SEQ ID NO: 28954 - DNA, 20 bp, Artificial Sequence
  MKO10028954_A_Limk1
  gRNA
ccagtgctactaccagaccg

SEQ ID NO: 28955 - DNA, 20 bp, Artificial Sequence
  MKO10028955_A_Limk1
  gRNA
ccacggtctggtagtagcac

SEQ ID NO: 28956 - DNA, 20 bp, Artificial Sequence
  MKO10028956_A_Limk1
  gRNA
cgctatggcgagtcttgcca

SEQ ID NO: 28957 - DNA, 20 bp, Artificial Sequence
  MKO10028957_A_Limk2
  gRNA
ctccccgtggatcaggtcgc

SEQ ID NO: 28958 - DNA, 20 bp, Artificial Sequence
  MKO10028958_A_Limk2
  gRNA
tgtccgtactctgcgagtag

SEQ ID NO: 28959 - DNA, 20 bp, Artificial Sequence
  MKO10028959_A_Limk2
  gRNA
ctgcgacctgatccacgggg

SEQ ID NO: 28960 - DNA, 20 bp, Artificial Sequence
  MKO10028960_A_Lims1
  gRNA
cacatacgaagcactgttcg

SEQ ID NO: 28961 - DNA, 20 bp, Artificial Sequence
  MKO10028961_A_Lims1
  gRNA
cgcagttggcacagttgaag

SEQ ID NO: 28962 - DNA, 20 bp, Artificial Sequence
  MKO10028962_A_Lims1
  gRNA
tgccacgtgtgagcgctgca

SEQ ID NO: 28963 - DNA, 20 bp, Artificial Sequence
  MKO10028963_A_Lims2
  gRNA
gctgttcgtcgatggcgagg

SEQ ID NO: 28964 - DNA, 20 bp, Artificial Sequence
  MKO10028964_A_Lims2
  gRNA
tcccgagggactcttctacg

SEQ ID NO: 28965 - DNA, 20 bp, Artificial Sequence
  MKO10028965_A_Lims2
  gRNA
cacctcgtagaagagtccct

SEQ ID NO: 28966 - DNA, 20 bp, Artificial Sequence
  MKO10028966_A_Lin28a
  gRNA
ctgtctatgaccgcccgcgc

SEQ ID NO: 28967 - DNA, 20 bp, Artificial Sequence
  MKO10028967_A_Lin28a
  gRNA
ggtcgagcgcgaccccagcg

SEQ ID NO: 28968 - DNA, 20 bp, Artificial Sequence
  MKO10028968_A_Lin28a
  gRNA
ctggaatccatccgtgtcac

SEQ ID NO: 28969 - DNA, 20 bp, Artificial Sequence
  MKO10028969_A_Lin28b
  gRNA
tattgctgcaaacgctttcg

SEQ ID NO: 28970 - DNA, 20 bp, Artificial Sequence
  MKO10028970_A_Lin28b
  gRNA
catctccatgataagtcgag

SEQ ID NO: 28971 - DNA, 20 bp, Artificial Sequence
  MKO10028971_A_Lin28b
  gRNA
cttgagtcaatacgggtaac

SEQ ID NO: 28972 - DNA, 20 bp, Artificial Sequence
  MKO10028972_A_Lin37
  gRNA
ttacttgttgtgcgtatcca

SEQ ID NO: 28973 - DNA, 20 bp, Artificial Sequence
  MKO10028973_A_Lin37
  gRNA
gcctactcactggatctctg

SEQ ID NO: 28974 - DNA, 20 bp, Artificial Sequence
  MKO10028974_A_Lin37
  gRNA
ctgcccgcttcccccaccag

SEQ ID NO: 28975 - DNA, 20 bp, Artificial Sequence
  MKO10028975_A_Lin52
  gRNA
tttggttctagggacggatt

SEQ ID NO: 28976 - DNA, 20 bp, Artificial Sequence
  MKO10028976_A_Lin52
  gRNA
cgctgttctggccagagatc

SEQ ID NO: 28977 - DNA, 20 bp, Artificial Sequence
  MKO10028977_A_Lin52
  gRNA
tctatctcagccatccattt

SEQ ID NO: 28978 - DNA, 20 bp, Artificial Sequence
  MKO10028978_A_Lin54
  gRNA
aaaatcagcttcgtgatcac

SEQ ID NO: 28979 - DNA, 20 bp, Artificial Sequence
  MKO10028979_A_Lin54
  gRNA
acctttgaagtcgccaaata

SEQ ID NO: 28980 - DNA, 20 bp, Artificial Sequence
  MKO10028980_A_Lin54
  gRNA
accttatttggcgacttcaa

SEQ ID NO: 28981 - DNA, 20 bp, Artificial Sequence
  MKO10028981_A_Lin7a
  gRNA
tgcaagagcaatcgaactac

SEQ ID NO: 28982 - DNA, 20 bp, Artificial Sequence
  MKO10028982_A_Lin7a
  gRNA
ctccgttcactgatagcagc

SEQ ID NO: 28983 - DNA, 20 bp, Artificial Sequence
  MKO10028983_A_Lin7a
  gRNA
ctgccctgaattccgtgcga

SEQ ID NO: 28984 - DNA, 20 bp, Artificial Sequence
  MKO10028984_A_Lin7b
  gRNA
agaagatgcgatctgcccgt

SEQ ID NO: 28985 - DNA, 20 bp, Artificial Sequence
  MKO10028985_A_Lin7b
  gRNA
gatgctcacctcgcggatgg

SEQ ID NO: 28986 - DNA, 20 bp, Artificial Sequence
  MKO10028986_A_Lin7b
  gRNA
tgtggcatgagcccgcacct

SEQ ID NO: 28987 - DNA, 20 bp, Artificial Sequence
  MKO10028987_A_Lin7c
  gRNA
attatccgcgatatatagat

SEQ ID NO: 28988 - DNA, 20 bp, Artificial Sequence
  MKO10028988_A_Lin7c
  gRNA
acggtacacaccaaaagtct

SEQ ID NO: 28989 - DNA, 20 bp, Artificial Sequence
  MKO10028989_A_Lin7c
  gRNA
actcaccaatctatatatcg

SEQ ID NO: 28990 - DNA, 20 bp, Artificial Sequence
  MKO10028990_A_Lin9
  gRNA
acttactctcgtcaggcaac

SEQ ID NO: 28991 - DNA, 20 bp, Artificial Sequence
  MKO10028991_A_Lin9
  gRNA
gtgggatcattgccactctc

SEQ ID NO: 28992 - DNA, 20 bp, Artificial Sequence
  MKO10028992_A_Lin9
  gRNA
aaagcccttgtcagtttaaa

SEQ ID NO: 28993 - DNA, 20 bp, Artificial Sequence
  MKO10028993_A_Lingo1
  gRNA
ggagtcgttgccgccagcat

SEQ ID NO: 28994 - DNA, 20 bp, Artificial Sequence
  MKO10028994_A_Lingo1
  gRNA
cgccgacctccagcgacttg

SEQ ID NO: 28995 - DNA, 20 bp, Artificial Sequence
  MKO10028995_A_Lingo1
  gRNA
cctatacaacctcaagtcgc

SEQ ID NO: 28996 - DNA, 20 bp, Artificial Sequence
  MKO10028996_A_Lingo2
  gRNA
tcgcgagcaatcgtcttctg

SEQ ID NO: 28997 - DNA, 20 bp, Artificial Sequence
  MKO10028997_A_Lingo2
  gRNA
ctctgacctgatccgcctac

SEQ ID NO: 28998 - DNA, 20 bp, Artificial Sequence
  MKO10028998_A_Lingo2
  gRNA
ctgcgttccctccgcctaaa

SEQ ID NO: 28999 - DNA, 20 bp, Artificial Sequence
  MKO10028999_A_Lingo3
  gRNA
ccgccggaccgtccacctta

SEQ ID NO: 29000 - DNA, 20 bp, Artificial Sequence
  MKO10029000_A_Lingo3
  gRNA
tgaacttgcgcgcaccaccc

SEQ ID NO: 29001 - DNA, 20 bp, Artificial Sequence
  MKO10029001_A_Lingo3
  gRNA
ccctgaccatcgcggacacg

SEQ ID NO: 29002 - DNA, 20 bp, Artificial Sequence
  MKO10029002_A_Lingo4
  gRNA
cccgactttcggatcagggc

SEQ ID NO: 29003 - DNA, 20 bp, Artificial Sequence
  MKO10029003_A_Lingo4
  gRNA
cagccccctggtacggctcc

SEQ ID NO: 29004 - DNA, 20 bp, Artificial Sequence
  MKO10029004_A_Lingo4
  gRNA
ggggcacttaccggagaagc

SEQ ID NO: 29005 - DNA, 20 bp, Artificial Sequence
  MKO10029005_A_Lins
  gRNA
tgaaacggagacccacgcaa

SEQ ID NO: 29006 - DNA, 20 bp, Artificial Sequence
  MKO10029006_A_Lins
  gRNA
cacgaggtggccacccttcc

SEQ ID NO: 29007 - DNA, 20 bp, Artificial Sequence
  MKO10029007_A_Lins
  gRNA
cgaggcacttcgcagccatg

SEQ ID NO: 29008 - DNA, 20 bp, Artificial Sequence
  MKO10029008_A_Lipa
  gRNA
aagcgtcccaattgaagtag

SEQ ID NO: 29009 - DNA, 20 bp, Artificial Sequence
  MKO10029009_A_Lipa
  gRNA
agaccgagataatcatgcgc

SEQ ID NO: 29010 - DNA, 20 bp, Artificial Sequence
  MKO10029010_A_Lipa
  gRNA
agtattcaccgaatccctcg

SEQ ID NO: 29011 - DNA, 20 bp, Artificial Sequence
  MKO10029011_A_Lipc
  gRNA
gcgcacgtctcagggttcgc

SEQ ID NO: 29012 - DNA, 20 bp, Artificial Sequence
  MKO10029012_A_Lipc
  gRNA
cacttcctaccgaccacccg

SEQ ID NO: 29013 - DNA, 20 bp, Artificial Sequence
  MKO10029013_A_Lipc
  gRNA
gggacgttccctcaaacata

SEQ ID NO: 29014 - DNA, 20 bp, Artificial Sequence
  MKO10029014_A_Lipe
  gRNA
gtctatggcgaatcggccac

SEQ ID NO: 29015 - DNA, 20 bp, Artificial Sequence
  MKO10029015_A_Lipe
  gRNA
gagtatgtcacgctacacaa

SEQ ID NO: 29016 - DNA, 20 bp, Artificial Sequence
  MKO10029016_A_Lipe
  gRNA
ctgctgaccatcaaccgacc

SEQ ID NO: 29017 - DNA, 20 bp, Artificial Sequence
  MKO10029017_A_Lipf
  gRNA
ggggtctatagaattcctta

SEQ ID NO: 29018 - DNA, 20 bp, Artificial Sequence
  MKO10029018_A_Lipf
  gRNA
gtatacttcacagtagcaac

SEQ ID NO: 29019 - DNA, 20 bp, Artificial Sequence
  MKO10029019_A_Lipf
  gRNA
ccatgctgcaaatatgccac

SEQ ID NO: 29020 - DNA, 20 bp, Artificial Sequence
  MKO10029020_A_Lipg
  gRNA
gcacacgtggctggatacgc

SEQ ID NO: 29021 - DNA, 20 bp, Artificial Sequence
  MKO10029021_A_Lipg
  gRNA
cccggacgatgcagactttg

SEQ ID NO: 29022 - DNA, 20 bp, Artificial Sequence
  MKO10029022_A_Lipg
  gRNA
tccacaaagtctgcatcgtc

SEQ ID NO: 29023 - DNA, 20 bp, Artificial Sequence
  MKO10029023_A_Liph
  gRNA
gtccacgaacagtgcgtcgc

SEQ ID NO: 29024 - DNA, 20 bp, Artificial Sequence
  MKO10029024_A_Liph
  gRNA
ctgtaccaaccaccgcgctg

SEQ ID NO: 29025 - DNA, 20 bp, Artificial Sequence
  MKO10029025_A_Liph
  gRNA
ggaggtctcccgttgaataa

SEQ ID NO: 29026 - DNA, 20 bp, Artificial Sequence
  MKO10029026_A_Lipi
  gRNA
acatgaaagtcgtagcgccc

SEQ ID NO: 29027 - DNA, 20 bp, Artificial Sequence
  MKO10029027_A_Lipi
  gRNA
acccagcgaagaaaaccgtc

SEQ ID NO: 29028 - DNA, 20 bp, Artificial Sequence
  MKO10029028_A_Lipi
  gRNA
taatataatctgctattcga

SEQ ID NO: 29029 - DNA, 20 bp, Artificial Sequence
  MKO10029029_A_Lipk
  gRNA
ccgatagtggttatgacgtg

SEQ ID NO: 29030 - DNA, 20 bp, Artificial Sequence
  MKO10029030_A_Lipk
  gRNA
cacctaaatcaccgcaatat

SEQ ID NO: 29031 - DNA, 20 bp, Artificial Sequence
  MKO10029031_A_Lipk
  gRNA
ctatggtggtgccctgcgag

SEQ ID NO: 29032 - DNA, 20 bp, Artificial Sequence
  MKO10029032_A_Lipm
  gRNA
tttaaccgtgtctgtccccg

SEQ ID NO: 29033 - DNA, 20 bp, Artificial Sequence
  MKO10029033_A_Lipm
  gRNA
cataccttgatcatcatatc

SEQ ID NO: 29034 - DNA, 20 bp, Artificial Sequence
  MKO10029034_A_Lipm
  gRNA
ggtcttgtgcttccgagacc

SEQ ID NO: 29035 - DNA, 20 bp, Artificial Sequence
  MKO10029035_A_Lipn
  gRNA
ttgattctttgcgccagttc

SEQ ID NO: 29036 - DNA, 20 bp, Artificial Sequence
  MKO10029036_A_Lipn
  gRNA
aaattggtaaaaacgcttgt

SEQ ID NO: 29037 - DNA, 20 bp, Artificial Sequence
  MKO10029037_A_Lipn
  gRNA
tatgacgtcaccaccgcaga

SEQ ID NO: 29038 - DNA, 20 bp, Artificial Sequence
  MKO10029038_A_Lipo1
  gRNA
tacctgggcaaagaaacacg

SEQ ID NO: 29039 - DNA, 20 bp, Artificial Sequence
  MKO10029039_A_Lipo1
  gRNA
catggcttgcttgcaacacc

SEQ ID NO: 29040 - DNA, 20 bp, Artificial Sequence
  MKO10029040_A_Lipo1
  gRNA
agctaccattaatttcattc

SEQ ID NO: 29041 - DNA, 20 bp, Artificial Sequence
  MKO10029041_A_Lipt1
  gRNA
atcgggtgccttaatagcgc

SEQ ID NO: 29042 - DNA, 20 bp, Artificial Sequence
  MKO10029042_A_Lipt1
  gRNA
taaactgcccgtcgagtagc

SEQ ID NO: 29043 - DNA, 20 bp, Artificial Sequence
  MKO10029043_A_Lipt1
  gRNA
aggagccgtgtaccacgaca

SEQ ID NO: 29044 - DNA, 20 bp, Artificial Sequence
  MKO10029044_A_Lipt2
  gRNA
cgccgccctacactggcgtc

SEQ ID NO: 29045 - DNA, 20 bp, Artificial Sequence
  MKO10029045_A_Lipt2
  gRNA
gagcgcaagatctgcgcgat

SEQ ID NO: 29046 - DNA, 20 bp, Artificial Sequence
  MKO10029046_A_Lipt2
  gRNA
gtctttgaagcgcctcactc

SEQ ID NO: 29047 - DNA, 20 bp, Artificial Sequence
  MKO10029047_A_Litaf
  gRNA
gttctgcgtagacgccctac

SEQ ID NO: 29048 - DNA, 20 bp, Artificial Sequence
  MKO10029048_A_Litaf
  gRNA
agacatacttgcgttggcgt

SEQ ID NO: 29049 - DNA, 20 bp, Artificial Sequence
  MKO10029049_A_Litaf
  gRNA
acaggctgggtgtagtacga

SEQ ID NO: 29050 - DNA, 20 bp, Artificial Sequence
  MKO10029050_A_Lix1l
  gRNA
tgacttgaagaacggggctc

SEQ ID NO: 29051 - DNA, 20 bp, Artificial Sequence
  MKO10029051_A_Lix1l
  gRNA
aaggcaccaatccccgtatt

SEQ ID NO: 29052 - DNA, 20 bp, Artificial Sequence
  MKO10029052_A_Lix1l
  gRNA
caatctttgcagcacttcgc

SEQ ID NO: 29053 - DNA, 20 bp, Artificial Sequence
  MKO10029053_A_Lix1
  gRNA
caggcgggatgctgctaaag

SEQ ID NO: 29054 - DNA, 20 bp, Artificial Sequence
  MKO10029054_A_Lix1
  gRNA
cactttagcagcatcccgcc

SEQ ID NO: 29055 - DNA, 20 bp, Artificial Sequence
  MKO10029055_A_Lix1
  gRNA
gaatgttgtgtcaatgttac

SEQ ID NO: 29056 - DNA, 20 bp, Artificial Sequence
  MKO10029056_A_Llgl1
  gRNA
tgcttaagcttctcgcgctg

SEQ ID NO: 29057 - DNA, 20 bp, Artificial Sequence
  MKO10029057_A_Llgl1
  gRNA
cggtggctgcgtcccgatgt

SEQ ID NO: 29058 - DNA, 20 bp, Artificial Sequence
  MKO10029058_A_Llgl1
  gRNA
gcagcgcgagaagcttaagc

SEQ ID NO: 29059 - DNA, 20 bp, Artificial Sequence
  MKO10029059_A_Llgl2
  gRNA
tagcccttcgctgcgcatcc

SEQ ID NO: 29060 - DNA, 20 bp, Artificial Sequence
  MKO10029060_A_Llgl2
  gRNA
cgctgctcacctgaccaggc

SEQ ID NO: 29061 - DNA, 20 bp, Artificial Sequence
  MKO10029061_A_Llgl2
  gRNA
gcatccttaccttgttaaac

SEQ ID NO: 29062 - DNA, 20 bp, Artificial Sequence
  MKO10029062_A_Llph
  gRNA
taatttagatgacatgaaaa

SEQ ID NO: 29063 - DNA, 20 bp, Artificial Sequence
  MKO10029063_A_Llph
  gRNA
gaagcatggctaaaagcctg

SEQ ID NO: 29064 - DNA, 20 bp, Artificial Sequence
  MKO10029064_A_Llph
  gRNA
gagcatccccgtccactctg

SEQ ID NO: 29065 - DNA, 20 bp, Artificial Sequence
  MKO10029065_A_Lman1l
  gRNA
ggccattccccttccgagct

SEQ ID NO: 29066 - DNA, 20 bp, Artificial Sequence
  MKO10029066_A_Lman1l
  gRNA
gatcccgatgccatcccatg

SEQ ID NO: 29067 - DNA, 20 bp, Artificial Sequence
  MKO10029067_A_Lman1l
  gRNA
gctacccacctggacatcac

SEQ ID NO: 29068 - DNA, 20 bp, Artificial Sequence
  MKO10029068_A_Lman1
  gRNA
tacgtaatctttgcccggac

SEQ ID NO: 29069 - DNA, 20 bp, Artificial Sequence
  MKO10029069_A_Lman1
  gRNA
acaactcgctaaagcttgag

SEQ ID NO: 29070 - DNA, 20 bp, Artificial Sequence
  MKO10029070_A_Lman1
  gRNA
agaggtcgaattggagccga

SEQ ID NO: 29071 - DNA, 20 bp, Artificial Sequence
  MKO10029071_A_Lman2l
  gRNA
ccctcagctatgatcacgag

SEQ ID NO: 29072 - DNA, 20 bp, Artificial Sequence
  MKO10029072_A_Lman2l
  gRNA
gaacaagcagttcttcgcta

SEQ ID NO: 29073 - DNA, 20 bp, Artificial Sequence
  MKO10029073_A_Lman2l
  gRNA
aggtgtcataacggatattt

SEQ ID NO: 29074 - DNA, 20 bp, Artificial Sequence
  MKO10029074_A_Lman2
  gRNA
acccgagaccgcctcgtacc

SEQ ID NO: 29075 - DNA, 20 bp, Artificial Sequence
  MKO10029075_A_Lman2
  gRNA
tcgtacgatcatagcaaaga

SEQ ID NO: 29076 - DNA, 20 bp, Artificial Sequence
  MKO10029076_A_Lman2
  gRNA
gcagcaaagagggctcgatc

SEQ ID NO: 29077 - DNA, 20 bp, Artificial Sequence
  MKO10029077_A_Lmbr1l
  gRNA
gcaggagtaagacggcgccc

SEQ ID NO: 29078 - DNA, 20 bp, Artificial Sequence
  MKO10029078_A_Lmbr1l
  gRNA
cactggatgtagtagttgcg

SEQ ID NO: 29079 - DNA, 20 bp, Artificial Sequence
  MKO10029079_A_Lmbr1l
  gRNA
tcacgcaatcttgttaactg

SEQ ID NO: 29080 - DNA, 20 bp, Artificial Sequence
  MKO10029080_A_Lmbr1
  gRNA
tgtatactaaccgtggatga

SEQ ID NO: 29081 - DNA, 20 bp, Artificial Sequence
  MKO10029081_A_Lmbr1
  gRNA
caaaaccgcgccagctgaca

SEQ ID NO: 29082 - DNA, 20 bp, Artificial Sequence
  MKO10029082_A_Lmbr1
  gRNA
gtatcttataatgatgaagt

SEQ ID NO: 29083 - DNA, 20 bp, Artificial Sequence
  MKO10029083_A_Lmbrd1
  gRNA
ccgaacgtagacccagcaaa

SEQ ID NO: 29084 - DNA, 20 bp, Artificial Sequence
  MKO10029084_A_Lmbrd1
  gRNA
attgagaataccgttctgta

SEQ ID NO: 29085 - DNA, 20 bp, Artificial Sequence
  MKO10029085_A_Lmbrd1
  gRNA
ctcaatctgtacggtgacat

SEQ ID NO: 29086 - DNA, 20 bp, Artificial Sequence
  MKO10029086_A_Lmbrd2
  gRNA
tgcatccagtcccgtaacgt

SEQ ID NO: 29087 - DNA, 20 bp, Artificial Sequence
  MKO10029087_A_Lmbrd2
  gRNA
caagtaagtgccgtaataga

SEQ ID NO: 29088 - DNA, 20 bp, Artificial Sequence
  MKO10029088_A_Lmbrd2
  gRNA
agcatccatgtttcaagccg

SEQ ID NO: 29089 - DNA, 20 bp, Artificial Sequence
  MKO10029089_A_Lmcd1
  gRNA
ggggtctttgccggtggcga

SEQ ID NO: 29090 - DNA, 20 bp, Artificial Sequence
  MKO10029090_A_Lmcd1
  gRNA
ttgacactatcacctacgag

SEQ ID NO: 29091 - DNA, 20 bp, Artificial Sequence
  MKO10029091_A_Lmcd1
  gRNA
ccggcttcgagcctcactcg

SEQ ID NO: 29092 - DNA, 20 bp, Artificial Sequence
  MKO10029092_A_Lmf1
  gRNA
agatctgccctacgttgacc

SEQ ID NO: 29093 - DNA, 20 bp, Artificial Sequence
  MKO10029093_A_Lmf1
  gRNA
tacatgtccctggtcaacgt

SEQ ID NO: 29094 - DNA, 20 bp, Artificial Sequence
  MKO10029094_A_Lmf1
  gRNA
ccgcggggacaagtgctggc

SEQ ID NO: 29095 - DNA, 20 bp, Artificial Sequence
  MKO10029095_A_Lmf2
  gRNA
gtaagtcgtaggcggcgaat

SEQ ID NO: 29096 - DNA, 20 bp, Artificial Sequence
  MKO10029096_A_Lmf2
  gRNA
gtggcactgcgatctcgatg

SEQ ID NO: 29097 - DNA, 20 bp, Artificial Sequence
  MKO10029097_A_Lmf2
  gRNA
tttcgactcatgttcgcctc

SEQ ID NO: 29098 - DNA, 20 bp, Artificial Sequence
  MKO10029098_A_Lmln
  gRNA
cactataacaggcccgcact

SEQ ID NO: 29099 - DNA, 20 bp, Artificial Sequence
  MKO10029099_A_Lmln
  gRNA
gtgcgacaaaccagtaccta

SEQ ID NO: 29100 - DNA, 20 bp, Artificial Sequence
  MKO10029100_A_Lmln
  gRNA
ctggcaggatcttacttagc

SEQ ID NO: 29101 - DNA, 20 bp, Artificial Sequence
  MKO10029101_A_Lmna
  gRNA
ccacaagccgcgtctcatgc

SEQ ID NO: 29102 - DNA, 20 bp, Artificial Sequence
  MKO10029102_A_Lmna
  gRNA
cggcttgtggagatcgataa

SEQ ID NO: 29103 - DNA, 20 bp, Artificial Sequence
  MKO10029103_A_Lmna
  gRNA
gggggacttgttggctgcgc

SEQ ID NO: 29104 - DNA, 20 bp, Artificial Sequence
  MKO10029104_A_Lmnb1
  gRNA
gatcaagcttcgagagtatg

SEQ ID NO: 29105 - DNA, 20 bp, Artificial Sequence
  MKO10029105_A_Lmnb1
  gRNA
agcagcacgacgcgcaggtg

SEQ ID NO: 29106 - DNA, 20 bp, Artificial Sequence
  MKO10029106_A_Lmnb1
  gRNA
gaagcatgagacccgcttgg

SEQ ID NO: 29107 - DNA, 20 bp, Artificial Sequence
  MKO10029107_A_Lmnb2
  gRNA
ccgacgggtactggatgaga

SEQ ID NO: 29108 - DNA, 20 bp, Artificial Sequence
  MKO10029108_A_Lmnb2
  gRNA
ccgtctcatccagtacccgt

SEQ ID NO: 29109 - DNA, 20 bp, Artificial Sequence
  MKO10029109_A_Lmnb2
  gRNA
gcacgagcggcgcttggtgg

SEQ ID NO: 29110 - DNA, 20 bp, Artificial Sequence
  MKO10029110_A_Lmo1
  gRNA
gatgctctccgtccaaccta

SEQ ID NO: 29111 - DNA, 20 bp, Artificial Sequence
  MKO10029111_A_Lmo1
  gRNA
tgtgccggcgtgactacctg

SEQ ID NO: 29112 - DNA, 20 bp, Artificial Sequence
  MKO10029112_A_Lmo1
  gRNA
atggtgggcgttactgaacc

SEQ ID NO: 29113 - DNA, 20 bp, Artificial Sequence
  MKO10029113_A_Lmo2
  gRNA
cggcgcatttgaaacactcc

SEQ ID NO: 29114 - DNA, 20 bp, Artificial Sequence
  MKO10029114_A_Lmo2
  gRNA
caatgtcctcggccatcgaa

SEQ ID NO: 29115 - DNA, 20 bp, Artificial Sequence
  MKO10029115_A_Lmo2
  gRNA
tgaaagccatcgaccagtac

SEQ ID NO: 29116 - DNA, 20 bp, Artificial Sequence
  MKO10029116_A_Lmo3
  gRNA
gggctccaccttgtacacga

SEQ ID NO: 29117 - DNA, 20 bp, Artificial Sequence
  MKO10029117_A_Lmo3
  gRNA
tcagatagtctctgcgacaa

SEQ ID NO: 29118 - DNA, 20 bp, Artificial Sequence
  MKO10029118_A_Lmo3
  gRNA
caggtggtacacattatcct

SEQ ID NO: 29119 - DNA, 20 bp, Artificial Sequence
  MKO10029119_A_Lmo4
  gRNA
tgacggccggctccctctcc

SEQ ID NO: 29120 - DNA, 20 bp, Artificial Sequence
  MKO10029120_A_Lmo4
  gRNA
agagggagccggccgtcacc

SEQ ID NO: 29121 - DNA, 20 bp, Artificial Sequence
  MKO10029121_A_Lmo4
  gRNA
atcgcctggtcccgggagat

SEQ ID NO: 29122 - DNA, 20 bp, Artificial Sequence
  MKO10029122_A_Lmo7
  gRNA
ttgatcttcttaacgacgcc

SEQ ID NO: 29123 - DNA, 20 bp, Artificial Sequence
  MKO10029123_A_Lmo7
  gRNA
agacttacttgacggtgact

SEQ ID NO: 29124 - DNA, 20 bp, Artificial Sequence
  MKO10029124_A_Lmo7
  gRNA
agactgtctaccccaatagc

SEQ ID NO: 29125 - DNA, 20 bp, Artificial Sequence
  MKO10029125_A_Lmod1
  gRNA
gaagcggaccaggatctcgt

SEQ ID NO: 29126 - DNA, 20 bp, Artificial Sequence
  MKO10029126_A_Lmod1
  gRNA
caatctgctcagccgaaaca

SEQ ID NO: 29127 - DNA, 20 bp, Artificial Sequence
  MKO10029127_A_Lmod1
  gRNA
agccctcgggctcattcaac

SEQ ID NO: 29128 - DNA, 20 bp, Artificial Sequence
  MKO10029128_A_Lmod2
  gRNA
gccgggaccatgtctacgtt

SEQ ID NO: 29129 - DNA, 20 bp, Artificial Sequence
  MKO10029129_A_Lmod2
  gRNA
gcacattaccagcgtaaacg

SEQ ID NO: 29130 - DNA, 20 bp, Artificial Sequence
  MKO10029130_A_Lmod2
  gRNA
gagagcccatgatgtgccgc

SEQ ID NO: 29131 - DNA, 20 bp, Artificial Sequence
  MKO10029131_A_Lmod3
  gRNA
gctctcatcagcaccgacgt

SEQ ID NO: 29132 - DNA, 20 bp, Artificial Sequence
  MKO10029132_A_Lmod3
  gRNA
ggcggcctatttctcggcac

SEQ ID NO: 29133 - DNA, 20 bp, Artificial Sequence
  MKO10029133_A_Lmod3
  gRNA
aaactatgtcggggcacagc

SEQ ID NO: 29134 - DNA, 20 bp, Artificial Sequence
  MKO10029134_A_Lmtk2
  gRNA
cgtcgcgagagtcatagtga

SEQ ID NO: 29135 - DNA, 20 bp, Artificial Sequence
  MKO10029135_A_Lmtk2
  gRNA
cactatgactctcgcgacgc

SEQ ID NO: 29136 - DNA, 20 bp, Artificial Sequence
  MKO10029136_A_Lmtk2
  gRNA
tcaataaactgcacaccgac

SEQ ID NO: 29137 - DNA, 20 bp, Artificial Sequence
  MKO10029137_A_Lmtk3
  gRNA
acagcgcaagttcatctccg

SEQ ID NO: 29138 - DNA, 20 bp, Artificial Sequence
  MKO10029138_A_Lmtk3
  gRNA
tttggctccgccctacgctg

SEQ ID NO: 29139 - DNA, 20 bp, Artificial Sequence
  MKO10029139_A_Lmtk3
  gRNA
atgaggaccacagcgtaggg

SEQ ID NO: 29140 - DNA, 20 bp, Artificial Sequence
  MKO10029140_A_Lmx1a
  gRNA
gtcagcgggtcatctcggac

SEQ ID NO: 29141 - DNA, 20 bp, Artificial Sequence
  MKO10029141_A_Lmx1a
  gRNA
tgcggctcaacgacagcttc

SEQ ID NO: 29142 - DNA, 20 bp, Artificial Sequence
  MKO10029142_A_Lmx1a
  gRNA
cttggaggatacttcaaacg

SEQ ID NO: 29143 - DNA, 20 bp, Artificial Sequence
  MKO10029143_A_Lmx1b
  gRNA
acgactcgttgactcgcatc

SEQ ID NO: 29144 - DNA, 20 bp, Artificial Sequence
  MKO10029144_A_Lmx1b
  gRNA
cccctaccgagttcgtcatg

SEQ ID NO: 29145 - DNA, 20 bp, Artificial Sequence
  MKO10029145_A_Lmx1b
  gRNA
ccctcgcagacggcgggatg

SEQ ID NO: 29146 - DNA, 20 bp, Artificial Sequence
  MKO10029146_A_Lnpep
  gRNA
acaaatcgccgttgttgccc

SEQ ID NO: 29147 - DNA, 20 bp, Artificial Sequence
  MKO10029147_A_Lnpep
  gRNA
actttcccgtttgtagcaac

SEQ ID NO: 29148 - DNA, 20 bp, Artificial Sequence
  MKO10029148_A_Lnpep
  gRNA
gcatatttgataacgcagta

SEQ ID NO: 29149 - DNA, 20 bp, Artificial Sequence
  MKO10029149_A_Lnp
  gRNA
tctagaacttctactgttga

SEQ ID NO: 29150 - DNA, 20 bp, Artificial Sequence
  MKO10029150_A_Lnp
  gRNA
atcagagattgcaaaaatta

SEQ ID NO: 29151 - DNA, 20 bp, Artificial Sequence
  MKO10029151_A_Lnp
  gRNA
ccacaagtacacaattaaac

SEQ ID NO: 29152 - DNA, 20 bp, Artificial Sequence
  MKO10029152_A_Lnx1
  gRNA
tcgaaggtcatgcccgttga

SEQ ID NO: 29153 - DNA, 20 bp, Artificial Sequence
  MKO10029153_A_Lnx1
  gRNA
cgccgaccgacacggccagc

SEQ ID NO: 29154 - DNA, 20 bp, Artificial Sequence
  MKO10029154_A_Lnx1
  gRNA
atccagcatatttatcgcga

SEQ ID NO: 29155 - DNA, 20 bp, Artificial Sequence
  MKO10029155_A_Lnx2
  gRNA
gtgcccgagcagtccgtttc

SEQ ID NO: 29156 - DNA, 20 bp, Artificial Sequence
  MKO10029156_A_Lnx2
  gRNA
cctggacaaccccgccttcg

SEQ ID NO: 29157 - DNA, 20 bp, Artificial Sequence
  MKO10029157_A_Lnx2
  gRNA
cggcagcgcgccacgggacg

SEQ ID NO: 29158 - DNA, 20 bp, Artificial Sequence
  MKO10029158_A_Loh12cr1
  gRNA
cccggcgatctgaacgcctc

SEQ ID NO: 29159 - DNA, 20 bp, Artificial Sequence
  MKO10029159_A_Loh12cr1
  gRNA
ggccaagatggacgatatcg

SEQ ID NO: 29160 - DNA, 20 bp, Artificial Sequence
  MKO10029160_A_Loh12cr1
  gRNA
acctgaggcgttcagatcgc

SEQ ID NO: 29161 - DNA, 20 bp, Artificial Sequence
  MKO10029161_A_Lonp1
  gRNA
caaggcgatgatatcccgaa

SEQ ID NO: 29162 - DNA, 20 bp, Artificial Sequence
  MKO10029162_A_Lonp1
  gRNA
cgacttgcacagccctatgt

SEQ ID NO: 29163 - DNA, 20 bp, Artificial Sequence
  MKO10029163_A_Lonp1
  gRNA
aagttgcgaatgattgtcac

SEQ ID NO: 29164 - DNA, 20 bp, Artificial Sequence
  MKO10029164_A_Lonp2
  gRNA
aagccattgatgatacgacc

SEQ ID NO: 29165 - DNA, 20 bp, Artificial Sequence
  MKO10029165_A_Lonp2
  gRNA
ctccatcagccacatccgaa

SEQ ID NO: 29166 - DNA, 20 bp, Artificial Sequence
  MKO10029166_A_Lonp2
  gRNA
gcttgtcaacctcatccaat

SEQ ID NO: 29167 - DNA, 20 bp, Artificial Sequence
  MKO10029167_A_Lonrf1
  gRNA
cggcttaagcttcctttgac

SEQ ID NO: 29168 - DNA, 20 bp, Artificial Sequence
  MKO10029168_A_Lonrf1
  gRNA
agaacccttactgtccgccc

SEQ ID NO: 29169 - DNA, 20 bp, Artificial Sequence
  MKO10029169_A_Lonrf1
  gRNA
cgccttaaactcctgcaggc

SEQ ID NO: 29170 - DNA, 20 bp, Artificial Sequence
  MKO10029170_A_Lonrf2
  gRNA
gtcgcatcgattgtgaactc

SEQ ID NO: 29171 - DNA, 20 bp, Artificial Sequence
  MKO10029171_A_Lonrf2
  gRNA
gacgaatccccagtatcctc

SEQ ID NO: 29172 - DNA, 20 bp, Artificial Sequence
  MKO10029172_A_Lonrf2
  gRNA
ttcttcgccgagttgcactc

SEQ ID NO: 29173 - DNA, 20 bp, Artificial Sequence
  MKO10029173_A_Lonrf3
  gRNA
accatttgctttatagcaat

SEQ ID NO: 29174 - DNA, 20 bp, Artificial Sequence
  MKO10029174_A_Lonrf3
  gRNA
accgattgctataaagcaaa

SEQ ID NO: 29175 - DNA, 20 bp, Artificial Sequence
  MKO10029175_A_Lonrf3
  gRNA
cctaataaagtctccaaaca

SEQ ID NO: 29176 - DNA, 20 bp, Artificial Sequence
  MKO10029176_A_Lor
  gRNA
tcctgatccgcctccgcagc

SEQ ID NO: 29177 - DNA, 20 bp, Artificial Sequence
  MKO10029177_A_Lor
  gRNA
ggcggctattatagcggtgg

SEQ ID NO: 29178 - DNA, 20 bp, Artificial Sequence
  MKO10029178_A_Lor
  gRNA
accagagtacttgccgcctc

SEQ ID NO: 29179 - DNA, 20 bp, Artificial Sequence
  MKO10029179_A_Loxhd1
  gRNA
aagccaacgttgacgtattc

SEQ ID NO: 29180 - DNA, 20 bp, Artificial Sequence
  MKO10029180_A_Loxhd1
  gRNA
ccacgttattggttcgcacc

SEQ ID NO: 29181 - DNA, 20 bp, Artificial Sequence
  MKO10029181_A_Loxhd1
  gRNA
acagccacaggggatgttcg

SEQ ID NO: 29182 - DNA, 20 bp, Artificial Sequence
  MKO10029182_A_Loxl1
  gRNA
gcctgcacgtagttagggtc

SEQ ID NO: 29183 - DNA, 20 bp, Artificial Sequence
  MKO10029183_A_Loxl1
  gRNA
ctccttgcgatgcgcagcag

SEQ ID NO: 29184 - DNA, 20 bp, Artificial Sequence
  MKO10029184_A_Loxl1
  gRNA
cttgaggttgccgaagtcac

SEQ ID NO: 29185 - DNA, 20 bp, Artificial Sequence
  MKO10029185_A_Loxl2
  gRNA
gaattgtcaaatttgaagcc

SEQ ID NO: 29186 - DNA, 20 bp, Artificial Sequence
  MKO10029186_A_Loxl2
  gRNA
ctgtgcaggccccatctggt

SEQ ID NO: 29187 - DNA, 20 bp, Artificial Sequence
  MKO10029187_A_Loxl2
  gRNA
cccctcttacttataggctt

SEQ ID NO: 29188 - DNA, 20 bp, Artificial Sequence
  MKO10029188_A_Loxl3
  gRNA
acaggctcgtgtgcgtctaa

SEQ ID NO: 29189 - DNA, 20 bp, Artificial Sequence
  MKO10029189_A_Loxl3
  gRNA
gtgtgacagaatgcgcctct

SEQ ID NO: 29190 - DNA, 20 bp, Artificial Sequence
  MKO10029190_A_Loxl3
  gRNA
tgcaaggaccagcgccttcc

SEQ ID NO: 29191 - DNA, 20 bp, Artificial Sequence
  MKO10029191_A_Loxl4
  gRNA
aagtacggtacgacggccac

SEQ ID NO: 29192 - DNA, 20 bp, Artificial Sequence
  MKO10029192_A_Loxl4
  gRNA
gcagggccggcggctagaag

SEQ ID NO: 29193 - DNA, 20 bp, Artificial Sequence
  MKO10029193_A_Loxl4
  gRNA
tactgtggcctgccgacagc

SEQ ID NO: 29194 - DNA, 20 bp, Artificial Sequence
  MKO10029194_A_Lox
  gRNA
atctttaggtctcccggacc

SEQ ID NO: 29195 - DNA, 20 bp, Artificial Sequence
  MKO10029195_A_Lox
  gRNA
gtacaacctgagatgcgctg

SEQ ID NO: 29196 - DNA, 20 bp, Artificial Sequence
  MKO10029196_A_Lox
  gRNA
gcataggtgtcataacatcc

SEQ ID NO: 29197 - DNA, 20 bp, Artificial Sequence
  MKO10029197_A_Lpar1
  gRNA
cagcgcaacgagaaccctaa

SEQ ID NO: 29198 - DNA, 20 bp, Artificial Sequence
  MKO10029198_A_Lpar1
  gRNA
cccactccggttataaaaga

SEQ ID NO: 29199 - DNA, 20 bp, Artificial Sequence
  MKO10029199_A_Lpar1
  gRNA
ctgcccgcagtgcgatgtcc

SEQ ID NO: 29200 - DNA, 20 bp, Artificial Sequence
  MKO10029200_A_Lpar2
  gRNA
cttggacagttgctcacgca

SEQ ID NO: 29201 - DNA, 20 bp, Artificial Sequence
  MKO10029201_A_Lpar2
  gRNA
tgagtgtggtctctcggtag

SEQ ID NO: 29202 - DNA, 20 bp, Artificial Sequence
  MKO10029202_A_Lpar2
  gRNA
ctgtaagtcctgcaacgttc

SEQ ID NO: 29203 - DNA, 20 bp, Artificial Sequence
  MKO10029203_A_Lpar3
  gRNA
aaacgttgaccgtcaaccgc

SEQ ID NO: 29204 - DNA, 20 bp, Artificial Sequence
  MKO10029204_A_Lpar3
  gRNA
caggaacacgtaagcgattc

SEQ ID NO: 29205 - DNA, 20 bp, Artificial Sequence
  MKO10029205_A_Lpar3
  gRNA
cgagacgggcagccagtacc

SEQ ID NO: 29206 - DNA, 20 bp, Artificial Sequence
  MKO10029206_A_Lpar4
  gRNA
ccttccgatcgcgtaccatc

SEQ ID NO: 29207 - DNA, 20 bp, Artificial Sequence
  MKO10029207_A_Lpar4
  gRNA
tttacaactttaatcgccac

SEQ ID NO: 29208 - DNA, 20 bp, Artificial Sequence
  MKO10029208_A_Lpar4
  gRNA
aattccgccattgtgtgcgc

SEQ ID NO: 29209 - DNA, 20 bp, Artificial Sequence
  MKO10029209_A_Lpar5
  gRNA
ggccggcgccaactgcgtgc

SEQ ID NO: 29210 - DNA, 20 bp, Artificial Sequence
  MKO10029210_A_Lpar5
  gRNA
agtgtacgcgcagtacacgc

SEQ ID NO: 29211 - DNA, 20 bp, Artificial Sequence
  MKO10029211_A_Lpar5
  gRNA
ccgtaacacccttcgcaacc

SEQ ID NO: 29212 - DNA, 20 bp, Artificial Sequence
  MKO10029212_A_Lpar6
  gRNA
tatcagtgtagatcgatttc

SEQ ID NO: 29213 - DNA, 20 bp, Artificial Sequence
  MKO10029213_A_Lpar6
  gRNA
gaacgtaacttgttctagta

SEQ ID NO: 29214 - DNA, 20 bp, Artificial Sequence
  MKO10029214_A_Lpar6
  gRNA
cccgtacagagtgtacttaa

SEQ ID NO: 29215 - DNA, 20 bp, Artificial Sequence
  MKO10029215_A_Lpcat1
  gRNA
cgttgacgctgttccccatc

SEQ ID NO: 29216 - DNA, 20 bp, Artificial Sequence
  MKO10029216_A_Lpcat1
  gRNA
ctgtcttccttcgcgagtcc

SEQ ID NO: 29217 - DNA, 20 bp, Artificial Sequence
  MKO10029217_A_Lpcat1
  gRNA
tcagagcgggacacgaacac

SEQ ID NO: 29218 - DNA, 20 bp, Artificial Sequence
  MKO10029218_A_Lpcat2b
  gRNA
agaccgcaaacgaagcatat

SEQ ID NO: 29219 - DNA, 20 bp, Artificial Sequence
  MKO10029219_A_Lpcat2b
  gRNA
cgggtagtctttctagaatt

SEQ ID NO: 29220 - DNA, 20 bp, Artificial Sequence
  MKO10029220_A_Lpcat2b
  gRNA
tgatgcaatcgccgttgttg

SEQ ID NO: 29221 - DNA, 20 bp, Artificial Sequence
  MKO10029221_A_Lpcat2
  gRNA
ggcaattccgtcgaagaacg

SEQ ID NO: 29222 - DNA, 20 bp, Artificial Sequence
  MKO10029222_A_Lpcat2
  gRNA
atcaaaaagcgagcgacatc

SEQ ID NO: 29223 - DNA, 20 bp, Artificial Sequence
  MKO10029223_A_Lpcat2
  gRNA
cctcattccacgttcttcga

SEQ ID NO: 29224 - DNA, 20 bp, Artificial Sequence
  MKO10029224_A_Lpcat3
  gRNA
ccggtgactacgatatcaag

SEQ ID NO: 29225 - DNA, 20 bp, Artificial Sequence
  MKO10029225_A_Lpcat3
  gRNA
taataacggcagtgacggtg

SEQ ID NO: 29226 - DNA, 20 bp, Artificial Sequence
  MKO10029226_A_Lpcat3
  gRNA
ctcccatctaggctacccgt

SEQ ID NO: 29227 - DNA, 20 bp, Artificial Sequence
  MKO10029227_A_Lpcat4
  gRNA
ccccgcctctcggcgcagag

SEQ ID NO: 29228 - DNA, 20 bp, Artificial Sequence
  MKO10029228_A_Lpcat4
  gRNA
ctcaaccactctgcgccgag

SEQ ID NO: 29229 - DNA, 20 bp, Artificial Sequence
  MKO10029229_A_Lpcat4
  gRNA
ttggggccagcagtaccccc

SEQ ID NO: 29230 - DNA, 20 bp, Artificial Sequence
  MKO10029230_A_Lpgat1
  gRNA
tgtaagaatggccgtgaccg

SEQ ID NO: 29231 - DNA, 20 bp, Artificial Sequence
  MKO10029231_A_Lpgat1
  gRNA
ttaccggtcctttatcctgt

SEQ ID NO: 29232 - DNA, 20 bp, Artificial Sequence
  MKO10029232_A_Lpgat1
  gRNA
ctaccgcgaccaacagctgc

SEQ ID NO: 29233 - DNA, 20 bp, Artificial Sequence
  MKO10029233_A_Lphn1
  gRNA
caacaccaatgcgaaccgtg

SEQ ID NO: 29234 - DNA, 20 bp, Artificial Sequence
  MKO10029234_A_Lphn1
  gRNA
tcccatttgggttgatgcgc

SEQ ID NO: 29235 - DNA, 20 bp, Artificial Sequence
  MKO10029235_A_Lphn1
  gRNA
atggtgcaaggacccgctgc

SEQ ID NO: 29236 - DNA, 20 bp, Artificial Sequence
  MKO10029236_A_Lphn2
  gRNA
gaacgtccacgtactcgccc

SEQ ID NO: 29237 - DNA, 20 bp, Artificial Sequence
  MKO10029237_A_Lphn2
  gRNA
tctacaacacgcgactaagc

SEQ ID NO: 29238 - DNA, 20 bp, Artificial Sequence
  MKO10029238_A_Lphn2
  gRNA
tctcgtctaactaacccgaa

SEQ ID NO: 29239 - DNA, 20 bp, Artificial Sequence
  MKO10029239_A_Lphn3
  gRNA
gagcgctcaacggctcatcg

SEQ ID NO: 29240 - DNA, 20 bp, Artificial Sequence
  MKO10029240_A_Lphn3
  gRNA
atgatcgagagcgccaacta

SEQ ID NO: 29241 - DNA, 20 bp, Artificial Sequence
  MKO10029241_A_Lphn3
  gRNA
gccgttgagcgctctgccgc

SEQ ID NO: 29242 - DNA, 20 bp, Artificial Sequence
  MKO10029242_A_Lpin1
  gRNA
gtcgatgcatcccgacagcg

SEQ ID NO: 29243 - DNA, 20 bp, Artificial Sequence
  MKO10029243_A_Lpin1
  gRNA
gaccattctctgtccgaact

SEQ ID NO: 29244 - DNA, 20 bp, Artificial Sequence
  MKO10029244_A_Lpin1
  gRNA
actgaaccccgccacgctgt

SEQ ID NO: 29245 - DNA, 20 bp, Artificial Sequence
  MKO10029245_A_Lpin2
  gRNA
ttcccgaagcgtacgtgaaa

SEQ ID NO: 29246 - DNA, 20 bp, Artificial Sequence
  MKO10029246_A_Lpin2
  gRNA
atcgatgcatccagacaacg

SEQ ID NO: 29247 - DNA, 20 bp, Artificial Sequence
  MKO10029247_A_Lpin2
  gRNA
aggatactcacgtttctaat

SEQ ID NO: 29248 - DNA, 20 bp, Artificial Sequence
  MKO10029248_A_Lpin3
  gRNA
gtacactcgccatcggagta

SEQ ID NO: 29249 - DNA, 20 bp, Artificial Sequence
  MKO10029249_A_Lpin3
  gRNA
cctgagggcctagtcattac

SEQ ID NO: 29250 - DNA, 20 bp, Artificial Sequence
  MKO10029250_A_Lpin3
  gRNA
tatgtccttaggctgcgatg

SEQ ID NO: 29251 - DNA, 20 bp, Artificial Sequence
  MKO10029251_A_Lpl
  gRNA
ctagacaacgtccacctctt

SEQ ID NO: 29252 - DNA, 20 bp, Artificial Sequence
  MKO10029252_A_Lpl
  gRNA
tctacaaaatcagcgtcatc

SEQ ID NO: 29253 - DNA, 20 bp, Artificial Sequence
  MKO10029253_A_Lpl
  gRNA
gggtcacctggtcgaagtat

SEQ ID NO: 29254 - DNA, 20 bp, Artificial Sequence
  MKO10029254_A_Lpo
  gRNA
ctgcccgcagaatacgagga

SEQ ID NO: 29255 - DNA, 20 bp, Artificial Sequence
  MKO10029255_A_Lpo
  gRNA
gagcccgtcctcgtattctg

SEQ ID NO: 29256 - DNA, 20 bp, Artificial Sequence
  MKO10029256_A_Lpo
  gRNA
ggctgtgcgtgtccggcctt

SEQ ID NO: 29257 - DNA, 20 bp, Artificial Sequence
  MKO10029257_A_Lpp
  gRNA
gcgtatgcccctcctgcaag

SEQ ID NO: 29258 - DNA, 20 bp, Artificial Sequence
  MKO10029258_A_Lpp
  gRNA
ccacccgctgacgattactt

SEQ ID NO: 29259 - DNA, 20 bp, Artificial Sequence
  MKO10029259_A_Lpp
  gRNA
gctacggtggcacatcacgc

SEQ ID NO: 29260 - DNA, 20 bp, Artificial Sequence
  MKO10029260_A_Lpxn
  gRNA
tgtgttaccctgcgatgaca

SEQ ID NO: 29261 - DNA, 20 bp, Artificial Sequence
  MKO10029261_A_Lpxn
  gRNA
attggaacgctgcacctttc

SEQ ID NO: 29262 - DNA, 20 bp, Artificial Sequence
  MKO10029262_A_Lpxn
  gRNA
cgtgtatgcaaccaatatcc

SEQ ID NO: 29263 - DNA, 20 bp, Artificial Sequence
  MKO10029263_A_Lrat
  gRNA
gctctttagcgtgagcgtcc

SEQ ID NO: 29264 - DNA, 20 bp, Artificial Sequence
  MKO10029264_A_Lrat
  gRNA
cccccaggtagatcccatag

SEQ ID NO: 29265 - DNA, 20 bp, Artificial Sequence
  MKO10029265_A_Lrat
  gRNA
gaagggtcatatatgatgcc

SEQ ID NO: 29266 - DNA, 20 bp, Artificial Sequence
  MKO10029266_A_Lrba
  gRNA
agatcttctcgttgacatgt

SEQ ID NO: 29267 - DNA, 20 bp, Artificial Sequence
  MKO10029267_A_Lrba
  gRNA
gcgtcaggaccgtacttctg

SEQ ID NO: 29268 - DNA, 20 bp, Artificial Sequence
  MKO10029268_A_Lrba
  gRNA
tctaactgtcaaattatagc

SEQ ID NO: 29269 - DNA, 20 bp, Artificial Sequence
  MKO10029269_A_Lrch1
  gRNA
cagatcctcacctgcgccgg

SEQ ID NO: 29270 - DNA, 20 bp, Artificial Sequence
  MKO10029270_A_Lrch1
  gRNA
tgtgagttgcaacgagatca

SEQ ID NO: 29271 - DNA, 20 bp, Artificial Sequence
  MKO10029271_A_Lrch1
  gRNA
gatcaccagcaccttgttgc

SEQ ID NO: 29272 - DNA, 20 bp, Artificial Sequence
  MKO10029272_A_Lrch2
  gRNA
tgttaacataccttaacatc

SEQ ID NO: 29273 - DNA, 20 bp, Artificial Sequence
  MKO10029273_A_Lrch2
  gRNA
ttgttacaaacctgtgccgg

SEQ ID NO: 29274 - DNA, 20 bp, Artificial Sequence
  MKO10029274_A_Lrch2
  gRNA
caatccattgcaagtaccac

SEQ ID NO: 29275 - DNA, 20 bp, Artificial Sequence
  MKO10029275_A_Lrch3
  gRNA
gagaagtcgagccgtatcaa

SEQ ID NO: 29276 - DNA, 20 bp, Artificial Sequence
  MKO10029276_A_Lrch3
  gRNA
ctgagaggcgatttcgtgac

SEQ ID NO: 29277 - DNA, 20 bp, Artificial Sequence
  MKO10029277_A_Lrch3
  gRNA
tcgcctctcagaaatcccta

SEQ ID NO: 29278 - DNA, 20 bp, Artificial Sequence
  MKO10029278_A_Lrch4
  gRNA
ttcgaacattgagatcccgc

SEQ ID NO: 29279 - DNA, 20 bp, Artificial Sequence
  MKO10029279_A_Lrch4
  gRNA
tgctgatgataagcactcga

SEQ ID NO: 29280 - DNA, 20 bp, Artificial Sequence
  MKO10029280_A_Lrch4
  gRNA
ccttagacttgtctcggaac

SEQ ID NO: 29281 - DNA, 20 bp, Artificial Sequence
  MKO10029281_A_Lrcol1
  gRNA
cacattccaaaaacacggtc

SEQ ID NO: 29282 - DNA, 20 bp, Artificial Sequence
  MKO10029282_A_Lrcol1
  gRNA
tcccactgcacaaagcgcac

SEQ ID NO: 29283 - DNA, 20 bp, Artificial Sequence
  MKO10029283_A_Lrcol1
  gRNA
gaagggctgttctcgctcag

SEQ ID NO: 29284 - DNA, 20 bp, Artificial Sequence
  MKO10029284_A_Lrdd
  gRNA
cgggcaaccagagtcgatag

SEQ ID NO: 29285 - DNA, 20 bp, Artificial Sequence
  MKO10029285_A_Lrdd
  gRNA
tcaccatccactatcgactc

SEQ ID NO: 29286 - DNA, 20 bp, Artificial Sequence
  MKO10029286_A_Lrdd
  gRNA
cgctccctttgtgcgcctgc

SEQ ID NO: 29287 - DNA, 20 bp, Artificial Sequence
  MKO10029287_A_Lrfn1
  gRNA
cccccgaacggctccttcga

SEQ ID NO: 29288 - DNA, 20 bp, Artificial Sequence
  MKO10029288_A_Lrfn1
  gRNA
ctacataaattgccccccga

SEQ ID NO: 29289 - DNA, 20 bp, Artificial Sequence
  MKO10029289_A_Lrfn1
  gRNA
ccaccgaagctgaccgtcaa

SEQ ID NO: 29290 - DNA, 20 bp, Artificial Sequence
  MKO10029290_A_Lrfn2
  gRNA
catgcgccgtacggaatccc

SEQ ID NO: 29291 - DNA, 20 bp, Artificial Sequence
  MKO10029291_A_Lrfn2
  gRNA
gggctacgacttgtgcgtac

SEQ ID NO: 29292 - DNA, 20 bp, Artificial Sequence
  MKO10029292_A_Lrfn2
  gRNA
ctgggattccgtacggcgca

SEQ ID NO: 29293 - DNA, 20 bp, Artificial Sequence
  MKO10029293_A_Lrfn3
  gRNA
ccgcgtggccgttagcccgg

SEQ ID NO: 29294 - DNA, 20 bp, Artificial Sequence
  MKO10029294_A_Lrfn3
  gRNA
cctaggcaacgtcaacacgt

SEQ ID NO: 29295 - DNA, 20 bp, Artificial Sequence
  MKO10029295_A_Lrfn3
  gRNA
cggcaccatgatcatagcgc

SEQ ID NO: 29296 - DNA, 20 bp, Artificial Sequence
  MKO10029296_A_Lrfn4
  gRNA
gcgcacagttgaactgcgcc

SEQ ID NO: 29297 - DNA, 20 bp, Artificial Sequence
  MKO10029297_A_Lrfn4
  gRNA
caactgggccgcatcgcccc

SEQ ID NO: 29298 - DNA, 20 bp, Artificial Sequence
  MKO10029298_A_Lrfn4
  gRNA
tgctgggccctccgacctca

SEQ ID NO: 29299 - DNA, 20 bp, Artificial Sequence
  MKO10029299_A_Lrfn5
  gRNA
catccagtttactacggaac

SEQ ID NO: 29300 - DNA, 20 bp, Artificial Sequence
  MKO10029300_A_Lrfn5
  gRNA
taacgaccagttaaaagtgc

SEQ ID NO: 29301 - DNA, 20 bp, Artificial Sequence
  MKO10029301_A_Lrfn5
  gRNA
aatcctgttccgtagtaaac

SEQ ID NO: 29302 - DNA, 20 bp, Artificial Sequence
  MKO10029302_A_Lrg1
  gRNA
ccgacccgcgacatgcagga

SEQ ID NO: 29303 - DNA, 20 bp, Artificial Sequence
  MKO10029303_A_Lrg1
  gRNA
cggtcgccaccccgaccaac

SEQ ID NO: 29304 - DNA, 20 bp, Artificial Sequence
  MKO10029304_A_Lrg1
  gRNA
gaggagcagctatggtctct

SEQ ID NO: 29305 - DNA, 20 bp, Artificial Sequence
  MKO10029305_A_Lrguk
  gRNA
tcatactcaccgatagattc

SEQ ID NO: 29306 - DNA, 20 bp, Artificial Sequence
  MKO10029306_A_Lrguk
  gRNA
cgctgacaggtcatacatct

SEQ ID NO: 29307 - DNA, 20 bp, Artificial Sequence
  MKO10029307_A_Lrguk
  gRNA
ttcccgcaggacaagtatga

SEQ ID NO: 29308 - DNA, 20 bp, Artificial Sequence
  MKO10029308_A_Lrif1
  gRNA
taccaagtagttcctacgat

SEQ ID NO: 29309 - DNA, 20 bp, Artificial Sequence
  MKO10029309_A_Lrif1
  gRNA
tttccatcgctgccaatcgt

SEQ ID NO: 29310 - DNA, 20 bp, Artificial Sequence
  MKO10029310_A_Lrif1
  gRNA
tcacaagccatagtacaacc

SEQ ID NO: 29311 - DNA, 20 bp, Artificial Sequence
  MKO10029311_A_Lrig1
  gRNA
cggagctcctgtttcccgaa

SEQ ID NO: 29312 - DNA, 20 bp, Artificial Sequence
  MKO10029312_A_Lrig1
  gRNA
aaaagcagcagagtcgatct

SEQ ID NO: 29313 - DNA, 20 bp, Artificial Sequence
  MKO10029313_A_Lrig1
  gRNA
ctctccgtctgagcaaaaac

SEQ ID NO: 29314 - DNA, 20 bp, Artificial Sequence
  MKO10029314_A_Lrig2
  gRNA
gtctaactggaacaacacct

SEQ ID NO: 29315 - DNA, 20 bp, Artificial Sequence
  MKO10029315_A_Lrig2
  gRNA
ttaggaatttgagcaataat

SEQ ID NO: 29316 - DNA, 20 bp, Artificial Sequence
  MKO10029316_A_Lrig2
  gRNA
aattagcatgattccaccca

SEQ ID NO: 29317 - DNA, 20 bp, Artificial Sequence
  MKO10029317_A_Lrig3
  gRNA
taacaaccgagtgtcgtcca

SEQ ID NO: 29318 - DNA, 20 bp, Artificial Sequence
  MKO10029318_A_Lrig3
  gRNA
ggtggctcagggaactcgtc

SEQ ID NO: 29319 - DNA, 20 bp, Artificial Sequence
  MKO10029319_A_Lrig3
  gRNA
attagagaccattccaaacc

SEQ ID NO: 29320 - DNA, 20 bp, Artificial Sequence
  MKO10029320_A_Lrit1
  gRNA
agtccaacttgagccgtcac

SEQ ID NO: 29321 - DNA, 20 bp, Artificial Sequence
  MKO10029321_A_Lrit1
  gRNA
tagagagaaccgccattcgc

SEQ ID NO: 29322 - DNA, 20 bp, Artificial Sequence
  MKO10029322_A_Lrit1
  gRNA
gccaatggacgaccactcaa

SEQ ID NO: 29323 - DNA, 20 bp, Artificial Sequence
  MKO10029323_A_Lrit2
  gRNA
ttgtgcgactgccgattaag

SEQ ID NO: 29324 - DNA, 20 bp, Artificial Sequence
  MKO10029324_A_Lrit2
  gRNA
tgcctatgttgacctacgag

SEQ ID NO: 29325 - DNA, 20 bp, Artificial Sequence
  MKO10029325_A_Lrit2
  gRNA
actgagcaagtccccttaat

SEQ ID NO: 29326 - DNA, 20 bp, Artificial Sequence
  MKO10029326_A_Lrit3
  gRNA
gttagtgttgtgtaacgacc

SEQ ID NO: 29327 - DNA, 20 bp, Artificial Sequence
  MKO10029327_A_Lrit3
  gRNA
ctgcacgagttgcgtttgga

SEQ ID NO: 29328 - DNA, 20 bp, Artificial Sequence
  MKO10029328_A_Lrit3
  gRNA
catcgctcttaagattcatc

SEQ ID NO: 29329 - DNA, 20 bp, Artificial Sequence
  MKO10029329_A_Lrmp
  gRNA
ccgagagcccgtcacagctc

SEQ ID NO: 29330 - DNA, 20 bp, Artificial Sequence
  MKO10029330_A_Lrmp
  gRNA
ccgtactcacgtctgtactc

SEQ ID NO: 29331 - DNA, 20 bp, Artificial Sequence
  MKO10029331_A_Lrmp
  gRNA
agagccgcctctgccatgca

SEQ ID NO: 29332 - DNA, 20 bp, Artificial Sequence
  MKO10029332_A_Lrp10
  gRNA
cgagagcgatgaccagcaac

SEQ ID NO: 29333 - DNA, 20 bp, Artificial Sequence
  MKO10029333_A_Lrp10
  gRNA
taccagacgttctgcgccga

SEQ ID NO: 29334 - DNA, 20 bp, Artificial Sequence
  MKO10029334_A_Lrp10
  gRNA
cttcggctgtcccggcctag

SEQ ID NO: 29335 - DNA, 20 bp, Artificial Sequence
  MKO10029335_A_Lrp11
  gRNA
ggacaagcctcccgttagca

SEQ ID NO: 29336 - DNA, 20 bp, Artificial Sequence
  MKO10029336_A_Lrp11
  gRNA
ctgctgtattgacatagcgt

SEQ ID NO: 29337 - DNA, 20 bp, Artificial Sequence
  MKO10029337_A_Lrp11
  gRNA
agtggctcttgaccgcaagt

SEQ ID NO: 29338 - DNA, 20 bp, Artificial Sequence
  MKO10029338_A_Lrp12
  gRNA
attgaaagttaccgagcgtg

SEQ ID NO: 29339 - DNA, 20 bp, Artificial Sequence
  MKO10029339_A_Lrp12
  gRNA
aacgctacttaccaagtcga

SEQ ID NO: 29340 - DNA, 20 bp, Artificial Sequence
  MKO10029340_A_Lrp12
  gRNA
gactgtgacatgccgacatg

SEQ ID NO: 29341 - DNA, 20 bp, Artificial Sequence
  MKO10029341_A_Lrp1b
  gRNA
tgctacaagatgttattgcg

SEQ ID NO: 29342 - DNA, 20 bp, Artificial Sequence
  MKO10029342_A_Lrp1b
  gRNA
gtcctatgcttgcagctgcg

SEQ ID NO: 29343 - DNA, 20 bp, Artificial Sequence
  MKO10029343_A_Lrp1b
  gRNA
gtcagacaacagatcttgca

SEQ ID NO: 29344 - DNA, 20 bp, Artificial Sequence
  MKO10029344_A_Lrp1
  gRNA
tttgacgagtgttccgtgta

SEQ ID NO: 29345 - DNA, 20 bp, Artificial Sequence
  MKO10029345_A_Lrp1
  gRNA
cccgttgcagagacgagaca

SEQ ID NO: 29346 - DNA, 20 bp, Artificial Sequence
  MKO10029346_A_Lrp1
  gRNA
ccgagccaactgttctcgaa

SEQ ID NO: 29347 - DNA, 20 bp, Artificial Sequence
  MKO10029347_A_Lrp2bp
  gRNA
ttattacctccacgctaatt

SEQ ID NO: 29348 - DNA, 20 bp, Artificial Sequence
  MKO10029348_A_Lrp2bp
  gRNA
ctgtatccaccaaattagcg

SEQ ID NO: 29349 - DNA, 20 bp, Artificial Sequence
  MKO10029349_A_Lrp2bp
  gRNA
cttcaaaataagctctcccg

SEQ ID NO: 29350 - DNA, 20 bp, Artificial Sequence
  MKO10029350_A_Lrp2
  gRNA
caggataaggattgttccga

SEQ ID NO: 29351 - DNA, 20 bp, Artificial Sequence
  MKO10029351_A_Lrp2
  gRNA
caggaaaaagcctgaaccgc

SEQ ID NO: 29352 - DNA, 20 bp, Artificial Sequence
  MKO10029352_A_Lrp2
  gRNA
cagcagctgacgtgctccaa

SEQ ID NO: 29353 - DNA, 20 bp, Artificial Sequence
  MKO10029353_A_Lrp3
  gRNA
agcagtgcagttcccgcctt

SEQ ID NO: 29354 - DNA, 20 bp, Artificial Sequence
  MKO10029354_A_Lrp3
  gRNA
actcctctacatcgaagttt

SEQ ID NO: 29355 - DNA, 20 bp, Artificial Sequence
  MKO10029355_A_Lrp3
  gRNA
gctggcatcacctcggatat

SEQ ID NO: 29356 - DNA, 20 bp, Artificial Sequence
  MKO10029356_A_Lrp4
  gRNA
tccgaatgcagtagccgttc

SEQ ID NO: 29357 - DNA, 20 bp, Artificial Sequence
  MKO10029357_A_Lrp4
  gRNA
gtacctgtatccccgcccag

SEQ ID NO: 29358 - DNA, 20 bp, Artificial Sequence
  MKO10029358_A_Lrp4
  gRNA
gcaagtgcatccgacgctcc

SEQ ID NO: 29359 - DNA, 20 bp, Artificial Sequence
  MKO10029359_A_Lrp5
  gRNA
cctcaatgggacgtcccgta

SEQ ID NO: 29360 - DNA, 20 bp, Artificial Sequence
  MKO10029360_A_Lrp5
  gRNA
ctcaccggaaggagccgtcc

SEQ ID NO: 29361 - DNA, 20 bp, Artificial Sequence
  MKO10029361_A_Lrp5
  gRNA
ctccgagaccaaccgcattg

SEQ ID NO: 29362 - DNA, 20 bp, Artificial Sequence
  MKO10029362_A_Lrp6
  gRNA
gagaatgcaacgattgtagt

SEQ ID NO: 29363 - DNA, 20 bp, Artificial Sequence
  MKO10029363_A_Lrp6
  gRNA
cggactgactctggactatc

SEQ ID NO: 29364 - DNA, 20 bp, Artificial Sequence
  MKO10029364_A_Lrp6
  gRNA
gtgccaaagatagaacgtgc

SEQ ID NO: 29365 - DNA, 20 bp, Artificial Sequence
  MKO10029365_A_Lrp8
  gRNA
cgatggctctgacgaatcga

SEQ ID NO: 29366 - DNA, 20 bp, Artificial Sequence
  MKO10029366_A_Lrp8
  gRNA
ccgcagcttaacttctcggc

SEQ ID NO: 29367 - DNA, 20 bp, Artificial Sequence
  MKO10029367_A_Lrp8
  gRNA
cccgcttcgtcactcccgtc

SEQ ID NO: 29368 - DNA, 20 bp, Artificial Sequence
  MKO10029368_A_Lrpap1
  gRNA
tccgcaggcggtccaagccc

SEQ ID NO: 29369 - DNA, 20 bp, Artificial Sequence
  MKO10029369_A_Lrpap1
  gRNA
cagactgcgcagtatcaacc

SEQ ID NO: 29370 - DNA, 20 bp, Artificial Sequence
  MKO10029370_A_Lrpap1
  gRNA
cctcccatccagtccgtatc

SEQ ID NO: 29371 - DNA, 20 bp, Artificial Sequence
  MKO10029371_A_Lrpprc
  gRNA
ccgaactgagtctcgccgag

SEQ ID NO: 29372 - DNA, 20 bp, Artificial Sequence
  MKO10029372_A_Lrpprc
  gRNA
agttacctactcgatttggt

SEQ ID NO: 29373 - DNA, 20 bp, Artificial Sequence
  MKO10029373_A_Lrpprc
  gRNA
agaacaggccgcatcacaaa

SEQ ID NO: 29374 - DNA, 20 bp, Artificial Sequence
  MKO10029374_A_Lrr1
  gRNA
ccgctcgcacgcccttgcct

SEQ ID NO: 29375 - DNA, 20 bp, Artificial Sequence
  MKO10029375_A_Lrr1
  gRNA
ccgaggcaagggcgtgcgag

SEQ ID NO: 29376 - DNA, 20 bp, Artificial Sequence
  MKO10029376_A_Lrr1
  gRNA
aggctcctttagccggacag

SEQ ID NO: 29377 - DNA, 20 bp, Artificial Sequence
  MKO10029377_A_Lrrc10b
  gRNA
agacctcgaccgcaaccgcc

SEQ ID NO: 29378 - DNA, 20 bp, Artificial Sequence
  MKO10029378_A_Lrrc10b
  gRNA
acttcctgcggcgctttccg

SEQ ID NO: 29379 - DNA, 20 bp, Artificial Sequence
  MKO10029379_A_Lrrc10b
  gRNA
ccagcagacggttgccgccc

SEQ ID NO: 29380 - DNA, 20 bp, Artificial Sequence
  MKO10029380_A_Lrrc10
  gRNA
ggcaaaggggttcgccgtgt

SEQ ID NO: 29381 - DNA, 20 bp, Artificial Sequence
  MKO10029381_A_Lrrc10
  gRNA
gcatgcgaagcagtaccgag

SEQ ID NO: 29382 - DNA, 20 bp, Artificial Sequence
  MKO10029382_A_Lrrc10
  gRNA
cgaccgctgccagagttatg

SEQ ID NO: 29383 - DNA, 20 bp, Artificial Sequence
  MKO10029383_A_Lrrc14b
  gRNA
ccttgcaggcacgatcacgc

SEQ ID NO: 29384 - DNA, 20 bp, Artificial Sequence
  MKO10029384_A_Lrrc14b
  gRNA
attgctgcacctgtacgtcc

SEQ ID NO: 29385 - DNA, 20 bp, Artificial Sequence
  MKO10029385_A_Lrrc14b
  gRNA
gctaggtccaacactcttag

SEQ ID NO: 29386 - DNA, 20 bp, Artificial Sequence
  MKO10029386_A_Lrrc14
  gRNA
acaggctgagctacgtaccg

SEQ ID NO: 29387 - DNA, 20 bp, Artificial Sequence
  MKO10029387_A_Lrrc14
  gRNA
agacctgcgcttcaataacc

SEQ ID NO: 29388 - DNA, 20 bp, Artificial Sequence
  MKO10029388_A_Lrrc14
  gRNA
catgcacgtagtgcagcctc

SEQ ID NO: 29389 - DNA, 20 bp, Artificial Sequence
  MKO10029389_A_Lrrc15
  gRNA
tctcatatagccgaagcacc

SEQ ID NO: 29390 - DNA, 20 bp, Artificial Sequence
  MKO10029390_A_Lrrc15
  gRNA
aactaaagaacctgcccgtt

SEQ ID NO: 29391 - DNA, 20 bp, Artificial Sequence
  MKO10029391_A_Lrrc15
  gRNA
agcatcttcgccaacgtcaa

SEQ ID NO: 29392 - DNA, 20 bp, Artificial Sequence
  MKO10029392_A_Lrrc16a
  gRNA
tgggaatatcctccgcaagc

SEQ ID NO: 29393 - DNA, 20 bp, Artificial Sequence
  MKO10029393_A_Lrrc16a
  gRNA
gtcagcacgcatccccagca

SEQ ID NO: 29394 - DNA, 20 bp, Artificial Sequence
  MKO10029394_A_Lrrc16a
  gRNA
tgctggggatgcgtgctgac

SEQ ID NO: 29395 - DNA, 20 bp, Artificial Sequence
  MKO10029395_A_Lrrc16b
  gRNA
gctgccatccgccgagagtg

SEQ ID NO: 29396 - DNA, 20 bp, Artificial Sequence
  MKO10029396_A_Lrrc16b
  gRNA
ccagtttcacacgatgttgc

SEQ ID NO: 29397 - DNA, 20 bp, Artificial Sequence
  MKO10029397_A_Lrrc16b
  gRNA
ccagcaacatcgtgtgaaac

SEQ ID NO: 29398 - DNA, 20 bp, Artificial Sequence
  MKO10029398_A_Lrrc17
  gRNA
ctgcgggtatccccgacact

SEQ ID NO: 29399 - DNA, 20 bp, Artificial Sequence
  MKO10029399_A_Lrrc17
  gRNA
gaacgtcagaatgcgcatag

SEQ ID NO: 29400 - DNA, 20 bp, Artificial Sequence
  MKO10029400_A_Lrrc17
  gRNA
aatcagacagctccgaccca

SEQ ID NO: 29401 - DNA, 20 bp, Artificial Sequence
  MKO10029401_A_Lrrc18
  gRNA
gaacatccgcaccgtgaatc

SEQ ID NO: 29402 - DNA, 20 bp, Artificial Sequence
  MKO10029402_A_Lrrc18
  gRNA
atctccgattcatctgcatt

SEQ ID NO: 29403 - DNA, 20 bp, Artificial Sequence
  MKO10029403_A_Lrrc18
  gRNA
aagctactctagaaggtgga

SEQ ID NO: 29404 - DNA, 20 bp, Artificial Sequence
  MKO10029404_A_Lrrc19
  gRNA
gagttacaaccaccatcgcc

SEQ ID NO: 29405 - DNA, 20 bp, Artificial Sequence
  MKO10029405_A_Lrrc19
  gRNA
agcagaatattgtaccatac

SEQ ID NO: 29406 - DNA, 20 bp, Artificial Sequence
  MKO10029406_A_Lrrc19
  gRNA
ctgtcgtgctttagctcatc

SEQ ID NO: 29407 - DNA, 20 bp, Artificial Sequence
  MKO10029407_A_Lrrc1
  gRNA
gcttccgtaatttgactagc

SEQ ID NO: 29408 - DNA, 20 bp, Artificial Sequence
  MKO10029408_A_Lrrc1
  gRNA
tcagcggaaacccactcacc

SEQ ID NO: 29409 - DNA, 20 bp, Artificial Sequence
  MKO10029409_A_Lrrc1
  gRNA
catttctagtctctataacc

SEQ ID NO: 29410 - DNA, 20 bp, Artificial Sequence
  MKO10029410_A_Lrrc20
  gRNA
tacgcgggcccctccgcctt

SEQ ID NO: 29411 - DNA, 20 bp, Artificial Sequence
  MKO10029411_A_Lrrc20
  gRNA
cctacctcgaagctgattga

SEQ ID NO: 29412 - DNA, 20 bp, Artificial Sequence
  MKO10029412_A_Lrrc20
  gRNA
tggggcaatcacacgcacgt

SEQ ID NO: 29413 - DNA, 20 bp, Artificial Sequence
  MKO10029413_A_Lrrc23
  gRNA
ggctcacgcttatattaagc

SEQ ID NO: 29414 - DNA, 20 bp, Artificial Sequence
  MKO10029414_A_Lrrc23
  gRNA
ctatatccatcttcgctatg

SEQ ID NO: 29415 - DNA, 20 bp, Artificial Sequence
  MKO10029415_A_Lrrc23
  gRNA
aacagggaaccgcatccacc

SEQ ID NO: 29416 - DNA, 20 bp, Artificial Sequence
  MKO10029416_A_Lrrc24
  gRNA
gcttgaggcttaccatcgcg

SEQ ID NO: 29417 - DNA, 20 bp, Artificial Sequence
  MKO10029417_A_Lrrc24
  gRNA
caacaataccctgcgtgcgc

SEQ ID NO: 29418 - DNA, 20 bp, Artificial Sequence
  MKO10029418_A_Lrrc24
  gRNA
cgccacgcaatccccgaagc

SEQ ID NO: 29419 - DNA, 20 bp, Artificial Sequence
  MKO10029419_A_Lrrc25
  gRNA
tggggctttcttcgacaagc

SEQ ID NO: 29420 - DNA, 20 bp, Artificial Sequence
  MKO10029420_A_Lrrc25
  gRNA
tcagcccgtctattgcaacc

SEQ ID NO: 29421 - DNA, 20 bp, Artificial Sequence
  MKO10029421_A_Lrrc25
  gRNA
gcggcggcgaagaagtctcc

SEQ ID NO: 29422 - DNA, 20 bp, Artificial Sequence
  MKO10029422_A_Lrrc26
  gRNA
ccgatagtgaattgtcctgc

SEQ ID NO: 29423 - DNA, 20 bp, Artificial Sequence
  MKO10029423_A_Lrrc26
  gRNA
gtgcgtgcaccgaccgaagc

SEQ ID NO: 29424 - DNA, 20 bp, Artificial Sequence
  MKO10029424_A_Lrrc26
  gRNA
ggtggtctacgctctcgggc

SEQ ID NO: 29425 - DNA, 20 bp, Artificial Sequence
  MKO10029425_A_Lrrc27
  gRNA
caaaatgttacccgttgagc

SEQ ID NO: 29426 - DNA, 20 bp, Artificial Sequence
  MKO10029426_A_Lrrc27
  gRNA
tctccactgagcagatgcgt

SEQ ID NO: 29427 - DNA, 20 bp, Artificial Sequence
  MKO10029427_A_Lrrc27
  gRNA
tctggacttacttggaggtt

SEQ ID NO: 29428 - DNA, 20 bp, Artificial Sequence
  MKO10029428_A_Lrrc28
  gRNA
gctctcagaccaccgatttc

SEQ ID NO: 29429 - DNA, 20 bp, Artificial Sequence
  MKO10029429_A_Lrrc28
  gRNA
taatacctaccaaggttgtg

SEQ ID NO: 29430 - DNA, 20 bp, Artificial Sequence
  MKO10029430_A_Lrrc28
  gRNA
aatctgtaagacgatctctg

SEQ ID NO: 29431 - DNA, 20 bp, Artificial Sequence
  MKO10029431_A_Lrrc29
  gRNA
ctgcatccagtctcgcttcg

SEQ ID NO: 29432 - DNA, 20 bp, Artificial Sequence
  MKO10029432_A_Lrrc29
  gRNA
cccctcccacgaagcgagac

SEQ ID NO: 29433 - DNA, 20 bp, Artificial Sequence
  MKO10029433_A_Lrrc29
  gRNA
gggcccatccctcgtcactg

SEQ ID NO: 29434 - DNA, 20 bp, Artificial Sequence
  MKO10029434_A_Lrrc2
  gRNA
ttgaaacagctcgatgtacg

SEQ ID NO: 29435 - DNA, 20 bp, Artificial Sequence
  MKO10029435_A_Lrrc2
  gRNA
actgcagacgacacatccgc

SEQ ID NO: 29436 - DNA, 20 bp, Artificial Sequence
  MKO10029436_A_Lrrc2
  gRNA
acgtgtcttccagctgaaat

SEQ ID NO: 29437 - DNA, 20 bp, Artificial Sequence
  MKO10029437_A_Lrrc30
  gRNA
agagacagaagttctcgtcg

SEQ ID NO: 29438 - DNA, 20 bp, Artificial Sequence
  MKO10029438_A_Lrrc30
  gRNA
gggcaggctgacccggatag

SEQ ID NO: 29439 - DNA, 20 bp, Artificial Sequence
  MKO10029439_A_Lrrc30
  gRNA
acaagtttaggaccactatc

SEQ ID NO: 29440 - DNA, 20 bp, Artificial Sequence
  MKO10029440_A_Lrrc32
  gRNA
ctatacagcgcttcgtcacc

SEQ ID NO: 29441 - DNA, 20 bp, Artificial Sequence
  MKO10029441_A_Lrrc32
  gRNA
gttctcccggaggtcgagcc

SEQ ID NO: 29442 - DNA, 20 bp, Artificial Sequence
  MKO10029442_A_Lrrc32
  gRNA
ctcgacgctgagagatagcc

SEQ ID NO: 29443 - DNA, 20 bp, Artificial Sequence
  MKO10029443_A_Lrrc34
  gRNA
tataacctcatcggcgatgt

SEQ ID NO: 29444 - DNA, 20 bp, Artificial Sequence
  MKO10029444_A_Lrrc34
  gRNA
gactccggacaaagaataac

SEQ ID NO: 29445 - DNA, 20 bp, Artificial Sequence
  MKO10029445_A_Lrrc34
  gRNA
ctatgctgcgaaactacttc

SEQ ID NO: 29446 - DNA, 20 bp, Artificial Sequence
  MKO10029446_A_Lrrc36
  gRNA
ctcaggactgacgtgtgacg

SEQ ID NO: 29447 - DNA, 20 bp, Artificial Sequence
  MKO10029447_A_Lrrc36
  gRNA
gagccgtccgtgacagcgag

SEQ ID NO: 29448 - DNA, 20 bp, Artificial Sequence
  MKO10029448_A_Lrrc36
  gRNA
cgcgtcacacgtcagtcctg

SEQ ID NO: 29449 - DNA, 20 bp, Artificial Sequence
  MKO10029449_A_Lrrc38
  gRNA
gaacaactcgctgcgctcgc

SEQ ID NO: 29450 - DNA, 20 bp, Artificial Sequence
  MKO10029450_A_Lrrc38
  gRNA
ttgcaccgacccccataccg

SEQ ID NO: 29451 - DNA, 20 bp, Artificial Sequence
  MKO10029451_A_Lrrc38
  gRNA
acactcgctgaaactagctt

SEQ ID NO: 29452 - DNA, 20 bp, Artificial Sequence
  MKO10029452_A_Lrrc39
  gRNA
acaatttcagagatcccccg

SEQ ID NO: 29453 - DNA, 20 bp, Artificial Sequence
  MKO10029453_A_Lrrc39
  gRNA
gtcttaggctagtgcggatc

SEQ ID NO: 29454 - DNA, 20 bp, Artificial Sequence
  MKO10029454_A_Lrrc39
  gRNA
tagtgaactgattcatactc

SEQ ID NO: 29455 - DNA, 20 bp, Artificial Sequence
  MKO10029455_A_Lrrc3b
  gRNA
gttacacaggtcagcgtcat

SEQ ID NO: 29456 - DNA, 20 bp, Artificial Sequence
  MKO10029456_A_Lrrc3b
  gRNA
gtactacgtgaggcagaatc

SEQ ID NO: 29457 - DNA, 20 bp, Artificial Sequence
  MKO10029457_A_Lrrc3b
  gRNA
ggatgaatctggtcgacctg

SEQ ID NO: 29458 - DNA, 20 bp, Artificial Sequence
  MKO10029458_A_Lrrc3
  gRNA
gtactacgtacgccacaacc

SEQ ID NO: 29459 - DNA, 20 bp, Artificial Sequence
  MKO10029459_A_Lrrc3
  gRNA
aattcttcggatgcgattgt

SEQ ID NO: 29460 - DNA, 20 bp, Artificial Sequence
  MKO10029460_A_Lrrc3
  gRNA
gaccaccgatgtcgccatgc

SEQ ID NO: 29461 - DNA, 20 bp, Artificial Sequence
  MKO10029461_A_Lrrc40
  gRNA
cattcagttctactgaacga

SEQ ID NO: 29462 - DNA, 20 bp, Artificial Sequence
  MKO10029462_A_Lrrc40
  gRNA
aagattgagtcgcaacagac

SEQ ID NO: 29463 - DNA, 20 bp, Artificial Sequence
  MKO10029463_A_Lrrc40
  gRNA
aaagatgctcaaatccctcg

SEQ ID NO: 29464 - DNA, 20 bp, Artificial Sequence
  MKO10029464_A_Lrrc41
  gRNA
ggtggtcaacacgaatagac

SEQ ID NO: 29465 - DNA, 20 bp, Artificial Sequence
  MKO10029465_A_Lrrc41
  gRNA
gctgcggcgtgttacacgag

SEQ ID NO: 29466 - DNA, 20 bp, Artificial Sequence
  MKO10029466_A_Lrrc41
  gRNA
tagtggcagagcccaaccgt

SEQ ID NO: 29467 - DNA, 20 bp, Artificial Sequence
  MKO10029467_A_Lrrc42
  gRNA
ccaggacatcaaagccgtta

SEQ ID NO: 29468 - DNA, 20 bp, Artificial Sequence
  MKO10029468_A_Lrrc42
  gRNA
ccagtgcgggtgatgaaaag

SEQ ID NO: 29469 - DNA, 20 bp, Artificial Sequence
  MKO10029469_A_Lrrc42
  gRNA
ctaacagcgctagattctca

SEQ ID NO: 29470 - DNA, 20 bp, Artificial Sequence
  MKO10029470_A_Lrrc43
  gRNA
caatctgcccccgacattga

SEQ ID NO: 29471 - DNA, 20 bp, Artificial Sequence
  MKO10029471_A_Lrrc43
  gRNA
atttgttgtggcctagcccc

SEQ ID NO: 29472 - DNA, 20 bp, Artificial Sequence
  MKO10029472_A_Lrrc43
  gRNA
atggtaaagccacggtagta

SEQ ID NO: 29473 - DNA, 20 bp, Artificial Sequence
  MKO10029473_A_Lrrc45
  gRNA
ggcaacaacctccgagctac

SEQ ID NO: 29474 - DNA, 20 bp, Artificial Sequence
  MKO10029474_A_Lrrc45
  gRNA
gacctgcgctggaataacat

SEQ ID NO: 29475 - DNA, 20 bp, Artificial Sequence
  MKO10029475_A_Lrrc45
  gRNA
ggccaatgttattccagcgc

SEQ ID NO: 29476 - DNA, 20 bp, Artificial Sequence
  MKO10029476_A_Lrrc46
  gRNA
atgccaagttctcaatgcgc

SEQ ID NO: 29477 - DNA, 20 bp, Artificial Sequence
  MKO10029477_A_Lrrc46
  gRNA
gatccagcgcattgagaact

SEQ ID NO: 29478 - DNA, 20 bp, Artificial Sequence
  MKO10029478_A_Lrrc46
  gRNA
actttaccgattgcaggtag

SEQ ID NO: 29479 - DNA, 20 bp, Artificial Sequence
  MKO10029479_A_Lrrc47
  gRNA
gatgtgcgcccatacatcgt

SEQ ID NO: 29480 - DNA, 20 bp, Artificial Sequence
  MKO10029480_A_Lrrc47
  gRNA
atcctagagtaccttcgtgc

SEQ ID NO: 29481 - DNA, 20 bp, Artificial Sequence
  MKO10029481_A_Lrrc47
  gRNA
gcggccgggctgcatacagc

SEQ ID NO: 29482 - DNA, 20 bp, Artificial Sequence
  MKO10029482_A_Lrrc48
  gRNA
tgacgagctgaagcaccgcg

SEQ ID NO: 29483 - DNA, 20 bp, Artificial Sequence
  MKO10029483_A_Lrrc48
  gRNA
ccatctgctcatcaacgcgc

SEQ ID NO: 29484 - DNA, 20 bp, Artificial Sequence
  MKO10029484_A_Lrrc48
  gRNA
ccggcgcgttgatgagcaga

SEQ ID NO: 29485 - DNA, 20 bp, Artificial Sequence
  MKO10029485_A_Lrrc49
  gRNA
actgtgtgccctatcatcga

SEQ ID NO: 29486 - DNA, 20 bp, Artificial Sequence
  MKO10029486_A_Lrrc49
  gRNA
tgctcttccccgtcgatgat

SEQ ID NO: 29487 - DNA, 20 bp, Artificial Sequence
  MKO10029487_A_Lrrc49
  gRNA
tcatgctgtaacagtctacc

SEQ ID NO: 29488 - DNA, 20 bp, Artificial Sequence
  MKO10029488_A_Lrrc4b
  gRNA
cttcgacgacctcaagtcgc

SEQ ID NO: 29489 - DNA, 20 bp, Artificial Sequence
  MKO10029489_A_Lrrc4b
  gRNA
cacggccgacacgttaagcg

SEQ ID NO: 29490 - DNA, 20 bp, Artificial Sequence
  MKO10029490_A_Lrrc4b
  gRNA
ccagccgggtgatctgcacg

SEQ ID NO: 29491 - DNA, 20 bp, Artificial Sequence
  MKO10029491_A_Lrrc4c
  gRNA
tgccatccggaacttcacga

SEQ ID NO: 29492 - DNA, 20 bp, Artificial Sequence
  MKO10029492_A_Lrrc4c
  gRNA
gccccactccagtgatcgat

SEQ ID NO: 29493 - DNA, 20 bp, Artificial Sequence
  MKO10029493_A_Lrrc4c
  gRNA
cgatttcaatggttcgaata

SEQ ID NO: 29494 - DNA, 20 bp, Artificial Sequence
  MKO10029494_A_Lrrc4
  gRNA
gaatccacacttgcgccgtg

SEQ ID NO: 29495 - DNA, 20 bp, Artificial Sequence
  MKO10029495_A_Lrrc4
  gRNA
ctgtgactgtactccgctgc

SEQ ID NO: 29496 - DNA, 20 bp, Artificial Sequence
  MKO10029496_A_Lrrc4
  gRNA
gaccacccgtgtgcccaagc

SEQ ID NO: 29497 - DNA, 20 bp, Artificial Sequence
  MKO10029497_A_Lrrc51
  gRNA
caacggcatccatcgcctag

SEQ ID NO: 29498 - DNA, 20 bp, Artificial Sequence
  MKO10029498_A_Lrrc51
  gRNA
gatggatgccgttgccgtga

SEQ ID NO: 29499 - DNA, 20 bp, Artificial Sequence
  MKO10029499_A_Lrrc51
  gRNA
cattatagatctggtaaccg

SEQ ID NO: 29500 - DNA, 20 bp, Artificial Sequence
  MKO10029500_A_Lrrc52
  gRNA
aatgccctccgaacgtcgag

SEQ ID NO: 29501 - DNA, 20 bp, Artificial Sequence
  MKO10029501_A_Lrrc52
  gRNA
tcagaacaaccggattcgag

SEQ ID NO: 29502 - DNA, 20 bp, Artificial Sequence
  MKO10029502_A_Lrrc52
  gRNA
tgcccagaacgccacgtgta

SEQ ID NO: 29503 - DNA, 20 bp, Artificial Sequence
  MKO10029503_A_Lrrc55
  gRNA
cgccaagcgcttagcacacc

SEQ ID NO: 29504 - DNA, 20 bp, Artificial Sequence
  MKO10029504_A_Lrrc55
  gRNA
ctacatggaactccgcgtgc

SEQ ID NO: 29505 - DNA, 20 bp, Artificial Sequence
  MKO10029505_A_Lrrc55
  gRNA
cggccaactgttgtcaccgt

SEQ ID NO: 29506 - DNA, 20 bp, Artificial Sequence
  MKO10029506_A_Lrrc56
  gRNA
cacagctagtatccgggtac

SEQ ID NO: 29507 - DNA, 20 bp, Artificial Sequence
  MKO10029507_A_Lrrc56
  gRNA
gccagctcagctcccgtacc

SEQ ID NO: 29508 - DNA, 20 bp, Artificial Sequence
  MKO10029508_A_Lrrc56
  gRNA
ggctctcaccgaagttcccc

SEQ ID NO: 29509 - DNA, 20 bp, Artificial Sequence
  MKO10029509_A_Lrrc57
  gRNA
agcctaccgcctctgataat

SEQ ID NO: 29510 - DNA, 20 bp, Artificial Sequence
  MKO10029510_A_Lrrc57
  gRNA
ctggttgagattgagttcga

SEQ ID NO: 29511 - DNA, 20 bp, Artificial Sequence
  MKO10029511_A_Lrrc57
  gRNA
agagagctaccatctacctt

SEQ ID NO: 29512 - DNA, 20 bp, Artificial Sequence
  MKO10029512_A_Lrrc58
  gRNA
cagcgacgtcaggcggttgt

SEQ ID NO: 29513 - DNA, 20 bp, Artificial Sequence
  MKO10029513_A_Lrrc58
  gRNA
accgcctgacgtcgctgccg

SEQ ID NO: 29514 - DNA, 20 bp, Artificial Sequence
  MKO10029514_A_Lrrc58
  gRNA
gagtttacgaggaaacccgt

SEQ ID NO: 29515 - DNA, 20 bp, Artificial Sequence
  MKO10029515_A_Lrrc59
  gRNA
cagatccaataccgtagcct

SEQ ID NO: 29516 - DNA, 20 bp, Artificial Sequence
  MKO10029516_A_Lrrc59
  gRNA
ggctcctagtcggatttctg

SEQ ID NO: 29517 - DNA, 20 bp, Artificial Sequence
  MKO10029517_A_Lrrc59
  gRNA
cagcagctacccgcagactt

SEQ ID NO: 29518 - DNA, 20 bp, Artificial Sequence
  MKO10029518_A_Lrrc61
  gRNA
cagccctgtaagccgattat

SEQ ID NO: 29519 - DNA, 20 bp, Artificial Sequence
  MKO10029519_A_Lrrc61
  gRNA
catgggtagagcccggctac

SEQ ID NO: 29520 - DNA, 20 bp, Artificial Sequence
  MKO10029520_A_Lrrc61
  gRNA
tcgtcaggccagcgatagct

SEQ ID NO: 29521 - DNA, 20 bp, Artificial Sequence
  MKO10029521_A_Lrrc63
  gRNA
acttactttcaggcggtttg

SEQ ID NO: 29522 - DNA, 20 bp, Artificial Sequence
  MKO10029522_A_Lrrc63
  gRNA
agccaagaagtcctcgaaaa

SEQ ID NO: 29523 - DNA, 20 bp, Artificial Sequence
  MKO10029523_A_Lrrc63
  gRNA
gggtgaaactgggtacctag

SEQ ID NO: 29524 - DNA, 20 bp, Artificial Sequence
  MKO10029524_A_Lrrc66
  gRNA
ctacgagtctgattccgacg

SEQ ID NO: 29525 - DNA, 20 bp, Artificial Sequence
  MKO10029525_A_Lrrc66
  gRNA
gggtcactttcgatatgcga

SEQ ID NO: 29526 - DNA, 20 bp, Artificial Sequence
  MKO10029526_A_Lrrc66
  gRNA
ggccacgttgatctattctc

SEQ ID NO: 29527 - DNA, 20 bp, Artificial Sequence
  MKO10029527_A_Lrrc69
  gRNA
gttacggttgaggcttaagt

SEQ ID NO: 29528 - DNA, 20 bp, Artificial Sequence
  MKO10029528_A_Lrrc69
  gRNA
ttacgcctgccggaaatatc

SEQ ID NO: 29529 - DNA, 20 bp, Artificial Sequence
  MKO10029529_A_Lrrc69
  gRNA
gcagttgacgttactaaacc

SEQ ID NO: 29530 - DNA, 20 bp, Artificial Sequence
  MKO10029530_A_Lrrc6
  gRNA
ggtgaccttacaacagttaa

SEQ ID NO: 29531 - DNA, 20 bp, Artificial Sequence
  MKO10029531_A_Lrrc6
  gRNA
gcatacctttaactgttgta

SEQ ID NO: 29532 - DNA, 20 bp, Artificial Sequence
  MKO10029532_A_Lrrc6
  gRNA
gatggacgcaccaagcagtg

SEQ ID NO: 29533 - DNA, 20 bp, Artificial Sequence
  MKO10029533_A_Lrrc71
  gRNA
ccgtggccgggtgacaactt

SEQ ID NO: 29534 - DNA, 20 bp, Artificial Sequence
  MKO10029534_A_Lrrc71
  gRNA
gtgaaggagatctacattcg

SEQ ID NO: 29535 - DNA, 20 bp, Artificial Sequence
  MKO10029535_A_Lrrc71
  gRNA
ctctggctgcaggatgccga

SEQ ID NO: 29536 - DNA, 20 bp, Artificial Sequence
  MKO10029536_A_Lrrc72
  gRNA
tgacgttcaccagcatgaac

SEQ ID NO: 29537 - DNA, 20 bp, Artificial Sequence
  MKO10029537_A_Lrrc72
  gRNA
tcatgctggtgaacgtcatc

SEQ ID NO: 29538 - DNA, 20 bp, Artificial Sequence
  MKO10029538_A_Lrrc72
  gRNA
gtgattcaatcagtagcatt

SEQ ID NO: 29539 - DNA, 20 bp, Artificial Sequence
  MKO10029539_A_Lrrc73
  gRNA
tcaccagacttggccccgtc

SEQ ID NO: 29540 - DNA, 20 bp, Artificial Sequence
  MKO10029540_A_Lrrc73
  gRNA
cctccagacggggccaagtc

SEQ ID NO: 29541 - DNA, 20 bp, Artificial Sequence
  MKO10029541_A_Lrrc73
  gRNA
tgctgttctcggccaacacc

SEQ ID NO: 29542 - DNA, 20 bp, Artificial Sequence
  MKO10029542_A_Lrrc7
  gRNA
cacactagaagagctctatc

SEQ ID NO: 29543 - DNA, 20 bp, Artificial Sequence
  MKO10029543_A_Lrrc7
  gRNA
aggtagctcctcaatctgat

SEQ ID NO: 29544 - DNA, 20 bp, Artificial Sequence
  MKO10029544_A_Lrrc7
  gRNA
tactgatgtcgagttctttc

SEQ ID NO: 29545 - DNA, 20 bp, Artificial Sequence
  MKO10029545_A_Lrrc8a
  gRNA
ccagtacgcccgtctccgat

SEQ ID NO: 29546 - DNA, 20 bp, Artificial Sequence
  MKO10029546_A_Lrrc8a
  gRNA
cccgaagctcgatctgcgtc

SEQ ID NO: 29547 - DNA, 20 bp, Artificial Sequence
  MKO10029547_A_Lrrc8a
  gRNA
acctgacgcagatcgagctt

SEQ ID NO: 29548 - DNA, 20 bp, Artificial Sequence
  MKO10029548_A_Lrrc8b
  gRNA
cgactgttcgatcgacgtgc

SEQ ID NO: 29549 - DNA, 20 bp, Artificial Sequence
  MKO10029549_A_Lrrc8b
  gRNA
gggcggggtggtcgaccacc

SEQ ID NO: 29550 - DNA, 20 bp, Artificial Sequence
  MKO10029550_A_Lrrc8b
  gRNA
aagcgttctgccacgggaag

SEQ ID NO: 29551 - DNA, 20 bp, Artificial Sequence
  MKO10029551_A_Lrrc8c
  gRNA
cgcttcatcccgcccgaaat

SEQ ID NO: 29552 - DNA, 20 bp, Artificial Sequence
  MKO10029552_A_Lrrc8c
  gRNA
tgattccggtgaccgagttc

SEQ ID NO: 29553 - DNA, 20 bp, Artificial Sequence
  MKO10029553_A_Lrrc8c
  gRNA
accgaccaaccccgcgaccg

SEQ ID NO: 29554 - DNA, 20 bp, Artificial Sequence
  MKO10029554_A_Lrrc8d
  gRNA
cccctctaacatcaccgacg

SEQ ID NO: 29555 - DNA, 20 bp, Artificial Sequence
  MKO10029555_A_Lrrc8d
  gRNA
cgaacacctcgtaccccgtg

SEQ ID NO: 29556 - DNA, 20 bp, Artificial Sequence
  MKO10029556_A_Lrrc8d
  gRNA
agagcttggtcccgtcgttg

SEQ ID NO: 29557 - DNA, 20 bp, Artificial Sequence
  MKO10029557_A_Lrrc8e
  gRNA
ggatctcctcgatagaccga

SEQ ID NO: 29558 - DNA, 20 bp, Artificial Sequence
  MKO10029558_A_Lrrc8e
  gRNA
cagactctcgagtgcgttgt

SEQ ID NO: 29559 - DNA, 20 bp, Artificial Sequence
  MKO10029559_A_Lrrc8e
  gRNA
aactgcttgaactccgccac

SEQ ID NO: 29560 - DNA, 20 bp, Artificial Sequence
  MKO10029560_A_Lrrc9
  gRNA
tcagggtatccccgaatagt

SEQ ID NO: 29561 - DNA, 20 bp, Artificial Sequence
  MKO10029561_A_Lrrc9
  gRNA
aacttatgagatcgttggac

SEQ ID NO: 29562 - DNA, 20 bp, Artificial Sequence
  MKO10029562_A_Lrrc9
  gRNA
taatgatttcacctcgattt

SEQ ID NO: 29563 - DNA, 20 bp, Artificial Sequence
  MKO10029563_A_Lrrcc1
  gRNA
gtgtagcgaaatcgaacggg

SEQ ID NO: 29564 - DNA, 20 bp, Artificial Sequence
  MKO10029564_A_Lrrcc1
  gRNA
aatcctatctgccttatacc

SEQ ID NO: 29565 - DNA, 20 bp, Artificial Sequence
  MKO10029565_A_Lrrcc1
  gRNA
atgacagatctaaatgtcgt

SEQ ID NO: 29566 - DNA, 20 bp, Artificial Sequence
  MKO10029566_A_Lrrd1
  gRNA
tcctttgatgagaccgccaa

SEQ ID NO: 29567 - DNA, 20 bp, Artificial Sequence
  MKO10029567_A_Lrrd1
  gRNA
tgaaagtttgtagataccac

SEQ ID NO: 29568 - DNA, 20 bp, Artificial Sequence
  MKO10029568_A_Lrrd1
  gRNA
gacacatacctctgagatct

SEQ ID NO: 29569 - DNA, 20 bp, Artificial Sequence
  MKO10029569_A_Lrrfip1
  gRNA
ggactcgctggccgaagttg

SEQ ID NO: 29570 - DNA, 20 bp, Artificial Sequence
  MKO10029570_A_Lrrfip1
  gRNA
gaagcgtgcagcccgagccg

SEQ ID NO: 29571 - DNA, 20 bp, Artificial Sequence
  MKO10029571_A_Lrrfip1
  gRNA
tgcacgcttcgctgcgagcc

SEQ ID NO: 29572 - DNA, 20 bp, Artificial Sequence
  MKO10029572_A_Lrrfip2
  gRNA
tagcagcaaagcgggccgcc

SEQ ID NO: 29573 - DNA, 20 bp, Artificial Sequence
  MKO10029573_A_Lrrfip2
  gRNA
gtcgttccagttcccgcatg

SEQ ID NO: 29574 - DNA, 20 bp, Artificial Sequence
  MKO10029574_A_Lrrfip2
  gRNA
tacccgcagttcactcagtg

SEQ ID NO: 29575 - DNA, 20 bp, Artificial Sequence
  MKO10029575_A_Lrriq1
  gRNA
aggagtaataatctcacgaa

SEQ ID NO: 29576 - DNA, 20 bp, Artificial Sequence
  MKO10029576_A_Lrriq1
  gRNA
aaatgctgagcaattaatga

SEQ ID NO: 29577 - DNA, 20 bp, Artificial Sequence
  MKO10029577_A_Lrriq1
  gRNA
ggaggacagtgacgacagcg

SEQ ID NO: 29578 - DNA, 20 bp, Artificial Sequence
  MKO10029578_A_Lrriq3
  gRNA
caaacatggtcagccctatg

SEQ ID NO: 29579 - DNA, 20 bp, Artificial Sequence
  MKO10029579_A_Lrriq3
  gRNA
ctgaacgtcttaaacctctc

SEQ ID NO: 29580 - DNA, 20 bp, Artificial Sequence
  MKO10029580_A_Lrriq3
  gRNA
tgaaaccacgtatccatctt

SEQ ID NO: 29581 - DNA, 20 bp, Artificial Sequence
  MKO10029581_A_Lrriq4
  gRNA
cttacttcgagtacggcaaa

SEQ ID NO: 29582 - DNA, 20 bp, Artificial Sequence
  MKO10029582_A_Lrriq4
  gRNA
tccgcacccttcgcgagctg

SEQ ID NO: 29583 - DNA, 20 bp, Artificial Sequence
  MKO10029583_A_Lrriq4
  gRNA
gatttgcgcgctcaagaacc

SEQ ID NO: 29584 - DNA, 20 bp, Artificial Sequence
  MKO10029584_A_Lrrk1
  gRNA
acccggagaactatgccgtc

SEQ ID NO: 29585 - DNA, 20 bp, Artificial Sequence
  MKO10029585_A_Lrrk1
  gRNA
tagtagttcacgtactactt

SEQ ID NO: 29586 - DNA, 20 bp, Artificial Sequence
  MKO10029586_A_Lrrk1
  gRNA
ttgtcatcggtgggctccgt

SEQ ID NO: 29587 - DNA, 20 bp, Artificial Sequence
  MKO10029587_A_Lrrk2
  gRNA
cccgcttacctgctgtacac

SEQ ID NO: 29588 - DNA, 20 bp, Artificial Sequence
  MKO10029588_A_Lrrk2
  gRNA
acacttaccggtgaatacca

SEQ ID NO: 29589 - DNA, 20 bp, Artificial Sequence
  MKO10029589_A_Lrrk2
  gRNA
cgtgcctctgttgattgtcc

SEQ ID NO: 29590 - DNA, 20 bp, Artificial Sequence
  MKO10029590_A_Lrrn1
  gRNA
tttcgcgatgtaaatagcga

SEQ ID NO: 29591 - DNA, 20 bp, Artificial Sequence
  MKO10029591_A_Lrrn1
  gRNA
tcgctatttacatcgcgaaa

SEQ ID NO: 29592 - DNA, 20 bp, Artificial Sequence
  MKO10029592_A_Lrrn1
  gRNA
gatgctgatctcacgcagat

SEQ ID NO: 29593 - DNA, 20 bp, Artificial Sequence
  MKO10029593_A_Lrrn2
  gRNA
taccagagcaaacttgtcga

SEQ ID NO: 29594 - DNA, 20 bp, Artificial Sequence
  MKO10029594_A_Lrrn2
  gRNA
accttcagcgccgcccagtc

SEQ ID NO: 29595 - DNA, 20 bp, Artificial Sequence
  MKO10029595_A_Lrrn2
  gRNA
cgcggcagtcgggccaaagc

SEQ ID NO: 29596 - DNA, 20 bp, Artificial Sequence
  MKO10029596_A_Lrrn3
  gRNA
cccctccgtattctgttaat

SEQ ID NO: 29597 - DNA, 20 bp, Artificial Sequence
  MKO10029597_A_Lrrn3
  gRNA
gttgcgactgtgtaatccgc

SEQ ID NO: 29598 - DNA, 20 bp, Artificial Sequence
  MKO10029598_A_Lrrn3
  gRNA
ataccagacgacgccttggc

SEQ ID NO: 29599 - DNA, 20 bp, Artificial Sequence
  MKO10029599_A_Lrrn4cl
  gRNA
gccgcctaagcctgttaccc

SEQ ID NO: 29600 - DNA, 20 bp, Artificial Sequence
  MKO10029600_A_Lrrn4cl
  gRNA
ggcaaccccatcgctcacga

SEQ ID NO: 29601 - DNA, 20 bp, Artificial Sequence
  MKO10029601_A_Lrrn4cl
  gRNA
ttgcccccgacgtcaaggta

SEQ ID NO: 29602 - DNA, 20 bp, Artificial Sequence
  MKO10029602_A_Lrrn4
  gRNA
cgcacgctgcgcagcctcga

SEQ ID NO: 29603 - DNA, 20 bp, Artificial Sequence
  MKO10029603_A_Lrrn4
  gRNA
accgcatctccgtgctacac

SEQ ID NO: 29604 - DNA, 20 bp, Artificial Sequence
  MKO10029604_A_Lrrn4
  gRNA
cctgttactggttagcaccc

SEQ ID NO: 29605 - DNA, 20 bp, Artificial Sequence
  MKO10029605_A_Lrrtm1
  gRNA
ggacaggttatggggcgcct

SEQ ID NO: 29606 - DNA, 20 bp, Artificial Sequence
  MKO10029606_A_Lrrtm1
  gRNA
agttagcatcgtaacgtccc

SEQ ID NO: 29607 - DNA, 20 bp, Artificial Sequence
  MKO10029607_A_Lrrtm1
  gRNA
cgttgcgcccgcagtcccac

SEQ ID NO: 29608 - DNA, 20 bp, Artificial Sequence
  MKO10029608_A_Lrrtm2
  gRNA
ctgaaatccctcacgaccgt

SEQ ID NO: 29609 - DNA, 20 bp, Artificial Sequence
  MKO10029609_A_Lrrtm2
  gRNA
cacaaaccgtttgcgaagtt

SEQ ID NO: 29610 - DNA, 20 bp, Artificial Sequence
  MKO10029610_A_Lrrtm2
  gRNA
ttcgagccaaacttcgcaaa

SEQ ID NO: 29611 - DNA, 20 bp, Artificial Sequence
  MKO10029611_A_Lrrtm3
  gRNA
cgctgcccgcgatgatctta

SEQ ID NO: 29612 - DNA, 20 bp, Artificial Sequence
  MKO10029612_A_Lrrtm3
  gRNA
agcagcgctccctcatgcga

SEQ ID NO: 29613 - DNA, 20 bp, Artificial Sequence
  MKO10029613_A_Lrrtm3
  gRNA
ttgagcacaatcacgtcagc

SEQ ID NO: 29614 - DNA, 20 bp, Artificial Sequence
  MKO10029614_A_Lrrtm4
  gRNA
ttatcccgaaacgcgtttgc

SEQ ID NO: 29615 - DNA, 20 bp, Artificial Sequence
  MKO10029615_A_Lrrtm4
  gRNA
gacatccaagcaatcgagcc

SEQ ID NO: 29616 - DNA, 20 bp, Artificial Sequence
  MKO10029616_A_Lrrtm4
  gRNA
atgtgccaggctcgattgct

SEQ ID NO: 29617 - DNA, 20 bp, Artificial Sequence
  MKO10029617_A_Lrsam1
  gRNA
gtcagctgccccatgtcatc

SEQ ID NO: 29618 - DNA, 20 bp, Artificial Sequence
  MKO10029618_A_Lrsam1
  gRNA
cacgttgcaaaagccccaaa

SEQ ID NO: 29619 - DNA, 20 bp, Artificial Sequence
  MKO10029619_A_Lrsam1
  gRNA
tctccccaggcaaaagaagc

SEQ ID NO: 29620 - DNA, 20 bp, Artificial Sequence
  MKO10029620_A_Lrtm1
  gRNA
gatcgtatgtctcatgatgt

SEQ ID NO: 29621 - DNA, 20 bp, Artificial Sequence
  MKO10029621_A_Lrtm1
  gRNA
cagggttggtacagttcgtg

SEQ ID NO: 29622 - DNA, 20 bp, Artificial Sequence
  MKO10029622_A_Lrtm1
  gRNA
gccgggatatatgttgaatg

SEQ ID NO: 29623 - DNA, 20 bp, Artificial Sequence
  MKO10029623_A_Lrtm2
  gRNA
ccggctgacgttcgagcccc

SEQ ID NO: 29624 - DNA, 20 bp, Artificial Sequence
  MKO10029624_A_Lrtm2
  gRNA
tgatgctgttattccgaagc

SEQ ID NO: 29625 - DNA, 20 bp, Artificial Sequence
  MKO10029625_A_Lrtm2
  gRNA
atcatcgccggggtcgtgtg

SEQ ID NO: 29626 - DNA, 20 bp, Artificial Sequence
  MKO10029626_A_Lrwd1
  gRNA
ccaggtgcggatgatcgccg

SEQ ID NO: 29627 - DNA, 20 bp, Artificial Sequence
  MKO10029627_A_Lrwd1
  gRNA
cgctcatcgagttcacgcag

SEQ ID NO: 29628 - DNA, 20 bp, Artificial Sequence
  MKO10029628_A_Lrwd1
  gRNA
ggaccttagcgtcttgcacc

SEQ ID NO: 29629 - DNA, 20 bp, Artificial Sequence
  MKO10029629_A_Lsamp
  gRNA
tgccaacgaggtctcctcgg

SEQ ID NO: 29630 - DNA, 20 bp, Artificial Sequence
  MKO10029630_A_Lsamp
  gRNA
gctcttcgactccgtgatag

SEQ ID NO: 29631 - DNA, 20 bp, Artificial Sequence
  MKO10029631_A_Lsamp
  gRNA
cttgtacgatcaagtaaact

SEQ ID NO: 29632 - DNA, 20 bp, Artificial Sequence
  MKO10029632_A_Lsg1
  gRNA
tattaagtttgtaccccctg

SEQ ID NO: 29633 - DNA, 20 bp, Artificial Sequence
  MKO10029633_A_Lsg1
  gRNA
gaagtccaagttccgttcaa

SEQ ID NO: 29634 - DNA, 20 bp, Artificial Sequence
  MKO10029634_A_Lsg1
  gRNA
ccaacactcaccgcacaagc

SEQ ID NO: 29635 - DNA, 20 bp, Artificial Sequence
  MKO10029635_A_Lsm10
  gRNA
gacgtatcggacgttacgac

SEQ ID NO: 29636 - DNA, 20 bp, Artificial Sequence
  MKO10029636_A_Lsm10
  gRNA
cgatacgtccatatcccaga

SEQ ID NO: 29637 - DNA, 20 bp, Artificial Sequence
  MKO10029637_A_Lsm10
  gRNA
gtcgagagttcccctccaaa

SEQ ID NO: 29638 - DNA, 20 bp, Artificial Sequence
  MKO10029638_A_Lsm11
  gRNA
tcgtcgccttcgacaagttc

SEQ ID NO: 29639 - DNA, 20 bp, Artificial Sequence
  MKO10029639_A_Lsm11
  gRNA
caccccgcaatgtgcttacg

SEQ ID NO: 29640 - DNA, 20 bp, Artificial Sequence
  MKO10029640_A_Lsm11
  gRNA
tccggtggaggttcccgccg

SEQ ID NO: 29641 - DNA, 20 bp, Artificial Sequence
  MKO10029641_A_Lsm12
  gRNA
cccaactcacgtcttgtgaa

SEQ ID NO: 29642 - DNA, 20 bp, Artificial Sequence
  MKO10029642_A_Lsm12
  gRNA
agcttcactcaatgttagta

SEQ ID NO: 29643 - DNA, 20 bp, Artificial Sequence
  MKO10029643_A_Lsm12
  gRNA
gtgaacgctgcagtatcttt

SEQ ID NO: 29644 - DNA, 20 bp, Artificial Sequence
  MKO10029644_A_Lsm14a
  gRNA
ttcttaccagttcgatcctt

SEQ ID NO: 29645 - DNA, 20 bp, Artificial Sequence
  MKO10029645_A_Lsm14a
  gRNA
acaagcagtacagaccgcct

SEQ ID NO: 29646 - DNA, 20 bp, Artificial Sequence
  MKO10029646_A_Lsm14a
  gRNA
gtcgtcatcttcattccagt

SEQ ID NO: 29647 - DNA, 20 bp, Artificial Sequence
  MKO10029647_A_Lsm14b
  gRNA
gcgttacctgaccgcctccg

SEQ ID NO: 29648 - DNA, 20 bp, Artificial Sequence
  MKO10029648_A_Lsm14b
  gRNA
accatggggctcttgccgac

SEQ ID NO: 29649 - DNA, 20 bp, Artificial Sequence
  MKO10029649_A_Lsm14b
  gRNA
accattgagctgtgtcgccg

SEQ ID NO: 29650 - DNA, 20 bp, Artificial Sequence
  MKO10029650_A_Lsm1
  gRNA
cattcctcgcgcagacactc

SEQ ID NO: 29651 - DNA, 20 bp, Artificial Sequence
  MKO10029651_A_Lsm1
  gRNA
tcgtccagagtgtctgcgcg

SEQ ID NO: 29652 - DNA, 20 bp, Artificial Sequence
  MKO10029652_A_Lsm1
  gRNA
cactgtcgatgtcctcgatg

SEQ ID NO: 29653 - DNA, 20 bp, Artificial Sequence
  MKO10029653_A_Lsm2
  gRNA
gctcggagccgatggtgttt

SEQ ID NO: 29654 - DNA, 20 bp, Artificial Sequence
  MKO10029654_A_Lsm2
  gRNA
gcacttctgtgctgttgacg

SEQ ID NO: 29655 - DNA, 20 bp, Artificial Sequence
  MKO10029655_A_Lsm2
  gRNA
tgtcggttagtttgatattg

SEQ ID NO: 29656 - DNA, 20 bp, Artificial Sequence
  MKO10029656_A_Lsm3
  gRNA
catggcggacgacgtagatc

SEQ ID NO: 29657 - DNA, 20 bp, Artificial Sequence
  MKO10029657_A_Lsm3
  gRNA
acagaccaccaataccgtag

SEQ ID NO: 29658 - DNA, 20 bp, Artificial Sequence
  MKO10029658_A_Lsm3
  gRNA
gtagtctgcctcgaagctct

SEQ ID NO: 29659 - DNA, 20 bp, Artificial Sequence
  MKO10029659_A_Lsm4
  gRNA
ggagacctacaacgggcatc

SEQ ID NO: 29660 - DNA, 20 bp, Artificial Sequence
  MKO10029660_A_Lsm4
  gRNA
gctcaccagatgcccgttgt

SEQ ID NO: 29661 - DNA, 20 bp, Artificial Sequence
  MKO10029661_A_Lsm4
  gRNA
atgcctgagtgctacatccg

SEQ ID NO: 29662 - DNA, 20 bp, Artificial Sequence
  MKO10029662_A_Lsm5
  gRNA
ccaatgcagctggttcccgg

SEQ ID NO: 29663 - DNA, 20 bp, Artificial Sequence
  MKO10029663_A_Lsm5
  gRNA
tttagtgaaattacaccaga

SEQ ID NO: 29664 - DNA, 20 bp, Artificial Sequence
  MKO10029664_A_Lsm5
  gRNA
attaaattcagatatggtgt

SEQ ID NO: 29665 - DNA, 20 bp, Artificial Sequence
  MKO10029665_A_Lsm6
  gRNA
agctcttaccattgtttcct

SEQ ID NO: 29666 - DNA, 20 bp, Artificial Sequence
  MKO10029666_A_Lsm6
  gRNA
tccaggggtcctggcctgcc

SEQ ID NO: 29667 - DNA, 20 bp, Artificial Sequence
  MKO10029667_A_Lsm6
  gRNA
ggttgttaaacatgagcctg

SEQ ID NO: 29668 - DNA, 20 bp, Artificial Sequence
  MKO10029668_A_Lsm7
  gRNA
actcaccttcccggccaccc

SEQ ID NO: 29669 - DNA, 20 bp, Artificial Sequence
  MKO10029669_A_Lsm7
  gRNA
gggaccatggagtacatgag

SEQ ID NO: 29670 - DNA, 20 bp, Artificial Sequence
  MKO10029670_A_Lsm7
  gRNA
ctcacctctcatgtactcca

SEQ ID NO: 29671 - DNA, 20 bp, Artificial Sequence
  MKO10029671_A_Lsm8
  gRNA
gacggattctgcactcgact

SEQ ID NO: 29672 - DNA, 20 bp, Artificial Sequence
  MKO10029672_A_Lsm8
  gRNA
gcgggtgttcagctcttcac

SEQ ID NO: 29673 - DNA, 20 bp, Artificial Sequence
  MKO10029673_A_Lsm8
  gRNA
aagagctgaacacccgctca

SEQ ID NO: 29674 - DNA, 20 bp, Artificial Sequence
  MKO10029674_A_Lsmd1
  gRNA
gccgaccatgctactacgag

SEQ ID NO: 29675 - DNA, 20 bp, Artificial Sequence
  MKO10029675_A_Lsmd1
  gRNA
actcgccggccacgcgtgca

SEQ ID NO: 29676 - DNA, 20 bp, Artificial Sequence
  MKO10029676_A_Lsmd1
  gRNA
tacagtcgcgatcagtgcac

SEQ ID NO: 29677 - DNA, 20 bp, Artificial Sequence
  MKO10029677_A_Lsmem1
  gRNA
ttcttgacacgtcctccatc

SEQ ID NO: 29678 - DNA, 20 bp, Artificial Sequence
  MKO10029678_A_Lsmem1
  gRNA
agaaggaagactctacgttg

SEQ ID NO: 29679 - DNA, 20 bp, Artificial Sequence
  MKO10029679_A_Lsmem1
  gRNA
caaactcagtctctgcccga

SEQ ID NO: 29680 - DNA, 20 bp, Artificial Sequence
  MKO10029680_A_Lsp1
  gRNA
ttcccccagaattgctgccg

SEQ ID NO: 29681 - DNA, 20 bp, Artificial Sequence
  MKO10029681_A_Lsp1
  gRNA
cggagccacggcagcaattc

SEQ ID NO: 29682 - DNA, 20 bp, Artificial Sequence
  MKO10029682_A_Lsp1
  gRNA
ctgcccgtgagcagcgtcaa

SEQ ID NO: 29683 - DNA, 20 bp, Artificial Sequence
  MKO10029683_A_Lsr
  gRNA
tgacagtgcgtacgctgtcc

SEQ ID NO: 29684 - DNA, 20 bp, Artificial Sequence
  MKO10029684_A_Lsr
  gRNA
ccccggctacaacccctatg

SEQ ID NO: 29685 - DNA, 20 bp, Artificial Sequence
  MKO10029685_A_Lsr
  gRNA
tggagtgtattactgctccg

SEQ ID NO: 29686 - DNA, 20 bp, Artificial Sequence
  MKO10029686_A_Lss
  gRNA
ccgccaccgatctcacccgc

SEQ ID NO: 29687 - DNA, 20 bp, Artificial Sequence
  MKO10029687_A_Lss
  gRNA
ctcaggtgtctgcggcgtcg

SEQ ID NO: 29688 - DNA, 20 bp, Artificial Sequence
  MKO10029688_A_Lss
  gRNA
aaaagcgcaaacagcccatg

SEQ ID NO: 29689 - DNA, 20 bp, Artificial Sequence
  MKO10029689_A_Lst1
  gRNA
ctgactatgcctgcatcgcc

SEQ ID NO: 29690 - DNA, 20 bp, Artificial Sequence
  MKO10029690_A_Lst1
  gRNA
gcttacctctctgactgaac

SEQ ID NO: 29691 - DNA, 20 bp, Artificial Sequence
  MKO10029691_A_Lst1
  gRNA
ccagatgatttcctgctaaa

SEQ ID NO: 29692 - DNA, 20 bp, Artificial Sequence
  MKO10029692_A_Lta4h
  gRNA
gaaattaacgtacaccgcag

SEQ ID NO: 29693 - DNA, 20 bp, Artificial Sequence
  MKO10029693_A_Lta4h
  gRNA
ctcatgagtgccatccgtga

SEQ ID NO: 29694 - DNA, 20 bp, Artificial Sequence
  MKO10029694_A_Lta4h
  gRNA
ctcactcctgaacagacgtc

SEQ ID NO: 29695 - DNA, 20 bp, Artificial Sequence
  MKO10029695_A_Lta
  gRNA
tggtacattgagcgcaccca

SEQ ID NO: 29696 - DNA, 20 bp, Artificial Sequence
  MKO10029696_A_Lta
  gRNA
gatcgtgcctttctccgaca

SEQ ID NO: 29697 - DNA, 20 bp, Artificial Sequence
  MKO10029697_A_Lta
  gRNA
gtgtccgcttctccgctgcc

SEQ ID NO: 29698 - DNA, 20 bp, Artificial Sequence
  MKO10029698_A_Ltb4r1
  gRNA
ccgctatgtgctcatcgcgc

SEQ ID NO: 29699 - DNA, 20 bp, Artificial Sequence
  MKO10029699_A_Ltb4r1
  gRNA
gtactaaggcctttgcccga

SEQ ID NO: 29700 - DNA, 20 bp, Artificial Sequence
  MKO10029700_A_Ltb4r1
  gRNA
ggccggtgcggcgactacgg

SEQ ID NO: 29701 - DNA, 20 bp, Artificial Sequence
  MKO10029701_A_Ltb4r2
  gRNA
cggctgctatggcgtgacgc

SEQ ID NO: 29702 - DNA, 20 bp, Artificial Sequence
  MKO10029702_A_Ltb4r2
  gRNA
cctgtaggagattgaccgcg

SEQ ID NO: 29703 - DNA, 20 bp, Artificial Sequence
  MKO10029703_A_Ltb4r2
  gRNA
gagcagcagcaccgcgccgt

SEQ ID NO: 29704 - DNA, 20 bp, Artificial Sequence
  MKO10029704_A_Ltbp1
  gRNA
ctcacccactcggaagttcg

SEQ ID NO: 29705 - DNA, 20 bp, Artificial Sequence
  MKO10029705_A_Ltbp1
  gRNA
gacagccacgaacttccgag

SEQ ID NO: 29706 - DNA, 20 bp, Artificial Sequence
  MKO10029706_A_Ltbp1
  gRNA
ctggtagagtttgggcatac

SEQ ID NO: 29707 - DNA, 20 bp, Artificial Sequence
  MKO10029707_A_Ltbp2
  gRNA
gttcgtcggtatccggccac

SEQ ID NO: 29708 - DNA, 20 bp, Artificial Sequence
  MKO10029708_A_Ltbp2
  gRNA
cggataccgacgaactgtcc

SEQ ID NO: 29709 - DNA, 20 bp, Artificial Sequence
  MKO10029709_A_Ltbp2
  gRNA
ggtactcacgtttgatacag

SEQ ID NO: 29710 - DNA, 20 bp, Artificial Sequence
  MKO10029710_A_Ltbp3
  gRNA
atcgaggggccgaacgctga

SEQ ID NO: 29711 - DNA, 20 bp, Artificial Sequence
  MKO10029711_A_Ltbp3
  gRNA
acatggccccggtccgggcc

SEQ ID NO: 29712 - DNA, 20 bp, Artificial Sequence
  MKO10029712_A_Ltbp3
  gRNA
ctcgatgcggtgcacctgaa

SEQ ID NO: 29713 - DNA, 20 bp, Artificial Sequence
  MKO10029713_A_Ltbp4
  gRNA
ttactcaggtgttccgcgca

SEQ ID NO: 29714 - DNA, 20 bp, Artificial Sequence
  MKO10029714_A_Ltbp4
  gRNA
cgtgcacgtggagcaccctc

SEQ ID NO: 29715 - DNA, 20 bp, Artificial Sequence
  MKO10029715_A_Ltbp4
  gRNA
aaccaccgcgatgatgaaca

SEQ ID NO: 29716 - DNA, 20 bp, Artificial Sequence
  MKO10029716_A_Ltbr
  gRNA
gagcagcagacgtcgtgcat

SEQ ID NO: 29717 - DNA, 20 bp, Artificial Sequence
  MKO10029717_A_Ltbr
  gRNA
ttgccccttgcaccagcgat

SEQ ID NO: 29718 - DNA, 20 bp, Artificial Sequence
  MKO10029718_A_Ltbr
  gRNA
cccgctgtcaaccccatacc

SEQ ID NO: 29719 - DNA, 20 bp, Artificial Sequence
  MKO10029719_A_Ltb
  gRNA
ccataacgacccgtacccga

SEQ ID NO: 29720 - DNA, 20 bp, Artificial Sequence
  MKO10029720_A_Ltb
  gRNA
ccatcgggtacgggtcgtta

SEQ ID NO: 29721 - DNA, 20 bp, Artificial Sequence
  MKO10029721_A_Ltb
  gRNA
ccctgttgcgcagtcctctc

SEQ ID NO: 29722 - DNA, 20 bp, Artificial Sequence
  MKO10029722_A_Ltc4s
  gRNA
tcggaagacgcgctcgaact

SEQ ID NO: 29723 - DNA, 20 bp, Artificial Sequence
  MKO10029723_A_Ltc4s
  gRNA
aatagcggaggcgcgcgaac

SEQ ID NO: 29724 - DNA, 20 bp, Artificial Sequence
  MKO10029724_A_Ltc4s
  gRNA
acgcgcgctcagcgcaactc

SEQ ID NO: 29725 - DNA, 20 bp, Artificial Sequence
  MKO10029725_A_Ltf
  gRNA
tatggacgaagtgtccctat

SEQ ID NO: 29726 - DNA, 20 bp, Artificial Sequence
  MKO10029726_A_Ltf
  gRNA
cccctacaaactgcgacctg

SEQ ID NO: 29727 - DNA, 20 bp, Artificial Sequence
  MKO10029727_A_Ltf
  gRNA
caggtggcccattccaattc

SEQ ID NO: 29728 - DNA, 20 bp, Artificial Sequence
  MKO10029728_A_Ltk
  gRNA
atcagagggcttgcggtggt

SEQ ID NO: 29729 - DNA, 20 bp, Artificial Sequence
  MKO10029729_A_Ltk
  gRNA
ggccgaatgcacgtgcccag

SEQ ID NO: 29730 - DNA, 20 bp, Artificial Sequence
  MKO10029730_A_Ltk
  gRNA
acagctagctccgtgccctc

SEQ ID NO: 29731 - DNA, 20 bp, Artificial Sequence
  MKO10029731_A_Ltn1
  gRNA
gctgcgtcgcctctcgaaca

SEQ ID NO: 29732 - DNA, 20 bp, Artificial Sequence
  MKO10029732_A_Ltn1
  gRNA
gcagctcggccactgtttga

SEQ ID NO: 29733 - DNA, 20 bp, Artificial Sequence
  MKO10029733_A_Ltn1
  gRNA
tcatgatcgccgtgttcgag

SEQ ID NO: 29734 - DNA, 20 bp, Artificial Sequence
  MKO10029734_A_Ltv1
  gRNA
tttccttgtaggacctcgac

SEQ ID NO: 29735 - DNA, 20 bp, Artificial Sequence
  MKO10029735_A_Ltv1
  gRNA
tcaagagctgcaacgatgtc

SEQ ID NO: 29736 - DNA, 20 bp, Artificial Sequence
  MKO10029736_A_Ltv1
  gRNA
aaagcttactgagtatacgc

SEQ ID NO: 29737 - DNA, 20 bp, Artificial Sequence
  MKO10029737_A_Luc7l2
  gRNA
cagcgacttaccgtcccgag

SEQ ID NO: 29738 - DNA, 20 bp, Artificial Sequence
  MKO10029738_A_Luc7l2
  gRNA
ggtccagcatagcgcgcatc

SEQ ID NO: 29739 - DNA, 20 bp, Artificial Sequence
  MKO10029739_A_Luc7l2
  gRNA
ctttcctagagaatggatct

SEQ ID NO: 29740 - DNA, 20 bp, Artificial Sequence
  MKO10029740_A_Luc7l3
  gRNA
gtatttgtgaacaattccgc

SEQ ID NO: 29741 - DNA, 20 bp, Artificial Sequence
  MKO10029741_A_Luc7l3
  gRNA
tagacgaggtcatgctcgtt

SEQ ID NO: 29742 - DNA, 20 bp, Artificial Sequence
  MKO10029742_A_Luc7l3
  gRNA
acaaatacccgttctgatct

SEQ ID NO: 29743 - DNA, 20 bp, Artificial Sequence
  MKO10029743_A_Luc7l
  gRNA
gaaccgaacttgccaaaaag

SEQ ID NO: 29744 - DNA, 20 bp, Artificial Sequence
  MKO10029744_A_Luc7l
  gRNA
acagggcccgcatctgcgcc

SEQ ID NO: 29745 - DNA, 20 bp, Artificial Sequence
  MKO10029745_A_Luc7l
  gRNA
ctgctcgaagagccaagtcg

SEQ ID NO: 29746 - DNA, 20 bp, Artificial Sequence
  MKO10029746_A_Lum
  gRNA
gtggaccgacggactcggtc

SEQ ID NO: 29747 - DNA, 20 bp, Artificial Sequence
  MKO10029747_A_Lum
  gRNA
aagcgcttgaagtactcatc

SEQ ID NO: 29748 - DNA, 20 bp, Artificial Sequence
  MKO10029748_A_Lum
  gRNA
caagcgcagatgcttgatct

SEQ ID NO: 29749 - DNA, 20 bp, Artificial Sequence
  MKO10029749_A_Lurap1l
  gRNA
agcctagcgcgctcgctgcg

SEQ ID NO: 29750 - DNA, 20 bp, Artificial Sequence
  MKO10029750_A_Lurap1l
  gRNA
acgcatgagccttacatcag

SEQ ID NO: 29751 - DNA, 20 bp, Artificial Sequence
  MKO10029751_A_Lurap1l
  gRNA
gcgctggggtggctacgtcg

SEQ ID NO: 29752 - DNA, 20 bp, Artificial Sequence
  MKO10029752_A_Lurap1
  gRNA
gcttcgaggcgagtgcgagc

SEQ ID NO: 29753 - DNA, 20 bp, Artificial Sequence
  MKO10029753_A_Lurap1
  gRNA
gacgccggacttgcgagacg

SEQ ID NO: 29754 - DNA, 20 bp, Artificial Sequence
  MKO10029754_A_Lurap1
  gRNA
tgcctcaataccctcgttca

SEQ ID NO: 29755 - DNA, 20 bp, Artificial Sequence
  MKO10029755_A_Luzp1
  gRNA
ccgccgcctcgatgagttag

SEQ ID NO: 29756 - DNA, 20 bp, Artificial Sequence
  MKO10029756_A_Luzp1
  gRNA
gcctagagccgtcccgagcg

SEQ ID NO: 29757 - DNA, 20 bp, Artificial Sequence
  MKO10029757_A_Luzp1
  gRNA
cgggttgtgtattcgcctgc

SEQ ID NO: 29758 - DNA, 20 bp, Artificial Sequence
  MKO10029758_A_Luzp2
  gRNA
atgtctttgtcagctgccgc

SEQ ID NO: 29759 - DNA, 20 bp, Artificial Sequence
  MKO10029759_A_Luzp2
  gRNA
gatccgtgacttacagaatg

SEQ ID NO: 29760 - DNA, 20 bp, Artificial Sequence
  MKO10029760_A_Luzp2
  gRNA
aaccgatgtgcagaagcttc

SEQ ID NO: 29761 - DNA, 20 bp, Artificial Sequence
  MKO10029761_A_Luzp4
  gRNA
tgatctatccctgagttgtt

SEQ ID NO: 29762 - DNA, 20 bp, Artificial Sequence
  MKO10029762_A_Luzp4
  gRNA
tgtactttacctctccctcg

SEQ ID NO: 29763 - DNA, 20 bp, Artificial Sequence
  MKO10029763_A_Luzp4
  gRNA
ttctgaagaagaatacaatg

SEQ ID NO: 29764 - DNA, 20 bp, Artificial Sequence
  MKO10029764_A_Lxn
  gRNA
actccacgacattgcatcgc

SEQ ID NO: 29765 - DNA, 20 bp, Artificial Sequence
  MKO10029765_A_Lxn
  gRNA
ttacctgcgatgcaatgtcg

SEQ ID NO: 29766 - DNA, 20 bp, Artificial Sequence
  MKO10029766_A_Lxn
  gRNA
tcgcctgcggttatgtaatg

SEQ ID NO: 29767 - DNA, 20 bp, Artificial Sequence
  MKO10029767_A_Ly6a
  gRNA
tcacgttgaccttagtaccc

SEQ ID NO: 29768 - DNA, 20 bp, Artificial Sequence
  MKO10029768_A_Ly6a
  gRNA
ccctcctaatattgaaagta

SEQ ID NO: 29769 - DNA, 20 bp, Artificial Sequence
  MKO10029769_A_Ly6a
  gRNA
tcaggaggcagcagttattg

SEQ ID NO: 29770 - DNA, 20 bp, Artificial Sequence
  MKO10029770_A_Ly6c1
  gRNA
caatcagggatcctaacatc

SEQ ID NO: 29771 - DNA, 20 bp, Artificial Sequence
  MKO10029771_A_Ly6c1
  gRNA
tccctgattggcacaccagc

SEQ ID NO: 29772 - DNA, 20 bp, Artificial Sequence
  MKO10029772_A_Ly6c1
  gRNA
ctgtgtgctcattcttcttg

SEQ ID NO: 29773 - DNA, 20 bp, Artificial Sequence
  MKO10029773_A_Ly6c2
  gRNA
caatcaaggatcctaacatc

SEQ ID NO: 29774 - DNA, 20 bp, Artificial Sequence
  MKO10029774_A_Ly6c2
  gRNA
tccttgattggcacaccagc

SEQ ID NO: 29775 - DNA, 20 bp, Artificial Sequence
  MKO10029775_A_Ly6c2
  gRNA
cacctcttcctgcacacagt

SEQ ID NO: 29776 - DNA, 20 bp, Artificial Sequence
  MKO10029776_A_Ly6d
  gRNA
agactgacctatgcaacgag

SEQ ID NO: 29777 - DNA, 20 bp, Artificial Sequence
  MKO10029777_A_Ly6d
  gRNA
cacgtgacatcgaagtgccc

SEQ ID NO: 29778 - DNA, 20 bp, Artificial Sequence
  MKO10029778_A_Ly6d
  gRNA
tgaccagcctctcgttgcat

SEQ ID NO: 29779 - DNA, 20 bp, Artificial Sequence
  MKO10029779_A_Ly6e
  gRNA
tatcacgttatctgccgctg

SEQ ID NO: 29780 - DNA, 20 bp, Artificial Sequence
  MKO10029780_A_Ly6e
  gRNA
ttctgcaacttcagcgcagc

SEQ ID NO: 29781 - DNA, 20 bp, Artificial Sequence
  MKO10029781_A_Ly6e
  gRNA
ctactcaccaaagcccgcag

SEQ ID NO: 29782 - DNA, 20 bp, Artificial Sequence
  MKO10029782_A_Ly6f
  gRNA
ggggcaggtaattgatttgc

SEQ ID NO: 29783 - DNA, 20 bp, Artificial Sequence
  MKO10029783_A_Ly6f
  gRNA
caattccaagtgaaactccc

SEQ ID NO: 29784 - DNA, 20 bp, Artificial Sequence
  MKO10029784_A_Ly6f
  gRNA
gcttctgttaaatctgggct

SEQ ID NO: 29785 - DNA, 20 bp, Artificial Sequence
  MKO10029785_A_Ly6g5b
  gRNA
aggagttgcagtaatcgtac

SEQ ID NO: 29786 - DNA, 20 bp, Artificial Sequence
  MKO10029786_A_Ly6g5b
  gRNA
atgagggcccgcgtgcttgt

SEQ ID NO: 29787 - DNA, 20 bp, Artificial Sequence
  MKO10029787_A_Ly6g5b
  gRNA
tcaccatacacggcgatgga

SEQ ID NO: 29788 - DNA, 20 bp, Artificial Sequence
  MKO10029788_A_Ly6g5c
  gRNA
gaattgctaccgatgtctgc

SEQ ID NO: 29789 - DNA, 20 bp, Artificial Sequence
  MKO10029789_A_Ly6g5c
  gRNA
agggtgaaggtcctcgagct

SEQ ID NO: 29790 - DNA, 20 bp, Artificial Sequence
  MKO10029790_A_Ly6g5c
  gRNA
gagccacttaccgagaacca

SEQ ID NO: 29791 - DNA, 20 bp, Artificial Sequence
  MKO10029791_A_Ly6g6c
  gRNA
tcgttgaagacctcccgaca

SEQ ID NO: 29792 - DNA, 20 bp, Artificial Sequence
  MKO10029792_A_Ly6g6c
  gRNA
cttctggtgtgccgcagcgc

SEQ ID NO: 29793 - DNA, 20 bp, Artificial Sequence
  MKO10029793_A_Ly6g6c
  gRNA
caaggtacacgtttgttgtc

SEQ ID NO: 29794 - DNA, 20 bp, Artificial Sequence
  MKO10029794_A_Ly6g6d
  gRNA
cgcagtcatagcaccgcgtg

SEQ ID NO: 29795 - DNA, 20 bp, Artificial Sequence
  MKO10029795_A_Ly6g6d
  gRNA
cacgcatcattgcaatcaag

SEQ ID NO: 29796 - DNA, 20 bp, Artificial Sequence
  MKO10029796_A_Ly6g6d
  gRNA
tcctgccaggacaccgcacg

SEQ ID NO: 29797 - DNA, 20 bp, Artificial Sequence
  MKO10029797_A_Ly6g6e
  gRNA
gccatgcgacctactggtca

SEQ ID NO: 29798 - DNA, 20 bp, Artificial Sequence
  MKO10029798_A_Ly6g6e
  gRNA
atgtactccccagccgatca

SEQ ID NO: 29799 - DNA, 20 bp, Artificial Sequence
  MKO10029799_A_Ly6g6e
  gRNA
gtaacagcggagccgtcctc

SEQ ID NO: 29800 - DNA, 20 bp, Artificial Sequence
  MKO10029800_A_Ly6g6f
  gRNA
aatcgggttcgggtttccga

SEQ ID NO: 29801 - DNA, 20 bp, Artificial Sequence
  MKO10029801_A_Ly6g6f
  gRNA
acatccacttggcccgcctt

SEQ ID NO: 29802 - DNA, 20 bp, Artificial Sequence
  MKO10029802_A_Ly6g6f
  gRNA
cttacctaaggcgggccaag

SEQ ID NO: 29803 - DNA, 20 bp, Artificial Sequence
  MKO10029803_A_Ly6h
  gRNA
gtgccgcttaacgaagtcgc

SEQ ID NO: 29804 - DNA, 20 bp, Artificial Sequence
  MKO10029804_A_Ly6h
  gRNA
cctcctgcgacttcgttaag

SEQ ID NO: 29805 - DNA, 20 bp, Artificial Sequence
  MKO10029805_A_Ly6h
  gRNA
ataccgtttgtgccagcgtg

SEQ ID NO: 29806 - DNA, 20 bp, Artificial Sequence
  MKO10029806_A_Ly6i
  gRNA
gcaacaggaaatattcatct

SEQ ID NO: 29807 - DNA, 20 bp, Artificial Sequence
  MKO10029807_A_Ly6i
  gRNA
aattgaaaagaagtttatcc

SEQ ID NO: 29808 - DNA, 20 bp, Artificial Sequence
  MKO10029808_A_Ly6i
  gRNA
tttacctgcccctaccctga

SEQ ID NO: 29809 - DNA, 20 bp, Artificial Sequence
  MKO10029809_A_Ly6k
  gRNA
tgtcgaaacagtgcacccga

SEQ ID NO: 29810 - DNA, 20 bp, Artificial Sequence
  MKO10029810_A_Ly6k
  gRNA
tctggagatggcgttcctag

SEQ ID NO: 29811 - DNA, 20 bp, Artificial Sequence
  MKO10029811_A_Ly6k
  gRNA
gcactgggacggattcgagc

SEQ ID NO: 29812 - DNA, 20 bp, Artificial Sequence
  MKO10029812_A_Ly75
  gRNA
gttaaacctacccgtaatgt

SEQ ID NO: 29813 - DNA, 20 bp, Artificial Sequence
  MKO10029813_A_Ly75
  gRNA
tgttagttccgctacagtcc

SEQ ID NO: 29814 - DNA, 20 bp, Artificial Sequence
  MKO10029814_A_Ly75
  gRNA
tgccgaattagcctacatta

SEQ ID NO: 29815 - DNA, 20 bp, Artificial Sequence
  MKO10029815_A_Ly86
  gRNA
ctcttcggcagatcccttac

SEQ ID NO: 29816 - DNA, 20 bp, Artificial Sequence
  MKO10029816_A_Ly86
  gRNA
tcagaacagatatactatgc

SEQ ID NO: 29817 - DNA, 20 bp, Artificial Sequence
  MKO10029817_A_Ly86
  gRNA
caatgaaaaccgtgctactg

SEQ ID NO: 29818 - DNA, 20 bp, Artificial Sequence
  MKO10029818_A_Ly96
  gRNA
catagagttgccgaagcgta

SEQ ID NO: 29819 - DNA, 20 bp, Artificial Sequence
  MKO10029819_A_Ly96
  gRNA
atcaataccattctctttcg

SEQ ID NO: 29820 - DNA, 20 bp, Artificial Sequence
  MKO10029820_A_Ly96
  gRNA
cacagaacttccttacgctt

SEQ ID NO: 29821 - DNA, 20 bp, Artificial Sequence
  MKO10029821_A_Ly9
  gRNA
gattctcgccgtaagcccaa

SEQ ID NO: 29822 - DNA, 20 bp, Artificial Sequence
  MKO10029822_A_Ly9
  gRNA
agtcgcacctcaacgtctcc

SEQ ID NO: 29823 - DNA, 20 bp, Artificial Sequence
  MKO10029823_A_Ly9
  gRNA
cgttgaggtgcgacttccct

SEQ ID NO: 29824 - DNA, 20 bp, Artificial Sequence
  MKO10029824_A_Lyar
  gRNA
ctgcaaaagttctcgcacct

SEQ ID NO: 29825 - DNA, 20 bp, Artificial Sequence
  MKO10029825_A_Lyar
  gRNA
cagcgactccgttctagagc

SEQ ID NO: 29826 - DNA, 20 bp, Artificial Sequence
  MKO10029826_A_Lyar
  gRNA
cttcttctccggtgggccgc

SEQ ID NO: 29827 - DNA, 20 bp, Artificial Sequence
  MKO10029827_A_Lyg1
  gRNA
aggcaactatgtggtcgacc

SEQ ID NO: 29828 - DNA, 20 bp, Artificial Sequence
  MKO10029828_A_Lyg1
  gRNA
tgaagtatttggctcgcgca

SEQ ID NO: 29829 - DNA, 20 bp, Artificial Sequence
  MKO10029829_A_Lyg1
  gRNA
cgctacggcctgacctattg

SEQ ID NO: 29830 - DNA, 20 bp, Artificial Sequence
  MKO10029830_A_Lyg2
  gRNA
tttgcaggacagccccgccg

SEQ ID NO: 29831 - DNA, 20 bp, Artificial Sequence
  MKO10029831_A_Lyg2
  gRNA
ggcggggctgtcctgcaaaa

SEQ ID NO: 29832 - DNA, 20 bp, Artificial Sequence
  MKO10029832_A_Lyg2
  gRNA
gtgcaccctcgtctgtacca

SEQ ID NO: 29833 - DNA, 20 bp, Artificial Sequence
  MKO10029833_A_Lyl1
  gRNA
gtggagggcagcgcacgctt

SEQ ID NO: 29834 - DNA, 20 bp, Artificial Sequence
  MKO10029834_A_Lyl1
  gRNA
accgaaacacgtgcactccc

SEQ ID NO: 29835 - DNA, 20 bp, Artificial Sequence
  MKO10029835_A_Lyl1
  gRNA
ggacgtctgctccaacttga

SEQ ID NO: 29836 - DNA, 20 bp, Artificial Sequence
  MKO10029836_A_Lynx1
  gRNA
gccagactcacaagttcgtg

SEQ ID NO: 29837 - DNA, 20 bp, Artificial Sequence
  MKO10029837_A_Lynx1
  gRNA
tgctttgaaaccgtgtacga

SEQ ID NO: 29838 - DNA, 20 bp, Artificial Sequence
  MKO10029838_A_Lynx1
  gRNA
ctgcagacttcaccccatac

SEQ ID NO: 29839 - DNA, 20 bp, Artificial Sequence
  MKO10029839_A_Lyn
  gRNA
acaatgtcaccttgttcctc

SEQ ID NO: 29840 - DNA, 20 bp, Artificial Sequence
  MKO10029840_A_Lyn
  gRNA
ttcttagatccagaggaaca

SEQ ID NO: 29841 - DNA, 20 bp, Artificial Sequence
  MKO10029841_A_Lyn
  gRNA
tttgtttgaaatctctgtcc

SEQ ID NO: 29842 - DNA, 20 bp, Artificial Sequence
  MKO10029842_A_Lypd1
  gRNA
atgagcaatcgttgttcagc

SEQ ID NO: 29843 - DNA, 20 bp, Artificial Sequence
  MKO10029843_A_Lypd1
  gRNA
ctgacgatgcacacgacttc

SEQ ID NO: 29844 - DNA, 20 bp, Artificial Sequence
  MKO10029844_A_Lypd1
  gRNA
tgcaatttacgatgaactca

SEQ ID NO: 29845 - DNA, 20 bp, Artificial Sequence
  MKO10029845_A_Lypd2
  gRNA
gtgccccatccacgttgcat

SEQ ID NO: 29846 - DNA, 20 bp, Artificial Sequence
  MKO10029846_A_Lypd2
  gRNA
gtagagcgtagtcttgcaca

SEQ ID NO: 29847 - DNA, 20 bp, Artificial Sequence
  MKO10029847_A_Lypd2
  gRNA
caattctgacctatgcaacg

SEQ ID NO: 29848 - DNA, 20 bp, Artificial Sequence
  MKO10029848_A_Lypd3
  gRNA
gcgttgtagcagttcacgac

SEQ ID NO: 29849 - DNA, 20 bp, Artificial Sequence
  MKO10029849_A_Lypd3
  gRNA
tgcgaaggtcggcgttacag

SEQ ID NO: 29850 - DNA, 20 bp, Artificial Sequence
  MKO10029850_A_Lypd3
  gRNA
gcccgtgaaggtccagtccg

SEQ ID NO: 29851 - DNA, 20 bp, Artificial Sequence
  MKO10029851_A_Lypd4
  gRNA
gaccgtagtgttcatcgaga

SEQ ID NO: 29852 - DNA, 20 bp, Artificial Sequence
  MKO10029852_A_Lypd4
  gRNA
tcctacctcgtgtctccgcc

SEQ ID NO: 29853 - DNA, 20 bp, Artificial Sequence
  MKO10029853_A_Lypd4
  gRNA
acccgtctcgatgaacacta

SEQ ID NO: 29854 - DNA, 20 bp, Artificial Sequence
  MKO10029854_A_Lypd5
  gRNA
gttcccctgagaagtcccga

SEQ ID NO: 29855 - DNA, 20 bp, Artificial Sequence
  MKO10029855_A_Lypd5
  gRNA
ccgcccaggttaccgcagcc

SEQ ID NO: 29856 - DNA, 20 bp, Artificial Sequence
  MKO10029856_A_Lypd5
  gRNA
tgacaggtccggatgtacac

SEQ ID NO: 29857 - DNA, 20 bp, Artificial Sequence
  MKO10029857_A_Lypd6b
  gRNA
ctgccgacacagccgagatt

SEQ ID NO: 29858 - DNA, 20 bp, Artificial Sequence
  MKO10029858_A_Lypd6b
  gRNA
tcgctgtaatgcacgctcag

SEQ ID NO: 29859 - DNA, 20 bp, Artificial Sequence
  MKO10029859_A_Lypd6b
  gRNA
cccctacttacgatcaagag

SEQ ID NO: 29860 - DNA, 20 bp, Artificial Sequence
  MKO10029860_A_Lypd6
  gRNA
acaattatgaatgcaaccga

SEQ ID NO: 29861 - DNA, 20 bp, Artificial Sequence
  MKO10029861_A_Lypd6
  gRNA
tgccgagactcagagcacga

SEQ ID NO: 29862 - DNA, 20 bp, Artificial Sequence
  MKO10029862_A_Lypd6
  gRNA
tttgtagccactccgtatcc

SEQ ID NO: 29863 - DNA, 20 bp, Artificial Sequence
  MKO10029863_A_Lypd8
  gRNA
tgggatagtggtggtcgagt

SEQ ID NO: 29864 - DNA, 20 bp, Artificial Sequence
  MKO10029864_A_Lypd8
  gRNA
gttctccttcgtaacacttt

SEQ ID NO: 29865 - DNA, 20 bp, Artificial Sequence
  MKO10029865_A_Lypd8
  gRNA
atgcggagcagaacttgttc

SEQ ID NO: 29866 - DNA, 20 bp, Artificial Sequence
  MKO10029866_A_Lypla1
  gRNA
tattctaggtttgatatcgt

SEQ ID NO: 29867 - DNA, 20 bp, Artificial Sequence
  MKO10029867_A_Lypla1
  gRNA
ctgtatctcccaatccgtga

SEQ ID NO: 29868 - DNA, 20 bp, Artificial Sequence
  MKO10029868_A_Lypla1
  gRNA
ggatgggcagaagcctttgc

SEQ ID NO: 29869 - DNA, 20 bp, Artificial Sequence
  MKO10029869_A_Lypla2
  gRNA
atcttcatgttgagtgtcac

SEQ ID NO: 29870 - DNA, 20 bp, Artificial Sequence
  MKO10029870_A_Lypla2
  gRNA
ggacagatgtacttgacatg

SEQ ID NO: 29871 - DNA, 20 bp, Artificial Sequence
  MKO10029871_A_Lypla2
  gRNA
ctgacgccctctccaccatc

SEQ ID NO: 29872 - DNA, 20 bp, Artificial Sequence
  MKO10029872_A_Lyplal1
  gRNA
caggccgtatactcctctga

SEQ ID NO: 29873 - DNA, 20 bp, Artificial Sequence
  MKO10029873_A_Lyplal1
  gRNA
gcgtacctggagggggccgt

SEQ ID NO: 29874 - DNA, 20 bp, Artificial Sequence
  MKO10029874_A_Lyplal1
  gRNA
tatctgcagagccgtgacac

SEQ ID NO: 29875 - DNA, 20 bp, Artificial Sequence
  MKO10029875_A_Lyrm1
  gRNA
aagtccccgacctcgtcgtg

SEQ ID NO: 29876 - DNA, 20 bp, Artificial Sequence
  MKO10029876_A_Lyrm1
  gRNA
gtctcaccgcacgacgaggt

SEQ ID NO: 29877 - DNA, 20 bp, Artificial Sequence
  MKO10029877_A_Lyrm1
  gRNA
atactcacagggcgtggata

SEQ ID NO: 29878 - DNA, 20 bp, Artificial Sequence
  MKO10029878_A_Lyrm2
  gRNA
atccgaatgatgataaccca

SEQ ID NO: 29879 - DNA, 20 bp, Artificial Sequence
  MKO10029879_A_Lyrm2
  gRNA
gcagtacctgcttcagcgtc

SEQ ID NO: 29880 - DNA, 20 bp, Artificial Sequence
  MKO10029880_A_Lyrm2
  gRNA
cccttgagcagttcatgaga

SEQ ID NO: 29881 - DNA, 20 bp, Artificial Sequence
  MKO10029881_A_Lyrm4
  gRNA
ccttgaaataatccgcagac

SEQ ID NO: 29882 - DNA, 20 bp, Artificial Sequence
  MKO10029882_A_Lyrm4
  gRNA
cccgggtcacctgtaattgt

SEQ ID NO: 29883 - DNA, 20 bp, Artificial Sequence
  MKO10029883_A_Lyrm4
  gRNA
atttcagcgcctacaattac

SEQ ID NO: 29884 - DNA, 20 bp, Artificial Sequence
  MKO10029884_A_Lyrm5
  gRNA
tacttctcctcgtaacgaat

SEQ ID NO: 29885 - DNA, 20 bp, Artificial Sequence
  MKO10029885_A_Lyrm5
  gRNA
atcaaagaacttatcgcacg

SEQ ID NO: 29886 - DNA, 20 bp, Artificial Sequence
  MKO10029886_A_Lyrm5
  gRNA
aaaatggccaattcgttacg

SEQ ID NO: 29887 - DNA, 20 bp, Artificial Sequence
  MKO10029887_A_Lyrm7
  gRNA
tttacttacgcagtgtgtca

SEQ ID NO: 29888 - DNA, 20 bp, Artificial Sequence
  MKO10029888_A_Lyrm7
  gRNA
cctggaagctttactgcttc

SEQ ID NO: 29889 - DNA, 20 bp, Artificial Sequence
  MKO10029889_A_Lyrm7
  gRNA
ctcagaacagctgttattca

SEQ ID NO: 29890 - DNA, 20 bp, Artificial Sequence
  MKO10029890_A_Lyrm9
  gRNA
aagtaacggtacagctgcaa

SEQ ID NO: 29891 - DNA, 20 bp, Artificial Sequence
  MKO10029891_A_Lyrm9
  gRNA
gttacttgttacgttgttgc

SEQ ID NO: 29892 - DNA, 20 bp, Artificial Sequence
  MKO10029892_A_Lyrm9
  gRNA
gagccattgaagatgccgac

SEQ ID NO: 29893 - DNA, 20 bp, Artificial Sequence
  MKO10029893_A_Lysmd1
  gRNA
catcggcagggtacctgagg

SEQ ID NO: 29894 - DNA, 20 bp, Artificial Sequence
  MKO10029894_A_Lysmd1
  gRNA
atttgagtgctaatccagcc

SEQ ID NO: 29895 - DNA, 20 bp, Artificial Sequence
  MKO10029895_A_Lysmd1
  gRNA
ccctctagacagcctcccct

SEQ ID NO: 29896 - DNA, 20 bp, Artificial Sequence
  MKO10029896_A_Lysmd2
  gRNA
tggccgtgctgccgtacgag

SEQ ID NO: 29897 - DNA, 20 bp, Artificial Sequence
  MKO10029897_A_Lysmd2
  gRNA
cgcaggcgagagatccgcca

SEQ ID NO: 29898 - DNA, 20 bp, Artificial Sequence
  MKO10029898_A_Lysmd2
  gRNA
ccccaagcctgcgcaacccg

SEQ ID NO: 29899 - DNA, 20 bp, Artificial Sequence
  MKO10029899_A_Lysmd3
  gRNA
atccgtattacggagcagac

SEQ ID NO: 29900 - DNA, 20 bp, Artificial Sequence
  MKO10029900_A_Lysmd3
  gRNA
ccccagtctgctccgtaata

SEQ ID NO: 29901 - DNA, 20 bp, Artificial Sequence
  MKO10029901_A_Lysmd3
  gRNA
ctaccgtacagcagtactga

SEQ ID NO: 29902 - DNA, 20 bp, Artificial Sequence
  MKO10029902_A_Lysmd4
  gRNA
atcaggtggtgttacgaccc

SEQ ID NO: 29903 - DNA, 20 bp, Artificial Sequence
  MKO10029903_A_Lysmd4
  gRNA
caccaagaactaatgcccct

SEQ ID NO: 29904 - DNA, 20 bp, Artificial Sequence
  MKO10029904_A_Lysmd4
  gRNA
acccagaagccagtagccga

SEQ ID NO: 29905 - DNA, 20 bp, Artificial Sequence
  MKO10029905_A_Lyst
  gRNA
aagggctcggtgacgatact

SEQ ID NO: 29906 - DNA, 20 bp, Artificial Sequence
  MKO10029906_A_Lyst
  gRNA
gctgcagttctagacgtcga

SEQ ID NO: 29907 - DNA, 20 bp, Artificial Sequence
  MKO10029907_A_Lyst
  gRNA
caggatcccctgaaatcggt

SEQ ID NO: 29908 - DNA, 20 bp, Artificial Sequence
  MKO10029908_A_Lyve1
  gRNA
taaaatgtggtaacgatttc

SEQ ID NO: 29909 - DNA, 20 bp, Artificial Sequence
  MKO10029909_A_Lyve1
  gRNA
tgtcagcagcagcgcctact

SEQ ID NO: 29910 - DNA, 20 bp, Artificial Sequence
  MKO10029910_A_Lyve1
  gRNA
atttctgcgctgactctacc

SEQ ID NO: 29911 - DNA, 20 bp, Artificial Sequence
  MKO10029911_A_Lyz1
  gRNA
ggtctacaatcgttgtgagt

SEQ ID NO: 29912 - DNA, 20 bp, Artificial Sequence
  MKO10029912_A_Lyz1
  gRNA
ctcacaacgattgtagacct

SEQ ID NO: 29913 - DNA, 20 bp, Artificial Sequence
  MKO10029913_A_Lyz1
  gRNA
ccaagatctaagaatgcctg

SEQ ID NO: 29914 - DNA, 20 bp, Artificial Sequence
  MKO10029914_A_Lyz2
  gRNA
agtttgccagaactctgaaa

SEQ ID NO: 29915 - DNA, 20 bp, Artificial Sequence
  MKO10029915_A_Lyz2
  gRNA
aatggaatggctggctacta

SEQ ID NO: 29916 - DNA, 20 bp, Artificial Sequence
  MKO10029916_A_Lyz2
  gRNA
ccaagagctgtgaatgcctg

SEQ ID NO: 29917 - DNA, 20 bp, Artificial Sequence
  MKO10029917_A_Lyzl1
  gRNA
aatctacactcgatgtaaac

SEQ ID NO: 29918 - DNA, 20 bp, Artificial Sequence
  MKO10029918_A_Lyzl1
  gRNA
caaatcccccgtaattgtcc

SEQ ID NO: 29919 - DNA, 20 bp, Artificial Sequence
  MKO10029919_A_Lyzl1
  gRNA
cactacagccgagaatgtcc

SEQ ID NO: 29920 - DNA, 20 bp, Artificial Sequence
  MKO10029920_A_Lyzl4
  gRNA
agctacttgctgactccgat

SEQ ID NO: 29921 - DNA, 20 bp, Artificial Sequence
  MKO10029921_A_Lyzl4
  gRNA
ggcgacgatgcagctgtacc

SEQ ID NO: 29922 - DNA, 20 bp, Artificial Sequence
  MKO10029922_A_Lyzl4
  gRNA
caagatggctccaccggttt

SEQ ID NO: 29923 - DNA, 20 bp, Artificial Sequence
  MKO10029923_A_Lyzl6
  gRNA
tccagatcaacagtcgttac

SEQ ID NO: 29924 - DNA, 20 bp, Artificial Sequence
  MKO10029924_A_Lyzl6
  gRNA
accagtaacgactgttgatc

SEQ ID NO: 29925 - DNA, 20 bp, Artificial Sequence
  MKO10029925_A_Lyzl6
  gRNA
catcatccatcgctgtagtt

SEQ ID NO: 29926 - DNA, 20 bp, Artificial Sequence
  MKO10029926_A_Lzic
  gRNA
acttcggacaaggctagccg

SEQ ID NO: 29927 - DNA, 20 bp, Artificial Sequence
  MKO10029927_A_Lzic
  gRNA
cggctagccttgtccgaagt

SEQ ID NO: 29928 - DNA, 20 bp, Artificial Sequence
  MKO10029928_A_Lzic
  gRNA
tcagtatctccaccttccgc

SEQ ID NO: 29929 - DNA, 20 bp, Artificial Sequence
  MKO10029929_A_Lztfl1
  gRNA
cttgatacctgctgtccttg

SEQ ID NO: 29930 - DNA, 20 bp, Artificial Sequence
  MKO10029930_A_Lztfl1
  gRNA
aaacttgttccaattaatga

SEQ ID NO: 29931 - DNA, 20 bp, Artificial Sequence
  MKO10029931_A_Lztfl1
  gRNA
acatctctgaacttgaaaac

SEQ ID NO: 29932 - DNA, 20 bp, Artificial Sequence
  MKO10029932_A_Lztr1
  gRNA
tcttctgcgtttcgatgtga

SEQ ID NO: 29933 - DNA, 20 bp, Artificial Sequence
  MKO10029933_A_Lztr1
  gRNA
caatcttccactccgtccac

SEQ ID NO: 29934 - DNA, 20 bp, Artificial Sequence
  MKO10029934_A_Lztr1
  gRNA
gggagcagcatgttcgtctt

SEQ ID NO: 29935 - DNA, 20 bp, Artificial Sequence
  MKO10029935_A_Lzts1
  gRNA
agttcgtctctagtccgccg

SEQ ID NO: 29936 - DNA, 20 bp, Artificial Sequence
  MKO10029936_A_Lzts1
  gRNA
acggcggactagagacgaac

SEQ ID NO: 29937 - DNA, 20 bp, Artificial Sequence
  MKO10029937_A_Lzts1
  gRNA
gggagctgacatcccctacg

SEQ ID NO: 29938 - DNA, 20 bp, Artificial Sequence
  MKO10029938_A_Lzts2
  gRNA
ggcccaaatccgcaagctcg

SEQ ID NO: 29939 - DNA, 20 bp, Artificial Sequence
  MKO10029939_A_Lzts2
  gRNA
atcccggagtcccgatgctt

SEQ ID NO: 29940 - DNA, 20 bp, Artificial Sequence
  MKO10029940_A_Lzts2
  gRNA
tgaaggctgttggccggatc

SEQ ID NO: 29941 - DNA, 20 bp, Artificial Sequence
  MKO10029941_A_Lzts3
  gRNA
agcggcgacttcgggagcgt

SEQ ID NO: 29942 - DNA, 20 bp, Artificial Sequence
  MKO10029942_A_Lzts3
  gRNA
ctccctggatcagcgcgcac

SEQ ID NO: 29943 - DNA, 20 bp, Artificial Sequence
  MKO10029943_A_Lzts3
  gRNA
ggccggcgggtcctcaagct

SEQ ID NO: 29944 - DNA, 20 bp, Artificial Sequence
  MKO10029944_A_M1ap
  gRNA
gacacgccatcagctgtacc

SEQ ID NO: 29945 - DNA, 20 bp, Artificial Sequence
  MKO10029945_A_M1ap
  gRNA
tcgagaatagatgaccccaa

SEQ ID NO: 29946 - DNA, 20 bp, Artificial Sequence
  MKO10029946_A_M1ap
  gRNA
catcgttgtctagcgtctca

SEQ ID NO: 29947 - DNA, 20 bp, Artificial Sequence
  MKO10029947_A_M6pr
  gRNA
cgctagtgtgtgccgattgc

SEQ ID NO: 29948 - DNA, 20 bp, Artificial Sequence
  MKO10029948_A_M6pr
  gRNA
gggtttcttataccagcgac

SEQ ID NO: 29949 - DNA, 20 bp, Artificial Sequence
  MKO10029949_A_M6pr
  gRNA
caaagagcagcgccgtgcag

SEQ ID NO: 29950 - DNA, 20 bp, Artificial Sequence
  MKO10029950_A_Maats1
  gRNA
cgttgcacgtcactcgagag

SEQ ID NO: 29951 - DNA, 20 bp, Artificial Sequence
  MKO10029951_A_Maats1
  gRNA
ttaccagtctgcttcgaatc

SEQ ID NO: 29952 - DNA, 20 bp, Artificial Sequence
  MKO10029952_A_Maats1
  gRNA
cactctcgagtgacgtgcaa

SEQ ID NO: 29953 - DNA, 20 bp, Artificial Sequence
  MKO10029953_A_Mab21l1
  gRNA
ttccgttcagccgatcgccc

SEQ ID NO: 29954 - DNA, 20 bp, Artificial Sequence
  MKO10029954_A_Mab21l1
  gRNA
ccccaacatgatcgcggccc

SEQ ID NO: 29955 - DNA, 20 bp, Artificial Sequence
  MKO10029955_A_Mab21l1
  gRNA
cggcacgcaaaatccgttcc

SEQ ID NO: 29956 - DNA, 20 bp, Artificial Sequence
  MKO10029956_A_Mab21l2
  gRNA
ctagtgtctggaaacgcgag

SEQ ID NO: 29957 - DNA, 20 bp, Artificial Sequence
  MKO10029957_A_Mab21l2
  gRNA
ccccaacatgatcgccgctc

SEQ ID NO: 29958 - DNA, 20 bp, Artificial Sequence
  MKO10029958_A_Mab21l2
  gRNA
tgagattgacgcccgctacg

SEQ ID NO: 29959 - DNA, 20 bp, Artificial Sequence
  MKO10029959_A_Mab21l3
  gRNA
cggcttcgaaacgactgtcc

SEQ ID NO: 29960 - DNA, 20 bp, Artificial Sequence
  MKO10029960_A_Mab21l3
  gRNA
tgtgctagaaaaacgcacta

SEQ ID NO: 29961 - DNA, 20 bp, Artificial Sequence
  MKO10029961_A_Mab21l3
  gRNA
ggccaccaagttaaacccaa

SEQ ID NO: 29962 - DNA, 20 bp, Artificial Sequence
  MKO10029962_A_Macc1
  gRNA
gcacgagtccgatcttacct

SEQ ID NO: 29963 - DNA, 20 bp, Artificial Sequence
  MKO10029963_A_Macc1
  gRNA
ctttggcatcactatcacga

SEQ ID NO: 29964 - DNA, 20 bp, Artificial Sequence
  MKO10029964_A_Macc1
  gRNA
tctctccaccgtttagtgac

SEQ ID NO: 29965 - DNA, 20 bp, Artificial Sequence
  MKO10029965_A_Macf1
  gRNA
tcttaccggagtgagcggtc

SEQ ID NO: 29966 - DNA, 20 bp, Artificial Sequence
  MKO10029966_A_Macf1
  gRNA
cttaccagcgactcggacca

SEQ ID NO: 29967 - DNA, 20 bp, Artificial Sequence
  MKO10029967_A_Macf1
  gRNA
tcaggttgtgtccatcccga

SEQ ID NO: 29968 - DNA, 20 bp, Artificial Sequence
  MKO10029968_A_Macrod1
  gRNA
ccgatagccgcaagtgatct

SEQ ID NO: 29969 - DNA, 20 bp, Artificial Sequence
  MKO10029969_A_Macrod1
  gRNA
tgcggcattcgtccgtgagc

SEQ ID NO: 29970 - DNA, 20 bp, Artificial Sequence
  MKO10029970_A_Macrod1
  gRNA
ggaggaccccaagtataaga

SEQ ID NO: 29971 - DNA, 20 bp, Artificial Sequence
  MKO10029971_A_Macrod2
  gRNA
tttctttccataaccgtctc

SEQ ID NO: 29972 - DNA, 20 bp, Artificial Sequence
  MKO10029972_A_Macrod2
  gRNA
cattcaggatgcatccctaa

SEQ ID NO: 29973 - DNA, 20 bp, Artificial Sequence
  MKO10029973_A_Macrod2
  gRNA
aggtgacatcactctgctag

SEQ ID NO: 29974 - DNA, 20 bp, Artificial Sequence
  MKO10029974_A_Mad1l1
  gRNA
tggacccacctcgtagttcc

SEQ ID NO: 29975 - DNA, 20 bp, Artificial Sequence
  MKO10029975_A_Mad1l1
  gRNA
gcgcgaggtagatcgcaacc

SEQ ID NO: 29976 - DNA, 20 bp, Artificial Sequence
  MKO10029976_A_Mad1l1
  gRNA
ggcacgcattcgacagctcc

SEQ ID NO: 29977 - DNA, 20 bp, Artificial Sequence
  MKO10029977_A_Mad2l1bp
  gRNA
gaaagcttggctcgccacgg

SEQ ID NO: 29978 - DNA, 20 bp, Artificial Sequence
  MKO10029978_A_Mad2l1bp
  gRNA
gcagtcgcgatggctgcgtc

SEQ ID NO: 29979 - DNA, 20 bp, Artificial Sequence
  MKO10029979_A_Mad2l1bp
  gRNA
cgggaaacaccaccggcacc

SEQ ID NO: 29980 - DNA, 20 bp, Artificial Sequence
  MKO10029980_A_Mad2l1
  gRNA
ccgtctcgtcagtcattgac

SEQ ID NO: 29981 - DNA, 20 bp, Artificial Sequence
  MKO10029981_A_Mad2l1
  gRNA
tgagcgaatttcatcctgta

SEQ ID NO: 29982 - DNA, 20 bp, Artificial Sequence
  MKO10029982_A_Mad2l1
  gRNA
ccaccatactattcacttta

SEQ ID NO: 29983 - DNA, 20 bp, Artificial Sequence
  MKO10029983_A_Mad2l2
  gRNA
cctgattctctatgtgcgcg

SEQ ID NO: 29984 - DNA, 20 bp, Artificial Sequence
  MKO10029984_A_Mad2l2
  gRNA
cctcgcgcacatagagaatc

SEQ ID NO: 29985 - DNA, 20 bp, Artificial Sequence
  MKO10029985_A_Mad2l2
  gRNA
ctggttcagctccgggtgac

SEQ ID NO: 29986 - DNA, 20 bp, Artificial Sequence
  MKO10029986_A_Madcam1
  gRNA
ttgccgcccgaaaatccacc

SEQ ID NO: 29987 - DNA, 20 bp, Artificial Sequence
  MKO10029987_A_Madcam1
  gRNA
tgttccgaatgacacaacgc

SEQ ID NO: 29988 - DNA, 20 bp, Artificial Sequence
  MKO10029988_A_Madcam1
  gRNA
cagcctccaccgtcgtccta

SEQ ID NO: 29989 - DNA, 20 bp, Artificial Sequence
  MKO10029989_A_Madd
  gRNA
ccgtacctttgtacacctcg

SEQ ID NO: 29990 - DNA, 20 bp, Artificial Sequence
  MKO10029990_A_Madd
  gRNA
cttgactatctcgtgatcgt

SEQ ID NO: 29991 - DNA, 20 bp, Artificial Sequence
  MKO10029991_A_Madd
  gRNA
tttgccctacgtttgccccg

SEQ ID NO: 29992 - DNA, 20 bp, Artificial Sequence
  MKO10029992_A_Maea
  gRNA
gaagcgcatggaccggatga

SEQ ID NO: 29993 - DNA, 20 bp, Artificial Sequence
  MKO10029993_A_Maea
  gRNA
atgataacaagtcccgactc

SEQ ID NO: 29994 - DNA, 20 bp, Artificial Sequence
  MKO10029994_A_Maea
  gRNA
gcgcttccgcttccacatgc

SEQ ID NO: 29995 - DNA, 20 bp, Artificial Sequence
  MKO10029995_A_Mael
  gRNA
gttataggtgaaattccacg

SEQ ID NO: 29996 - DNA, 20 bp, Artificial Sequence
  MKO10029996_A_Mael
  gRNA
aggaagcgctgttcacaatg

SEQ ID NO: 29997 - DNA, 20 bp, Artificial Sequence
  MKO10029997_A_Mael
  gRNA
acttacttgcagcctggcaa

SEQ ID NO: 29998 - DNA, 20 bp, Artificial Sequence
  MKO10029998_A_Maf1
  gRNA
gatctagactccgacccctt

SEQ ID NO: 29999 - DNA, 20 bp, Artificial Sequence
  MKO10029999_A_Maf1
  gRNA
cggctgcacttgtcgctcag

SEQ ID NO: 30000 - DNA, 20 bp, Artificial Sequence
  MKO10030000_A_Maf1
  gRNA
tctttagctgccgctccatc

SEQ ID NO: 30001 - DNA, 20 bp, Artificial Sequence
  MKO10030001_A_Mafa
  gRNA
tcgggagccctcgccagcgc

SEQ ID NO: 30002 - DNA, 20 bp, Artificial Sequence
  MKO10030002_A_Mafa
  gRNA
ggtcagagcttcgcgggcgg

SEQ ID NO: 30003 - DNA, 20 bp, Artificial Sequence
  MKO10030003_A_Mafa
  gRNA
tgcgcccatcgccagctccg

SEQ ID NO: 30004 - DNA, 20 bp, Artificial Sequence
  MKO10030004_A_Mafb
  gRNA
cgcgtttatacctgcacgac

SEQ ID NO: 30005 - DNA, 20 bp, Artificial Sequence
  MKO10030005_A_Mafb
  gRNA
ggggctacgcccagtcgtgc

SEQ ID NO: 30006 - DNA, 20 bp, Artificial Sequence
  MKO10030006_A_Mafb
  gRNA
tgcgggcggcaacggtagtg

SEQ ID NO: 30007 - DNA, 20 bp, Artificial Sequence
  MKO10030007_A_Maff
  gRNA
gcccggcgccgacttgacga

SEQ ID NO: 30008 - DNA, 20 bp, Artificial Sequence
  MKO10030008_A_Maff
  gRNA
cgagaacgccgccatgcgcc

SEQ ID NO: 30009 - DNA, 20 bp, Artificial Sequence
  MKO10030009_A_Maff
  gRNA
cttcagggctttgctagata

SEQ ID NO: 30010 - DNA, 20 bp, Artificial Sequence
  MKO10030010_A_Mafg
  gRNA
ctatgaccgagcatccgtct

SEQ ID NO: 30011 - DNA, 20 bp, Artificial Sequence
  MKO10030011_A_Mafg
  gRNA
tggcaccagcttgaccgacg

SEQ ID NO: 30012 - DNA, 20 bp, Artificial Sequence
  MKO10030012_A_Mafg
  gRNA
gttatgacgacccccaataa

SEQ ID NO: 30013 - DNA, 20 bp, Artificial Sequence
  MKO10030013_A_Mafk
  gRNA
acagaccttcgctcgcaccg

SEQ ID NO: 30014 - DNA, 20 bp, Artificial Sequence
  MKO10030014_A_Mafk
  gRNA
tcgggccacggtgcgagcga

SEQ ID NO: 30015 - DNA, 20 bp, Artificial Sequence
  MKO10030015_A_Mafk
  gRNA
gactaatcccaagcccaaca

SEQ ID NO: 30016 - DNA, 20 bp, Artificial Sequence
  MKO10030016_A_Maf
  gRNA
gcacttcgacgaccgcttct

SEQ ID NO: 30017 - DNA, 20 bp, Artificial Sequence
  MKO10030017_A_Maf
  gRNA
ggcgatcacggcggacacca

SEQ ID NO: 30018 - DNA, 20 bp, Artificial Sequence
  MKO10030018_A_Maf
  gRNA
ttctgttcgctgcccgagcc

SEQ ID NO: 30019 - DNA, 20 bp, Artificial Sequence
  MKO10030019_A_Magea10
  gRNA
gcgtaggagatgtatggttg

SEQ ID NO: 30020 - DNA, 20 bp, Artificial Sequence
  MKO10030020_A_Magea10
  gRNA
ccatacatctcctacgcttc

SEQ ID NO: 30021 - DNA, 20 bp, Artificial Sequence
  MKO10030021_A_Magea10
  gRNA
gagtgcatgcaattagtctt

SEQ ID NO: 30022 - DNA, 20 bp, Artificial Sequence
  MKO10030022_A_Magea1
  gRNA
ctttgcgagatgagatatac

SEQ ID NO: 30023 - DNA, 20 bp, Artificial Sequence
  MKO10030023_A_Magea1
  gRNA
aaccatggagacgtcagagg

SEQ ID NO: 30024 - DNA, 20 bp, Artificial Sequence
  MKO10030024_A_Magea1
  gRNA
ctcctcctctgacgtctcca

SEQ ID NO: 30025 - DNA, 20 bp, Artificial Sequence
  MKO10030025_A_Magea2
  gRNA
cagcctccaagagagtgctc

SEQ ID NO: 30026 - DNA, 20 bp, Artificial Sequence
  MKO10030026_A_Magea2
  gRNA
cactacactagaatgtgagc

SEQ ID NO: 30027 - DNA, 20 bp, Artificial Sequence
  MKO10030027_A_Magea2
  gRNA
cactaccaaagcagaaatgt

SEQ ID NO: 30028 - DNA, 20 bp, Artificial Sequence
  MKO10030028_A_Magea3
  gRNA
cagtacactagaatgtgtgt

SEQ ID NO: 30029 - DNA, 20 bp, Artificial Sequence
  MKO10030029_A_Magea3
  gRNA
aatagtgatccccctagcta

SEQ ID NO: 30030 - DNA, 20 bp, Artificial Sequence
  MKO10030030_A_Magea3
  gRNA
ctgaataacatagggttgtg

SEQ ID NO: 30031 - DNA, 20 bp, Artificial Sequence
  MKO10030031_A_Magea4
  gRNA
ttacactgaaaaatacgcag

SEQ ID NO: 30032 - DNA, 20 bp, Artificial Sequence
  MKO10030032_A_Magea4
  gRNA
gaacattgtctaactccctt

SEQ ID NO: 30033 - DNA, 20 bp, Artificial Sequence
  MKO10030033_A_Magea4
  gRNA
aacagaggctagtatcacaa

SEQ ID NO: 30034 - DNA, 20 bp, Artificial Sequence
  MKO10030034_A_Magea5
  gRNA
gaccatggagacatccgagg

SEQ ID NO: 30035 - DNA, 20 bp, Artificial Sequence
  MKO10030035_A_Magea5
  gRNA
ggtctatttctaccatgtca

SEQ ID NO: 30036 - DNA, 20 bp, Artificial Sequence
  MKO10030036_A_Magea5
  gRNA
ggtggtatcttcctcctcct

SEQ ID NO: 30037 - DNA, 20 bp, Artificial Sequence
  MKO10030037_A_Magea6
  gRNA
ctttgcgagatgagatagaa

SEQ ID NO: 30038 - DNA, 20 bp, Artificial Sequence
  MKO10030038_A_Magea6
  gRNA
actagaatggtcagagaaat

SEQ ID NO: 30039 - DNA, 20 bp, Artificial Sequence
  MKO10030039_A_Magea6
  gRNA
tctgctcaagatccaagcct

SEQ ID NO: 30040 - DNA, 20 bp, Artificial Sequence
  MKO10030040_A_Magea8
  gRNA
cagtacactagaatgtaagc

SEQ ID NO: 30041 - DNA, 20 bp, Artificial Sequence
  MKO10030041_A_Magea8
  gRNA
tctgttcaagatccacgcct

SEQ ID NO: 30042 - DNA, 20 bp, Artificial Sequence
  MKO10030042_A_Magea8
  gRNA
gaccatggtgacatcacagg

SEQ ID NO: 30043 - DNA, 20 bp, Artificial Sequence
  MKO10030043_A_Mageb16
  gRNA
gaagaatgtgcagctgacca

SEQ ID NO: 30044 - DNA, 20 bp, Artificial Sequence
  MKO10030044_A_Mageb16
  gRNA
atcagcatgctctaatagca

SEQ ID NO: 30045 - DNA, 20 bp, Artificial Sequence
  MKO10030045_A_Mageb16
  gRNA
ttacctgtgatgactgtaga

SEQ ID NO: 30046 - DNA, 20 bp, Artificial Sequence
  MKO10030046_A_Mageb18
  gRNA
gatgtaggcatactggcaac

SEQ ID NO: 30047 - DNA, 20 bp, Artificial Sequence
  MKO10030047_A_Mageb18
  gRNA
tttctatgggtgtccacatc

SEQ ID NO: 30048 - DNA, 20 bp, Artificial Sequence
  MKO10030048_A_Mageb18
  gRNA
ctccatcctttgaattcacg

SEQ ID NO: 30049 - DNA, 20 bp, Artificial Sequence
  MKO10030049_A_Mageb1
  gRNA
ttcctagaaagatgttctcc

SEQ ID NO: 30050 - DNA, 20 bp, Artificial Sequence
  MKO10030050_A_Mageb1
  gRNA
cagactcaactacatgttag

SEQ ID NO: 30051 - DNA, 20 bp, Artificial Sequence
  MKO10030051_A_Mageb1
  gRNA
ggtgtatcctgcacaggctc

SEQ ID NO: 30052 - DNA, 20 bp, Artificial Sequence
  MKO10030052_A_Mageb2
  gRNA
tcatcttaaacttatctagc

SEQ ID NO: 30053 - DNA, 20 bp, Artificial Sequence
  MKO10030053_A_Mageb2
  gRNA
cagactcaactacatgttag

SEQ ID NO: 30054 - DNA, 20 bp, Artificial Sequence
  MKO10030054_A_Mageb2
  gRNA
agcacagtcaacatgcctag

SEQ ID NO: 30055 - DNA, 20 bp, Artificial Sequence
  MKO10030055_A_Mageb3
  gRNA
cagactcaactacacattag

SEQ ID NO: 30056 - DNA, 20 bp, Artificial Sequence
  MKO10030056_A_Mageb3
  gRNA
tctcctgttgacctgagtgc

SEQ ID NO: 30057 - DNA, 20 bp, Artificial Sequence
  MKO10030057_A_Mageb3
  gRNA
gtgactgctgtcgtttagca

SEQ ID NO: 30058 - DNA, 20 bp, Artificial Sequence
  MKO10030058_A_Mageb4
  gRNA
gtcccactggttgactcctc

SEQ ID NO: 30059 - DNA, 20 bp, Artificial Sequence
  MKO10030059_A_Mageb4
  gRNA
cttgttagaagatcattctg

SEQ ID NO: 30060 - DNA, 20 bp, Artificial Sequence
  MKO10030060_A_Mageb4
  gRNA
tgacccctcttgcaaagata

SEQ ID NO: 30061 - DNA, 20 bp, Artificial Sequence
  MKO10030061_A_Mageb5
  gRNA
agggcaaacccttcctttgt

SEQ ID NO: 30062 - DNA, 20 bp, Artificial Sequence
  MKO10030062_A_Mageb5
  gRNA
tcctcaaaaagatgagtctc

SEQ ID NO: 30063 - DNA, 20 bp, Artificial Sequence
  MKO10030063_A_Mageb5
  gRNA
attgaggtttcataaccttc

SEQ ID NO: 30064 - DNA, 20 bp, Artificial Sequence
  MKO10030064_A_Maged1
  gRNA
cgacctacctgagcgcttga

SEQ ID NO: 30065 - DNA, 20 bp, Artificial Sequence
  MKO10030065_A_Maged1
  gRNA
tcttgccccgaattatagtc

SEQ ID NO: 30066 - DNA, 20 bp, Artificial Sequence
  MKO10030066_A_Maged1
  gRNA
gatgcttaaagactacacga

SEQ ID NO: 30067 - DNA, 20 bp, Artificial Sequence
  MKO10030067_A_Maged2
  gRNA
aagattcccatcagacgctc

SEQ ID NO: 30068 - DNA, 20 bp, Artificial Sequence
  MKO10030068_A_Maged2
  gRNA
gcctacaaccccgaccaaaa

SEQ ID NO: 30069 - DNA, 20 bp, Artificial Sequence
  MKO10030069_A_Maged2
  gRNA
tgcgaagctacagtcatccc

SEQ ID NO: 30070 - DNA, 20 bp, Artificial Sequence
  MKO10030070_A_Magee1
  gRNA
cgcaagttgcgaacgatcaa

SEQ ID NO: 30071 - DNA, 20 bp, Artificial Sequence
  MKO10030071_A_Magee1
  gRNA
cgagccctactccgttagtg

SEQ ID NO: 30072 - DNA, 20 bp, Artificial Sequence
  MKO10030072_A_Magee1
  gRNA
cccgttgtttctgcgcgcat

SEQ ID NO: 30073 - DNA, 20 bp, Artificial Sequence
  MKO10030073_A_Magee2
  gRNA
cgacgagcagtcccgacgtt

SEQ ID NO: 30074 - DNA, 20 bp, Artificial Sequence
  MKO10030074_A_Magee2
  gRNA
cagagcagctcgtattcaac

SEQ ID NO: 30075 - DNA, 20 bp, Artificial Sequence
  MKO10030075_A_Magee2
  gRNA
gcgttgcctcattagcttac

SEQ ID NO: 30076 - DNA, 20 bp, Artificial Sequence
  MKO10030076_A_Mageh1
  gRNA
tcggcgccgccggaacgcaa

SEQ ID NO: 30077 - DNA, 20 bp, Artificial Sequence
  MKO10030077_A_Mageh1
  gRNA
ctattctcaattcgggtgct

SEQ ID NO: 30078 - DNA, 20 bp, Artificial Sequence
  MKO10030078_A_Mageh1
  gRNA
cgccgactcttccgtccccg

SEQ ID NO: 30079 - DNA, 20 bp, Artificial Sequence
  MKO10030079_A_Magel2
  gRNA
ggctatcggtgtccccgtaa

SEQ ID NO: 30080 - DNA, 20 bp, Artificial Sequence
  MKO10030080_A_Magel2
  gRNA
tacgtgatcgagtggagccc

SEQ ID NO: 30081 - DNA, 20 bp, Artificial Sequence
  MKO10030081_A_Magel2
  gRNA
ggatggatcatcacgacacc

SEQ ID NO: 30082 - DNA, 20 bp, Artificial Sequence
  MKO10030082_A_Magi1
  gRNA
acatagtagacaccgtagac

SEQ ID NO: 30083 - DNA, 20 bp, Artificial Sequence
  MKO10030083_A_Magi1
  gRNA
gcgaggatgctactattcac

SEQ ID NO: 30084 - DNA, 20 bp, Artificial Sequence
  MKO10030084_A_Magi1
  gRNA
cttggagagtgtgctcgtcc

SEQ ID NO: 30085 - DNA, 20 bp, Artificial Sequence
  MKO10030085_A_Magi2
  gRNA
ggatccgcgacttgcgaaaa

SEQ ID NO: 30086 - DNA, 20 bp, Artificial Sequence
  MKO10030086_A_Magi2
  gRNA
aacggcgtggtcataacccc

SEQ ID NO: 30087 - DNA, 20 bp, Artificial Sequence
  MKO10030087_A_Magi2
  gRNA
acgccgtttccattgactac

SEQ ID NO: 30088 - DNA, 20 bp, Artificial Sequence
  MKO10030088_A_Magi3
  gRNA
atctcggcgcccaagtcgcc

SEQ ID NO: 30089 - DNA, 20 bp, Artificial Sequence
  MKO10030089_A_Magi3
  gRNA
cctggggcggctccgcgacg

SEQ ID NO: 30090 - DNA, 20 bp, Artificial Sequence
  MKO10030090_A_Magi3
  gRNA
cctgatcaactggatcgggc

SEQ ID NO: 30091 - DNA, 20 bp, Artificial Sequence
  MKO10030091_A_Magix
  gRNA
tactagcgctgtcaagtccg

SEQ ID NO: 30092 - DNA, 20 bp, Artificial Sequence
  MKO10030092_A_Magix
  gRNA
tcttgtgaaacatcgacccc

SEQ ID NO: 30093 - DNA, 20 bp, Artificial Sequence
  MKO10030093_A_Magix
  gRNA
acctaccctccgtgtggcgc

SEQ ID NO: 30094 - DNA, 20 bp, Artificial Sequence
  MKO10030094_A_Magohb
  gRNA
acctgccgcccaaccctgtc

SEQ ID NO: 30095 - DNA, 20 bp, Artificial Sequence
  MKO10030095_A_Magohb
  gRNA
caggaacttgaaatcgtaat

SEQ ID NO: 30096 - DNA, 20 bp, Artificial Sequence
  MKO10030096_A_Magohb
  gRNA
tcttgaagtgtagaccaatg

SEQ ID NO: 30097 - DNA, 20 bp, Artificial Sequence
  MKO10030097_A_Magoh
  gRNA
acctgccggcccacgcgatc

SEQ ID NO: 30098 - DNA, 20 bp, Artificial Sequence
  MKO10030098_A_Magoh
  gRNA
cccctcctgatcgcgtgggc

SEQ ID NO: 30099 - DNA, 20 bp, Artificial Sequence
  MKO10030099_A_Magoh
  gRNA
taaaatactcgcaagccttc

SEQ ID NO: 30100 - DNA, 20 bp, Artificial Sequence
  MKO10030100_A_Magt1
  gRNA
ggctgatacatatgagttgc

SEQ ID NO: 30101 - DNA, 20 bp, Artificial Sequence
  MKO10030101_A_Magt1
  gRNA
attagacctccaaattatgc

SEQ ID NO: 30102 - DNA, 20 bp, Artificial Sequence
  MKO10030102_A_Magt1
  gRNA
gccaagaatttgccaaaatc

SEQ ID NO: 30103 - DNA, 20 bp, Artificial Sequence
  MKO10030103_A_Mag
  gRNA
gctcatcggggaagtcgaaa

SEQ ID NO: 30104 - DNA, 20 bp, Artificial Sequence
  MKO10030104_A_Mag
  gRNA
ccagggccgcagccgcctat

SEQ ID NO: 30105 - DNA, 20 bp, Artificial Sequence
  MKO10030105_A_Mag
  gRNA
ctcacacttgacgtccaaac

SEQ ID NO: 30106 - DNA, 20 bp, Artificial Sequence
  MKO10030106_A_Mak16
  gRNA
tacccgttcccagagacgcc

SEQ ID NO: 30107 - DNA, 20 bp, Artificial Sequence
  MKO10030107_A_Mak16
  gRNA
caatcggtcgtcctgtcctc

SEQ ID NO: 30108 - DNA, 20 bp, Artificial Sequence
  MKO10030108_A_Mak16
  gRNA
gctctataaccttcatgtac

SEQ ID NO: 30109 - DNA, 20 bp, Artificial Sequence
  MKO10030109_A_Mak
  gRNA
cacgtatgggagtgtactga

SEQ ID NO: 30110 - DNA, 20 bp, Artificial Sequence
  MKO10030110_A_Mak
  gRNA
gtagacacatagtcagtata

SEQ ID NO: 30111 - DNA, 20 bp, Artificial Sequence
  MKO10030111_A_Mak
  gRNA
tatgaacttgcgagaagtta

SEQ ID NO: 30112 - DNA, 20 bp, Artificial Sequence
  MKO10030112_A_Mal2
  gRNA
agtacgtccttaggatgtcg

SEQ ID NO: 30113 - DNA, 20 bp, Artificial Sequence
  MKO10030113_A_Mal2
  gRNA
gacatcctaaggacgtactc

SEQ ID NO: 30114 - DNA, 20 bp, Artificial Sequence
  MKO10030114_A_Mal2
  gRNA
caaccagtataacatcaacg

SEQ ID NO: 30115 - DNA, 20 bp, Artificial Sequence
  MKO10030115_A_Mall
  gRNA
cacgtcaggcggggcgtagc

SEQ ID NO: 30116 - DNA, 20 bp, Artificial Sequence
  MKO10030116_A_Mall
  gRNA
aacaaggcggcgacccccga

SEQ ID NO: 30117 - DNA, 20 bp, Artificial Sequence
  MKO10030117_A_Mall
  gRNA
cgtcgcataccccttgctgc

SEQ ID NO: 30118 - DNA, 20 bp, Artificial Sequence
  MKO10030118_A_Malsu1
  gRNA
cgagagctatgggtccgggc

SEQ ID NO: 30119 - DNA, 20 bp, Artificial Sequence
  MKO10030119_A_Malsu1
  gRNA
cgatccgtatgtcaagatcg

SEQ ID NO: 30120 - DNA, 20 bp, Artificial Sequence
  MKO10030120_A_Malsu1
  gRNA
ctgcaggcgagcgtcgccag

SEQ ID NO: 30121 - DNA, 20 bp, Artificial Sequence
  MKO10030121_A_Malt1
  gRNA
tgtaacaacaacatgctgcc

SEQ ID NO: 30122 - DNA, 20 bp, Artificial Sequence
  MKO10030122_A_Malt1
  gRNA
cttccgcttctcaacccccc

SEQ ID NO: 30123 - DNA, 20 bp, Artificial Sequence
  MKO10030123_A_Malt1
  gRNA
gtcctatgcctcactaccag

SEQ ID NO: 30124 - DNA, 20 bp, Artificial Sequence
  MKO10030124_A_Mal
  gRNA
ccatgaaaacatcgccgcag

SEQ ID NO: 30125 - DNA, 20 bp, Artificial Sequence
  MKO10030125_A_Mal
  gRNA
gtagatcagagtgaccacgt

SEQ ID NO: 30126 - DNA, 20 bp, Artificial Sequence
  MKO10030126_A_Mal
  gRNA
gttccaggtgtttgcctacg

SEQ ID NO: 30127 - DNA, 20 bp, Artificial Sequence
  MKO10030127_A_Mamdc2
  gRNA
aatgccctagacctgcccgc

SEQ ID NO: 30128 - DNA, 20 bp, Artificial Sequence
  MKO10030128_A_Mamdc2
  gRNA
ggagtggaactgtttgcgcc

SEQ ID NO: 30129 - DNA, 20 bp, Artificial Sequence
  MKO10030129_A_Mamdc2
  gRNA
tagccgtgtttccttgtccc

SEQ ID NO: 30130 - DNA, 20 bp, Artificial Sequence
  MKO10030130_A_Mamdc4
  gRNA
ctatcgatggcttcgagacc

SEQ ID NO: 30131 - DNA, 20 bp, Artificial Sequence
  MKO10030131_A_Mamdc4
  gRNA
tcgaagccatcgatagcctg

SEQ ID NO: 30132 - DNA, 20 bp, Artificial Sequence
  MKO10030132_A_Mamdc4
  gRNA
acctggaccaggctggtata

SEQ ID NO: 30133 - DNA, 20 bp, Artificial Sequence
  MKO10030133_A_Maml1
  gRNA
cgacctgccgtgcatgatcg

SEQ ID NO: 30134 - DNA, 20 bp, Artificial Sequence
  MKO10030134_A_Maml1
  gRNA
ccagcgcccgcgatcatgca

SEQ ID NO: 30135 - DNA, 20 bp, Artificial Sequence
  MKO10030135_A_Maml1
  gRNA
gggccagaacgcctccacct

SEQ ID NO: 30136 - DNA, 20 bp, Artificial Sequence
  MKO10030136_A_Maml2
  gRNA
gttaccgttatttgccccta

SEQ ID NO: 30137 - DNA, 20 bp, Artificial Sequence
  MKO10030137_A_Maml2
  gRNA
cattgttgaagtgacgttgt

SEQ ID NO: 30138 - DNA, 20 bp, Artificial Sequence
  MKO10030138_A_Maml2
  gRNA
ttacccgaatactgagcagc

SEQ ID NO: 30139 - DNA, 20 bp, Artificial Sequence
  MKO10030139_A_Maml3
  gRNA
tcatacagttatagcggcga

SEQ ID NO: 30140 - DNA, 20 bp, Artificial Sequence
  MKO10030140_A_Maml3
  gRNA
cgtcgcaagcgccattctgc

SEQ ID NO: 30141 - DNA, 20 bp, Artificial Sequence
  MKO10030141_A_Maml3
  gRNA
tccgagaatgacgcccccta

SEQ ID NO: 30142 - DNA, 20 bp, Artificial Sequence
  MKO10030142_A_Mamld1
  gRNA
gcgacagcccccatcccgcc

SEQ ID NO: 30143 - DNA, 20 bp, Artificial Sequence
  MKO10030143_A_Mamld1
  gRNA
ctggggcggctgggatccga

SEQ ID NO: 30144 - DNA, 20 bp, Artificial Sequence
  MKO10030144_A_Mamld1
  gRNA
gaggcaaactggaccaattg

SEQ ID NO: 30145 - DNA, 20 bp, Artificial Sequence
  MKO10030145_A_Mamstr
  gRNA
ccgtcagctcttccagttta

SEQ ID NO: 30146 - DNA, 20 bp, Artificial Sequence
  MKO10030146_A_Mamstr
  gRNA
ctcaacttgcagatttgccc

SEQ ID NO: 30147 - DNA, 20 bp, Artificial Sequence
  MKO10030147_A_Mamstr
  gRNA
tctgttctggaggcatgtac

SEQ ID NO: 30148 - DNA, 20 bp, Artificial Sequence
  MKO10030148_A_Man1a2
  gRNA
ccactgacccctacacgttg

SEQ ID NO: 30149 - DNA, 20 bp, Artificial Sequence
  MKO10030149_A_Man1a2
  gRNA
catgaagccccatgatataa

SEQ ID NO: 30150 - DNA, 20 bp, Artificial Sequence
  MKO10030150_A_Man1a2
  gRNA
gtccctgtcccacaacgtgt

SEQ ID NO: 30151 - DNA, 20 bp, Artificial Sequence
  MKO10030151_A_Man1a
  gRNA
gaagtcaacatacgcttcgt

SEQ ID NO: 30152 - DNA, 20 bp, Artificial Sequence
  MKO10030152_A_Man1a
  gRNA
ataattataaacgctatgcg

SEQ ID NO: 30153 - DNA, 20 bp, Artificial Sequence
  MKO10030153_A_Man1a
  gRNA
agctacaatagtagatgccc

SEQ ID NO: 30154 - DNA, 20 bp, Artificial Sequence
  MKO10030154_A_Man1b1
  gRNA
cagccgtatgaagagagtac

SEQ ID NO: 30155 - DNA, 20 bp, Artificial Sequence
  MKO10030155_A_Man1b1
  gRNA
acacacagagaaccgtcatc

SEQ ID NO: 30156 - DNA, 20 bp, Artificial Sequence
  MKO10030156_A_Man1b1
  gRNA
agccgtgattgagcctgaac

SEQ ID NO: 30157 - DNA, 20 bp, Artificial Sequence
  MKO10030157_A_Man1c1
  gRNA
gaattaccgccgttatgcga

SEQ ID NO: 30158 - DNA, 20 bp, Artificial Sequence
  MKO10030158_A_Man1c1
  gRNA
cattcttgcccatcgcataa

SEQ ID NO: 30159 - DNA, 20 bp, Artificial Sequence
  MKO10030159_A_Man1c1
  gRNA
agagcagtcctccgatatac

SEQ ID NO: 30160 - DNA, 20 bp, Artificial Sequence
  MKO10030160_A_Man2a1
  gRNA
gcgttgcctggtgacccccg

SEQ ID NO: 30161 - DNA, 20 bp, Artificial Sequence
  MKO10030161_A_Man2a1
  gRNA
cgtcctccacagactcgctc

SEQ ID NO: 30162 - DNA, 20 bp, Artificial Sequence
  MKO10030162_A_Man2a1
  gRNA
cagctggaaattgtgaccgg

SEQ ID NO: 30163 - DNA, 20 bp, Artificial Sequence
  MKO10030163_A_Man2a2
  gRNA
tgacatcataagccgtatca

SEQ ID NO: 30164 - DNA, 20 bp, Artificial Sequence
  MKO10030164_A_Man2a2
  gRNA
ctgcccagagaaagcgccgc

SEQ ID NO: 30165 - DNA, 20 bp, Artificial Sequence
  MKO10030165_A_Man2a2
  gRNA
tttgccgtttgacaatgtgg

SEQ ID NO: 30166 - DNA, 20 bp, Artificial Sequence
  MKO10030166_A_Man2b1
  gRNA
tttcggccactctcgagaac

SEQ ID NO: 30167 - DNA, 20 bp, Artificial Sequence
  MKO10030167_A_Man2b1
  gRNA
cacaatcgcgccatagtggg

SEQ ID NO: 30168 - DNA, 20 bp, Artificial Sequence
  MKO10030168_A_Man2b1
  gRNA
acatgtcccccaacgaagcc

SEQ ID NO: 30169 - DNA, 20 bp, Artificial Sequence
  MKO10030169_A_Man2b2
  gRNA
tcgtattgactacgacctca

SEQ ID NO: 30170 - DNA, 20 bp, Artificial Sequence
  MKO10030170_A_Man2b2
  gRNA
tggcggaactggtccgcgga

SEQ ID NO: 30171 - DNA, 20 bp, Artificial Sequence
  MKO10030171_A_Man2b2
  gRNA
caccacggtagtgtagacat

SEQ ID NO: 30172 - DNA, 20 bp, Artificial Sequence
  MKO10030172_A_Man2c1
  gRNA
aagctgtcgccgacctgcgc

SEQ ID NO: 30173 - DNA, 20 bp, Artificial Sequence
  MKO10030173_A_Man2c1
  gRNA
ccagttatgtcctgagcgag

SEQ ID NO: 30174 - DNA, 20 bp, Artificial Sequence
  MKO10030174_A_Man2c1
  gRNA
cagttctacccgaaaccagc

SEQ ID NO: 30175 - DNA, 20 bp, Artificial Sequence
  MKO10030175_A_Manbal
  gRNA
ttgggccatggcctccgacc

SEQ ID NO: 30176 - DNA, 20 bp, Artificial Sequence
  MKO10030176_A_Manbal
  gRNA
gctgcggtatggactcttcc

SEQ ID NO: 30177 - DNA, 20 bp, Artificial Sequence
  MKO10030177_A_Manbal
  gRNA
ccatcgcttccaccaacaag

SEQ ID NO: 30178 - DNA, 20 bp, Artificial Sequence
  MKO10030178_A_Manba
  gRNA
tcacgtcaacttcatccgaa

SEQ ID NO: 30179 - DNA, 20 bp, Artificial Sequence
  MKO10030179_A_Manba
  gRNA
gttcacgtctttgactacgt

SEQ ID NO: 30180 - DNA, 20 bp, Artificial Sequence
  MKO10030180_A_Manba
  gRNA
ttaatgacctgaactataga

SEQ ID NO: 30181 - DNA, 20 bp, Artificial Sequence
  MKO10030181_A_Maneal
  gRNA
cggaactagcaccgttcgag

SEQ ID NO: 30182 - DNA, 20 bp, Artificial Sequence
  MKO10030182_A_Maneal
  gRNA
ttccgtcgaatcctgccgcg

SEQ ID NO: 30183 - DNA, 20 bp, Artificial Sequence
  MKO10030183_A_Maneal
  gRNA
atttagagctgacccgccgc

SEQ ID NO: 30184 - DNA, 20 bp, Artificial Sequence
  MKO10030184_A_Manea
  gRNA
tttcccgaatgcgcatttag

SEQ ID NO: 30185 - DNA, 20 bp, Artificial Sequence
  MKO10030185_A_Manea
  gRNA
aaactggagccaatgtcgtc

SEQ ID NO: 30186 - DNA, 20 bp, Artificial Sequence
  MKO10030186_A_Manea
  gRNA
gttcgcagttctccttatga

SEQ ID NO: 30187 - DNA, 20 bp, Artificial Sequence
  MKO10030187_A_Manf
  gRNA
ctacagatcagtccgtgcgc

SEQ ID NO: 30188 - DNA, 20 bp, Artificial Sequence
  MKO10030188_A_Manf
  gRNA
aggaggatgtgggctacgcg

SEQ ID NO: 30189 - DNA, 20 bp, Artificial Sequence
  MKO10030189_A_Manf
  gRNA
gatgcctaaatacgccccca

SEQ ID NO: 30190 - DNA, 20 bp, Artificial Sequence
  MKO10030190_A_Mansc1
  gRNA
cagcttggcttactcgttgc

SEQ ID NO: 30191 - DNA, 20 bp, Artificial Sequence
  MKO10030191_A_Mansc1
  gRNA
ttacttgaccattcgtcacc

SEQ ID NO: 30192 - DNA, 20 bp, Artificial Sequence
  MKO10030192_A_Mansc1
  gRNA
cctgggtttcgtaccccagc

SEQ ID NO: 30193 - DNA, 20 bp, Artificial Sequence
  MKO10030193_A_Mansc4
  gRNA
ccgcagtctatcccaccatt

SEQ ID NO: 30194 - DNA, 20 bp, Artificial Sequence
  MKO10030194_A_Mansc4
  gRNA
tgttctccgagtagtacttg

SEQ ID NO: 30195 - DNA, 20 bp, Artificial Sequence
  MKO10030195_A_Mansc4
  gRNA
tgctaatgttgagtcgagat

SEQ ID NO: 30196 - DNA, 20 bp, Artificial Sequence
  MKO10030196_A_Maoa
  gRNA
acaagcgtaagattctgttc

SEQ ID NO: 30197 - DNA, 20 bp, Artificial Sequence
  MKO10030197_A_Maoa
  gRNA
gcgtctagttcaatatgtca

SEQ ID NO: 30198 - DNA, 20 bp, Artificial Sequence
  MKO10030198_A_Maoa
  gRNA
atttggattacaacaacctg

SEQ ID NO: 30199 - DNA, 20 bp, Artificial Sequence
  MKO10030199_A_Maob
  gRNA
ccagaatcgtatcttacgat

SEQ ID NO: 30200 - DNA, 20 bp, Artificial Sequence
  MKO10030200_A_Maob
  gRNA
ccaatcgtaagatacgattc

SEQ ID NO: 30201 - DNA, 20 bp, Artificial Sequence
  MKO10030201_A_Maob
  gRNA
gccaaacttctgcatgattg

SEQ ID NO: 30202 - DNA, 20 bp, Artificial Sequence
  MKO10030202_A_Map10
  gRNA
cgaggtgtattcgccctgcg

SEQ ID NO: 30203 - DNA, 20 bp, Artificial Sequence
  MKO10030203_A_Map10
  gRNA
gtcgccgtgcgccgcgagcc

SEQ ID NO: 30204 - DNA, 20 bp, Artificial Sequence
  MKO10030204_A_Map10
  gRNA
caaagttgcgaatcccctcc

SEQ ID NO: 30205 - DNA, 20 bp, Artificial Sequence
  MKO10030205_A_Map1a
  gRNA
gtcttgccgctgcagtgatt

SEQ ID NO: 30206 - DNA, 20 bp, Artificial Sequence
  MKO10030206_A_Map1a
  gRNA
gcccgggatgttcgatctac

SEQ ID NO: 30207 - DNA, 20 bp, Artificial Sequence
  MKO10030207_A_Map1a
  gRNA
ggtcagaaccgccgtccacc

SEQ ID NO: 30208 - DNA, 20 bp, Artificial Sequence
  MKO10030208_A_Map1b
  gRNA
gtcgcataagatcccgccaa

SEQ ID NO: 30209 - DNA, 20 bp, Artificial Sequence
  MKO10030209_A_Map1b
  gRNA
cgctgcccgccataaactgc

SEQ ID NO: 30210 - DNA, 20 bp, Artificial Sequence
  MKO10030210_A_Map1b
  gRNA
tgacgtaggcttctcccggc

SEQ ID NO: 30211 - DNA, 20 bp, Artificial Sequence
  MKO10030211_A_Map1lc3a
  gRNA
gtccgcagccgaccgctgta

SEQ ID NO: 30212 - DNA, 20 bp, Artificial Sequence
  MKO10030212_A_Map1lc3a
  gRNA
cccgcgcgatgccctccgac

SEQ ID NO: 30213 - DNA, 20 bp, Artificial Sequence
  MKO10030213_A_Map1lc3a
  gRNA
gggaggcgtagaccatgtag

SEQ ID NO: 30214 - DNA, 20 bp, Artificial Sequence
  MKO10030214_A_Map1lc3b
  gRNA
gcgagctcatcaagataatc

SEQ ID NO: 30215 - DNA, 20 bp, Artificial Sequence
  MKO10030215_A_Map1lc3b
  gRNA
agaacctactgggatcttgg

SEQ ID NO: 30216 - DNA, 20 bp, Artificial Sequence
  MKO10030216_A_Map1lc3b
  gRNA
ctttcttgcagaacaaagag

SEQ ID NO: 30217 - DNA, 20 bp, Artificial Sequence
  MKO10030217_A_Map1s
  gRNA
aaatccgcccgcgcagctgc

SEQ ID NO: 30218 - DNA, 20 bp, Artificial Sequence
  MKO10030218_A_Map1s
  gRNA
ggacagcgtccacgcgatcc

SEQ ID NO: 30219 - DNA, 20 bp, Artificial Sequence
  MKO10030219_A_Map1s
  gRNA
ggctgaatgccgggacacga

SEQ ID NO: 30220 - DNA, 20 bp, Artificial Sequence
  MKO10030220_A_Map2k1
  gRNA
cttgtgcttctcccgaagat

SEQ ID NO: 30221 - DNA, 20 bp, Artificial Sequence
  MKO10030221_A_Map2k1
  gRNA
gtgcaactccccgtacatcg

SEQ ID NO: 30222 - DNA, 20 bp, Artificial Sequence
  MKO10030222_A_Map2k1
  gRNA
atgatctggttccggattgc

SEQ ID NO: 30223 - DNA, 20 bp, Artificial Sequence
  MKO10030223_A_Map2k2
  gRNA
tgacggcctatgccgggcct

SEQ ID NO: 30224 - DNA, 20 bp, Artificial Sequence
  MKO10030224_A_Map2k2
  gRNA
atgatctggttgcgcacggc

SEQ ID NO: 30225 - DNA, 20 bp, Artificial Sequence
  MKO10030225_A_Map2k2
  gRNA
ccgtgcgcaaccagatcatc

SEQ ID NO: 30226 - DNA, 20 bp, Artificial Sequence
  MKO10030226_A_Map2k3
  gRNA
tccgggagtccaggttccgg

SEQ ID NO: 30227 - DNA, 20 bp, Artificial Sequence
  MKO10030227_A_Map2k3
  gRNA
actcacgtggggttggacac

SEQ ID NO: 30228 - DNA, 20 bp, Artificial Sequence
  MKO10030228_A_Map2k3
  gRNA
ccacagacccccccggaacc

SEQ ID NO: 30229 - DNA, 20 bp, Artificial Sequence
  MKO10030229_A_Map2k4
  gRNA
tttgtaaaacttatcgaacg

SEQ ID NO: 30230 - DNA, 20 bp, Artificial Sequence
  MKO10030230_A_Map2k4
  gRNA
aaccgtgctgtcgatttgac

SEQ ID NO: 30231 - DNA, 20 bp, Artificial Sequence
  MKO10030231_A_Map2k4
  gRNA
cacctgtcaaatcgacagca

SEQ ID NO: 30232 - DNA, 20 bp, Artificial Sequence
  MKO10030232_A_Map2k5
  gRNA
aacgctgtcgtcgtcgcttc

SEQ ID NO: 30233 - DNA, 20 bp, Artificial Sequence
  MKO10030233_A_Map2k5
  gRNA
acggaacatacatggcctga

SEQ ID NO: 30234 - DNA, 20 bp, Artificial Sequence
  MKO10030234_A_Map2k5
  gRNA
ccatgtatgttccgttcccc

SEQ ID NO: 30235 - DNA, 20 bp, Artificial Sequence
  MKO10030235_A_Map2k6
  gRNA
acttacgtggaactggtctg

SEQ ID NO: 30236 - DNA, 20 bp, Artificial Sequence
  MKO10030236_A_Map2k6
  gRNA
ccggaagagtgcaccgtaga

SEQ ID NO: 30237 - DNA, 20 bp, Artificial Sequence
  MKO10030237_A_Map2k6
  gRNA
aagatgcgtcacgtgcccag

SEQ ID NO: 30238 - DNA, 20 bp, Artificial Sequence
  MKO10030238_A_Map2k7
  gRNA
gtacctggcccccgatagtc

SEQ ID NO: 30239 - DNA, 20 bp, Artificial Sequence
  MKO10030239_A_Map2k7
  gRNA
cttgttcacaccgcgcagta

SEQ ID NO: 30240 - DNA, 20 bp, Artificial Sequence
  MKO10030240_A_Map2k7
  gRNA
gcttacctctccatactgcg

SEQ ID NO: 30241 - DNA, 20 bp, Artificial Sequence
  MKO10030241_A_Map2
  gRNA
tccttcatctttccgctcgt

SEQ ID NO: 30242 - DNA, 20 bp, Artificial Sequence
  MKO10030242_A_Map2
  gRNA
tctgaaagatggccgacgag

SEQ ID NO: 30243 - DNA, 20 bp, Artificial Sequence
  MKO10030243_A_Map2
  gRNA
ttcgcctgtttaaaagcacc

SEQ ID NO: 30244 - DNA, 20 bp, Artificial Sequence
  MKO10030244_A_Map3k10
  gRNA
ctaccgagaaatcgacgcct

SEQ ID NO: 30245 - DNA, 20 bp, Artificial Sequence
  MKO10030245_A_Map3k10
  gRNA
caaggcgtcgatttctcggt

SEQ ID NO: 30246 - DNA, 20 bp, Artificial Sequence
  MKO10030246_A_Map3k10
  gRNA
ccaaaatctggtcgcccgtg

SEQ ID NO: 30247 - DNA, 20 bp, Artificial Sequence
  MKO10030247_A_Map3k11
  gRNA
ggcgcacgtgcggccgttct

SEQ ID NO: 30248 - DNA, 20 bp, Artificial Sequence
  MKO10030248_A_Map3k11
  gRNA
tggaggcgaagtcgggcctg

SEQ ID NO: 30249 - DNA, 20 bp, Artificial Sequence
  MKO10030249_A_Map3k11
  gRNA
agaacgcatcagcatgcccc

SEQ ID NO: 30250 - DNA, 20 bp, Artificial Sequence
  MKO10030250_A_Map3k12
  gRNA
gctaatcacatacgacgatg

SEQ ID NO: 30251 - DNA, 20 bp, Artificial Sequence
  MKO10030251_A_Map3k12
  gRNA
catgccaccagcgatgccca

SEQ ID NO: 30252 - DNA, 20 bp, Artificial Sequence
  MKO10030252_A_Map3k12
  gRNA
cttgagcgcagaattccata

SEQ ID NO: 30253 - DNA, 20 bp, Artificial Sequence
  MKO10030253_A_Map3k13
  gRNA
cgtcgcgtggatggcaccag

SEQ ID NO: 30254 - DNA, 20 bp, Artificial Sequence
  MKO10030254_A_Map3k13
  gRNA
cattccactggcgattcccg

SEQ ID NO: 30255 - DNA, 20 bp, Artificial Sequence
  MKO10030255_A_Map3k13
  gRNA
gcagccggggcgtgatcttc

SEQ ID NO: 30256 - DNA, 20 bp, Artificial Sequence
  MKO10030256_A_Map3k14
  gRNA
aggatggggcattccgctgt

SEQ ID NO: 30257 - DNA, 20 bp, Artificial Sequence
  MKO10030257_A_Map3k14
  gRNA
tacctggtgcatgcgctcca

SEQ ID NO: 30258 - DNA, 20 bp, Artificial Sequence
  MKO10030258_A_Map3k14
  gRNA
agtatcgagaagaggtccac

SEQ ID NO: 30259 - DNA, 20 bp, Artificial Sequence
  MKO10030259_A_Map3k15
  gRNA
gggcccgctgtgtatgcccc

SEQ ID NO: 30260 - DNA, 20 bp, Artificial Sequence
  MKO10030260_A_Map3k15
  gRNA
ggctagtgaacctgtcgacc

SEQ ID NO: 30261 - DNA, 20 bp, Artificial Sequence
  MKO10030261_A_Map3k15
  gRNA
tctgtcctaccgtgatatcc

SEQ ID NO: 30262 - DNA, 20 bp, Artificial Sequence
  MKO10030262_A_Map3k19
  gRNA
cccaccatctccgcgtcatc

SEQ ID NO: 30263 - DNA, 20 bp, Artificial Sequence
  MKO10030263_A_Map3k19
  gRNA
tggttagcatcctccccgtg

SEQ ID NO: 30264 - DNA, 20 bp, Artificial Sequence
  MKO10030264_A_Map3k19
  gRNA
tgacttcagcccgttcatat

SEQ ID NO: 30265 - DNA, 20 bp, Artificial Sequence
  MKO10030265_A_Map3k1
  gRNA
accccgaagagccccgtcac

SEQ ID NO: 30266 - DNA, 20 bp, Artificial Sequence
  MKO10030266_A_Map3k1
  gRNA
tcggtgaagccggaatcccc

SEQ ID NO: 30267 - DNA, 20 bp, Artificial Sequence
  MKO10030267_A_Map3k1
  gRNA
gtgaagccaatccctattaa

SEQ ID NO: 30268 - DNA, 20 bp, Artificial Sequence
  MKO10030268_A_Map3k2
  gRNA
tctaagtctaagatcgcctt

SEQ ID NO: 30269 - DNA, 20 bp, Artificial Sequence
  MKO10030269_A_Map3k2
  gRNA
taaagataatgctggccgac

SEQ ID NO: 30270 - DNA, 20 bp, Artificial Sequence
  MKO10030270_A_Map3k2
  gRNA
taactggtctagtaacctgc

SEQ ID NO: 30271 - DNA, 20 bp, Artificial Sequence
  MKO10030271_A_Map3k3
  gRNA
atccagacaaccgggttcgt

SEQ ID NO: 30272 - DNA, 20 bp, Artificial Sequence
  MKO10030272_A_Map3k3
  gRNA
tccagatgagccgacgaacc

SEQ ID NO: 30273 - DNA, 20 bp, Artificial Sequence
  MKO10030273_A_Map3k3
  gRNA
tccacatcttcgtatctcac

SEQ ID NO: 30274 - DNA, 20 bp, Artificial Sequence
  MKO10030274_A_Map3k4
  gRNA
agccggtttcaacgggccct

SEQ ID NO: 30275 - DNA, 20 bp, Artificial Sequence
  MKO10030275_A_Map3k4
  gRNA
accagatcagttcgttcgat

SEQ ID NO: 30276 - DNA, 20 bp, Artificial Sequence
  MKO10030276_A_Map3k4
  gRNA
gctcgcctttcaagttcgat

SEQ ID NO: 30277 - DNA, 20 bp, Artificial Sequence
  MKO10030277_A_Map3k5
  gRNA
gcccatctgcttacccctcg

SEQ ID NO: 30278 - DNA, 20 bp, Artificial Sequence
  MKO10030278_A_Map3k5
  gRNA
tggagatgagcgacgccttc

SEQ ID NO: 30279 - DNA, 20 bp, Artificial Sequence
  MKO10030279_A_Map3k5
  gRNA
gcctaacttcgagctcctgc

SEQ ID NO: 30280 - DNA, 20 bp, Artificial Sequence
  MKO10030280_A_Map3k6
  gRNA
ctgcatcgccacataagacc

SEQ ID NO: 30281 - DNA, 20 bp, Artificial Sequence
  MKO10030281_A_Map3k6
  gRNA
agaccattcgtcaggatatc

SEQ ID NO: 30282 - DNA, 20 bp, Artificial Sequence
  MKO10030282_A_Map3k6
  gRNA
gctatcgtaccgtgatgtcc

SEQ ID NO: 30283 - DNA, 20 bp, Artificial Sequence
  MKO10030283_A_Map3k7cl
  gRNA
tctacggagtcgtgacacgg

SEQ ID NO: 30284 - DNA, 20 bp, Artificial Sequence
  MKO10030284_A_Map3k7cl
  gRNA
cgactccgtagagtccatgc

SEQ ID NO: 30285 - DNA, 20 bp, Artificial Sequence
  MKO10030285_A_Map3k7cl
  gRNA
atgcgaactggcttatctgc

SEQ ID NO: 30286 - DNA, 20 bp, Artificial Sequence
  MKO10030286_A_Map3k7
  gRNA
gatgatcgaagcgccgtcgc

SEQ ID NO: 30287 - DNA, 20 bp, Artificial Sequence
  MKO10030287_A_Map3k7
  gRNA
cggcgcttcgatcatctcac

SEQ ID NO: 30288 - DNA, 20 bp, Artificial Sequence
  MKO10030288_A_Map3k7
  gRNA
gggacttactggattcaggc

SEQ ID NO: 30289 - DNA, 20 bp, Artificial Sequence
  MKO10030289_A_Map3k8
  gRNA
tcgagggtagcgcttcaccc

SEQ ID NO: 30290 - DNA, 20 bp, Artificial Sequence
  MKO10030290_A_Map3k8
  gRNA
ggagaacatccgaatcgatt

SEQ ID NO: 30291 - DNA, 20 bp, Artificial Sequence
  MKO10030291_A_Map3k8
  gRNA
gatggacagtatcgccccat

SEQ ID NO: 30292 - DNA, 20 bp, Artificial Sequence
  MKO10030292_A_Map3k9
  gRNA
ccgaacatcattgcgctcag

SEQ ID NO: 30293 - DNA, 20 bp, Artificial Sequence
  MKO10030293_A_Map3k9
  gRNA
actcctctatagtcgttagc

SEQ ID NO: 30294 - DNA, 20 bp, Artificial Sequence
  MKO10030294_A_Map3k9
  gRNA
ccagctacggtgtactgctt

SEQ ID NO: 30295 - DNA, 20 bp, Artificial Sequence
  MKO10030295_A_Map4k1
  gRNA
tgacgtcgccacccttcaga

SEQ ID NO: 30296 - DNA, 20 bp, Artificial Sequence
  MKO10030296_A_Map4k1
  gRNA
aagccacgatgttggcgtgc

SEQ ID NO: 30297 - DNA, 20 bp, Artificial Sequence
  MKO10030297_A_Map4k1
  gRNA
cctttacaaggctcgcgaca

SEQ ID NO: 30298 - DNA, 20 bp, Artificial Sequence
  MKO10030298_A_Map4k2
  gRNA
gttcggacgtgacggtgtca

SEQ ID NO: 30299 - DNA, 20 bp, Artificial Sequence
  MKO10030299_A_Map4k2
  gRNA
tgacaccgtcacgtccgaac

SEQ ID NO: 30300 - DNA, 20 bp, Artificial Sequence
  MKO10030300_A_Map4k2
  gRNA
tccccaggaatgaccgattg

SEQ ID NO: 30301 - DNA, 20 bp, Artificial Sequence
  MKO10030301_A_Map4k3
  gRNA
taggcacggaatgtcaacac

SEQ ID NO: 30302 - DNA, 20 bp, Artificial Sequence
  MKO10030302_A_Map4k3
  gRNA
ttcacaggcgagataaactt

SEQ ID NO: 30303 - DNA, 20 bp, Artificial Sequence
  MKO10030303_A_Map4k3
  gRNA
tctttacaggacatatatca

SEQ ID NO: 30304 - DNA, 20 bp, Artificial Sequence
  MKO10030304_A_Map4k4
  gRNA
ggtgacgtccataaccttga

SEQ ID NO: 30305 - DNA, 20 bp, Artificial Sequence
  MKO10030305_A_Map4k4
  gRNA
gctggccgccatcaaggtta

SEQ ID NO: 30306 - DNA, 20 bp, Artificial Sequence
  MKO10030306_A_Map4k4
  gRNA
cgaaatattgccacgtacta

SEQ ID NO: 30307 - DNA, 20 bp, Artificial Sequence
  MKO10030307_A_Map4k5
  gRNA
atttgcatggagtactgcgg

SEQ ID NO: 30308 - DNA, 20 bp, Artificial Sequence
  MKO10030308_A_Map4k5
  gRNA
tgcaacatcgtagcctactt

SEQ ID NO: 30309 - DNA, 20 bp, Artificial Sequence
  MKO10030309_A_Map4k5
  gRNA
cgtctgcagagagaccttac

SEQ ID NO: 30310 - DNA, 20 bp, Artificial Sequence
  MKO10030310_A_Map4
  gRNA
agagccctatgatgacatcg

SEQ ID NO: 30311 - DNA, 20 bp, Artificial Sequence
  MKO10030311_A_Map4
  gRNA
tcaacgcatccacaagactg

SEQ ID NO: 30312 - DNA, 20 bp, Artificial Sequence
  MKO10030312_A_Map4
  gRNA
ctccattccatgatcaccat

SEQ ID NO: 30313 - DNA, 20 bp, Artificial Sequence
  MKO10030313_A_Map6d1
  gRNA
cagcacgtagaccgtccggg

SEQ ID NO: 30314 - DNA, 20 bp, Artificial Sequence
  MKO10030314_A_Map6d1
  gRNA
ttcgcacaccgaaatcgcgc

SEQ ID NO: 30315 - DNA, 20 bp, Artificial Sequence
  MKO10030315_A_Map6d1
  gRNA
gctgtgagttgtgacgactc

SEQ ID NO: 30316 - DNA, 20 bp, Artificial Sequence
  MKO10030316_A_Map6
  gRNA
gtgcagacgagcgcgacacg

SEQ ID NO: 30317 - DNA, 20 bp, Artificial Sequence
  MKO10030317_A_Map6
  gRNA
ccttcctacgtgtgtcgcgc

SEQ ID NO: 30318 - DNA, 20 bp, Artificial Sequence
  MKO10030318_A_Map6
  gRNA
ccgtattcttctgcgatcca

SEQ ID NO: 30319 - DNA, 20 bp, Artificial Sequence
  MKO10030319_A_Map7d1
  gRNA
ccgctcttctcggcgctctt

SEQ ID NO: 30320 - DNA, 20 bp, Artificial Sequence
  MKO10030320_A_Map7d1
  gRNA
catggagagtggcccgcgtg

SEQ ID NO: 30321 - DNA, 20 bp, Artificial Sequence
  MKO10030321_A_Map7d1
  gRNA
ggcttacctgcgggtgcgcc

SEQ ID NO: 30322 - DNA, 20 bp, Artificial Sequence
  MKO10030322_A_Map7d2
  gRNA
accggcgcatcattgcttcc

SEQ ID NO: 30323 - DNA, 20 bp, Artificial Sequence
  MKO10030323_A_Map7d2
  gRNA
gactcaccatcacgtccgcc

SEQ ID NO: 30324 - DNA, 20 bp, Artificial Sequence
  MKO10030324_A_Map7d2
  gRNA
gtgtataccgttggtggact

SEQ ID NO: 30325 - DNA, 20 bp, Artificial Sequence
  MKO10030325_A_Map7
  gRNA
agaagtctaaccgctggtcc

SEQ ID NO: 30326 - DNA, 20 bp, Artificial Sequence
  MKO10030326_A_Map7
  gRNA
gctagccagagaacgccgag

SEQ ID NO: 30327 - DNA, 20 bp, Artificial Sequence
  MKO10030327_A_Map7
  gRNA
tcatcaacccgtagcacagg

SEQ ID NO: 30328 - DNA, 20 bp, Artificial Sequence
  MKO10030328_A_Map9
  gRNA
cgtcaaaagaagcacgtcct

SEQ ID NO: 30329 - DNA, 20 bp, Artificial Sequence
  MKO10030329_A_Map9
  gRNA
atctgcatcaagaccgctgc

SEQ ID NO: 30330 - DNA, 20 bp, Artificial Sequence
  MKO10030330_A_Map9
  gRNA
ctcggaaaacctcgatcttg

SEQ ID NO: 30331 - DNA, 20 bp, Artificial Sequence
  MKO10030331_A_Mapk10
  gRNA
acagggattcgataaacacg

SEQ ID NO: 30332 - DNA, 20 bp, Artificial Sequence
  MKO10030332_A_Mapk10
  gRNA
agaaccaaactcacgccaag

SEQ ID NO: 30333 - DNA, 20 bp, Artificial Sequence
  MKO10030333_A_Mapk10
  gRNA
gttctggtagcgcttaagaa

SEQ ID NO: 30334 - DNA, 20 bp, Artificial Sequence
  MKO10030334_A_Mapk11
  gRNA
tccaatcgctgatccacgcg

SEQ ID NO: 30335 - DNA, 20 bp, Artificial Sequence
  MKO10030335_A_Mapk11
  gRNA
ggtggatgatgcccgccgag

SEQ ID NO: 30336 - DNA, 20 bp, Artificial Sequence
  MKO10030336_A_Mapk11
  gRNA
gcagctcggcctacgacgcg

SEQ ID NO: 30337 - DNA, 20 bp, Artificial Sequence
  MKO10030337_A_Mapk12
  gRNA
tgtggatgacaccagccgca

SEQ ID NO: 30338 - DNA, 20 bp, Artificial Sequence
  MKO10030338_A_Mapk12
  gRNA
aagtcgtccagagactcatc

SEQ ID NO: 30339 - DNA, 20 bp, Artificial Sequence
  MKO10030339_A_Mapk12
  gRNA
tggccatcaagaagttgtac

SEQ ID NO: 30340 - DNA, 20 bp, Artificial Sequence
  MKO10030340_A_Mapk13
  gRNA
gcagctcggccatcgacaag

SEQ ID NO: 30341 - DNA, 20 bp, Artificial Sequence
  MKO10030341_A_Mapk13
  gRNA
tttcagtacatccactccgc

SEQ ID NO: 30342 - DNA, 20 bp, Artificial Sequence
  MKO10030342_A_Mapk13
  gRNA
ctcccctgtccgcttgtcga

SEQ ID NO: 30343 - DNA, 20 bp, Artificial Sequence
  MKO10030343_A_Mapk14
  gRNA
ggcacttcacgatgttgttc

SEQ ID NO: 30344 - DNA, 20 bp, Artificial Sequence
  MKO10030344_A_Mapk14
  gRNA
ggtagatgagaaactgaacg

SEQ ID NO: 30345 - DNA, 20 bp, Artificial Sequence
  MKO10030345_A_Mapk14
  gRNA
gttcacacccgcaaggtcac

SEQ ID NO: 30346 - DNA, 20 bp, Artificial Sequence
  MKO10030346_A_Mapk15
  gRNA
ggtaaaagatgcaccgcttg

SEQ ID NO: 30347 - DNA, 20 bp, Artificial Sequence
  MKO10030347_A_Mapk15
  gRNA
atcaagcaggcggatgatgt

SEQ ID NO: 30348 - DNA, 20 bp, Artificial Sequence
  MKO10030348_A_Mapk15
  gRNA
agccaaccttctgatcccga

SEQ ID NO: 30349 - DNA, 20 bp, Artificial Sequence
  MKO10030349_A_Mapk1ip1l
  gRNA
ggcgtggggtatgatcctgc

SEQ ID NO: 30350 - DNA, 20 bp, Artificial Sequence
  MKO10030350_A_Mapk1ip1l
  gRNA
aacatgccatatcgatctcc

SEQ ID NO: 30351 - DNA, 20 bp, Artificial Sequence
  MKO10030351_A_Mapk1ip1l
  gRNA
ctactcggggggagtccaga

SEQ ID NO: 30352 - DNA, 20 bp, Artificial Sequence
  MKO10030352_A_Mapk1ip1
  gRNA
cccttccgattcgtccaacc

SEQ ID NO: 30353 - DNA, 20 bp, Artificial Sequence
  MKO10030353_A_Mapk1ip1
  gRNA
gctctccgggttggacgaat

SEQ ID NO: 30354 - DNA, 20 bp, Artificial Sequence
  MKO10030354_A_Mapk1ip1
  gRNA
tcaggagtaggatactgcgc

SEQ ID NO: 30355 - DNA, 20 bp, Artificial Sequence
  MKO10030355_A_Mapk1
  gRNA
tggcagagatgctatccaac

SEQ ID NO: 30356 - DNA, 20 bp, Artificial Sequence
  MKO10030356_A_Mapk1
  gRNA
cagagtacgtagccacacgt

SEQ ID NO: 30357 - DNA, 20 bp, Artificial Sequence
  MKO10030357_A_Mapk1
  gRNA
ggtgcagaacgttagctgaa

SEQ ID NO: 30358 - DNA, 20 bp, Artificial Sequence
  MKO10030358_A_Mapk3
  gRNA
ccactctggtcttgcgcacg

SEQ ID NO: 30359 - DNA, 20 bp, Artificial Sequence
  MKO10030359_A_Mapk3
  gRNA
acctctgaccttaaggtcgc

SEQ ID NO: 30360 - DNA, 20 bp, Artificial Sequence
  MKO10030360_A_Mapk3
  gRNA
ccacgtgcgcaagaccagag

SEQ ID NO: 30361 - DNA, 20 bp, Artificial Sequence
  MKO10030361_A_Mapk4
  gRNA
gtgcagcgcgatccacgtgc

SEQ ID NO: 30362 - DNA, 20 bp, Artificial Sequence
  MKO10030362_A_Mapk4
  gRNA
gtccatggagcgcgccttcg

SEQ ID NO: 30363 - DNA, 20 bp, Artificial Sequence
  MKO10030363_A_Mapk4
  gRNA
gagcccgtactcgtgccccg

SEQ ID NO: 30364 - DNA, 20 bp, Artificial Sequence
  MKO10030364_A_Mapk6
  gRNA
caaggcgcagatcgcgctag

SEQ ID NO: 30365 - DNA, 20 bp, Artificial Sequence
  MKO10030365_A_Mapk6
  gRNA
ctgaatggtccccgcgatga

SEQ ID NO: 30366 - DNA, 20 bp, Artificial Sequence
  MKO10030366_A_Mapk6
  gRNA
gagcatctactccttcccga

SEQ ID NO: 30367 - DNA, 20 bp, Artificial Sequence
  MKO10030367_A_Mapk7
  gRNA
tgcgagtccaccgctctagc

SEQ ID NO: 30368 - DNA, 20 bp, Artificial Sequence
  MKO10030368_A_Mapk7
  gRNA
cgacaatatcatcgccatca

SEQ ID NO: 30369 - DNA, 20 bp, Artificial Sequence
  MKO10030369_A_Mapk7
  gRNA
tactcgctggtaccgtgccc

SEQ ID NO: 30370 - DNA, 20 bp, Artificial Sequence
  MKO10030370_A_Mapk8ip1
  gRNA
tgtcacctgccgcgtcgatc

SEQ ID NO: 30371 - DNA, 20 bp, Artificial Sequence
  MKO10030371_A_Mapk8ip1
  gRNA
gtggctgcacttcggcgaca

SEQ ID NO: 30372 - DNA, 20 bp, Artificial Sequence
  MKO10030372_A_Mapk8ip1
  gRNA
cggtggaagtgccgcggtcc

SEQ ID NO: 30373 - DNA, 20 bp, Artificial Sequence
  MKO10030373_A_Mapk8ip2
  gRNA
agtcgtccgtgatctcagac

SEQ ID NO: 30374 - DNA, 20 bp, Artificial Sequence
  MKO10030374_A_Mapk8ip2
  gRNA
cgagggtcggcgaagcagtc

SEQ ID NO: 30375 - DNA, 20 bp, Artificial Sequence
  MKO10030375_A_Mapk8ip2
  gRNA
gaggcgggagctacgttact

SEQ ID NO: 30376 - DNA, 20 bp, Artificial Sequence
  MKO10030376_A_Mapk8ip3
  gRNA
gtaccaagacgactactgct

SEQ ID NO: 30377 - DNA, 20 bp, Artificial Sequence
  MKO10030377_A_Mapk8ip3
  gRNA
cacgcaatacgagcgcgaga

SEQ ID NO: 30378 - DNA, 20 bp, Artificial Sequence
  MKO10030378_A_Mapk8ip3
  gRNA
ccgattctcgttcctccagt

SEQ ID NO: 30379 - DNA, 20 bp, Artificial Sequence
  MKO10030379_A_Mapk8
  gRNA
cccatgccgagaatgacctc

SEQ ID NO: 30380 - DNA, 20 bp, Artificial Sequence
  MKO10030380_A_Mapk8
  gRNA
tcgctactacagagcaccag

SEQ ID NO: 30381 - DNA, 20 bp, Artificial Sequence
  MKO10030381_A_Mapk8
  gRNA
ttgcaatcaagaagctcagc

SEQ ID NO: 30382 - DNA, 20 bp, Artificial Sequence
  MKO10030382_A_Mapk9
  gRNA
agccgatcggtttcagttgc

SEQ ID NO: 30383 - DNA, 20 bp, Artificial Sequence
  MKO10030383_A_Mapk9
  gRNA
taccagcaactgaaaccgat

SEQ ID NO: 30384 - DNA, 20 bp, Artificial Sequence
  MKO10030384_A_Mapk9
  gRNA
aatactcaggtacttggtaa

SEQ ID NO: 30385 - DNA, 20 bp, Artificial Sequence
  MKO10030385_A_Mapkap1
  gRNA
tcgaacaaagagcgactctt

SEQ ID NO: 30386 - DNA, 20 bp, Artificial Sequence
  MKO10030386_A_Mapkap1
  gRNA
gtccatattgtctgtacgcc

SEQ ID NO: 30387 - DNA, 20 bp, Artificial Sequence
  MKO10030387_A_Mapkap1
  gRNA
acctcatcgggctcatctgt

SEQ ID NO: 30388 - DNA, 20 bp, Artificial Sequence
  MKO10030388_A_Mapkapk2
  gRNA
gagcaatgttgatcgagtgc

SEQ ID NO: 30389 - DNA, 20 bp, Artificial Sequence
  MKO10030389_A_Mapkapk2
  gRNA
gtgttatacaccatactatg

SEQ ID NO: 30390 - DNA, 20 bp, Artificial Sequence
  MKO10030390_A_Mapkapk2
  gRNA
tccacctctctgcgcgcctt

SEQ ID NO: 30391 - DNA, 20 bp, Artificial Sequence
  MKO10030391_A_Mapkapk3
  gRNA
cccccacatcgtgcgcatcc

SEQ ID NO: 30392 - DNA, 20 bp, Artificial Sequence
  MKO10030392_A_Mapkapk3
  gRNA
gcatattctcatacacgtcc

SEQ ID NO: 30393 - DNA, 20 bp, Artificial Sequence
  MKO10030393_A_Mapkapk3
  gRNA
tgttccggctgtgcaagaac

SEQ ID NO: 30394 - DNA, 20 bp, Artificial Sequence
  MKO10030394_A_Mapkapk5
  gRNA
cctaactggaccactaattc

SEQ ID NO: 30395 - DNA, 20 bp, Artificial Sequence
  MKO10030395_A_Mapkapk5
  gRNA
aaactgggagccggaattag

SEQ ID NO: 30396 - DNA, 20 bp, Artificial Sequence
  MKO10030396_A_Mapkapk5
  gRNA
ggctcgactcttaattgtaa

SEQ ID NO: 30397 - DNA, 20 bp, Artificial Sequence
  MKO10030397_A_Mapkbp1
  gRNA
ggatgtggctgaacgtagcc

SEQ ID NO: 30398 - DNA, 20 bp, Artificial Sequence
  MKO10030398_A_Mapkbp1
  gRNA
cgttgacaatcatgtcatgc

SEQ ID NO: 30399 - DNA, 20 bp, Artificial Sequence
  MKO10030399_A_Mapkbp1
  gRNA
cttgcttgtgacccccgatc

SEQ ID NO: 30400 - DNA, 20 bp, Artificial Sequence
  MKO10030400_A_Mapre1
  gRNA
ggaatggtgcgaaagaatcc

SEQ ID NO: 30401 - DNA, 20 bp, Artificial Sequence
  MKO10030401_A_Mapre1
  gRNA
ttctctgcagataattcctg

SEQ ID NO: 30402 - DNA, 20 bp, Artificial Sequence
  MKO10030402_A_Mapre1
  gRNA
accattccggggccagcctt

SEQ ID NO: 30403 - DNA, 20 bp, Artificial Sequence
  MKO10030403_A_Mapre2
  gRNA
tcgaaacatacctgctgtgg

SEQ ID NO: 30404 - DNA, 20 bp, Artificial Sequence
  MKO10030404_A_Mapre2
  gRNA
gaattgcatcttgcccttgt

SEQ ID NO: 30405 - DNA, 20 bp, Artificial Sequence
  MKO10030405_A_Mapre2
  gRNA
atcaacattcatccgtttaa

SEQ ID NO: 30406 - DNA, 20 bp, Artificial Sequence
  MKO10030406_A_Mapre3
  gRNA
cacgttgctgagtcgtccag

SEQ ID NO: 30407 - DNA, 20 bp, Artificial Sequence
  MKO10030407_A_Mapre3
  gRNA
ctgaggggggattcttccgg

SEQ ID NO: 30408 - DNA, 20 bp, Artificial Sequence
  MKO10030408_A_Mapre3
  gRNA
cgagaacagccccgtcatct

SEQ ID NO: 30409 - DNA, 20 bp, Artificial Sequence
  MKO10030409_A_Mapt
  gRNA
cagtatggctgaccctcgcc

SEQ ID NO: 30410 - DNA, 20 bp, Artificial Sequence
  MKO10030410_A_Mapt
  gRNA
catcggagacaccccgaacc

SEQ ID NO: 30411 - DNA, 20 bp, Artificial Sequence
  MKO10030411_A_Mapt
  gRNA
tggcgttggacgtgcccttc

SEQ ID NO: 30412 - DNA, 20 bp, Artificial Sequence
  MKO10030412_A_Marcksl1
  gRNA
agcgggcgcttcccccgcga

SEQ ID NO: 30413 - DNA, 20 bp, Artificial Sequence
  MKO10030413_A_Marcksl1
  gRNA
cacctgtccgttggccttcg

SEQ ID NO: 30414 - DNA, 20 bp, Artificial Sequence
  MKO10030414_A_Marcksl1
  gRNA
gatgagcgcctgcagcgacg

SEQ ID NO: 30415 - DNA, 20 bp, Artificial Sequence
  MKO10030415_A_Marcks
  gRNA
ctcctccacgtcgtcgccca

SEQ ID NO: 30416 - DNA, 20 bp, Artificial Sequence
  MKO10030416_A_Marcks
  gRNA
gcgatgcgtcctccgccgca

SEQ ID NO: 30417 - DNA, 20 bp, Artificial Sequence
  MKO10030417_A_Marcks
  gRNA
gttctccaagaccgcagcga

SEQ ID NO: 30418 - DNA, 20 bp, Artificial Sequence
  MKO10030418_A_Marco
  gRNA
caatggatcactagctatcg

SEQ ID NO: 30419 - DNA, 20 bp, Artificial Sequence
  MKO10030419_A_Marco
  gRNA
agcctcgttcacctttaatc

SEQ ID NO: 30420 - DNA, 20 bp, Artificial Sequence
  MKO10030420_A_Marco
  gRNA
acacctggtacctagagcac

SEQ ID NO: 30421 - DNA, 20 bp, Artificial Sequence
  MKO10030421_A_Marf1
  gRNA
cccacttgggaaatcggaac

SEQ ID NO: 30422 - DNA, 20 bp, Artificial Sequence
  MKO10030422_A_Marf1
  gRNA
ggagcttcccacaacacgac

SEQ ID NO: 30423 - DNA, 20 bp, Artificial Sequence
  MKO10030423_A_Marf1
  gRNA
gcgtgtttgcgaaccttcgc

SEQ ID NO: 30424 - DNA, 20 bp, Artificial Sequence
  MKO10030424_A_Mark1
  gRNA
tctctcctagcatacgtctg

SEQ ID NO: 30425 - DNA, 20 bp, Artificial Sequence
  MKO10030425_A_Mark1
  gRNA
ttcatctgtcgctgacgtaa

SEQ ID NO: 30426 - DNA, 20 bp, Artificial Sequence
  MKO10030426_A_Mark1
  gRNA
gtttcatacctatgttagga

SEQ ID NO: 30427 - DNA, 20 bp, Artificial Sequence
  MKO10030427_A_Mark2
  gRNA
tgctcacctctttccccgtc

SEQ ID NO: 30428 - DNA, 20 bp, Artificial Sequence
  MKO10030428_A_Mark2
  gRNA
agccggtagttgccaatatg

SEQ ID NO: 30429 - DNA, 20 bp, Artificial Sequence
  MKO10030429_A_Mark2
  gRNA
gaagactctctaccttgtca

SEQ ID NO: 30430 - DNA, 20 bp, Artificial Sequence
  MKO10030430_A_Mark3
  gRNA
agtctgtagtttccgatgtg

SEQ ID NO: 30431 - DNA, 20 bp, Artificial Sequence
  MKO10030431_A_Mark3
  gRNA
acaccgagctccagagcgcc

SEQ ID NO: 30432 - DNA, 20 bp, Artificial Sequence
  MKO10030432_A_Mark3
  gRNA
agcgcaataagatgtccact

SEQ ID NO: 30433 - DNA, 20 bp, Artificial Sequence
  MKO10030433_A_Mark4
  gRNA
gacggagaagacgctatacc

SEQ ID NO: 30434 - DNA, 20 bp, Artificial Sequence
  MKO10030434_A_Mark4
  gRNA
ctcggcatatcctcacgggc

SEQ ID NO: 30435 - DNA, 20 bp, Artificial Sequence
  MKO10030435_A_Mark4
  gRNA
atgccgagccagcttgactt

SEQ ID NO: 30436 - DNA, 20 bp, Artificial Sequence
  MKO10030436_A_Mars2
  gRNA
tcgtgctcgccgagcgctag

SEQ ID NO: 30437 - DNA, 20 bp, Artificial Sequence
  MKO10030437_A_Mars2
  gRNA
gcggcgttcacgtagaagat

SEQ ID NO: 30438 - DNA, 20 bp, Artificial Sequence
  MKO10030438_A_Mars2
  gRNA
tcggcgagcacgaaccgtag

SEQ ID NO: 30439 - DNA, 20 bp, Artificial Sequence
  MKO10030439_A_Mars
  gRNA
gatgagactgttcgtgagcg

SEQ ID NO: 30440 - DNA, 20 bp, Artificial Sequence
  MKO10030440_A_Mars
  gRNA
accttaggccgggtaaggaa

SEQ ID NO: 30441 - DNA, 20 bp, Artificial Sequence
  MKO10030441_A_Mars
  gRNA
cggccgcgagggcccggggt

SEQ ID NO: 30442 - DNA, 20 bp, Artificial Sequence
  MKO10030442_A_Marveld1
  gRNA
tacctactctcggcactcta

SEQ ID NO: 30443 - DNA, 20 bp, Artificial Sequence
  MKO10030443_A_Marveld1
  gRNA
acgaagagcgcgaagtgcac

SEQ ID NO: 30444 - DNA, 20 bp, Artificial Sequence
  MKO10030444_A_Marveld1
  gRNA
gcgctggctcgtggtcaacg

SEQ ID NO: 30445 - DNA, 20 bp, Artificial Sequence
  MKO10030445_A_Marveld2
  gRNA
acccgtcgttgtcatcgaaa

SEQ ID NO: 30446 - DNA, 20 bp, Artificial Sequence
  MKO10030446_A_Marveld2
  gRNA
tgacgatcgagaacgctata

SEQ ID NO: 30447 - DNA, 20 bp, Artificial Sequence
  MKO10030447_A_Marveld2
  gRNA
cggactcacgccacgtagtc

SEQ ID NO: 30448 - DNA, 20 bp, Artificial Sequence
  MKO10030448_A_Marveld3
  gRNA
cccgcgaccgctcgacgtgg

SEQ ID NO: 30449 - DNA, 20 bp, Artificial Sequence
  MKO10030449_A_Marveld3
  gRNA
tggttgcagcgaacgggctt

SEQ ID NO: 30450 - DNA, 20 bp, Artificial Sequence
  MKO10030450_A_Marveld3
  gRNA
cagccacgccgccgtagatc

SEQ ID NO: 30451 - DNA, 20 bp, Artificial Sequence
  MKO10030451_A_Mas1
  gRNA
tatcggtcctctaccccata

SEQ ID NO: 30452 - DNA, 20 bp, Artificial Sequence
  MKO10030452_A_Mas1
  gRNA
acttgctgtactacgagtac

SEQ ID NO: 30453 - DNA, 20 bp, Artificial Sequence
  MKO10030453_A_Mas1
  gRNA
actcgtagtacagcaagtag

SEQ ID NO: 30454 - DNA, 20 bp, Artificial Sequence
  MKO10030454_A_Masp1
  gRNA
tatgggctgaaacctccggc

SEQ ID NO: 30455 - DNA, 20 bp, Artificial Sequence
  MKO10030455_A_Masp1
  gRNA
gggggtctgctcagtatcgg

SEQ ID NO: 30456 - DNA, 20 bp, Artificial Sequence
  MKO10030456_A_Masp1
  gRNA
caggaagtggttctttcgcc

SEQ ID NO: 30457 - DNA, 20 bp, Artificial Sequence
  MKO10030457_A_Masp2
  gRNA
agtagccgcccaagtagttg

SEQ ID NO: 30458 - DNA, 20 bp, Artificial Sequence
  MKO10030458_A_Masp2
  gRNA
gacaccaggcgcccgaatac

SEQ ID NO: 30459 - DNA, 20 bp, Artificial Sequence
  MKO10030459_A_Masp2
  gRNA
gagaacgtagcccgctctgc

SEQ ID NO: 30460 - DNA, 20 bp, Artificial Sequence
  MKO10030460_A_Mast1
  gRNA
caccgagagcatcaccgacg

SEQ ID NO: 30461 - DNA, 20 bp, Artificial Sequence
  MKO10030461_A_Mast1
  gRNA
gctggtacggtagttgatgc

SEQ ID NO: 30462 - DNA, 20 bp, Artificial Sequence
  MKO10030462_A_Mast1
  gRNA
gcagggcggatggacgccga

SEQ ID NO: 30463 - DNA, 20 bp, Artificial Sequence
  MKO10030463_A_Mast2
  gRNA
tggggcaactcggccgtccg

SEQ ID NO: 30464 - DNA, 20 bp, Artificial Sequence
  MKO10030464_A_Mast2
  gRNA
cgcagtctttgcccccgcgc

SEQ ID NO: 30465 - DNA, 20 bp, Artificial Sequence
  MKO10030465_A_Mast2
  gRNA
catcctgactaagttgtcgc

SEQ ID NO: 30466 - DNA, 20 bp, Artificial Sequence
  MKO10030466_A_Mast3
  gRNA
ggagctggtgtagacgctcc

SEQ ID NO: 30467 - DNA, 20 bp, Artificial Sequence
  MKO10030467_A_Mast3
  gRNA
cccagtcaagctcgtcctcc

SEQ ID NO: 30468 - DNA, 20 bp, Artificial Sequence
  MKO10030468_A_Mast3
  gRNA
ggacacttacctccgggcaa

SEQ ID NO: 30469 - DNA, 20 bp, Artificial Sequence
  MKO10030469_A_Mast4
  gRNA
ttggacgtctccgccgaagc

SEQ ID NO: 30470 - DNA, 20 bp, Artificial Sequence
  MKO10030470_A_Mast4
  gRNA
ctccgccacccatgccgttt

SEQ ID NO: 30471 - DNA, 20 bp, Artificial Sequence
  MKO10030471_A_Mast4
  gRNA
gcctgtcctgctaccgggtt

SEQ ID NO: 30472 - DNA, 20 bp, Artificial Sequence
  MKO10030472_A_Mastl
  gRNA
cagtttaatatgaccctcat

SEQ ID NO: 30473 - DNA, 20 bp, Artificial Sequence
  MKO10030473_A_Mastl
  gRNA
atgagagataagacttgtcc

SEQ ID NO: 30474 - DNA, 20 bp, Artificial Sequence
  MKO10030474_A_Mastl
  gRNA
tctattataggttgtcaaaa

SEQ ID NO: 30475 - DNA, 20 bp, Artificial Sequence
  MKO10030475_A_Mat1a
  gRNA
ccagcaccgcatcactaatc

SEQ ID NO: 30476 - DNA, 20 bp, Artificial Sequence
  MKO10030476_A_Mat1a
  gRNA
gagtttgtgagcgagcacga

SEQ ID NO: 30477 - DNA, 20 bp, Artificial Sequence
  MKO10030477_A_Mat1a
  gRNA
atagcagatctgaggcgctc

SEQ ID NO: 30478 - DNA, 20 bp, Artificial Sequence
  MKO10030478_A_Mat2a
  gRNA
gccgcaatggtacattgcct

SEQ ID NO: 30479 - DNA, 20 bp, Artificial Sequence
  MKO10030479_A_Mat2a
  gRNA
acacaagctaaatgccaaat

SEQ ID NO: 30480 - DNA, 20 bp, Artificial Sequence
  MKO10030480_A_Mat2a
  gRNA
ccacaagccactttagcatc

SEQ ID NO: 30481 - DNA, 20 bp, Artificial Sequence
  MKO10030481_A_Mat2b
  gRNA
caccagtaatgagaacccgc

SEQ ID NO: 30482 - DNA, 20 bp, Artificial Sequence
  MKO10030482_A_Mat2b
  gRNA
ggctacgtctttcacatgtg

SEQ ID NO: 30483 - DNA, 20 bp, Artificial Sequence
  MKO10030483_A_Mat2b
  gRNA
gcacaatgcactatgacatg

SEQ ID NO: 30484 - DNA, 20 bp, Artificial Sequence
  MKO10030484_A_Matk
  gRNA
agcctttcgaaagggtgaca

SEQ ID NO: 30485 - DNA, 20 bp, Artificial Sequence
  MKO10030485_A_Matk
  gRNA
gaaacacacggcctcatcga

SEQ ID NO: 30486 - DNA, 20 bp, Artificial Sequence
  MKO10030486_A_Matk
  gRNA
gcccatctcgatgcaaaaca

SEQ ID NO: 30487 - DNA, 20 bp, Artificial Sequence
  MKO10030487_A_Matn1
  gRNA
ccgtgggtcgtgtccggcag

SEQ ID NO: 30488 - DNA, 20 bp, Artificial Sequence
  MKO10030488_A_Matn1
  gRNA
cgctcttggatccgtcgatg

SEQ ID NO: 30489 - DNA, 20 bp, Artificial Sequence
  MKO10030489_A_Matn1
  gRNA
taatccacgtgctcgtcctg

SEQ ID NO: 30490 - DNA, 20 bp, Artificial Sequence
  MKO10030490_A_Matn2
  gRNA
gtccacctgaccgacaccga

SEQ ID NO: 30491 - DNA, 20 bp, Artificial Sequence
  MKO10030491_A_Matn2
  gRNA
cacttgcagatgtacgagcc

SEQ ID NO: 30492 - DNA, 20 bp, Artificial Sequence
  MKO10030492_A_Matn2
  gRNA
tgttaagagcaaatccctcg

SEQ ID NO: 30493 - DNA, 20 bp, Artificial Sequence
  MKO10030493_A_Matn3
  gRNA
ttgatagttctcgtagcgtc

SEQ ID NO: 30494 - DNA, 20 bp, Artificial Sequence
  MKO10030494_A_Matn3
  gRNA
ggaagagcacgtcttctacg

SEQ ID NO: 30495 - DNA, 20 bp, Artificial Sequence
  MKO10030495_A_Matn3
  gRNA
gctctggacaaatgcgcctc

SEQ ID NO: 30496 - DNA, 20 bp, Artificial Sequence
  MKO10030496_A_Matn4
  gRNA
ggccgaaggcgcgcgcccat

SEQ ID NO: 30497 - DNA, 20 bp, Artificial Sequence
  MKO10030497_A_Matn4
  gRNA
ggtctgaacgccacgcgcgt

SEQ ID NO: 30498 - DNA, 20 bp, Artificial Sequence
  MKO10030498_A_Matn4
  gRNA
acgacagaaatacgagtcca

SEQ ID NO: 30499 - DNA, 20 bp, Artificial Sequence
  MKO10030499_A_Matr3
  gRNA
ggcggcggtcccagaatccc

SEQ ID NO: 30500 - DNA, 20 bp, Artificial Sequence
  MKO10030500_A_Matr3
  gRNA
gagtggagtcaacatatcaa

SEQ ID NO: 30501 - DNA, 20 bp, Artificial Sequence
  MKO10030501_A_Matr3
  gRNA
gtagactgctgcagcatgaa

SEQ ID NO: 30502 - DNA, 20 bp, Artificial Sequence
  MKO10030502_A_Mau2
  gRNA
tctcacaacagacgccatac

SEQ ID NO: 30503 - DNA, 20 bp, Artificial Sequence
  MKO10030503_A_Mau2
  gRNA
catactcagcccccacgcct

SEQ ID NO: 30504 - DNA, 20 bp, Artificial Sequence
  MKO10030504_A_Mau2
  gRNA
gggggctgagtatgcccgag

SEQ ID NO: 30505 - DNA, 20 bp, Artificial Sequence
  MKO10030505_A_Mavs
  gRNA
gccaccagacatcctcgcga

SEQ ID NO: 30506 - DNA, 20 bp, Artificial Sequence
  MKO10030506_A_Mavs
  gRNA
gccgtcgcgaggatgtctgg

SEQ ID NO: 30507 - DNA, 20 bp, Artificial Sequence
  MKO10030507_A_Mavs
  gRNA
ttggtgtctctcgtaagcca

SEQ ID NO: 30508 - DNA, 20 bp, Artificial Sequence
  MKO10030508_A_Max
  gRNA
gagcgataacgatgacatcg

SEQ ID NO: 30509 - DNA, 20 bp, Artificial Sequence
  MKO10030509_A_Max
  gRNA
gatggtgccgcccttggcgt

SEQ ID NO: 30510 - DNA, 20 bp, Artificial Sequence
  MKO10030510_A_Max
  gRNA
cagcctctacaccaacgcca

SEQ ID NO: 30511 - DNA, 20 bp, Artificial Sequence
  MKO10030511_A_Maz
  gRNA
caggtggtagacgtcgcgga

SEQ ID NO: 30512 - DNA, 20 bp, Artificial Sequence
  MKO10030512_A_Maz
  gRNA
cgccgtcatgtgagcgcacg

SEQ ID NO: 30513 - DNA, 20 bp, Artificial Sequence
  MKO10030513_A_Maz
  gRNA
cgtgtcggactgtgtgcgct

SEQ ID NO: 30514 - DNA, 20 bp, Artificial Sequence
  MKO10030514_A_Mb21d1
  gRNA
aaacggctctcgtcttagat

SEQ ID NO: 30515 - DNA, 20 bp, Artificial Sequence
  MKO10030515_A_Mb21d1
  gRNA
tgctaacaacttatcgaagc

SEQ ID NO: 30516 - DNA, 20 bp, Artificial Sequence
  MKO10030516_A_Mb21d1
  gRNA
tctcgtacccaagaatgcaa

SEQ ID NO: 30517 - DNA, 20 bp, Artificial Sequence
  MKO10030517_A_Mb21d2
  gRNA
gttgtacgacatcgtccccg

SEQ ID NO: 30518 - DNA, 20 bp, Artificial Sequence
  MKO10030518_A_Mb21d2
  gRNA
acaatcgccgatcacatcaa

SEQ ID NO: 30519 - DNA, 20 bp, Artificial Sequence
  MKO10030519_A_Mb21d2
  gRNA
gtattcccgctggtcgtgcc

SEQ ID NO: 30520 - DNA, 20 bp, Artificial Sequence
  MKO10030520_A_Mbd1
  gRNA
acgttgtgcaaagattgtcg

SEQ ID NO: 30521 - DNA, 20 bp, Artificial Sequence
  MKO10030521_A_Mbd1
  gRNA
ggggccttatattccccctg

SEQ ID NO: 30522 - DNA, 20 bp, Artificial Sequence
  MKO10030522_A_Mbd1
  gRNA
ccgcgaacagagaatgttta

SEQ ID NO: 30523 - DNA, 20 bp, Artificial Sequence
  MKO10030523_A_Mbd2
  gRNA
gtggttgttcattcatccgc

SEQ ID NO: 30524 - DNA, 20 bp, Artificial Sequence
  MKO10030524_A_Mbd2
  gRNA
ctccttgcaggagtcggtcc

SEQ ID NO: 30525 - DNA, 20 bp, Artificial Sequence
  MKO10030525_A_Mbd2
  gRNA
agggtctcgtcattgctacc

SEQ ID NO: 30526 - DNA, 20 bp, Artificial Sequence
  MKO10030526_A_Mbd3l1
  gRNA
ctccaagcctacagcagtgc

SEQ ID NO: 30527 - DNA, 20 bp, Artificial Sequence
  MKO10030527_A_Mbd3l1
  gRNA
tacggatgtgatgtcaatgc

SEQ ID NO: 30528 - DNA, 20 bp, Artificial Sequence
  MKO10030528_A_Mbd3l1
  gRNA
tgtataactagacatcctca

SEQ ID NO: 30529 - DNA, 20 bp, Artificial Sequence
  MKO10030529_A_Mbd3l2
  gRNA
gattgtcccgaaaaagataa

SEQ ID NO: 30530 - DNA, 20 bp, Artificial Sequence
  MKO10030530_A_Mbd3l2
  gRNA
gctgacccttaacaccactt

SEQ ID NO: 30531 - DNA, 20 bp, Artificial Sequence
  MKO10030531_A_Mbd3l2
  gRNA
aagtactcactatcaaaggc

SEQ ID NO: 30532 - DNA, 20 bp, Artificial Sequence
  MKO10030532_A_Mbd3
  gRNA
gtcgctcttgaccttgttgc

SEQ ID NO: 30533 - DNA, 20 bp, Artificial Sequence
  MKO10030533_A_Mbd3
  gRNA
agcaccttcgacttccgcac

SEQ ID NO: 30534 - DNA, 20 bp, Artificial Sequence
  MKO10030534_A_Mbd3
  gRNA
aagaatcatagcgcacacgc

SEQ ID NO: 30535 - DNA, 20 bp, Artificial Sequence
  MKO10030535_A_Mbd4
  gRNA
ggtgggtgctgatcgcgagc

SEQ ID NO: 30536 - DNA, 20 bp, Artificial Sequence
  MKO10030536_A_Mbd4
  gRNA
tcgcgactatatttctcaat

SEQ ID NO: 30537 - DNA, 20 bp, Artificial Sequence
  MKO10030537_A_Mbd4
  gRNA
tgcgctcactgcttatcacc

SEQ ID NO: 30538 - DNA, 20 bp, Artificial Sequence
  MKO10030538_A_Mbd5
  gRNA
gccgcccgtgaaggtactac

SEQ ID NO: 30539 - DNA, 20 bp, Artificial Sequence
  MKO10030539_A_Mbd5
  gRNA
gctaaagcagcgtttacatt

SEQ ID NO: 30540 - DNA, 20 bp, Artificial Sequence
  MKO10030540_A_Mbd5
  gRNA
gggtgtcctgaactcggcat

SEQ ID NO: 30541 - DNA, 20 bp, Artificial Sequence
  MKO10030541_A_Mbd6
  gRNA
cgagtccgtctaggggtctg

SEQ ID NO: 30542 - DNA, 20 bp, Artificial Sequence
  MKO10030542_A_Mbd6
  gRNA
cccccaagcaataacccccc

SEQ ID NO: 30543 - DNA, 20 bp, Artificial Sequence
  MKO10030543_A_Mbd6
  gRNA
acactccagaccgcacttgc

SEQ ID NO: 30544 - DNA, 20 bp, Artificial Sequence
  MKO10030544_A_Mbip
  gRNA
cgtgttgttcaagtgcagta

SEQ ID NO: 30545 - DNA, 20 bp, Artificial Sequence
  MKO10030545_A_Mbip
  gRNA
aagagccatacatcccaccg

SEQ ID NO: 30546 - DNA, 20 bp, Artificial Sequence
  MKO10030546_A_Mbip
  gRNA
aaattacaatcgattggaac

SEQ ID NO: 30547 - DNA, 20 bp, Artificial Sequence
  MKO10030547_A_Mbl1
  gRNA
atcacggacgaggcgactga

SEQ ID NO: 30548 - DNA, 20 bp, Artificial Sequence
  MKO10030548_A_Mbl1
  gRNA
tcgcctcgtccgtgatgcct

SEQ ID NO: 30549 - DNA, 20 bp, Artificial Sequence
  MKO10030549_A_Mbl1
  gRNA
tcccaacaggtcaagggctc

SEQ ID NO: 30550 - DNA, 20 bp, Artificial Sequence
  MKO10030550_A_Mbl2
  gRNA
tatgcagagaccttaaccga

SEQ ID NO: 30551 - DNA, 20 bp, Artificial Sequence
  MKO10030551_A_Mbl2
  gRNA
ttccccatcgcccgtgttgt

SEQ ID NO: 30552 - DNA, 20 bp, Artificial Sequence
  MKO10030552_A_Mbl2
  gRNA
ccgtcacgtccatctttgcc

SEQ ID NO: 30553 - DNA, 20 bp, Artificial Sequence
  MKO10030553_A_Mblac1
  gRNA
gcgggacgtgagcgtcgtag

SEQ ID NO: 30554 - DNA, 20 bp, Artificial Sequence
  MKO10030554_A_Mblac1
  gRNA
ttggccccatccgcagacgg

SEQ ID NO: 30555 - DNA, 20 bp, Artificial Sequence
  MKO10030555_A_Mblac1
  gRNA
ggcgatgtgttcgagcgact

SEQ ID NO: 30556 - DNA, 20 bp, Artificial Sequence
  MKO10030556_A_Mblac2
  gRNA
caaagttgtccccgcgagcc

SEQ ID NO: 30557 - DNA, 20 bp, Artificial Sequence
  MKO10030557_A_Mblac2
  gRNA
caagaacggttctacgagtc

SEQ ID NO: 30558 - DNA, 20 bp, Artificial Sequence
  MKO10030558_A_Mblac2
  gRNA
agtggtgacgtcgtgtatga

SEQ ID NO: 30559 - DNA, 20 bp, Artificial Sequence
  MKO10030559_A_Mbnl1
  gRNA
gtgtgtcgagagtaccagcg

SEQ ID NO: 30560 - DNA, 20 bp, Artificial Sequence
  MKO10030560_A_Mbnl1
  gRNA
gccaccgcagtctttaacac

SEQ ID NO: 30561 - DNA, 20 bp, Artificial Sequence
  MKO10030561_A_Mbnl1
  gRNA
cttgccgactgcaccaatgt

SEQ ID NO: 30562 - DNA, 20 bp, Artificial Sequence
  MKO10030562_A_Mbnl2
  gRNA
cccgggcacagtttcctcgc

SEQ ID NO: 30563 - DNA, 20 bp, Artificial Sequence
  MKO10030563_A_Mbnl2
  gRNA
acataaaggggcgttgcatg

SEQ ID NO: 30564 - DNA, 20 bp, Artificial Sequence
  MKO10030564_A_Mbnl2
  gRNA
agcgtgagcacgttcctctc

SEQ ID NO: 30565 - DNA, 20 bp, Artificial Sequence
  MKO10030565_A_Mbnl3
  gRNA
tccagtctatctgtacgaat

SEQ ID NO: 30566 - DNA, 20 bp, Artificial Sequence
  MKO10030566_A_Mbnl3
  gRNA
gccaattcgtacagatagac

SEQ ID NO: 30567 - DNA, 20 bp, Artificial Sequence
  MKO10030567_A_Mbnl3
  gRNA
catccgtagggtgagcatag

SEQ ID NO: 30568 - DNA, 20 bp, Artificial Sequence
  MKO10030568_A_Mboat1
  gRNA
cactcagaagatcacgacgt

SEQ ID NO: 30569 - DNA, 20 bp, Artificial Sequence
  MKO10030569_A_Mboat1
  gRNA
gccaaggtgtgccggacctc

SEQ ID NO: 30570 - DNA, 20 bp, Artificial Sequence
  MKO10030570_A_Mboat1
  gRNA
ccctgaggtccggcacacct

SEQ ID NO: 30571 - DNA, 20 bp, Artificial Sequence
  MKO10030571_A_Mboat2
  gRNA
gacgccggtacctgatcgat

SEQ ID NO: 30572 - DNA, 20 bp, Artificial Sequence
  MKO10030572_A_Mboat2
  gRNA
cgtgcaactgcccatcgatc

SEQ ID NO: 30573 - DNA, 20 bp, Artificial Sequence
  MKO10030573_A_Mboat2
  gRNA
ttgccttgttagcagccgtt

SEQ ID NO: 30574 - DNA, 20 bp, Artificial Sequence
  MKO10030574_A_Mboat4
  gRNA
ggagggatacgtccccgacg

SEQ ID NO: 30575 - DNA, 20 bp, Artificial Sequence
  MKO10030575_A_Mboat4
  gRNA
cagcgccaaagcccgccgcg

SEQ ID NO: 30576 - DNA, 20 bp, Artificial Sequence
  MKO10030576_A_Mboat4
  gRNA
tcactacaccgaatactacc

SEQ ID NO: 30577 - DNA, 20 bp, Artificial Sequence
  MKO10030577_A_Mboat7
  gRNA
cgcggcaatgcaaccgcact

SEQ ID NO: 30578 - DNA, 20 bp, Artificial Sequence
  MKO10030578_A_Mboat7
  gRNA
gcatgcgcttctacgttgcc

SEQ ID NO: 30579 - DNA, 20 bp, Artificial Sequence
  MKO10030579_A_Mboat7
  gRNA
cagctatagctactgttacg

SEQ ID NO: 30580 - DNA, 20 bp, Artificial Sequence
  MKO10030580_A_Mbp
  gRNA
gggctctcagcgtctcgcca

SEQ ID NO: 30581 - DNA, 20 bp, Artificial Sequence
  MKO10030581_A_Mbp
  gRNA
accgctaaagaagcgcccga

SEQ ID NO: 30582 - DNA, 20 bp, Artificial Sequence
  MKO10030582_A_Mbp
  gRNA
tccatcgggcgcttctttag

SEQ ID NO: 30583 - DNA, 20 bp, Artificial Sequence
  MKO10030583_A_Mbtd1
  gRNA
gtgatatctcggaaaatgta

SEQ ID NO: 30584 - DNA, 20 bp, Artificial Sequence
  MKO10030584_A_Mbtd1
  gRNA
tgacgagtaacttcttgaac

SEQ ID NO: 30585 - DNA, 20 bp, Artificial Sequence
  MKO10030585_A_Mbtd1
  gRNA
gcagctaatttagcaactaa

SEQ ID NO: 30586 - DNA, 20 bp, Artificial Sequence
  MKO10030586_A_Mbtps1
  gRNA
gtttcattacagggcacgat

SEQ ID NO: 30587 - DNA, 20 bp, Artificial Sequence
  MKO10030587_A_Mbtps1
  gRNA
gctgagagccattcctcgcc

SEQ ID NO: 30588 - DNA, 20 bp, Artificial Sequence
  MKO10030588_A_Mbtps1
  gRNA
tcactggatgggttgttccg

SEQ ID NO: 30589 - DNA, 20 bp, Artificial Sequence
  MKO10030589_A_Mbtps2
  gRNA
catgtacaacaccactaatg

SEQ ID NO: 30590 - DNA, 20 bp, Artificial Sequence
  MKO10030590_A_Mbtps2
  gRNA
ttcgctgcagtcctcattag

SEQ ID NO: 30591 - DNA, 20 bp, Artificial Sequence
  MKO10030591_A_Mbtps2
  gRNA
ccgccgtccccaactgtaaa

SEQ ID NO: 30592 - DNA, 20 bp, Artificial Sequence
  MKO10030592_A_Mb
  gRNA
tgacattgccgccaagtaca

SEQ ID NO: 30593 - DNA, 20 bp, Artificial Sequence
  MKO10030593_A_Mb
  gRNA
tgtgcttggtggcgtgtgat

SEQ ID NO: 30594 - DNA, 20 bp, Artificial Sequence
  MKO10030594_A_Mb
  gRNA
cctacctccaggtacttgac

SEQ ID NO: 30595 - DNA, 20 bp, Artificial Sequence
  MKO10030595_A_Mc1r
  gRNA
cacgacagcccgtcgtgctc

SEQ ID NO: 30596 - DNA, 20 bp, Artificial Sequence
  MKO10030596_A_Mc1r
  gRNA
cgatgctgacacttaccatc

SEQ ID NO: 30597 - DNA, 20 bp, Artificial Sequence
  MKO10030597_A_Mc1r
  gRNA
ataacgcagcgcatagaaga

SEQ ID NO: 30598 - DNA, 20 bp, Artificial Sequence
  MKO10030598_A_Mc2r
  gRNA
gttatttcttgcggtgtcat

SEQ ID NO: 30599 - DNA, 20 bp, Artificial Sequence
  MKO10030599_A_Mc2r
  gRNA
gctccgaaaggcatatataa

SEQ ID NO: 30600 - DNA, 20 bp, Artificial Sequence
  MKO10030600_A_Mc2r
  gRNA
gggcagtctgtataagatct

SEQ ID NO: 30601 - DNA, 20 bp, Artificial Sequence
  MKO10030601_A_Mc3r
  gRNA
tcaccttgatcggggtcatc

SEQ ID NO: 30602 - DNA, 20 bp, Artificial Sequence
  MKO10030602_A_Mc3r
  gRNA
gacccagatgaccccgatca

SEQ ID NO: 30603 - DNA, 20 bp, Artificial Sequence
  MKO10030603_A_Mc3r
  gRNA
gcactgcgatgcgctggacg

SEQ ID NO: 30604 - DNA, 20 bp, Artificial Sequence
  MKO10030604_A_Mc4r
  gRNA
gcctaaccgtcatgatgtta

SEQ ID NO: 30605 - DNA, 20 bp, Artificial Sequence
  MKO10030605_A_Mc4r
  gRNA
ccgtatccgtactgtttaac

SEQ ID NO: 30606 - DNA, 20 bp, Artificial Sequence
  MKO10030606_A_Mc4r
  gRNA
gcccttccccagcgactcgc

SEQ ID NO: 30607 - DNA, 20 bp, Artificial Sequence
  MKO10030607_A_Mc5r
  gRNA
cttagccgtggccgacatgc

SEQ ID NO: 30608 - DNA, 20 bp, Artificial Sequence
  MKO10030608_A_Mc5r
  gRNA
aaggcgtttaatacccgcca

SEQ ID NO: 30609 - DNA, 20 bp, Artificial Sequence
  MKO10030609_A_Mc5r
  gRNA
ttctgctctgctccgcgcaa

SEQ ID NO: 30610 - DNA, 20 bp, Artificial Sequence
  MKO10030610_A_Mcam
  gRNA
gaagctcaacgtagtgatcc

SEQ ID NO: 30611 - DNA, 20 bp, Artificial Sequence
  MKO10030611_A_Mcam
  gRNA
acgacattggcttgaatagt

SEQ ID NO: 30612 - DNA, 20 bp, Artificial Sequence
  MKO10030612_A_Mcam
  gRNA
ccagagtagccaccgagtct

SEQ ID NO: 30613 - DNA, 20 bp, Artificial Sequence
  MKO10030613_A_Mcat
  gRNA
tcgtagagctgccgcacacg

SEQ ID NO: 30614 - DNA, 20 bp, Artificial Sequence
  MKO10030614_A_Mcat
  gRNA
caatgcactctatctacgag

SEQ ID NO: 30615 - DNA, 20 bp, Artificial Sequence
  MKO10030615_A_Mcat
  gRNA
agctctacgaggccgcgcac

SEQ ID NO: 30616 - DNA, 20 bp, Artificial Sequence
  MKO10030616_A_Mccc1
  gRNA
gcagacgaggcatattccat

SEQ ID NO: 30617 - DNA, 20 bp, Artificial Sequence
  MKO10030617_A_Mccc1
  gRNA
tccgaaagaaaaccgtagcc

SEQ ID NO: 30618 - DNA, 20 bp, Artificial Sequence
  MKO10030618_A_Mccc1
  gRNA
tcagcagagctacctcgcaa

SEQ ID NO: 30619 - DNA, 20 bp, Artificial Sequence
  MKO10030619_A_Mccc2
  gRNA
cttcctcgtcgccatataac

SEQ ID NO: 30620 - DNA, 20 bp, Artificial Sequence
  MKO10030620_A_Mccc2
  gRNA
cgggcgcggcacacatccag

SEQ ID NO: 30621 - DNA, 20 bp, Artificial Sequence
  MKO10030621_A_Mccc2
  gRNA
gacgaggaagtccccgccgg

SEQ ID NO: 30622 - DNA, 20 bp, Artificial Sequence
  MKO10030622_A_Mcc
  gRNA
gcgcacgacactccgctatg

SEQ ID NO: 30623 - DNA, 20 bp, Artificial Sequence
  MKO10030623_A_Mcc
  gRNA
ctctatgtgcctgtcaacgt

SEQ ID NO: 30624 - DNA, 20 bp, Artificial Sequence
  MKO10030624_A_Mcc
  gRNA
acctgatggtggtaccttgc

SEQ ID NO: 30625 - DNA, 20 bp, Artificial Sequence
  MKO10030625_A_Mcee
  gRNA
gctgggtcggctcaatcacg

SEQ ID NO: 30626 - DNA, 20 bp, Artificial Sequence
  MKO10030626_A_Mcee
  gRNA
tgtagcgcccgcagccaacg

SEQ ID NO: 30627 - DNA, 20 bp, Artificial Sequence
  MKO10030627_A_Mcee
  gRNA
aatgcatcacgtctgcatcg

SEQ ID NO: 30628 - DNA, 20 bp, Artificial Sequence
  MKO10030628_A_Mcf2l
  gRNA
aggtacttacggctatccgc

SEQ ID NO: 30629 - DNA, 20 bp, Artificial Sequence
  MKO10030629_A_Mcf2l
  gRNA
cacagagcgggacgatgtcc

SEQ ID NO: 30630 - DNA, 20 bp, Artificial Sequence
  MKO10030630_A_Mcf2l
  gRNA
agcccgtgggccgaagaaca

SEQ ID NO: 30631 - DNA, 20 bp, Artificial Sequence
  MKO10030631_A_Mcf2
  gRNA
cattggatttcgatttagcc

SEQ ID NO: 30632 - DNA, 20 bp, Artificial Sequence
  MKO10030632_A_Mcf2
  gRNA
tgcaaggtgccgcctaactc

SEQ ID NO: 30633 - DNA, 20 bp, Artificial Sequence
  MKO10030633_A_Mcf2
  gRNA
cgaaaggtatcacctgttga

SEQ ID NO: 30634 - DNA, 20 bp, Artificial Sequence
  MKO10030634_A_Mcfd2
  gRNA
ttcaaaatgcatgattacga

SEQ ID NO: 30635 - DNA, 20 bp, Artificial Sequence
  MKO10030635_A_Mcfd2
  gRNA
agctcatcctcgctcatgac

SEQ ID NO: 30636 - DNA, 20 bp, Artificial Sequence
  MKO10030636_A_Mcfd2
  gRNA
cgtgcactgtgctcttatcc

SEQ ID NO: 30637 - DNA, 20 bp, Artificial Sequence
  MKO10030637_A_Mchr1
  gRNA
actacagcgcatgacgtctt

SEQ ID NO: 30638 - DNA, 20 bp, Artificial Sequence
  MKO10030638_A_Mchr1
  gRNA
tgaccgtgcgaagctgcccc

SEQ ID NO: 30639 - DNA, 20 bp, Artificial Sequence
  MKO10030639_A_Mchr1
  gRNA
aatgccagcaacatctccga

SEQ ID NO: 30640 - DNA, 20 bp, Artificial Sequence
  MKO10030640_A_Mcidas
  gRNA
cgcttcggttccgagcagcg

SEQ ID NO: 30641 - DNA, 20 bp, Artificial Sequence
  MKO10030641_A_Mcidas
  gRNA
gacgcggacgaatcaccact

SEQ ID NO: 30642 - DNA, 20 bp, Artificial Sequence
  MKO10030642_A_Mcidas
  gRNA
gggtcctcgtacaccgccac

SEQ ID NO: 30643 - DNA, 20 bp, Artificial Sequence
  MKO10030643_A_Mcl1
  gRNA
cgacttatgcagccgccttt

SEQ ID NO: 30644 - DNA, 20 bp, Artificial Sequence
  MKO10030644_A_Mcl1
  gRNA
cacggccgggcgcttgccga

SEQ ID NO: 30645 - DNA, 20 bp, Artificial Sequence
  MKO10030645_A_Mcl1
  gRNA
ctcaggcatgctccggaaac

SEQ ID NO: 30646 - DNA, 20 bp, Artificial Sequence
  MKO10030646_A_Mcm10
  gRNA
gttaccttgcagctcctcgc

SEQ ID NO: 30647 - DNA, 20 bp, Artificial Sequence
  MKO10030647_A_Mcm10
  gRNA
ccgagcaacccgcttggctt

SEQ ID NO: 30648 - DNA, 20 bp, Artificial Sequence
  MKO10030648_A_Mcm10
  gRNA
tacacccgcacagccactac

SEQ ID NO: 30649 - DNA, 20 bp, Artificial Sequence
  MKO10030649_A_Mcm2
  gRNA
gctcgatgtctacgaggccg

SEQ ID NO: 30650 - DNA, 20 bp, Artificial Sequence
  MKO10030650_A_Mcm2
  gRNA
ccacgtagaacgcgccacag

SEQ ID NO: 30651 - DNA, 20 bp, Artificial Sequence
  MKO10030651_A_Mcm2
  gRNA
gttctacgtggcggcgctta

SEQ ID NO: 30652 - DNA, 20 bp, Artificial Sequence
  MKO10030652_A_Mcm3ap
  gRNA
tcgtaccttgccgcatgatg

SEQ ID NO: 30653 - DNA, 20 bp, Artificial Sequence
  MKO10030653_A_Mcm3ap
  gRNA
tgcgtctggtgaagacccgc

SEQ ID NO: 30654 - DNA, 20 bp, Artificial Sequence
  MKO10030654_A_Mcm3ap
  gRNA
ctgtgcgccagagtaagcga

SEQ ID NO: 30655 - DNA, 20 bp, Artificial Sequence
  MKO10030655_A_Mcm3
  gRNA
tcagcgtgaatgacctgcgc

SEQ ID NO: 30656 - DNA, 20 bp, Artificial Sequence
  MKO10030656_A_Mcm3
  gRNA
gtgaacactgcgaacgactt

SEQ ID NO: 30657 - DNA, 20 bp, Artificial Sequence
  MKO10030657_A_Mcm3
  gRNA
cctcctgaacaatgcgtttg

SEQ ID NO: 30658 - DNA, 20 bp, Artificial Sequence
  MKO10030658_A_Mcm4
  gRNA
ggttccttccactcgcgagc

SEQ ID NO: 30659 - DNA, 20 bp, Artificial Sequence
  MKO10030659_A_Mcm4
  gRNA
ttcgcctctacgtctccgat

SEQ ID NO: 30660 - DNA, 20 bp, Artificial Sequence
  MKO10030660_A_Mcm4
  gRNA
aaagcaggtcgtcacccaat

SEQ ID NO: 30661 - DNA, 20 bp, Artificial Sequence
  MKO10030661_A_Mcm5
  gRNA
atgccagcccgtcgagcatt

SEQ ID NO: 30662 - DNA, 20 bp, Artificial Sequence
  MKO10030662_A_Mcm5
  gRNA
accaatatcgccatgcgccc

SEQ ID NO: 30663 - DNA, 20 bp, Artificial Sequence
  MKO10030663_A_Mcm5
  gRNA
ttcagaatccgaatgctcga

SEQ ID NO: 30664 - DNA, 20 bp, Artificial Sequence
  MKO10030664_A_Mcm6
  gRNA
tcgtcctgagagaaacacgc

SEQ ID NO: 30665 - DNA, 20 bp, Artificial Sequence
  MKO10030665_A_Mcm6
  gRNA
ttcaaggctcgacacaggta

SEQ ID NO: 30666 - DNA, 20 bp, Artificial Sequence
  MKO10030666_A_Mcm6
  gRNA
gggctgctcacccgaatcag

SEQ ID NO: 30667 - DNA, 20 bp, Artificial Sequence
  MKO10030667_A_Mcm7
  gRNA
aatcttcgcatgagttcaga

SEQ ID NO: 30668 - DNA, 20 bp, Artificial Sequence
  MKO10030668_A_Mcm7
  gRNA
tttagtgagttgtatttccg

SEQ ID NO: 30669 - DNA, 20 bp, Artificial Sequence
  MKO10030669_A_Mcm7
  gRNA
ctcaggttcatctggctcat

SEQ ID NO: 30670 - DNA, 20 bp, Artificial Sequence
  MKO10030670_A_Mcm8
  gRNA
gtctaacggtggagagacaa

SEQ ID NO: 30671 - DNA, 20 bp, Artificial Sequence
  MKO10030671_A_Mcm8
  gRNA
cgccgaattacaagctcaag

SEQ ID NO: 30672 - DNA, 20 bp, Artificial Sequence
  MKO10030672_A_Mcm8
  gRNA
aatatccgagcaacttgcta

SEQ ID NO: 30673 - DNA, 20 bp, Artificial Sequence
  MKO10030673_A_Mcm9
  gRNA
ctcgagggggccgccttgcg

SEQ ID NO: 30674 - DNA, 20 bp, Artificial Sequence
  MKO10030674_A_Mcm9
  gRNA
gacagtgatccgaacgagtc

SEQ ID NO: 30675 - DNA, 20 bp, Artificial Sequence
  MKO10030675_A_Mcm9
  gRNA
acatgacgatggccgactga

SEQ ID NO: 30676 - DNA, 20 bp, Artificial Sequence
  MKO10030676_A_Mcmbp
  gRNA
aggggcacttcgttcagcga

SEQ ID NO: 30677 - DNA, 20 bp, Artificial Sequence
  MKO10030677_A_Mcmbp
  gRNA
caagtttcgttgcatgattc

SEQ ID NO: 30678 - DNA, 20 bp, Artificial Sequence
  MKO10030678_A_Mcmbp
  gRNA
aaaatggagttaatcctgac

SEQ ID NO: 30679 - DNA, 20 bp, Artificial Sequence
  MKO10030679_A_Mcmdc2
  gRNA
atctaattcaacaacgtcac

SEQ ID NO: 30680 - DNA, 20 bp, Artificial Sequence
  MKO10030680_A_Mcmdc2
  gRNA
gttaagactctctcattaat

SEQ ID NO: 30681 - DNA, 20 bp, Artificial Sequence
  MKO10030681_A_Mcmdc2
  gRNA
agcagagttatgctgtctat

SEQ ID NO: 30682 - DNA, 20 bp, Artificial Sequence
  MKO10030682_A_Mcoln1
  gRNA
tgccagcggtactaccaccg

SEQ ID NO: 30683 - DNA, 20 bp, Artificial Sequence
  MKO10030683_A_Mcoln1
  gRNA
cggtatgcctatgtccgtgg

SEQ ID NO: 30684 - DNA, 20 bp, Artificial Sequence
  MKO10030684_A_Mcoln1
  gRNA
gggctggtgaggtccccacc

SEQ ID NO: 30685 - DNA, 20 bp, Artificial Sequence
  MKO10030685_A_Mcoln2
  gRNA
ctttcctagcttgttcggtt

SEQ ID NO: 30686 - DNA, 20 bp, Artificial Sequence
  MKO10030686_A_Mcoln2
  gRNA
gatggcgtctctcgattctg

SEQ ID NO: 30687 - DNA, 20 bp, Artificial Sequence
  MKO10030687_A_Mcoln2
  gRNA
ggtgctcaccacggaacccg

SEQ ID NO: 30688 - DNA, 20 bp, Artificial Sequence
  MKO10030688_A_Mcoln3
  gRNA
ctcataagcgtgattgccca

SEQ ID NO: 30689 - DNA, 20 bp, Artificial Sequence
  MKO10030689_A_Mcoln3
  gRNA
agcgtaaagtcgtaacagtc

SEQ ID NO: 30690 - DNA, 20 bp, Artificial Sequence
  MKO10030690_A_Mcoln3
  gRNA
tctgcagacagttcgacacc

SEQ ID NO: 30691 - DNA, 20 bp, Artificial Sequence
  MKO10030691_A_Mcph1
  gRNA
tgttcatcggtattcactgc

SEQ ID NO: 30692 - DNA, 20 bp, Artificial Sequence
  MKO10030692_A_Mcph1
  gRNA
cgaagctggtttccgtcctc

SEQ ID NO: 30693 - DNA, 20 bp, Artificial Sequence
  MKO10030693_A_Mcph1
  gRNA
ccagcttcgccccggtcttc

SEQ ID NO: 30694 - DNA, 20 bp, Artificial Sequence
  MKO10030694_A_Mcpt1
  gRNA
ccctctgactttatcgaccc

SEQ ID NO: 30695 - DNA, 20 bp, Artificial Sequence
  MKO10030695_A_Mcpt1
  gRNA
ctgaagatcatcacggacag

SEQ ID NO: 30696 - DNA, 20 bp, Artificial Sequence
  MKO10030696_A_Mcpt1
  gRNA
agctgagttgactcctactg

SEQ ID NO: 30697 - DNA, 20 bp, Artificial Sequence
  MKO10030697_A_Mcpt2
  gRNA
tgattacgattatcaactcc

SEQ ID NO: 30698 - DNA, 20 bp, Artificial Sequence
  MKO10030698_A_Mcpt2
  gRNA
ctccttcgaaccgttcttag

SEQ ID NO: 30699 - DNA, 20 bp, Artificial Sequence
  MKO10030699_A_Mcpt2
  gRNA
gttgataatcgtaatcactg

SEQ ID NO: 30700 - DNA, 20 bp, Artificial Sequence
  MKO10030700_A_Mcpt4
  gRNA
gcattacgactataacctcc

SEQ ID NO: 30701 - DNA, 20 bp, Artificial Sequence
  MKO10030701_A_Mcpt4
  gRNA
accacattctcgcccttaca

SEQ ID NO: 30702 - DNA, 20 bp, Artificial Sequence
  MKO10030702_A_Mcpt4
  gRNA
cccggcttgataaagtcaga

SEQ ID NO: 30703 - DNA, 20 bp, Artificial Sequence
  MKO10030703_A_Mcpt8
  gRNA
gggacatgctgcgacacttc

SEQ ID NO: 30704 - DNA, 20 bp, Artificial Sequence
  MKO10030704_A_Mcpt8
  gRNA
agcaaatcagtctatcgctg

SEQ ID NO: 30705 - DNA, 20 bp, Artificial Sequence
  MKO10030705_A_Mcpt8
  gRNA
gaaattctggtgaatacccg

SEQ ID NO: 30706 - DNA, 20 bp, Artificial Sequence
  MKO10030706_A_Mcpt9
  gRNA
cacataacctttcttactga

SEQ ID NO: 30707 - DNA, 20 bp, Artificial Sequence
  MKO10030707_A_Mcpt9
  gRNA
gtgaataccttcagtaagaa

SEQ ID NO: 30708 - DNA, 20 bp, Artificial Sequence
  MKO10030708_A_Mcpt9
  gRNA
actgaaaatcgtgggggaaa

SEQ ID NO: 30709 - DNA, 20 bp, Artificial Sequence
  MKO10030709_A_Mcrs1
  gRNA
ccttccacaggttcatcaaa

SEQ ID NO: 30710 - DNA, 20 bp, Artificial Sequence
  MKO10030710_A_Mcrs1
  gRNA
cctcatcaatgctgtgctgc

SEQ ID NO: 30711 - DNA, 20 bp, Artificial Sequence
  MKO10030711_A_Mcrs1
  gRNA
cccactcacttggagatgac

SEQ ID NO: 30712 - DNA, 20 bp, Artificial Sequence
  MKO10030712_A_Mctp1
  gRNA
gtcagtcatccttacgccta

SEQ ID NO: 30713 - DNA, 20 bp, Artificial Sequence
  MKO10030713_A_Mctp1
  gRNA
tagctcaccttgatatatag

SEQ ID NO: 30714 - DNA, 20 bp, Artificial Sequence
  MKO10030714_A_Mctp1
  gRNA
ccgtatgtgaagtttaaaat

SEQ ID NO: 30715 - DNA, 20 bp, Artificial Sequence
  MKO10030715_A_Mctp2
  gRNA
aaggccgcaacctcgtggtc

SEQ ID NO: 30716 - DNA, 20 bp, Artificial Sequence
  MKO10030716_A_Mctp2
  gRNA
tatggtgaggaggtacgcga

SEQ ID NO: 30717 - DNA, 20 bp, Artificial Sequence
  MKO10030717_A_Mctp2
  gRNA
tgatcaaaagctccgtgtga

SEQ ID NO: 30718 - DNA, 20 bp, Artificial Sequence
  MKO10030718_A_Mcts1
  gRNA
accctgtgaaaattgtccga

SEQ ID NO: 30719 - DNA, 20 bp, Artificial Sequence
  MKO10030719_A_Mcts1
  gRNA
gctccgggagaagttaagcc

SEQ ID NO: 30720 - DNA, 20 bp, Artificial Sequence
  MKO10030720_A_Mcts1
  gRNA
tttaatacccttaataaccg

SEQ ID NO: 30721 - DNA, 20 bp, Artificial Sequence
  MKO10030721_A_Mcts2
  gRNA
tgctgcagtagataccatcg

SEQ ID NO: 30722 - DNA, 20 bp, Artificial Sequence
  MKO10030722_A_Mcts2
  gRNA
tcttcatgactccgacacac

SEQ ID NO: 30723 - DNA, 20 bp, Artificial Sequence
  MKO10030723_A_Mcts2
  gRNA
gttcaagaaatttgacgaga

SEQ ID NO: 30724 - DNA, 20 bp, Artificial Sequence
  MKO10030724_A_Mcur1
  gRNA
caatcttagataatacctgc

SEQ ID NO: 30725 - DNA, 20 bp, Artificial Sequence
  MKO10030725_A_Mcur1
  gRNA
ctactttgacacccacgctc

SEQ ID NO: 30726 - DNA, 20 bp, Artificial Sequence
  MKO10030726_A_Mcur1
  gRNA
ctaggaaatcgctctccagc

SEQ ID NO: 30727 - DNA, 20 bp, Artificial Sequence
  MKO10030727_A_Mcu
  gRNA
ttggcagcgctcgcgtcgag

SEQ ID NO: 30728 - DNA, 20 bp, Artificial Sequence
  MKO10030728_A_Mcu
  gRNA
gctgaacgacgtgaagaccc

SEQ ID NO: 30729 - DNA, 20 bp, Artificial Sequence
  MKO10030729_A_Mcu
  gRNA
gattaccggtgatatctgtg

SEQ ID NO: 30730 - DNA, 20 bp, Artificial Sequence
  MKO10030730_A_Mdc1
  gRNA
gctgtcgttccgttagcttc

SEQ ID NO: 30731 - DNA, 20 bp, Artificial Sequence
  MKO10030731_A_Mdc1
  gRNA
tgctgcaggtgacccgcttt

SEQ ID NO: 30732 - DNA, 20 bp, Artificial Sequence
  MKO10030732_A_Mdc1
  gRNA
ttacgatttgagtgccattg

SEQ ID NO: 30733 - DNA, 20 bp, Artificial Sequence
  MKO10030733_A_Mdfic
  gRNA
tgatgcgggaccagtccatt

SEQ ID NO: 30734 - DNA, 20 bp, Artificial Sequence
  MKO10030734_A_Mdfic
  gRNA
agcgagggcttcacccgcgc

SEQ ID NO: 30735 - DNA, 20 bp, Artificial Sequence
  MKO10030735_A_Mdfic
  gRNA
ttgttactcaccgtgggccg

SEQ ID NO: 30736 - DNA, 20 bp, Artificial Sequence
  MKO10030736_A_Mdfi
  gRNA
tgaggcgcgtcgcagcgaga

SEQ ID NO: 30737 - DNA, 20 bp, Artificial Sequence
  MKO10030737_A_Mdfi
  gRNA
gtcacagtccgcgcactcgc

SEQ ID NO: 30738 - DNA, 20 bp, Artificial Sequence
  MKO10030738_A_Mdfi
  gRNA
tctcgctgcgacgcgcctca

SEQ ID NO: 30739 - DNA, 20 bp, Artificial Sequence
  MKO10030739_A_Mdga1
  gRNA
gtgcggtggaccaaaactgc

SEQ ID NO: 30740 - DNA, 20 bp, Artificial Sequence
  MKO10030740_A_Mdga1
  gRNA
acccgcccgcccgctttatc

SEQ ID NO: 30741 - DNA, 20 bp, Artificial Sequence
  MKO10030741_A_Mdga1
  gRNA
cgagcgcatcgcacgcacgc

SEQ ID NO: 30742 - DNA, 20 bp, Artificial Sequence
  MKO10030742_A_Mdga2
  gRNA
ccgcgcgacgcgaaccgcgc

SEQ ID NO: 30743 - DNA, 20 bp, Artificial Sequence
  MKO10030743_A_Mdga2
  gRNA
ccagcgcggttcgcgtcgcg

SEQ ID NO: 30744 - DNA, 20 bp, Artificial Sequence
  MKO10030744_A_Mdga2
  gRNA
gagtgcacaatccgaactgt

SEQ ID NO: 30745 - DNA, 20 bp, Artificial Sequence
  MKO10030745_A_Mdh1b
  gRNA
cgcgagcaacattatcgcag

SEQ ID NO: 30746 - DNA, 20 bp, Artificial Sequence
  MKO10030746_A_Mdh1b
  gRNA
ataatgttgctcgcgatgtt

SEQ ID NO: 30747 - DNA, 20 bp, Artificial Sequence
  MKO10030747_A_Mdh1b
  gRNA
catcaactccgtcgtcatgt

SEQ ID NO: 30748 - DNA, 20 bp, Artificial Sequence
  MKO10030748_A_Mdh1
  gRNA
gatcgatggcgctgacttgg

SEQ ID NO: 30749 - DNA, 20 bp, Artificial Sequence
  MKO10030749_A_Mdh1
  gRNA
gtcagcgccatcgatcccca

SEQ ID NO: 30750 - DNA, 20 bp, Artificial Sequence
  MKO10030750_A_Mdh1
  gRNA
atacgccaagaaatcagtta

SEQ ID NO: 30751 - DNA, 20 bp, Artificial Sequence
  MKO10030751_A_Mdh2
  gRNA
tgtgtgagcgatatcgtaga

SEQ ID NO: 30752 - DNA, 20 bp, Artificial Sequence
  MKO10030752_A_Mdh2
  gRNA
ctggcaactgctccggtcca

SEQ ID NO: 30753 - DNA, 20 bp, Artificial Sequence
  MKO10030753_A_Mdh2
  gRNA
gttggcaatgatgcaaacca

SEQ ID NO: 30754 - DNA, 20 bp, Artificial Sequence
  MKO10030754_A_Mdk
  gRNA
ccgcggacgtgaccaccaag

SEQ ID NO: 30755 - DNA, 20 bp, Artificial Sequence
  MKO10030755_A_Mdk
  gRNA
gcaccttgcaatggacgcgc

SEQ ID NO: 30756 - DNA, 20 bp, Artificial Sequence
  MKO10030756_A_Mdk
  gRNA
cattgtaccgcgccttcttc

SEQ ID NO: 30757 - DNA, 20 bp, Artificial Sequence
  MKO10030757_A_Mdm1
  gRNA
cgacatgccggtgcgcttca

SEQ ID NO: 30758 - DNA, 20 bp, Artificial Sequence
  MKO10030758_A_Mdm1
  gRNA
agctccacatccgcgctaac

SEQ ID NO: 30759 - DNA, 20 bp, Artificial Sequence
  MKO10030759_A_Mdm1
  gRNA
ggcctcaccttgaagcgcac

SEQ ID NO: 30760 - DNA, 20 bp, Artificial Sequence
  MKO10030760_A_Mdm2
  gRNA
cgacacttacactatgaaag

SEQ ID NO: 30761 - DNA, 20 bp, Artificial Sequence
  MKO10030761_A_Mdm2
  gRNA
ttgaagttgttaaagtccgt

SEQ ID NO: 30762 - DNA, 20 bp, Artificial Sequence
  MKO10030762_A_Mdm2
  gRNA
acctcttagtcataatatac

SEQ ID NO: 30763 - DNA, 20 bp, Artificial Sequence
  MKO10030763_A_Mdm4
  gRNA
tccaagtcaagaccgactga

SEQ ID NO: 30764 - DNA, 20 bp, Artificial Sequence
  MKO10030764_A_Mdm4
  gRNA
acatcagcttctattaacac

SEQ ID NO: 30765 - DNA, 20 bp, Artificial Sequence
  MKO10030765_A_Mdm4
  gRNA
atgtaggtaatgcactatct

SEQ ID NO: 30766 - DNA, 20 bp, Artificial Sequence
  MKO10030766_A_Mdn1
  gRNA
acgtaggcggatgaagctcc

SEQ ID NO: 30767 - DNA, 20 bp, Artificial Sequence
  MKO10030767_A_Mdn1
  gRNA
tgagtcgttcatgcagatcg

SEQ ID NO: 30768 - DNA, 20 bp, Artificial Sequence
  MKO10030768_A_Mdn1
  gRNA
aggtgtccttaaaatagcgc

SEQ ID NO: 30769 - DNA, 20 bp, Artificial Sequence
  MKO10030769_A_Mdp1
  gRNA
gcgatggaactgtacgagac

SEQ ID NO: 30770 - DNA, 20 bp, Artificial Sequence
  MKO10030770_A_Mdp1
  gRNA
ctcttgcagattacacgctc

SEQ ID NO: 30771 - DNA, 20 bp, Artificial Sequence
  MKO10030771_A_Mdp1
  gRNA
cacaggttgcaccacaagac

SEQ ID NO: 30772 - DNA, 20 bp, Artificial Sequence
  MKO10030772_A_Me1
  gRNA
cttaccttgacgacatcctc

SEQ ID NO: 30773 - DNA, 20 bp, Artificial Sequence
  MKO10030773_A_Me1
  gRNA
aagtgccataccttggcttc

SEQ ID NO: 30774 - DNA, 20 bp, Artificial Sequence
  MKO10030774_A_Me1
  gRNA
taatgggatgggcatccctg

SEQ ID NO: 30775 - DNA, 20 bp, Artificial Sequence
  MKO10030775_A_Me2
  gRNA
cctgcccgtgtgcatcgacg

SEQ ID NO: 30776 - DNA, 20 bp, Artificial Sequence
  MKO10030776_A_Me2
  gRNA
agtgcccacgtcgatgcaca

SEQ ID NO: 30777 - DNA, 20 bp, Artificial Sequence
  MKO10030777_A_Me2
  gRNA
attgtgtacacgccaacagt

SEQ ID NO: 30778 - DNA, 20 bp, Artificial Sequence
  MKO10030778_A_Me3
  gRNA
taggtactcaccggggtcgg

SEQ ID NO: 30779 - DNA, 20 bp, Artificial Sequence
  MKO10030779_A_Me3
  gRNA
gcctcaccttccgccgaccc

SEQ ID NO: 30780 - DNA, 20 bp, Artificial Sequence
  MKO10030780_A_Me3
  gRNA
tgagaatcagcagagcgacc

SEQ ID NO: 30781 - DNA, 20 bp, Artificial Sequence
  MKO10030781_A_Mea1
  gRNA
ggctggtacgagtagcctgc

SEQ ID NO: 30782 - DNA, 20 bp, Artificial Sequence
  MKO10030782_A_Mea1
  gRNA
accatacctggatccgatct

SEQ ID NO: 30783 - DNA, 20 bp, Artificial Sequence
  MKO10030783_A_Mea1
  gRNA
tgcctgggctcgggagatct

SEQ ID NO: 30784 - DNA, 20 bp, Artificial Sequence
  MKO10030784_A_Meaf6
  gRNA
tacagcagccgacgtgactg

SEQ ID NO: 30785 - DNA, 20 bp, Artificial Sequence
  MKO10030785_A_Meaf6
  gRNA
gcctgcgcaggaggaccccg

SEQ ID NO: 30786 - DNA, 20 bp, Artificial Sequence
  MKO10030786_A_Meaf6
  gRNA
acggagccgtctaggtcctc

SEQ ID NO: 30787 - DNA, 20 bp, Artificial Sequence
  MKO10030787_A_Mecom
  gRNA
gagatcgaatgtgtcgctga

SEQ ID NO: 30788 - DNA, 20 bp, Artificial Sequence
  MKO10030788_A_Mecom
  gRNA
tcaggcccctcgaagccttc

SEQ ID NO: 30789 - DNA, 20 bp, Artificial Sequence
  MKO10030789_A_Mecom
  gRNA
agaacggcagcaccgctgtg

SEQ ID NO: 30790 - DNA, 20 bp, Artificial Sequence
  MKO10030790_A_Mecp2
  gRNA
acgggcgtccggctgtccac

SEQ ID NO: 30791 - DNA, 20 bp, Artificial Sequence
  MKO10030791_A_Mecp2
  gRNA
gataatggagcgccgctgtt

SEQ ID NO: 30792 - DNA, 20 bp, Artificial Sequence
  MKO10030792_A_Mecp2
  gRNA
agctttcgtgtccaaccttc

SEQ ID NO: 30793 - DNA, 20 bp, Artificial Sequence
  MKO10030793_A_Mecr
  gRNA
gaacaccgcctcagtccgcc

SEQ ID NO: 30794 - DNA, 20 bp, Artificial Sequence
  MKO10030794_A_Mecr
  gRNA
ttacccaaacccgcatttgc

SEQ ID NO: 30795 - DNA, 20 bp, Artificial Sequence
  MKO10030795_A_Mecr
  gRNA
ccatcaacgttgtccgagac

SEQ ID NO: 30796 - DNA, 20 bp, Artificial Sequence
  MKO10030796_A_Med10
  gRNA
ccaagtatcggagcattcgg

SEQ ID NO: 30797 - DNA, 20 bp, Artificial Sequence
  MKO10030797_A_Med10
  gRNA
cccccgaatgctccgatact

SEQ ID NO: 30798 - DNA, 20 bp, Artificial Sequence
  MKO10030798_A_Med10
  gRNA
acagcagctgcacgatatca

SEQ ID NO: 30799 - DNA, 20 bp, Artificial Sequence
  MKO10030799_A_Med11
  gRNA
gaacgagcggctgcgcgccc

SEQ ID NO: 30800 - DNA, 20 bp, Artificial Sequence
  MKO10030800_A_Med11
  gRNA
tttcacgctcgatatcctcc

SEQ ID NO: 30801 - DNA, 20 bp, Artificial Sequence
  MKO10030801_A_Med11
  gRNA
cctggcaggaacggcgatcc

SEQ ID NO: 30802 - DNA, 20 bp, Artificial Sequence
  MKO10030802_A_Med12l
  gRNA
tatgaattgcactctgcgat

SEQ ID NO: 30803 - DNA, 20 bp, Artificial Sequence
  MKO10030803_A_Med12l
  gRNA
agccacgttgctcgaaccat

SEQ ID NO: 30804 - DNA, 20 bp, Artificial Sequence
  MKO10030804_A_Med12l
  gRNA
cgcagagtgcaattcatagt

SEQ ID NO: 30805 - DNA, 20 bp, Artificial Sequence
  MKO10030805_A_Med12
  gRNA
ctcagagtgctattaacacc

SEQ ID NO: 30806 - DNA, 20 bp, Artificial Sequence
  MKO10030806_A_Med12
  gRNA
aggattgaagttgacgttct

SEQ ID NO: 30807 - DNA, 20 bp, Artificial Sequence
  MKO10030807_A_Med12
  gRNA
gctcgccttgttcatgtttc

SEQ ID NO: 30808 - DNA, 20 bp, Artificial Sequence
  MKO10030808_A_Med13l
  gRNA
gccgatctatttgatcaacg

SEQ ID NO: 30809 - DNA, 20 bp, Artificial Sequence
  MKO10030809_A_Med13l
  gRNA
gagcagcgtcctacattcat

SEQ ID NO: 30810 - DNA, 20 bp, Artificial Sequence
  MKO10030810_A_Med13l
  gRNA
gacagcggatgaaacttaac

SEQ ID NO: 30811 - DNA, 20 bp, Artificial Sequence
  MKO10030811_A_Med13
  gRNA
ttccttcaggccgacttgac

SEQ ID NO: 30812 - DNA, 20 bp, Artificial Sequence
  MKO10030812_A_Med13
  gRNA
agagtgccatttagtccaaa

SEQ ID NO: 30813 - DNA, 20 bp, Artificial Sequence
  MKO10030813_A_Med13
  gRNA
aaccgaaactttgtacgaat

SEQ ID NO: 30814 - DNA, 20 bp, Artificial Sequence
  MKO10030814_A_Med14
  gRNA
ttctactttgccagcgtcat

SEQ ID NO: 30815 - DNA, 20 bp, Artificial Sequence
  MKO10030815_A_Med14
  gRNA
gaacgaagagttgacgtgtc

SEQ ID NO: 30816 - DNA, 20 bp, Artificial Sequence
  MKO10030816_A_Med14
  gRNA
gccattgatgtactgactac

SEQ ID NO: 30817 - DNA, 20 bp, Artificial Sequence
  MKO10030817_A_Med15
  gRNA
actggcgtagcgccgccttt

SEQ ID NO: 30818 - DNA, 20 bp, Artificial Sequence
  MKO10030818_A_Med15
  gRNA
acttacgaatatctcggaaa

SEQ ID NO: 30819 - DNA, 20 bp, Artificial Sequence
  MKO10030819_A_Med15
  gRNA
gctgaccagcttctgccgaa

SEQ ID NO: 30820 - DNA, 20 bp, Artificial Sequence
  MKO10030820_A_Med16
  gRNA
cccgggcgttggggcgagtg

SEQ ID NO: 30821 - DNA, 20 bp, Artificial Sequence
  MKO10030821_A_Med16
  gRNA
tccacactcgccccaacgcc

SEQ ID NO: 30822 - DNA, 20 bp, Artificial Sequence
  MKO10030822_A_Med16
  gRNA
gtactgcccgtcgctgcccc

SEQ ID NO: 30823 - DNA, 20 bp, Artificial Sequence
  MKO10030823_A_Med17
  gRNA
gctcagaattgaagtctcgc

SEQ ID NO: 30824 - DNA, 20 bp, Artificial Sequence
  MKO10030824_A_Med17
  gRNA
atgatgtcctcagtattgtc

SEQ ID NO: 30825 - DNA, 20 bp, Artificial Sequence
  MKO10030825_A_Med17
  gRNA
gactctggaccccgtctctc

SEQ ID NO: 30826 - DNA, 20 bp, Artificial Sequence
  MKO10030826_A_Med18
  gRNA
ttaagtgttgtcgccccggc

SEQ ID NO: 30827 - DNA, 20 bp, Artificial Sequence
  MKO10030827_A_Med18
  gRNA
gaccttccttgatcacgaga

SEQ ID NO: 30828 - DNA, 20 bp, Artificial Sequence
  MKO10030828_A_Med18
  gRNA
gtcaccatgatgcccgtcac

SEQ ID NO: 30829 - DNA, 20 bp, Artificial Sequence
  MKO10030829_A_Med19
  gRNA
gcttctcaatgagggatcgg

SEQ ID NO: 30830 - DNA, 20 bp, Artificial Sequence
  MKO10030830_A_Med19
  gRNA
cgacatagtccagaccaccc

SEQ ID NO: 30831 - DNA, 20 bp, Artificial Sequence
  MKO10030831_A_Med19
  gRNA
tgcatcagacgacactgctc

SEQ ID NO: 30832 - DNA, 20 bp, Artificial Sequence
  MKO10030832_A_Med1
  gRNA
taagcttgtgcgtcaagtaa

SEQ ID NO: 30833 - DNA, 20 bp, Artificial Sequence
  MKO10030833_A_Med1
  gRNA
gccagcaatgactgatcgtt

SEQ ID NO: 30834 - DNA, 20 bp, Artificial Sequence
  MKO10030834_A_Med1
  gRNA
tccaaacgatcagtcattgc

SEQ ID NO: 30835 - DNA, 20 bp, Artificial Sequence
  MKO10030835_A_Med20
  gRNA
aatactggtagcgagtgccc

SEQ ID NO: 30836 - DNA, 20 bp, Artificial Sequence
  MKO10030836_A_Med20
  gRNA
ccttcgctatgggagtgacg

SEQ ID NO: 30837 - DNA, 20 bp, Artificial Sequence
  MKO10030837_A_Med20
  gRNA
caccataagcacatcgaagt

SEQ ID NO: 30838 - DNA, 20 bp, Artificial Sequence
  MKO10030838_A_Med21
  gRNA
agcagttgatgctatgagtc

SEQ ID NO: 30839 - DNA, 20 bp, Artificial Sequence
  MKO10030839_A_Med21
  gRNA
tcacgaagctgctacatgtc

SEQ ID NO: 30840 - DNA, 20 bp, Artificial Sequence
  MKO10030840_A_Med21
  gRNA
gacctcaccttctgtaggat

SEQ ID NO: 30841 - DNA, 20 bp, Artificial Sequence
  MKO10030841_A_Med22
  gRNA
caatggagacctcgtcccgc

SEQ ID NO: 30842 - DNA, 20 bp, Artificial Sequence
  MKO10030842_A_Med22
  gRNA
aggaggagtactactcgtcc

SEQ ID NO: 30843 - DNA, 20 bp, Artificial Sequence
  MKO10030843_A_Med22
  gRNA
catcagcagaatctgcgtcg

SEQ ID NO: 30844 - DNA, 20 bp, Artificial Sequence
  MKO10030844_A_Med23
  gRNA
ccggggctcgatggtaccga

SEQ ID NO: 30845 - DNA, 20 bp, Artificial Sequence
  MKO10030845_A_Med23
  gRNA
aatgtttatggatacccccg

SEQ ID NO: 30846 - DNA, 20 bp, Artificial Sequence
  MKO10030846_A_Med23
  gRNA
ccattgctaagcagtcatag

SEQ ID NO: 30847 - DNA, 20 bp, Artificial Sequence
  MKO10030847_A_Med24
  gRNA
acatgttctgtgaccgactc

SEQ ID NO: 30848 - DNA, 20 bp, Artificial Sequence
  MKO10030848_A_Med24
  gRNA
tttccttgcagaagcgctcc

SEQ ID NO: 30849 - DNA, 20 bp, Artificial Sequence
  MKO10030849_A_Med24
  gRNA
tagttgccacggcaaagcag

SEQ ID NO: 30850 - DNA, 20 bp, Artificial Sequence
  MKO10030850_A_Med25
  gRNA
cccccaaagtccgtctctgc

SEQ ID NO: 30851 - DNA, 20 bp, Artificial Sequence
  MKO10030851_A_Med25
  gRNA
cgtctttgcaggtacttcaa

SEQ ID NO: 30852 - DNA, 20 bp, Artificial Sequence
  MKO10030852_A_Med25
  gRNA
aggtgcgtgacattgtacat

SEQ ID NO: 30853 - DNA, 20 bp, Artificial Sequence
  MKO10030853_A_Med26
  gRNA
ggatgtcgttgcgattcttc

SEQ ID NO: 30854 - DNA, 20 bp, Artificial Sequence
  MKO10030854_A_Med26
  gRNA
agattcccgtgaacgccgtg

SEQ ID NO: 30855 - DNA, 20 bp, Artificial Sequence
  MKO10030855_A_Med26
  gRNA
gttggaagtgatctccagtc

SEQ ID NO: 30856 - DNA, 20 bp, Artificial Sequence
  MKO10030856_A_Med27
  gRNA
caatcgtgcgatcgatgaac

SEQ ID NO: 30857 - DNA, 20 bp, Artificial Sequence
  MKO10030857_A_Med27
  gRNA
gtctgccaagcggagaccga

SEQ ID NO: 30858 - DNA, 20 bp, Artificial Sequence
  MKO10030858_A_Med27
  gRNA
catcgatcgcacgattgtga

SEQ ID NO: 30859 - DNA, 20 bp, Artificial Sequence
  MKO10030859_A_Med28
  gRNA
actgcagcggaaggatgcgc

SEQ ID NO: 30860 - DNA, 20 bp, Artificial Sequence
  MKO10030860_A_Med28
  gRNA
ctgcttgcagaagcgacgcc

SEQ ID NO: 30861 - DNA, 20 bp, Artificial Sequence
  MKO10030861_A_Med28
  gRNA
ttatgtcaatgggactgatc

SEQ ID NO: 30862 - DNA, 20 bp, Artificial Sequence
  MKO10030862_A_Med29
  gRNA
acacttgtcaaagcgctgca

SEQ ID NO: 30863 - DNA, 20 bp, Artificial Sequence
  MKO10030863_A_Med29
  gRNA
cccggacccccggcagaacc

SEQ ID NO: 30864 - DNA, 20 bp, Artificial Sequence
  MKO10030864_A_Med29
  gRNA
gtgtcaggcccgggttctgc

SEQ ID NO: 30865 - DNA, 20 bp, Artificial Sequence
  MKO10030865_A_Med30
  gRNA
gggcccggacgccatgcccg

SEQ ID NO: 30866 - DNA, 20 bp, Artificial Sequence
  MKO10030866_A_Med30
  gRNA
cgcccacgggcatggcgtcc

SEQ ID NO: 30867 - DNA, 20 bp, Artificial Sequence
  MKO10030867_A_Med30
  gRNA
atggctcaaagaacgacgac

SEQ ID NO: 30868 - DNA, 20 bp, Artificial Sequence
  MKO10030868_A_Med31
  gRNA
ccagtatgagcactttcgca

SEQ ID NO: 30869 - DNA, 20 bp, Artificial Sequence
  MKO10030869_A_Med31
  gRNA
ccttgcgaaagtgctcatac

SEQ ID NO: 30870 - DNA, 20 bp, Artificial Sequence
  MKO10030870_A_Med31
  gRNA
tatggccgcggccgtcgcta

SEQ ID NO: 30871 - DNA, 20 bp, Artificial Sequence
  MKO10030871_A_Med4
  gRNA
aaaagttcaccacgaaatgc

SEQ ID NO: 30872 - DNA, 20 bp, Artificial Sequence
  MKO10030872_A_Med4
  gRNA
aaatcattaaatatgcgcac

SEQ ID NO: 30873 - DNA, 20 bp, Artificial Sequence
  MKO10030873_A_Med4
  gRNA
ttaggcaacagctgtttacc

SEQ ID NO: 30874 - DNA, 20 bp, Artificial Sequence
  MKO10030874_A_Med6
  gRNA
catcgctggagtcatctatc

SEQ ID NO: 30875 - DNA, 20 bp, Artificial Sequence
  MKO10030875_A_Med6
  gRNA
tgtcgataccatccttccaa

SEQ ID NO: 30876 - DNA, 20 bp, Artificial Sequence
  MKO10030876_A_Med6
  gRNA
tacaagcttactgcagtgca

SEQ ID NO: 30877 - DNA, 20 bp, Artificial Sequence
  MKO10030877_A_Med7
  gRNA
gagagttaaagctgagccga

SEQ ID NO: 30878 - DNA, 20 bp, Artificial Sequence
  MKO10030878_A_Med7
  gRNA
gcctccaatgcagtacatca

SEQ ID NO: 30879 - DNA, 20 bp, Artificial Sequence
  MKO10030879_A_Med7
  gRNA
gatgataacagcaattgtcc

SEQ ID NO: 30880 - DNA, 20 bp, Artificial Sequence
  MKO10030880_A_Med8
  gRNA
agaccgagacgaagacctca

SEQ ID NO: 30881 - DNA, 20 bp, Artificial Sequence
  MKO10030881_A_Med8
  gRNA
gacgccactgttccgaaacc

SEQ ID NO: 30882 - DNA, 20 bp, Artificial Sequence
  MKO10030882_A_Med8
  gRNA
acgacctcatggctgaaaac

SEQ ID NO: 30883 - DNA, 20 bp, Artificial Sequence
  MKO10030883_A_Med9
  gRNA
attctcctccttcgcgccag

SEQ ID NO: 30884 - DNA, 20 bp, Artificial Sequence
  MKO10030884_A_Med9
  gRNA
ccgcggcctcagtcccccgc

SEQ ID NO: 30885 - DNA, 20 bp, Artificial Sequence
  MKO10030885_A_Med9
  gRNA
aagctcatcggcaccatgcc

SEQ ID NO: 30886 - DNA, 20 bp, Artificial Sequence
  MKO10030886_A_Medag
  gRNA
tgagtgaacctctaatacga

SEQ ID NO: 30887 - DNA, 20 bp, Artificial Sequence
  MKO10030887_A_Medag
  gRNA
gagcttcacctacgaattca

SEQ ID NO: 30888 - DNA, 20 bp, Artificial Sequence
  MKO10030888_A_Medag
  gRNA
tattaacgtgcagaccaaga

SEQ ID NO: 30889 - DNA, 20 bp, Artificial Sequence
  MKO10030889_A_Mef2a
  gRNA
ttcactcgtgtcaccgtctt

SEQ ID NO: 30890 - DNA, 20 bp, Artificial Sequence
  MKO10030890_A_Mef2a
  gRNA
gctttgtcgtacactaaccc

SEQ ID NO: 30891 - DNA, 20 bp, Artificial Sequence
  MKO10030891_A_Mef2a
  gRNA
tcaaagtaatcgtcagcatc

SEQ ID NO: 30892 - DNA, 20 bp, Artificial Sequence
  MKO10030892_A_Mef2b
  gRNA
gcacgagagccgcaccaacg

SEQ ID NO: 30893 - DNA, 20 bp, Artificial Sequence
  MKO10030893_A_Mef2b
  gRNA
cccgcctcactttcgacccc

SEQ ID NO: 30894 - DNA, 20 bp, Artificial Sequence
  MKO10030894_A_Mef2b
  gRNA
tacctgaaggatatccgcgt

SEQ ID NO: 30895 - DNA, 20 bp, Artificial Sequence
  MKO10030895_A_Mef2c
  gRNA
acaacgagccgcacgagagc

SEQ ID NO: 30896 - DNA, 20 bp, Artificial Sequence
  MKO10030896_A_Mef2c
  gRNA
aatggatgagcgtaacagac

SEQ ID NO: 30897 - DNA, 20 bp, Artificial Sequence
  MKO10030897_A_Mef2c
  gRNA
cttctccataggcggtctga

SEQ ID NO: 30898 - DNA, 20 bp, Artificial Sequence
  MKO10030898_A_Mef2d
  gRNA
catcagtccaaacttccgct

SEQ ID NO: 30899 - DNA, 20 bp, Artificial Sequence
  MKO10030899_A_Mef2d
  gRNA
gctacactcaccaacggggc

SEQ ID NO: 30900 - DNA, 20 bp, Artificial Sequence
  MKO10030900_A_Mef2d
  gRNA
gatgggctcttcaggcgcta

SEQ ID NO: 30901 - DNA, 20 bp, Artificial Sequence
  MKO10030901_A_Mefv
  gRNA
acatcgagtgcgccccatag

SEQ ID NO: 30902 - DNA, 20 bp, Artificial Sequence
  MKO10030902_A_Mefv
  gRNA
agcatactcctccccgtagt

SEQ ID NO: 30903 - DNA, 20 bp, Artificial Sequence
  MKO10030903_A_Mefv
  gRNA
gtgccctcgtcacatgaagc

SEQ ID NO: 30904 - DNA, 20 bp, Artificial Sequence
  MKO10030904_A_Megf10
  gRNA
gccactgcgctgcgggctac

SEQ ID NO: 30905 - DNA, 20 bp, Artificial Sequence
  MKO10030905_A_Megf10
  gRNA
cgtacgtgccctgttcacaa

SEQ ID NO: 30906 - DNA, 20 bp, Artificial Sequence
  MKO10030906_A_Megf10
  gRNA
gctgcaccgacatcctgaac

SEQ ID NO: 30907 - DNA, 20 bp, Artificial Sequence
  MKO10030907_A_Megf11
  gRNA
ttgggacctccgccggtaca

SEQ ID NO: 30908 - DNA, 20 bp, Artificial Sequence
  MKO10030908_A_Megf11
  gRNA
ccggaggccgcgcctatacg

SEQ ID NO: 30909 - DNA, 20 bp, Artificial Sequence
  MKO10030909_A_Megf11
  gRNA
gtgtgcgccccgggcttccg

SEQ ID NO: 30910 - DNA, 20 bp, Artificial Sequence
  MKO10030910_A_Megf6
  gRNA
tcagccgcgtagtgcctgtg

SEQ ID NO: 30911 - DNA, 20 bp, Artificial Sequence
  MKO10030911_A_Megf6
  gRNA
ccgccacgtacctgcgctct

SEQ ID NO: 30912 - DNA, 20 bp, Artificial Sequence
  MKO10030912_A_Megf6
  gRNA
ggtgatggcaaaacgtgcca

SEQ ID NO: 30913 - DNA, 20 bp, Artificial Sequence
  MKO10030913_A_Megf8
  gRNA
cataagtgcactccgtgtcc

SEQ ID NO: 30914 - DNA, 20 bp, Artificial Sequence
  MKO10030914_A_Megf8
  gRNA
tccataccggagcaggcgtc

SEQ ID NO: 30915 - DNA, 20 bp, Artificial Sequence
  MKO10030915_A_Megf8
  gRNA
tgtgcgtttgcgagccgggc

SEQ ID NO: 30916 - DNA, 20 bp, Artificial Sequence
  MKO10030916_A_Megf9
  gRNA
aagcgctgcaaccagaccac

SEQ ID NO: 30917 - DNA, 20 bp, Artificial Sequence
  MKO10030917_A_Megf9
  gRNA
gatctcgaacatagccttct

SEQ ID NO: 30918 - DNA, 20 bp, Artificial Sequence
  MKO10030918_A_Megf9
  gRNA
tgttccgcagtgacttctac

SEQ ID NO: 30919 - DNA, 20 bp, Artificial Sequence
  MKO10030919_A_Mei1
  gRNA
cgaaaagcacgcgtacaaaa

SEQ ID NO: 30920 - DNA, 20 bp, Artificial Sequence
  MKO10030920_A_Mei1
  gRNA
gctcactactcagccgaata

SEQ ID NO: 30921 - DNA, 20 bp, Artificial Sequence
  MKO10030921_A_Mei1
  gRNA
tttggcggacgagcttgtaa

SEQ ID NO: 30922 - DNA, 20 bp, Artificial Sequence
  MKO10030922_A_Mei4
  gRNA
tgaagtcatcttccgacttt

SEQ ID NO: 30923 - DNA, 20 bp, Artificial Sequence
  MKO10030923_A_Mei4
  gRNA
gacaacgtggggagcacatc

SEQ ID NO: 30924 - DNA, 20 bp, Artificial Sequence
  MKO10030924_A_Mei4
  gRNA
gctccccacgttgtcagatc

SEQ ID NO: 30925 - DNA, 20 bp, Artificial Sequence
  MKO10030925_A_Meig1
  gRNA
tcccggtgcaggtcgaccga

SEQ ID NO: 30926 - DNA, 20 bp, Artificial Sequence
  MKO10030926_A_Meig1
  gRNA
ttcttcacgtaccctgtctc

SEQ ID NO: 30927 - DNA, 20 bp, Artificial Sequence
  MKO10030927_A_Meig1
  gRNA
tttcacgtcagaagtagcca

SEQ ID NO: 30928 - DNA, 20 bp, Artificial Sequence
  MKO10030928_A_Meiob
  gRNA
taatctcgagattctttaac

SEQ ID NO: 30929 - DNA, 20 bp, Artificial Sequence
  MKO10030929_A_Meiob
  gRNA
atctcgagattattattcat

SEQ ID NO: 30930 - DNA, 20 bp, Artificial Sequence
  MKO10030930_A_Meiob
  gRNA
agtttagccctgcaactcct

SEQ ID NO: 30931 - DNA, 20 bp, Artificial Sequence
  MKO10030931_A_Meis1
  gRNA
tacttgtaccccccgcgagc

SEQ ID NO: 30932 - DNA, 20 bp, Artificial Sequence
  MKO10030932_A_Meis1
  gRNA
ctttaaagcgtcattgaccg

SEQ ID NO: 30933 - DNA, 20 bp, Artificial Sequence
  MKO10030933_A_Meis1
  gRNA
cagagaggccgatggcgcaa

SEQ ID NO: 30934 - DNA, 20 bp, Artificial Sequence
  MKO10030934_A_Meis2
  gRNA
tgaaccggggggatcggccg

SEQ ID NO: 30935 - DNA, 20 bp, Artificial Sequence
  MKO10030935_A_Meis2
  gRNA
cgcgtgagggtctccgtaca

SEQ ID NO: 30936 - DNA, 20 bp, Artificial Sequence
  MKO10030936_A_Meis2
  gRNA
catcgcggtcttcgccaagc

SEQ ID NO: 30937 - DNA, 20 bp, Artificial Sequence
  MKO10030937_A_Meis3
  gRNA
cctcccagatccgctccgag

SEQ ID NO: 30938 - DNA, 20 bp, Artificial Sequence
  MKO10030938_A_Meis3
  gRNA
gatgagctgcgccactaccc

SEQ ID NO: 30939 - DNA, 20 bp, Artificial Sequence
  MKO10030939_A_Meis3
  gRNA
ctacatgctcgccccgtgat

SEQ ID NO: 30940 - DNA, 20 bp, Artificial Sequence
  MKO10030940_A_Melk
  gRNA
gtttgactacataatctccc

SEQ ID NO: 30941 - DNA, 20 bp, Artificial Sequence
  MKO10030941_A_Melk
  gRNA
cccgggtctcctcttccgac

SEQ ID NO: 30942 - DNA, 20 bp, Artificial Sequence
  MKO10030942_A_Melk
  gRNA
aagctaaagctgattgactt

SEQ ID NO: 30943 - DNA, 20 bp, Artificial Sequence
  MKO10030943_A_Memo1
  gRNA
cacagtatgtgtatcccgca

SEQ ID NO: 30944 - DNA, 20 bp, Artificial Sequence
  MKO10030944_A_Memo1
  gRNA
acctcagctgaacgctcagc

SEQ ID NO: 30945 - DNA, 20 bp, Artificial Sequence
  MKO10030945_A_Memo1
  gRNA
ctttagtttacggagagcta

SEQ ID NO: 30946 - DNA, 20 bp, Artificial Sequence
  MKO10030946_A_Men1
  gRNA
tctgcgctctatcgacgacg

SEQ ID NO: 30947 - DNA, 20 bp, Artificial Sequence
  MKO10030947_A_Men1
  gRNA
catgcgctgcgaccgtaaga

SEQ ID NO: 30948 - DNA, 20 bp, Artificial Sequence
  MKO10030948_A_Men1
  gRNA
aggtgtttctagtcgcgaac

SEQ ID NO: 30949 - DNA, 20 bp, Artificial Sequence
  MKO10030949_A_Meox1
  gRNA
gccgggtcaggtagttgtgg

SEQ ID NO: 30950 - DNA, 20 bp, Artificial Sequence
  MKO10030950_A_Meox1
  gRNA
tcggggtatgctgctgtcgc

SEQ ID NO: 30951 - DNA, 20 bp, Artificial Sequence
  MKO10030951_A_Meox1
  gRNA
ggggaggattgcatggtact

SEQ ID NO: 30952 - DNA, 20 bp, Artificial Sequence
  MKO10030952_A_Meox2
  gRNA
gcttgacggccataatcccc

SEQ ID NO: 30953 - DNA, 20 bp, Artificial Sequence
  MKO10030953_A_Meox2
  gRNA
tcccgcgattatgcaagacg

SEQ ID NO: 30954 - DNA, 20 bp, Artificial Sequence
  MKO10030954_A_Meox2
  gRNA
tctagacctcactgaaagac

SEQ ID NO: 30955 - DNA, 20 bp, Artificial Sequence
  MKO10030955_A_Mep1a
  gRNA
tgcgagatccctcaagcaga

SEQ ID NO: 30956 - DNA, 20 bp, Artificial Sequence
  MKO10030956_A_Mep1a
  gRNA
gctccccattccatacattc

SEQ ID NO: 30957 - DNA, 20 bp, Artificial Sequence
  MKO10030957_A_Mep1a
  gRNA
gaaggatgtccccttgaaag

SEQ ID NO: 30958 - DNA, 20 bp, Artificial Sequence
  MKO10030958_A_Mep1b
  gRNA
tgagggagacatcaaactcg

SEQ ID NO: 30959 - DNA, 20 bp, Artificial Sequence
  MKO10030959_A_Mep1b
  gRNA
cagccagctccggaaaagtt

SEQ ID NO: 30960 - DNA, 20 bp, Artificial Sequence
  MKO10030960_A_Mep1b
  gRNA
tggtatgtggccatctcttg

SEQ ID NO: 30961 - DNA, 20 bp, Artificial Sequence
  MKO10030961_A_Mepce
  gRNA
cccgacatcgcaaacgtcgc

SEQ ID NO: 30962 - DNA, 20 bp, Artificial Sequence
  MKO10030962_A_Mepce
  gRNA
ggtgcggtccccggtgtcta

SEQ ID NO: 30963 - DNA, 20 bp, Artificial Sequence
  MKO10030963_A_Mepce
  gRNA
gaatgttccgccgcatctac

SEQ ID NO: 30964 - DNA, 20 bp, Artificial Sequence
  MKO10030964_A_Mepe
  gRNA
aacacacccgccagacccga

SEQ ID NO: 30965 - DNA, 20 bp, Artificial Sequence
  MKO10030965_A_Mepe
  gRNA
gctagcgcgcctgtgggaat

SEQ ID NO: 30966 - DNA, 20 bp, Artificial Sequence
  MKO10030966_A_Mepe
  gRNA
aatgcttactggtgccgccc

SEQ ID NO: 30967 - DNA, 20 bp, Artificial Sequence
  MKO10030967_A_Mertk
  gRNA
tagacttaccaggtacggtt

SEQ ID NO: 30968 - DNA, 20 bp, Artificial Sequence
  MKO10030968_A_Mertk
  gRNA
ccgtctgtcctaaccgtacc

SEQ ID NO: 30969 - DNA, 20 bp, Artificial Sequence
  MKO10030969_A_Mertk
  gRNA
accttgaacttccacgtata

SEQ ID NO: 30970 - DNA, 20 bp, Artificial Sequence
  MKO10030970_A_Mesdc1
  gRNA
ccccttagtgcgcgcgatga

SEQ ID NO: 30971 - DNA, 20 bp, Artificial Sequence
  MKO10030971_A_Mesdc1
  gRNA
caccatcatcgcgcgcacta

SEQ ID NO: 30972 - DNA, 20 bp, Artificial Sequence
  MKO10030972_A_Mesdc1
  gRNA
ctctcgcgaacagttcaagc

SEQ ID NO: 30973 - DNA, 20 bp, Artificial Sequence
  MKO10030973_A_Mesdc2
  gRNA
acgccaactatgacgttcag

SEQ ID NO: 30974 - DNA, 20 bp, Artificial Sequence
  MKO10030974_A_Mesdc2
  gRNA
gcccggagtgtccgccgcgt

SEQ ID NO: 30975 - DNA, 20 bp, Artificial Sequence
  MKO10030975_A_Mesdc2
  gRNA
accgcgccatcttcatgctc

SEQ ID NO: 30976 - DNA, 20 bp, Artificial Sequence
  MKO10030976_A_Mesp1
  gRNA
gctcggtccccgtttaagcc

SEQ ID NO: 30977 - DNA, 20 bp, Artificial Sequence
  MKO10030977_A_Mesp1
  gRNA
cccacgattctgcggcgact

SEQ ID NO: 30978 - DNA, 20 bp, Artificial Sequence
  MKO10030978_A_Mesp1
  gRNA
agaaacctggacgccgccgc

SEQ ID NO: 30979 - DNA, 20 bp, Artificial Sequence
  MKO10030979_A_Mesp2
  gRNA
ttcgtcggggcgccgtcgcc

SEQ ID NO: 30980 - DNA, 20 bp, Artificial Sequence
  MKO10030980_A_Mesp2
  gRNA
gtagtgcgcgtgctacgggc

SEQ ID NO: 30981 - DNA, 20 bp, Artificial Sequence
  MKO10030981_A_Mesp2
  gRNA
tggagagcacctctgcatcg

SEQ ID NO: 30982 - DNA, 20 bp, Artificial Sequence
  MKO10030982_A_Mest
  gRNA
cgatcactcgatggaacctc

SEQ ID NO: 30983 - DNA, 20 bp, Artificial Sequence
  MKO10030983_A_Mest
  gRNA
taccttgtaccagtcatagc

SEQ ID NO: 30984 - DNA, 20 bp, Artificial Sequence
  MKO10030984_A_Mest
  gRNA
gcatcgtagagtcccttctg

SEQ ID NO: 30985 - DNA, 20 bp, Artificial Sequence
  MKO10030985_A_Metap1d
  gRNA
aagccagactacgtgacgac

SEQ ID NO: 30986 - DNA, 20 bp, Artificial Sequence
  MKO10030986_A_Metap1d
  gRNA
atgtttcagccgacctcttc

SEQ ID NO: 30987 - DNA, 20 bp, Artificial Sequence
  MKO10030987_A_Metap1d
  gRNA
tgacgcatatccctcacctc

SEQ ID NO: 30988 - DNA, 20 bp, Artificial Sequence
  MKO10030988_A_Metap1
  gRNA
gtgtaccgatagcctgccca

SEQ ID NO: 30989 - DNA, 20 bp, Artificial Sequence
  MKO10030989_A_Metap1
  gRNA
cttatgtagtaacttgtgag

SEQ ID NO: 30990 - DNA, 20 bp, Artificial Sequence
  MKO10030990_A_Metap1
  gRNA
atactcaccagtggataatg

SEQ ID NO: 30991 - DNA, 20 bp, Artificial Sequence
  MKO10030991_A_Metap2
  gRNA
cgacttccgagaagctgcgg

SEQ ID NO: 30992 - DNA, 20 bp, Artificial Sequence
  MKO10030992_A_Metap2
  gRNA
ggatgacgatgatagaaatc

SEQ ID NO: 30993 - DNA, 20 bp, Artificial Sequence
  MKO10030993_A_Metap2
  gRNA
tgattcttacccatcttgtg

SEQ ID NO: 30994 - DNA, 20 bp, Artificial Sequence
  MKO10030994_A_Metrnl
  gRNA
gggcgctcattgttaaccta

SEQ ID NO: 30995 - DNA, 20 bp, Artificial Sequence
  MKO10030995_A_Metrnl
  gRNA
ctacagtgggctcacccgag

SEQ ID NO: 30996 - DNA, 20 bp, Artificial Sequence
  MKO10030996_A_Metrnl
  gRNA
tgtgaagcctgttcacccgc

SEQ ID NO: 30997 - DNA, 20 bp, Artificial Sequence
  MKO10030997_A_Metrn
  gRNA
gtcttcgctgaacgtatgac

SEQ ID NO: 30998 - DNA, 20 bp, Artificial Sequence
  MKO10030998_A_Metrn
  gRNA
ggagccgatttggcgaagct

SEQ ID NO: 30999 - DNA, 20 bp, Artificial Sequence
  MKO10030999_A_Metrn
  gRNA
ttccgagtagccagcgtgag

SEQ ID NO: 31000 - DNA, 20 bp, Artificial Sequence
  MKO10031000_A_Mettl10
  gRNA
tctgcatccaccgtattagt

SEQ ID NO: 31001 - DNA, 20 bp, Artificial Sequence
  MKO10031001_A_Mettl10
  gRNA
agagtatgaaccgactaata

SEQ ID NO: 31002 - DNA, 20 bp, Artificial Sequence
  MKO10031002_A_Mettl10
  gRNA
gctatctaacattaacttga

SEQ ID NO: 31003 - DNA, 20 bp, Artificial Sequence
  MKO10031003_A_Mettl11b
  gRNA
atgacgacagagttcgtcgt

SEQ ID NO: 31004 - DNA, 20 bp, Artificial Sequence
  MKO10031004_A_Mettl11b
  gRNA
cgttaacctgcaagtagctc

SEQ ID NO: 31005 - DNA, 20 bp, Artificial Sequence
  MKO10031005_A_Mettl11b
  gRNA
cttctgccaacgggatctaa

SEQ ID NO: 31006 - DNA, 20 bp, Artificial Sequence
  MKO10031006_A_Mettl13
  gRNA
accccgctgtgaaaccatcg

SEQ ID NO: 31007 - DNA, 20 bp, Artificial Sequence
  MKO10031007_A_Mettl13
  gRNA
aagacagatggtactttcgg

SEQ ID NO: 31008 - DNA, 20 bp, Artificial Sequence
  MKO10031008_A_Mettl13
  gRNA
gggagcgccagtactatgct

SEQ ID NO: 31009 - DNA, 20 bp, Artificial Sequence
  MKO10031009_A_Mettl14
  gRNA
cgcatacctgcaggtttctc

SEQ ID NO: 31010 - DNA, 20 bp, Artificial Sequence
  MKO10031010_A_Mettl14
  gRNA
acagacctcagaatttcatc

SEQ ID NO: 31011 - DNA, 20 bp, Artificial Sequence
  MKO10031011_A_Mettl14
  gRNA
agattccagtacctttctta

SEQ ID NO: 31012 - DNA, 20 bp, Artificial Sequence
  MKO10031012_A_Mettl15
  gRNA
cgaagggagaaacctcgttc

SEQ ID NO: 31013 - DNA, 20 bp, Artificial Sequence
  MKO10031013_A_Mettl15
  gRNA
aggattccatcaatcgttcc

SEQ ID NO: 31014 - DNA, 20 bp, Artificial Sequence
  MKO10031014_A_Mettl15
  gRNA
ggaaagtcttggtagcgatg

SEQ ID NO: 31015 - DNA, 20 bp, Artificial Sequence
  MKO10031015_A_Mettl16
  gRNA
actgtaccttggcttccaat

SEQ ID NO: 31016 - DNA, 20 bp, Artificial Sequence
  MKO10031016_A_Mettl16
  gRNA
gacaaaactactctccgaag

SEQ ID NO: 31017 - DNA, 20 bp, Artificial Sequence
  MKO10031017_A_Mettl16
  gRNA
tgagacttaactatattcac

SEQ ID NO: 31018 - DNA, 20 bp, Artificial Sequence
  MKO10031018_A_Mettl17
  gRNA
aatccgacccgttgtctacc

SEQ ID NO: 31019 - DNA, 20 bp, Artificial Sequence
  MKO10031019_A_Mettl17
  gRNA
gcatacgccgcccttgtgcc

SEQ ID NO: 31020 - DNA, 20 bp, Artificial Sequence
  MKO10031020_A_Mettl17
  gRNA
tgcgcaaaactacctaccat

SEQ ID NO: 31021 - DNA, 20 bp, Artificial Sequence
  MKO10031021_A_Mettl18
  gRNA
gcttgcctcgggatcactct

SEQ ID NO: 31022 - DNA, 20 bp, Artificial Sequence
  MKO10031022_A_Mettl18
  gRNA
aaggcaatctacagaacgtc

SEQ ID NO: 31023 - DNA, 20 bp, Artificial Sequence
  MKO10031023_A_Mettl18
  gRNA
aaattaacatccctcgatga

SEQ ID NO: 31024 - DNA, 20 bp, Artificial Sequence
  MKO10031024_A_Mettl1
  gRNA
gtacaccgtcaccgacgtgc

SEQ ID NO: 31025 - DNA, 20 bp, Artificial Sequence
  MKO10031025_A_Mettl1
  gRNA
tgcttcgttcgcttaaagtg

SEQ ID NO: 31026 - DNA, 20 bp, Artificial Sequence
  MKO10031026_A_Mettl1
  gRNA
ttcggagacaggcgatgttc

SEQ ID NO: 31027 - DNA, 20 bp, Artificial Sequence
  MKO10031027_A_Mettl20
  gRNA
cgagtactgattggtgaccc

SEQ ID NO: 31028 - DNA, 20 bp, Artificial Sequence
  MKO10031028_A_Mettl20
  gRNA
taacccccaggtgcaagttt

SEQ ID NO: 31029 - DNA, 20 bp, Artificial Sequence
  MKO10031029_A_Mettl20
  gRNA
aaaagccgtaactggatttc

SEQ ID NO: 31030 - DNA, 20 bp, Artificial Sequence
  MKO10031030_A_Mettl21a
  gRNA
agttactatcccgttcatag

SEQ ID NO: 31031 - DNA, 20 bp, Artificial Sequence
  MKO10031031_A_Mettl21a
  gRNA
cttgccgaatccgctatgaa

SEQ ID NO: 31032 - DNA, 20 bp, Artificial Sequence
  MKO10031032_A_Mettl21a
  gRNA
cgagaggcttatggaatttc

SEQ ID NO: 31033 - DNA, 20 bp, Artificial Sequence
  MKO10031033_A_Mettl21c
  gRNA
ctgttgttatgactacgtgc

SEQ ID NO: 31034 - DNA, 20 bp, Artificial Sequence
  MKO10031034_A_Mettl21c
  gRNA
tccccgagagtaggggctgc

SEQ ID NO: 31035 - DNA, 20 bp, Artificial Sequence
  MKO10031035_A_Mettl21c
  gRNA
caagagcattatcagttcgc

SEQ ID NO: 31036 - DNA, 20 bp, Artificial Sequence
  MKO10031036_A_Mettl21e
  gRNA
cctgtctaatgctactcccc

SEQ ID NO: 31037 - DNA, 20 bp, Artificial Sequence
  MKO10031037_A_Mettl21e
  gRNA
cctggggagtagcattagac

SEQ ID NO: 31038 - DNA, 20 bp, Artificial Sequence
  MKO10031038_A_Mettl21e
  gRNA
ctctgataacgactattcct

SEQ ID NO: 31039 - DNA, 20 bp, Artificial Sequence
  MKO10031039_A_Mettl22
  gRNA
gggacctggatgtggtacga

SEQ ID NO: 31040 - DNA, 20 bp, Artificial Sequence
  MKO10031040_A_Mettl22
  gRNA
ggatatagtctgccaggagt

SEQ ID NO: 31041 - DNA, 20 bp, Artificial Sequence
  MKO10031041_A_Mettl22
  gRNA
catcgtggctgccacgatgc

SEQ ID NO: 31042 - DNA, 20 bp, Artificial Sequence
  MKO10031042_A_Mettl23
  gRNA
tccatactcaccttcggacc

SEQ ID NO: 31043 - DNA, 20 bp, Artificial Sequence
  MKO10031043_A_Mettl23
  gRNA
agtcctacaacttcgacctg

SEQ ID NO: 31044 - DNA, 20 bp, Artificial Sequence
  MKO10031044_A_Mettl23
  gRNA
gctgatcatctcctttgcaa

SEQ ID NO: 31045 - DNA, 20 bp, Artificial Sequence
  MKO10031045_A_Mettl24
  gRNA
atgcggatcccgccaatcga

SEQ ID NO: 31046 - DNA, 20 bp, Artificial Sequence
  MKO10031046_A_Mettl24
  gRNA
atcaccgcttgtccatcgat

SEQ ID NO: 31047 - DNA, 20 bp, Artificial Sequence
  MKO10031047_A_Mettl24
  gRNA
gatgaatctcgaagacgagc

SEQ ID NO: 31048 - DNA, 20 bp, Artificial Sequence
  MKO10031048_A_Mettl25
  gRNA
tgtaaatatccgcagagtac

SEQ ID NO: 31049 - DNA, 20 bp, Artificial Sequence
  MKO10031049_A_Mettl25
  gRNA
ccatcggtggcagacaggtc

SEQ ID NO: 31050 - DNA, 20 bp, Artificial Sequence
  MKO10031050_A_Mettl25
  gRNA
ccagacctgtctgccaccga

SEQ ID NO: 31051 - DNA, 20 bp, Artificial Sequence
  MKO10031051_A_Mettl2
  gRNA
cactttcctctccgccgccg

SEQ ID NO: 31052 - DNA, 20 bp, Artificial Sequence
  MKO10031052_A_Mettl2
  gRNA
gcaggagaacagctccccgc

SEQ ID NO: 31053 - DNA, 20 bp, Artificial Sequence
  MKO10031053_A_Mettl2
  gRNA
tcacctagaaattagtggtg

SEQ ID NO: 31054 - DNA, 20 bp, Artificial Sequence
  MKO10031054_A_Mettl3
  gRNA
acgccgtttctgccctgcga

SEQ ID NO: 31055 - DNA, 20 bp, Artificial Sequence
  MKO10031055_A_Mettl3
  gRNA
cttgtcgcaagctgcacttc

SEQ ID NO: 31056 - DNA, 20 bp, Artificial Sequence
  MKO10031056_A_Mettl3
  gRNA
gttgaaaagtttcgctctcg

SEQ ID NO: 31057 - DNA, 20 bp, Artificial Sequence
  MKO10031057_A_Mettl4
  gRNA
ttaaccgatttgttctccca

SEQ ID NO: 31058 - DNA, 20 bp, Artificial Sequence
  MKO10031058_A_Mettl4
  gRNA
gcgaatgcctatccctaaac

SEQ ID NO: 31059 - DNA, 20 bp, Artificial Sequence
  MKO10031059_A_Mettl4
  gRNA
ttacccacttgttgaaaaac

SEQ ID NO: 31060 - DNA, 20 bp, Artificial Sequence
  MKO10031060_A_Mettl5
  gRNA
agcatcggagcggcaatgct

SEQ ID NO: 31061 - DNA, 20 bp, Artificial Sequence
  MKO10031061_A_Mettl5
  gRNA
caatgtcatcgtatgtgtta

SEQ ID NO: 31062 - DNA, 20 bp, Artificial Sequence
  MKO10031062_A_Mettl5
  gRNA
tgagcttacttccctagttg

SEQ ID NO: 31063 - DNA, 20 bp, Artificial Sequence
  MKO10031063_A_Mettl6
  gRNA
caagcaggtcgtctctagtg

SEQ ID NO: 31064 - DNA, 20 bp, Artificial Sequence
  MKO10031064_A_Mettl6
  gRNA
gatcattcagcccgtagtca

SEQ ID NO: 31065 - DNA, 20 bp, Artificial Sequence
  MKO10031065_A_Mettl6
  gRNA
atcagtaaaaaaatacgatc

SEQ ID NO: 31066 - DNA, 20 bp, Artificial Sequence
  MKO10031066_A_Mettl7a1
  gRNA
tagctttagcttcgagaagc

SEQ ID NO: 31067 - DNA, 20 bp, Artificial Sequence
  MKO10031067_A_Mettl7a1
  gRNA
gcggctggtggtctgtaccc

SEQ ID NO: 31068 - DNA, 20 bp, Artificial Sequence
  MKO10031068_A_Mettl7a1
  gRNA
gccgcaccaatgtccaggag

SEQ ID NO: 31069 - DNA, 20 bp, Artificial Sequence
  MKO10031069_A_Mettl7a2Higd1c
  gRNA
gggagtctctcgatttccgg

SEQ ID NO: 31070 - DNA, 20 bp, Artificial Sequence
  MKO10031070_A_Mettl7a2Higd1c
  gRNA
atttagcttgtaaagaccgt

SEQ ID NO: 31071 - DNA, 20 bp, Artificial Sequence
  MKO10031071_A_Mettl7a2Higd1c
  gRNA
cccgcacgtggatgagatga

SEQ ID NO: 31072 - DNA, 20 bp, Artificial Sequence
  MKO10031072_A_Mettl7a2
  gRNA
ccaggagaagattctgcgcg

SEQ ID NO: 31073 - DNA, 20 bp, Artificial Sequence
  MKO10031073_A_Mettl7a2
  gRNA
cccagctccacatgcctaga

SEQ ID NO: 31074 - DNA, 20 bp, Artificial Sequence
  MKO10031074_A_Mettl7a2
  gRNA
tcacagcatagccatagatg

SEQ ID NO: 31075 - DNA, 20 bp, Artificial Sequence
  MKO10031075_A_Mettl7a3
  gRNA
tgctgaagagctcctgcttt

SEQ ID NO: 31076 - DNA, 20 bp, Artificial Sequence
  MKO10031076_A_Mettl7a3
  gRNA
cctcacgcagaatcttctct

SEQ ID NO: 31077 - DNA, 20 bp, Artificial Sequence
  MKO10031077_A_Mettl7a3
  gRNA
tcacagcatagccatagatg

SEQ ID NO: 31078 - DNA, 20 bp, Artificial Sequence
  MKO10031078_A_Mettl7b
  gRNA
ttccggcaacgtggccctgc

SEQ ID NO: 31079 - DNA, 20 bp, Artificial Sequence
  MKO10031079_A_Mettl7b
  gRNA
ccacaatgaagcgctcatat

SEQ ID NO: 31080 - DNA, 20 bp, Artificial Sequence
  MKO10031080_A_Mettl7b
  gRNA
acagttctccgaagtccagc

SEQ ID NO: 31081 - DNA, 20 bp, Artificial Sequence
  MKO10031081_A_Mettl8
  gRNA
cgagtcgctccagaagagca

SEQ ID NO: 31082 - DNA, 20 bp, Artificial Sequence
  MKO10031082_A_Mettl8
  gRNA
gaatcatcctgggatcaagt

SEQ ID NO: 31083 - DNA, 20 bp, Artificial Sequence
  MKO10031083_A_Mettl8
  gRNA
tacctctagtattcgaaaag

SEQ ID NO: 31084 - DNA, 20 bp, Artificial Sequence
  MKO10031084_A_Mettl9
  gRNA
catcagctgcttaaatttgc

SEQ ID NO: 31085 - DNA, 20 bp, Artificial Sequence
  MKO10031085_A_Mettl9
  gRNA
gaaagcttcgacgacaaagc

SEQ ID NO: 31086 - DNA, 20 bp, Artificial Sequence
  MKO10031086_A_Mettl9
  gRNA
gagactgcttagaattaatc

SEQ ID NO: 31087 - DNA, 20 bp, Artificial Sequence
  MKO10031087_A_Met
  gRNA
gcagcgcgtcgacttattca

SEQ ID NO: 31088 - DNA, 20 bp, Artificial Sequence
  MKO10031088_A_Met
  gRNA
aagcgcgcagtgacgagtat

SEQ ID NO: 31089 - DNA, 20 bp, Artificial Sequence
  MKO10031089_A_Met
  gRNA
attcctaccttataaaccgc

SEQ ID NO: 31090 - DNA, 20 bp, Artificial Sequence
  MKO10031090_A_Mex3a
  gRNA
tgtacgagtaccctaccgcg

SEQ ID NO: 31091 - DNA, 20 bp, Artificial Sequence
  MKO10031091_A_Mex3a
  gRNA
cggcgtggactcggcctttg

SEQ ID NO: 31092 - DNA, 20 bp, Artificial Sequence
  MKO10031092_A_Mex3a
  gRNA
agacgagcgcgcccttcagc

SEQ ID NO: 31093 - DNA, 20 bp, Artificial Sequence
  MKO10031093_A_Mex3b
  gRNA
tacgatctccgcgacgtgtt

SEQ ID NO: 31094 - DNA, 20 bp, Artificial Sequence
  MKO10031094_A_Mex3b
  gRNA
acccagttccgaacacgtcg

SEQ ID NO: 31095 - DNA, 20 bp, Artificial Sequence
  MKO10031095_A_Mex3b
  gRNA
ctagcgcgatccacgttctc

SEQ ID NO: 31096 - DNA, 20 bp, Artificial Sequence
  MKO10031096_A_Mex3c
  gRNA
ccgcctcgcgacctccgaga

SEQ ID NO: 31097 - DNA, 20 bp, Artificial Sequence
  MKO10031097_A_Mex3c
  gRNA
atgcatatcgccatgcgtac

SEQ ID NO: 31098 - DNA, 20 bp, Artificial Sequence
  MKO10031098_A_Mex3c
  gRNA
tcggagtaactatgtacgtg

SEQ ID NO: 31099 - DNA, 20 bp, Artificial Sequence
  MKO10031099_A_Mex3d
  gRNA
gggacgcttcgacgcgccag

SEQ ID NO: 31100 - DNA, 20 bp, Artificial Sequence
  MKO10031100_A_Mex3d
  gRNA
gcgcgtgccctaccgagtgg

SEQ ID NO: 31101 - DNA, 20 bp, Artificial Sequence
  MKO10031101_A_Mex3d
  gRNA
gccacccgagcccgacgacg

SEQ ID NO: 31102 - DNA, 20 bp, Artificial Sequence
  MKO10031102_A_Mfap1a
  gRNA
ttgaccaggtgagatctcaa

SEQ ID NO: 31103 - DNA, 20 bp, Artificial Sequence
  MKO10031103_A_Mfap1a
  gRNA
acttactttcgaatgaagac

SEQ ID NO: 31104 - DNA, 20 bp, Artificial Sequence
  MKO10031104_A_Mfap1a
  gRNA
agctgaagcattgaaacaga

SEQ ID NO: 31105 - DNA, 20 bp, Artificial Sequence
  MKO10031105_A_Mfap1b
  gRNA
ttgaccaggtgagatctcaa

SEQ ID NO: 31106 - DNA, 20 bp, Artificial Sequence
  MKO10031106_A_Mfap1b
  gRNA
acttactttcgaatgaagac

SEQ ID NO: 31107 - DNA, 20 bp, Artificial Sequence
  MKO10031107_A_Mfap1b
  gRNA
agctgaagcattgaaacaga

SEQ ID NO: 31108 - DNA, 20 bp, Artificial Sequence
  MKO10031108_A_Mfap2
  gRNA
taccaatctggtcgccatag

SEQ ID NO: 31109 - DNA, 20 bp, Artificial Sequence
  MKO10031109_A_Mfap2
  gRNA
tactggacatggtccgggaa

SEQ ID NO: 31110 - DNA, 20 bp, Artificial Sequence
  MKO10031110_A_Mfap2
  gRNA
gagactgagcctaccgagcc

SEQ ID NO: 31111 - DNA, 20 bp, Artificial Sequence
  MKO10031111_A_Mfap3l
  gRNA
cgaagagacgtctcctgtag

SEQ ID NO: 31112 - DNA, 20 bp, Artificial Sequence
  MKO10031112_A_Mfap3l
  gRNA
tgagtcccccaccgctgact

SEQ ID NO: 31113 - DNA, 20 bp, Artificial Sequence
  MKO10031113_A_Mfap3l
  gRNA
tcagttctggcaatgattac

SEQ ID NO: 31114 - DNA, 20 bp, Artificial Sequence
  MKO10031114_A_Mfap3
  gRNA
gagttgcttcggcctagctc

SEQ ID NO: 31115 - DNA, 20 bp, Artificial Sequence
  MKO10031115_A_Mfap3
  gRNA
ggcacagccgagtgacgttc

SEQ ID NO: 31116 - DNA, 20 bp, Artificial Sequence
  MKO10031116_A_Mfap3
  gRNA
gaactttgattcgctcccag

SEQ ID NO: 31117 - DNA, 20 bp, Artificial Sequence
  MKO10031117_A_Mfap4
  gRNA
ctgtgatgatatctacgccc

SEQ ID NO: 31118 - DNA, 20 bp, Artificial Sequence
  MKO10031118_A_Mfap4
  gRNA
ggatggctataccctctacg

SEQ ID NO: 31119 - DNA, 20 bp, Artificial Sequence
  MKO10031119_A_Mfap4
  gRNA
gcttgtagtcgctccagccc

SEQ ID NO: 31120 - DNA, 20 bp, Artificial Sequence
  MKO10031120_A_Mfap5
  gRNA
gatccctctacagacgatac

SEQ ID NO: 31121 - DNA, 20 bp, Artificial Sequence
  MKO10031121_A_Mfap5
  gRNA
gtcacctgtatcgtctgtag

SEQ ID NO: 31122 - DNA, 20 bp, Artificial Sequence
  MKO10031122_A_Mfap5
  gRNA
cgcgttgaccactgacccct

SEQ ID NO: 31123 - DNA, 20 bp, Artificial Sequence
  MKO10031123_A_Mff
  gRNA
gctgacccaccacgcaacac

SEQ ID NO: 31124 - DNA, 20 bp, Artificial Sequence
  MKO10031124_A_Mff
  gRNA
gaaaatgctgttcgccaaaa

SEQ ID NO: 31125 - DNA, 20 bp, Artificial Sequence
  MKO10031125_A_Mff
  gRNA
gtccactccctttaaacctc

SEQ ID NO: 31126 - DNA, 20 bp, Artificial Sequence
  MKO10031126_A_Mfge8
  gRNA
cggtacagacgagccagctc

SEQ ID NO: 31127 - DNA, 20 bp, Artificial Sequence
  MKO10031127_A_Mfge8
  gRNA
gtttcatgggcttgcagcgc

SEQ ID NO: 31128 - DNA, 20 bp, Artificial Sequence
  MKO10031128_A_Mfge8
  gRNA
ggcatgctactctgcgcctc

SEQ ID NO: 31129 - DNA, 20 bp, Artificial Sequence
  MKO10031129_A_Mfhas1
  gRNA
catgccgcggagccattcaa

SEQ ID NO: 31130 - DNA, 20 bp, Artificial Sequence
  MKO10031130_A_Mfhas1
  gRNA
taggcctcgcagccggttgc

SEQ ID NO: 31131 - DNA, 20 bp, Artificial Sequence
  MKO10031131_A_Mfhas1
  gRNA
cgagcgagtgaatgtggctt

SEQ ID NO: 31132 - DNA, 20 bp, Artificial Sequence
  MKO10031132_A_Mfi2
  gRNA
ctctctacgaggtaaccgac

SEQ ID NO: 31133 - DNA, 20 bp, Artificial Sequence
  MKO10031133_A_Mfi2
  gRNA
gacgcccttcagggtgttga

SEQ ID NO: 31134 - DNA, 20 bp, Artificial Sequence
  MKO10031134_A_Mfi2
  gRNA
tgtagtcgtagtatctctct

SEQ ID NO: 31135 - DNA, 20 bp, Artificial Sequence
  MKO10031135_A_Mfn1
  gRNA
ttgtgtgaccaatcccgctg

SEQ ID NO: 31136 - DNA, 20 bp, Artificial Sequence
  MKO10031136_A_Mfn1
  gRNA
acttgatcgaatagcatccg

SEQ ID NO: 31137 - DNA, 20 bp, Artificial Sequence
  MKO10031137_A_Mfn1
  gRNA
aaagcctaccttatgaccga

SEQ ID NO: 31138 - DNA, 20 bp, Artificial Sequence
  MKO10031138_A_Mfn2
  gRNA
agttaccgtctgcatcagcg

SEQ ID NO: 31139 - DNA, 20 bp, Artificial Sequence
  MKO10031139_A_Mfn2
  gRNA
ccgtgatcaatgccatgctc

SEQ ID NO: 31140 - DNA, 20 bp, Artificial Sequence
  MKO10031140_A_Mfn2
  gRNA
acaggtaccctttgacgtcc

SEQ ID NO: 31141 - DNA, 20 bp, Artificial Sequence
  MKO10031141_A_Mfng
  gRNA
tttctgcatcaaccgccaac

SEQ ID NO: 31142 - DNA, 20 bp, Artificial Sequence
  MKO10031142_A_Mfng
  gRNA
gtggatgggccggttcaggc

SEQ ID NO: 31143 - DNA, 20 bp, Artificial Sequence
  MKO10031143_A_Mfng
  gRNA
gctgcagtcaaaaaaccgca

SEQ ID NO: 31144 - DNA, 20 bp, Artificial Sequence
  MKO10031144_A_Mfrp
  gRNA
cgacgtcatcctccgtccag

SEQ ID NO: 31145 - DNA, 20 bp, Artificial Sequence
  MKO10031145_A_Mfrp
  gRNA
agcccgactgccacttctcc

SEQ ID NO: 31146 - DNA, 20 bp, Artificial Sequence
  MKO10031146_A_Mfrp
  gRNA
ttgctcaactcactcgcctc

SEQ ID NO: 31147 - DNA, 20 bp, Artificial Sequence
  MKO10031147_A_Mfsd10
  gRNA
tgagcccaggtcagcgacaa

SEQ ID NO: 31148 - DNA, 20 bp, Artificial Sequence
  MKO10031148_A_Mfsd10
  gRNA
ttcagccatcgggatgccag

SEQ ID NO: 31149 - DNA, 20 bp, Artificial Sequence
  MKO10031149_A_Mfsd10
  gRNA
ggcaaaaagtaggctgatcc

SEQ ID NO: 31150 - DNA, 20 bp, Artificial Sequence
  MKO10031150_A_Mfsd11
  gRNA
aaatttgatcactccgtccg

SEQ ID NO: 31151 - DNA, 20 bp, Artificial Sequence
  MKO10031151_A_Mfsd11
  gRNA
ccaacaatggcgaccacgga

SEQ ID NO: 31152 - DNA, 20 bp, Artificial Sequence
  MKO10031152_A_Mfsd11
  gRNA
gctcatcagaatttatcgtc

SEQ ID NO: 31153 - DNA, 20 bp, Artificial Sequence
  MKO10031153_A_Mfsd12
  gRNA
tcaccgtgtacggcgcagcc

SEQ ID NO: 31154 - DNA, 20 bp, Artificial Sequence
  MKO10031154_A_Mfsd12
  gRNA
gcggggaagccacgcctgaa

SEQ ID NO: 31155 - DNA, 20 bp, Artificial Sequence
  MKO10031155_A_Mfsd12
  gRNA
ccgtgagctccaccttctcg

SEQ ID NO: 31156 - DNA, 20 bp, Artificial Sequence
  MKO10031156_A_Mfsd1
  gRNA
cttaccgtattccaaatatg

SEQ ID NO: 31157 - DNA, 20 bp, Artificial Sequence
  MKO10031157_A_Mfsd1
  gRNA
atacagcagcatgaatttcg

SEQ ID NO: 31158 - DNA, 20 bp, Artificial Sequence
  MKO10031158_A_Mfsd1
  gRNA
cccgtttcacctgagtctga

SEQ ID NO: 31159 - DNA, 20 bp, Artificial Sequence
  MKO10031159_A_Mfsd2a
  gRNA
ggggccccgtaccagttgac

SEQ ID NO: 31160 - DNA, 20 bp, Artificial Sequence
  MKO10031160_A_Mfsd2a
  gRNA
gagggacttactgtatgccg

SEQ ID NO: 31161 - DNA, 20 bp, Artificial Sequence
  MKO10031161_A_Mfsd2a
  gRNA
ctaatgcagaagcccaccag

SEQ ID NO: 31162 - DNA, 20 bp, Artificial Sequence
  MKO10031162_A_Mfsd2b
  gRNA
gaagtaggccagtgcgatta

SEQ ID NO: 31163 - DNA, 20 bp, Artificial Sequence
  MKO10031163_A_Mfsd2b
  gRNA
accacactcacggtatgcgg

SEQ ID NO: 31164 - DNA, 20 bp, Artificial Sequence
  MKO10031164_A_Mfsd2b
  gRNA
cattggtggggtccccaacc

SEQ ID NO: 31165 - DNA, 20 bp, Artificial Sequence
  MKO10031165_A_Mfsd3
  gRNA
taggctgtcggccagcacgc

SEQ ID NO: 31166 - DNA, 20 bp, Artificial Sequence
  MKO10031166_A_Mfsd3
  gRNA
gccaggcggagatccagaac

SEQ ID NO: 31167 - DNA, 20 bp, Artificial Sequence
  MKO10031167_A_Mfsd3
  gRNA
ctccttgggtggggctctac

SEQ ID NO: 31168 - DNA, 20 bp, Artificial Sequence
  MKO10031168_A_Mfsd4
  gRNA
cacccggccgtcgcagccca

SEQ ID NO: 31169 - DNA, 20 bp, Artificial Sequence
  MKO10031169_A_Mfsd4
  gRNA
gcccgccagcgctatgaccg

SEQ ID NO: 31170 - DNA, 20 bp, Artificial Sequence
  MKO10031170_A_Mfsd4
  gRNA
ggggcaacgagctgtgcgtc

SEQ ID NO: 31171 - DNA, 20 bp, Artificial Sequence
  MKO10031171_A_Mfsd5
  gRNA
ctggtacatccacgagcacg

SEQ ID NO: 31172 - DNA, 20 bp, Artificial Sequence
  MKO10031172_A_Mfsd5
  gRNA
ggcatgacttccccgccgag

SEQ ID NO: 31173 - DNA, 20 bp, Artificial Sequence
  MKO10031173_A_Mfsd5
  gRNA
ggggccggtcgcaccctttg

SEQ ID NO: 31174 - DNA, 20 bp, Artificial Sequence
  MKO10031174_A_Mfsd6l
  gRNA
ggacgtcccattgcgggttg

SEQ ID NO: 31175 - DNA, 20 bp, Artificial Sequence
  MKO10031175_A_Mfsd6l
  gRNA
atttcgtagacgccactgat

SEQ ID NO: 31176 - DNA, 20 bp, Artificial Sequence
  MKO10031176_A_Mfsd6l
  gRNA
ggcgggagtcaccccttatg

SEQ ID NO: 31177 - DNA, 20 bp, Artificial Sequence
  MKO10031177_A_Mfsd6
  gRNA
gactaacacgcctccgatca

SEQ ID NO: 31178 - DNA, 20 bp, Artificial Sequence
  MKO10031178_A_Mfsd6
  gRNA
tgtgagtgagtcgcggcagt

SEQ ID NO: 31179 - DNA, 20 bp, Artificial Sequence
  MKO10031179_A_Mfsd6
  gRNA
tgatcgttgccactcagttc

SEQ ID NO: 31180 - DNA, 20 bp, Artificial Sequence
  MKO10031180_A_Mfsd7a
  gRNA
tctgacttaccgctccacgg

SEQ ID NO: 31181 - DNA, 20 bp, Artificial Sequence
  MKO10031181_A_Mfsd7a
  gRNA
cacccaccagtttgagccct

SEQ ID NO: 31182 - DNA, 20 bp, Artificial Sequence
  MKO10031182_A_Mfsd7a
  gRNA
agcagatgacatccctatga

SEQ ID NO: 31183 - DNA, 20 bp, Artificial Sequence
  MKO10031183_A_Mfsd7b
  gRNA
ctcttgtaggagtactcttc

SEQ ID NO: 31184 - DNA, 20 bp, Artificial Sequence
  MKO10031184_A_Mfsd7b
  gRNA
acctccgttgcctccaagtc

SEQ ID NO: 31185 - DNA, 20 bp, Artificial Sequence
  MKO10031185_A_Mfsd7b
  gRNA
gaggatcgggctgacactgg

SEQ ID NO: 31186 - DNA, 20 bp, Artificial Sequence
  MKO10031186_A_Mfsd7c
  gRNA
tcggacaatggaacttaagt

SEQ ID NO: 31187 - DNA, 20 bp, Artificial Sequence
  MKO10031187_A_Mfsd7c
  gRNA
ggtctgaccatcgtcattgc

SEQ ID NO: 31188 - DNA, 20 bp, Artificial Sequence
  MKO10031188_A_Mfsd7c
  gRNA
caccatgcgattcagcagag

SEQ ID NO: 31189 - DNA, 20 bp, Artificial Sequence
  MKO10031189_A_Mfsd8
  gRNA
gttgtccgatcatacattgc

SEQ ID NO: 31190 - DNA, 20 bp, Artificial Sequence
  MKO10031190_A_Mfsd8
  gRNA
tagcaccagcaatgtatgat

SEQ ID NO: 31191 - DNA, 20 bp, Artificial Sequence
  MKO10031191_A_Mfsd8
  gRNA
atctactcttgtaatgctct

SEQ ID NO: 31192 - DNA, 20 bp, Artificial Sequence
  MKO10031192_A_Mfsd9
  gRNA
gagttgcaaaacgccgtatg

SEQ ID NO: 31193 - DNA, 20 bp, Artificial Sequence
  MKO10031193_A_Mfsd9
  gRNA
cccgtagtggctggaatagt

SEQ ID NO: 31194 - DNA, 20 bp, Artificial Sequence
  MKO10031194_A_Mfsd9
  gRNA
caatgtgttcctgtttacgc

SEQ ID NO: 31195 - DNA, 20 bp, Artificial Sequence
  MKO10031195_A_Mgam
  gRNA
ttaccttctgcacccgtgtt

SEQ ID NO: 31196 - DNA, 20 bp, Artificial Sequence
  MKO10031196_A_Mgam
  gRNA
gacgttgtaaacacaaatgc

SEQ ID NO: 31197 - DNA, 20 bp, Artificial Sequence
  MKO10031197_A_Mgam
  gRNA
agtggaagcgatttgatgtc

SEQ ID NO: 31198 - DNA, 20 bp, Artificial Sequence
  MKO10031198_A_Mgarp
  gRNA
atctggcgatgtatctccgc

SEQ ID NO: 31199 - DNA, 20 bp, Artificial Sequence
  MKO10031199_A_Mgarp
  gRNA
cgagcgcgggtcctcagtag

SEQ ID NO: 31200 - DNA, 20 bp, Artificial Sequence
  MKO10031200_A_Mgarp
  gRNA
ctcttcgccgaatgtcatcc

SEQ ID NO: 31201 - DNA, 20 bp, Artificial Sequence
  MKO10031201_A_Mgat1
  gRNA
gcacacgccggccccgaaac

SEQ ID NO: 31202 - DNA, 20 bp, Artificial Sequence
  MKO10031202_A_Mgat1
  gRNA
gcgcatccagtcgtcccaaa

SEQ ID NO: 31203 - DNA, 20 bp, Artificial Sequence
  MKO10031203_A_Mgat1
  gRNA
ggtggatgacctcacgggtg

SEQ ID NO: 31204 - DNA, 20 bp, Artificial Sequence
  MKO10031204_A_Mgat2
  gRNA
ggtgctaatcctgacgctcg

SEQ ID NO: 31205 - DNA, 20 bp, Artificial Sequence
  MKO10031205_A_Mgat2
  gRNA
acgtcggtaatgacggcacc

SEQ ID NO: 31206 - DNA, 20 bp, Artificial Sequence
  MKO10031206_A_Mgat2
  gRNA
tgctggacgcggagcccgta

SEQ ID NO: 31207 - DNA, 20 bp, Artificial Sequence
  MKO10031207_A_Mgat3
  gRNA
atggcgttgataacccgcct

SEQ ID NO: 31208 - DNA, 20 bp, Artificial Sequence
  MKO10031208_A_Mgat3
  gRNA
tgaggcacgtgttgagtacg

SEQ ID NO: 31209 - DNA, 20 bp, Artificial Sequence
  MKO10031209_A_Mgat3
  gRNA
cgtctttatcatcgacgatg

SEQ ID NO: 31210 - DNA, 20 bp, Artificial Sequence
  MKO10031210_A_Mgat4a
  gRNA
cttcagcccgccgtacagat

SEQ ID NO: 31211 - DNA, 20 bp, Artificial Sequence
  MKO10031211_A_Mgat4a
  gRNA
taggatatctcagcgctcct

SEQ ID NO: 31212 - DNA, 20 bp, Artificial Sequence
  MKO10031212_A_Mgat4a
  gRNA
gacaatggtgtttagctccg

SEQ ID NO: 31213 - DNA, 20 bp, Artificial Sequence
  MKO10031213_A_Mgat4b
  gRNA
tgcacctcgcgccgtacgct

SEQ ID NO: 31214 - DNA, 20 bp, Artificial Sequence
  MKO10031214_A_Mgat4b
  gRNA
cattccgagcgtacggcgcg

SEQ ID NO: 31215 - DNA, 20 bp, Artificial Sequence
  MKO10031215_A_Mgat4b
  gRNA
cttgctcagccgcgtgcaaa

SEQ ID NO: 31216 - DNA, 20 bp, Artificial Sequence
  MKO10031216_A_Mgat4c
  gRNA
ttctcacgatctcccacgtc

SEQ ID NO: 31217 - DNA, 20 bp, Artificial Sequence
  MKO10031217_A_Mgat4c
  gRNA
acgaacgtatctcccattga

SEQ ID NO: 31218 - DNA, 20 bp, Artificial Sequence
  MKO10031218_A_Mgat4c
  gRNA
catagcgttcagaattaagt

SEQ ID NO: 31219 - DNA, 20 bp, Artificial Sequence
  MKO10031219_A_Mgat5b
  gRNA
cgaagggcaccacgtgactc

SEQ ID NO: 31220 - DNA, 20 bp, Artificial Sequence
  MKO10031220_A_Mgat5b
  gRNA
tcgcaagatgagcgacctgc

SEQ ID NO: 31221 - DNA, 20 bp, Artificial Sequence
  MKO10031221_A_Mgat5b
  gRNA
ccagttctctgcccggcgcc

SEQ ID NO: 31222 - DNA, 20 bp, Artificial Sequence
  MKO10031222_A_Mgat5
  gRNA
gaaaacgctcgccgtcttgc

SEQ ID NO: 31223 - DNA, 20 bp, Artificial Sequence
  MKO10031223_A_Mgat5
  gRNA
cactccatagtctgcgtagc

SEQ ID NO: 31224 - DNA, 20 bp, Artificial Sequence
  MKO10031224_A_Mgat5
  gRNA
atggctacccccactgcgag

SEQ ID NO: 31225 - DNA, 20 bp, Artificial Sequence
  MKO10031225_A_Mga
  gRNA
gggcgaccacctaaaaacac

SEQ ID NO: 31226 - DNA, 20 bp, Artificial Sequence
  MKO10031226_A_Mga
  gRNA
gtaagacgaacacgatgagc

SEQ ID NO: 31227 - DNA, 20 bp, Artificial Sequence
  MKO10031227_A_Mga
  gRNA
aggaatagctccgatcaaga

SEQ ID NO: 31228 - DNA, 20 bp, Artificial Sequence
  MKO10031228_A_Mgea5
  gRNA
atcaacgttgaaacgcaaat

SEQ ID NO: 31229 - DNA, 20 bp, Artificial Sequence
  MKO10031229_A_Mgea5
  gRNA
ttcatctatgctatttcgcc

SEQ ID NO: 31230 - DNA, 20 bp, Artificial Sequence
  MKO10031230_A_Mgea5
  gRNA
ttggcgagagatgtattcag

SEQ ID NO: 31231 - DNA, 20 bp, Artificial Sequence
  MKO10031231_A_Mgl2
  gRNA
agatgaccaccagtagcagg

SEQ ID NO: 31232 - DNA, 20 bp, Artificial Sequence
  MKO10031232_A_Mgl2
  gRNA
gcagctgacaacttcgaaaa

SEQ ID NO: 31233 - DNA, 20 bp, Artificial Sequence
  MKO10031233_A_Mgl2
  gRNA
cctcagcctcctgctactgg

SEQ ID NO: 31234 - DNA, 20 bp, Artificial Sequence
  MKO10031234_A_Mgll
  gRNA
ggacgtcggggtagtccttc

SEQ ID NO: 31235 - DNA, 20 bp, Artificial Sequence
  MKO10031235_A_Mgll
  gRNA
cgcctgggtgaacttgcctc

SEQ ID NO: 31236 - DNA, 20 bp, Artificial Sequence
  MKO10031236_A_Mgll
  gRNA
actgtccgtctgcattgacc

SEQ ID NO: 31237 - DNA, 20 bp, Artificial Sequence
  MKO10031237_A_Mgme1
  gRNA
ctaaacgagagtacttcgct

SEQ ID NO: 31238 - DNA, 20 bp, Artificial Sequence
  MKO10031238_A_Mgme1
  gRNA
gcagccttatgcttactcac

SEQ ID NO: 31239 - DNA, 20 bp, Artificial Sequence
  MKO10031239_A_Mgme1
  gRNA
aagccacttggcccaatact

SEQ ID NO: 31240 - DNA, 20 bp, Artificial Sequence
  MKO10031240_A_Mgmt
  gRNA
cccaaagcggctcgtgcagt

SEQ ID NO: 31241 - DNA, 20 bp, Artificial Sequence
  MKO10031241_A_Mgmt
  gRNA
tcgaccagctctgagccgtc

SEQ ID NO: 31242 - DNA, 20 bp, Artificial Sequence
  MKO10031242_A_Mgmt
  gRNA
tgagcaaccgtatcccatgc

SEQ ID NO: 31243 - DNA, 20 bp, Artificial Sequence
  MKO10031243_A_Mgp
  gRNA
gctgtgtgagcgctacgcca

SEQ ID NO: 31244 - DNA, 20 bp, Artificial Sequence
  MKO10031244_A_Mgp
  gRNA
ctgcctacaaccgctacttc

SEQ ID NO: 31245 - DNA, 20 bp, Artificial Sequence
  MKO10031245_A_Mgp
  gRNA
aggtttctcaccgtagcaca

SEQ ID NO: 31246 - DNA, 20 bp, Artificial Sequence
  MKO10031246_A_Mgrn1
  gRNA
catcctgagtcgccgcatcg

SEQ ID NO: 31247 - DNA, 20 bp, Artificial Sequence
  MKO10031247_A_Mgrn1
  gRNA
ggaagctcaccggacttcgg

SEQ ID NO: 31248 - DNA, 20 bp, Artificial Sequence
  MKO10031248_A_Mgrn1
  gRNA
cacacgggcatcggcatcaa

SEQ ID NO: 31249 - DNA, 20 bp, Artificial Sequence
  MKO10031249_A_Mgst1
  gRNA
ttggaagcatggccgacctc

SEQ ID NO: 31250 - DNA, 20 bp, Artificial Sequence
  MKO10031250_A_Mgst1
  gRNA
gtttgttcgcactgacgaga

SEQ ID NO: 31251 - DNA, 20 bp, Artificial Sequence
  MKO10031251_A_Mgst1
  gRNA
caggaggccgatgccgagaa

SEQ ID NO: 31252 - DNA, 20 bp, Artificial Sequence
  MKO10031252_A_Mgst2
  gRNA
gaaagtccaggtattcgttc

SEQ ID NO: 31253 - DNA, 20 bp, Artificial Sequence
  MKO10031253_A_Mgst2
  gRNA
acgcccgtcacaagtatttc

SEQ ID NO: 31254 - DNA, 20 bp, Artificial Sequence
  MKO10031254_A_Mgst2
  gRNA
ctgtattcatcgtaatgctg

SEQ ID NO: 31255 - DNA, 20 bp, Artificial Sequence
  MKO10031255_A_Mgst3
  gRNA
tacgcatatggctactacac

SEQ ID NO: 31256 - DNA, 20 bp, Artificial Sequence
  MKO10031256_A_Mgst3
  gRNA
tgtagtagccatatgcgtaa

SEQ ID NO: 31257 - DNA, 20 bp, Artificial Sequence
  MKO10031257_A_Mgst3
  gRNA
ttgaacatatgcccgttctc

SEQ ID NO: 31258 - DNA, 20 bp, Artificial Sequence
  MKO10031258_A_Mia2
  gRNA
cgggtcctgtgtaatctctc

SEQ ID NO: 31259 - DNA, 20 bp, Artificial Sequence
  MKO10031259_A_Mia2
  gRNA
ggcaggtacagaaagcgtct

SEQ ID NO: 31260 - DNA, 20 bp, Artificial Sequence
  MKO10031260_A_Mia2
  gRNA
ttcaatctcgactgcatctc

SEQ ID NO: 31261 - DNA, 20 bp, Artificial Sequence
  MKO10031261_A_Mia3
  gRNA
ggcgagcgcttatcgtcttc

SEQ ID NO: 31262 - DNA, 20 bp, Artificial Sequence
  MKO10031262_A_Mia3
  gRNA
gcgacaactatccccccgag

SEQ ID NO: 31263 - DNA, 20 bp, Artificial Sequence
  MKO10031263_A_Mia3
  gRNA
aaattcacaaaacgacaatc

SEQ ID NO: 31264 - DNA, 20 bp, Artificial Sequence
  MKO10031264_A_Mia
  gRNA
aatcaggggccacgtagtcc

SEQ ID NO: 31265 - DNA, 20 bp, Artificial Sequence
  MKO10031265_A_Mia
  gRNA
gccgcttcttgactatatat

SEQ ID NO: 31266 - DNA, 20 bp, Artificial Sequence
  MKO10031266_A_Mia
  gRNA
cagacaagacgacgatgcca

SEQ ID NO: 31267 - DNA, 20 bp, Artificial Sequence
  MKO10031267_A_Mib1
  gRNA
ttccatcgaatgccaatgat

SEQ ID NO: 31268 - DNA, 20 bp, Artificial Sequence
  MKO10031268_A_Mib1
  gRNA
acggtgctaagaacctttac

SEQ ID NO: 31269 - DNA, 20 bp, Artificial Sequence
  MKO10031269_A_Mib1
  gRNA
ggctggatgcactccagtcc

SEQ ID NO: 31270 - DNA, 20 bp, Artificial Sequence
  MKO10031270_A_Mib2
  gRNA
aaccacgaacgtgtaccgag

SEQ ID NO: 31271 - DNA, 20 bp, Artificial Sequence
  MKO10031271_A_Mib2
  gRNA
ggttacgctgagcccccgac

SEQ ID NO: 31272 - DNA, 20 bp, Artificial Sequence
  MKO10031272_A_Mib2
  gRNA
agatgtctcatagcgctcga

SEQ ID NO: 31273 - DNA, 20 bp, Artificial Sequence
  MKO10031273_A_Mical1
  gRNA
ttcactatacgagagatgcg

SEQ ID NO: 31274 - DNA, 20 bp, Artificial Sequence
  MKO10031274_A_Mical1
  gRNA
cgtgcgcccattcacaaagt

SEQ ID NO: 31275 - DNA, 20 bp, Artificial Sequence
  MKO10031275_A_Mical1
  gRNA
ggatgtactgagtagctttc

SEQ ID NO: 31276 - DNA, 20 bp, Artificial Sequence
  MKO10031276_A_Mical2
  gRNA
acctagatccgctggaccat

SEQ ID NO: 31277 - DNA, 20 bp, Artificial Sequence
  MKO10031277_A_Mical2
  gRNA
gcttatccagtttgtgccac

SEQ ID NO: 31278 - DNA, 20 bp, Artificial Sequence
  MKO10031278_A_Mical2
  gRNA
cccccacagtgtctcatcgt

SEQ ID NO: 31279 - DNA, 20 bp, Artificial Sequence
  MKO10031279_A_Mical3
  gRNA
caggcctcggagatcgtgta

SEQ ID NO: 31280 - DNA, 20 bp, Artificial Sequence
  MKO10031280_A_Mical3
  gRNA
ttcaccatacacgatctccg

SEQ ID NO: 31281 - DNA, 20 bp, Artificial Sequence
  MKO10031281_A_Mical3
  gRNA
ctaccttcaagaggattagc

SEQ ID NO: 31282 - DNA, 20 bp, Artificial Sequence
  MKO10031282_A_Micalcl
  gRNA
atggacgactcggtaaactc

SEQ ID NO: 31283 - DNA, 20 bp, Artificial Sequence
  MKO10031283_A_Micalcl
  gRNA
ctgctccacaactccgaagc

SEQ ID NO: 31284 - DNA, 20 bp, Artificial Sequence
  MKO10031284_A_Micalcl
  gRNA
tgatggtacctttatcctta

SEQ ID NO: 31285 - DNA, 20 bp, Artificial Sequence
  MKO10031285_A_Micall1
  gRNA
tgtcttcgagaataatcgat

SEQ ID NO: 31286 - DNA, 20 bp, Artificial Sequence
  MKO10031286_A_Micall1
  gRNA
caggctgcgcatgcgctgct

SEQ ID NO: 31287 - DNA, 20 bp, Artificial Sequence
  MKO10031287_A_Micall1
  gRNA
ccgccaagtaccgctgcacc

SEQ ID NO: 31288 - DNA, 20 bp, Artificial Sequence
  MKO10031288_A_Micall2
  gRNA
actcacttggggaccggcca

SEQ ID NO: 31289 - DNA, 20 bp, Artificial Sequence
  MKO10031289_A_Micall2
  gRNA
gattcgaccgaagaactttc

SEQ ID NO: 31290 - DNA, 20 bp, Artificial Sequence
  MKO10031290_A_Micall2
  gRNA
ggtagaggcgcccgtcagcc

SEQ ID NO: 31291 - DNA, 20 bp, Artificial Sequence
  MKO10031291_A_Micu1
  gRNA
cgaagtgttcatgactccgc

SEQ ID NO: 31292 - DNA, 20 bp, Artificial Sequence
  MKO10031292_A_Micu1
  gRNA
ttcttgctgttaacgcatgg

SEQ ID NO: 31293 - DNA, 20 bp, Artificial Sequence
  MKO10031293_A_Micu1
  gRNA
atgaacacttcggtttcacc

SEQ ID NO: 31294 - DNA, 20 bp, Artificial Sequence
  MKO10031294_A_Micu2
  gRNA
aatactctccgtcgtgctcc

SEQ ID NO: 31295 - DNA, 20 bp, Artificial Sequence
  MKO10031295_A_Micu2
  gRNA
gatatcgaggatgtactgtc

SEQ ID NO: 31296 - DNA, 20 bp, Artificial Sequence
  MKO10031296_A_Micu2
  gRNA
actgcatgaaccgctgtttg

SEQ ID NO: 31297 - DNA, 20 bp, Artificial Sequence
  MKO10031297_A_Micu3
  gRNA
tctctcgagatgtagcatag

SEQ ID NO: 31298 - DNA, 20 bp, Artificial Sequence
  MKO10031298_A_Micu3
  gRNA
tttgatgatcccttccaaac

SEQ ID NO: 31299 - DNA, 20 bp, Artificial Sequence
  MKO10031299_A_Micu3
  gRNA
atgctacatctcgagagaga

SEQ ID NO: 31300 - DNA, 20 bp, Artificial Sequence
  MKO10031300_A_Mid1ip1
  gRNA
cgcgccaatgaagcgattca

SEQ ID NO: 31301 - DNA, 20 bp, Artificial Sequence
  MKO10031301_A_Mid1ip1
  gRNA
ctccccactcgatatcattg

SEQ ID NO: 31302 - DNA, 20 bp, Artificial Sequence
  MKO10031302_A_Mid1ip1
  gRNA
ccatccgcaatgatatcgag

SEQ ID NO: 31303 - DNA, 20 bp, Artificial Sequence
  MKO10031303_A_Mid1
  gRNA
cttcaacatgttgacaagtt

SEQ ID NO: 31304 - DNA, 20 bp, Artificial Sequence
  MKO10031304_A_Mid1
  gRNA
gaagaaactgctagaatgtc

SEQ ID NO: 31305 - DNA, 20 bp, Artificial Sequence
  MKO10031305_A_Mid1
  gRNA
tgtgtttctcttaataagat

SEQ ID NO: 31306 - DNA, 20 bp, Artificial Sequence
  MKO10031306_A_Mid2
  gRNA
gttcactgttgcgcttaacc

SEQ ID NO: 31307 - DNA, 20 bp, Artificial Sequence
  MKO10031307_A_Mid2
  gRNA
ctgttgaccgctcaagacac

SEQ ID NO: 31308 - DNA, 20 bp, Artificial Sequence
  MKO10031308_A_Mid2
  gRNA
ctgcaaaaaacattgccgag

SEQ ID NO: 31309 - DNA, 20 bp, Artificial Sequence
  MKO10031309_A_Midn
  gRNA
caagttgacgctcgtgccca

SEQ ID NO: 31310 - DNA, 20 bp, Artificial Sequence
  MKO10031310_A_Midn
  gRNA
aacggactgttccggcctcg

SEQ ID NO: 31311 - DNA, 20 bp, Artificial Sequence
  MKO10031311_A_Midn
  gRNA
tcatgtgatccccgactcgc

SEQ ID NO: 31312 - DNA, 20 bp, Artificial Sequence
  MKO10031312_A_Mief1
  gRNA
ctgggttctcacgacgaacc

SEQ ID NO: 31313 - DNA, 20 bp, Artificial Sequence
  MKO10031313_A_Mief1
  gRNA
aaccggtcagccaacatgtc

SEQ ID NO: 31314 - DNA, 20 bp, Artificial Sequence
  MKO10031314_A_Mief1
  gRNA
ctcaagtacatgtcccgaag

SEQ ID NO: 31315 - DNA, 20 bp, Artificial Sequence
  MKO10031315_A_Mief2
  gRNA
atccagggcccgcaaacggg

SEQ ID NO: 31316 - DNA, 20 bp, Artificial Sequence
  MKO10031316_A_Mief2
  gRNA
cagtagagaccgcccgtttg

SEQ ID NO: 31317 - DNA, 20 bp, Artificial Sequence
  MKO10031317_A_Mief2
  gRNA
gccttacccgctttacagcc

SEQ ID NO: 31318 - DNA, 20 bp, Artificial Sequence
  MKO10031318_A_Mien1
  gRNA
ggcactacggacaccggcgc

SEQ ID NO: 31319 - DNA, 20 bp, Artificial Sequence
  MKO10031319_A_Mien1
  gRNA
cgcgactcaatctcaatgcc

SEQ ID NO: 31320 - DNA, 20 bp, Artificial Sequence
  MKO10031320_A_Mien1
  gRNA
attgagattgagtcgcgact

SEQ ID NO: 31321 - DNA, 20 bp, Artificial Sequence
  MKO10031321_A_Mier1
  gRNA
tcaaaatatttacatcgacg

SEQ ID NO: 31322 - DNA, 20 bp, Artificial Sequence
  MKO10031322_A_Mier1
  gRNA
cagcactgttcggttacctg

SEQ ID NO: 31323 - DNA, 20 bp, Artificial Sequence
  MKO10031323_A_Mier1
  gRNA
tgatccatcagctgacatgc

SEQ ID NO: 31324 - DNA, 20 bp, Artificial Sequence
  MKO10031324_A_Mier2
  gRNA
tgacacggctccagccctgc

SEQ ID NO: 31325 - DNA, 20 bp, Artificial Sequence
  MKO10031325_A_Mier2
  gRNA
acgagctgcttgcactgtat

SEQ ID NO: 31326 - DNA, 20 bp, Artificial Sequence
  MKO10031326_A_Mier2
  gRNA
ggacaaggacttcattgacc

SEQ ID NO: 31327 - DNA, 20 bp, Artificial Sequence
  MKO10031327_A_Mier3
  gRNA
gcactggaattcgcaaccgc

SEQ ID NO: 31328 - DNA, 20 bp, Artificial Sequence
  MKO10031328_A_Mier3
  gRNA
atcgcgaaagacctgctgtc

SEQ ID NO: 31329 - DNA, 20 bp, Artificial Sequence
  MKO10031329_A_Mier3
  gRNA
catagccgtagaacgccaac

SEQ ID NO: 31330 - DNA, 20 bp, Artificial Sequence
  MKO10031330_A_Mif4gd
  gRNA
gcccacggcggaagacgctc

SEQ ID NO: 31331 - DNA, 20 bp, Artificial Sequence
  MKO10031331_A_Mif4gd
  gRNA
gccagagcgtcttccgccgt

SEQ ID NO: 31332 - DNA, 20 bp, Artificial Sequence
  MKO10031332_A_Mif4gd
  gRNA
catgtgctacgccatcattc

SEQ ID NO: 31333 - DNA, 20 bp, Artificial Sequence
  MKO10031333_A_Mif
  gRNA
gcaaacctgtgcgggcttgc

SEQ ID NO: 31334 - DNA, 20 bp, Artificial Sequence
  MKO10031334_A_Mif
  gRNA
ggccaccggcaagcccgcac

SEQ ID NO: 31335 - DNA, 20 bp, Artificial Sequence
  MKO10031335_A_Mif
  gRNA
ccagtacatcgcagtgcacg

SEQ ID NO: 31336 - DNA, 20 bp, Artificial Sequence
  MKO10031336_A_Miip
  gRNA
tcgagatgacacgtttgatg

SEQ ID NO: 31337 - DNA, 20 bp, Artificial Sequence
  MKO10031337_A_Miip
  gRNA
ggccatacctaggctatgat

SEQ ID NO: 31338 - DNA, 20 bp, Artificial Sequence
  MKO10031338_A_Miip
  gRNA
aggggggccgtagttcttcc

SEQ ID NO: 31339 - DNA, 20 bp, Artificial Sequence
  MKO10031339_A_Mill1
  gRNA
cctagagtacaggcggtagc

SEQ ID NO: 31340 - DNA, 20 bp, Artificial Sequence
  MKO10031340_A_Mill1
  gRNA
cacccgtattctggccgttc

SEQ ID NO: 31341 - DNA, 20 bp, Artificial Sequence
  MKO10031341_A_Mill1
  gRNA
cagcaggttcattgatattg

SEQ ID NO: 31342 - DNA, 20 bp, Artificial Sequence
  MKO10031342_A_Mill2
  gRNA
tgacattatagcgcagagtg

SEQ ID NO: 31343 - DNA, 20 bp, Artificial Sequence
  MKO10031343_A_Mill2
  gRNA
gctcttcatctacgtatatt

SEQ ID NO: 31344 - DNA, 20 bp, Artificial Sequence
  MKO10031344_A_Mill2
  gRNA
gcagtcctactgttgatctt

SEQ ID NO: 31345 - DNA, 20 bp, Artificial Sequence
  MKO10031345_A_Milr1
  gRNA
acatcacctattcgctcttc

SEQ ID NO: 31346 - DNA, 20 bp, Artificial Sequence
  MKO10031346_A_Milr1
  gRNA
atctccaatgccaacgagtc

SEQ ID NO: 31347 - DNA, 20 bp, Artificial Sequence
  MKO10031347_A_Milr1
  gRNA
ttctggagatgcgcctgcac

SEQ ID NO: 31348 - DNA, 20 bp, Artificial Sequence
  MKO10031348_A_Mina
  gRNA
gtcaaatacgaaccccgaaa

SEQ ID NO: 31349 - DNA, 20 bp, Artificial Sequence
  MKO10031349_A_Mina
  gRNA
gttcgtatttgacattgcaa

SEQ ID NO: 31350 - DNA, 20 bp, Artificial Sequence
  MKO10031350_A_Mina
  gRNA
aaggccttacttgttctggt

SEQ ID NO: 31351 - DNA, 20 bp, Artificial Sequence
  MKO10031351_A_Mink1
  gRNA
caggggcggcacgtcaagac

SEQ ID NO: 31352 - DNA, 20 bp, Artificial Sequence
  MKO10031352_A_Mink1
  gRNA
cagagctggtcatcgttccc

SEQ ID NO: 31353 - DNA, 20 bp, Artificial Sequence
  MKO10031353_A_Mink1
  gRNA
gatgtcgtccaggctgcggg

SEQ ID NO: 31354 - DNA, 20 bp, Artificial Sequence
  MKO10031354_A_Minos1
  gRNA
acctagcttcacgaccgtgt

SEQ ID NO: 31355 - DNA, 20 bp, Artificial Sequence
  MKO10031355_A_Minos1
  gRNA
gaacatgtcggagtccgagc

SEQ ID NO: 31356 - DNA, 20 bp, Artificial Sequence
  MKO10031356_A_Minos1
  gRNA
caatcccacgccagaaccaa

SEQ ID NO: 31357 - DNA, 20 bp, Artificial Sequence
  MKO10031357_A_Minpp1
  gRNA
gctcactcgcagagacccgt

SEQ ID NO: 31358 - DNA, 20 bp, Artificial Sequence
  MKO10031358_A_Minpp1
  gRNA
gttaatcgcaagttccgaag

SEQ ID NO: 31359 - DNA, 20 bp, Artificial Sequence
  MKO10031359_A_Minpp1
  gRNA
gcagctggaccggctgttaa

SEQ ID NO: 31360 - DNA, 20 bp, Artificial Sequence
  MKO10031360_A_Mios
  gRNA
atgcccccgcttcactcgtc

SEQ ID NO: 31361 - DNA, 20 bp, Artificial Sequence
  MKO10031361_A_Mios
  gRNA
tgcgttcctgacgagtgaag

SEQ ID NO: 31362 - DNA, 20 bp, Artificial Sequence
  MKO10031362_A_Mios
  gRNA
agttgctgtacgtgacagag

SEQ ID NO: 31363 - DNA, 20 bp, Artificial Sequence
  MKO10031363_A_Miox
  gRNA
ccacatcgggtcgatagacc

SEQ ID NO: 31364 - DNA, 20 bp, Artificial Sequence
  MKO10031364_A_Miox
  gRNA
tccggatgccctccgcggtc

SEQ ID NO: 31365 - DNA, 20 bp, Artificial Sequence
  MKO10031365_A_Miox
  gRNA
gatcgtgcaaaagtccgacc

SEQ ID NO: 31366 - DNA, 20 bp, Artificial Sequence
  MKO10031366_A_Mipep
  gRNA
ccgagagttcgtcaaaaatg

SEQ ID NO: 31367 - DNA, 20 bp, Artificial Sequence
  MKO10031367_A_Mipep
  gRNA
agtcccttgatgcggaaacc

SEQ ID NO: 31368 - DNA, 20 bp, Artificial Sequence
  MKO10031368_A_Mipep
  gRNA
ggtacctggtttccgcatca

SEQ ID NO: 31369 - DNA, 20 bp, Artificial Sequence
  MKO10031369_A_Mipol1
  gRNA
ttccgcaatgtcagcctccg

SEQ ID NO: 31370 - DNA, 20 bp, Artificial Sequence
  MKO10031370_A_Mipol1
  gRNA
ccgactgcagttagccctca

SEQ ID NO: 31371 - DNA, 20 bp, Artificial Sequence
  MKO10031371_A_Mipol1
  gRNA
gacattgcggaaaggactgc

SEQ ID NO: 31372 - DNA, 20 bp, Artificial Sequence
  MKO10031372_A_Mip
  gRNA
gcttggagcctcgctacgtt

SEQ ID NO: 31373 - DNA, 20 bp, Artificial Sequence
  MKO10031373_A_Mip
  gRNA
cccaggggcccaacgtagcg

SEQ ID NO: 31374 - DNA, 20 bp, Artificial Sequence
  MKO10031374_A_Mip
  gRNA
tctttgctacatacgacgag

SEQ ID NO: 31375 - DNA, 20 bp, Artificial Sequence
  MKO10031375_A_Mis12
  gRNA
agatcacccctgtccagact

SEQ ID NO: 31376 - DNA, 20 bp, Artificial Sequence
  MKO10031376_A_Mis12
  gRNA
gaaactcgagcttctccaac

SEQ ID NO: 31377 - DNA, 20 bp, Artificial Sequence
  MKO10031377_A_Mis12
  gRNA
atgctacgtagatcctcagc

SEQ ID NO: 31378 - DNA, 20 bp, Artificial Sequence
  MKO10031378_A_Mis18a
  gRNA
cgtctcctgtaacgtctctg

SEQ ID NO: 31379 - DNA, 20 bp, Artificial Sequence
  MKO10031379_A_Mis18a
  gRNA
tttcaacggcttcaacgctg

SEQ ID NO: 31380 - DNA, 20 bp, Artificial Sequence
  MKO10031380_A_Mis18a
  gRNA
acaagtcgcgcttgtagtcc

SEQ ID NO: 31381 - DNA, 20 bp, Artificial Sequence
  MKO10031381_A_Mis18bp1
  gRNA
tgattaggcagtccacctac

SEQ ID NO: 31382 - DNA, 20 bp, Artificial Sequence
  MKO10031382_A_Mis18bp1
  gRNA
gaagaacttgtccgccaaac

SEQ ID NO: 31383 - DNA, 20 bp, Artificial Sequence
  MKO10031383_A_Mis18bp1
  gRNA
agacctaatttaacactatc

SEQ ID NO: 31384 - DNA, 20 bp, Artificial Sequence
  MKO10031384_A_Misp
  gRNA
cctgcgtccactgcgattca

SEQ ID NO: 31385 - DNA, 20 bp, Artificial Sequence
  MKO10031385_A_Misp
  gRNA
gccaaggaagacgcgtctgt

SEQ ID NO: 31386 - DNA, 20 bp, Artificial Sequence
  MKO10031386_A_Misp
  gRNA
cttgtgccgctttacccttg

SEQ ID NO: 31387 - DNA, 20 bp, Artificial Sequence
  MKO10031387_A_Mitd1
  gRNA
gttctcagaacgaaaatctc

SEQ ID NO: 31388 - DNA, 20 bp, Artificial Sequence
  MKO10031388_A_Mitd1
  gRNA
ctatacatgaccgagaaatt

SEQ ID NO: 31389 - DNA, 20 bp, Artificial Sequence
  MKO10031389_A_Mitd1
  gRNA
gatacctacttcatacccag

SEQ ID NO: 31390 - DNA, 20 bp, Artificial Sequence
  MKO10031390_A_Mitf
  gRNA
gatcgacctctacagcaacc

SEQ ID NO: 31391 - DNA, 20 bp, Artificial Sequence
  MKO10031391_A_Mitf
  gRNA
tgtgtctagttacccgtctc

SEQ ID NO: 31392 - DNA, 20 bp, Artificial Sequence
  MKO10031392_A_Mitf
  gRNA
ctctcgagcgtcgtgcatgc

SEQ ID NO: 31393 - DNA, 20 bp, Artificial Sequence
  MKO10031393_A_Mixl1
  gRNA
cgacggggcggccgagcctt

SEQ ID NO: 31394 - DNA, 20 bp, Artificial Sequence
  MKO10031394_A_Mixl1
  gRNA
caagcgcacgtcgttcagct

SEQ ID NO: 31395 - DNA, 20 bp, Artificial Sequence
  MKO10031395_A_Mixl1
  gRNA
gaggaaaactccccgccttg

SEQ ID NO: 31396 - DNA, 20 bp, Artificial Sequence
  MKO10031396_A_Mki67
  gRNA
gtaaccccgtttacttgagt

SEQ ID NO: 31397 - DNA, 20 bp, Artificial Sequence
  MKO10031397_A_Mki67
  gRNA
ccatcattgaccgctccttt

SEQ ID NO: 31398 - DNA, 20 bp, Artificial Sequence
  MKO10031398_A_Mki67
  gRNA
ttaatgtgtaggaaccatca

SEQ ID NO: 31399 - DNA, 20 bp, Artificial Sequence
  MKO10031399_A_Mkks
  gRNA
aatataggagcaacgcctat

SEQ ID NO: 31400 - DNA, 20 bp, Artificial Sequence
  MKO10031400_A_Mkks
  gRNA
atcctcattgacacgaagta

SEQ ID NO: 31401 - DNA, 20 bp, Artificial Sequence
  MKO10031401_A_Mkks
  gRNA
actggtcagatacgctgtca

SEQ ID NO: 31402 - DNA, 20 bp, Artificial Sequence
  MKO10031402_A_Mkl1
  gRNA
cttccgtttcaaatagtcct

SEQ ID NO: 31403 - DNA, 20 bp, Artificial Sequence
  MKO10031403_A_Mkl1
  gRNA
gccttaccctggcccgctcc

SEQ ID NO: 31404 - DNA, 20 bp, Artificial Sequence
  MKO10031404_A_Mkl1
  gRNA
caccaatgatagcctccttc

SEQ ID NO: 31405 - DNA, 20 bp, Artificial Sequence
  MKO10031405_A_Mkl2
  gRNA
tcttacgtggcatgatgccc

SEQ ID NO: 31406 - DNA, 20 bp, Artificial Sequence
  MKO10031406_A_Mkl2
  gRNA
gcctcatttgccactagtct

SEQ ID NO: 31407 - DNA, 20 bp, Artificial Sequence
  MKO10031407_A_Mkl2
  gRNA
cccaagactagtggcaaatg

SEQ ID NO: 31408 - DNA, 20 bp, Artificial Sequence
  MKO10031408_A_Mkln1
  gRNA
gtaatattctgaacgatagc

SEQ ID NO: 31409 - DNA, 20 bp, Artificial Sequence
  MKO10031409_A_Mkln1
  gRNA
ccttgtcgattcattaaaat

SEQ ID NO: 31410 - DNA, 20 bp, Artificial Sequence
  MKO10031410_A_Mkln1
  gRNA
cttgctgtaccagttcagac

SEQ ID NO: 31411 - DNA, 20 bp, Artificial Sequence
  MKO10031411_A_Mknk1
  gRNA
tcgaagtcgagtgttccgtg

SEQ ID NO: 31412 - DNA, 20 bp, Artificial Sequence
  MKO10031412_A_Mknk1
  gRNA
gacgtcccgcaccactctac

SEQ ID NO: 31413 - DNA, 20 bp, Artificial Sequence
  MKO10031413_A_Mknk1
  gRNA
cactcgacttcgactgtgcc

SEQ ID NO: 31414 - DNA, 20 bp, Artificial Sequence
  MKO10031414_A_Mknk2
  gRNA
cacgtcctgtactaccacgc

SEQ ID NO: 31415 - DNA, 20 bp, Artificial Sequence
  MKO10031415_A_Mknk2
  gRNA
cgttaaagtggcgccttcta

SEQ ID NO: 31416 - DNA, 20 bp, Artificial Sequence
  MKO10031416_A_Mknk2
  gRNA
ttaccttgacagcatattcc

SEQ ID NO: 31417 - DNA, 20 bp, Artificial Sequence
  MKO10031417_A_Mkrn1
  gRNA
gatcccaaagcgacgctcgc

SEQ ID NO: 31418 - DNA, 20 bp, Artificial Sequence
  MKO10031418_A_Mkrn1
  gRNA
gtgtttatggagaccgctgc

SEQ ID NO: 31419 - DNA, 20 bp, Artificial Sequence
  MKO10031419_A_Mkrn1
  gRNA
aaccccagcgagcgtcgctt

SEQ ID NO: 31420 - DNA, 20 bp, Artificial Sequence
  MKO10031420_A_Mkrn2
  gRNA
gcctgtcctgcatccgtcaa

SEQ ID NO: 31421 - DNA, 20 bp, Artificial Sequence
  MKO10031421_A_Mkrn2
  gRNA
gttgcactcactttatgatt

SEQ ID NO: 31422 - DNA, 20 bp, Artificial Sequence
  MKO10031422_A_Mkrn2
  gRNA
tccaaagcgacactccccag

SEQ ID NO: 31423 - DNA, 20 bp, Artificial Sequence
  MKO10031423_A_Mkrn3
  gRNA
gcctcaaactcgccgcgcgc

SEQ ID NO: 31424 - DNA, 20 bp, Artificial Sequence
  MKO10031424_A_Mkrn3
  gRNA
gggaccatgcgacctcggta

SEQ ID NO: 31425 - DNA, 20 bp, Artificial Sequence
  MKO10031425_A_Mkrn3
  gRNA
tagatctccgccgcccagaa

SEQ ID NO: 31426 - DNA, 20 bp, Artificial Sequence
  MKO10031426_A_Mks1
  gRNA
acaccgccctgacgaagaag

SEQ ID NO: 31427 - DNA, 20 bp, Artificial Sequence
  MKO10031427_A_Mks1
  gRNA
tggcgaacgtcaggcggcgg

SEQ ID NO: 31428 - DNA, 20 bp, Artificial Sequence
  MKO10031428_A_Mks1
  gRNA
cagtgtaagtgaagattcgc

SEQ ID NO: 31429 - DNA, 20 bp, Artificial Sequence
  MKO10031429_A_Mkx
  gRNA
tggcgcgtcctcttaagcag

SEQ ID NO: 31430 - DNA, 20 bp, Artificial Sequence
  MKO10031430_A_Mkx
  gRNA
cccttagtagatccgatgtc

SEQ ID NO: 31431 - DNA, 20 bp, Artificial Sequence
  MKO10031431_A_Mkx
  gRNA
ctcgcagatgacgctagtgc

SEQ ID NO: 31432 - DNA, 20 bp, Artificial Sequence
  MKO10031432_A_Mlana
  gRNA
taccacctaccacgggctga

SEQ ID NO: 31433 - DNA, 20 bp, Artificial Sequence
  MKO10031433_A_Mlana
  gRNA
caggacaaaaggcgtcatat

SEQ ID NO: 31434 - DNA, 20 bp, Artificial Sequence
  MKO10031434_A_Mlana
  gRNA
gatcaggatgccgatccctg

SEQ ID NO: 31435 - DNA, 20 bp, Artificial Sequence
  MKO10031435_A_Mlc1
  gRNA
cgtagtagtcacagcgaacg

SEQ ID NO: 31436 - DNA, 20 bp, Artificial Sequence
  MKO10031436_A_Mlc1
  gRNA
ccgggccgaaatgatcaccg

SEQ ID NO: 31437 - DNA, 20 bp, Artificial Sequence
  MKO10031437_A_Mlc1
  gRNA
cgactcacgtttatggctga

SEQ ID NO: 31438 - DNA, 20 bp, Artificial Sequence
  MKO10031438_A_Mlec
  gRNA
ggttggaatgaacactccga

SEQ ID NO: 31439 - DNA, 20 bp, Artificial Sequence
  MKO10031439_A_Mlec
  gRNA
ggtcctccggggtggagcgc

SEQ ID NO: 31440 - DNA, 20 bp, Artificial Sequence
  MKO10031440_A_Mlec
  gRNA
cagtttcatgccatagtccg

SEQ ID NO: 31441 - DNA, 20 bp, Artificial Sequence
  MKO10031441_A_Mlf1
  gRNA
aatcgtcgagaacgtgatga

SEQ ID NO: 31442 - DNA, 20 bp, Artificial Sequence
  MKO10031442_A_Mlf1
  gRNA
catcacgttctcgacgatta

SEQ ID NO: 31443 - DNA, 20 bp, Artificial Sequence
  MKO10031443_A_Mlf1
  gRNA
gggacactcacgcgaagaag

SEQ ID NO: 31444 - DNA, 20 bp, Artificial Sequence
  MKO10031444_A_Mlf2
  gRNA
tccccagtccggcggtttca

SEQ ID NO: 31445 - DNA, 20 bp, Artificial Sequence
  MKO10031445_A_Mlf2
  gRNA
agcgcatctccgacgtctcc

SEQ ID NO: 31446 - DNA, 20 bp, Artificial Sequence
  MKO10031446_A_Mlf2
  gRNA
cacatgagccgcatgttgtc

SEQ ID NO: 31447 - DNA, 20 bp, Artificial Sequence
  MKO10031447_A_Mlh1
  gRNA
tacctcaccacgaaagccat

SEQ ID NO: 31448 - DNA, 20 bp, Artificial Sequence
  MKO10031448_A_Mlh1
  gRNA
tcaccgtgatcagggtgccc

SEQ ID NO: 31449 - DNA, 20 bp, Artificial Sequence
  MKO10031449_A_Mlh1
  gRNA
caaccagggcaccctgatca

SEQ ID NO: 31450 - DNA, 20 bp, Artificial Sequence
  MKO10031450_A_Mlh3
  gRNA
tgcccatgaacgcattcgtt

SEQ ID NO: 31451 - DNA, 20 bp, Artificial Sequence
  MKO10031451_A_Mlh3
  gRNA
atggatgaggatggccgaac

SEQ ID NO: 31452 - DNA, 20 bp, Artificial Sequence
  MKO10031452_A_Mlh3
  gRNA
gctccaaacgaatgcgttca

SEQ ID NO: 31453 - DNA, 20 bp, Artificial Sequence
  MKO10031453_A_Mlip
  gRNA
gagatcagcccctcgtactt

SEQ ID NO: 31454 - DNA, 20 bp, Artificial Sequence
  MKO10031454_A_Mlip
  gRNA
gatactggattatccgtcag

SEQ ID NO: 31455 - DNA, 20 bp, Artificial Sequence
  MKO10031455_A_Mlip
  gRNA
gtttctcgaccagctgctct

SEQ ID NO: 31456 - DNA, 20 bp, Artificial Sequence
  MKO10031456_A_Mlkl
  gRNA
cccaacatcttgcgtatatt

SEQ ID NO: 31457 - DNA, 20 bp, Artificial Sequence
  MKO10031457_A_Mlkl
  gRNA
aggaacatcttggacctccg

SEQ ID NO: 31458 - DNA, 20 bp, Artificial Sequence
  MKO10031458_A_Mlkl
  gRNA
ccgatacctgtataagcctc

SEQ ID NO: 31459 - DNA, 20 bp, Artificial Sequence
  MKO10031459_A_Mllt10
  gRNA
cccacatgatcgttataata

SEQ ID NO: 31460 - DNA, 20 bp, Artificial Sequence
  MKO10031460_A_Mllt10
  gRNA
accttattataacgatcatg

SEQ ID NO: 31461 - DNA, 20 bp, Artificial Sequence
  MKO10031461_A_Mllt10
  gRNA
gcagacaatgttcaatactg

SEQ ID NO: 31462 - DNA, 20 bp, Artificial Sequence
  MKO10031462_A_Mllt11
  gRNA
tacacctacctacgagagca

SEQ ID NO: 31463 - DNA, 20 bp, Artificial Sequence
  MKO10031463_A_Mllt11
  gRNA
taggtgtatctgacaggccc

SEQ ID NO: 31464 - DNA, 20 bp, Artificial Sequence
  MKO10031464_A_Mllt11
  gRNA
agcagcgttggcaaaatgaa

SEQ ID NO: 31465 - DNA, 20 bp, Artificial Sequence
  MKO10031465_A_Mllt1
  gRNA
taggtgatggtaatgcccga

SEQ ID NO: 31466 - DNA, 20 bp, Artificial Sequence
  MKO10031466_A_Mllt1
  gRNA
tggtgggcttcttccgtagc

SEQ ID NO: 31467 - DNA, 20 bp, Artificial Sequence
  MKO10031467_A_Mllt1
  gRNA
cctcactaaccttggagccg

SEQ ID NO: 31468 - DNA, 20 bp, Artificial Sequence
  MKO10031468_A_Mllt3
  gRNA
gactctcttacctgcgactt

SEQ ID NO: 31469 - DNA, 20 bp, Artificial Sequence
  MKO10031469_A_Mllt3
  gRNA
tcaggcatatctagatgagt

SEQ ID NO: 31470 - DNA, 20 bp, Artificial Sequence
  MKO10031470_A_Mllt3
  gRNA
tctgcattctgatgacaacg

SEQ ID NO: 31471 - DNA, 20 bp, Artificial Sequence
  MKO10031471_A_Mllt4
  gRNA
cgccgtttcatgacaacttc

SEQ ID NO: 31472 - DNA, 20 bp, Artificial Sequence
  MKO10031472_A_Mllt4
  gRNA
gaggagagcatgcgcatgtc

SEQ ID NO: 31473 - DNA, 20 bp, Artificial Sequence
  MKO10031473_A_Mllt4
  gRNA
caattcaactgtacaactag

SEQ ID NO: 31474 - DNA, 20 bp, Artificial Sequence
  MKO10031474_A_Mllt6
  gRNA
gcctcatgatcgcttcaaca

SEQ ID NO: 31475 - DNA, 20 bp, Artificial Sequence
  MKO10031475_A_Mllt6
  gRNA
gttcgccaacgtgctcacga

SEQ ID NO: 31476 - DNA, 20 bp, Artificial Sequence
  MKO10031476_A_Mllt6
  gRNA
aagcttgtcggcatccgtgg

SEQ ID NO: 31477 - DNA, 20 bp, Artificial Sequence
  MKO10031477_A_Mlph
  gRNA
ccccgcagggtcgtgaagat

SEQ ID NO: 31478 - DNA, 20 bp, Artificial Sequence
  MKO10031478_A_Mlph
  gRNA
tgaagcgagccctcacgtgc

SEQ ID NO: 31479 - DNA, 20 bp, Artificial Sequence
  MKO10031479_A_Mlph
  gRNA
ggcactgtcgtctgctgttc

SEQ ID NO: 31480 - DNA, 20 bp, Artificial Sequence
  MKO10031480_A_Mlst8
  gRNA
gactccgtcataactgatga

SEQ ID NO: 31481 - DNA, 20 bp, Artificial Sequence
  MKO10031481_A_Mlst8
  gRNA
aggactgcacagctcgcatc

SEQ ID NO: 31482 - DNA, 20 bp, Artificial Sequence
  MKO10031482_A_Mlst8
  gRNA
cgaagcatgattgctgctgc

SEQ ID NO: 31483 - DNA, 20 bp, Artificial Sequence
  MKO10031483_A_Mlxipl
  gRNA
ttactggaagcggcgcatcg

SEQ ID NO: 31484 - DNA, 20 bp, Artificial Sequence
  MKO10031484_A_Mlxipl
  gRNA
ttccctcagatgtgcaacgg

SEQ ID NO: 31485 - DNA, 20 bp, Artificial Sequence
  MKO10031485_A_Mlxipl
  gRNA
tgtcccggcatagcaacttg

SEQ ID NO: 31486 - DNA, 20 bp, Artificial Sequence
  MKO10031486_A_Mlxip
  gRNA
cttggtgagcgacgcatcga

SEQ ID NO: 31487 - DNA, 20 bp, Artificial Sequence
  MKO10031487_A_Mlxip
  gRNA
atgatctgctgtcggcgcgg

SEQ ID NO: 31488 - DNA, 20 bp, Artificial Sequence
  MKO10031488_A_Mlxip
  gRNA
gccggatcttgtcccgccac

SEQ ID NO: 31489 - DNA, 20 bp, Artificial Sequence
  MKO10031489_A_Mlx
  gRNA
gagtgtgcgcacgccgcctc

SEQ ID NO: 31490 - DNA, 20 bp, Artificial Sequence
  MKO10031490_A_Mlx
  gRNA
taggttcacgatgacggagc

SEQ ID NO: 31491 - DNA, 20 bp, Artificial Sequence
  MKO10031491_A_Mlx
  gRNA
catactcttctgtagaacga

SEQ ID NO: 31492 - DNA, 20 bp, Artificial Sequence
  MKO10031492_A_Mlycd
  gRNA
gtgccctccgactgaaaccg

SEQ ID NO: 31493 - DNA, 20 bp, Artificial Sequence
  MKO10031493_A_Mlycd
  gRNA
atggacatgaagcggcgtgt

SEQ ID NO: 31494 - DNA, 20 bp, Artificial Sequence
  MKO10031494_A_Mlycd
  gRNA
cccttgaggctctcgtgaac

SEQ ID NO: 31495 - DNA, 20 bp, Artificial Sequence
  MKO10031495_A_Mmaa
  gRNA
ataggactgtccgggccccc

SEQ ID NO: 31496 - DNA, 20 bp, Artificial Sequence
  MKO10031496_A_Mmaa
  gRNA
tccagacttccgagcgccta

SEQ ID NO: 31497 - DNA, 20 bp, Artificial Sequence
  MKO10031497_A_Mmaa
  gRNA
gcgcactcaagttgctccgt

SEQ ID NO: 31498 - DNA, 20 bp, Artificial Sequence
  MKO10031498_A_Mmab
  gRNA
cgacgtcctgtagcatgcac

SEQ ID NO: 31499 - DNA, 20 bp, Artificial Sequence
  MKO10031499_A_Mmab
  gRNA
caggctgcagccgtcctcga

SEQ ID NO: 31500 - DNA, 20 bp, Artificial Sequence
  MKO10031500_A_Mmab
  gRNA
tgatcaagtatttgaagccg

SEQ ID NO: 31501 - DNA, 20 bp, Artificial Sequence
  MKO10031501_A_Mmachc
  gRNA
gtgtgcatacacccccgatt

SEQ ID NO: 31502 - DNA, 20 bp, Artificial Sequence
  MKO10031502_A_Mmachc
  gRNA
gctgtctgggcgagaatctt

SEQ ID NO: 31503 - DNA, 20 bp, Artificial Sequence
  MKO10031503_A_Mmachc
  gRNA
gggctggtttgccatccgag

SEQ ID NO: 31504 - DNA, 20 bp, Artificial Sequence
  MKO10031504_A_Mmadhc
  gRNA
ggcttcgattgtcacctcaa

SEQ ID NO: 31505 - DNA, 20 bp, Artificial Sequence
  MKO10031505_A_Mmadhc
  gRNA
caatcgaagcctatattccc

SEQ ID NO: 31506 - DNA, 20 bp, Artificial Sequence
  MKO10031506_A_Mmadhc
  gRNA
ctggatcgcacactcaactt

SEQ ID NO: 31507 - DNA, 20 bp, Artificial Sequence
  MKO10031507_A_Mmd2
  gRNA
gctggtacctcttgtgcgcc

SEQ ID NO: 31508 - DNA, 20 bp, Artificial Sequence
  MKO10031508_A_Mmd2
  gRNA
actgcctgcacatgatcgac

SEQ ID NO: 31509 - DNA, 20 bp, Artificial Sequence
  MKO10031509_A_Mmd2
  gRNA
tatggtctcccagtcgtcat

SEQ ID NO: 31510 - DNA, 20 bp, Artificial Sequence
  MKO10031510_A_Mmd
  gRNA
tgaccatccgatcgcacatg

SEQ ID NO: 31511 - DNA, 20 bp, Artificial Sequence
  MKO10031511_A_Mmd
  gRNA
ccctggcatctcatatgcgt

SEQ ID NO: 31512 - DNA, 20 bp, Artificial Sequence
  MKO10031512_A_Mmd
  gRNA
gctatcttaccatggggcgt

SEQ ID NO: 31513 - DNA, 20 bp, Artificial Sequence
  MKO10031513_A_Mmel1
  gRNA
gccagcctccgcaagcgtac

SEQ ID NO: 31514 - DNA, 20 bp, Artificial Sequence
  MKO10031514_A_Mmel1
  gRNA
aacttctaccagtacgcttg

SEQ ID NO: 31515 - DNA, 20 bp, Artificial Sequence
  MKO10031515_A_Mmel1
  gRNA
gagaggacggttgtaaaacg

SEQ ID NO: 31516 - DNA, 20 bp, Artificial Sequence
  MKO10031516_A_Mme
  gRNA
tgctcgactgattcagaata

SEQ ID NO: 31517 - DNA, 20 bp, Artificial Sequence
  MKO10031517_A_Mme
  gRNA
ggccagtagcatcagataac

SEQ ID NO: 31518 - DNA, 20 bp, Artificial Sequence
  MKO10031518_A_Mme
  gRNA
tcccagttatctgatgctac

SEQ ID NO: 31519 - DNA, 20 bp, Artificial Sequence
  MKO10031519_A_Mmgt1
  gRNA
ggaacagcactcgaccacga

SEQ ID NO: 31520 - DNA, 20 bp, Artificial Sequence
  MKO10031520_A_Mmgt1
  gRNA
gaatcatggcgccgtcgctg

SEQ ID NO: 31521 - DNA, 20 bp, Artificial Sequence
  MKO10031521_A_Mmgt1
  gRNA
tatggcatagttcatatcgc

SEQ ID NO: 31522 - DNA, 20 bp, Artificial Sequence
  MKO10031522_A_Mmgt2
  gRNA
tgcgcttacctgttacggcg

SEQ ID NO: 31523 - DNA, 20 bp, Artificial Sequence
  MKO10031523_A_Mmgt2
  gRNA
agaactatatccgccggcag

SEQ ID NO: 31524 - DNA, 20 bp, Artificial Sequence
  MKO10031524_A_Mmgt2
  gRNA
agtatgaaccacgccgtaac

SEQ ID NO: 31525 - DNA, 20 bp, Artificial Sequence
  MKO10031525_A_Mmp10
  gRNA
caagttcatgggctgcaacc

SEQ ID NO: 31526 - DNA, 20 bp, Artificial Sequence
  MKO10031526_A_Mmp10
  gRNA
cttgtggagaacctgtagac

SEQ ID NO: 31527 - DNA, 20 bp, Artificial Sequence
  MKO10031527_A_Mmp10
  gRNA
ctggctcatgcctacccacc

SEQ ID NO: 31528 - DNA, 20 bp, Artificial Sequence
  MKO10031528_A_Mmp11
  gRNA
cgaagcgcttctgtcggttc

SEQ ID NO: 31529 - DNA, 20 bp, Artificial Sequence
  MKO10031529_A_Mmp11
  gRNA
gccttagcccagatgaccga

SEQ ID NO: 31530 - DNA, 20 bp, Artificial Sequence
  MKO10031530_A_Mmp11
  gRNA
aacttgccgtttgacgggcc

SEQ ID NO: 31531 - DNA, 20 bp, Artificial Sequence
  MKO10031531_A_Mmp12
  gRNA
ataatgcacatccctcgatg

SEQ ID NO: 31532 - DNA, 20 bp, Artificial Sequence
  MKO10031532_A_Mmp12
  gRNA
acatcctcacgcttcatgtc

SEQ ID NO: 31533 - DNA, 20 bp, Artificial Sequence
  MKO10031533_A_Mmp12
  gRNA
tacgtatgtcatcagcagag

SEQ ID NO: 31534 - DNA, 20 bp, Artificial Sequence
  MKO10031534_A_Mmp13
  gRNA
acctgtaagttaagttcgtt

SEQ ID NO: 31535 - DNA, 20 bp, Artificial Sequence
  MKO10031535_A_Mmp13
  gRNA
ctaccatcctgcgactcttg

SEQ ID NO: 31536 - DNA, 20 bp, Artificial Sequence
  MKO10031536_A_Mmp13
  gRNA
tgggcatccccaccatagtt

SEQ ID NO: 31537 - DNA, 20 bp, Artificial Sequence
  MKO10031537_A_Mmp14
  gRNA
gggcgagtatgccacattcg

SEQ ID NO: 31538 - DNA, 20 bp, Artificial Sequence
  MKO10031538_A_Mmp14
  gRNA
atgccacggcgatcgtcatc

SEQ ID NO: 31539 - DNA, 20 bp, Artificial Sequence
  MKO10031539_A_Mmp14
  gRNA
ttgcctgatgacgatcgccg

SEQ ID NO: 31540 - DNA, 20 bp, Artificial Sequence
  MKO10031540_A_Mmp15
  gRNA
aacgtttccgccgtcgacgc

SEQ ID NO: 31541 - DNA, 20 bp, Artificial Sequence
  MKO10031541_A_Mmp15
  gRNA
tcgtagccgaatgtcatcat

SEQ ID NO: 31542 - DNA, 20 bp, Artificial Sequence
  MKO10031542_A_Mmp15
  gRNA
tgaaagccaacctgcgtcga

SEQ ID NO: 31543 - DNA, 20 bp, Artificial Sequence
  MKO10031543_A_Mmp16
  gRNA
cgaaagcgctacgcattaac

SEQ ID NO: 31544 - DNA, 20 bp, Artificial Sequence
  MKO10031544_A_Mmp16
  gRNA
catgatagcggtggggtcgt

SEQ ID NO: 31545 - DNA, 20 bp, Artificial Sequence
  MKO10031545_A_Mmp16
  gRNA
caacgaccccaccgctatca

SEQ ID NO: 31546 - DNA, 20 bp, Artificial Sequence
  MKO10031546_A_Mmp17
  gRNA
aatgacggctaccccttcga

SEQ ID NO: 31547 - DNA, 20 bp, Artificial Sequence
  MKO10031547_A_Mmp17
  gRNA
gtgggtgacccgctacgcta

SEQ ID NO: 31548 - DNA, 20 bp, Artificial Sequence
  MKO10031548_A_Mmp17
  gRNA
cgaaggggtagccgtcattg

SEQ ID NO: 31549 - DNA, 20 bp, Artificial Sequence
  MKO10031549_A_Mmp19
  gRNA
tgggcactcccgatataccc

SEQ ID NO: 31550 - DNA, 20 bp, Artificial Sequence
  MKO10031550_A_Mmp19
  gRNA
gtcatccatctgaccggaaa

SEQ ID NO: 31551 - DNA, 20 bp, Artificial Sequence
  MKO10031551_A_Mmp19
  gRNA
cgtatgaagcagccccgttg

SEQ ID NO: 31552 - DNA, 20 bp, Artificial Sequence
  MKO10031552_A_Mmp1a
  gRNA
ttcagtgtaccacgtgtaac

SEQ ID NO: 31553 - DNA, 20 bp, Artificial Sequence
  MKO10031553_A_Mmp1a
  gRNA
attatgaccttgatgagacg

SEQ ID NO: 31554 - DNA, 20 bp, Artificial Sequence
  MKO10031554_A_Mmp1a
  gRNA
ctcactcattctagtgatat

SEQ ID NO: 31555 - DNA, 20 bp, Artificial Sequence
  MKO10031555_A_Mmp1b
  gRNA
aatcgcatccaggccttata

SEQ ID NO: 31556 - DNA, 20 bp, Artificial Sequence
  MKO10031556_A_Mmp1b
  gRNA
caacttaccctcattgttgt

SEQ ID NO: 31557 - DNA, 20 bp, Artificial Sequence
  MKO10031557_A_Mmp1b
  gRNA
tttattgctccatgtgtagc

SEQ ID NO: 31558 - DNA, 20 bp, Artificial Sequence
  MKO10031558_A_Mmp20
  gRNA
aggcggtagttagccacatc

SEQ ID NO: 31559 - DNA, 20 bp, Artificial Sequence
  MKO10031559_A_Mmp20
  gRNA
cagctgtactccacgcatgc

SEQ ID NO: 31560 - DNA, 20 bp, Artificial Sequence
  MKO10031560_A_Mmp20
  gRNA
ggtgaaatctataggggttc

SEQ ID NO: 31561 - DNA, 20 bp, Artificial Sequence
  MKO10031561_A_Mmp21
  gRNA
tcgatgcctacgtccatgtc

SEQ ID NO: 31562 - DNA, 20 bp, Artificial Sequence
  MKO10031562_A_Mmp21
  gRNA
tctacgaaaaccgcaacaac

SEQ ID NO: 31563 - DNA, 20 bp, Artificial Sequence
  MKO10031563_A_Mmp21
  gRNA
tgtgaggcaatccgaggacg

SEQ ID NO: 31564 - DNA, 20 bp, Artificial Sequence
  MKO10031564_A_Mmp23
  gRNA
acgccgctacacgctgacac

SEQ ID NO: 31565 - DNA, 20 bp, Artificial Sequence
  MKO10031565_A_Mmp23
  gRNA
tcagcgtgtagcggcgtctt

SEQ ID NO: 31566 - DNA, 20 bp, Artificial Sequence
  MKO10031566_A_Mmp23
  gRNA
taagcccggaagagacgcga

SEQ ID NO: 31567 - DNA, 20 bp, Artificial Sequence
  MKO10031567_A_Mmp24
  gRNA
cgcagatgcccgcgactcat

SEQ ID NO: 31568 - DNA, 20 bp, Artificial Sequence
  MKO10031568_A_Mmp24
  gRNA
acacaacttcaagctaccgc

SEQ ID NO: 31569 - DNA, 20 bp, Artificial Sequence
  MKO10031569_A_Mmp24
  gRNA
ttcgtcaggctttcgatgtg

SEQ ID NO: 31570 - DNA, 20 bp, Artificial Sequence
  MKO10031570_A_Mmp25
  gRNA
gcgtggacaggatccgccgg

SEQ ID NO: 31571 - DNA, 20 bp, Artificial Sequence
  MKO10031571_A_Mmp25
  gRNA
cactcagagaatagcgacgt

SEQ ID NO: 31572 - DNA, 20 bp, Artificial Sequence
  MKO10031572_A_Mmp25
  gRNA
atcctggggcaaacggtatg

SEQ ID NO: 31573 - DNA, 20 bp, Artificial Sequence
  MKO10031573_A_Mmp27
  gRNA
atgctatcactactttccgc

SEQ ID NO: 31574 - DNA, 20 bp, Artificial Sequence
  MKO10031574_A_Mmp27
  gRNA
gatactaaccatagatggac

SEQ ID NO: 31575 - DNA, 20 bp, Artificial Sequence
  MKO10031575_A_Mmp27
  gRNA
ttgcgatcatgaaagtgccc

SEQ ID NO: 31576 - DNA, 20 bp, Artificial Sequence
  MKO10031576_A_Mmp28
  gRNA
cgcacggcccctcgaacagc

SEQ ID NO: 31577 - DNA, 20 bp, Artificial Sequence
  MKO10031577_A_Mmp28
  gRNA
gcgggtcatctggcgcagtg

SEQ ID NO: 31578 - DNA, 20 bp, Artificial Sequence
  MKO10031578_A_Mmp28
  gRNA
gggctggccaacgccttcga

SEQ ID NO: 31579 - DNA, 20 bp, Artificial Sequence
  MKO10031579_A_Mmp2
  gRNA
gcagtggtccgcgtaaagta

SEQ ID NO: 31580 - DNA, 20 bp, Artificial Sequence
  MKO10031580_A_Mmp2
  gRNA
tgtattcccgaccgttgaac

SEQ ID NO: 31581 - DNA, 20 bp, Artificial Sequence
  MKO10031581_A_Mmp2
  gRNA
aagttgtagttggccacatc

SEQ ID NO: 31582 - DNA, 20 bp, Artificial Sequence
  MKO10031582_A_Mmp3
  gRNA
actttgacgatgatgaacga

SEQ ID NO: 31583 - DNA, 20 bp, Artificial Sequence
  MKO10031583_A_Mmp3
  gRNA
aataggtaccaacctattcc

SEQ ID NO: 31584 - DNA, 20 bp, Artificial Sequence
  MKO10031584_A_Mmp3
  gRNA
tgagcatctccattaatccc

SEQ ID NO: 31585 - DNA, 20 bp, Artificial Sequence
  MKO10031585_A_Mmp7
  gRNA
atttgatccactacgatccg

SEQ ID NO: 31586 - DNA, 20 bp, Artificial Sequence
  MKO10031586_A_Mmp7
  gRNA
caaagtgagcatctccgcct

SEQ ID NO: 31587 - DNA, 20 bp, Artificial Sequence
  MKO10031587_A_Mmp7
  gRNA
gggactgcggatatcataat

SEQ ID NO: 31588 - DNA, 20 bp, Artificial Sequence
  MKO10031588_A_Mmp8
  gRNA
gaccttcaccgagatcttac

SEQ ID NO: 31589 - DNA, 20 bp, Artificial Sequence
  MKO10031589_A_Mmp8
  gRNA
acttaccaagcaatcaattc

SEQ ID NO: 31590 - DNA, 20 bp, Artificial Sequence
  MKO10031590_A_Mmp8
  gRNA
aagcttctctgcaaccatcg

SEQ ID NO: 31591 - DNA, 20 bp, Artificial Sequence
  MKO10031591_A_Mmp9
  gRNA
acaactcgtcgtcgtcgaaa

SEQ ID NO: 31592 - DNA, 20 bp, Artificial Sequence
  MKO10031592_A_Mmp9
  gRNA
atttcgacgacgacgagttg

SEQ ID NO: 31593 - DNA, 20 bp, Artificial Sequence
  MKO10031593_A_Mmp9
  gRNA
cggcccgggtgtaaccatag

SEQ ID NO: 31594 - DNA, 20 bp, Artificial Sequence
  MKO10031594_A_Mmrn1
  gRNA
gttatccccgacagtgatac

SEQ ID NO: 31595 - DNA, 20 bp, Artificial Sequence
  MKO10031595_A_Mmrn1
  gRNA
agtcacaccgctgttgacca

SEQ ID NO: 31596 - DNA, 20 bp, Artificial Sequence
  MKO10031596_A_Mmrn1
  gRNA
cagcggtgtgactttcagcc

SEQ ID NO: 31597 - DNA, 20 bp, Artificial Sequence
  MKO10031597_A_Mmrn2
  gRNA
ggtgtccttaccagaagtcc

SEQ ID NO: 31598 - DNA, 20 bp, Artificial Sequence
  MKO10031598_A_Mmrn2
  gRNA
accttaatctcattaaactc

SEQ ID NO: 31599 - DNA, 20 bp, Artificial Sequence
  MKO10031599_A_Mmrn2
  gRNA
aaagccatcttctactgact

SEQ ID NO: 31600 - DNA, 20 bp, Artificial Sequence
  MKO10031600_A_Mms19
  gRNA
gctcctcgagcccgagttcg

SEQ ID NO: 31601 - DNA, 20 bp, Artificial Sequence
  MKO10031601_A_Mms19
  gRNA
cctaccgcagagcatgtctg

SEQ ID NO: 31602 - DNA, 20 bp, Artificial Sequence
  MKO10031602_A_Mms19
  gRNA
aaaatgctgaaccccgaact

SEQ ID NO: 31603 - DNA, 20 bp, Artificial Sequence
  MKO10031603_A_Mms22l
  gRNA
cgtggattacttctgtacat

SEQ ID NO: 31604 - DNA, 20 bp, Artificial Sequence
  MKO10031604_A_Mms22l
  gRNA
acgccaaagcagacagtatt

SEQ ID NO: 31605 - DNA, 20 bp, Artificial Sequence
  MKO10031605_A_Mms22l
  gRNA
agctcatcgaccaacatgga

SEQ ID NO: 31606 - DNA, 20 bp, Artificial Sequence
  MKO10031606_A_Mn1
  gRNA
gctgcgcgcatgaaagccgt

SEQ ID NO: 31607 - DNA, 20 bp, Artificial Sequence
  MKO10031607_A_Mn1
  gRNA
cgtcgctccgacggagcgtt

SEQ ID NO: 31608 - DNA, 20 bp, Artificial Sequence
  MKO10031608_A_Mn1
  gRNA
tctgatatctccaaccgatt

SEQ ID NO: 31609 - DNA, 20 bp, Artificial Sequence
  MKO10031609_A_Mnat1
  gRNA
gccgtcgctgctcatgttct

SEQ ID NO: 31610 - DNA, 20 bp, Artificial Sequence
  MKO10031610_A_Mnat1
  gRNA
gcttaccagctcatctaaaa

SEQ ID NO: 31611 - DNA, 20 bp, Artificial Sequence
  MKO10031611_A_Mnat1
  gRNA
tgaagatcccactgttgata

SEQ ID NO: 31612 - DNA, 20 bp, Artificial Sequence
  MKO10031612_A_Mnd1
  gRNA
acaaacataccgtctcttgc

SEQ ID NO: 31613 - DNA, 20 bp, Artificial Sequence
  MKO10031613_A_Mnd1
  gRNA
agcctccaacttgcgcttcc

SEQ ID NO: 31614 - DNA, 20 bp, Artificial Sequence
  MKO10031614_A_Mnd1
  gRNA
tcatgccaggaagcgcaagt

SEQ ID NO: 31615 - DNA, 20 bp, Artificial Sequence
  MKO10031615_A_Mndal
  gRNA
aaagcttgtaccgtagctga

SEQ ID NO: 31616 - DNA, 20 bp, Artificial Sequence
  MKO10031616_A_Mndal
  gRNA
aaagcgatcgcaaaaactga

SEQ ID NO: 31617 - DNA, 20 bp, Artificial Sequence
  MKO10031617_A_Mndal
  gRNA
atctaacattccttcagcta

SEQ ID NO: 31618 - DNA, 20 bp, Artificial Sequence
  MKO10031618_A_Mnda
  gRNA
atctaacattctttcggcta

SEQ ID NO: 31619 - DNA, 20 bp, Artificial Sequence
  MKO10031619_A_Mnda
  gRNA
ttcaggaagcatagaagttg

SEQ ID NO: 31620 - DNA, 20 bp, Artificial Sequence
  MKO10031620_A_Mnda
  gRNA
tggtgactggcacatggctg

SEQ ID NO: 31621 - DNA, 20 bp, Artificial Sequence
  MKO10031621_A_Mns1
  gRNA
cttgttccgccgctcttgct

SEQ ID NO: 31622 - DNA, 20 bp, Artificial Sequence
  MKO10031622_A_Mns1
  gRNA
tgagcagtttgagctcgaca

SEQ ID NO: 31623 - DNA, 20 bp, Artificial Sequence
  MKO10031623_A_Mns1
  gRNA
gcaaaatgaaaacgacgaga

SEQ ID NO: 31624 - DNA, 20 bp, Artificial Sequence
  MKO10031624_A_Mnt
  gRNA
tggcgatcttctcccgcgca

SEQ ID NO: 31625 - DNA, 20 bp, Artificial Sequence
  MKO10031625_A_Mnt
  gRNA
gaagcgcaacatccccaacg

SEQ ID NO: 31626 - DNA, 20 bp, Artificial Sequence
  MKO10031626_A_Mnt
  gRNA
cttcgaatctgagcgtgctg

SEQ ID NO: 31627 - DNA, 20 bp, Artificial Sequence
  MKO10031627_A_Mnx1
  gRNA
cagtagacgcgcgcagccac

SEQ ID NO: 31628 - DNA, 20 bp, Artificial Sequence
  MKO10031628_A_Mnx1
  gRNA
gaccagatactgtagtcgcg

SEQ ID NO: 31629 - DNA, 20 bp, Artificial Sequence
  MKO10031629_A_Mnx1
  gRNA
ccaagaggttcgactgcgcc

SEQ ID NO: 31630 - DNA, 20 bp, Artificial Sequence
  MKO10031630_A_Moap1
  gRNA
cgtctagaccaagtcattgc

SEQ ID NO: 31631 - DNA, 20 bp, Artificial Sequence
  MKO10031631_A_Moap1
  gRNA
gcaaccaatagtgctttccg

SEQ ID NO: 31632 - DNA, 20 bp, Artificial Sequence
  MKO10031632_A_Moap1
  gRNA
tcgagcacccatgttagcac

SEQ ID NO: 31633 - DNA, 20 bp, Artificial Sequence
  MKO10031633_A_Mob1a
  gRNA
ctgggacctgccgacatgac

SEQ ID NO: 31634 - DNA, 20 bp, Artificial Sequence
  MKO10031634_A_Mob1a
  gRNA
tgactccgtgatgcagctgc

SEQ ID NO: 31635 - DNA, 20 bp, Artificial Sequence
  MKO10031635_A_Mob1a
  gRNA
agctgcccagtcatgtcggc

SEQ ID NO: 31636 - DNA, 20 bp, Artificial Sequence
  MKO10031636_A_Mob1b
  gRNA
cactgggcagcggcaaccta

SEQ ID NO: 31637 - DNA, 20 bp, Artificial Sequence
  MKO10031637_A_Mob1b
  gRNA
gaagcatgacagccatccgt

SEQ ID NO: 31638 - DNA, 20 bp, Artificial Sequence
  MKO10031638_A_Mob1b
  gRNA
cccgaagaatttcatgtcag

SEQ ID NO: 31639 - DNA, 20 bp, Artificial Sequence
  MKO10031639_A_Mob2
  gRNA
gggagatcgacctcaacgag

SEQ ID NO: 31640 - DNA, 20 bp, Artificial Sequence
  MKO10031640_A_Mob2
  gRNA
atttggtgtgctccggctcc

SEQ ID NO: 31641 - DNA, 20 bp, Artificial Sequence
  MKO10031641_A_Mob2
  gRNA
ccccaaagaaaccgctgtca

SEQ ID NO: 31642 - DNA, 20 bp, Artificial Sequence
  MKO10031642_A_Mob3a
  gRNA
tttcgaccgcatcgcccaga

SEQ ID NO: 31643 - DNA, 20 bp, Artificial Sequence
  MKO10031643_A_Mob3a
  gRNA
gcctgactcaccgacattag

SEQ ID NO: 31644 - DNA, 20 bp, Artificial Sequence
  MKO10031644_A_Mob3a
  gRNA
agttcgaagcgctgcgtgcc

SEQ ID NO: 31645 - DNA, 20 bp, Artificial Sequence
  MKO10031645_A_Mob3b
  gRNA
tcaggtccacacccgagttg

SEQ ID NO: 31646 - DNA, 20 bp, Artificial Sequence
  MKO10031646_A_Mob3b
  gRNA
gcagccgtgcagttacccaa

SEQ ID NO: 31647 - DNA, 20 bp, Artificial Sequence
  MKO10031647_A_Mob3b
  gRNA
gatgaacctcatagaccgca

SEQ ID NO: 31648 - DNA, 20 bp, Artificial Sequence
  MKO10031648_A_Mob3c
  gRNA
ggccccgctacgagtaccgc

SEQ ID NO: 31649 - DNA, 20 bp, Artificial Sequence
  MKO10031649_A_Mob3c
  gRNA
aggacgagcgtcagtaccga

SEQ ID NO: 31650 - DNA, 20 bp, Artificial Sequence
  MKO10031650_A_Mob3c
  gRNA
agactcggaagagtcgggtc

SEQ ID NO: 31651 - DNA, 20 bp, Artificial Sequence
  MKO10031651_A_Mob4
  gRNA
caattctgccttgaactaaa

SEQ ID NO: 31652 - DNA, 20 bp, Artificial Sequence
  MKO10031652_A_Mob4
  gRNA
cagcaagtccatttagttca

SEQ ID NO: 31653 - DNA, 20 bp, Artificial Sequence
  MKO10031653_A_Mob4
  gRNA
agttgctgtcatctgagtac

SEQ ID NO: 31654 - DNA, 20 bp, Artificial Sequence
  MKO10031654_A_Mobp
  gRNA
caactccaagcgtgagatcg

SEQ ID NO: 31655 - DNA, 20 bp, Artificial Sequence
  MKO10031655_A_Mobp
  gRNA
cgatctcacgcttggagttg

SEQ ID NO: 31656 - DNA, 20 bp, Artificial Sequence
  MKO10031656_A_Mobp
  gRNA
gccgtgccacgtcccctcag

SEQ ID NO: 31657 - DNA, 20 bp, Artificial Sequence
  MKO10031657_A_Mocos
  gRNA
gcttcagcgctattacatcg

SEQ ID NO: 31658 - DNA, 20 bp, Artificial Sequence
  MKO10031658_A_Mocos
  gRNA
gatgtaatagcgctgaagca

SEQ ID NO: 31659 - DNA, 20 bp, Artificial Sequence
  MKO10031659_A_Mocos
  gRNA
tattgactagcagagcaccc

SEQ ID NO: 31660 - DNA, 20 bp, Artificial Sequence
  MKO10031660_A_Mocs1
  gRNA
ccaacggcatcaacctagcc

SEQ ID NO: 31661 - DNA, 20 bp, Artificial Sequence
  MKO10031661_A_Mocs1
  gRNA
ccgggctaggttgatgccgt

SEQ ID NO: 31662 - DNA, 20 bp, Artificial Sequence
  MKO10031662_A_Mocs1
  gRNA
tgccgcactattccgaacgc

SEQ ID NO: 31663 - DNA, 20 bp, Artificial Sequence
  MKO10031663_A_Mocs2
  gRNA
cgtcaagagtatgtcgagct

SEQ ID NO: 31664 - DNA, 20 bp, Artificial Sequence
  MKO10031664_A_Mocs2
  gRNA
gaaagatgtggacgatgtcc

SEQ ID NO: 31665 - DNA, 20 bp, Artificial Sequence
  MKO10031665_A_Mocs2
  gRNA
aatggtctccgagcgaactc

SEQ ID NO: 31666 - DNA, 20 bp, Artificial Sequence
  MKO10031666_A_Mocs3
  gRNA
caacgtgcccacgcgctacc

SEQ ID NO: 31667 - DNA, 20 bp, Artificial Sequence
  MKO10031667_A_Mocs3
  gRNA
gatctcgtcccgcgacagcg

SEQ ID NO: 31668 - DNA, 20 bp, Artificial Sequence
  MKO10031668_A_Mocs3
  gRNA
cgtccggcctcaagtagagg

SEQ ID NO: 31669 - DNA, 20 bp, Artificial Sequence
  MKO10031669_A_Mogat1
  gRNA
cctcatggaatattcgtgcc

SEQ ID NO: 31670 - DNA, 20 bp, Artificial Sequence
  MKO10031670_A_Mogat1
  gRNA
ctgtgcatccgccagcgcaa

SEQ ID NO: 31671 - DNA, 20 bp, Artificial Sequence
  MKO10031671_A_Mogat1
  gRNA
gcgcctcctttgcacctccg

SEQ ID NO: 31672 - DNA, 20 bp, Artificial Sequence
  MKO10031672_A_Mogat2
  gRNA
cccttcccggaactacatcg

SEQ ID NO: 31673 - DNA, 20 bp, Artificial Sequence
  MKO10031673_A_Mogat2
  gRNA
ctgcgcgcccccaacgatga

SEQ ID NO: 31674 - DNA, 20 bp, Artificial Sequence
  MKO10031674_A_Mogat2
  gRNA
ggaagcccgcgatgtagttc

SEQ ID NO: 31675 - DNA, 20 bp, Artificial Sequence
  MKO10031675_A_Mogs
  gRNA
ccacacggcacctcgccagt

SEQ ID NO: 31676 - DNA, 20 bp, Artificial Sequence
  MKO10031676_A_Mogs
  gRNA
cgctggccttcggcctgtcg

SEQ ID NO: 31677 - DNA, 20 bp, Artificial Sequence
  MKO10031677_A_Mogs
  gRNA
tcggcagcatatccacgatg

SEQ ID NO: 31678 - DNA, 20 bp, Artificial Sequence
  MKO10031678_A_Mog
  gRNA
tatcccatccgggctttagt

SEQ ID NO: 31679 - DNA, 20 bp, Artificial Sequence
  MKO10031679_A_Mog
  gRNA
ctgccgtgccgcatctctcc

SEQ ID NO: 31680 - DNA, 20 bp, Artificial Sequence
  MKO10031680_A_Mog
  gRNA
tgaacttaccaaaagtccga

SEQ ID NO: 31681 - DNA, 20 bp, Artificial Sequence
  MKO10031681_A_Mon1a
  gRNA
ttcgctccgagcccgagagc

SEQ ID NO: 31682 - DNA, 20 bp, Artificial Sequence
  MKO10031682_A_Mon1a
  gRNA
ccaaatgggttccccgcttt

SEQ ID NO: 31683 - DNA, 20 bp, Artificial Sequence
  MKO10031683_A_Mon1a
  gRNA
tggcgcatgtccgtagccag

SEQ ID NO: 31684 - DNA, 20 bp, Artificial Sequence
  MKO10031684_A_Mon1b
  gRNA
gctaccgtaccgtgagtaga

SEQ ID NO: 31685 - DNA, 20 bp, Artificial Sequence
  MKO10031685_A_Mon1b
  gRNA
tgccggcgcttagttgaaga

SEQ ID NO: 31686 - DNA, 20 bp, Artificial Sequence
  MKO10031686_A_Mon1b
  gRNA
ggtgcaccagccttcgcggc

SEQ ID NO: 31687 - DNA, 20 bp, Artificial Sequence
  MKO10031687_A_Mon2
  gRNA
gtcctgcaccaacagccccg

SEQ ID NO: 31688 - DNA, 20 bp, Artificial Sequence
  MKO10031688_A_Mon2
  gRNA
ccttggtcccacaccccatt

SEQ ID NO: 31689 - DNA, 20 bp, Artificial Sequence
  MKO10031689_A_Mon2
  gRNA
agaatatgcagagcgacctg

SEQ ID NO: 31690 - DNA, 20 bp, Artificial Sequence
  MKO10031690_A_Morc1
  gRNA
aatatggtaacgggcttaag

SEQ ID NO: 31691 - DNA, 20 bp, Artificial Sequence
  MKO10031691_A_Morc1
  gRNA
cacatcgagtcttacagccc

SEQ ID NO: 31692 - DNA, 20 bp, Artificial Sequence
  MKO10031692_A_Morc1
  gRNA
atattgcccgatgaacttca

SEQ ID NO: 31693 - DNA, 20 bp, Artificial Sequence
  MKO10031693_A_Morc2a
  gRNA
accactcatgaattcttatt

SEQ ID NO: 31694 - DNA, 20 bp, Artificial Sequence
  MKO10031694_A_Morc2a
  gRNA
gccatactgcccaatttgag

SEQ ID NO: 31695 - DNA, 20 bp, Artificial Sequence
  MKO10031695_A_Morc2a
  gRNA
aaagcataaatcctcctcga

SEQ ID NO: 31696 - DNA, 20 bp, Artificial Sequence
  MKO10031696_A_Morc2b
  gRNA
cccgacgaagacctcagtcc

SEQ ID NO: 31697 - DNA, 20 bp, Artificial Sequence
  MKO10031697_A_Morc2b
  gRNA
tatttacgctgaaaagcgag

SEQ ID NO: 31698 - DNA, 20 bp, Artificial Sequence
  MKO10031698_A_Morc2b
  gRNA
cccgtaccgcccaatctgtg

SEQ ID NO: 31699 - DNA, 20 bp, Artificial Sequence
  MKO10031699_A_Morc3
  gRNA
tgtttgttgaacgtcacgat

SEQ ID NO: 31700 - DNA, 20 bp, Artificial Sequence
  MKO10031700_A_Morc3
  gRNA
ccattcccgtacaatccaac

SEQ ID NO: 31701 - DNA, 20 bp, Artificial Sequence
  MKO10031701_A_Morc3
  gRNA
caaattctactagtcatacc

SEQ ID NO: 31702 - DNA, 20 bp, Artificial Sequence
  MKO10031702_A_Morc4
  gRNA
gtacaataaccgcctgcgcc

SEQ ID NO: 31703 - DNA, 20 bp, Artificial Sequence
  MKO10031703_A_Morc4
  gRNA
ccgcaggggcccctcggtac

SEQ ID NO: 31704 - DNA, 20 bp, Artificial Sequence
  MKO10031704_A_Morc4
  gRNA
gcgacccttcagtgccatcg

SEQ ID NO: 31705 - DNA, 20 bp, Artificial Sequence
  MKO10031705_A_Morf4l1
  gRNA
gcctcttctctatgaagcaa

SEQ ID NO: 31706 - DNA, 20 bp, Artificial Sequence
  MKO10031706_A_Morf4l1
  gRNA
acctttgcttcatagagaag

SEQ ID NO: 31707 - DNA, 20 bp, Artificial Sequence
  MKO10031707_A_Morf4l1
  gRNA
cactcaccctcctggaattt

SEQ ID NO: 31708 - DNA, 20 bp, Artificial Sequence
  MKO10031708_A_Morf4l2
  gRNA
tcttccgcacagaaccggaa

SEQ ID NO: 31709 - DNA, 20 bp, Artificial Sequence
  MKO10031709_A_Morf4l2
  gRNA
caattctcacgaataatctc

SEQ ID NO: 31710 - DNA, 20 bp, Artificial Sequence
  MKO10031710_A_Morf4l2
  gRNA
tccctgcgacttcttacaat

SEQ ID NO: 31711 - DNA, 20 bp, Artificial Sequence
  MKO10031711_A_Morn1
  gRNA
ttactacgaaggcgaatttg

SEQ ID NO: 31712 - DNA, 20 bp, Artificial Sequence
  MKO10031712_A_Morn1
  gRNA
ttcatgacgccgtgcccttg

SEQ ID NO: 31713 - DNA, 20 bp, Artificial Sequence
  MKO10031713_A_Morn1
  gRNA
ctccccttcatagcgacctc

SEQ ID NO: 31714 - DNA, 20 bp, Artificial Sequence
  MKO10031714_A_Morn2
  gRNA
ccagtgtactttgccccagt

SEQ ID NO: 31715 - DNA, 20 bp, Artificial Sequence
  MKO10031715_A_Morn2
  gRNA
gggacttacacattcccaac

SEQ ID NO: 31716 - DNA, 20 bp, Artificial Sequence
  MKO10031716_A_Morn2
  gRNA
ggaagttaccacaccactgc

SEQ ID NO: 31717 - DNA, 20 bp, Artificial Sequence
  MKO10031717_A_Morn3
  gRNA
gatcgactttggccgtgatg

SEQ ID NO: 31718 - DNA, 20 bp, Artificial Sequence
  MKO10031718_A_Morn3
  gRNA
gtaacaaccagcgcagcggg

SEQ ID NO: 31719 - DNA, 20 bp, Artificial Sequence
  MKO10031719_A_Morn3
  gRNA
ggactacccaccttaggtat

SEQ ID NO: 31720 - DNA, 20 bp, Artificial Sequence
  MKO10031720_A_Morn4
  gRNA
catggaataccccgcaacga

SEQ ID NO: 31721 - DNA, 20 bp, Artificial Sequence
  MKO10031721_A_Morn4
  gRNA
gtaccgcggcgagtggaaag

SEQ ID NO: 31722 - DNA, 20 bp, Artificial Sequence
  MKO10031722_A_Morn4
  gRNA
tctcgaacagaccttcgttg

SEQ ID NO: 31723 - DNA, 20 bp, Artificial Sequence
  MKO10031723_A_Morn5
  gRNA
ccgatgtatctcgtgtcagt

SEQ ID NO: 31724 - DNA, 20 bp, Artificial Sequence
  MKO10031724_A_Morn5
  gRNA
cgtcgaatcggctcccactg

SEQ ID NO: 31725 - DNA, 20 bp, Artificial Sequence
  MKO10031725_A_Morn5
  gRNA
ccggtaatccttgatgaccc

SEQ ID NO: 31726 - DNA, 20 bp, Artificial Sequence
  MKO10031726_A_Mospd1
  gRNA
gatgttcgatcctgtcacta

SEQ ID NO: 31727 - DNA, 20 bp, Artificial Sequence
  MKO10031727_A_Mospd1
  gRNA
gtctatcacaccatagtgac

SEQ ID NO: 31728 - DNA, 20 bp, Artificial Sequence
  MKO10031728_A_Mospd1
  gRNA
gccctgatgctgcctactct

SEQ ID NO: 31729 - DNA, 20 bp, Artificial Sequence
  MKO10031729_A_Mospd2
  gRNA
actcagcttcgaatctccgc

SEQ ID NO: 31730 - DNA, 20 bp, Artificial Sequence
  MKO10031730_A_Mospd2
  gRNA
gggttgaaagttacttatac

SEQ ID NO: 31731 - DNA, 20 bp, Artificial Sequence
  MKO10031731_A_Mospd2
  gRNA
atgtttgacatgtccgaaac

SEQ ID NO: 31732 - DNA, 20 bp, Artificial Sequence
  MKO10031732_A_Mospd3
  gRNA
ctggttgcggcctacgtctt

SEQ ID NO: 31733 - DNA, 20 bp, Artificial Sequence
  MKO10031733_A_Mospd3
  gRNA
gttcagtgtgatacggcacg

SEQ ID NO: 31734 - DNA, 20 bp, Artificial Sequence
  MKO10031734_A_Mospd3
  gRNA
tgcatcgaataccgtgtatt

SEQ ID NO: 31735 - DNA, 20 bp, Artificial Sequence
  MKO10031735_A_Mos
  gRNA
caacccgaactatgttgtcg

SEQ ID NO: 31736 - DNA, 20 bp, Artificial Sequence
  MKO10031736_A_Mos
  gRNA
tacgccacgacaacatagtt

SEQ ID NO: 31737 - DNA, 20 bp, Artificial Sequence
  MKO10031737_A_Mos
  gRNA
accgatggcgacagctcacg

SEQ ID NO: 31738 - DNA, 20 bp, Artificial Sequence
  MKO10031738_A_Mov10l1
  gRNA
aaagcaaatcaatcgtgatc

SEQ ID NO: 31739 - DNA, 20 bp, Artificial Sequence
  MKO10031739_A_Mov10l1
  gRNA
ctctccagatgtagcatgac

SEQ ID NO: 31740 - DNA, 20 bp, Artificial Sequence
  MKO10031740_A_Mov10l1
  gRNA
atagccagcaccttccaaca

SEQ ID NO: 31741 - DNA, 20 bp, Artificial Sequence
  MKO10031741_A_Mov10
  gRNA
aggtactaaccctacggctt

SEQ ID NO: 31742 - DNA, 20 bp, Artificial Sequence
  MKO10031742_A_Mov10
  gRNA
ttccgccgttccgaagccgt

SEQ ID NO: 31743 - DNA, 20 bp, Artificial Sequence
  MKO10031743_A_Mov10
  gRNA
acacctgtcgtgaaagatcc

SEQ ID NO: 31744 - DNA, 20 bp, Artificial Sequence
  MKO10031744_A_Moxd1
  gRNA
gcgaaactgtgattctcgcc

SEQ ID NO: 31745 - DNA, 20 bp, Artificial Sequence
  MKO10031745_A_Moxd1
  gRNA
ttaccacctagattacgcca

SEQ ID NO: 31746 - DNA, 20 bp, Artificial Sequence
  MKO10031746_A_Moxd1
  gRNA
agtcttaccgtactttgatc

SEQ ID NO: 31747 - DNA, 20 bp, Artificial Sequence
  MKO10031747_A_Moxd2
  gRNA
cagcccagcccgcgatgacg

SEQ ID NO: 31748 - DNA, 20 bp, Artificial Sequence
  MKO10031748_A_Moxd2
  gRNA
atagcattcgccgatgcctg

SEQ ID NO: 31749 - DNA, 20 bp, Artificial Sequence
  MKO10031749_A_Moxd2
  gRNA
accgtaatgtcacgatcatg

SEQ ID NO: 31750 - DNA, 20 bp, Artificial Sequence
  MKO10031750_A_Mpc1
  gRNA
ttatttccaggatgagtaag

SEQ ID NO: 31751 - DNA, 20 bp, Artificial Sequence
  MKO10031751_A_Mpc1
  gRNA
atccgcccactgataatctc

SEQ ID NO: 31752 - DNA, 20 bp, Artificial Sequence
  MKO10031752_A_Mpc1
  gRNA
tctggggcccagttgccaac

SEQ ID NO: 31753 - DNA, 20 bp, Artificial Sequence
  MKO10031753_A_Mpc2
  gRNA
ccaaatccgaaacagctgag

SEQ ID NO: 31754 - DNA, 20 bp, Artificial Sequence
  MKO10031754_A_Mpc2
  gRNA
agacttacccatttcattat

SEQ ID NO: 31755 - DNA, 20 bp, Artificial Sequence
  MKO10031755_A_Mpc2
  gRNA
agcccagaaaaaaactgttc

SEQ ID NO: 31756 - DNA, 20 bp, Artificial Sequence
  MKO10031756_A_Mpdu1
  gRNA
ggcctccaatgtacctgccg

SEQ ID NO: 31757 - DNA, 20 bp, Artificial Sequence
  MKO10031757_A_Mpdu1
  gRNA
gatgctgtagaccacggttc

SEQ ID NO: 31758 - DNA, 20 bp, Artificial Sequence
  MKO10031758_A_Mpdu1
  gRNA
gctctccccgctcacgcctc

SEQ ID NO: 31759 - DNA, 20 bp, Artificial Sequence
  MKO10031759_A_Mpdz
  gRNA
agagcgggaaatccgtgggc

SEQ ID NO: 31760 - DNA, 20 bp, Artificial Sequence
  MKO10031760_A_Mpdz
  gRNA
gaccggcggcaaagatcctc

SEQ ID NO: 31761 - DNA, 20 bp, Artificial Sequence
  MKO10031761_A_Mpdz
  gRNA
gagctgatcaagttcgtcac

SEQ ID NO: 31762 - DNA, 20 bp, Artificial Sequence
  MKO10031762_A_Mpeg1
  gRNA
caggtagtccttcgtcaaac

SEQ ID NO: 31763 - DNA, 20 bp, Artificial Sequence
  MKO10031763_A_Mpeg1
  gRNA
ctagtggcaatagaccgtgc

SEQ ID NO: 31764 - DNA, 20 bp, Artificial Sequence
  MKO10031764_A_Mpeg1
  gRNA
gttggtgactttcgcatcac

SEQ ID NO: 31765 - DNA, 20 bp, Artificial Sequence
  MKO10031765_A_Mpg
  gRNA
ggcgactagatgcccgcgcg

SEQ ID NO: 31766 - DNA, 20 bp, Artificial Sequence
  MKO10031766_A_Mpg
  gRNA
ctgttccatcagcgagtcgc

SEQ ID NO: 31767 - DNA, 20 bp, Artificial Sequence
  MKO10031767_A_Mpg
  gRNA
tggagaagtagatactccgc

SEQ ID NO: 31768 - DNA, 20 bp, Artificial Sequence
  MKO10031768_A_Mphosph10
  gRNA
cattgattcagatgaaagcg

SEQ ID NO: 31769 - DNA, 20 bp, Artificial Sequence
  MKO10031769_A_Mphosph10
  gRNA
gtttgggcggcagaagatta

SEQ ID NO: 31770 - DNA, 20 bp, Artificial Sequence
  MKO10031770_A_Mphosph10
  gRNA
atgtcctcgtcactttcaac

SEQ ID NO: 31771 - DNA, 20 bp, Artificial Sequence
  MKO10031771_A_Mphosph6
  gRNA
cctcaggagcttcatcgtag

SEQ ID NO: 31772 - DNA, 20 bp, Artificial Sequence
  MKO10031772_A_Mphosph6
  gRNA
atatttaatacctcaacctc

SEQ ID NO: 31773 - DNA, 20 bp, Artificial Sequence
  MKO10031773_A_Mphosph6
  gRNA
gaattctaagaaccgagcag

SEQ ID NO: 31774 - DNA, 20 bp, Artificial Sequence
  MKO10031774_A_Mphosph8
  gRNA
gagatatatagaatctccgc

SEQ ID NO: 31775 - DNA, 20 bp, Artificial Sequence
  MKO10031775_A_Mphosph8
  gRNA
ctcgagatgagactgacact

SEQ ID NO: 31776 - DNA, 20 bp, Artificial Sequence
  MKO10031776_A_Mphosph8
  gRNA
atgctggtacccgagttaga

SEQ ID NO: 31777 - DNA, 20 bp, Artificial Sequence
  MKO10031777_A_Mphosph9
  gRNA
gtctcgggttccttggacgc

SEQ ID NO: 31778 - DNA, 20 bp, Artificial Sequence
  MKO10031778_A_Mphosph9
  gRNA
ttccagttcagctcgctccc

SEQ ID NO: 31779 - DNA, 20 bp, Artificial Sequence
  MKO10031779_A_Mphosph9
  gRNA
acaccccatttgtactaagg

SEQ ID NO: 31780 - DNA, 20 bp, Artificial Sequence
  MKO10031780_A_Mpi
  gRNA
gggagatccgtttcaccaac

SEQ ID NO: 31781 - DNA, 20 bp, Artificial Sequence
  MKO10031781_A_Mpi
  gRNA
tctgggaaatacggttgtca

SEQ ID NO: 31782 - DNA, 20 bp, Artificial Sequence
  MKO10031782_A_Mpi
  gRNA
caggcatgccacttcacttt

SEQ ID NO: 31783 - DNA, 20 bp, Artificial Sequence
  MKO10031783_A_Mplkip
  gRNA
actcccgtacccgtcccgcg

SEQ ID NO: 31784 - DNA, 20 bp, Artificial Sequence
  MKO10031784_A_Mplkip
  gRNA
gagaagttgccgccgtgccg

SEQ ID NO: 31785 - DNA, 20 bp, Artificial Sequence
  MKO10031785_A_Mplkip
  gRNA
agcaatacgcaaacattcac

SEQ ID NO: 31786 - DNA, 20 bp, Artificial Sequence
  MKO10031786_A_Mpl
  gRNA
cagctgctgtatgcctaccg

SEQ ID NO: 31787 - DNA, 20 bp, Artificial Sequence
  MKO10031787_A_Mpl
  gRNA
tgaactccgctatggcccca

SEQ ID NO: 31788 - DNA, 20 bp, Artificial Sequence
  MKO10031788_A_Mpl
  gRNA
ccgacagcatcccaaccgca

SEQ ID NO: 31789 - DNA, 20 bp, Artificial Sequence
  MKO10031789_A_Mpnd
  gRNA
tccgctacccgtcccgcgct

SEQ ID NO: 31790 - DNA, 20 bp, Artificial Sequence
  MKO10031790_A_Mpnd
  gRNA
ccctagggggcgcgctcacg

SEQ ID NO: 31791 - DNA, 20 bp, Artificial Sequence
  MKO10031791_A_Mpnd
  gRNA
tagctggtgccggcgaagcc

SEQ ID NO: 31792 - DNA, 20 bp, Artificial Sequence
  MKO10031792_A_Mpo
  gRNA
tgcgatacttgtcattcggt

SEQ ID NO: 31793 - DNA, 20 bp, Artificial Sequence
  MKO10031793_A_Mpo
  gRNA
acgccatcttcatactctgc

SEQ ID NO: 31794 - DNA, 20 bp, Artificial Sequence
  MKO10031794_A_Mpo
  gRNA
ctgtgcctatcaggacgtga

SEQ ID NO: 31795 - DNA, 20 bp, Artificial Sequence
  MKO10031795_A_Mpp1
  gRNA
gcactctatacctgtagcgc

SEQ ID NO: 31796 - DNA, 20 bp, Artificial Sequence
  MKO10031796_A_Mpp1
  gRNA
gagtcgccttcctgcgctac

SEQ ID NO: 31797 - DNA, 20 bp, Artificial Sequence
  MKO10031797_A_Mpp1
  gRNA
gtctatgaatcatgccgcca

SEQ ID NO: 31798 - DNA, 20 bp, Artificial Sequence
  MKO10031798_A_Mpp2
  gRNA
agacgaagttggaggccgtc

SEQ ID NO: 31799 - DNA, 20 bp, Artificial Sequence
  MKO10031799_A_Mpp2
  gRNA
cccaccatgcgcaccgcatc

SEQ ID NO: 31800 - DNA, 20 bp, Artificial Sequence
  MKO10031800_A_Mpp2
  gRNA
tactggctggttgctaaacg

SEQ ID NO: 31801 - DNA, 20 bp, Artificial Sequence
  MKO10031801_A_Mpp3
  gRNA
gtcggtgaagattgttcgct

SEQ ID NO: 31802 - DNA, 20 bp, Artificial Sequence
  MKO10031802_A_Mpp3
  gRNA
tctgcccgataacatcgatg

SEQ ID NO: 31803 - DNA, 20 bp, Artificial Sequence
  MKO10031803_A_Mpp3
  gRNA
agaaactccgctattatgag

SEQ ID NO: 31804 - DNA, 20 bp, Artificial Sequence
  MKO10031804_A_Mpp4
  gRNA
aggtctacgactgcctccag

SEQ ID NO: 31805 - DNA, 20 bp, Artificial Sequence
  MKO10031805_A_Mpp4
  gRNA
ctcgggggaaccggaagctt

SEQ ID NO: 31806 - DNA, 20 bp, Artificial Sequence
  MKO10031806_A_Mpp4
  gRNA
gagctgttacccaaagcttc

SEQ ID NO: 31807 - DNA, 20 bp, Artificial Sequence
  MKO10031807_A_Mpp5
  gRNA
aagagtggcctcctgcacga

SEQ ID NO: 31808 - DNA, 20 bp, Artificial Sequence
  MKO10031808_A_Mpp5
  gRNA
atcataagccggatagtgaa

SEQ ID NO: 31809 - DNA, 20 bp, Artificial Sequence
  MKO10031809_A_Mpp5
  gRNA
tcttgtacattggcgataag

SEQ ID NO: 31810 - DNA, 20 bp, Artificial Sequence
  MKO10031810_A_Mpp6
  gRNA
tcgacaaggtctgcttcacg

SEQ ID NO: 31811 - DNA, 20 bp, Artificial Sequence
  MKO10031811_A_Mpp6
  gRNA
atcgcccgaatccttcatgg

SEQ ID NO: 31812 - DNA, 20 bp, Artificial Sequence
  MKO10031812_A_Mpp6
  gRNA
gtagatgccatccgtattct

SEQ ID NO: 31813 - DNA, 20 bp, Artificial Sequence
  MKO10031813_A_Mpp7
  gRNA
ctctgtgaaaataatccgcc

SEQ ID NO: 31814 - DNA, 20 bp, Artificial Sequence
  MKO10031814_A_Mpp7
  gRNA
gcctgacgatattgatgatg

SEQ ID NO: 31815 - DNA, 20 bp, Artificial Sequence
  MKO10031815_A_Mpp7
  gRNA
cgtgttctcaccttgacatt

SEQ ID NO: 31816 - DNA, 20 bp, Artificial Sequence
  MKO10031816_A_Mppe1
  gRNA
cccctcaagggagtggcaaa

SEQ ID NO: 31817 - DNA, 20 bp, Artificial Sequence
  MKO10031817_A_Mppe1
  gRNA
acgatgtgcagagatttcag

SEQ ID NO: 31818 - DNA, 20 bp, Artificial Sequence
  MKO10031818_A_Mppe1
  gRNA
tctctgcacatcgtctgccc

SEQ ID NO: 31819 - DNA, 20 bp, Artificial Sequence
  MKO10031819_A_Mpped1
  gRNA
accacggggagccgtagatc

SEQ ID NO: 31820 - DNA, 20 bp, Artificial Sequence
  MKO10031820_A_Mpped1
  gRNA
atcgccgtagggcatttgaa

SEQ ID NO: 31821 - DNA, 20 bp, Artificial Sequence
  MKO10031821_A_Mpped1
  gRNA
ccacgagctgaccttcgacc

SEQ ID NO: 31822 - DNA, 20 bp, Artificial Sequence
  MKO10031822_A_Mpped2
  gRNA
gctcggtgaaatcgcctgtg

SEQ ID NO: 31823 - DNA, 20 bp, Artificial Sequence
  MKO10031823_A_Mpped2
  gRNA
agatgcagacaaaccgcgtg

SEQ ID NO: 31824 - DNA, 20 bp, Artificial Sequence
  MKO10031824_A_Mpped2
  gRNA
cgtgaatcccaccgaacaca

SEQ ID NO: 31825 - DNA, 20 bp, Artificial Sequence
  MKO10031825_A_Mprip
  gRNA
agccgacatgtcggcggcca

SEQ ID NO: 31826 - DNA, 20 bp, Artificial Sequence
  MKO10031826_A_Mprip
  gRNA
cttacccgtgaccggtgcac

SEQ ID NO: 31827 - DNA, 20 bp, Artificial Sequence
  MKO10031827_A_Mprip
  gRNA
gcgatatgccctggatgaga

SEQ ID NO: 31828 - DNA, 20 bp, Artificial Sequence
  MKO10031828_A_Mpst
  gRNA
gtcgtagatcacgacgtgcg

SEQ ID NO: 31829 - DNA, 20 bp, Artificial Sequence
  MKO10031829_A_Mpst
  gRNA
caaactcgcgtcgtgcatcg

SEQ ID NO: 31830 - DNA, 20 bp, Artificial Sequence
  MKO10031830_A_Mpst
  gRNA
cggtgtcacagcctgccacg

SEQ ID NO: 31831 - DNA, 20 bp, Artificial Sequence
  MKO10031831_A_Mptx1
  gRNA
ccatgtggtccccctagaaa

SEQ ID NO: 31832 - DNA, 20 bp, Artificial Sequence
  MKO10031832_A_Mptx1
  gRNA
acaatggcaaccttataaac

SEQ ID NO: 31833 - DNA, 20 bp, Artificial Sequence
  MKO10031833_A_Mptx1
  gRNA
ctgaaagaacagagagaaac

SEQ ID NO: 31834 - DNA, 20 bp, Artificial Sequence
  MKO10031834_A_Mptx2
  gRNA
agatgctataagggcgagtc

SEQ ID NO: 31835 - DNA, 20 bp, Artificial Sequence
  MKO10031835_A_Mptx2
  gRNA
cttgaagaagggatacgtgg

SEQ ID NO: 31836 - DNA, 20 bp, Artificial Sequence
  MKO10031836_A_Mptx2
  gRNA
cacaatggagaagcttattg

SEQ ID NO: 31837 - DNA, 20 bp, Artificial Sequence
  MKO10031837_A_Mpv17l2
  gRNA
ttccgagtcacctatatcaa

SEQ ID NO: 31838 - DNA, 20 bp, Artificial Sequence
  MKO10031838_A_Mpv17l2
  gRNA
cgcagccagcatgttcgccg

SEQ ID NO: 31839 - DNA, 20 bp, Artificial Sequence
  MKO10031839_A_Mpv17l2
  gRNA
gaggcttcgtaggcccgacg

SEQ ID NO: 31840 - DNA, 20 bp, Artificial Sequence
  MKO10031840_A_Mpv17l
  gRNA
ctggcgccagacgcgtcgcg

SEQ ID NO: 31841 - DNA, 20 bp, Artificial Sequence
  MKO10031841_A_Mpv17l
  gRNA
tggcccctcaccgacgtaga

SEQ ID NO: 31842 - DNA, 20 bp, Artificial Sequence
  MKO10031842_A_Mpv17l
  gRNA
aacaggcatgagcgttctcc

SEQ ID NO: 31843 - DNA, 20 bp, Artificial Sequence
  MKO10031843_A_Mpv17
  gRNA
ttgtaccagcctccgacgac

SEQ ID NO: 31844 - DNA, 20 bp, Artificial Sequence
  MKO10031844_A_Mpv17
  gRNA
ccattgagtatcccgaccag

SEQ ID NO: 31845 - DNA, 20 bp, Artificial Sequence
  MKO10031845_A_Mpv17
  gRNA
gcggggtctccagcaacacc

SEQ ID NO: 31846 - DNA, 20 bp, Artificial Sequence
  MKO10031846_A_Mpzl1
  gRNA
ccttaccgacacggcgctgt

SEQ ID NO: 31847 - DNA, 20 bp, Artificial Sequence
  MKO10031847_A_Mpzl1
  gRNA
cgtggcactgattgcggccc

SEQ ID NO: 31848 - DNA, 20 bp, Artificial Sequence
  MKO10031848_A_Mpzl1
  gRNA
tggacacattaggctccacg

SEQ ID NO: 31849 - DNA, 20 bp, Artificial Sequence
  MKO10031849_A_Mpzl2
  gRNA
gagatgcgctaactgtgacg

SEQ ID NO: 31850 - DNA, 20 bp, Artificial Sequence
  MKO10031850_A_Mpzl2
  gRNA
tctttgaaccgtccgctcat

SEQ ID NO: 31851 - DNA, 20 bp, Artificial Sequence
  MKO10031851_A_Mpzl2
  gRNA
aatttacacctccggggccc

SEQ ID NO: 31852 - DNA, 20 bp, Artificial Sequence
  MKO10031852_A_Mpzl3
  gRNA
agtgccgatgctcacgtccg

SEQ ID NO: 31853 - DNA, 20 bp, Artificial Sequence
  MKO10031853_A_Mpzl3
  gRNA
gggatattgtggtacacgtc

SEQ ID NO: 31854 - DNA, 20 bp, Artificial Sequence
  MKO10031854_A_Mpzl3
  gRNA
cattccgagaccggatctcc

SEQ ID NO: 31855 - DNA, 20 bp, Artificial Sequence
  MKO10031855_A_Mpz
  gRNA
aacctgccgccctcgcttcg

SEQ ID NO: 31856 - DNA, 20 bp, Artificial Sequence
  MKO10031856_A_Mpz
  gRNA
acaaccttacatcgatgagg

SEQ ID NO: 31857 - DNA, 20 bp, Artificial Sequence
  MKO10031857_A_Mpz
  gRNA
gcagccagcagtaccgaatc

SEQ ID NO: 31858 - DNA, 20 bp, Artificial Sequence
  MKO10031858_A_Mr1
  gRNA
cagagatcgtgctcactcga

SEQ ID NO: 31859 - DNA, 20 bp, Artificial Sequence
  MKO10031859_A_Mr1
  gRNA
cgacagtgtcactcgacaga

SEQ ID NO: 31860 - DNA, 20 bp, Artificial Sequence
  MKO10031860_A_Mr1
  gRNA
tttcgagttgttcttaccac

SEQ ID NO: 31861 - DNA, 20 bp, Artificial Sequence
  MKO10031861_A_Mrap2
  gRNA
ccaggtctatgcgtgatgtc

SEQ ID NO: 31862 - DNA, 20 bp, Artificial Sequence
  MKO10031862_A_Mrap2
  gRNA
gcaacgcggagtcctcagag

SEQ ID NO: 31863 - DNA, 20 bp, Artificial Sequence
  MKO10031863_A_Mrap2
  gRNA
ctgactttgctgacgaagac

SEQ ID NO: 31864 - DNA, 20 bp, Artificial Sequence
  MKO10031864_A_Mrap
  gRNA
gacagaggcgtcggtcccgt

SEQ ID NO: 31865 - DNA, 20 bp, Artificial Sequence
  MKO10031865_A_Mrap
  gRNA
attccattgtcatcgccctg

SEQ ID NO: 31866 - DNA, 20 bp, Artificial Sequence
  MKO10031866_A_Mrap
  gRNA
caccagctatgagtattacc

SEQ ID NO: 31867 - DNA, 20 bp, Artificial Sequence
  MKO10031867_A_Mras
  gRNA
gcggtccacgtgctcgaagc

SEQ ID NO: 31868 - DNA, 20 bp, Artificial Sequence
  MKO10031868_A_Mras
  gRNA
tgtctactccgtcaccgaca

SEQ ID NO: 31869 - DNA, 20 bp, Artificial Sequence
  MKO10031869_A_Mras
  gRNA
gtcattcccaatgatcctcg

SEQ ID NO: 31870 - DNA, 20 bp, Artificial Sequence
  MKO10031870_A_Mrc1
  gRNA
gagccatccgtccgagcgcc

SEQ ID NO: 31871 - DNA, 20 bp, Artificial Sequence
  MKO10031871_A_Mrc1
  gRNA
tgaagatcacaagcgctgcg

SEQ ID NO: 31872 - DNA, 20 bp, Artificial Sequence
  MKO10031872_A_Mrc1
  gRNA
aacagtctgagtgtacgcag

SEQ ID NO: 31873 - DNA, 20 bp, Artificial Sequence
  MKO10031873_A_Mrc2
  gRNA
cgatggcagtgtcgtacact

SEQ ID NO: 31874 - DNA, 20 bp, Artificial Sequence
  MKO10031874_A_Mrc2
  gRNA
ccactggttgtcgtatttga

SEQ ID NO: 31875 - DNA, 20 bp, Artificial Sequence
  MKO10031875_A_Mrc2
  gRNA
ccggaaccgactcttcaacc

SEQ ID NO: 31876 - DNA, 20 bp, Artificial Sequence
  MKO10031876_A_Mre11a
  gRNA
ttgccgtggatactaaatac

SEQ ID NO: 31877 - DNA, 20 bp, Artificial Sequence
  MKO10031877_A_Mre11a
  gRNA
ttacccccgtgggatcatca

SEQ ID NO: 31878 - DNA, 20 bp, Artificial Sequence
  MKO10031878_A_Mre11a
  gRNA
acggtcaatgtcggtggaga

SEQ ID NO: 31879 - DNA, 20 bp, Artificial Sequence
  MKO10031879_A_Mreg
  gRNA
cctctccagagtcgctccaa

SEQ ID NO: 31880 - DNA, 20 bp, Artificial Sequence
  MKO10031880_A_Mreg
  gRNA
gctctccgagaggtacctct

SEQ ID NO: 31881 - DNA, 20 bp, Artificial Sequence
  MKO10031881_A_Mreg
  gRNA
cttccctgcggatctgccgc

SEQ ID NO: 31882 - DNA, 20 bp, Artificial Sequence
  MKO10031882_A_Mrfap1
  gRNA
aaactgctcgaagtcctcct

SEQ ID NO: 31883 - DNA, 20 bp, Artificial Sequence
  MKO10031883_A_Mrfap1
  gRNA
cggcgccgccggcaccctgc

SEQ ID NO: 31884 - DNA, 20 bp, Artificial Sequence
  MKO10031884_A_Mrfap1
  gRNA
gcgcgcgccggcgcgcaacc

SEQ ID NO: 31885 - DNA, 20 bp, Artificial Sequence
  MKO10031885_A_Mrgbp
  gRNA
tgtctatgtgcggcgcctct

SEQ ID NO: 31886 - DNA, 20 bp, Artificial Sequence
  MKO10031886_A_Mrgbp
  gRNA
gagcactatgtacgacatgc

SEQ ID NO: 31887 - DNA, 20 bp, Artificial Sequence
  MKO10031887_A_Mrgbp
  gRNA
gcgcagccgggtcactgaca

SEQ ID NO: 31888 - DNA, 20 bp, Artificial Sequence
  MKO10031888_A_Mrgpra1
  gRNA
tgccaaagggcaatccgcaa

SEQ ID NO: 31889 - DNA, 20 bp, Artificial Sequence
  MKO10031889_A_Mrgpra1
  gRNA
ctcctttgcggattgccctt

SEQ ID NO: 31890 - DNA, 20 bp, Artificial Sequence
  MKO10031890_A_Mrgpra1
  gRNA
cagcaagaggaatgggggaa

SEQ ID NO: 31891 - DNA, 20 bp, Artificial Sequence
  MKO10031891_A_Mrgpra2a
  gRNA
gatgtagacaaccattataa

SEQ ID NO: 31892 - DNA, 20 bp, Artificial Sequence
  MKO10031892_A_Mrgpra2a
  gRNA
gtgctttaacaccattataa

SEQ ID NO: 31893 - DNA, 20 bp, Artificial Sequence
  MKO10031893_A_Mrgpra2a
  gRNA
cagcaagaggaatgggggaa

SEQ ID NO: 31894 - DNA, 20 bp, Artificial Sequence
  MKO10031894_A_Mrgpra2b
  gRNA
gatgtagacaaccatcataa

SEQ ID NO: 31895 - DNA, 20 bp, Artificial Sequence
  MKO10031895_A_Mrgpra2b
  gRNA
gtgctttaacaccattatga

SEQ ID NO: 31896 - DNA, 20 bp, Artificial Sequence
  MKO10031896_A_Mrgpra2b
  gRNA
cagcaagaggaatgggggaa

SEQ ID NO: 31897 - DNA, 20 bp, Artificial Sequence
  MKO10031897_A_Mrgpra3
  gRNA
tttattcaaccgttgcctga

SEQ ID NO: 31898 - DNA, 20 bp, Artificial Sequence
  MKO10031898_A_Mrgpra3
  gRNA
taatctagtacaaacacacc

SEQ ID NO: 31899 - DNA, 20 bp, Artificial Sequence
  MKO10031899_A_Mrgpra3
  gRNA
cagcaagaggaatgggagaa

SEQ ID NO: 31900 - DNA, 20 bp, Artificial Sequence
  MKO10031900_A_Mrgpra4
  gRNA
cacagagtcaattacatatt

SEQ ID NO: 31901 - DNA, 20 bp, Artificial Sequence
  MKO10031901_A_Mrgpra4
  gRNA
atgacagttctctacatcac

SEQ ID NO: 31902 - DNA, 20 bp, Artificial Sequence
  MKO10031902_A_Mrgpra4
  gRNA
ggaaccagatcacagcacac

SEQ ID NO: 31903 - DNA, 20 bp, Artificial Sequence
  MKO10031903_A_Mrgpra6
  gRNA
tcctgctcttccgcttgcgc

SEQ ID NO: 31904 - DNA, 20 bp, Artificial Sequence
  MKO10031904_A_Mrgpra6
  gRNA
ctgtcagcccgactagtccg

SEQ ID NO: 31905 - DNA, 20 bp, Artificial Sequence
  MKO10031905_A_Mrgpra6
  gRNA
ccccatcatttacttctttg

SEQ ID NO: 31906 - DNA, 20 bp, Artificial Sequence
  MKO10031906_A_Mrgpra9
  gRNA
atcttgatgctggtacttcc

SEQ ID NO: 31907 - DNA, 20 bp, Artificial Sequence
  MKO10031907_A_Mrgpra9
  gRNA
gaacgtgagaagtttctgcg

SEQ ID NO: 31908 - DNA, 20 bp, Artificial Sequence
  MKO10031908_A_Mrgpra9
  gRNA
agtgatctacatccagcaaa

SEQ ID NO: 31909 - DNA, 20 bp, Artificial Sequence
  MKO10031909_A_Mrgprb1
  gRNA
ggcttcctatattacactag

SEQ ID NO: 31910 - DNA, 20 bp, Artificial Sequence
  MKO10031910_A_Mrgprb1
  gRNA
ttaggcaccatcggtttcaa

SEQ ID NO: 31911 - DNA, 20 bp, Artificial Sequence
  MKO10031911_A_Mrgprb1
  gRNA
ctataagaaaaatggagcaa

SEQ ID NO: 31912 - DNA, 20 bp, Artificial Sequence
  MKO10031912_A_Mrgprb2
  gRNA
ccattaggcaccgaaggttc

SEQ ID NO: 31913 - DNA, 20 bp, Artificial Sequence
  MKO10031913_A_Mrgprb2
  gRNA
gagtcttccgcctgaacctt

SEQ ID NO: 31914 - DNA, 20 bp, Artificial Sequence
  MKO10031914_A_Mrgprb2
  gRNA
cacagcgaattcctatgacc

SEQ ID NO: 31915 - DNA, 20 bp, Artificial Sequence
  MKO10031915_A_Mrgprb3
  gRNA
gggataatcaatataatctc

SEQ ID NO: 31916 - DNA, 20 bp, Artificial Sequence
  MKO10031916_A_Mrgprb3
  gRNA
gattctgcagagagctatac

SEQ ID NO: 31917 - DNA, 20 bp, Artificial Sequence
  MKO10031917_A_Mrgprb3
  gRNA
ctgaaacttgccatgcctaa

SEQ ID NO: 31918 - DNA, 20 bp, Artificial Sequence
  MKO10031918_A_Mrgprb4
  gRNA
ttagacaacacaggttgcga

SEQ ID NO: 31919 - DNA, 20 bp, Artificial Sequence
  MKO10031919_A_Mrgprb4
  gRNA
tcgcaacctgtgttgtctaa

SEQ ID NO: 31920 - DNA, 20 bp, Artificial Sequence
  MKO10031920_A_Mrgprb4
  gRNA
actccataatccttgataag

SEQ ID NO: 31921 - DNA, 20 bp, Artificial Sequence
  MKO10031921_A_Mrgprb5
  gRNA
tagagagcgctcaacactga

SEQ ID NO: 31922 - DNA, 20 bp, Artificial Sequence
  MKO10031922_A_Mrgprb5
  gRNA
ggccacagccttcccctaat

SEQ ID NO: 31923 - DNA, 20 bp, Artificial Sequence
  MKO10031923_A_Mrgprb5
  gRNA
tgggtctaaccactccagcc

SEQ ID NO: 31924 - DNA, 20 bp, Artificial Sequence
  MKO10031924_A_Mrgprb8
  gRNA
gagacaattctcctactatc

SEQ ID NO: 31925 - DNA, 20 bp, Artificial Sequence
  MKO10031925_A_Mrgprb8
  gRNA
gcgttgggcatgataccaag

SEQ ID NO: 31926 - DNA, 20 bp, Artificial Sequence
  MKO10031926_A_Mrgprb8
  gRNA
ttctgtcaatgtgaccatac

SEQ ID NO: 31927 - DNA, 20 bp, Artificial Sequence
  MKO10031927_A_Mrgprd
  gRNA
gaccccatcattagtacacg

SEQ ID NO: 31928 - DNA, 20 bp, Artificial Sequence
  MKO10031928_A_Mrgprd
  gRNA
ggatgaccacgtacagccgc

SEQ ID NO: 31929 - DNA, 20 bp, Artificial Sequence
  MKO10031929_A_Mrgprd
  gRNA
ccggtggcacttataccaga

SEQ ID NO: 31930 - DNA, 20 bp, Artificial Sequence
  MKO10031930_A_Mrgpre
  gRNA
ggaggggttcccgaaacctc

SEQ ID NO: 31931 - DNA, 20 bp, Artificial Sequence
  MKO10031931_A_Mrgpre
  gRNA
cctcatctccaagtgcccgc

SEQ ID NO: 31932 - DNA, 20 bp, Artificial Sequence
  MKO10031932_A_Mrgpre
  gRNA
gtagcagaagaaccgcagca

SEQ ID NO: 31933 - DNA, 20 bp, Artificial Sequence
  MKO10031933_A_Mrgprf
  gRNA
gtgctcggcactctacgtgc

SEQ ID NO: 31934 - DNA, 20 bp, Artificial Sequence
  MKO10031934_A_Mrgprf
  gRNA
gacactcttcgaatgtagtc

SEQ ID NO: 31935 - DNA, 20 bp, Artificial Sequence
  MKO10031935_A_Mrgprf
  gRNA
agatggccggaaactgttca

SEQ ID NO: 31936 - DNA, 20 bp, Artificial Sequence
  MKO10031936_A_Mrgprg
  gRNA
ctctattgctacgatcgtgt

SEQ ID NO: 31937 - DNA, 20 bp, Artificial Sequence
  MKO10031937_A_Mrgprg
  gRNA
acggcggttggggctgcaaa

SEQ ID NO: 31938 - DNA, 20 bp, Artificial Sequence
  MKO10031938_A_Mrgprg
  gRNA
atagccccccaagacctgac

SEQ ID NO: 31939 - DNA, 20 bp, Artificial Sequence
  MKO10031939_A_Mrgprh
  gRNA
atgtacacgtatcggcattc

SEQ ID NO: 31940 - DNA, 20 bp, Artificial Sequence
  MKO10031940_A_Mrgprh
  gRNA
gctctacgctgatggccgtg

SEQ ID NO: 31941 - DNA, 20 bp, Artificial Sequence
  MKO10031941_A_Mrgprh
  gRNA
atccgtatgctctgaagacc

SEQ ID NO: 31942 - DNA, 20 bp, Artificial Sequence
  MKO10031942_A_Mrgprx1
  gRNA
catcactaccctggttggac

SEQ ID NO: 31943 - DNA, 20 bp, Artificial Sequence
  MKO10031943_A_Mrgprx1
  gRNA
gcaatcatcccctatatctc

SEQ ID NO: 31944 - DNA, 20 bp, Artificial Sequence
  MKO10031944_A_Mrgprx1
  gRNA
atgctttctatgctgcctaa

SEQ ID NO: 31945 - DNA, 20 bp, Artificial Sequence
  MKO10031945_A_Mrgprx2
  gRNA
gtgaccggatatatactaca

SEQ ID NO: 31946 - DNA, 20 bp, Artificial Sequence
  MKO10031946_A_Mrgprx2
  gRNA
ttgaaatcgatgatgcctaa

SEQ ID NO: 31947 - DNA, 20 bp, Artificial Sequence
  MKO10031947_A_Mrgprx2
  gRNA
ccataagaaaaatggaggaa

SEQ ID NO: 31948 - DNA, 20 bp, Artificial Sequence
  MKO10031948_A_Mri1
  gRNA
cagagtgatccgcttcgccg

SEQ ID NO: 31949 - DNA, 20 bp, Artificial Sequence
  MKO10031949_A_Mri1
  gRNA
tgccacctgtgatgagttcg

SEQ ID NO: 31950 - DNA, 20 bp, Artificial Sequence
  MKO10031950_A_Mri1
  gRNA
ctgctcgtacaccagctcga

SEQ ID NO: 31951 - DNA, 20 bp, Artificial Sequence
  MKO10031951_A_Mrm1
  gRNA
ctagctgcttagagttcgtc

SEQ ID NO: 31952 - DNA, 20 bp, Artificial Sequence
  MKO10031952_A_Mrm1
  gRNA
ttcgccactcctgacctgcc

SEQ ID NO: 31953 - DNA, 20 bp, Artificial Sequence
  MKO10031953_A_Mrm1
  gRNA
ccaccacgagccacccctgc

SEQ ID NO: 31954 - DNA, 20 bp, Artificial Sequence
  MKO10031954_A_Mroh1
  gRNA
ctcaggatcttcgtacggta

SEQ ID NO: 31955 - DNA, 20 bp, Artificial Sequence
  MKO10031955_A_Mroh1
  gRNA
cgtaccgtacgaagatcctg

SEQ ID NO: 31956 - DNA, 20 bp, Artificial Sequence
  MKO10031956_A_Mroh1
  gRNA
caggcatggagtgtctcgtc

SEQ ID NO: 31957 - DNA, 20 bp, Artificial Sequence
  MKO10031957_A_Mroh2a
  gRNA
gagcgcgttcatcactacac

SEQ ID NO: 31958 - DNA, 20 bp, Artificial Sequence
  MKO10031958_A_Mroh2a
  gRNA
gtcccgaaaccacttcagct

SEQ ID NO: 31959 - DNA, 20 bp, Artificial Sequence
  MKO10031959_A_Mroh2a
  gRNA
cagacccctaccattgccat

SEQ ID NO: 31960 - DNA, 20 bp, Artificial Sequence
  MKO10031960_A_Mroh2b
  gRNA
ggagatattaacctcacaat

SEQ ID NO: 31961 - DNA, 20 bp, Artificial Sequence
  MKO10031961_A_Mroh2b
  gRNA
agctggttgccagttcagcc

SEQ ID NO: 31962 - DNA, 20 bp, Artificial Sequence
  MKO10031962_A_Mroh2b
  gRNA
tactcagcatcccaattgtg

SEQ ID NO: 31963 - DNA, 20 bp, Artificial Sequence
  MKO10031963_A_Mroh4
  gRNA
tacggcccaggtgctccaac

SEQ ID NO: 31964 - DNA, 20 bp, Artificial Sequence
  MKO10031964_A_Mroh4
  gRNA
cctgcgtgagtgccccagcg

SEQ ID NO: 31965 - DNA, 20 bp, Artificial Sequence
  MKO10031965_A_Mroh4
  gRNA
tgaacccacctcccgctgtc

SEQ ID NO: 31966 - DNA, 20 bp, Artificial Sequence
  MKO10031966_A_Mroh5
  gRNA
tgtgagatgcgtcctgacgg

SEQ ID NO: 31967 - DNA, 20 bp, Artificial Sequence
  MKO10031967_A_Mroh5
  gRNA
ttagcccgtagtaggtgaac

SEQ ID NO: 31968 - DNA, 20 bp, Artificial Sequence
  MKO10031968_A_Mroh5
  gRNA
cgtctgtcggcactcatggc

SEQ ID NO: 31969 - DNA, 20 bp, Artificial Sequence
  MKO10031969_A_Mroh6
  gRNA
ctacaggccactcgcgctct

SEQ ID NO: 31970 - DNA, 20 bp, Artificial Sequence
  MKO10031970_A_Mroh6
  gRNA
catctctccaagagcgcgag

SEQ ID NO: 31971 - DNA, 20 bp, Artificial Sequence
  MKO10031971_A_Mroh6
  gRNA
gcccgtttactcgctgattc

SEQ ID NO: 31972 - DNA, 20 bp, Artificial Sequence
  MKO10031972_A_Mroh7
  gRNA
tgagaacacgctccgcacac

SEQ ID NO: 31973 - DNA, 20 bp, Artificial Sequence
  MKO10031973_A_Mroh7
  gRNA
gttctcactgccctccgtgc

SEQ ID NO: 31974 - DNA, 20 bp, Artificial Sequence
  MKO10031974_A_Mroh7
  gRNA
tccatagcctgccgtcgagc

SEQ ID NO: 31975 - DNA, 20 bp, Artificial Sequence
  MKO10031975_A_Mroh8
  gRNA
caacttagacgacgttcaaa

SEQ ID NO: 31976 - DNA, 20 bp, Artificial Sequence
  MKO10031976_A_Mroh8
  gRNA
cactacttcttctgtaccgc

SEQ ID NO: 31977 - DNA, 20 bp, Artificial Sequence
  MKO10031977_A_Mroh8
  gRNA
tataccttatgacgaaaaca

SEQ ID NO: 31978 - DNA, 20 bp, Artificial Sequence
  MKO10031978_A_Mroh9
  gRNA
aagtgaacaatccataatct

SEQ ID NO: 31979 - DNA, 20 bp, Artificial Sequence
  MKO10031979_A_Mroh9
  gRNA
gtttaaagccgaaatcctat

SEQ ID NO: 31980 - DNA, 20 bp, Artificial Sequence
  MKO10031980_A_Mroh9
  gRNA
tgtgattcaaactgcaccag

SEQ ID NO: 31981 - DNA, 20 bp, Artificial Sequence
  MKO10031981_A_Mro
  gRNA
gatcatacagcccacgaacc

SEQ ID NO: 31982 - DNA, 20 bp, Artificial Sequence
  MKO10031982_A_Mro
  gRNA
aatggcctaagagcgaatct

SEQ ID NO: 31983 - DNA, 20 bp, Artificial Sequence
  MKO10031983_A_Mro
  gRNA
cagacccaagattcgctctt

SEQ ID NO: 31984 - DNA, 20 bp, Artificial Sequence
  MKO10031984_A_Mrp63
  gRNA
aagacacggtacgcggccgc

SEQ ID NO: 31985 - DNA, 20 bp, Artificial Sequence
  MKO10031985_A_Mrp63
  gRNA
taccgtgtctttccaagcga

SEQ ID NO: 31986 - DNA, 20 bp, Artificial Sequence
  MKO10031986_A_Mrp63
  gRNA
gcggccacgccgcggagcga

SEQ ID NO: 31987 - DNA, 20 bp, Artificial Sequence
  MKO10031987_A_Mrpl10
  gRNA
ctgctactatatcttgacgc

SEQ ID NO: 31988 - DNA, 20 bp, Artificial Sequence
  MKO10031988_A_Mrpl10
  gRNA
agtgcatgactcgccagtgg

SEQ ID NO: 31989 - DNA, 20 bp, Artificial Sequence
  MKO10031989_A_Mrpl10
  gRNA
gatagctgtctgccagaacg

SEQ ID NO: 31990 - DNA, 20 bp, Artificial Sequence
  MKO10031990_A_Mrpl11
  gRNA
aaaacacagctcgttccttc

SEQ ID NO: 31991 - DNA, 20 bp, Artificial Sequence
  MKO10031991_A_Mrpl11
  gRNA
ccttcaccactcgaatgccc

SEQ ID NO: 31992 - DNA, 20 bp, Artificial Sequence
  MKO10031992_A_Mrpl11
  gRNA
cattggctctgcccgttccc

SEQ ID NO: 31993 - DNA, 20 bp, Artificial Sequence
  MKO10031993_A_Mrpl12
  gRNA
acaccctaaggcggccgagg

SEQ ID NO: 31994 - DNA, 20 bp, Artificial Sequence
  MKO10031994_A_Mrpl12
  gRNA
ataccttcaggagttcgttg

SEQ ID NO: 31995 - DNA, 20 bp, Artificial Sequence
  MKO10031995_A_Mrpl12
  gRNA
agacctcaacgaactcctga

SEQ ID NO: 31996 - DNA, 20 bp, Artificial Sequence
  MKO10031996_A_Mrpl13
  gRNA
gctataaccgcaagtttgcc

SEQ ID NO: 31997 - DNA, 20 bp, Artificial Sequence
  MKO10031997_A_Mrpl13
  gRNA
ataccacattcgagcaaaag

SEQ ID NO: 31998 - DNA, 20 bp, Artificial Sequence
  MKO10031998_A_Mrpl13
  gRNA
aaagtgtactcctcacatac

SEQ ID NO: 31999 - DNA, 20 bp, Artificial Sequence
  MKO10031999_A_Mrpl14
  gRNA
gatcccatggccgcccttac

SEQ ID NO: 32000 - DNA, 20 bp, Artificial Sequence
  MKO10032000_A_Mrpl14
  gRNA
caccggggtggccgatggta

SEQ ID NO: 32001 - DNA, 20 bp, Artificial Sequence
  MKO10032001_A_Mrpl14
  gRNA
ccccactcttgttatagacg

SEQ ID NO: 32002 - DNA, 20 bp, Artificial Sequence
  MKO10032002_A_Mrpl15
  gRNA
tgaccatccagccgcttaag

SEQ ID NO: 32003 - DNA, 20 bp, Artificial Sequence
  MKO10032003_A_Mrpl15
  gRNA
gcgcggctgcgggaccagcc

SEQ ID NO: 32004 - DNA, 20 bp, Artificial Sequence
  MKO10032004_A_Mrpl15
  gRNA
accgcgggtcatggctggca

SEQ ID NO: 32005 - DNA, 20 bp, Artificial Sequence
  MKO10032005_A_Mrpl16
  gRNA
cttgacaatcaaccgcttta

SEQ ID NO: 32006 - DNA, 20 bp, Artificial Sequence
  MKO10032006_A_Mrpl16
  gRNA
gcgctttcactacacacgct

SEQ ID NO: 32007 - DNA, 20 bp, Artificial Sequence
  MKO10032007_A_Mrpl16
  gRNA
gcgtccccgcgccgctcctg

SEQ ID NO: 32008 - DNA, 20 bp, Artificial Sequence
  MKO10032008_A_Mrpl17
  gRNA
atgtcgcctcgatgcgttcg

SEQ ID NO: 32009 - DNA, 20 bp, Artificial Sequence
  MKO10032009_A_Mrpl17
  gRNA
agttcgccacgaacgcatcg

SEQ ID NO: 32010 - DNA, 20 bp, Artificial Sequence
  MKO10032010_A_Mrpl17
  gRNA
caacgaacgagccatgcgta

SEQ ID NO: 32011 - DNA, 20 bp, Artificial Sequence
  MKO10032011_A_Mrpl18
  gRNA
ctgcacggccggcacggaac

SEQ ID NO: 32012 - DNA, 20 bp, Artificial Sequence
  MKO10032012_A_Mrpl18
  gRNA
tagctcggaaagaacggggc

SEQ ID NO: 32013 - DNA, 20 bp, Artificial Sequence
  MKO10032013_A_Mrpl18
  gRNA
tttaatagcccattctcgag

SEQ ID NO: 32014 - DNA, 20 bp, Artificial Sequence
  MKO10032014_A_Mrpl19
  gRNA
gggcgtcccgtaagtacagc

SEQ ID NO: 32015 - DNA, 20 bp, Artificial Sequence
  MKO10032015_A_Mrpl19
  gRNA
acagccgacccctatgccag

SEQ ID NO: 32016 - DNA, 20 bp, Artificial Sequence
  MKO10032016_A_Mrpl19
  gRNA
cgttcccagcgtttggacca

SEQ ID NO: 32017 - DNA, 20 bp, Artificial Sequence
  MKO10032017_A_Mrpl1
  gRNA
tctacttcatagatccgccg

SEQ ID NO: 32018 - DNA, 20 bp, Artificial Sequence
  MKO10032018_A_Mrpl1
  gRNA
tcaacatggcggcggccgta

SEQ ID NO: 32019 - DNA, 20 bp, Artificial Sequence
  MKO10032019_A_Mrpl1
  gRNA
acttaaaacgcttataccca

SEQ ID NO: 32020 - DNA, 20 bp, Artificial Sequence
  MKO10032020_A_Mrpl20
  gRNA
ctgaacccgccaatagcgat

SEQ ID NO: 32021 - DNA, 20 bp, Artificial Sequence
  MKO10032021_A_Mrpl20
  gRNA
accgcctcaccgatcgctat

SEQ ID NO: 32022 - DNA, 20 bp, Artificial Sequence
  MKO10032022_A_Mrpl20
  gRNA
agccttcgttaagtgtacga

SEQ ID NO: 32023 - DNA, 20 bp, Artificial Sequence
  MKO10032023_A_Mrpl21
  gRNA
cagagcgcttcatatccaca

SEQ ID NO: 32024 - DNA, 20 bp, Artificial Sequence
  MKO10032024_A_Mrpl21
  gRNA
gtcctgcagaggttgtgaag

SEQ ID NO: 32025 - DNA, 20 bp, Artificial Sequence
  MKO10032025_A_Mrpl21
  gRNA
accggaggagtggcttgccc

SEQ ID NO: 32026 - DNA, 20 bp, Artificial Sequence
  MKO10032026_A_Mrpl22
  gRNA
aaacttaccgctggtctccg

SEQ ID NO: 32027 - DNA, 20 bp, Artificial Sequence
  MKO10032027_A_Mrpl22
  gRNA
gttagcttaccatctttgcc

SEQ ID NO: 32028 - DNA, 20 bp, Artificial Sequence
  MKO10032028_A_Mrpl22
  gRNA
tcacgttgcaggtgcactga

SEQ ID NO: 32029 - DNA, 20 bp, Artificial Sequence
  MKO10032029_A_Mrpl23
  gRNA
tcacttactccatggggatc

SEQ ID NO: 32030 - DNA, 20 bp, Artificial Sequence
  MKO10032030_A_Mrpl23
  gRNA
caggtaccccctttaccaac

SEQ ID NO: 32031 - DNA, 20 bp, Artificial Sequence
  MKO10032031_A_Mrpl23
  gRNA
ctcactcaccagctgcacgt

SEQ ID NO: 32032 - DNA, 20 bp, Artificial Sequence
  MKO10032032_A_Mrpl24
  gRNA
ggacagcattaccgatacat

SEQ ID NO: 32033 - DNA, 20 bp, Artificial Sequence
  MKO10032033_A_Mrpl24
  gRNA
agtttcgctgccgaacgact

SEQ ID NO: 32034 - DNA, 20 bp, Artificial Sequence
  MKO10032034_A_Mrpl24
  gRNA
gggggcttcactagcgatca

SEQ ID NO: 32035 - DNA, 20 bp, Artificial Sequence
  MKO10032035_A_Mrpl27
  gRNA
acgctgaggacgcgggcagc

SEQ ID NO: 32036 - DNA, 20 bp, Artificial Sequence
  MKO10032036_A_Mrpl27
  gRNA
tcaggtcactacgttcacgc

SEQ ID NO: 32037 - DNA, 20 bp, Artificial Sequence
  MKO10032037_A_Mrpl27
  gRNA
gagcaactcacatgggctcc

SEQ ID NO: 32038 - DNA, 20 bp, Artificial Sequence
  MKO10032038_A_Mrpl28
  gRNA
gaacctgctcctgaagccgc

SEQ ID NO: 32039 - DNA, 20 bp, Artificial Sequence
  MKO10032039_A_Mrpl28
  gRNA
cctctacgtagaccttgaac

SEQ ID NO: 32040 - DNA, 20 bp, Artificial Sequence
  MKO10032040_A_Mrpl28
  gRNA
gatctcatcgatgaggccta

SEQ ID NO: 32041 - DNA, 20 bp, Artificial Sequence
  MKO10032041_A_Mrpl2
  gRNA
ccgcccagtgcatatgtctg

SEQ ID NO: 32042 - DNA, 20 bp, Artificial Sequence
  MKO10032042_A_Mrpl2
  gRNA
gtacttggtacgactcttcc

SEQ ID NO: 32043 - DNA, 20 bp, Artificial Sequence
  MKO10032043_A_Mrpl2
  gRNA
cgctctctacgttgttgatg

SEQ ID NO: 32044 - DNA, 20 bp, Artificial Sequence
  MKO10032044_A_Mrpl30
  gRNA
ttctgcgctccgcgttcccg

SEQ ID NO: 32045 - DNA, 20 bp, Artificial Sequence
  MKO10032045_A_Mrpl30
  gRNA
aagcttacctgcagtctgca

SEQ ID NO: 32046 - DNA, 20 bp, Artificial Sequence
  MKO10032046_A_Mrpl30
  gRNA
ctgcttcagactgtgaagaa

SEQ ID NO: 32047 - DNA, 20 bp, Artificial Sequence
  MKO10032047_A_Mrpl32
  gRNA
tgcgtcccggaccgctccag

SEQ ID NO: 32048 - DNA, 20 bp, Artificial Sequence
  MKO10032048_A_Mrpl32
  gRNA
ggtctctggacggctaatgc

SEQ ID NO: 32049 - DNA, 20 bp, Artificial Sequence
  MKO10032049_A_Mrpl32
  gRNA
tatcatgtgctagctctgtg

SEQ ID NO: 32050 - DNA, 20 bp, Artificial Sequence
  MKO10032050_A_Mrpl33
  gRNA
gtgaaactagtgagccaagc

SEQ ID NO: 32051 - DNA, 20 bp, Artificial Sequence
  MKO10032051_A_Mrpl33
  gRNA
ctcggagtcggcttctcttg

SEQ ID NO: 32052 - DNA, 20 bp, Artificial Sequence
  MKO10032052_A_Mrpl33
  gRNA
gaccgacttacaagagacag

SEQ ID NO: 32053 - DNA, 20 bp, Artificial Sequence
  MKO10032053_A_Mrpl34
  gRNA
gatactcgtttccgcgcgcg

SEQ ID NO: 32054 - DNA, 20 bp, Artificial Sequence
  MKO10032054_A_Mrpl34
  gRNA
aggatgacctgcacgccggc

SEQ ID NO: 32055 - DNA, 20 bp, Artificial Sequence
  MKO10032055_A_Mrpl34
  gRNA
acactcacctgccactcaat

SEQ ID NO: 32056 - DNA, 20 bp, Artificial Sequence
  MKO10032056_A_Mrpl35
  gRNA
attcctggcgcagttccgat

SEQ ID NO: 32057 - DNA, 20 bp, Artificial Sequence
  MKO10032057_A_Mrpl35
  gRNA
caacctatcggaactgcgcc

SEQ ID NO: 32058 - DNA, 20 bp, Artificial Sequence
  MKO10032058_A_Mrpl35
  gRNA
aagaggcgcaactggtacgc

SEQ ID NO: 32059 - DNA, 20 bp, Artificial Sequence
  MKO10032059_A_Mrpl36
  gRNA
acgcgccaaaccctgcgcag

SEQ ID NO: 32060 - DNA, 20 bp, Artificial Sequence
  MKO10032060_A_Mrpl36
  gRNA
cctgcacctgagtcgcctcg

SEQ ID NO: 32061 - DNA, 20 bp, Artificial Sequence
  MKO10032061_A_Mrpl36
  gRNA
agactcggggcttcaccgcg

SEQ ID NO: 32062 - DNA, 20 bp, Artificial Sequence
  MKO10032062_A_Mrpl37
  gRNA
aaagcgttgtggccgtaaat

SEQ ID NO: 32063 - DNA, 20 bp, Artificial Sequence
  MKO10032063_A_Mrpl37
  gRNA
gggtgacctaccgcggttcc

SEQ ID NO: 32064 - DNA, 20 bp, Artificial Sequence
  MKO10032064_A_Mrpl37
  gRNA
gtatggtactactagtacct

SEQ ID NO: 32065 - DNA, 20 bp, Artificial Sequence
  MKO10032065_A_Mrpl38
  gRNA
ggcggtaccgctcgaagctc

SEQ ID NO: 32066 - DNA, 20 bp, Artificial Sequence
  MKO10032066_A_Mrpl38
  gRNA
gctcacgtcgatgtcctcgt

SEQ ID NO: 32067 - DNA, 20 bp, Artificial Sequence
  MKO10032067_A_Mrpl38
  gRNA
caatgaagtgactccgaccg

SEQ ID NO: 32068 - DNA, 20 bp, Artificial Sequence
  MKO10032068_A_Mrpl39
  gRNA
gttatcgttaaccccccgaa

SEQ ID NO: 32069 - DNA, 20 bp, Artificial Sequence
  MKO10032069_A_Mrpl39
  gRNA
ccgcatttctgtcagctccg

SEQ ID NO: 32070 - DNA, 20 bp, Artificial Sequence
  MKO10032070_A_Mrpl39
  gRNA
gcgttcttgtgccatgatgc

SEQ ID NO: 32071 - DNA, 20 bp, Artificial Sequence
  MKO10032071_A_Mrpl3
  gRNA
acttacatagaagcgtgaca

SEQ ID NO: 32072 - DNA, 20 bp, Artificial Sequence
  MKO10032072_A_Mrpl3
  gRNA
gataacgctgtaattaagcc

SEQ ID NO: 32073 - DNA, 20 bp, Artificial Sequence
  MKO10032073_A_Mrpl3
  gRNA
gcatgcagtcacattactac

SEQ ID NO: 32074 - DNA, 20 bp, Artificial Sequence
  MKO10032074_A_Mrpl40
  gRNA
taggctggtatcccgcttta

SEQ ID NO: 32075 - DNA, 20 bp, Artificial Sequence
  MKO10032075_A_Mrpl40
  gRNA
tgttcacagacagcgacctc

SEQ ID NO: 32076 - DNA, 20 bp, Artificial Sequence
  MKO10032076_A_Mrpl40
  gRNA
cgtgaaaaactatggctacc

SEQ ID NO: 32077 - DNA, 20 bp, Artificial Sequence
  MKO10032077_A_Mrpl41
  gRNA
gacatttgatgctaacaacc

SEQ ID NO: 32078 - DNA, 20 bp, Artificial Sequence
  MKO10032078_A_Mrpl41
  gRNA
ttcctgactgccgtgactca

SEQ ID NO: 32079 - DNA, 20 bp, Artificial Sequence
  MKO10032079_A_Mrpl41
  gRNA
cgactcttagtgaaggtgcg

SEQ ID NO: 32080 - DNA, 20 bp, Artificial Sequence
  MKO10032080_A_Mrpl42
  gRNA
gatggacttactgtccgtgc

SEQ ID NO: 32081 - DNA, 20 bp, Artificial Sequence
  MKO10032081_A_Mrpl42
  gRNA
gcgtaccaattgtagtcatc

SEQ ID NO: 32082 - DNA, 20 bp, Artificial Sequence
  MKO10032082_A_Mrpl42
  gRNA
acgtactttggtgtgttcgt

SEQ ID NO: 32083 - DNA, 20 bp, Artificial Sequence
  MKO10032083_A_Mrpl43
  gRNA
accgtagccatgaccggtcg

SEQ ID NO: 32084 - DNA, 20 bp, Artificial Sequence
  MKO10032084_A_Mrpl43
  gRNA
gatgcggatcacatccaagc

SEQ ID NO: 32085 - DNA, 20 bp, Artificial Sequence
  MKO10032085_A_Mrpl43
  gRNA
ttcacgtatactacgactcc

SEQ ID NO: 32086 - DNA, 20 bp, Artificial Sequence
  MKO10032086_A_Mrpl44
  gRNA
ttcccagacttgcccgccga

SEQ ID NO: 32087 - DNA, 20 bp, Artificial Sequence
  MKO10032087_A_Mrpl44
  gRNA
gcagggccctcgccgcctat

SEQ ID NO: 32088 - DNA, 20 bp, Artificial Sequence
  MKO10032088_A_Mrpl44
  gRNA
ctcctctacgagtagtccca

SEQ ID NO: 32089 - DNA, 20 bp, Artificial Sequence
  MKO10032089_A_Mrpl45
  gRNA
aatgaccaatcccgctttcc

SEQ ID NO: 32090 - DNA, 20 bp, Artificial Sequence
  MKO10032090_A_Mrpl45
  gRNA
cctatacatttggcctgtac

SEQ ID NO: 32091 - DNA, 20 bp, Artificial Sequence
  MKO10032091_A_Mrpl45
  gRNA
acctaccggaaaacagtgtt

SEQ ID NO: 32092 - DNA, 20 bp, Artificial Sequence
  MKO10032092_A_Mrpl46
  gRNA
gtctagctttcgatgcaacg

SEQ ID NO: 32093 - DNA, 20 bp, Artificial Sequence
  MKO10032093_A_Mrpl46
  gRNA
ccctaaaagagtacgcccta

SEQ ID NO: 32094 - DNA, 20 bp, Artificial Sequence
  MKO10032094_A_Mrpl46
  gRNA
cagcccggggagacccttcg

SEQ ID NO: 32095 - DNA, 20 bp, Artificial Sequence
  MKO10032095_A_Mrpl47
  gRNA
accgcaggtcgttgattcca

SEQ ID NO: 32096 - DNA, 20 bp, Artificial Sequence
  MKO10032096_A_Mrpl47
  gRNA
aactttatctacgttatcca

SEQ ID NO: 32097 - DNA, 20 bp, Artificial Sequence
  MKO10032097_A_Mrpl47
  gRNA
aagtccggagcgcttagaaa

SEQ ID NO: 32098 - DNA, 20 bp, Artificial Sequence
  MKO10032098_A_Mrpl48
  gRNA
tgtccatcaaagtcgaggaa

SEQ ID NO: 32099 - DNA, 20 bp, Artificial Sequence
  MKO10032099_A_Mrpl48
  gRNA
gtatcttccgatgccacgag

SEQ ID NO: 32100 - DNA, 20 bp, Artificial Sequence
  MKO10032100_A_Mrpl48
  gRNA
ctacctttcctcgactttga

SEQ ID NO: 32101 - DNA, 20 bp, Artificial Sequence
  MKO10032101_A_Mrpl49
  gRNA
gtcgcccgtagctccgaccg

SEQ ID NO: 32102 - DNA, 20 bp, Artificial Sequence
  MKO10032102_A_Mrpl49
  gRNA
ccgagagcgacgaacaaagt

SEQ ID NO: 32103 - DNA, 20 bp, Artificial Sequence
  MKO10032103_A_Mrpl49
  gRNA
cctactttgttcgtcgctct

SEQ ID NO: 32104 - DNA, 20 bp, Artificial Sequence
  MKO10032104_A_Mrpl4
  gRNA
aggcgccgttgcaaacacgt

SEQ ID NO: 32105 - DNA, 20 bp, Artificial Sequence
  MKO10032105_A_Mrpl4
  gRNA
gtctcaccagcgctatctcg

SEQ ID NO: 32106 - DNA, 20 bp, Artificial Sequence
  MKO10032106_A_Mrpl4
  gRNA
ccactcacctcctcgccata

SEQ ID NO: 32107 - DNA, 20 bp, Artificial Sequence
  MKO10032107_A_Mrpl50
  gRNA
tggcggcgctgatcgtgtct

SEQ ID NO: 32108 - DNA, 20 bp, Artificial Sequence
  MKO10032108_A_Mrpl50
  gRNA
tatgagattccaagcgactc

SEQ ID NO: 32109 - DNA, 20 bp, Artificial Sequence
  MKO10032109_A_Mrpl50
  gRNA
gcctggagttagggaccgca

SEQ ID NO: 32110 - DNA, 20 bp, Artificial Sequence
  MKO10032110_A_Mrpl51
  gRNA
ttgatcgctggaacgagaag

SEQ ID NO: 32111 - DNA, 20 bp, Artificial Sequence
  MKO10032111_A_Mrpl51
  gRNA
ttccctaggcgtcccacggt

SEQ ID NO: 32112 - DNA, 20 bp, Artificial Sequence
  MKO10032112_A_Mrpl51
  gRNA
acttacccagagagaagctt

SEQ ID NO: 32113 - DNA, 20 bp, Artificial Sequence
  MKO10032113_A_Mrpl52
  gRNA
gcactcactggagtcgccac

SEQ ID NO: 32114 - DNA, 20 bp, Artificial Sequence
  MKO10032114_A_Mrpl52
  gRNA
gagattgcactgcagcgtag

SEQ ID NO: 32115 - DNA, 20 bp, Artificial Sequence
  MKO10032115_A_Mrpl52
  gRNA
tcacccgcgaaggaccagtc

SEQ ID NO: 32116 - DNA, 20 bp, Artificial Sequence
  MKO10032116_A_Mrpl53
  gRNA
cggactacggccggtcaagc

SEQ ID NO: 32117 - DNA, 20 bp, Artificial Sequence
  MKO10032117_A_Mrpl53
  gRNA
accgaacaacacgtccacgc

SEQ ID NO: 32118 - DNA, 20 bp, Artificial Sequence
  MKO10032118_A_Mrpl53
  gRNA
ggtaaccatggcggcggctt

SEQ ID NO: 32119 - DNA, 20 bp, Artificial Sequence
  MKO10032119_A_Mrpl54
  gRNA
cttcccgggtgtgggcccgc

SEQ ID NO: 32120 - DNA, 20 bp, Artificial Sequence
  MKO10032120_A_Mrpl54
  gRNA
tggcggccgcccatctcctc

SEQ ID NO: 32121 - DNA, 20 bp, Artificial Sequence
  MKO10032121_A_Mrpl54
  gRNA
gaagtagtcgccagtactct

SEQ ID NO: 32122 - DNA, 20 bp, Artificial Sequence
  MKO10032122_A_Mrpl55
  gRNA
ccggtatcggatatggatag

SEQ ID NO: 32123 - DNA, 20 bp, Artificial Sequence
  MKO10032123_A_Mrpl55
  gRNA
cttaccgccagcatgcgtcg

SEQ ID NO: 32124 - DNA, 20 bp, Artificial Sequence
  MKO10032124_A_Mrpl55
  gRNA
aaccgggccctgcgctcttc

SEQ ID NO: 32125 - DNA, 20 bp, Artificial Sequence
  MKO10032125_A_Mrpl9
  gRNA
ccaccagagcacggtcatcg

SEQ ID NO: 32126 - DNA, 20 bp, Artificial Sequence
  MKO10032126_A_Mrpl9
  gRNA
tggtggaaggtgccgctcgc

SEQ ID NO: 32127 - DNA, 20 bp, Artificial Sequence
  MKO10032127_A_Mrpl9
  gRNA
ctctttcagctgagacgcga

SEQ ID NO: 32128 - DNA, 20 bp, Artificial Sequence
  MKO10032128_A_Mrps10
  gRNA
aattcagacacgagccgcca

SEQ ID NO: 32129 - DNA, 20 bp, Artificial Sequence
  MKO10032129_A_Mrps10
  gRNA
aaaggatgtgaccagaccta

SEQ ID NO: 32130 - DNA, 20 bp, Artificial Sequence
  MKO10032130_A_Mrps10
  gRNA
ccatacctttgtcacttcca

SEQ ID NO: 32131 - DNA, 20 bp, Artificial Sequence
  MKO10032131_A_Mrps11
  gRNA
aagcggctccaagtcgcttc

SEQ ID NO: 32132 - DNA, 20 bp, Artificial Sequence
  MKO10032132_A_Mrps11
  gRNA
taccctcacctgaagcgact

SEQ ID NO: 32133 - DNA, 20 bp, Artificial Sequence
  MKO10032133_A_Mrps11
  gRNA
ggcgcgggccagggacgcat

SEQ ID NO: 32134 - DNA, 20 bp, Artificial Sequence
  MKO10032134_A_Mrps12
  gRNA
gggtgcgaccaccctccacg

SEQ ID NO: 32135 - DNA, 20 bp, Artificial Sequence
  MKO10032135_A_Mrps12
  gRNA
ctcaccacgtccctcagtcg

SEQ ID NO: 32136 - DNA, 20 bp, Artificial Sequence
  MKO10032136_A_Mrps12
  gRNA
gaaggaaccccctaagcgtc

SEQ ID NO: 32137 - DNA, 20 bp, Artificial Sequence
  MKO10032137_A_Mrps14
  gRNA
aacatggcggcgtccgtgct

SEQ ID NO: 32138 - DNA, 20 bp, Artificial Sequence
  MKO10032138_A_Mrps14
  gRNA
cagcgacgcttaacaccacg

SEQ ID NO: 32139 - DNA, 20 bp, Artificial Sequence
  MKO10032139_A_Mrps14
  gRNA
gttatgacatctcgcccacg

SEQ ID NO: 32140 - DNA, 20 bp, Artificial Sequence
  MKO10032140_A_Mrps15
  gRNA
tacgccgccgtccagaaacc

SEQ ID NO: 32141 - DNA, 20 bp, Artificial Sequence
  MKO10032141_A_Mrps15
  gRNA
gtattctttgatgaacgcag

SEQ ID NO: 32142 - DNA, 20 bp, Artificial Sequence
  MKO10032142_A_Mrps15
  gRNA
gggtggttcatcgtcctgct

SEQ ID NO: 32143 - DNA, 20 bp, Artificial Sequence
  MKO10032143_A_Mrps16
  gRNA
aaaactagttgccctcaacc

SEQ ID NO: 32144 - DNA, 20 bp, Artificial Sequence
  MKO10032144_A_Mrps16
  gRNA
tggccgatttgtggagcagt

SEQ ID NO: 32145 - DNA, 20 bp, Artificial Sequence
  MKO10032145_A_Mrps16
  gRNA
gcactcactgagctggacca

SEQ ID NO: 32146 - DNA, 20 bp, Artificial Sequence
  MKO10032146_A_Mrps17
  gRNA
tgcttcacatgcttcgatcg

SEQ ID NO: 32147 - DNA, 20 bp, Artificial Sequence
  MKO10032147_A_Mrps17
  gRNA
gttcatccgtccacgccaaa

SEQ ID NO: 32148 - DNA, 20 bp, Artificial Sequence
  MKO10032148_A_Mrps17
  gRNA
cgagttatcgaccccgtcac

SEQ ID NO: 32149 - DNA, 20 bp, Artificial Sequence
  MKO10032149_A_Mrps18a
  gRNA
gacttcttaccggttgagct

SEQ ID NO: 32150 - DNA, 20 bp, Artificial Sequence
  MKO10032150_A_Mrps18a
  gRNA
ggaagaacaccgaaaaatcg

SEQ ID NO: 32151 - DNA, 20 bp, Artificial Sequence
  MKO10032151_A_Mrps18a
  gRNA
gtgaagatggctcatcgagc

SEQ ID NO: 32152 - DNA, 20 bp, Artificial Sequence
  MKO10032152_A_Mrps18b
  gRNA
cagcgtaacaataaagttgc

SEQ ID NO: 32153 - DNA, 20 bp, Artificial Sequence
  MKO10032153_A_Mrps18b
  gRNA
tcagaataccacaaccgcta

SEQ ID NO: 32154 - DNA, 20 bp, Artificial Sequence
  MKO10032154_A_Mrps18b
  gRNA
gactaccgccgcaaccacaa

SEQ ID NO: 32155 - DNA, 20 bp, Artificial Sequence
  MKO10032155_A_Mrps18c
  gRNA
tcttaccaggtcctcattgc

SEQ ID NO: 32156 - DNA, 20 bp, Artificial Sequence
  MKO10032156_A_Mrps18c
  gRNA
tttatcctagccagtcccaa

SEQ ID NO: 32157 - DNA, 20 bp, Artificial Sequence
  MKO10032157_A_Mrps18c
  gRNA
tccttgtaggggttctccat

SEQ ID NO: 32158 - DNA, 20 bp, Artificial Sequence
  MKO10032158_A_Mrps21
  gRNA
gcgtcgtcgacttatgactt

SEQ ID NO: 32159 - DNA, 20 bp, Artificial Sequence
  MKO10032159_A_Mrps21
  gRNA
gtgcctaccggaccctgaac

SEQ ID NO: 32160 - DNA, 20 bp, Artificial Sequence
  MKO10032160_A_Mrps21
  gRNA
agccttgccgccgccgccag

SEQ ID NO: 32161 - DNA, 20 bp, Artificial Sequence
  MKO10032161_A_Mrps22
  gRNA
gctttgcgtagtgtgccact

SEQ ID NO: 32162 - DNA, 20 bp, Artificial Sequence
  MKO10032162_A_Mrps22
  gRNA
agattccgctgagtatatca

SEQ ID NO: 32163 - DNA, 20 bp, Artificial Sequence
  MKO10032163_A_Mrps22
  gRNA
tcagctaatacgtcatttat

SEQ ID NO: 32164 - DNA, 20 bp, Artificial Sequence
  MKO10032164_A_Mrps23
  gRNA
cgtatcgcaagcggggcctt

SEQ ID NO: 32165 - DNA, 20 bp, Artificial Sequence
  MKO10032165_A_Mrps23
  gRNA
acgctcgaatctgatcctcc

SEQ ID NO: 32166 - DNA, 20 bp, Artificial Sequence
  MKO10032166_A_Mrps23
  gRNA
acttcaagtctacctgtcag

SEQ ID NO: 32167 - DNA, 20 bp, Artificial Sequence
  MKO10032167_A_Mrps24
  gRNA
ccctagcccgcgcaccgacg

SEQ ID NO: 32168 - DNA, 20 bp, Artificial Sequence
  MKO10032168_A_Mrps24
  gRNA
gcactacatcgcacaccgaa

SEQ ID NO: 32169 - DNA, 20 bp, Artificial Sequence
  MKO10032169_A_Mrps24
  gRNA
actcaccttggcgcagaccg

SEQ ID NO: 32170 - DNA, 20 bp, Artificial Sequence
  MKO10032170_A_Mrps25
  gRNA
tactgcagcgtacggcggat

SEQ ID NO: 32171 - DNA, 20 bp, Artificial Sequence
  MKO10032171_A_Mrps25
  gRNA
ccgccgtacgctgcagtacc

SEQ ID NO: 32172 - DNA, 20 bp, Artificial Sequence
  MKO10032172_A_Mrps25
  gRNA
cttcgcacatgcactcccgc

SEQ ID NO: 32173 - DNA, 20 bp, Artificial Sequence
  MKO10032173_A_Mrps26
  gRNA
tcaacacgaagaattccgca

SEQ ID NO: 32174 - DNA, 20 bp, Artificial Sequence
  MKO10032174_A_Mrps26
  gRNA
cctggaaccgggacgagaac

SEQ ID NO: 32175 - DNA, 20 bp, Artificial Sequence
  MKO10032175_A_Mrps26
  gRNA
gttgcgcgctctgaaccgcc

SEQ ID NO: 32176 - DNA, 20 bp, Artificial Sequence
  MKO10032176_A_Mrps27
  gRNA
cctgctttctgcagcgtacg

SEQ ID NO: 32177 - DNA, 20 bp, Artificial Sequence
  MKO10032177_A_Mrps27
  gRNA
ccacgtacgctgcagaaagc

SEQ ID NO: 32178 - DNA, 20 bp, Artificial Sequence
  MKO10032178_A_Mrps27
  gRNA
ttcgacacagtcccaactgc

SEQ ID NO: 32179 - DNA, 20 bp, Artificial Sequence
  MKO10032179_A_Mrps28
  gRNA
ggagtcgtgggttgcgctct

SEQ ID NO: 32180 - DNA, 20 bp, Artificial Sequence
  MKO10032180_A_Mrps28
  gRNA
aagccgcctgaacgcgcccg

SEQ ID NO: 32181 - DNA, 20 bp, Artificial Sequence
  MKO10032181_A_Mrps28
  gRNA
gcgcatcttccatatcgtgg

SEQ ID NO: 32182 - DNA, 20 bp, Artificial Sequence
  MKO10032182_A_Mrps2
  gRNA
gggccaagatatcatcgatc

SEQ ID NO: 32183 - DNA, 20 bp, Artificial Sequence
  MKO10032183_A_Mrps2
  gRNA
ggctcgctgactgcggggac

SEQ ID NO: 32184 - DNA, 20 bp, Artificial Sequence
  MKO10032184_A_Mrps2
  gRNA
gatccagatcgatgatatct

SEQ ID NO: 32185 - DNA, 20 bp, Artificial Sequence
  MKO10032185_A_Mrps30
  gRNA
gttgcttagatattcgaatc

SEQ ID NO: 32186 - DNA, 20 bp, Artificial Sequence
  MKO10032186_A_Mrps30
  gRNA
acccccgtaaaaatctatgt

SEQ ID NO: 32187 - DNA, 20 bp, Artificial Sequence
  MKO10032187_A_Mrps30
  gRNA
tcatactgccgtctgaacaa

SEQ ID NO: 32188 - DNA, 20 bp, Artificial Sequence
  MKO10032188_A_Mrps31
  gRNA
gattcagtttgacgaagaca

SEQ ID NO: 32189 - DNA, 20 bp, Artificial Sequence
  MKO10032189_A_Mrps31
  gRNA
gctgatgaaccacctgaacc

SEQ ID NO: 32190 - DNA, 20 bp, Artificial Sequence
  MKO10032190_A_Mrps31
  gRNA
cttaacaaacctggttcagg

SEQ ID NO: 32191 - DNA, 20 bp, Artificial Sequence
  MKO10032191_A_Mrps33
  gRNA
tgaagaaatgtctccgcttt

SEQ ID NO: 32192 - DNA, 20 bp, Artificial Sequence
  MKO10032192_A_Mrps33
  gRNA
ggactttgagtcagtagacc

SEQ ID NO: 32193 - DNA, 20 bp, Artificial Sequence
  MKO10032193_A_Mrps33
  gRNA
gcatgtctcgtctgagtgcc

SEQ ID NO: 32194 - DNA, 20 bp, Artificial Sequence
  MKO10032194_A_Mrps34
  gRNA
cgcgtgaggcgccagtagca

SEQ ID NO: 32195 - DNA, 20 bp, Artificial Sequence
  MKO10032195_A_Mrps34
  gRNA
gcggctctcgcgacgcacgt

SEQ ID NO: 32196 - DNA, 20 bp, Artificial Sequence
  MKO10032196_A_Mrps34
  gRNA
agcaagtcatgtaccacgat

SEQ ID NO: 32197 - DNA, 20 bp, Artificial Sequence
  MKO10032197_A_Mrps35
  gRNA
tccgctgtatcaatctcaac

SEQ ID NO: 32198 - DNA, 20 bp, Artificial Sequence
  MKO10032198_A_Mrps35
  gRNA
aagcccgagccgtaacgtta

SEQ ID NO: 32199 - DNA, 20 bp, Artificial Sequence
  MKO10032199_A_Mrps35
  gRNA
cgcggcagtggggtaaacac

SEQ ID NO: 32200 - DNA, 20 bp, Artificial Sequence
  MKO10032200_A_Mrps36
  gRNA
tacaacttaccactgagttt

SEQ ID NO: 32201 - DNA, 20 bp, Artificial Sequence
  MKO10032201_A_Mrps36
  gRNA
agagacaaacctaaactcag

SEQ ID NO: 32202 - DNA, 20 bp, Artificial Sequence
  MKO10032202_A_Mrps36
  gRNA
ggtcacgatgggcagcaaga

SEQ ID NO: 32203 - DNA, 20 bp, Artificial Sequence
  MKO10032203_A_Mrps5
  gRNA
ttaaagagagttgcctagac

SEQ ID NO: 32204 - DNA, 20 bp, Artificial Sequence
  MKO10032204_A_Mrps5
  gRNA
gtggttgcgccttgtttccc

SEQ ID NO: 32205 - DNA, 20 bp, Artificial Sequence
  MKO10032205_A_Mrps5
  gRNA
ctgctggcccgtccagttgc

SEQ ID NO: 32206 - DNA, 20 bp, Artificial Sequence
  MKO10032206_A_Mrps6
  gRNA
ggcgatgccccgctacgagt

SEQ ID NO: 32207 - DNA, 20 bp, Artificial Sequence
  MKO10032207_A_Mrps6
  gRNA
gtgagcgtgcgctcccctac

SEQ ID NO: 32208 - DNA, 20 bp, Artificial Sequence
  MKO10032208_A_Mrps6
  gRNA
cttggcgcgagacattgacg

SEQ ID NO: 32209 - DNA, 20 bp, Artificial Sequence
  MKO10032209_A_Mrps7
  gRNA
cccggaattcgggggcatag

SEQ ID NO: 32210 - DNA, 20 bp, Artificial Sequence
  MKO10032210_A_Mrps7
  gRNA
agtgccgagagaataaaccg

SEQ ID NO: 32211 - DNA, 20 bp, Artificial Sequence
  MKO10032211_A_Mrps7
  gRNA
cgccgacgtcggtcagcgag

SEQ ID NO: 32212 - DNA, 20 bp, Artificial Sequence
  MKO10032212_A_Mrps9
  gRNA
cgcttctcaaacaaaccact

SEQ ID NO: 32213 - DNA, 20 bp, Artificial Sequence
  MKO10032213_A_Mrps9
  gRNA
acggccatcttctccccact

SEQ ID NO: 32214 - DNA, 20 bp, Artificial Sequence
  MKO10032214_A_Mrps9
  gRNA
gttaggattaccttcatcat

SEQ ID NO: 32215 - DNA, 20 bp, Artificial Sequence
  MKO10032215_A_Mrrf
  gRNA
cattagactcatcgagaagc

SEQ ID NO: 32216 - DNA, 20 bp, Artificial Sequence
  MKO10032216_A_Mrrf
  gRNA
tattaacggtcaccctggcc

SEQ ID NO: 32217 - DNA, 20 bp, Artificial Sequence
  MKO10032217_A_Mrrf
  gRNA
ggtgaccgttaatagagcct

SEQ ID NO: 32218 - DNA, 20 bp, Artificial Sequence
  MKO10032218_A_Mrs2
  gRNA
tcaagccactttagccagcg

SEQ ID NO: 32219 - DNA, 20 bp, Artificial Sequence
  MKO10032219_A_Mrs2
  gRNA
tcaggcttacccagtactgc

SEQ ID NO: 32220 - DNA, 20 bp, Artificial Sequence
  MKO10032220_A_Mrs2
  gRNA
gcatcactactagaaacaac

SEQ ID NO: 32221 - DNA, 20 bp, Artificial Sequence
  MKO10032221_A_Mrto4
  gRNA
cccacagcttcggaaatgtg

SEQ ID NO: 32222 - DNA, 20 bp, Artificial Sequence
  MKO10032222_A_Mrto4
  gRNA
cgctcaccggctgtgtttcc

SEQ ID NO: 32223 - DNA, 20 bp, Artificial Sequence
  MKO10032223_A_Mrto4
  gRNA
aagcacttacctcttctatc

SEQ ID NO: 32224 - DNA, 20 bp, Artificial Sequence
  MKO10032224_A_Mrvi1
  gRNA
atcccccgtcaggacgattg

SEQ ID NO: 32225 - DNA, 20 bp, Artificial Sequence
  MKO10032225_A_Mrvi1
  gRNA
cccgccgtgggaggaaatca

SEQ ID NO: 32226 - DNA, 20 bp, Artificial Sequence
  MKO10032226_A_Mrvi1
  gRNA
gctttcccaccgacacctga

SEQ ID NO: 32227 - DNA, 20 bp, Artificial Sequence
  MKO10032227_A_Ms4a10
  gRNA
gcagaacaagctgataacgt

SEQ ID NO: 32228 - DNA, 20 bp, Artificial Sequence
  MKO10032228_A_Ms4a10
  gRNA
tatcagcttgttctgcgcac

SEQ ID NO: 32229 - DNA, 20 bp, Artificial Sequence
  MKO10032229_A_Ms4a10
  gRNA
ggtctgcagtttctcgttgc

SEQ ID NO: 32230 - DNA, 20 bp, Artificial Sequence
  MKO10032230_A_Ms4a13
  gRNA
gatagattccaatcataatc

SEQ ID NO: 32231 - DNA, 20 bp, Artificial Sequence
  MKO10032231_A_Ms4a13
  gRNA
caggttatccagattatgat

SEQ ID NO: 32232 - DNA, 20 bp, Artificial Sequence
  MKO10032232_A_Ms4a13
  gRNA
tcggtgtcatatagaaatta

SEQ ID NO: 32233 - DNA, 20 bp, Artificial Sequence
  MKO10032233_A_Ms4a15
  gRNA
ccggtcaagaacgtctccat

SEQ ID NO: 32234 - DNA, 20 bp, Artificial Sequence
  MKO10032234_A_Ms4a15
  gRNA
caaggtggatgagaccgatc

SEQ ID NO: 32235 - DNA, 20 bp, Artificial Sequence
  MKO10032235_A_Ms4a15
  gRNA
atcccgcccagcaacgccag

SEQ ID NO: 32236 - DNA, 20 bp, Artificial Sequence
  MKO10032236_A_Ms4a18
  gRNA
ctacaacactcaattcttcg

SEQ ID NO: 32237 - DNA, 20 bp, Artificial Sequence
  MKO10032237_A_Ms4a18
  gRNA
gatgaattcaaggagggcga

SEQ ID NO: 32238 - DNA, 20 bp, Artificial Sequence
  MKO10032238_A_Ms4a18
  gRNA
catcagaggactaatctcac

SEQ ID NO: 32239 - DNA, 20 bp, Artificial Sequence
  MKO10032239_A_Ms4a1
  gRNA
ggatcatcagcagtcccccc

SEQ ID NO: 32240 - DNA, 20 bp, Artificial Sequence
  MKO10032240_A_Ms4a1
  gRNA
ggaagaggccattcatgatt

SEQ ID NO: 32241 - DNA, 20 bp, Artificial Sequence
  MKO10032241_A_Ms4a1
  gRNA
cagtcgtagatatcaacata

SEQ ID NO: 32242 - DNA, 20 bp, Artificial Sequence
  MKO10032242_A_Ms4a2
  gRNA
cacaaagcagccgtcgtctt

SEQ ID NO: 32243 - DNA, 20 bp, Artificial Sequence
  MKO10032243_A_Ms4a2
  gRNA
aagaatgtaaccgaagacga

SEQ ID NO: 32244 - DNA, 20 bp, Artificial Sequence
  MKO10032244_A_Ms4a2
  gRNA
aatgtccgccatgtctgctt

SEQ ID NO: 32245 - DNA, 20 bp, Artificial Sequence
  MKO10032245_A_Ms4a3
  gRNA
atacatctgatgaggaaccc

SEQ ID NO: 32246 - DNA, 20 bp, Artificial Sequence
  MKO10032246_A_Ms4a3
  gRNA
gagaaaccccacacgaatgc

SEQ ID NO: 32247 - DNA, 20 bp, Artificial Sequence
  MKO10032247_A_Ms4a3
  gRNA
agcacttaccagcattcgtg

SEQ ID NO: 32248 - DNA, 20 bp, Artificial Sequence
  MKO10032248_A_Ms4a4b
  gRNA
gatagtgttcagagttagac

SEQ ID NO: 32249 - DNA, 20 bp, Artificial Sequence
  MKO10032249_A_Ms4a4b
  gRNA
ttcctgttgtaactcccgtg

SEQ ID NO: 32250 - DNA, 20 bp, Artificial Sequence
  MKO10032250_A_Ms4a4b
  gRNA
acccacttcagtgatgttaa

SEQ ID NO: 32251 - DNA, 20 bp, Artificial Sequence
  MKO10032251_A_Ms4a4c
  gRNA
aaattattattccgaagctg

SEQ ID NO: 32252 - DNA, 20 bp, Artificial Sequence
  MKO10032252_A_Ms4a4c
  gRNA
ttcctgttgtaactccagcg

SEQ ID NO: 32253 - DNA, 20 bp, Artificial Sequence
  MKO10032253_A_Ms4a4c
  gRNA
cacctcgctggagttacaac

SEQ ID NO: 32254 - DNA, 20 bp, Artificial Sequence
  MKO10032254_A_Ms4a4d
  gRNA
attcatgtcagtgctcttac

SEQ ID NO: 32255 - DNA, 20 bp, Artificial Sequence
  MKO10032255_A_Ms4a4d
  gRNA
taaatactcacagcgatggc

SEQ ID NO: 32256 - DNA, 20 bp, Artificial Sequence
  MKO10032256_A_Ms4a4d
  gRNA
ggcgtcatcagtgtgatttc

SEQ ID NO: 32257 - DNA, 20 bp, Artificial Sequence
  MKO10032257_A_Ms4a5
  gRNA
cactaagtaaattcattgcc

SEQ ID NO: 32258 - DNA, 20 bp, Artificial Sequence
  MKO10032258_A_Ms4a5
  gRNA
acaccacactgcataccatc

SEQ ID NO: 32259 - DNA, 20 bp, Artificial Sequence
  MKO10032259_A_Ms4a5
  gRNA
ccttgggtatgggtttacca

SEQ ID NO: 32260 - DNA, 20 bp, Artificial Sequence
  MKO10032260_A_Ms4a6b
  gRNA
gatgctgatcagtactatgt

SEQ ID NO: 32261 - DNA, 20 bp, Artificial Sequence
  MKO10032261_A_Ms4a6b
  gRNA
ctttgccgccaagtctgttc

SEQ ID NO: 32262 - DNA, 20 bp, Artificial Sequence
  MKO10032262_A_Ms4a6b
  gRNA
tgactttgtctccgtgacga

SEQ ID NO: 32263 - DNA, 20 bp, Artificial Sequence
  MKO10032263_A_Ms4a6c
  gRNA
tctgagcagtttattgcctc

SEQ ID NO: 32264 - DNA, 20 bp, Artificial Sequence
  MKO10032264_A_Ms4a6c
  gRNA
aacctttctacaactcagac

SEQ ID NO: 32265 - DNA, 20 bp, Artificial Sequence
  MKO10032265_A_Ms4a6c
  gRNA
tgactttctctccgtaatga

SEQ ID NO: 32266 - DNA, 20 bp, Artificial Sequence
  MKO10032266_A_Ms4a6d
  gRNA
gccattaaacagctgcttcg

SEQ ID NO: 32267 - DNA, 20 bp, Artificial Sequence
  MKO10032267_A_Ms4a6d
  gRNA
tgccttgcagcaatgtaagc

SEQ ID NO: 32268 - DNA, 20 bp, Artificial Sequence
  MKO10032268_A_Ms4a6d
  gRNA
cccgagcagtttgccatctc

SEQ ID NO: 32269 - DNA, 20 bp, Artificial Sequence
  MKO10032269_A_Ms4a7
  gRNA
cactaggcactccaatcagc

SEQ ID NO: 32270 - DNA, 20 bp, Artificial Sequence
  MKO10032270_A_Ms4a7
  gRNA
ggtacttaccccaggtttgt

SEQ ID NO: 32271 - DNA, 20 bp, Artificial Sequence
  MKO10032271_A_Ms4a7
  gRNA
ggcaccatgcgtctacagct

SEQ ID NO: 32272 - DNA, 20 bp, Artificial Sequence
  MKO10032272_A_Ms4a8a
  gRNA
gcaggcggttcggtcatagc

SEQ ID NO: 32273 - DNA, 20 bp, Artificial Sequence
  MKO10032273_A_Ms4a8a
  gRNA
accgcccaacagttatcctg

SEQ ID NO: 32274 - DNA, 20 bp, Artificial Sequence
  MKO10032274_A_Ms4a8a
  gRNA
ccctagctactacccttacc

SEQ ID NO: 32275 - DNA, 20 bp, Artificial Sequence
  MKO10032275_A_Msantd1
  gRNA
agcatcggagggcccgcaac

SEQ ID NO: 32276 - DNA, 20 bp, Artificial Sequence
  MKO10032276_A_Msantd1
  gRNA
agatagcgagtccatcccgc

SEQ ID NO: 32277 - DNA, 20 bp, Artificial Sequence
  MKO10032277_A_Msantd1
  gRNA
gtacaccttggcattgcgct

SEQ ID NO: 32278 - DNA, 20 bp, Artificial Sequence
  MKO10032278_A_Msantd2
  gRNA
cgaacgcgctcatcgctgta

SEQ ID NO: 32279 - DNA, 20 bp, Artificial Sequence
  MKO10032279_A_Msantd2
  gRNA
cttgctgccgaataccgtgc

SEQ ID NO: 32280 - DNA, 20 bp, Artificial Sequence
  MKO10032280_A_Msantd2
  gRNA
tagcagtagatgatccgggt

SEQ ID NO: 32281 - DNA, 20 bp, Artificial Sequence
  MKO10032281_A_Msantd3
  gRNA
ggcccgtctcctcgtttaac

SEQ ID NO: 32282 - DNA, 20 bp, Artificial Sequence
  MKO10032282_A_Msantd3
  gRNA
aatgcaagaagagcgacgcg

SEQ ID NO: 32283 - DNA, 20 bp, Artificial Sequence
  MKO10032283_A_Msantd3
  gRNA
cgcactcgcgctcgatctgc

SEQ ID NO: 32284 - DNA, 20 bp, Artificial Sequence
  MKO10032284_A_Msantd4
  gRNA
tgagcgcgaacgtctacagc

SEQ ID NO: 32285 - DNA, 20 bp, Artificial Sequence
  MKO10032285_A_Msantd4
  gRNA
gaaagagcgcctgcgccacc

SEQ ID NO: 32286 - DNA, 20 bp, Artificial Sequence
  MKO10032286_A_Msantd4
  gRNA
tcatgagtgcgcgccagtcc

SEQ ID NO: 32287 - DNA, 20 bp, Artificial Sequence
  MKO10032287_A_Msc
  gRNA
agccgtaaccgcgctccatg

SEQ ID NO: 32288 - DNA, 20 bp, Artificial Sequence
  MKO10032288_A_Msc
  gRNA
tcttccccgcaccgcctgcg

SEQ ID NO: 32289 - DNA, 20 bp, Artificial Sequence
  MKO10032289_A_Msc
  gRNA
aagacgtttctgcagccaac

SEQ ID NO: 32290 - DNA, 20 bp, Artificial Sequence
  MKO10032290_A_Msgn1
  gRNA
cctcccgggtatggacaacc

SEQ ID NO: 32291 - DNA, 20 bp, Artificial Sequence
  MKO10032291_A_Msgn1
  gRNA
cgatggctacggcagtcacg

SEQ ID NO: 32292 - DNA, 20 bp, Artificial Sequence
  MKO10032292_A_Msgn1
  gRNA
gtaatccagctcgactaagc

SEQ ID NO: 32293 - DNA, 20 bp, Artificial Sequence
  MKO10032293_A_Msh2
  gRNA
tttaatacccataacgccaa

SEQ ID NO: 32294 - DNA, 20 bp, Artificial Sequence
  MKO10032294_A_Msh2
  gRNA
tgatcagttctccaatctcg

SEQ ID NO: 32295 - DNA, 20 bp, Artificial Sequence
  MKO10032295_A_Msh2
  gRNA
tataaacttcaactcgatac

SEQ ID NO: 32296 - DNA, 20 bp, Artificial Sequence
  MKO10032296_A_Msh3
  gRNA
cgtgcatgtccgccgacttg

SEQ ID NO: 32297 - DNA, 20 bp, Artificial Sequence
  MKO10032297_A_Msh3
  gRNA
ggacatgcacgaacagtctg

SEQ ID NO: 32298 - DNA, 20 bp, Artificial Sequence
  MKO10032298_A_Msh3
  gRNA
gtccgaagattccaaatctc

SEQ ID NO: 32299 - DNA, 20 bp, Artificial Sequence
  MKO10032299_A_Msh4
  gRNA
accaccgctacaatgactga

SEQ ID NO: 32300 - DNA, 20 bp, Artificial Sequence
  MKO10032300_A_Msh4
  gRNA
tgccattcctatctcgcctc

SEQ ID NO: 32301 - DNA, 20 bp, Artificial Sequence
  MKO10032301_A_Msh4
  gRNA
tttagaactccgttatctgc

SEQ ID NO: 32302 - DNA, 20 bp, Artificial Sequence
  MKO10032302_A_Msh5
  gRNA
gaggctatgactcgatttct

SEQ ID NO: 32303 - DNA, 20 bp, Artificial Sequence
  MKO10032303_A_Msh5
  gRNA
gagctaccaaaatccacgct

SEQ ID NO: 32304 - DNA, 20 bp, Artificial Sequence
  MKO10032304_A_Msh5
  gRNA
ctctcgtggtctggggcatc

SEQ ID NO: 32305 - DNA, 20 bp, Artificial Sequence
  MKO10032305_A_Msh6
  gRNA
cagcctattagaatgtcgtt

SEQ ID NO: 32306 - DNA, 20 bp, Artificial Sequence
  MKO10032306_A_Msh6
  gRNA
ttacgggtagcgaaattctc

SEQ ID NO: 32307 - DNA, 20 bp, Artificial Sequence
  MKO10032307_A_Msh6
  gRNA
gtctagcaccatccgctgac

SEQ ID NO: 32308 - DNA, 20 bp, Artificial Sequence
  MKO10032308_A_Msi1
  gRNA
gaagggctgcgcgaatactt

SEQ ID NO: 32309 - DNA, 20 bp, Artificial Sequence
  MKO10032309_A_Msi1
  gRNA
tttcggcttcgtcactttca

SEQ ID NO: 32310 - DNA, 20 bp, Artificial Sequence
  MKO10032310_A_Msi1
  gRNA
gcactttatccacccccgcc

SEQ ID NO: 32311 - DNA, 20 bp, Artificial Sequence
  MKO10032311_A_Msi2
  gRNA
atcccacaacgaaacgctcc

SEQ ID NO: 32312 - DNA, 20 bp, Artificial Sequence
  MKO10032312_A_Msi2
  gRNA
aaacttacccggggtcgtgc

SEQ ID NO: 32313 - DNA, 20 bp, Artificial Sequence
  MKO10032313_A_Msi2
  gRNA
ttacctggagcgtttcgttg

SEQ ID NO: 32314 - DNA, 20 bp, Artificial Sequence
  MKO10032314_A_Msl1
  gRNA
ccatacgttcaatccgagca

SEQ ID NO: 32315 - DNA, 20 bp, Artificial Sequence
  MKO10032315_A_Msl1
  gRNA
gaggattcccgtaatggtaa

SEQ ID NO: 32316 - DNA, 20 bp, Artificial Sequence
  MKO10032316_A_Msl1
  gRNA
accactcagtagagcctcta

SEQ ID NO: 32317 - DNA, 20 bp, Artificial Sequence
  MKO10032317_A_Msl2
  gRNA
gcgatcgagttcgtccgaca

SEQ ID NO: 32318 - DNA, 20 bp, Artificial Sequence
  MKO10032318_A_Msl2
  gRNA
actccatcgcagcgacgtcg

SEQ ID NO: 32319 - DNA, 20 bp, Artificial Sequence
  MKO10032319_A_Msl2
  gRNA
tatcccgtgccagtgtcgtc

SEQ ID NO: 32320 - DNA, 20 bp, Artificial Sequence
  MKO10032320_A_Msl3l2
  gRNA
gtgctacgtgcgccacttct

SEQ ID NO: 32321 - DNA, 20 bp, Artificial Sequence
  MKO10032321_A_Msl3l2
  gRNA
atgctgcgcgccataaatgt

SEQ ID NO: 32322 - DNA, 20 bp, Artificial Sequence
  MKO10032322_A_Msl3l2
  gRNA
cgcacctaaggatgacggtg

SEQ ID NO: 32323 - DNA, 20 bp, Artificial Sequence
  MKO10032323_A_Msl3
  gRNA
ttactttaatacgacgctga

SEQ ID NO: 32324 - DNA, 20 bp, Artificial Sequence
  MKO10032324_A_Msl3
  gRNA
tcagcgtcgtattaaagtaa

SEQ ID NO: 32325 - DNA, 20 bp, Artificial Sequence
  MKO10032325_A_Msl3
  gRNA
attgtcgctgcgttcaagaa

SEQ ID NO: 32326 - DNA, 20 bp, Artificial Sequence
  MKO10032326_A_Mslnl
  gRNA
tgcgctgcagggcaactctc

SEQ ID NO: 32327 - DNA, 20 bp, Artificial Sequence
  MKO10032327_A_Mslnl
  gRNA
tagcctgaggacccgagcag

SEQ ID NO: 32328 - DNA, 20 bp, Artificial Sequence
  MKO10032328_A_Mslnl
  gRNA
ctcactcgtagaaaagtaga

SEQ ID NO: 32329 - DNA, 20 bp, Artificial Sequence
  MKO10032329_A_Msln
  gRNA
tcctaggcacctcaccgacg

SEQ ID NO: 32330 - DNA, 20 bp, Artificial Sequence
  MKO10032330_A_Msln
  gRNA
ctcccggcagctgcgttgtc

SEQ ID NO: 32331 - DNA, 20 bp, Artificial Sequence
  MKO10032331_A_Msln
  gRNA
gacagaagaacattacactc

SEQ ID NO: 32332 - DNA, 20 bp, Artificial Sequence
  MKO10032332_A_Msmb
  gRNA
cgagacttacttggtacagc

SEQ ID NO: 32333 - DNA, 20 bp, Artificial Sequence
  MKO10032333_A_Msmb
  gRNA
agacctgtcgagttgacagc

SEQ ID NO: 32334 - DNA, 20 bp, Artificial Sequence
  MKO10032334_A_Msmb
  gRNA
agtccagctgtcaactcgac

SEQ ID NO: 32335 - DNA, 20 bp, Artificial Sequence
  MKO10032335_A_Msmp
  gRNA
tcggctaacacccctgctcc

SEQ ID NO: 32336 - DNA, 20 bp, Artificial Sequence
  MKO10032336_A_Msmp
  gRNA
tgaagtatttaccctcgtag

SEQ ID NO: 32337 - DNA, 20 bp, Artificial Sequence
  MKO10032337_A_Msmp
  gRNA
agccgagccccattctaagt

SEQ ID NO: 32338 - DNA, 20 bp, Artificial Sequence
  MKO10032338_A_Msn
  gRNA
tatgccgtccagtctaagta

SEQ ID NO: 32339 - DNA, 20 bp, Artificial Sequence
  MKO10032339_A_Msn
  gRNA
tgaagtcaccatacttagac

SEQ ID NO: 32340 - DNA, 20 bp, Artificial Sequence
  MKO10032340_A_Msn
  gRNA
aggagcaccggggcatgctc

SEQ ID NO: 32341 - DNA, 20 bp, Artificial Sequence
  MKO10032341_A_Msr1
  gRNA
gcgttccgtgtctataaggt

SEQ ID NO: 32342 - DNA, 20 bp, Artificial Sequence
  MKO10032342_A_Msr1
  gRNA
tgaacgtgcgtcaaatttca

SEQ ID NO: 32343 - DNA, 20 bp, Artificial Sequence
  MKO10032343_A_Msr1
  gRNA
ttccttgatttcgtcagtcc

SEQ ID NO: 32344 - DNA, 20 bp, Artificial Sequence
  MKO10032344_A_Msra
  gRNA
gagaatcacgacccgaccca

SEQ ID NO: 32345 - DNA, 20 bp, Artificial Sequence
  MKO10032345_A_Msra
  gRNA
gtacacaacccggacgactt

SEQ ID NO: 32346 - DNA, 20 bp, Artificial Sequence
  MKO10032346_A_Msra
  gRNA
tcccacatccgccgtgcaga

SEQ ID NO: 32347 - DNA, 20 bp, Artificial Sequence
  MKO10032347_A_Msrb1
  gRNA
gaatcttgattgtccccgct

SEQ ID NO: 32348 - DNA, 20 bp, Artificial Sequence
  MKO10032348_A_Msrb1
  gRNA
gtgtgcgtacttcgagtgac

SEQ ID NO: 32349 - DNA, 20 bp, Artificial Sequence
  MKO10032349_A_Msrb1
  gRNA
ttccagaatcacttcgagcc

SEQ ID NO: 32350 - DNA, 20 bp, Artificial Sequence
  MKO10032350_A_Msrb2
  gRNA
tgcttcgcttagagagcgct

SEQ ID NO: 32351 - DNA, 20 bp, Artificial Sequence
  MKO10032351_A_Msrb2
  gRNA
aggaagtgtccagtcgtctc

SEQ ID NO: 32352 - DNA, 20 bp, Artificial Sequence
  MKO10032352_A_Msrb2
  gRNA
ccagtgggcttgggtccatc

SEQ ID NO: 32353 - DNA, 20 bp, Artificial Sequence
  MKO10032353_A_Msrb3
  gRNA
cctccgaactgatcacatca

SEQ ID NO: 32354 - DNA, 20 bp, Artificial Sequence
  MKO10032354_A_Msrb3
  gRNA
ttccaccctgtgcatcccgt

SEQ ID NO: 32355 - DNA, 20 bp, Artificial Sequence
  MKO10032355_A_Msrb3
  gRNA
acctgaaccagagtcaaatt

SEQ ID NO: 32356 - DNA, 20 bp, Artificial Sequence
  MKO10032356_A_Mss51
  gRNA
ttgtcgagagctccgtcttg

SEQ ID NO: 32357 - DNA, 20 bp, Artificial Sequence
  MKO10032357_A_Mss51
  gRNA
ctgtagatcgtgtcatggaa

SEQ ID NO: 32358 - DNA, 20 bp, Artificial Sequence
  MKO10032358_A_Mss51
  gRNA
cgaaatccaaagcttgatac

SEQ ID NO: 32359 - DNA, 20 bp, Artificial Sequence
  MKO10032359_A_Mst1r
  gRNA
caaagagtaggtcattcccg

SEQ ID NO: 32360 - DNA, 20 bp, Artificial Sequence
  MKO10032360_A_Mst1r
  gRNA
ccacacgggtgaagctagcg

SEQ ID NO: 32361 - DNA, 20 bp, Artificial Sequence
  MKO10032361_A_Mst1r
  gRNA
ccctcaggtacgacatcatc

SEQ ID NO: 32362 - DNA, 20 bp, Artificial Sequence
  MKO10032362_A_Mst1
  gRNA
tatacgcccacgccaaagaa

SEQ ID NO: 32363 - DNA, 20 bp, Artificial Sequence
  MKO10032363_A_Mst1
  gRNA
gaccccattgtccataatgc

SEQ ID NO: 32364 - DNA, 20 bp, Artificial Sequence
  MKO10032364_A_Mst1
  gRNA
ccggcaccgctgtgtgtaac

SEQ ID NO: 32365 - DNA, 20 bp, Artificial Sequence
  MKO10032365_A_Mstn
  gRNA
tgacgattatcacgctacca

SEQ ID NO: 32366 - DNA, 20 bp, Artificial Sequence
  MKO10032366_A_Mstn
  gRNA
tcgatcagtacgacgtccag

SEQ ID NO: 32367 - DNA, 20 bp, Artificial Sequence
  MKO10032367_A_Mstn
  gRNA
cttcaaaatcgaccgtgagg

SEQ ID NO: 32368 - DNA, 20 bp, Artificial Sequence
  MKO10032368_A_Msto1
  gRNA
gtcgaggcgtataggtttcc

SEQ ID NO: 32369 - DNA, 20 bp, Artificial Sequence
  MKO10032369_A_Msto1
  gRNA
cccgacgtcttgtacagaac

SEQ ID NO: 32370 - DNA, 20 bp, Artificial Sequence
  MKO10032370_A_Msto1
  gRNA
ctacagagaccgacagctag

SEQ ID NO: 32371 - DNA, 20 bp, Artificial Sequence
  MKO10032371_A_Msx1
  gRNA
ccgcgcgctcggcaatagac

SEQ ID NO: 32372 - DNA, 20 bp, Artificial Sequence
  MKO10032372_A_Msx1
  gRNA
aggccctcatggccgatcac

SEQ ID NO: 32373 - DNA, 20 bp, Artificial Sequence
  MKO10032373_A_Msx1
  gRNA
gttccagaaccgtcgcgcta

SEQ ID NO: 32374 - DNA, 20 bp, Artificial Sequence
  MKO10032374_A_Msx2
  gRNA
gcgtcccggacgccgtgtcc

SEQ ID NO: 32375 - DNA, 20 bp, Artificial Sequence
  MKO10032375_A_Msx2
  gRNA
caagcccttcgagaccgcct

SEQ ID NO: 32376 - DNA, 20 bp, Artificial Sequence
  MKO10032376_A_Msx2
  gRNA
tatgccacgccggttggata

SEQ ID NO: 32377 - DNA, 20 bp, Artificial Sequence
  MKO10032377_A_Msx3
  gRNA
ttcggcggcaacgcggttcc

SEQ ID NO: 32378 - DNA, 20 bp, Artificial Sequence
  MKO10032378_A_Msx3
  gRNA
tggcgtccgtggtttgcgat

SEQ ID NO: 32379 - DNA, 20 bp, Artificial Sequence
  MKO10032379_A_Msx3
  gRNA
ggcgacattcgacatgaacg

SEQ ID NO: 32380 - DNA, 20 bp, Artificial Sequence
  MKO10032380_A_Mt1
  gRNA
gggagtcttaccggtggagc

SEQ ID NO: 32381 - DNA, 20 bp, Artificial Sequence
  MKO10032381_A_Mt1
  gRNA
acagcacgtgcacttgtccg

SEQ ID NO: 32382 - DNA, 20 bp, Artificial Sequence
  MKO10032382_A_Mt1
  gRNA
gcacatttggagcagcccac

SEQ ID NO: 32383 - DNA, 20 bp, Artificial Sequence
  MKO10032383_A_Mt2
  gRNA
gtcccccttaccggaggcac

SEQ ID NO: 32384 - DNA, 20 bp, Artificial Sequence
  MKO10032384_A_Mt2
  gRNA
gatggatcctgctcctgcgc

SEQ ID NO: 32385 - DNA, 20 bp, Artificial Sequence
  MKO10032385_A_Mt2
  gRNA
ggcacagcagctgcacttgt

SEQ ID NO: 32386 - DNA, 20 bp, Artificial Sequence
  MKO10032386_A_Mt3
  gRNA
cacacttctcacatccggca

SEQ ID NO: 32387 - DNA, 20 bp, Artificial Sequence
  MKO10032387_A_Mt3
  gRNA
gcacttgcatttgtccgagc

SEQ ID NO: 32388 - DNA, 20 bp, Artificial Sequence
  MKO10032388_A_Mt3
  gRNA
gagacctgcccctgtcctac

SEQ ID NO: 32389 - DNA, 20 bp, Artificial Sequence
  MKO10032389_A_Mt4
  gRNA
gacatacacgtgcattcccc

SEQ ID NO: 32390 - DNA, 20 bp, Artificial Sequence
  MKO10032390_A_Mt4
  gRNA
acacctggaccatggaccct

SEQ ID NO: 32391 - DNA, 20 bp, Artificial Sequence
  MKO10032391_A_Mt4
  gRNA
gcccggggctgcatctgcaa

SEQ ID NO: 32392 - DNA, 20 bp, Artificial Sequence
  MKO10032392_A_Mta1
  gRNA
gcttgtccgccagcgcgatg

SEQ ID NO: 32393 - DNA, 20 bp, Artificial Sequence
  MKO10032393_A_Mta1
  gRNA
gcaacccgtacctgatccgc

SEQ ID NO: 32394 - DNA, 20 bp, Artificial Sequence
  MKO10032394_A_Mta1
  gRNA
gtgactccgtctcattgagc

SEQ ID NO: 32395 - DNA, 20 bp, Artificial Sequence
  MKO10032395_A_Mta2
  gRNA
gctcctcaatccgtctaacc

SEQ ID NO: 32396 - DNA, 20 bp, Artificial Sequence
  MKO10032396_A_Mta2
  gRNA
tactagaaatatcccttcgc

SEQ ID NO: 32397 - DNA, 20 bp, Artificial Sequence
  MKO10032397_A_Mta2
  gRNA
cgtcctataccttatgtggg

SEQ ID NO: 32398 - DNA, 20 bp, Artificial Sequence
  MKO10032398_A_Mta3
  gRNA
ggagtcggagacgccagttg

SEQ ID NO: 32399 - DNA, 20 bp, Artificial Sequence
  MKO10032399_A_Mta3
  gRNA
gctcctctatccgtctgatg

SEQ ID NO: 32400 - DNA, 20 bp, Artificial Sequence
  MKO10032400_A_Mta3
  gRNA
cactgcctgcgacacatatc

SEQ ID NO: 32401 - DNA, 20 bp, Artificial Sequence
  MKO10032401_A_Mtap7d3
  gRNA
ctgcagatgcttgtcgtcgc

SEQ ID NO: 32402 - DNA, 20 bp, Artificial Sequence
  MKO10032402_A_Mtap7d3
  gRNA
cgtggtattaattcttctgc

SEQ ID NO: 32403 - DNA, 20 bp, Artificial Sequence
  MKO10032403_A_Mtap7d3
  gRNA
gtattgatcaacgacagaaa

SEQ ID NO: 32404 - DNA, 20 bp, Artificial Sequence
  MKO10032404_A_Mtap
  gRNA
cggacactaaccttgccgaa

SEQ ID NO: 32405 - DNA, 20 bp, Artificial Sequence
  MKO10032405_A_Mtap
  gRNA
gccatccgatgccttaattt

SEQ ID NO: 32406 - DNA, 20 bp, Artificial Sequence
  MKO10032406_A_Mtap
  gRNA
tctcaaggacccgcaagctg

SEQ ID NO: 32407 - DNA, 20 bp, Artificial Sequence
  MKO10032407_A_Mtbp
  gRNA
ggaagggaagtttcgatccg

SEQ ID NO: 32408 - DNA, 20 bp, Artificial Sequence
  MKO10032408_A_Mtbp
  gRNA
gatggatcggtacttgctgc

SEQ ID NO: 32409 - DNA, 20 bp, Artificial Sequence
  MKO10032409_A_Mtbp
  gRNA
tttgcggtgcaagcaatatg

SEQ ID NO: 32410 - DNA, 20 bp, Artificial Sequence
  MKO10032410_A_Mtch1
  gRNA
gcagtgtgtatcgcgaatgc

SEQ ID NO: 32411 - DNA, 20 bp, Artificial Sequence
  MKO10032411_A_Mtch1
  gRNA
tggacaaggcgttggacata

SEQ ID NO: 32412 - DNA, 20 bp, Artificial Sequence
  MKO10032412_A_Mtch1
  gRNA
atccacctgcacaatgtact

SEQ ID NO: 32413 - DNA, 20 bp, Artificial Sequence
  MKO10032413_A_Mtch2
  gRNA
ctttgaccgagttatcaaag

SEQ ID NO: 32414 - DNA, 20 bp, Artificial Sequence
  MKO10032414_A_Mtch2
  gRNA
ggcacctaccatagcaaaag

SEQ ID NO: 32415 - DNA, 20 bp, Artificial Sequence
  MKO10032415_A_Mtch2
  gRNA
aaaatatttcgtcctattgt

SEQ ID NO: 32416 - DNA, 20 bp, Artificial Sequence
  MKO10032416_A_Mtcp1
  gRNA
cacaacacttacgaagttct

SEQ ID NO: 32417 - DNA, 20 bp, Artificial Sequence
  MKO10032417_A_Mtcp1
  gRNA
ttatccatgtagcgctcctc

SEQ ID NO: 32418 - DNA, 20 bp, Artificial Sequence
  MKO10032418_A_Mtcp1
  gRNA
ggcttagttgcgtcacctaa

SEQ ID NO: 32419 - DNA, 20 bp, Artificial Sequence
  MKO10032419_A_Mtdh
  gRNA
acttcaacagtccgtccatt

SEQ ID NO: 32420 - DNA, 20 bp, Artificial Sequence
  MKO10032420_A_Mtdh
  gRNA
tcattggattcaactatccc

SEQ ID NO: 32421 - DNA, 20 bp, Artificial Sequence
  MKO10032421_A_Mtdh
  gRNA
caaaacagttcacgccatga

SEQ ID NO: 32422 - DNA, 20 bp, Artificial Sequence
  MKO10032422_A_Mterf1a
  gRNA
ctgtcgcattccgcactaaa

SEQ ID NO: 32423 - DNA, 20 bp, Artificial Sequence
  MKO10032423_A_Mterf1a
  gRNA
gctttctcttggatgcagcg

SEQ ID NO: 32424 - DNA, 20 bp, Artificial Sequence
  MKO10032424_A_Mterf1a
  gRNA
tagtgcggaatgcgacagta

SEQ ID NO: 32425 - DNA, 20 bp, Artificial Sequence
  MKO10032425_A_Mterf1b
  gRNA
tagtgtggaatgcgacagta

SEQ ID NO: 32426 - DNA, 20 bp, Artificial Sequence
  MKO10032426_A_Mterf1b
  gRNA
gctttctcttgggtgcagtg

SEQ ID NO: 32427 - DNA, 20 bp, Artificial Sequence
  MKO10032427_A_Mterf1b
  gRNA
tcctgaatgaaatcgacttg

SEQ ID NO: 32428 - DNA, 20 bp, Artificial Sequence
  MKO10032428_A_Mterfd1
  gRNA
cgccttccaaggctactaac

SEQ ID NO: 32429 - DNA, 20 bp, Artificial Sequence
  MKO10032429_A_Mterfd1
  gRNA
agacttcctgttagtagcct

SEQ ID NO: 32430 - DNA, 20 bp, Artificial Sequence
  MKO10032430_A_Mterfd1
  gRNA
tcaaactttacctggtctta

SEQ ID NO: 32431 - DNA, 20 bp, Artificial Sequence
  MKO10032431_A_Mterfd2
  gRNA
accgagttgtgaaggtcctc

SEQ ID NO: 32432 - DNA, 20 bp, Artificial Sequence
  MKO10032432_A_Mterfd2
  gRNA
gtcaatgtcccgctgatgca

SEQ ID NO: 32433 - DNA, 20 bp, Artificial Sequence
  MKO10032433_A_Mterfd2
  gRNA
aacttgaaactcctcgacag

SEQ ID NO: 32434 - DNA, 20 bp, Artificial Sequence
  MKO10032434_A_Mterfd3
  gRNA
ggactgcagataatcgcttc

SEQ ID NO: 32435 - DNA, 20 bp, Artificial Sequence
  MKO10032435_A_Mterfd3
  gRNA
atttcacaactaactgtcgt

SEQ ID NO: 32436 - DNA, 20 bp, Artificial Sequence
  MKO10032436_A_Mterfd3
  gRNA
atttgcaatctcttcaacgt

SEQ ID NO: 32437 - DNA, 20 bp, Artificial Sequence
  MKO10032437_A_Mtf1
  gRNA
gcggtaccagtgcacctttg

SEQ ID NO: 32438 - DNA, 20 bp, Artificial Sequence
  MKO10032438_A_Mtf1
  gRNA
accaccttaaaactcacgtc

SEQ ID NO: 32439 - DNA, 20 bp, Artificial Sequence
  MKO10032439_A_Mtf1
  gRNA
gtacaccttcgtctgtaatc

SEQ ID NO: 32440 - DNA, 20 bp, Artificial Sequence
  MKO10032440_A_Mtf2
  gRNA
atcacactcgagtcaatatg

SEQ ID NO: 32441 - DNA, 20 bp, Artificial Sequence
  MKO10032441_A_Mtf2
  gRNA
cttgaacaagctgtctttac

SEQ ID NO: 32442 - DNA, 20 bp, Artificial Sequence
  MKO10032442_A_Mtf2
  gRNA
gtaattcactggtccacaag

SEQ ID NO: 32443 - DNA, 20 bp, Artificial Sequence
  MKO10032443_A_Mtfmt
  gRNA
ccagccgagggagtgacata

SEQ ID NO: 32444 - DNA, 20 bp, Artificial Sequence
  MKO10032444_A_Mtfmt
  gRNA
atattctccagatcccacgt

SEQ ID NO: 32445 - DNA, 20 bp, Artificial Sequence
  MKO10032445_A_Mtfmt
  gRNA
tgtctccatgaagcaccgtg

SEQ ID NO: 32446 - DNA, 20 bp, Artificial Sequence
  MKO10032446_A_Mtfp1
  gRNA
gcgccgagcgcgacctctac

SEQ ID NO: 32447 - DNA, 20 bp, Artificial Sequence
  MKO10032447_A_Mtfp1
  gRNA
ggcccccgactgtccgcaaa

SEQ ID NO: 32448 - DNA, 20 bp, Artificial Sequence
  MKO10032448_A_Mtfp1
  gRNA
aaggcccctacctgtcgatg

SEQ ID NO: 32449 - DNA, 20 bp, Artificial Sequence
  MKO10032449_A_Mtfr1l
  gRNA
acatggggctgctcgaagtg

SEQ ID NO: 32450 - DNA, 20 bp, Artificial Sequence
  MKO10032450_A_Mtfr1l
  gRNA
ctcacctcaaaggatgcccg

SEQ ID NO: 32451 - DNA, 20 bp, Artificial Sequence
  MKO10032451_A_Mtfr1l
  gRNA
ttacgttgcatgacaatcag

SEQ ID NO: 32452 - DNA, 20 bp, Artificial Sequence
  MKO10032452_A_Mtfr1
  gRNA
gttcatctcgaagtatcgta

SEQ ID NO: 32453 - DNA, 20 bp, Artificial Sequence
  MKO10032453_A_Mtfr1
  gRNA
gatcaagagcagacgtactt

SEQ ID NO: 32454 - DNA, 20 bp, Artificial Sequence
  MKO10032454_A_Mtfr1
  gRNA
tggagtaccaacggaagggg

SEQ ID NO: 32455 - DNA, 20 bp, Artificial Sequence
  MKO10032455_A_Mtfr2
  gRNA
cggagtattgttcgtattat

SEQ ID NO: 32456 - DNA, 20 bp, Artificial Sequence
  MKO10032456_A_Mtfr2
  gRNA
ttcaagaaaacgctgttcgt

SEQ ID NO: 32457 - DNA, 20 bp, Artificial Sequence
  MKO10032457_A_Mtfr2
  gRNA
gactccgtagagttcacatg

SEQ ID NO: 32458 - DNA, 20 bp, Artificial Sequence
  MKO10032458_A_Mtg1
  gRNA
ctaccgctaccatcgagccg

SEQ ID NO: 32459 - DNA, 20 bp, Artificial Sequence
  MKO10032459_A_Mtg1
  gRNA
ttatcgaggttcatgacgcc

SEQ ID NO: 32460 - DNA, 20 bp, Artificial Sequence
  MKO10032460_A_Mtg1
  gRNA
cccaaccaacctcggctcga

SEQ ID NO: 32461 - DNA, 20 bp, Artificial Sequence
  MKO10032461_A_Mtg2
  gRNA
tagtgaacgatccccacgtg

SEQ ID NO: 32462 - DNA, 20 bp, Artificial Sequence
  MKO10032462_A_Mtg2
  gRNA
tacaggggcacggttgtcgt

SEQ ID NO: 32463 - DNA, 20 bp, Artificial Sequence
  MKO10032463_A_Mtg2
  gRNA
taacctgggagacgagtacg

SEQ ID NO: 32464 - DNA, 20 bp, Artificial Sequence
  MKO10032464_A_Mthfd1l
  gRNA
agacgtcattcacaattcca

SEQ ID NO: 32465 - DNA, 20 bp, Artificial Sequence
  MKO10032465_A_Mthfd1l
  gRNA
acctgaataaccacaagcac

SEQ ID NO: 32466 - DNA, 20 bp, Artificial Sequence
  MKO10032466_A_Mthfd1l
  gRNA
tggggtcttcattaatcttc

SEQ ID NO: 32467 - DNA, 20 bp, Artificial Sequence
  MKO10032467_A_Mthfd1
  gRNA
gctcctgcatccgagttacc

SEQ ID NO: 32468 - DNA, 20 bp, Artificial Sequence
  MKO10032468_A_Mthfd1
  gRNA
caatgccattgcacccgaga

SEQ ID NO: 32469 - DNA, 20 bp, Artificial Sequence
  MKO10032469_A_Mthfd1
  gRNA
cagggatcgactgaagaacc

SEQ ID NO: 32470 - DNA, 20 bp, Artificial Sequence
  MKO10032470_A_Mthfd2l
  gRNA
actaatataccgctgactct

SEQ ID NO: 32471 - DNA, 20 bp, Artificial Sequence
  MKO10032471_A_Mthfd2l
  gRNA
ggcgggaagatccaagaacg

SEQ ID NO: 32472 - DNA, 20 bp, Artificial Sequence
  MKO10032472_A_Mthfd2l
  gRNA
cacgaagccgttatcatctc

SEQ ID NO: 32473 - DNA, 20 bp, Artificial Sequence
  MKO10032473_A_Mthfd2
  gRNA
attatctcccacacgcccca

SEQ ID NO: 32474 - DNA, 20 bp, Artificial Sequence
  MKO10032474_A_Mthfd2
  gRNA
aacaacgatgagaacgtaga

SEQ ID NO: 32475 - DNA, 20 bp, Artificial Sequence
  MKO10032475_A_Mthfd2
  gRNA
tgggagataattaagcgaac

SEQ ID NO: 32476 - DNA, 20 bp, Artificial Sequence
  MKO10032476_A_Mthfr
  gRNA
cccctacaggtttgaccgga

SEQ ID NO: 32477 - DNA, 20 bp, Artificial Sequence
  MKO10032477_A_Mthfr
  gRNA
ccccgatgcagagagcttcg

SEQ ID NO: 32478 - DNA, 20 bp, Artificial Sequence
  MKO10032478_A_Mthfr
  gRNA
gccaggtaacatctacgaag

SEQ ID NO: 32479 - DNA, 20 bp, Artificial Sequence
  MKO10032479_A_Mthfsd
  gRNA
aacagccctgttcgcagtcg

SEQ ID NO: 32480 - DNA, 20 bp, Artificial Sequence
  MKO10032480_A_Mthfsd
  gRNA
ccaacaccacgactgcgaac

SEQ ID NO: 32481 - DNA, 20 bp, Artificial Sequence
  MKO10032481_A_Mthfsd
  gRNA
tcagagaaacgcccgcttcc

SEQ ID NO: 32482 - DNA, 20 bp, Artificial Sequence
  MKO10032482_A_Mthfs
  gRNA
atcttgcatgcttagaaaga

SEQ ID NO: 32483 - DNA, 20 bp, Artificial Sequence
  MKO10032483_A_Mthfs
  gRNA
cttctcgcaccttctgcgtg

SEQ ID NO: 32484 - DNA, 20 bp, Artificial Sequence
  MKO10032484_A_Mthfs
  gRNA
cgtggtgtaacttaggatgc

SEQ ID NO: 32485 - DNA, 20 bp, Artificial Sequence
  MKO10032485_A_Mtif2
  gRNA
ttctaatgaatctacgtcaa

SEQ ID NO: 32486 - DNA, 20 bp, Artificial Sequence
  MKO10032486_A_Mtif2
  gRNA
agaaactcaagttgcagcga

SEQ ID NO: 32487 - DNA, 20 bp, Artificial Sequence
  MKO10032487_A_Mtif2
  gRNA
ggtcaccgacattgttgtgt

SEQ ID NO: 32488 - DNA, 20 bp, Artificial Sequence
  MKO10032488_A_Mtif3
  gRNA
tgagcggattatccgcgtcc

SEQ ID NO: 32489 - DNA, 20 bp, Artificial Sequence
  MKO10032489_A_Mtif3
  gRNA
acgagctctttcgtcatagt

SEQ ID NO: 32490 - DNA, 20 bp, Artificial Sequence
  MKO10032490_A_Mtif3
  gRNA
cccggagctttagccgctcc

SEQ ID NO: 32491 - DNA, 20 bp, Artificial Sequence
  MKO10032491_A_Mtl5
  gRNA
cgataacacgtgcacgctgt

SEQ ID NO: 32492 - DNA, 20 bp, Artificial Sequence
  MKO10032492_A_Mtl5
  gRNA
gcgctgttgccgctaagcgc

SEQ ID NO: 32493 - DNA, 20 bp, Artificial Sequence
  MKO10032493_A_Mtl5
  gRNA
gtgatgagatttaacttcgc

SEQ ID NO: 32494 - DNA, 20 bp, Artificial Sequence
  MKO10032494_A_Mtm1
  gRNA
ccagtaattagtaactcccc

SEQ ID NO: 32495 - DNA, 20 bp, Artificial Sequence
  MKO10032495_A_Mtm1
  gRNA
acaagtaatatctagaccat

SEQ ID NO: 32496 - DNA, 20 bp, Artificial Sequence
  MKO10032496_A_Mtm1
  gRNA
taagtataattcacactcct

SEQ ID NO: 32497 - DNA, 20 bp, Artificial Sequence
  MKO10032497_A_Mtmr10
  gRNA
gtaaagatttccgaattgtc

SEQ ID NO: 32498 - DNA, 20 bp, Artificial Sequence
  MKO10032498_A_Mtmr10
  gRNA
caaagcgaaacctgacaatt

SEQ ID NO: 32499 - DNA, 20 bp, Artificial Sequence
  MKO10032499_A_Mtmr10
  gRNA
cgaaccgaagattaaaaagc

SEQ ID NO: 32500 - DNA, 20 bp, Artificial Sequence
  MKO10032500_A_Mtmr11
  gRNA
taatcgaccaatgttgatca

SEQ ID NO: 32501 - DNA, 20 bp, Artificial Sequence
  MKO10032501_A_Mtmr11
  gRNA
gacttccggctgcttcgagt

SEQ ID NO: 32502 - DNA, 20 bp, Artificial Sequence
  MKO10032502_A_Mtmr11
  gRNA
tctggaccgaagtctaaccc

SEQ ID NO: 32503 - DNA, 20 bp, Artificial Sequence
  MKO10032503_A_Mtmr12
  gRNA
tcgtgtcagcgcggcgtcta

SEQ ID NO: 32504 - DNA, 20 bp, Artificial Sequence
  MKO10032504_A_Mtmr12
  gRNA
gcacccgcaggtctttgcaa

SEQ ID NO: 32505 - DNA, 20 bp, Artificial Sequence
  MKO10032505_A_Mtmr12
  gRNA
cacataccccgccattatcc

SEQ ID NO: 32506 - DNA, 20 bp, Artificial Sequence
  MKO10032506_A_Mtmr14
  gRNA
cccccgccacatcgtattcc

SEQ ID NO: 32507 - DNA, 20 bp, Artificial Sequence
  MKO10032507_A_Mtmr14
  gRNA
tcggccacactggctggatg

SEQ ID NO: 32508 - DNA, 20 bp, Artificial Sequence
  MKO10032508_A_Mtmr14
  gRNA
atacgatgtggcgggggtag

SEQ ID NO: 32509 - DNA, 20 bp, Artificial Sequence
  MKO10032509_A_Mtmr1
  gRNA
ccactcactgctcccataaa

SEQ ID NO: 32510 - DNA, 20 bp, Artificial Sequence
  MKO10032510_A_Mtmr1
  gRNA
actctgctgatcactccaag

SEQ ID NO: 32511 - DNA, 20 bp, Artificial Sequence
  MKO10032511_A_Mtmr1
  gRNA
agccatggggataattcttg

SEQ ID NO: 32512 - DNA, 20 bp, Artificial Sequence
  MKO10032512_A_Mtmr2
  gRNA
cgctgactgtcacaagttac

SEQ ID NO: 32513 - DNA, 20 bp, Artificial Sequence
  MKO10032513_A_Mtmr2
  gRNA
agccgaggtgaaaactccta

SEQ ID NO: 32514 - DNA, 20 bp, Artificial Sequence
  MKO10032514_A_Mtmr2
  gRNA
ccccatgcaggtcctgaggg

SEQ ID NO: 32515 - DNA, 20 bp, Artificial Sequence
  MKO10032515_A_Mtmr3
  gRNA
ctcccgaatcagctgcttcc

SEQ ID NO: 32516 - DNA, 20 bp, Artificial Sequence
  MKO10032516_A_Mtmr3
  gRNA
aacaatgcaatccgaccacc

SEQ ID NO: 32517 - DNA, 20 bp, Artificial Sequence
  MKO10032517_A_Mtmr3
  gRNA
agagtatgtgggccgtgctg

SEQ ID NO: 32518 - DNA, 20 bp, Artificial Sequence
  MKO10032518_A_Mtmr4
  gRNA
agcgagacctgccaagcccg

SEQ ID NO: 32519 - DNA, 20 bp, Artificial Sequence
  MKO10032519_A_Mtmr4
  gRNA
ttgcctttgcctaccatgcg

SEQ ID NO: 32520 - DNA, 20 bp, Artificial Sequence
  MKO10032520_A_Mtmr4
  gRNA
caaggatctgttccccccca

SEQ ID NO: 32521 - DNA, 20 bp, Artificial Sequence
  MKO10032521_A_Mtmr6
  gRNA
agctagccggccggtgatcg

SEQ ID NO: 32522 - DNA, 20 bp, Artificial Sequence
  MKO10032522_A_Mtmr6
  gRNA
ccgaggaacatacagctctc

SEQ ID NO: 32523 - DNA, 20 bp, Artificial Sequence
  MKO10032523_A_Mtmr6
  gRNA
aaacttgctctgaccacttc

SEQ ID NO: 32524 - DNA, 20 bp, Artificial Sequence
  MKO10032524_A_Mtmr7
  gRNA
gaatgacaagttgtacgatc

SEQ ID NO: 32525 - DNA, 20 bp, Artificial Sequence
  MKO10032525_A_Mtmr7
  gRNA
gtacgtccccagatcggcca

SEQ ID NO: 32526 - DNA, 20 bp, Artificial Sequence
  MKO10032526_A_Mtmr7
  gRNA
ttccacgaatatgacgtgag

SEQ ID NO: 32527 - DNA, 20 bp, Artificial Sequence
  MKO10032527_A_Mtmr9
  gRNA
ccgaagtgcttcgtcatcga

SEQ ID NO: 32528 - DNA, 20 bp, Artificial Sequence
  MKO10032528_A_Mtmr9
  gRNA
ctgggaagcgccccccatgt

SEQ ID NO: 32529 - DNA, 20 bp, Artificial Sequence
  MKO10032529_A_Mtmr9
  gRNA
cagcccctgaccggcacaaa

SEQ ID NO: 32530 - DNA, 20 bp, Artificial Sequence
  MKO10032530_A_Mtnr1a
  gRNA
cggctcgatattcaacatca

SEQ ID NO: 32531 - DNA, 20 bp, Artificial Sequence
  MKO10032531_A_Mtnr1a
  gRNA
actggagtgttccggtttgc

SEQ ID NO: 32532 - DNA, 20 bp, Artificial Sequence
  MKO10032532_A_Mtnr1a
  gRNA
gcccagaatgtccaccacga

SEQ ID NO: 32533 - DNA, 20 bp, Artificial Sequence
  MKO10032533_A_Mtnr1b
  gRNA
aaccgcaagctgcggaacgc

SEQ ID NO: 32534 - DNA, 20 bp, Artificial Sequence
  MKO10032534_A_Mtnr1b
  gRNA
gcagcgcctagtgttccata

SEQ ID NO: 32535 - DNA, 20 bp, Artificial Sequence
  MKO10032535_A_Mtnr1b
  gRNA
cacctgcgttccgcagcttg

SEQ ID NO: 32536 - DNA, 20 bp, Artificial Sequence
  MKO10032536_A_Mto1
  gRNA
taatggactctttagcgagt

SEQ ID NO: 32537 - DNA, 20 bp, Artificial Sequence
  MKO10032537_A_Mto1
  gRNA
tcacctgaatagccacgttc

SEQ ID NO: 32538 - DNA, 20 bp, Artificial Sequence
  MKO10032538_A_Mto1
  gRNA
tgatcccccaaacgtcctgc

SEQ ID NO: 32539 - DNA, 20 bp, Artificial Sequence
  MKO10032539_A_Mtor
  gRNA
tgatacgaactagctcgttg

SEQ ID NO: 32540 - DNA, 20 bp, Artificial Sequence
  MKO10032540_A_Mtor
  gRNA
gtccaaggccattggccgcc

SEQ ID NO: 32541 - DNA, 20 bp, Artificial Sequence
  MKO10032541_A_Mtor
  gRNA
ttcctttggttcccgctgcg

SEQ ID NO: 32542 - DNA, 20 bp, Artificial Sequence
  MKO10032542_A_Mtpap
  gRNA
aatgtatcaaaacagtccgc

SEQ ID NO: 32543 - DNA, 20 bp, Artificial Sequence
  MKO10032543_A_Mtpap
  gRNA
actcaatgctcgatgtccac

SEQ ID NO: 32544 - DNA, 20 bp, Artificial Sequence
  MKO10032544_A_Mtpap
  gRNA
aatccgtctagccaagtatc

SEQ ID NO: 32545 - DNA, 20 bp, Artificial Sequence
  MKO10032545_A_Mtpn
  gRNA
cgctgcagtcatgtgcgaca

SEQ ID NO: 32546 - DNA, 20 bp, Artificial Sequence
  MKO10032546_A_Mtpn
  gRNA
tgacagaagcaatttcacgc

SEQ ID NO: 32547 - DNA, 20 bp, Artificial Sequence
  MKO10032547_A_Mtpn
  gRNA
tcaagggcggtcagtccatc

SEQ ID NO: 32548 - DNA, 20 bp, Artificial Sequence
  MKO10032548_A_Mtrf1l
  gRNA
agacatgcgtcagccagcgt

SEQ ID NO: 32549 - DNA, 20 bp, Artificial Sequence
  MKO10032549_A_Mtrf1l
  gRNA
cgctggctgacgcatgtcta

SEQ ID NO: 32550 - DNA, 20 bp, Artificial Sequence
  MKO10032550_A_Mtrf1l
  gRNA
ttccttcggaagaaatggat

SEQ ID NO: 32551 - DNA, 20 bp, Artificial Sequence
  MKO10032551_A_Mtrf1
  gRNA
ccgggatgcgctgaactcga

SEQ ID NO: 32552 - DNA, 20 bp, Artificial Sequence
  MKO10032552_A_Mtrf1
  gRNA
acggatgcagcgcattcaca

SEQ ID NO: 32553 - DNA, 20 bp, Artificial Sequence
  MKO10032553_A_Mtrf1
  gRNA
aattatacaccagccgatta

SEQ ID NO: 32554 - DNA, 20 bp, Artificial Sequence
  MKO10032554_A_Mtrr
  gRNA
gtccggtgtcgtagaaacgc

SEQ ID NO: 32555 - DNA, 20 bp, Artificial Sequence
  MKO10032555_A_Mtrr
  gRNA
agtaattgataaacgacttc

SEQ ID NO: 32556 - DNA, 20 bp, Artificial Sequence
  MKO10032556_A_Mtrr
  gRNA
atcatttgtagtcagccgaa

SEQ ID NO: 32557 - DNA, 20 bp, Artificial Sequence
  MKO10032557_A_Mtr
  gRNA
tgagcttgttgacgcatacc

SEQ ID NO: 32558 - DNA, 20 bp, Artificial Sequence
  MKO10032558_A_Mtr
  gRNA
cagcagtactagtatcgccc

SEQ ID NO: 32559 - DNA, 20 bp, Artificial Sequence
  MKO10032559_A_Mtr
  gRNA
aaagtctcaccaagtgttca

SEQ ID NO: 32560 - DNA, 20 bp, Artificial Sequence
  MKO10032560_A_Mtss1l
  gRNA
cgctgagccaatgtcccgcg

SEQ ID NO: 32561 - DNA, 20 bp, Artificial Sequence
  MKO10032561_A_Mtss1l
  gRNA
gagcctcatcaatccactgc

SEQ ID NO: 32562 - DNA, 20 bp, Artificial Sequence
  MKO10032562_A_Mtss1l
  gRNA
tcttcgatgcgctcctgcag

SEQ ID NO: 32563 - DNA, 20 bp, Artificial Sequence
  MKO10032563_A_Mtss1
  gRNA
catctgctcaccacgtgtgt

SEQ ID NO: 32564 - DNA, 20 bp, Artificial Sequence
  MKO10032564_A_Mtss1
  gRNA
ccggtgccgcatgcacattc

SEQ ID NO: 32565 - DNA, 20 bp, Artificial Sequence
  MKO10032565_A_Mtss1
  gRNA
tgagagctgagccgatctcc

SEQ ID NO: 32566 - DNA, 20 bp, Artificial Sequence
  MKO10032566_A_Mttp
  gRNA
ggattgtaaagtgacctacc

SEQ ID NO: 32567 - DNA, 20 bp, Artificial Sequence
  MKO10032567_A_Mttp
  gRNA
ctcctatgaaaacgagccag

SEQ ID NO: 32568 - DNA, 20 bp, Artificial Sequence
  MKO10032568_A_Mttp
  gRNA
gccgctcattatttaatgag

SEQ ID NO: 32569 - DNA, 20 bp, Artificial Sequence
  MKO10032569_A_Mturn
  gRNA
ctgtcgccgcagccgttgtc

SEQ ID NO: 32570 - DNA, 20 bp, Artificial Sequence
  MKO10032570_A_Mturn
  gRNA
aacgcgtcgtcatctgcgtc

SEQ ID NO: 32571 - DNA, 20 bp, Artificial Sequence
  MKO10032571_A_Mturn
  gRNA
gatggacttctacgccgacc

SEQ ID NO: 32572 - DNA, 20 bp, Artificial Sequence
  MKO10032572_A_Mtus1
  gRNA
ctccgagagaacgcttgagt

SEQ ID NO: 32573 - DNA, 20 bp, Artificial Sequence
  MKO10032573_A_Mtus1
  gRNA
aacggtcagcgcttcaaact

SEQ ID NO: 32574 - DNA, 20 bp, Artificial Sequence
  MKO10032574_A_Mtus1
  gRNA
gcaattccaccttctccgag

SEQ ID NO: 32575 - DNA, 20 bp, Artificial Sequence
  MKO10032575_A_Mtus2
  gRNA
gcagggagtcgtgaatagcc

SEQ ID NO: 32576 - DNA, 20 bp, Artificial Sequence
  MKO10032576_A_Mtus2
  gRNA
gcgagtgccatccatccgcc

SEQ ID NO: 32577 - DNA, 20 bp, Artificial Sequence
  MKO10032577_A_Mtus2
  gRNA
catggccgaacgatagaaag

SEQ ID NO: 32578 - DNA, 20 bp, Artificial Sequence
  MKO10032578_A_Mtx1
  gRNA
gcgagctgacagatcgtagt

SEQ ID NO: 32579 - DNA, 20 bp, Artificial Sequence
  MKO10032579_A_Mtx1
  gRNA
tacgatctgtcagctcgcca

SEQ ID NO: 32580 - DNA, 20 bp, Artificial Sequence
  MKO10032580_A_Mtx1
  gRNA
catcacccatcttcgtaaag

SEQ ID NO: 32581 - DNA, 20 bp, Artificial Sequence
  MKO10032581_A_Mtx2
  gRNA
gccctacacaccactttgac

SEQ ID NO: 32582 - DNA, 20 bp, Artificial Sequence
  MKO10032582_A_Mtx2
  gRNA
gcggaatatatgtctccatc

SEQ ID NO: 32583 - DNA, 20 bp, Artificial Sequence
  MKO10032583_A_Mtx2
  gRNA
accttgtatcagcaactgag

SEQ ID NO: 32584 - DNA, 20 bp, Artificial Sequence
  MKO10032584_A_Mtx3
  gRNA
acttcaccgtgacaaagccg

SEQ ID NO: 32585 - DNA, 20 bp, Artificial Sequence
  MKO10032585_A_Mtx3
  gRNA
ggcaaaccacggctttgtca

SEQ ID NO: 32586 - DNA, 20 bp, Artificial Sequence
  MKO10032586_A_Mtx3
  gRNA
actggcttacatcgctctcc

SEQ ID NO: 32587 - DNA, 20 bp, Artificial Sequence
  MKO10032587_A_Muc13
  gRNA
tgcaaccctaacccctgtaa

SEQ ID NO: 32588 - DNA, 20 bp, Artificial Sequence
  MKO10032588_A_Muc13
  gRNA
ttacctgtgcttccaccgct

SEQ ID NO: 32589 - DNA, 20 bp, Artificial Sequence
  MKO10032589_A_Muc13
  gRNA
acaagaagcagttcctttac

SEQ ID NO: 32590 - DNA, 20 bp, Artificial Sequence
  MKO10032590_A_Muc15
  gRNA
agcagacgcaaatcctttac

SEQ ID NO: 32591 - DNA, 20 bp, Artificial Sequence
  MKO10032591_A_Muc15
  gRNA
tgtttctgaggcctcgcaaa

SEQ ID NO: 32592 - DNA, 20 bp, Artificial Sequence
  MKO10032592_A_Muc15
  gRNA
tatgatgacagaaacgaacc

SEQ ID NO: 32593 - DNA, 20 bp, Artificial Sequence
  MKO10032593_A_Muc19
  gRNA
gtgtaggtgaagcaactatg

SEQ ID NO: 32594 - DNA, 20 bp, Artificial Sequence
  MKO10032594_A_Muc19
  gRNA
gatcgatgacgttgagatct

SEQ ID NO: 32595 - DNA, 20 bp, Artificial Sequence
  MKO10032595_A_Muc19
  gRNA
tgtgggtgttctagtcgtag

SEQ ID NO: 32596 - DNA, 20 bp, Artificial Sequence
  MKO10032596_A_Muc1
  gRNA
caactggggtgaactgttac

SEQ ID NO: 32597 - DNA, 20 bp, Artificial Sequence
  MKO10032597_A_Muc1
  gRNA
tggagtggtagtcgatgcta

SEQ ID NO: 32598 - DNA, 20 bp, Artificial Sequence
  MKO10032598_A_Muc1
  gRNA
cacagtcgattctaccacca

SEQ ID NO: 32599 - DNA, 20 bp, Artificial Sequence
  MKO10032599_A_Muc20
  gRNA
gagagccgtgaaactcacga

SEQ ID NO: 32600 - DNA, 20 bp, Artificial Sequence
  MKO10032600_A_Muc20
  gRNA
ctccccaatagcatcgtccc

SEQ ID NO: 32601 - DNA, 20 bp, Artificial Sequence
  MKO10032601_A_Muc20
  gRNA
aggccacggtcagccgtaca

SEQ ID NO: 32602 - DNA, 20 bp, Artificial Sequence
  MKO10032602_A_Muc2
  gRNA
gccggcccgagagtagacct

SEQ ID NO: 32603 - DNA, 20 bp, Artificial Sequence
  MKO10032603_A_Muc2
  gRNA
gggccggcctctccctcatg

SEQ ID NO: 32604 - DNA, 20 bp, Artificial Sequence
  MKO10032604_A_Muc2
  gRNA
gtctatcctgatcaccatta

SEQ ID NO: 32605 - DNA, 20 bp, Artificial Sequence
  MKO10032605_A_Muc4
  gRNA
gtgtccccgtgccatacgtc

SEQ ID NO: 32606 - DNA, 20 bp, Artificial Sequence
  MKO10032606_A_Muc4
  gRNA
ataccctatctactcccgtc

SEQ ID NO: 32607 - DNA, 20 bp, Artificial Sequence
  MKO10032607_A_Muc4
  gRNA
tcgatgcttgtgagctcatt

SEQ ID NO: 32608 - DNA, 20 bp, Artificial Sequence
  MKO10032608_A_Muc5ac
  gRNA
tatccagctacgccgtgtcc

SEQ ID NO: 32609 - DNA, 20 bp, Artificial Sequence
  MKO10032609_A_Muc5ac
  gRNA
cgggtggttattgactaaga

SEQ ID NO: 32610 - DNA, 20 bp, Artificial Sequence
  MKO10032610_A_Muc5ac
  gRNA
gttcactcacctcgtaccac

SEQ ID NO: 32611 - DNA, 20 bp, Artificial Sequence
  MKO10032611_A_Muc5b
  gRNA
gcggaacacgtcaccatcaa

SEQ ID NO: 32612 - DNA, 20 bp, Artificial Sequence
  MKO10032612_A_Muc5b
  gRNA
ttcaacatccaactgcgtcg

SEQ ID NO: 32613 - DNA, 20 bp, Artificial Sequence
  MKO10032613_A_Muc5b
  gRNA
gtccacttaccgctcatgct

SEQ ID NO: 32614 - DNA, 20 bp, Artificial Sequence
  MKO10032614_A_Muc6
  gRNA
ctcaccgtaagatgggcgtc

SEQ ID NO: 32615 - DNA, 20 bp, Artificial Sequence
  MKO10032615_A_Muc6
  gRNA
ggcgggcacgtcatccccac

SEQ ID NO: 32616 - DNA, 20 bp, Artificial Sequence
  MKO10032616_A_Muc6
  gRNA
ccatgtacttcgtctctacc

SEQ ID NO: 32617 - DNA, 20 bp, Artificial Sequence
  MKO10032617_A_Mucl1
  gRNA
acccactttggtctgattag

SEQ ID NO: 32618 - DNA, 20 bp, Artificial Sequence
  MKO10032618_A_Mucl1
  gRNA
tgagtcctctaatttagcca

SEQ ID NO: 32619 - DNA, 20 bp, Artificial Sequence
  MKO10032619_A_Mucl1
  gRNA
atgatattgaataacattca

SEQ ID NO: 32620 - DNA, 20 bp, Artificial Sequence
  MKO10032620_A_Mug1
  gRNA
gaaaaacctgttcgatgagc

SEQ ID NO: 32621 - DNA, 20 bp, Artificial Sequence
  MKO10032621_A_Mug1
  gRNA
ccttcctgattgagatacca

SEQ ID NO: 32622 - DNA, 20 bp, Artificial Sequence
  MKO10032622_A_Mug1
  gRNA
gctacgtcccctgaatgagt

SEQ ID NO: 32623 - DNA, 20 bp, Artificial Sequence
  MKO10032623_A_Mug2
  gRNA
tcacaatgaaggaaacacat

SEQ ID NO: 32624 - DNA, 20 bp, Artificial Sequence
  MKO10032624_A_Mug2
  gRNA
ttccaggaagtatatggtgc

SEQ ID NO: 32625 - DNA, 20 bp, Artificial Sequence
  MKO10032625_A_Mug2
  gRNA
agcttcatacctgattgtcc

SEQ ID NO: 32626 - DNA, 20 bp, Artificial Sequence
  MKO10032626_A_Mul1
  gRNA
agcggttcgcgaccgtcgct

SEQ ID NO: 32627 - DNA, 20 bp, Artificial Sequence
  MKO10032627_A_Mul1
  gRNA
acttctcgtacacggtctct

SEQ ID NO: 32628 - DNA, 20 bp, Artificial Sequence
  MKO10032628_A_Mul1
  gRNA
ccagttcaccgatccccgtg

SEQ ID NO: 32629 - DNA, 20 bp, Artificial Sequence
  MKO10032629_A_Mum1l1
  gRNA
agtaccgggagagtatcgat

SEQ ID NO: 32630 - DNA, 20 bp, Artificial Sequence
  MKO10032630_A_Mum1l1
  gRNA
ttgttagctcggtcccgagc

SEQ ID NO: 32631 - DNA, 20 bp, Artificial Sequence
  MKO10032631_A_Mum1l1
  gRNA
cgcaccaatcgatactctcc

SEQ ID NO: 32632 - DNA, 20 bp, Artificial Sequence
  MKO10032632_A_Mum1
  gRNA
ttaccgacgctccctgcgag

SEQ ID NO: 32633 - DNA, 20 bp, Artificial Sequence
  MKO10032633_A_Mum1
  gRNA
tagcccagtgcgcatccaag

SEQ ID NO: 32634 - DNA, 20 bp, Artificial Sequence
  MKO10032634_A_Mum1
  gRNA
ccacggctgagctcttaacc

SEQ ID NO: 32635 - DNA, 20 bp, Artificial Sequence
  MKO10032635_A_Mup10
  gRNA
tattacagattaatggggaa

SEQ ID NO: 32636 - DNA, 20 bp, Artificial Sequence
  MKO10032636_A_Mup10
  gRNA
agtatggaatttaagaacta

SEQ ID NO: 32637 - DNA, 20 bp, Artificial Sequence
  MKO10032637_A_Mup10
  gRNA
agagtgctccgaattatcta

SEQ ID NO: 32638 - DNA, 20 bp, Artificial Sequence
  MKO10032638_A_Mup11
  gRNA
tattacagattaatggggaa

SEQ ID NO: 32639 - DNA, 20 bp, Artificial Sequence
  MKO10032639_A_Mup11
  gRNA
agtatggaatttaagaacta

SEQ ID NO: 32640 - DNA, 20 bp, Artificial Sequence
  MKO10032640_A_Mup11
  gRNA
cagaagagatgaagagtgct

SEQ ID NO: 32641 - DNA, 20 bp, Artificial Sequence
  MKO10032641_A_Mup12
  gRNA
tattacagattaatggggaa

SEQ ID NO: 32642 - DNA, 20 bp, Artificial Sequence
  MKO10032642_A_Mup12
  gRNA
agtatggaatttaagaacta

SEQ ID NO: 32643 - DNA, 20 bp, Artificial Sequence
  MKO10032643_A_Mup12
  gRNA
cagaagagatgaagagtgct

SEQ ID NO: 32644 - DNA, 20 bp, Artificial Sequence
  MKO10032644_A_Mup13
  gRNA
tattacagattaatggggaa

SEQ ID NO: 32645 - DNA, 20 bp, Artificial Sequence
  MKO10032645_A_Mup13
  gRNA
agtatggactttaagaacta

SEQ ID NO: 32646 - DNA, 20 bp, Artificial Sequence
  MKO10032646_A_Mup13
  gRNA
cagaagagatgaagagtgct

SEQ ID NO: 32647 - DNA, 20 bp, Artificial Sequence
  MKO10032647_A_Mup14
  gRNA
tattacagattaatggggaa

SEQ ID NO: 32648 - DNA, 20 bp, Artificial Sequence
  MKO10032648_A_Mup14
  gRNA
agtatggaatttaagaacta

SEQ ID NO: 32649 - DNA, 20 bp, Artificial Sequence
  MKO10032649_A_Mup14
  gRNA
cagaagagatgaagagtgct

SEQ ID NO: 32650 - DNA, 20 bp, Artificial Sequence
  MKO10032650_A_Mup15
  gRNA
tattacagattaatggggaa

SEQ ID NO: 32651 - DNA, 20 bp, Artificial Sequence
  MKO10032651_A_Mup15
  gRNA
agtatggaatttaagaacta

SEQ ID NO: 32652 - DNA, 20 bp, Artificial Sequence
  MKO10032652_A_Mup15
  gRNA
cagaagagatgaagagtgct

SEQ ID NO: 32653 - DNA, 20 bp, Artificial Sequence
  MKO10032653_A_Mup16
  gRNA
tattacagattaatggggaa

SEQ ID NO: 32654 - DNA, 20 bp, Artificial Sequence
  MKO10032654_A_Mup16
  gRNA
agtatggaatttaagaacta

SEQ ID NO: 32655 - DNA, 20 bp, Artificial Sequence
  MKO10032655_A_Mup16
  gRNA
agagtgctccgaattatcta

SEQ ID NO: 32656 - DNA, 20 bp, Artificial Sequence
  MKO10032656_A_Mup17
  gRNA
cacctcattaacgaaaagga

SEQ ID NO: 32657 - DNA, 20 bp, Artificial Sequence
  MKO10032657_A_Mup17
  gRNA
tattacagattaatggggaa

SEQ ID NO: 32658 - DNA, 20 bp, Artificial Sequence
  MKO10032658_A_Mup17
  gRNA
agtatggactttaagaacta

SEQ ID NO: 32659 - DNA, 20 bp, Artificial Sequence
  MKO10032659_A_Mup19
  gRNA
tattacagattaatggggaa

SEQ ID NO: 32660 - DNA, 20 bp, Artificial Sequence
  MKO10032660_A_Mup19
  gRNA
agtatggaatttaagaacta

SEQ ID NO: 32661 - DNA, 20 bp, Artificial Sequence
  MKO10032661_A_Mup19
  gRNA
agagtgctccgaattatcta

SEQ ID NO: 32662 - DNA, 20 bp, Artificial Sequence
  MKO10032662_A_Mup1
  gRNA
gatgctgctgctgctgtgtg

SEQ ID NO: 32663 - DNA, 20 bp, Artificial Sequence
  MKO10032663_A_Mup1
  gRNA
tagaactagcttcttctgca

SEQ ID NO: 32664 - DNA, 20 bp, Artificial Sequence
  MKO10032664_A_Mup1
  gRNA
tattacagattaatggggaa

SEQ ID NO: 32665 - DNA, 20 bp, Artificial Sequence
  MKO10032665_A_Mup20
  gRNA
tggagaaaccttccagctga

SEQ ID NO: 32666 - DNA, 20 bp, Artificial Sequence
  MKO10032666_A_Mup20
  gRNA
tattacagattaatggggaa

SEQ ID NO: 32667 - DNA, 20 bp, Artificial Sequence
  MKO10032667_A_Mup20
  gRNA
aatatggaatttaagagcta

SEQ ID NO: 32668 - DNA, 20 bp, Artificial Sequence
  MKO10032668_A_Mup21
  gRNA
tcttacagattagcgggtat

SEQ ID NO: 32669 - DNA, 20 bp, Artificial Sequence
  MKO10032669_A_Mup21
  gRNA
tgcaccgaaatgactttgat

SEQ ID NO: 32670 - DNA, 20 bp, Artificial Sequence
  MKO10032670_A_Mup21
  gRNA
atgacttactgacgttggtt

SEQ ID NO: 32671 - DNA, 20 bp, Artificial Sequence
  MKO10032671_A_Mup2
  gRNA
tattacagattaatggggaa

SEQ ID NO: 32672 - DNA, 20 bp, Artificial Sequence
  MKO10032672_A_Mup2
  gRNA
agtatggaatttaagaacta

SEQ ID NO: 32673 - DNA, 20 bp, Artificial Sequence
  MKO10032673_A_Mup2
  gRNA
cagaagagatgaagagtgct

SEQ ID NO: 32674 - DNA, 20 bp, Artificial Sequence
  MKO10032674_A_Mup3
  gRNA
tgcaccgaaatgactgcgat

SEQ ID NO: 32675 - DNA, 20 bp, Artificial Sequence
  MKO10032675_A_Mup3
  gRNA
ttcaccaatcgcagtcattt

SEQ ID NO: 32676 - DNA, 20 bp, Artificial Sequence
  MKO10032676_A_Mup3
  gRNA
tcttacagattagtgggtat

SEQ ID NO: 32677 - DNA, 20 bp, Artificial Sequence
  MKO10032677_A_Mup4
  gRNA
gtttcatctcattaacgaaa

SEQ ID NO: 32678 - DNA, 20 bp, Artificial Sequence
  MKO10032678_A_Mup4
  gRNA
gctgacaaaacagagaaggc

SEQ ID NO: 32679 - DNA, 20 bp, Artificial Sequence
  MKO10032679_A_Mup4
  gRNA
tgtggagcacatccatgtct

SEQ ID NO: 32680 - DNA, 20 bp, Artificial Sequence
  MKO10032680_A_Mup5
  gRNA
gtgctccacaaaaactctca

SEQ ID NO: 32681 - DNA, 20 bp, Artificial Sequence
  MKO10032681_A_Mup5
  gRNA
tgtggagcacatcgatgtct

SEQ ID NO: 32682 - DNA, 20 bp, Artificial Sequence
  MKO10032682_A_Mup5
  gRNA
agagtgcactgaaatatatt

SEQ ID NO: 32683 - DNA, 20 bp, Artificial Sequence
  MKO10032683_A_Mup6
  gRNA
ttccagctgatgtcgctcta

SEQ ID NO: 32684 - DNA, 20 bp, Artificial Sequence
  MKO10032684_A_Mup6
  gRNA
taccatagagcgacatcagc

SEQ ID NO: 32685 - DNA, 20 bp, Artificial Sequence
  MKO10032685_A_Mup6
  gRNA
ttgatatctgaattcaaatc

SEQ ID NO: 32686 - DNA, 20 bp, Artificial Sequence
  MKO10032686_A_Mup7
  gRNA
tattacagattaatggggaa

SEQ ID NO: 32687 - DNA, 20 bp, Artificial Sequence
  MKO10032687_A_Mup7
  gRNA
agtatggactttaagaacta

SEQ ID NO: 32688 - DNA, 20 bp, Artificial Sequence
  MKO10032688_A_Mup7
  gRNA
agagtgctccgaattatcta

SEQ ID NO: 32689 - DNA, 20 bp, Artificial Sequence
  MKO10032689_A_Mup8
  gRNA
tattacagattaatggggaa

SEQ ID NO: 32690 - DNA, 20 bp, Artificial Sequence
  MKO10032690_A_Mup8
  gRNA
agtatggactttaagaacta

SEQ ID NO: 32691 - DNA, 20 bp, Artificial Sequence
  MKO10032691_A_Mup8
  gRNA
cagaagagatgaagagtgct

SEQ ID NO: 32692 - DNA, 20 bp, Artificial Sequence
  MKO10032692_A_Mup9
  gRNA
tattacagattaatggggaa

SEQ ID NO: 32693 - DNA, 20 bp, Artificial Sequence
  MKO10032693_A_Mup9
  gRNA
agtatggaatttaagaacta

SEQ ID NO: 32694 - DNA, 20 bp, Artificial Sequence
  MKO10032694_A_Mup9
  gRNA
agagtgctccgaattatcta

SEQ ID NO: 32695 - DNA, 20 bp, Artificial Sequence
  MKO10032695_A_Murc
  gRNA
tcacacttgacaaccgattc

SEQ ID NO: 32696 - DNA, 20 bp, Artificial Sequence
  MKO10032696_A_Murc
  gRNA
aacataatactcctcatccg

SEQ ID NO: 32697 - DNA, 20 bp, Artificial Sequence
  MKO10032697_A_Murc
  gRNA
tctgtccagcacggtcacaa

SEQ ID NO: 32698 - DNA, 20 bp, Artificial Sequence
  MKO10032698_A_Mus81
  gRNA
tacccgctaccattgcgcag

SEQ ID NO: 32699 - DNA, 20 bp, Artificial Sequence
  MKO10032699_A_Mus81
  gRNA
gcttccttcccgctgcgcaa

SEQ ID NO: 32700 - DNA, 20 bp, Artificial Sequence
  MKO10032700_A_Mus81
  gRNA
ccacagcttcctaaccaaag

SEQ ID NO: 32701 - DNA, 20 bp, Artificial Sequence
  MKO10032701_A_Musk
  gRNA
gggttacccatcgtagtgca

SEQ ID NO: 32702 - DNA, 20 bp, Artificial Sequence
  MKO10032702_A_Musk
  gRNA
aagtttctcagtcccgctga

SEQ ID NO: 32703 - DNA, 20 bp, Artificial Sequence
  MKO10032703_A_Musk
  gRNA
agcattgtcccccttgatcc

SEQ ID NO: 32704 - DNA, 20 bp, Artificial Sequence
  MKO10032704_A_Mustn1
  gRNA
agggggccgcttcttcttga

SEQ ID NO: 32705 - DNA, 20 bp, Artificial Sequence
  MKO10032705_A_Mustn1
  gRNA
gaagacctgaagggggcccg

SEQ ID NO: 32706 - DNA, 20 bp, Artificial Sequence
  MKO10032706_A_Mustn1
  gRNA
gtattcagccgcaaccgcac

SEQ ID NO: 32707 - DNA, 20 bp, Artificial Sequence
  MKO10032707_A_Mutyh
  gRNA
tgatcgactattatactcga

SEQ ID NO: 32708 - DNA, 20 bp, Artificial Sequence
  MKO10032708_A_Mutyh
  gRNA
ataggccctcctgtccgagt

SEQ ID NO: 32709 - DNA, 20 bp, Artificial Sequence
  MKO10032709_A_Mutyh
  gRNA
tccgaagcaacttgctcagc

SEQ ID NO: 32710 - DNA, 20 bp, Artificial Sequence
  MKO10032710_A_Mut
  gRNA
ccgcactgcaatcgaagcca

SEQ ID NO: 32711 - DNA, 20 bp, Artificial Sequence
  MKO10032711_A_Mut
  gRNA
gtactccaacccatctgcga

SEQ ID NO: 32712 - DNA, 20 bp, Artificial Sequence
  MKO10032712_A_Mut
  gRNA
taagtgaccaccccgatgtc

SEQ ID NO: 32713 - DNA, 20 bp, Artificial Sequence
  MKO10032713_A_Mvb12a
  gRNA
cggctttctgcgcgaagcct

SEQ ID NO: 32714 - DNA, 20 bp, Artificial Sequence
  MKO10032714_A_Mvb12a
  gRNA
caagccccgcacgctcagcc

SEQ ID NO: 32715 - DNA, 20 bp, Artificial Sequence
  MKO10032715_A_Mvb12a
  gRNA
cggatcttactgatatcctg

SEQ ID NO: 32716 - DNA, 20 bp, Artificial Sequence
  MKO10032716_A_Mvb12b
  gRNA
cttacccgataaacgtgtac

SEQ ID NO: 32717 - DNA, 20 bp, Artificial Sequence
  MKO10032717_A_Mvb12b
  gRNA
tcccggaaccgagcaccaac

SEQ ID NO: 32718 - DNA, 20 bp, Artificial Sequence
  MKO10032718_A_Mvb12b
  gRNA
tgttgactcacgtgtatcca

SEQ ID NO: 32719 - DNA, 20 bp, Artificial Sequence
  MKO10032719_A_Mvd
  gRNA
cctggtgcagcgtgacgctc

SEQ ID NO: 32720 - DNA, 20 bp, Artificial Sequence
  MKO10032720_A_Mvd
  gRNA
cacaaccgttgccattagca

SEQ ID NO: 32721 - DNA, 20 bp, Artificial Sequence
  MKO10032721_A_Mvd
  gRNA
ctgccctgcagttcgccgcc

SEQ ID NO: 32722 - DNA, 20 bp, Artificial Sequence
  MKO10032722_A_Mvk
  gRNA
cacctgcttaataccgatgt

SEQ ID NO: 32723 - DNA, 20 bp, Artificial Sequence
  MKO10032723_A_Mvk
  gRNA
cgactggacacgagctttct

SEQ ID NO: 32724 - DNA, 20 bp, Artificial Sequence
  MKO10032724_A_Mvk
  gRNA
gacctccccagagaccgtgc

SEQ ID NO: 32725 - DNA, 20 bp, Artificial Sequence
  MKO10032725_A_Mvp
  gRNA
ccggctccggcacgctgacc

SEQ ID NO: 32726 - DNA, 20 bp, Artificial Sequence
  MKO10032726_A_Mvp
  gRNA
gggaccgtcaccatgcgaac

SEQ ID NO: 32727 - DNA, 20 bp, Artificial Sequence
  MKO10032727_A_Mvp
  gRNA
gcaggacatcaccccgctgc

SEQ ID NO: 32728 - DNA, 20 bp, Artificial Sequence
  MKO10032728_A_Mx1
  gRNA
ggattccagttggatataac

SEQ ID NO: 32729 - DNA, 20 bp, Artificial Sequence
  MKO10032729_A_Mx1
  gRNA
gagttcttaagaacgtcaga

SEQ ID NO: 32730 - DNA, 20 bp, Artificial Sequence
  MKO10032730_A_Mx1
  gRNA
gtgtcgatgaggtcaataca

SEQ ID NO: 32731 - DNA, 20 bp, Artificial Sequence
  MKO10032731_A_Mx2
  gRNA
gattcagtcaacttacccag

SEQ ID NO: 32732 - DNA, 20 bp, Artificial Sequence
  MKO10032732_A_Mx2
  gRNA
gagtcgatgaggtcaatgca

SEQ ID NO: 32733 - DNA, 20 bp, Artificial Sequence
  MKO10032733_A_Mx2
  gRNA
ctcctatgatgacatcgaag

SEQ ID NO: 32734 - DNA, 20 bp, Artificial Sequence
  MKO10032734_A_Mxd1
  gRNA
aacagcggcacctgaagcgg

SEQ ID NO: 32735 - DNA, 20 bp, Artificial Sequence
  MKO10032735_A_Mxd1
  gRNA
gccgctgttcccgctgaagc

SEQ ID NO: 32736 - DNA, 20 bp, Artificial Sequence
  MKO10032736_A_Mxd1
  gRNA
cggcttgactcagggcccag

SEQ ID NO: 32737 - DNA, 20 bp, Artificial Sequence
  MKO10032737_A_Mxd3
  gRNA
gcagcaagcccggcggctca

SEQ ID NO: 32738 - DNA, 20 bp, Artificial Sequence
  MKO10032738_A_Mxd3
  gRNA
gctctaagcaccgcttcagc

SEQ ID NO: 32739 - DNA, 20 bp, Artificial Sequence
  MKO10032739_A_Mxd3
  gRNA
caggtctgtgcacaacgagc

SEQ ID NO: 32740 - DNA, 20 bp, Artificial Sequence
  MKO10032740_A_Mxd4
  gRNA
ccttgcgaagtcgccgtcga

SEQ ID NO: 32741 - DNA, 20 bp, Artificial Sequence
  MKO10032741_A_Mxd4
  gRNA
gcatcttagcacgcttcaga

SEQ ID NO: 32742 - DNA, 20 bp, Artificial Sequence
  MKO10032742_A_Mxd4
  gRNA
cacggaggcgtagccgtgct

SEQ ID NO: 32743 - DNA, 20 bp, Artificial Sequence
  MKO10032743_A_Mxi1
  gRNA
ctcgttccaagttctctagc

SEQ ID NO: 32744 - DNA, 20 bp, Artificial Sequence
  MKO10032744_A_Mxi1
  gRNA
tcccctccatgccgagcccc

SEQ ID NO: 32745 - DNA, 20 bp, Artificial Sequence
  MKO10032745_A_Mxi1
  gRNA
cggatacgaatggacagcat

SEQ ID NO: 32746 - DNA, 20 bp, Artificial Sequence
  MKO10032746_A_Mxra7
  gRNA
ccacggcgcgatggagtcgc

SEQ ID NO: 32747 - DNA, 20 bp, Artificial Sequence
  MKO10032747_A_Mxra7
  gRNA
cccgtctgacatctcgccaa

SEQ ID NO: 32748 - DNA, 20 bp, Artificial Sequence
  MKO10032748_A_Mxra7
  gRNA
actccgactctatgacatgt

SEQ ID NO: 32749 - DNA, 20 bp, Artificial Sequence
  MKO10032749_A_Mxra8
  gRNA
cgcgctggcgatcatgcagc

SEQ ID NO: 32750 - DNA, 20 bp, Artificial Sequence
  MKO10032750_A_Mxra8
  gRNA
gtcaccgcgtgcaaaagcgt

SEQ ID NO: 32751 - DNA, 20 bp, Artificial Sequence
  MKO10032751_A_Mxra8
  gRNA
gcgccgagtcttccacctac

SEQ ID NO: 32752 - DNA, 20 bp, Artificial Sequence
  MKO10032752_A_Myadml2
  gRNA
tttcgtaccatgcatccggc

SEQ ID NO: 32753 - DNA, 20 bp, Artificial Sequence
  MKO10032753_A_Myadml2
  gRNA
ccctctgtacttcacccgac

SEQ ID NO: 32754 - DNA, 20 bp, Artificial Sequence
  MKO10032754_A_Myadml2
  gRNA
tgatgatgtcatgacagcga

SEQ ID NO: 32755 - DNA, 20 bp, Artificial Sequence
  MKO10032755_A_Myadm
  gRNA
cccgggtacgtccatgagct

SEQ ID NO: 32756 - DNA, 20 bp, Artificial Sequence
  MKO10032756_A_Myadm
  gRNA
gccatctgcttcatactagc

SEQ ID NO: 32757 - DNA, 20 bp, Artificial Sequence
  MKO10032757_A_Myadm
  gRNA
tctggtgtactccactcgtc

SEQ ID NO: 32758 - DNA, 20 bp, Artificial Sequence
  MKO10032758_A_Mybbp1a
  gRNA
gccctgaagcgcctaatcac

SEQ ID NO: 32759 - DNA, 20 bp, Artificial Sequence
  MKO10032759_A_Mybbp1a
  gRNA
gtctcacctgtgccagcgcc

SEQ ID NO: 32760 - DNA, 20 bp, Artificial Sequence
  MKO10032760_A_Mybbp1a
  gRNA
cagcctacaagccatgaaca

SEQ ID NO: 32761 - DNA, 20 bp, Artificial Sequence
  MKO10032761_A_Mybl1
  gRNA
atatgaagcacacaagcgcc

SEQ ID NO: 32762 - DNA, 20 bp, Artificial Sequence
  MKO10032762_A_Mybl1
  gRNA
aaaccttctgccatcgatgt

SEQ ID NO: 32763 - DNA, 20 bp, Artificial Sequence
  MKO10032763_A_Mybl1
  gRNA
aacaacacggaactgatgat

SEQ ID NO: 32764 - DNA, 20 bp, Artificial Sequence
  MKO10032764_A_Mybl2
  gRNA
ggctatcagcgtccactgtt

SEQ ID NO: 32765 - DNA, 20 bp, Artificial Sequence
  MKO10032765_A_Mybl2
  gRNA
gagatcgccaagatgctacc

SEQ ID NO: 32766 - DNA, 20 bp, Artificial Sequence
  MKO10032766_A_Mybl2
  gRNA
tctggatgagttacactacc

SEQ ID NO: 32767 - DNA, 20 bp, Artificial Sequence
  MKO10032767_A_Mybpc1
  gRNA
tacccgagtttgcctctcga

SEQ ID NO: 32768 - DNA, 20 bp, Artificial Sequence
  MKO10032768_A_Mybpc1
  gRNA
ctcaccaactttcaccgatc

SEQ ID NO: 32769 - DNA, 20 bp, Artificial Sequence
  MKO10032769_A_Mybpc1
  gRNA
ccccttgaaccatttgacag

SEQ ID NO: 32770 - DNA, 20 bp, Artificial Sequence
  MKO10032770_A_Mybpc2
  gRNA
cgacagctgctcgttcaacg

SEQ ID NO: 32771 - DNA, 20 bp, Artificial Sequence
  MKO10032771_A_Mybpc2
  gRNA
tctctagacggtaatccccg

SEQ ID NO: 32772 - DNA, 20 bp, Artificial Sequence
  MKO10032772_A_Mybpc2
  gRNA
cggagcccggttcatcttca

SEQ ID NO: 32773 - DNA, 20 bp, Artificial Sequence
  MKO10032773_A_Mybpc3
  gRNA
tggcagtgctgccgtgttcg

SEQ ID NO: 32774 - DNA, 20 bp, Artificial Sequence
  MKO10032774_A_Mybpc3
  gRNA
cctctttctgatgcgaccac

SEQ ID NO: 32775 - DNA, 20 bp, Artificial Sequence
  MKO10032775_A_Mybpc3
  gRNA
ggagcctgcaatgaccgcgt

SEQ ID NO: 32776 - DNA, 20 bp, Artificial Sequence
  MKO10032776_A_Mybphl
  gRNA
ccccattccgcacgctgaca

SEQ ID NO: 32777 - DNA, 20 bp, Artificial Sequence
  MKO10032777_A_Mybphl
  gRNA
gctgtattgcccgtatcttg

SEQ ID NO: 32778 - DNA, 20 bp, Artificial Sequence
  MKO10032778_A_Mybphl
  gRNA
gaatctactaatcccgatcc

SEQ ID NO: 32779 - DNA, 20 bp, Artificial Sequence
  MKO10032779_A_Mybph
  gRNA
ccagcagacggttcgaaacc

SEQ ID NO: 32780 - DNA, 20 bp, Artificial Sequence
  MKO10032780_A_Mybph
  gRNA
tcgtcagacctacatccgcc

SEQ ID NO: 32781 - DNA, 20 bp, Artificial Sequence
  MKO10032781_A_Mybph
  gRNA
ctatgagctcaccgtgcatc

SEQ ID NO: 32782 - DNA, 20 bp, Artificial Sequence
  MKO10032782_A_Myb
  gRNA
ctaacttacgggcagataat

SEQ ID NO: 32783 - DNA, 20 bp, Artificial Sequence
  MKO10032783_A_Myb
  gRNA
aacgcttcggaccatatttc

SEQ ID NO: 32784 - DNA, 20 bp, Artificial Sequence
  MKO10032784_A_Myb
  gRNA
gcactttctgccaccggtgt

SEQ ID NO: 32785 - DNA, 20 bp, Artificial Sequence
  MKO10032785_A_Mycbp2
  gRNA
aaattactgttcggagtact

SEQ ID NO: 32786 - DNA, 20 bp, Artificial Sequence
  MKO10032786_A_Mycbp2
  gRNA
tcacgcttgccaaactattc

SEQ ID NO: 32787 - DNA, 20 bp, Artificial Sequence
  MKO10032787_A_Mycbp2
  gRNA
gcccccaatcaagctgccaa

SEQ ID NO: 32788 - DNA, 20 bp, Artificial Sequence
  MKO10032788_A_Mycbpap
  gRNA
cccataccggagtagtccag

SEQ ID NO: 32789 - DNA, 20 bp, Artificial Sequence
  MKO10032789_A_Mycbpap
  gRNA
ccaggactttaaaagaatcg

SEQ ID NO: 32790 - DNA, 20 bp, Artificial Sequence
  MKO10032790_A_Mycbpap
  gRNA
gatcctccctcaccagatct

SEQ ID NO: 32791 - DNA, 20 bp, Artificial Sequence
  MKO10032791_A_Mycbp
  gRNA
actcgaagcgcgagcagttc

SEQ ID NO: 32792 - DNA, 20 bp, Artificial Sequence
  MKO10032792_A_Mycbp
  gRNA
ctgctcgcgcttcgagtcgg

SEQ ID NO: 32793 - DNA, 20 bp, Artificial Sequence
  MKO10032793_A_Mycbp
  gRNA
tgttcagtatgaaccacctc

SEQ ID NO: 32794 - DNA, 20 bp, Artificial Sequence
  MKO10032794_A_Mycl
  gRNA
ccgagattccgcctcgtccc

SEQ ID NO: 32795 - DNA, 20 bp, Artificial Sequence
  MKO10032795_A_Mycl
  gRNA
gtccggggtagcgggcgctt

SEQ ID NO: 32796 - DNA, 20 bp, Artificial Sequence
  MKO10032796_A_Mycl
  gRNA
ggggtctgctcgcaccgtga

SEQ ID NO: 32797 - DNA, 20 bp, Artificial Sequence
  MKO10032797_A_Mycn
  gRNA
cgagtacgtgcacgccctac

SEQ ID NO: 32798 - DNA, 20 bp, Artificial Sequence
  MKO10032798_A_Mycn
  gRNA
gccgactctcgcttgttcac

SEQ ID NO: 32799 - DNA, 20 bp, Artificial Sequence
  MKO10032799_A_Mycn
  gRNA
taaagaagatcgaacacgct

SEQ ID NO: 32800 - DNA, 20 bp, Artificial Sequence
  MKO10032800_A_Mycs
  gRNA
tgcgttctcctgatgcgccg

SEQ ID NO: 32801 - DNA, 20 bp, Artificial Sequence
  MKO10032801_A_Mycs
  gRNA
ggctaccggtccctcgccgt

SEQ ID NO: 32802 - DNA, 20 bp, Artificial Sequence
  MKO10032802_A_Mycs
  gRNA
cgcgccaccgttgccctacg

SEQ ID NO: 32803 - DNA, 20 bp, Artificial Sequence
  MKO10032803_A_Myct1
  gRNA
gctaataacaccacgagctt

SEQ ID NO: 32804 - DNA, 20 bp, Artificial Sequence
  MKO10032804_A_Myct1
  gRNA
aatgtccttcaccgtatccg

SEQ ID NO: 32805 - DNA, 20 bp, Artificial Sequence
  MKO10032805_A_Myct1
  gRNA
ccagtgcacccatttcgcag

SEQ ID NO: 32806 - DNA, 20 bp, Artificial Sequence
  MKO10032806_A_Myc
  gRNA
ggacgtagcgaccgcaacat

SEQ ID NO: 32807 - DNA, 20 bp, Artificial Sequence
  MKO10032807_A_Myc
  gRNA
gctgtacggagtcgtagtcg

SEQ ID NO: 32808 - DNA, 20 bp, Artificial Sequence
  MKO10032808_A_Myc
  gRNA
tcgggctcatctccatcccg

SEQ ID NO: 32809 - DNA, 20 bp, Artificial Sequence
  MKO10032809_A_Myd88
  gRNA
gtccgaccgtgacgtcctgc

SEQ ID NO: 32810 - DNA, 20 bp, Artificial Sequence
  MKO10032810_A_Myd88
  gRNA
ctccctcaggtgtcgccgca

SEQ ID NO: 32811 - DNA, 20 bp, Artificial Sequence
  MKO10032811_A_Myd88
  gRNA
caacgatatcgagtttgtgc

SEQ ID NO: 32812 - DNA, 20 bp, Artificial Sequence
  MKO10032812_A_Myef2
  gRNA
aaagatttgatgagagaaaa

SEQ ID NO: 32813 - DNA, 20 bp, Artificial Sequence
  MKO10032813_A_Myef2
  gRNA
ggccgatgccgacaagtccg

SEQ ID NO: 32814 - DNA, 20 bp, Artificial Sequence
  MKO10032814_A_Myef2
  gRNA
cgacggctcgcagcagcaac

SEQ ID NO: 32815 - DNA, 20 bp, Artificial Sequence
  MKO10032815_A_Myeov2
  gRNA
tgtcgagatgaaacccgcag

SEQ ID NO: 32816 - DNA, 20 bp, Artificial Sequence
  MKO10032816_A_Myeov2
  gRNA
cacctcatccaggtccacat

SEQ ID NO: 32817 - DNA, 20 bp, Artificial Sequence
  MKO10032817_A_Myeov2
  gRNA
ctccaggctggaggtagcac

SEQ ID NO: 32818 - DNA, 20 bp, Artificial Sequence
  MKO10032818_A_Myf5
  gRNA
cgtgatccgatccacaatgc

SEQ ID NO: 32819 - DNA, 20 bp, Artificial Sequence
  MKO10032819_A_Myf5
  gRNA
ggcggccttgcgccgatcca

SEQ ID NO: 32820 - DNA, 20 bp, Artificial Sequence
  MKO10032820_A_Myf5
  gRNA
aagctttcgagacgctcaag

SEQ ID NO: 32821 - DNA, 20 bp, Artificial Sequence
  MKO10032821_A_Myf6
  gRNA
aagcagctaccctgcgcgaa

SEQ ID NO: 32822 - DNA, 20 bp, Artificial Sequence
  MKO10032822_A_Myf6
  gRNA
cagctacattgagcgtctac

SEQ ID NO: 32823 - DNA, 20 bp, Artificial Sequence
  MKO10032823_A_Myf6
  gRNA
caagtgtttcggatcattcc

SEQ ID NO: 32824 - DNA, 20 bp, Artificial Sequence
  MKO10032824_A_Myg1
  gRNA
tgggattaagccgagcaacc

SEQ ID NO: 32825 - DNA, 20 bp, Artificial Sequence
  MKO10032825_A_Myg1
  gRNA
gcacttcggacgtaagctcc

SEQ ID NO: 32826 - DNA, 20 bp, Artificial Sequence
  MKO10032826_A_Myg1
  gRNA
gtggtggtcatggcataccg

SEQ ID NO: 32827 - DNA, 20 bp, Artificial Sequence
  MKO10032827_A_Myh10
  gRNA
cttacgtgcatagaattgac

SEQ ID NO: 32828 - DNA, 20 bp, Artificial Sequence
  MKO10032828_A_Myh10
  gRNA
ctttgtgagaagaagcaacg

SEQ ID NO: 32829 - DNA, 20 bp, Artificial Sequence
  MKO10032829_A_Myh10
  gRNA
cacgttgcttcttctcacaa

SEQ ID NO: 32830 - DNA, 20 bp, Artificial Sequence
  MKO10032830_A_Myh11
  gRNA
catctactcagaaaagatcg

SEQ ID NO: 32831 - DNA, 20 bp, Artificial Sequence
  MKO10032831_A_Myh11
  gRNA
agaggagttgtcgttcttga

SEQ ID NO: 32832 - DNA, 20 bp, Artificial Sequence
  MKO10032832_A_Myh11
  gRNA
tcgcattgccgaaagcctcc

SEQ ID NO: 32833 - DNA, 20 bp, Artificial Sequence
  MKO10032833_A_Myh13
  gRNA
gctaactcacgtgatcaaga

SEQ ID NO: 32834 - DNA, 20 bp, Artificial Sequence
  MKO10032834_A_Myh13
  gRNA
ccctaagtttgacaagatcg

SEQ ID NO: 32835 - DNA, 20 bp, Artificial Sequence
  MKO10032835_A_Myh13
  gRNA
ttaattgacagtggagaatc

SEQ ID NO: 32836 - DNA, 20 bp, Artificial Sequence
  MKO10032836_A_Myh14
  gRNA
cgcgtaccgcagcatgcttc

SEQ ID NO: 32837 - DNA, 20 bp, Artificial Sequence
  MKO10032837_A_Myh14
  gRNA
aacaatggcctccgtgtaga

SEQ ID NO: 32838 - DNA, 20 bp, Artificial Sequence
  MKO10032838_A_Myh14
  gRNA
attgccaaaggcttctagga

SEQ ID NO: 32839 - DNA, 20 bp, Artificial Sequence
  MKO10032839_A_Myh15
  gRNA
catacgtgaagactatagac

SEQ ID NO: 32840 - DNA, 20 bp, Artificial Sequence
  MKO10032840_A_Myh15
  gRNA
gttaaagaaagcggtgatga

SEQ ID NO: 32841 - DNA, 20 bp, Artificial Sequence
  MKO10032841_A_Myh15
  gRNA
tacatacatagatcatccaa

SEQ ID NO: 32842 - DNA, 20 bp, Artificial Sequence
  MKO10032842_A_Myh1
  gRNA
tcgttggacagcggagaatc

SEQ ID NO: 32843 - DNA, 20 bp, Artificial Sequence
  MKO10032843_A_Myh1
  gRNA
gccagtgtataacgcagagg

SEQ ID NO: 32844 - DNA, 20 bp, Artificial Sequence
  MKO10032844_A_Myh1
  gRNA
accacctctgcgttatacac

SEQ ID NO: 32845 - DNA, 20 bp, Artificial Sequence
  MKO10032845_A_Myh2
  gRNA
tcaccgtcaacccttacaaa

SEQ ID NO: 32846 - DNA, 20 bp, Artificial Sequence
  MKO10032846_A_Myh2
  gRNA
tgacttaacagcggagaatc

SEQ ID NO: 32847 - DNA, 20 bp, Artificial Sequence
  MKO10032847_A_Myh2
  gRNA
gagggttcatggggaagatc

SEQ ID NO: 32848 - DNA, 20 bp, Artificial Sequence
  MKO10032848_A_Myh3
  gRNA
cttctaaatagcggagaatc

SEQ ID NO: 32849 - DNA, 20 bp, Artificial Sequence
  MKO10032849_A_Myh3
  gRNA
ttcatggcatacacgtcctc

SEQ ID NO: 32850 - DNA, 20 bp, Artificial Sequence
  MKO10032850_A_Myh3
  gRNA
ctcacgtgatcaggatagac

SEQ ID NO: 32851 - DNA, 20 bp, Artificial Sequence
  MKO10032851_A_Myh4
  gRNA
gtctacttacgtaatcagga

SEQ ID NO: 32852 - DNA, 20 bp, Artificial Sequence
  MKO10032852_A_Myh4
  gRNA
ttaacagacggtcaccgtca

SEQ ID NO: 32853 - DNA, 20 bp, Artificial Sequence
  MKO10032853_A_Myh4
  gRNA
ctgtccctcagtggagaatc

SEQ ID NO: 32854 - DNA, 20 bp, Artificial Sequence
  MKO10032854_A_Myh6
  gRNA
tctccagacggtgaccataa

SEQ ID NO: 32855 - DNA, 20 bp, Artificial Sequence
  MKO10032855_A_Myh6
  gRNA
caacctcaaggagcgctacg

SEQ ID NO: 32856 - DNA, 20 bp, Artificial Sequence
  MKO10032856_A_Myh6
  gRNA
gttgcctcaagcggagaatc

SEQ ID NO: 32857 - DNA, 20 bp, Artificial Sequence
  MKO10032857_A_Myh7b
  gRNA
catgatgacgcacctcaacg

SEQ ID NO: 32858 - DNA, 20 bp, Artificial Sequence
  MKO10032858_A_Myh7b
  gRNA
caagggcaagcgtcgctccg

SEQ ID NO: 32859 - DNA, 20 bp, Artificial Sequence
  MKO10032859_A_Myh7b
  gRNA
cccaccccgtttcgacttac

SEQ ID NO: 32860 - DNA, 20 bp, Artificial Sequence
  MKO10032860_A_Myh7
  gRNA
tcaaggagcgctacgcttcc

SEQ ID NO: 32861 - DNA, 20 bp, Artificial Sequence
  MKO10032861_A_Myh7
  gRNA
tttgctgttattgccgccat

SEQ ID NO: 32862 - DNA, 20 bp, Artificial Sequence
  MKO10032862_A_Myh7
  gRNA
ctatactcacgtgatgagga

SEQ ID NO: 32863 - DNA, 20 bp, Artificial Sequence
  MKO10032863_A_Myh8
  gRNA
agtcacatacgtgatcagga

SEQ ID NO: 32864 - DNA, 20 bp, Artificial Sequence
  MKO10032864_A_Myh8
  gRNA
gtcctcgatcttgtcatatt

SEQ ID NO: 32865 - DNA, 20 bp, Artificial Sequence
  MKO10032865_A_Myh8
  gRNA
ttaccagactctcaccgtca

SEQ ID NO: 32866 - DNA, 20 bp, Artificial Sequence
  MKO10032866_A_Myh9
  gRNA
tctgttggcaggggggagtc

SEQ ID NO: 32867 - DNA, 20 bp, Artificial Sequence
  MKO10032867_A_Myh9
  gRNA
gctcaccctgcatcatgctc

SEQ ID NO: 32868 - DNA, 20 bp, Artificial Sequence
  MKO10032868_A_Myh9
  gRNA
tatctgtgatggcgtagatg

SEQ ID NO: 32869 - DNA, 20 bp, Artificial Sequence
  MKO10032869_A_Myl10
  gRNA
taaggaaaagcttatgacgc

SEQ ID NO: 32870 - DNA, 20 bp, Artificial Sequence
  MKO10032870_A_Myl10
  gRNA
tcgcataaatgtcaagaacg

SEQ ID NO: 32871 - DNA, 20 bp, Artificial Sequence
  MKO10032871_A_Myl10
  gRNA
cgtgcagtatagtctcttct

SEQ ID NO: 32872 - DNA, 20 bp, Artificial Sequence
  MKO10032872_A_Myl12a
  gRNA
cgtccaggtattcgtcagtt

SEQ ID NO: 32873 - DNA, 20 bp, Artificial Sequence
  MKO10032873_A_Myl12a
  gRNA
ttatcctccaggcaccatcc

SEQ ID NO: 32874 - DNA, 20 bp, Artificial Sequence
  MKO10032874_A_Myl12a
  gRNA
aaacccaactgacgaatacc

SEQ ID NO: 32875 - DNA, 20 bp, Artificial Sequence
  MKO10032875_A_Myl12b
  gRNA
ttgccctccaggcaccatcc

SEQ ID NO: 32876 - DNA, 20 bp, Artificial Sequence
  MKO10032876_A_Myl12b
  gRNA
gaatcccactgatgcctacc

SEQ ID NO: 32877 - DNA, 20 bp, Artificial Sequence
  MKO10032877_A_Myl12b
  gRNA
gctaaacggcactgaccccg

SEQ ID NO: 32878 - DNA, 20 bp, Artificial Sequence
  MKO10032878_A_Myl1
  gRNA
agcccttacccagagtggcg

SEQ ID NO: 32879 - DNA, 20 bp, Artificial Sequence
  MKO10032879_A_Myl1
  gRNA
gtttcttgcagacttcaagg

SEQ ID NO: 32880 - DNA, 20 bp, Artificial Sequence
  MKO10032880_A_Myl1
  gRNA
ttccccaggagagaagatga

SEQ ID NO: 32881 - DNA, 20 bp, Artificial Sequence
  MKO10032881_A_Myl2
  gRNA
cgatgaagccgtctctgttc

SEQ ID NO: 32882 - DNA, 20 bp, Artificial Sequence
  MKO10032882_A_Myl2
  gRNA
gaccattctcaacgcattca

SEQ ID NO: 32883 - DNA, 20 bp, Artificial Sequence
  MKO10032883_A_Myl2
  gRNA
cccgccttctatccgcttct

SEQ ID NO: 32884 - DNA, 20 bp, Artificial Sequence
  MKO10032884_A_Myl3
  gRNA
tgtgatcttcatctcgccct

SEQ ID NO: 32885 - DNA, 20 bp, Artificial Sequence
  MKO10032885_A_Myl3
  gRNA
gctgttcgaccgcacaccca

SEQ ID NO: 32886 - DNA, 20 bp, Artificial Sequence
  MKO10032886_A_Myl3
  gRNA
ccagcgtggccagcacgtgt

SEQ ID NO: 32887 - DNA, 20 bp, Artificial Sequence
  MKO10032887_A_Myl4
  gRNA
aacgcgcagcacctctgcgt

SEQ ID NO: 32888 - DNA, 20 bp, Artificial Sequence
  MKO10032888_A_Myl4
  gRNA
ttcagtgctgaccagatcga

SEQ ID NO: 32889 - DNA, 20 bp, Artificial Sequence
  MKO10032889_A_Myl4
  gRNA
attgtttgaccggactccaa

SEQ ID NO: 32890 - DNA, 20 bp, Artificial Sequence
  MKO10032890_A_Myl6b
  gRNA
acgtctcaaagtctacacgt

SEQ ID NO: 32891 - DNA, 20 bp, Artificial Sequence
  MKO10032891_A_Myl6b
  gRNA
tttgagctgtttgaccgagt

SEQ ID NO: 32892 - DNA, 20 bp, Artificial Sequence
  MKO10032892_A_Myl6b
  gRNA
cctggggaaccccaaaaacg

SEQ ID NO: 32893 - DNA, 20 bp, Artificial Sequence
  MKO10032893_A_Myl6
  gRNA
gacccttacccagtgtgact

SEQ ID NO: 32894 - DNA, 20 bp, Artificial Sequence
  MKO10032894_A_Myl6
  gRNA
cgagcagtgtgacttcaccg

SEQ ID NO: 32895 - DNA, 20 bp, Artificial Sequence
  MKO10032895_A_Myl6
  gRNA
cctacctgcggtctggtcct

SEQ ID NO: 32896 - DNA, 20 bp, Artificial Sequence
  MKO10032896_A_Myl7
  gRNA
ccctccagggacggaccccg

SEQ ID NO: 32897 - DNA, 20 bp, Artificial Sequence
  MKO10032897_A_Myl7
  gRNA
gctggggtcgaacatgcgga

SEQ ID NO: 32898 - DNA, 20 bp, Artificial Sequence
  MKO10032898_A_Myl7
  gRNA
gttcgaacaagcccagattc

SEQ ID NO: 32899 - DNA, 20 bp, Artificial Sequence
  MKO10032899_A_Myl9
  gRNA
cgaccgattcacggatgagg

SEQ ID NO: 32900 - DNA, 20 bp, Artificial Sequence
  MKO10032900_A_Myl9
  gRNA
cgaggcacccattgataaga

SEQ ID NO: 32901 - DNA, 20 bp, Artificial Sequence
  MKO10032901_A_Myl9
  gRNA
gccctccagatactcgtctg

SEQ ID NO: 32902 - DNA, 20 bp, Artificial Sequence
  MKO10032902_A_Mylip
  gRNA
cagcatcgttgcgaagcata

SEQ ID NO: 32903 - DNA, 20 bp, Artificial Sequence
  MKO10032903_A_Mylip
  gRNA
caccttaccgccttaaactg

SEQ ID NO: 32904 - DNA, 20 bp, Artificial Sequence
  MKO10032904_A_Mylip
  gRNA
gatggctcggtagaggccgc

SEQ ID NO: 32905 - DNA, 20 bp, Artificial Sequence
  MKO10032905_A_Mylk2
  gRNA
gcagcagaatgccgcgaagc

SEQ ID NO: 32906 - DNA, 20 bp, Artificial Sequence
  MKO10032906_A_Mylk2
  gRNA
taccgttctagtggcaaatt

SEQ ID NO: 32907 - DNA, 20 bp, Artificial Sequence
  MKO10032907_A_Mylk2
  gRNA
acaacagacctcgtctttac

SEQ ID NO: 32908 - DNA, 20 bp, Artificial Sequence
  MKO10032908_A_Mylk3
  gRNA
gccttcccacagcgtcctag

SEQ ID NO: 32909 - DNA, 20 bp, Artificial Sequence
  MKO10032909_A_Mylk3
  gRNA
agcaatcgacagaatcagcg

SEQ ID NO: 32910 - DNA, 20 bp, Artificial Sequence
  MKO10032910_A_Mylk3
  gRNA
gtgtgcaagctgacgcctct

SEQ ID NO: 32911 - DNA, 20 bp, Artificial Sequence
  MKO10032911_A_Mylk4
  gRNA
attaccatccgatgatcaaa

SEQ ID NO: 32912 - DNA, 20 bp, Artificial Sequence
  MKO10032912_A_Mylk4
  gRNA
gatcagcgtcatgaaccagc

SEQ ID NO: 32913 - DNA, 20 bp, Artificial Sequence
  MKO10032913_A_Mylk4
  gRNA
ctgccgctccatttgatcat

SEQ ID NO: 32914 - DNA, 20 bp, Artificial Sequence
  MKO10032914_A_Mylk
  gRNA
tggcgcccgccaggtgaccg

SEQ ID NO: 32915 - DNA, 20 bp, Artificial Sequence
  MKO10032915_A_Mylk
  gRNA
gggagactcgtcctagcatc

SEQ ID NO: 32916 - DNA, 20 bp, Artificial Sequence
  MKO10032916_A_Mylk
  gRNA
tgtcatccacactgtccgcg

SEQ ID NO: 32917 - DNA, 20 bp, Artificial Sequence
  MKO10032917_A_Mylpf
  gRNA
ttatcgacaaagaggatctt

SEQ ID NO: 32918 - DNA, 20 bp, Artificial Sequence
  MKO10032918_A_Mylpf
  gRNA
tgtccctgcaggtgcggacc

SEQ ID NO: 32919 - DNA, 20 bp, Artificial Sequence
  MKO10032919_A_Mylpf
  gRNA
tcactgtaattgatcagaac

SEQ ID NO: 32920 - DNA, 20 bp, Artificial Sequence
  MKO10032920_A_Mynn
  gRNA
cgcgctctctagaacgtcac

SEQ ID NO: 32921 - DNA, 20 bp, Artificial Sequence
  MKO10032921_A_Mynn
  gRNA
cccgattgttataatctcgc

SEQ ID NO: 32922 - DNA, 20 bp, Artificial Sequence
  MKO10032922_A_Mynn
  gRNA
caccatgatgcatgcgacta

SEQ ID NO: 32923 - DNA, 20 bp, Artificial Sequence
  MKO10032923_A_Myo10
  gRNA
ggggttcactgacgcgatga

SEQ ID NO: 32924 - DNA, 20 bp, Artificial Sequence
  MKO10032924_A_Myo10
  gRNA
cctgtacgagcgcgccacca

SEQ ID NO: 32925 - DNA, 20 bp, Artificial Sequence
  MKO10032925_A_Myo10
  gRNA
gcgctcgctacctgctttga

SEQ ID NO: 32926 - DNA, 20 bp, Artificial Sequence
  MKO10032926_A_Myo15
  gRNA
tagattgcaaacattcgata

SEQ ID NO: 32927 - DNA, 20 bp, Artificial Sequence
  MKO10032927_A_Myo15
  gRNA
gatgaggtttcgctcaaatc

SEQ ID NO: 32928 - DNA, 20 bp, Artificial Sequence
  MKO10032928_A_Myo15
  gRNA
ctttaggttggctagcacag

SEQ ID NO: 32929 - DNA, 20 bp, Artificial Sequence
  MKO10032929_A_Myo16
  gRNA
ccctttagattatgccgttg

SEQ ID NO: 32930 - DNA, 20 bp, Artificial Sequence
  MKO10032930_A_Myo16
  gRNA
ttatctggcgcagcgagctg

SEQ ID NO: 32931 - DNA, 20 bp, Artificial Sequence
  MKO10032931_A_Myo16
  gRNA
tgacgtccgttagcatactc

SEQ ID NO: 32932 - DNA, 20 bp, Artificial Sequence
  MKO10032932_A_Myo18a
  gRNA
gcagtatctggctaccatcg

SEQ ID NO: 32933 - DNA, 20 bp, Artificial Sequence
  MKO10032933_A_Myo18a
  gRNA
catacactgcgccagcgcta

SEQ ID NO: 32934 - DNA, 20 bp, Artificial Sequence
  MKO10032934_A_Myo18a
  gRNA
ctcgttgaggtataccagtg

SEQ ID NO: 32935 - DNA, 20 bp, Artificial Sequence
  MKO10032935_A_Myo18b
  gRNA
tctgctgatatccccgttgt

SEQ ID NO: 32936 - DNA, 20 bp, Artificial Sequence
  MKO10032936_A_Myo18b
  gRNA
tacaacggggatatcagcag

SEQ ID NO: 32937 - DNA, 20 bp, Artificial Sequence
  MKO10032937_A_Myo18b
  gRNA
cagaaggacgggttcacgct

SEQ ID NO: 32938 - DNA, 20 bp, Artificial Sequence
  MKO10032938_A_Myo19
  gRNA
ccaccgcatagaacttcatc

SEQ ID NO: 32939 - DNA, 20 bp, Artificial Sequence
  MKO10032939_A_Myo19
  gRNA
actggttgaccggctcaatc

SEQ ID NO: 32940 - DNA, 20 bp, Artificial Sequence
  MKO10032940_A_Myo19
  gRNA
gagttgagggacgtgcttaa

SEQ ID NO: 32941 - DNA, 20 bp, Artificial Sequence
  MKO10032941_A_Myo1a
  gRNA
taagctagtgatgtcctacg

SEQ ID NO: 32942 - DNA, 20 bp, Artificial Sequence
  MKO10032942_A_Myo1a
  gRNA
gctcatagaaagtatagtcc

SEQ ID NO: 32943 - DNA, 20 bp, Artificial Sequence
  MKO10032943_A_Myo1a
  gRNA
atcgagaggagttgttattg

SEQ ID NO: 32944 - DNA, 20 bp, Artificial Sequence
  MKO10032944_A_Myo1b
  gRNA
catatattcgccggagaaag

SEQ ID NO: 32945 - DNA, 20 bp, Artificial Sequence
  MKO10032945_A_Myo1b
  gRNA
ataggacatgacgagcttgc

SEQ ID NO: 32946 - DNA, 20 bp, Artificial Sequence
  MKO10032946_A_Myo1b
  gRNA
atgaacgtctcctcattgag

SEQ ID NO: 32947 - DNA, 20 bp, Artificial Sequence
  MKO10032947_A_Myo1c
  gRNA
cgcactgcgccaccccgttc

SEQ ID NO: 32948 - DNA, 20 bp, Artificial Sequence
  MKO10032948_A_Myo1c
  gRNA
tcgtactgagcgtcgggacc

SEQ ID NO: 32949 - DNA, 20 bp, Artificial Sequence
  MKO10032949_A_Myo1c
  gRNA
gcgccttgactgcccgagac

SEQ ID NO: 32950 - DNA, 20 bp, Artificial Sequence
  MKO10032950_A_Myo1d
  gRNA
gacactgtcgagcagtataa

SEQ ID NO: 32951 - DNA, 20 bp, Artificial Sequence
  MKO10032951_A_Myo1d
  gRNA
gctgaagtcaaactgcgttt

SEQ ID NO: 32952 - DNA, 20 bp, Artificial Sequence
  MKO10032952_A_Myo1d
  gRNA
atcgtaatgacaattccagc

SEQ ID NO: 32953 - DNA, 20 bp, Artificial Sequence
  MKO10032953_A_Myo1e
  gRNA
tctttccgtagcggtgaaag

SEQ ID NO: 32954 - DNA, 20 bp, Artificial Sequence
  MKO10032954_A_Myo1e
  gRNA
caccactgtgcttgacattg

SEQ ID NO: 32955 - DNA, 20 bp, Artificial Sequence
  MKO10032955_A_Myo1e
  gRNA
agggcagcaaaggcgcctac

SEQ ID NO: 32956 - DNA, 20 bp, Artificial Sequence
  MKO10032956_A_Myo1f
  gRNA
gactcaccgcgccctgatag

SEQ ID NO: 32957 - DNA, 20 bp, Artificial Sequence
  MKO10032957_A_Myo1f
  gRNA
caacctccgcaaacgcttca

SEQ ID NO: 32958 - DNA, 20 bp, Artificial Sequence
  MKO10032958_A_Myo1f
  gRNA
ccctcaccgacaacatgtac

SEQ ID NO: 32959 - DNA, 20 bp, Artificial Sequence
  MKO10032959_A_Myo1g
  gRNA
cgtatccgtgaacccctacc

SEQ ID NO: 32960 - DNA, 20 bp, Artificial Sequence
  MKO10032960_A_Myo1g
  gRNA
accacctcatctttacgccg

SEQ ID NO: 32961 - DNA, 20 bp, Artificial Sequence
  MKO10032961_A_Myo1g
  gRNA
gccaaaggcttcgagcacac

SEQ ID NO: 32962 - DNA, 20 bp, Artificial Sequence
  MKO10032962_A_Myo1h
  gRNA
tgtggaagttccgctcgccg

SEQ ID NO: 32963 - DNA, 20 bp, Artificial Sequence
  MKO10032963_A_Myo1h
  gRNA
atcggagcgcctcgcctccc

SEQ ID NO: 32964 - DNA, 20 bp, Artificial Sequence
  MKO10032964_A_Myo1h
  gRNA
ctccgagcacatcatgcgat

SEQ ID NO: 32965 - DNA, 20 bp, Artificial Sequence
  MKO10032965_A_Myo3a
  gRNA
cccataagttcctttgccga

SEQ ID NO: 32966 - DNA, 20 bp, Artificial Sequence
  MKO10032966_A_Myo3a
  gRNA
actttctgaccacccaaatg

SEQ ID NO: 32967 - DNA, 20 bp, Artificial Sequence
  MKO10032967_A_Myo3a
  gRNA
atcattgaaaccatcggcaa

SEQ ID NO: 32968 - DNA, 20 bp, Artificial Sequence
  MKO10032968_A_Myo3b
  gRNA
ttacaaagccgatcgctgtg

SEQ ID NO: 32969 - DNA, 20 bp, Artificial Sequence
  MKO10032969_A_Myo3b
  gRNA
ggaatcactccccgatccca

SEQ ID NO: 32970 - DNA, 20 bp, Artificial Sequence
  MKO10032970_A_Myo3b
  gRNA
aatcgtctctataatctccc

SEQ ID NO: 32971 - DNA, 20 bp, Artificial Sequence
  MKO10032971_A_Myo5a
  gRNA
tacagttgcgaagtaccgca

SEQ ID NO: 32972 - DNA, 20 bp, Artificial Sequence
  MKO10032972_A_Myo5a
  gRNA
ttgctcaaggattataagcc

SEQ ID NO: 32973 - DNA, 20 bp, Artificial Sequence
  MKO10032973_A_Myo5a
  gRNA
cggaaccctgacatacttgt

SEQ ID NO: 32974 - DNA, 20 bp, Artificial Sequence
  MKO10032974_A_Myo5b
  gRNA
aaaatagcgcatggcgtact

SEQ ID NO: 32975 - DNA, 20 bp, Artificial Sequence
  MKO10032975_A_Myo5b
  gRNA
gccgagcgccacacctcatc

SEQ ID NO: 32976 - DNA, 20 bp, Artificial Sequence
  MKO10032976_A_Myo5b
  gRNA
atgacatcctgtccgtagat

SEQ ID NO: 32977 - DNA, 20 bp, Artificial Sequence
  MKO10032977_A_Myo5c
  gRNA
tgattctccactcacgatta

SEQ ID NO: 32978 - DNA, 20 bp, Artificial Sequence
  MKO10032978_A_Myo5c
  gRNA
gccatcatccacgcctacag

SEQ ID NO: 32979 - DNA, 20 bp, Artificial Sequence
  MKO10032979_A_Myo5c
  gRNA
tctctgcacgctatgccatg

SEQ ID NO: 32980 - DNA, 20 bp, Artificial Sequence
  MKO10032980_A_Myo6
  gRNA
agccagtctatcatcgtatc

SEQ ID NO: 32981 - DNA, 20 bp, Artificial Sequence
  MKO10032981_A_Myo6
  gRNA
tgtaccgaactttgacattg

SEQ ID NO: 32982 - DNA, 20 bp, Artificial Sequence
  MKO10032982_A_Myo6
  gRNA
ctccagatacgatgatagac

SEQ ID NO: 32983 - DNA, 20 bp, Artificial Sequence
  MKO10032983_A_Myo7a
  gRNA
ctccacgccgtgcaccgatg

SEQ ID NO: 32984 - DNA, 20 bp, Artificial Sequence
  MKO10032984_A_Myo7a
  gRNA
gaaaccttctcattcgctac

SEQ ID NO: 32985 - DNA, 20 bp, Artificial Sequence
  MKO10032985_A_Myo7a
  gRNA
cgtggtgaagctctgcgact

SEQ ID NO: 32986 - DNA, 20 bp, Artificial Sequence
  MKO10032986_A_Myo7b
  gRNA
gcattcgtggatcgagcaac

SEQ ID NO: 32987 - DNA, 20 bp, Artificial Sequence
  MKO10032987_A_Myo7b
  gRNA
gttgctcgatccacgaatgc

SEQ ID NO: 32988 - DNA, 20 bp, Artificial Sequence
  MKO10032988_A_Myo7b
  gRNA
gaccttgattgaggatgacg

SEQ ID NO: 32989 - DNA, 20 bp, Artificial Sequence
  MKO10032989_A_Myo9a
  gRNA
gtattctattaccttctcgc

SEQ ID NO: 32990 - DNA, 20 bp, Artificial Sequence
  MKO10032990_A_Myo9a
  gRNA
aataacaattcaagtcgttt

SEQ ID NO: 32991 - DNA, 20 bp, Artificial Sequence
  MKO10032991_A_Myo9a
  gRNA
cctcacttgctcctgcgaga

SEQ ID NO: 32992 - DNA, 20 bp, Artificial Sequence
  MKO10032992_A_Myo9b
  gRNA
gatggtcctttcgacgccac

SEQ ID NO: 32993 - DNA, 20 bp, Artificial Sequence
  MKO10032993_A_Myo9b
  gRNA
gctatgccagtggcgtcgaa

SEQ ID NO: 32994 - DNA, 20 bp, Artificial Sequence
  MKO10032994_A_Myo9b
  gRNA
ccttcttgaaaagtctcgcc

SEQ ID NO: 32995 - DNA, 20 bp, Artificial Sequence
  MKO10032995_A_Myocd
  gRNA
actcacgcggtattaagcct

SEQ ID NO: 32996 - DNA, 20 bp, Artificial Sequence
  MKO10032996_A_Myocd
  gRNA
caggtccgaccgtgccagcc

SEQ ID NO: 32997 - DNA, 20 bp, Artificial Sequence
  MKO10032997_A_Myocd
  gRNA
tgtttctgcccttgcgcctc

SEQ ID NO: 32998 - DNA, 20 bp, Artificial Sequence
  MKO10032998_A_Myoc
  gRNA
cttcgcctacgacactaaaa

SEQ ID NO: 32999 - DNA, 20 bp, Artificial Sequence
  MKO10032999_A_Myoc
  gRNA
tacttgtagcgattcgtgaa

SEQ ID NO: 33000 - DNA, 20 bp, Artificial Sequence
  MKO10033000_A_Myoc
  gRNA
ctaaagccgacttatctcga

SEQ ID NO: 33001 - DNA, 20 bp, Artificial Sequence
  MKO10033001_A_Myod1
  gRNA
ggagatgcgctccactatgc

SEQ ID NO: 33002 - DNA, 20 bp, Artificial Sequence
  MKO10033002_A_Myod1
  gRNA
aacgccatccgctacatcga

SEQ ID NO: 33003 - DNA, 20 bp, Artificial Sequence
  MKO10033003_A_Myod1
  gRNA
agcttctatcgccgccactc

SEQ ID NO: 33004 - DNA, 20 bp, Artificial Sequence
  MKO10033004_A_Myof
  gRNA
gtggggtatagccgatcacc

SEQ ID NO: 33005 - DNA, 20 bp, Artificial Sequence
  MKO10033005_A_Myof
  gRNA
ctggtcccgctcggatcatt

SEQ ID NO: 33006 - DNA, 20 bp, Artificial Sequence
  MKO10033006_A_Myof
  gRNA
tgtagggcaaagacctgttc

SEQ ID NO: 33007 - DNA, 20 bp, Artificial Sequence
  MKO10033007_A_Myog
  gRNA
ccagtacattgagcgcctac

SEQ ID NO: 33008 - DNA, 20 bp, Artificial Sequence
  MKO10033008_A_Myog
  gRNA
gcactcccttacgtccatcg

SEQ ID NO: 33009 - DNA, 20 bp, Artificial Sequence
  MKO10033009_A_Myog
  gRNA
gagcgcgatctccgctacag

SEQ ID NO: 33010 - DNA, 20 bp, Artificial Sequence
  MKO10033010_A_Myom1
  gRNA
caaacataccacgtgagccg

SEQ ID NO: 33011 - DNA, 20 bp, Artificial Sequence
  MKO10033011_A_Myom1
  gRNA
cgtggtccgtttggaggttg

SEQ ID NO: 33012 - DNA, 20 bp, Artificial Sequence
  MKO10033012_A_Myom1
  gRNA
cacgtccacccttcaacgag

SEQ ID NO: 33013 - DNA, 20 bp, Artificial Sequence
  MKO10033013_A_Myom2
  gRNA
tcttaggtaccggtctcaag

SEQ ID NO: 33014 - DNA, 20 bp, Artificial Sequence
  MKO10033014_A_Myom2
  gRNA
cgtaagaagccgcttgagac

SEQ ID NO: 33015 - DNA, 20 bp, Artificial Sequence
  MKO10033015_A_Myom2
  gRNA
gcaagtaccggattgagagc

SEQ ID NO: 33016 - DNA, 20 bp, Artificial Sequence
  MKO10033016_A_Myom3
  gRNA
cgcttcgatcgcatgccgtc

SEQ ID NO: 33017 - DNA, 20 bp, Artificial Sequence
  MKO10033017_A_Myom3
  gRNA
gcccgtagttgttggtgata

SEQ ID NO: 33018 - DNA, 20 bp, Artificial Sequence
  MKO10033018_A_Myom3
  gRNA
gaactgatcgagttgtgctc

SEQ ID NO: 33019 - DNA, 20 bp, Artificial Sequence
  MKO10033019_A_Myot
  gRNA
tcaacgcttctttcgatcct

SEQ ID NO: 33020 - DNA, 20 bp, Artificial Sequence
  MKO10033020_A_Myot
  gRNA
agaaaacatgtcgatcgaag

SEQ ID NO: 33021 - DNA, 20 bp, Artificial Sequence
  MKO10033021_A_Myot
  gRNA
gcgagccatcttctcctcgt

SEQ ID NO: 33022 - DNA, 20 bp, Artificial Sequence
  MKO10033022_A_Myoz1
  gRNA
ggcattgacctactggcata

SEQ ID NO: 33023 - DNA, 20 bp, Artificial Sequence
  MKO10033023_A_Myoz1
  gRNA
ctgtcccttcttaccaaccg

SEQ ID NO: 33024 - DNA, 20 bp, Artificial Sequence
  MKO10033024_A_Myoz1
  gRNA
acccccatggcccgatccca

SEQ ID NO: 33025 - DNA, 20 bp, Artificial Sequence
  MKO10033025_A_Myoz2
  gRNA
ctaagtactaccggtctcca

SEQ ID NO: 33026 - DNA, 20 bp, Artificial Sequence
  MKO10033026_A_Myoz2
  gRNA
atttggggggcttcgtggat

SEQ ID NO: 33027 - DNA, 20 bp, Artificial Sequence
  MKO10033027_A_Myoz2
  gRNA
aagcatcgtctgcccgaaag

SEQ ID NO: 33028 - DNA, 20 bp, Artificial Sequence
  MKO10033028_A_Myoz3
  gRNA
ctccgagacgcacgtgttcc

SEQ ID NO: 33029 - DNA, 20 bp, Artificial Sequence
  MKO10033029_A_Myoz3
  gRNA
acacgtgcgtctcggagtgg

SEQ ID NO: 33030 - DNA, 20 bp, Artificial Sequence
  MKO10033030_A_Myoz3
  gRNA
atcctggcgagtagtgcccg

SEQ ID NO: 33031 - DNA, 20 bp, Artificial Sequence
  MKO10033031_A_Mypn
  gRNA
tcactcactgaccatcgccg

SEQ ID NO: 33032 - DNA, 20 bp, Artificial Sequence
  MKO10033032_A_Mypn
  gRNA
actctgggctgggccgccaa

SEQ ID NO: 33033 - DNA, 20 bp, Artificial Sequence
  MKO10033033_A_Mypn
  gRNA
gcctgcacaatgtggatatc

SEQ ID NO: 33034 - DNA, 20 bp, Artificial Sequence
  MKO10033034_A_Mypop
  gRNA
ccgcgtgccgcattccacgc

SEQ ID NO: 33035 - DNA, 20 bp, Artificial Sequence
  MKO10033035_A_Mypop
  gRNA
cgacttcaagcgccgcacca

SEQ ID NO: 33036 - DNA, 20 bp, Artificial Sequence
  MKO10033036_A_Mypop
  gRNA
aggagactgccaatgctatc

SEQ ID NO: 33037 - DNA, 20 bp, Artificial Sequence
  MKO10033037_A_Myrfl
  gRNA
aagagcaactcgtccccaac

SEQ ID NO: 33038 - DNA, 20 bp, Artificial Sequence
  MKO10033038_A_Myrfl
  gRNA
cttcaagcagactcgtatcc

SEQ ID NO: 33039 - DNA, 20 bp, Artificial Sequence
  MKO10033039_A_Myrfl
  gRNA
ttatgctttacccaggaacg

SEQ ID NO: 33040 - DNA, 20 bp, Artificial Sequence
  MKO10033040_A_Myrf
  gRNA
tcatgtagaggtcccgttgc

SEQ ID NO: 33041 - DNA, 20 bp, Artificial Sequence
  MKO10033041_A_Myrf
  gRNA
atggcagcataagggggtac

SEQ ID NO: 33042 - DNA, 20 bp, Artificial Sequence
  MKO10033042_A_Myrf
  gRNA
ggaccatcccctgggcgcca

SEQ ID NO: 33043 - DNA, 20 bp, Artificial Sequence
  MKO10033043_A_Myrip
  gRNA
gaagtgactccacgttctac

SEQ ID NO: 33044 - DNA, 20 bp, Artificial Sequence
  MKO10033044_A_Myrip
  gRNA
agcagcgctccacgaacttc

SEQ ID NO: 33045 - DNA, 20 bp, Artificial Sequence
  MKO10033045_A_Myrip
  gRNA
cccatagcttctcgtgcttc

SEQ ID NO: 33046 - DNA, 20 bp, Artificial Sequence
  MKO10033046_A_Mysm1
  gRNA
atcactatcttgattcaacg

SEQ ID NO: 33047 - DNA, 20 bp, Artificial Sequence
  MKO10033047_A_Mysm1
  gRNA
aaaattctgggttaatcaaa

SEQ ID NO: 33048 - DNA, 20 bp, Artificial Sequence
  MKO10033048_A_Mysm1
  gRNA
tatcattgagaaaatgctgt

SEQ ID NO: 33049 - DNA, 20 bp, Artificial Sequence
  MKO10033049_A_Myt1l
  gRNA
cgccatcgcacacggtccaa

SEQ ID NO: 33050 - DNA, 20 bp, Artificial Sequence
  MKO10033050_A_Myt1l
  gRNA
ctcataacattcgtctactg

SEQ ID NO: 33051 - DNA, 20 bp, Artificial Sequence
  MKO10033051_A_Myt1l
  gRNA
ttcgcttgggagcaggttct

SEQ ID NO: 33052 - DNA, 20 bp, Artificial Sequence
  MKO10033052_A_Myt1
  gRNA
atgacaagcgagcccgcaca

SEQ ID NO: 33053 - DNA, 20 bp, Artificial Sequence
  MKO10033053_A_Myt1
  gRNA
ggcctcataccttcgatgtc

SEQ ID NO: 33054 - DNA, 20 bp, Artificial Sequence
  MKO10033054_A_Myt1
  gRNA
gcaagtactccagacatcga

SEQ ID NO: 33055 - DNA, 20 bp, Artificial Sequence
  MKO10033055_A_Myzap
  gRNA
gaagatccgacagctcaccc

SEQ ID NO: 33056 - DNA, 20 bp, Artificial Sequence
  MKO10033056_A_Myzap
  gRNA
tgatgccaatgccgcattca

SEQ ID NO: 33057 - DNA, 20 bp, Artificial Sequence
  MKO10033057_A_Myzap
  gRNA
atggactcaccgacaggtcc

SEQ ID NO: 33058 - DNA, 20 bp, Artificial Sequence
  MKO10033058_A_Mzb1
  gRNA
atctatgaagcctaccgcca

SEQ ID NO: 33059 - DNA, 20 bp, Artificial Sequence
  MKO10033059_A_Mzb1
  gRNA
gcagcgcctccagattcgct

SEQ ID NO: 33060 - DNA, 20 bp, Artificial Sequence
  MKO10033060_A_Mzb1
  gRNA
gcatcgcagcgcaggtgagc

SEQ ID NO: 33061 - DNA, 20 bp, Artificial Sequence
  MKO10033061_A_Mzf1
  gRNA
tctagcagcacggcgcgtcg

SEQ ID NO: 33062 - DNA, 20 bp, Artificial Sequence
  MKO10033062_A_Mzf1
  gRNA
ggcgcgtgagcttgagtcgc

SEQ ID NO: 33063 - DNA, 20 bp, Artificial Sequence
  MKO10033063_A_Mzf1
  gRNA
tcaggctcagtgtcgctatg

SEQ ID NO: 33064 - DNA, 20 bp, Artificial Sequence
  MKO10033064_A_Mzt1
  gRNA
tggtctccctcaccgcgttc

SEQ ID NO: 33065 - DNA, 20 bp, Artificial Sequence
  MKO10033065_A_Mzt1
  gRNA
ctctccatggcgagcggtag

SEQ ID NO: 33066 - DNA, 20 bp, Artificial Sequence
  MKO10033066_A_Mzt1
  gRNA
ctccttaataacagacgata

SEQ ID NO: 33067 - DNA, 20 bp, Artificial Sequence
  MKO10033067_A_Mzt2
  gRNA
ggctatacgaatggcggcgg

SEQ ID NO: 33068 - DNA, 20 bp, Artificial Sequence
  MKO10033068_A_Mzt2
  gRNA
gcttcggcggaagaaagtgc

SEQ ID NO: 33069 - DNA, 20 bp, Artificial Sequence
  MKO10033069_A_Mzt2
  gRNA
tcagcatctggaagacggcg

SEQ ID NO: 33070 - DNA, 20 bp, Artificial Sequence
  MKO10033070_A_N28178
  gRNA
cgatggttgcctgcgccgca

SEQ ID NO: 33071 - DNA, 20 bp, Artificial Sequence
  MKO10033071_A_N28178
  gRNA
tgcggcgcaggcaaccatcg

SEQ ID NO: 33072 - DNA, 20 bp, Artificial Sequence
  MKO10033072_A_N28178
  gRNA
aacaacggggtcacgtagag

SEQ ID NO: 33073 - DNA, 20 bp, Artificial Sequence
  MKO10033073_A_N4bp1
  gRNA
ctcaagttgtactgtcgacc

SEQ ID NO: 33074 - DNA, 20 bp, Artificial Sequence
  MKO10033074_A_N4bp1
  gRNA
tctacaaatctaagccccga

SEQ ID NO: 33075 - DNA, 20 bp, Artificial Sequence
  MKO10033075_A_N4bp1
  gRNA
taggtttctactgcacttag

SEQ ID NO: 33076 - DNA, 20 bp, Artificial Sequence
  MKO10033076_A_N4bp2l1
  gRNA
aggaacagcgaaccgtccag

SEQ ID NO: 33077 - DNA, 20 bp, Artificial Sequence
  MKO10033077_A_N4bp2l1
  gRNA
taatggcctctactccaacg

SEQ ID NO: 33078 - DNA, 20 bp, Artificial Sequence
  MKO10033078_A_N4bp2l1
  gRNA
tcaacgttcaagagttagca

SEQ ID NO: 33079 - DNA, 20 bp, Artificial Sequence
  MKO10033079_A_N4bp2l2
  gRNA
attcgtagcgatccagcatc

SEQ ID NO: 33080 - DNA, 20 bp, Artificial Sequence
  MKO10033080_A_N4bp2l2
  gRNA
cacctctgctccccctcgag

SEQ ID NO: 33081 - DNA, 20 bp, Artificial Sequence
  MKO10033081_A_N4bp2l2
  gRNA
aggtacaatgttaatcaact

SEQ ID NO: 33082 - DNA, 20 bp, Artificial Sequence
  MKO10033082_A_N4bp2
  gRNA
gtgcatacgcttctgacgac

SEQ ID NO: 33083 - DNA, 20 bp, Artificial Sequence
  MKO10033083_A_N4bp2
  gRNA
tgcacacaactcaatgcgct

SEQ ID NO: 33084 - DNA, 20 bp, Artificial Sequence
  MKO10033084_A_N4bp2
  gRNA
gtgctgagaatgacgccacc

SEQ ID NO: 33085 - DNA, 20 bp, Artificial Sequence
  MKO10033085_A_N4bp3
  gRNA
cacggcgacctcttcagtag

SEQ ID NO: 33086 - DNA, 20 bp, Artificial Sequence
  MKO10033086_A_N4bp3
  gRNA
ccccgctggaagagtccgac

SEQ ID NO: 33087 - DNA, 20 bp, Artificial Sequence
  MKO10033087_A_N4bp3
  gRNA
ttgtcaaagcgaccccgctc

SEQ ID NO: 33088 - DNA, 20 bp, Artificial Sequence
  MKO10033088_A_N6amt1
  gRNA
ccgcgacgtgtacgagccag

SEQ ID NO: 33089 - DNA, 20 bp, Artificial Sequence
  MKO10033089_A_N6amt1
  gRNA
cgacccacgtgcccgtacaa

SEQ ID NO: 33090 - DNA, 20 bp, Artificial Sequence
  MKO10033090_A_N6amt1
  gRNA
tgtagtgactccgcctgaag

SEQ ID NO: 33091 - DNA, 20 bp, Artificial Sequence
  MKO10033091_A_N6amt2
  gRNA
ctatgcgcagcgattctctc

SEQ ID NO: 33092 - DNA, 20 bp, Artificial Sequence
  MKO10033092_A_N6amt2
  gRNA
tgttacacgaactatgactc

SEQ ID NO: 33093 - DNA, 20 bp, Artificial Sequence
  MKO10033093_A_N6amt2
  gRNA
tcttgccccgagtcagaaac

SEQ ID NO: 33094 - DNA, 20 bp, Artificial Sequence
  MKO10033094_A_Naa10
  gRNA
gtcacctcaccctagcattg

SEQ ID NO: 33095 - DNA, 20 bp, Artificial Sequence
  MKO10033095_A_Naa10
  gRNA
gaagattgtgggctacgtct

SEQ ID NO: 33096 - DNA, 20 bp, Artificial Sequence
  MKO10033096_A_Naa10
  gRNA
ccagtgaggtgatatgtcca

SEQ ID NO: 33097 - DNA, 20 bp, Artificial Sequence
  MKO10033097_A_Naa11
  gRNA
gttctcgatcatcgcccgtg

SEQ ID NO: 33098 - DNA, 20 bp, Artificial Sequence
  MKO10033098_A_Naa11
  gRNA
tggccgtcaagcgctcacac

SEQ ID NO: 33099 - DNA, 20 bp, Artificial Sequence
  MKO10033099_A_Naa11
  gRNA
gcgccggtgtgagcgcttga

SEQ ID NO: 33100 - DNA, 20 bp, Artificial Sequence
  MKO10033100_A_Naa15
  gRNA
acgttaatcctttcatagcc

SEQ ID NO: 33101 - DNA, 20 bp, Artificial Sequence
  MKO10033101_A_Naa15
  gRNA
gcttatgaattggttcgcag

SEQ ID NO: 33102 - DNA, 20 bp, Artificial Sequence
  MKO10033102_A_Naa15
  gRNA
tcgcatttgaatctgcagta

SEQ ID NO: 33103 - DNA, 20 bp, Artificial Sequence
  MKO10033103_A_Naa16
  gRNA
acttcttatcagaacgttgc

SEQ ID NO: 33104 - DNA, 20 bp, Artificial Sequence
  MKO10033104_A_Naa16
  gRNA
tttcagcaaatgataagcga

SEQ ID NO: 33105 - DNA, 20 bp, Artificial Sequence
  MKO10033105_A_Naa16
  gRNA
aacccgaagtttgctgaaca

SEQ ID NO: 33106 - DNA, 20 bp, Artificial Sequence
  MKO10033106_A_Naa20
  gRNA
gcggcgcaatgaccacgctc

SEQ ID NO: 33107 - DNA, 20 bp, Artificial Sequence
  MKO10033107_A_Naa20
  gRNA
tcactcacatgttgttgaag

SEQ ID NO: 33108 - DNA, 20 bp, Artificial Sequence
  MKO10033108_A_Naa20
  gRNA
aaggatacagtttctgtaag

SEQ ID NO: 33109 - DNA, 20 bp, Artificial Sequence
  MKO10033109_A_Naa25
  gRNA
acttacgccggtgcatctct

SEQ ID NO: 33110 - DNA, 20 bp, Artificial Sequence
  MKO10033110_A_Naa25
  gRNA
cttcttgtactcgcccactc

SEQ ID NO: 33111 - DNA, 20 bp, Artificial Sequence
  MKO10033111_A_Naa25
  gRNA
ttctctaccgagagatgcac

SEQ ID NO: 33112 - DNA, 20 bp, Artificial Sequence
  MKO10033112_A_Naa30
  gRNA
cgaggcggcgacctcggcca

SEQ ID NO: 33113 - DNA, 20 bp, Artificial Sequence
  MKO10033113_A_Naa30
  gRNA
gcgaaggcaagaacgcgcct

SEQ ID NO: 33114 - DNA, 20 bp, Artificial Sequence
  MKO10033114_A_Naa30
  gRNA
acgcactgcgacttaaactg

SEQ ID NO: 33115 - DNA, 20 bp, Artificial Sequence
  MKO10033115_A_Naa35
  gRNA
aagatggatgccggtatgat

SEQ ID NO: 33116 - DNA, 20 bp, Artificial Sequence
  MKO10033116_A_Naa35
  gRNA
atcataccggcatccatctt

SEQ ID NO: 33117 - DNA, 20 bp, Artificial Sequence
  MKO10033117_A_Naa35
  gRNA
ctcagcctgcctgaactgat

SEQ ID NO: 33118 - DNA, 20 bp, Artificial Sequence
  MKO10033118_A_Naa40
  gRNA
ttcaagaagtatgaccgcaa

SEQ ID NO: 33119 - DNA, 20 bp, Artificial Sequence
  MKO10033119_A_Naa40
  gRNA
aaatgaccgatgaccgagcc

SEQ ID NO: 33120 - DNA, 20 bp, Artificial Sequence
  MKO10033120_A_Naa40
  gRNA
cggtcatacttcttgaagac

SEQ ID NO: 33121 - DNA, 20 bp, Artificial Sequence
  MKO10033121_A_Naa50
  gRNA
ttccagtagccggatcgagc

SEQ ID NO: 33122 - DNA, 20 bp, Artificial Sequence
  MKO10033122_A_Naa50
  gRNA
tgaagcacatgcgcgtctgc

SEQ ID NO: 33123 - DNA, 20 bp, Artificial Sequence
  MKO10033123_A_Naa50
  gRNA
gttggcgagctagcaaaact

SEQ ID NO: 33124 - DNA, 20 bp, Artificial Sequence
  MKO10033124_A_Naa60
  gRNA
ggtggccgccattgatgtag

SEQ ID NO: 33125 - DNA, 20 bp, Artificial Sequence
  MKO10033125_A_Naa60
  gRNA
gcctggcggtagatcctgtg

SEQ ID NO: 33126 - DNA, 20 bp, Artificial Sequence
  MKO10033126_A_Naa60
  gRNA
atatcacgataccatgagtc

SEQ ID NO: 33127 - DNA, 20 bp, Artificial Sequence
  MKO10033127_A_Naaa
  gRNA
gggtcgtagtgccgcagcat

SEQ ID NO: 33128 - DNA, 20 bp, Artificial Sequence
  MKO10033128_A_Naaa
  gRNA
cccagacttcttgcgcaccg

SEQ ID NO: 33129 - DNA, 20 bp, Artificial Sequence
  MKO10033129_A_Naaa
  gRNA
cacttacgcggaagcctcgt

SEQ ID NO: 33130 - DNA, 20 bp, Artificial Sequence
  MKO10033130_A_Naalad2
  gRNA
tgtcaactacgctcgtactg

SEQ ID NO: 33131 - DNA, 20 bp, Artificial Sequence
  MKO10033131_A_Naalad2
  gRNA
ctttacaaaacttccccatc

SEQ ID NO: 33132 - DNA, 20 bp, Artificial Sequence
  MKO10033132_A_Naalad2
  gRNA
agagaacatcgtaatgaacc

SEQ ID NO: 33133 - DNA, 20 bp, Artificial Sequence
  MKO10033133_A_Naaladl1
  gRNA
cgctggaaggatacagcgac

SEQ ID NO: 33134 - DNA, 20 bp, Artificial Sequence
  MKO10033134_A_Naaladl1
  gRNA
cccgtagcgagtcagagcga

SEQ ID NO: 33135 - DNA, 20 bp, Artificial Sequence
  MKO10033135_A_Naaladl1
  gRNA
cttgcatcctcaaagccgat

SEQ ID NO: 33136 - DNA, 20 bp, Artificial Sequence
  MKO10033136_A_Nab1
  gRNA
tccggcgagcagagccctga

SEQ ID NO: 33137 - DNA, 20 bp, Artificial Sequence
  MKO10033137_A_Nab1
  gRNA
gactcacggccgggctctac

SEQ ID NO: 33138 - DNA, 20 bp, Artificial Sequence
  MKO10033138_A_Nab1
  gRNA
ggatggatttcccgacttcc

SEQ ID NO: 33139 - DNA, 20 bp, Artificial Sequence
  MKO10033139_A_Nab2
  gRNA
cgtagatgacgctgtacttc

SEQ ID NO: 33140 - DNA, 20 bp, Artificial Sequence
  MKO10033140_A_Nab2
  gRNA
cggaagtacagcgtcatcta

SEQ ID NO: 33141 - DNA, 20 bp, Artificial Sequence
  MKO10033141_A_Nab2
  gRNA
cgtgtgttatcccctctgcc

SEQ ID NO: 33142 - DNA, 20 bp, Artificial Sequence
  MKO10033142_A_Nabp1
  gRNA
cctctaggtatgcatcaatg

SEQ ID NO: 33143 - DNA, 20 bp, Artificial Sequence
  MKO10033143_A_Nabp1
  gRNA
atcggagggctcatacagac

SEQ ID NO: 33144 - DNA, 20 bp, Artificial Sequence
  MKO10033144_A_Nabp1
  gRNA
gatattattcggttgaccag

SEQ ID NO: 33145 - DNA, 20 bp, Artificial Sequence
  MKO10033145_A_Nabp2
  gRNA
gggtcccgtggtcgcttgtg

SEQ ID NO: 33146 - DNA, 20 bp, Artificial Sequence
  MKO10033146_A_Nabp2
  gRNA
cgaggttcggacctgtaaag

SEQ ID NO: 33147 - DNA, 20 bp, Artificial Sequence
  MKO10033147_A_Nabp2
  gRNA
tactgccccacaagcgacca

SEQ ID NO: 33148 - DNA, 20 bp, Artificial Sequence
  MKO10033148_A_Nacad
  gRNA
gccccgcatcgtgatgggtg

SEQ ID NO: 33149 - DNA, 20 bp, Artificial Sequence
  MKO10033149_A_Nacad
  gRNA
gggaggtgtcacaataccgc

SEQ ID NO: 33150 - DNA, 20 bp, Artificial Sequence
  MKO10033150_A_Nacad
  gRNA
ggcctcgccaaagaccacgt

SEQ ID NO: 33151 - DNA, 20 bp, Artificial Sequence
  MKO10033151_A_Naca
  gRNA
tctttaggctatgtccaaac

SEQ ID NO: 33152 - DNA, 20 bp, Artificial Sequence
  MKO10033152_A_Naca
  gRNA
acacacctgggcttgctgcg

SEQ ID NO: 33153 - DNA, 20 bp, Artificial Sequence
  MKO10033153_A_Naca
  gRNA
gacggccacgcagcaagccc

SEQ ID NO: 33154 - DNA, 20 bp, Artificial Sequence
  MKO10033154_A_Nacc1
  gRNA
tgtacctcaccggtcaaaga

SEQ ID NO: 33155 - DNA, 20 bp, Artificial Sequence
  MKO10033155_A_Nacc1
  gRNA
gccagcctcgccatcgtggc

SEQ ID NO: 33156 - DNA, 20 bp, Artificial Sequence
  MKO10033156_A_Nacc1
  gRNA
actgtccagtggctttcgtc

SEQ ID NO: 33157 - DNA, 20 bp, Artificial Sequence
  MKO10033157_A_Nacc2
  gRNA
ccgacgcacccatgacgcta

SEQ ID NO: 33158 - DNA, 20 bp, Artificial Sequence
  MKO10033158_A_Nacc2
  gRNA
ctcgccgtgtccgtaagcgc

SEQ ID NO: 33159 - DNA, 20 bp, Artificial Sequence
  MKO10033159_A_Nacc2
  gRNA
tccggggtctacatcacacg

SEQ ID NO: 33160 - DNA, 20 bp, Artificial Sequence
  MKO10033160_A_Nadk2
  gRNA
acgtgcgtggaacgcgccgg

SEQ ID NO: 33161 - DNA, 20 bp, Artificial Sequence
  MKO10033161_A_Nadk2
  gRNA
cggtagcaagtcatgatccg

SEQ ID NO: 33162 - DNA, 20 bp, Artificial Sequence
  MKO10033162_A_Nadk2
  gRNA
cgtactccctccgcttgacc

SEQ ID NO: 33163 - DNA, 20 bp, Artificial Sequence
  MKO10033163_A_Nadk
  gRNA
aagttctgcacgttccgtga

SEQ ID NO: 33164 - DNA, 20 bp, Artificial Sequence
  MKO10033164_A_Nadk
  gRNA
catgtcaaccgttgacttgc

SEQ ID NO: 33165 - DNA, 20 bp, Artificial Sequence
  MKO10033165_A_Nadk
  gRNA
aaacaacatgatcgtgtatg

SEQ ID NO: 33166 - DNA, 20 bp, Artificial Sequence
  MKO10033166_A_Nadsyn1
  gRNA
gggtaaaccagcgcagttcc

SEQ ID NO: 33167 - DNA, 20 bp, Artificial Sequence
  MKO10033167_A_Nadsyn1
  gRNA
aactgcgctggtttaccccc

SEQ ID NO: 33168 - DNA, 20 bp, Artificial Sequence
  MKO10033168_A_Nadsyn1
  gRNA
tgcagttgtagcgaacattc

SEQ ID NO: 33169 - DNA, 20 bp, Artificial Sequence
  MKO10033169_A_Nae1
  gRNA
tataggctgtggggtgatca

SEQ ID NO: 33170 - DNA, 20 bp, Artificial Sequence
  MKO10033170_A_Nae1
  gRNA
gaaccgagctcaagctgcca

SEQ ID NO: 33171 - DNA, 20 bp, Artificial Sequence
  MKO10033171_A_Nae1
  gRNA
gaactaaatagcgatgtctc

SEQ ID NO: 33172 - DNA, 20 bp, Artificial Sequence
  MKO10033172_A_Naf1
  gRNA
tcatctccatctgacaacac

SEQ ID NO: 33173 - DNA, 20 bp, Artificial Sequence
  MKO10033173_A_Naf1
  gRNA
atgcttgaaaccttcccaag

SEQ ID NO: 33174 - DNA, 20 bp, Artificial Sequence
  MKO10033174_A_Naf1
  gRNA
atgacagtatcctcattaac

SEQ ID NO: 33175 - DNA, 20 bp, Artificial Sequence
  MKO10033175_A_Naga
  gRNA
attggtgggcgtgacgcctc

SEQ ID NO: 33176 - DNA, 20 bp, Artificial Sequence
  MKO10033176_A_Naga
  gRNA
aatcccgtgagggaagcgct

SEQ ID NO: 33177 - DNA, 20 bp, Artificial Sequence
  MKO10033177_A_Naga
  gRNA
tgggacggcccgtggcgttc

SEQ ID NO: 33178 - DNA, 20 bp, Artificial Sequence
  MKO10033178_A_Nagk
  gRNA
cacatcctcaccgtccggtg

SEQ ID NO: 33179 - DNA, 20 bp, Artificial Sequence
  MKO10033179_A_Nagk
  gRNA
ggtgcctcaactcctcaatc

SEQ ID NO: 33180 - DNA, 20 bp, Artificial Sequence
  MKO10033180_A_Nagk
  gRNA
gctgactcaccaggcttcga

SEQ ID NO: 33181 - DNA, 20 bp, Artificial Sequence
  MKO10033181_A_Naglu
  gRNA
gagatcgatacgtacttcac

SEQ ID NO: 33182 - DNA, 20 bp, Artificial Sequence
  MKO10033182_A_Naglu
  gRNA
agtacgtatcgatctctgac

SEQ ID NO: 33183 - DNA, 20 bp, Artificial Sequence
  MKO10033183_A_Naglu
  gRNA
gaccccatgtttcccctcat

SEQ ID NO: 33184 - DNA, 20 bp, Artificial Sequence
  MKO10033184_A_Nagpa
  gRNA
cagttcggtatccgacgcga

SEQ ID NO: 33185 - DNA, 20 bp, Artificial Sequence
  MKO10033185_A_Nagpa
  gRNA
tgacgacatcttgttgacgc

SEQ ID NO: 33186 - DNA, 20 bp, Artificial Sequence
  MKO10033186_A_Nagpa
  gRNA
gtcgtgtggctcatccgcaa

SEQ ID NO: 33187 - DNA, 20 bp, Artificial Sequence
  MKO10033187_A_Nags
  gRNA
cagctacggtggcatcgtcg

SEQ ID NO: 33188 - DNA, 20 bp, Artificial Sequence
  MKO10033188_A_Nags
  gRNA
gccaggcgggataccgcctg

SEQ ID NO: 33189 - DNA, 20 bp, Artificial Sequence
  MKO10033189_A_Nags
  gRNA
cccgcaggcggtatcccgcc

SEQ ID NO: 33190 - DNA, 20 bp, Artificial Sequence
  MKO10033190_A_Naif1
  gRNA
aatctttaatcatgggccgg

SEQ ID NO: 33191 - DNA, 20 bp, Artificial Sequence
  MKO10033191_A_Naif1
  gRNA
caagaccgaggtccgtcgca

SEQ ID NO: 33192 - DNA, 20 bp, Artificial Sequence
  MKO10033192_A_Naif1
  gRNA
acagatgatccggcgttctc

SEQ ID NO: 33193 - DNA, 20 bp, Artificial Sequence
  MKO10033193_A_Naip1
  gRNA
gaacaaatccctcatagcct

SEQ ID NO: 33194 - DNA, 20 bp, Artificial Sequence
  MKO10033194_A_Naip1
  gRNA
tcaaagtaagaaatcttcag

SEQ ID NO: 33195 - DNA, 20 bp, Artificial Sequence
  MKO10033195_A_Naip1
  gRNA
accaaagcatcaacagccac

SEQ ID NO: 33196 - DNA, 20 bp, Artificial Sequence
  MKO10033196_A_Naip2
  gRNA
gactggccccacgaatcacc

SEQ ID NO: 33197 - DNA, 20 bp, Artificial Sequence
  MKO10033197_A_Naip2
  gRNA
gttgcccaagcatccaccac

SEQ ID NO: 33198 - DNA, 20 bp, Artificial Sequence
  MKO10033198_A_Naip2
  gRNA
gaccagagcttcaacagccc

SEQ ID NO: 33199 - DNA, 20 bp, Artificial Sequence
  MKO10033199_A_Naip5
  gRNA
cctcgtagctttgaatatac

SEQ ID NO: 33200 - DNA, 20 bp, Artificial Sequence
  MKO10033200_A_Naip5
  gRNA
actagagcttcaacacccac

SEQ ID NO: 33201 - DNA, 20 bp, Artificial Sequence
  MKO10033201_A_Naip5
  gRNA
ccagtatattcaaagctacg

SEQ ID NO: 33202 - DNA, 20 bp, Artificial Sequence
  MKO10033202_A_Naip6
  gRNA
cctcgtagtcttgaatatac

SEQ ID NO: 33203 - DNA, 20 bp, Artificial Sequence
  MKO10033203_A_Naip6
  gRNA
actagagcttcaaaacccac

SEQ ID NO: 33204 - DNA, 20 bp, Artificial Sequence
  MKO10033204_A_Naip6
  gRNA
ccagtatattcaagactacg

SEQ ID NO: 33205 - DNA, 20 bp, Artificial Sequence
  MKO10033205_A_Naip7
  gRNA
cctcgtagtcttgaatatac

SEQ ID NO: 33206 - DNA, 20 bp, Artificial Sequence
  MKO10033206_A_Naip7
  gRNA
gctgagctctctgctcgttt

SEQ ID NO: 33207 - DNA, 20 bp, Artificial Sequence
  MKO10033207_A_Naip7
  gRNA
ccagctgctgacagtgcacg

SEQ ID NO: 33208 - DNA, 20 bp, Artificial Sequence
  MKO10033208_A_Nalcn
  gRNA
atttccgattcgaactgcca

SEQ ID NO: 33209 - DNA, 20 bp, Artificial Sequence
  MKO10033209_A_Nalcn
  gRNA
gggatccgcagcatgcccca

SEQ ID NO: 33210 - DNA, 20 bp, Artificial Sequence
  MKO10033210_A_Nalcn
  gRNA
acaccagcgatccttcacat

SEQ ID NO: 33211 - DNA, 20 bp, Artificial Sequence
  MKO10033211_A_Nampt
  gRNA
cagaggagtctcttcgcaag

SEQ ID NO: 33212 - DNA, 20 bp, Artificial Sequence
  MKO10033212_A_Nampt
  gRNA
cctacttacctcaatccaat

SEQ ID NO: 33213 - DNA, 20 bp, Artificial Sequence
  MKO10033213_A_Nampt
  gRNA
gatgatgtctttaacgaaag

SEQ ID NO: 33214 - DNA, 20 bp, Artificial Sequence
  MKO10033214_A_Nanog
  gRNA
tcactctgcaggttaagacc

SEQ ID NO: 33215 - DNA, 20 bp, Artificial Sequence
  MKO10033215_A_Nanog
  gRNA
tctgaacctgagctataagc

SEQ ID NO: 33216 - DNA, 20 bp, Artificial Sequence
  MKO10033216_A_Nanog
  gRNA
cattgctagtcttcaaccac

SEQ ID NO: 33217 - DNA, 20 bp, Artificial Sequence
  MKO10033217_A_Nanos1
  gRNA
gggcacgagcgccataggcg

SEQ ID NO: 33218 - DNA, 20 bp, Artificial Sequence
  MKO10033218_A_Nanos1
  gRNA
cgtcacttcggccgtggatg

SEQ ID NO: 33219 - DNA, 20 bp, Artificial Sequence
  MKO10033219_A_Nanos1
  gRNA
cgccgcacgtctgctgaaac

SEQ ID NO: 33220 - DNA, 20 bp, Artificial Sequence
  MKO10033220_A_Nanos2
  gRNA
cagtctctctaccgacgcag

SEQ ID NO: 33221 - DNA, 20 bp, Artificial Sequence
  MKO10033221_A_Nanos2
  gRNA
ctgagtttcgcccactgcgt

SEQ ID NO: 33222 - DNA, 20 bp, Artificial Sequence
  MKO10033222_A_Nanos2
  gRNA
tcgccggtggctccacatag

SEQ ID NO: 33223 - DNA, 20 bp, Artificial Sequence
  MKO10033223_A_Nanos3
  gRNA
cagaatgaacataagcgttc

SEQ ID NO: 33224 - DNA, 20 bp, Artificial Sequence
  MKO10033224_A_Nanos3
  gRNA
tccaagctcctaggccgtag

SEQ ID NO: 33225 - DNA, 20 bp, Artificial Sequence
  MKO10033225_A_Nanos3
  gRNA
ctgtccctccactacggcct

SEQ ID NO: 33226 - DNA, 20 bp, Artificial Sequence
  MKO10033226_A_Nanp
  gRNA
ccgaggctatggggctgagt

SEQ ID NO: 33227 - DNA, 20 bp, Artificial Sequence
  MKO10033227_A_Nanp
  gRNA
catgcctctcctgctcgccc

SEQ ID NO: 33228 - DNA, 20 bp, Artificial Sequence
  MKO10033228_A_Nanp
  gRNA
aaaataccactacaaagaag

SEQ ID NO: 33229 - DNA, 20 bp, Artificial Sequence
  MKO10033229_A_Nans
  gRNA
ctcgtgcccggaatacccga

SEQ ID NO: 33230 - DNA, 20 bp, Artificial Sequence
  MKO10033230_A_Nans
  gRNA
cgctcaccgagatgacgcgc

SEQ ID NO: 33231 - DNA, 20 bp, Artificial Sequence
  MKO10033231_A_Nans
  gRNA
gttggaacgtcacataacgt

SEQ ID NO: 33232 - DNA, 20 bp, Artificial Sequence
  MKO10033232_A_Nap1l1
  gRNA
ctatcagcctttatttgata

SEQ ID NO: 33233 - DNA, 20 bp, Artificial Sequence
  MKO10033233_A_Nap1l1
  gRNA
ccccacttacttgtcaatgt

SEQ ID NO: 33234 - DNA, 20 bp, Artificial Sequence
  MKO10033234_A_Nap1l1
  gRNA
ataattaccttatcaaataa

SEQ ID NO: 33235 - DNA, 20 bp, Artificial Sequence
  MKO10033235_A_Nap1l2
  gRNA
cgggcccctccgccattacc

SEQ ID NO: 33236 - DNA, 20 bp, Artificial Sequence
  MKO10033236_A_Nap1l2
  gRNA
gctacgatccccacccttat

SEQ ID NO: 33237 - DNA, 20 bp, Artificial Sequence
  MKO10033237_A_Nap1l2
  gRNA
gagactaacggcaacgaaga

SEQ ID NO: 33238 - DNA, 20 bp, Artificial Sequence
  MKO10033238_A_Nap1l3
  gRNA
actacgacccgttcttcgcg

SEQ ID NO: 33239 - DNA, 20 bp, Artificial Sequence
  MKO10033239_A_Nap1l3
  gRNA
tcccatccccacgcgaagaa

SEQ ID NO: 33240 - DNA, 20 bp, Artificial Sequence
  MKO10033240_A_Nap1l3
  gRNA
gggacgtcgctgggcccttc

SEQ ID NO: 33241 - DNA, 20 bp, Artificial Sequence
  MKO10033241_A_Nap1l4
  gRNA
gcacgcaccttgtcaaatag

SEQ ID NO: 33242 - DNA, 20 bp, Artificial Sequence
  MKO10033242_A_Nap1l4
  gRNA
catagaagctaagttctacg

SEQ ID NO: 33243 - DNA, 20 bp, Artificial Sequence
  MKO10033243_A_Nap1l4
  gRNA
actgcactgacctgtattac

SEQ ID NO: 33244 - DNA, 20 bp, Artificial Sequence
  MKO10033244_A_Nap1l5
  gRNA
agcggcactgtcaccggtcg

SEQ ID NO: 33245 - DNA, 20 bp, Artificial Sequence
  MKO10033245_A_Nap1l5
  gRNA
gaagcgctgcgataagatcg

SEQ ID NO: 33246 - DNA, 20 bp, Artificial Sequence
  MKO10033246_A_Nap1l5
  gRNA
tgcccaattccgtgaaatgc

SEQ ID NO: 33247 - DNA, 20 bp, Artificial Sequence
  MKO10033247_A_Napa
  gRNA
cttgaacatgttcgccgctc

SEQ ID NO: 33248 - DNA, 20 bp, Artificial Sequence
  MKO10033248_A_Napa
  gRNA
tagaggctcatccaaaatag

SEQ ID NO: 33249 - DNA, 20 bp, Artificial Sequence
  MKO10033249_A_Napa
  gRNA
gtaggtgtagttgggcagcc

SEQ ID NO: 33250 - DNA, 20 bp, Artificial Sequence
  MKO10033250_A_Napb
  gRNA
gagctcagtctcatagatct

SEQ ID NO: 33251 - DNA, 20 bp, Artificial Sequence
  MKO10033251_A_Napb
  gRNA
gatctatgagactgagctcg

SEQ ID NO: 33252 - DNA, 20 bp, Artificial Sequence
  MKO10033252_A_Napb
  gRNA
cttgaacatatttgcagctc

SEQ ID NO: 33253 - DNA, 20 bp, Artificial Sequence
  MKO10033253_A_Napepld
  gRNA
cgaaccgctcgttcaacgcc

SEQ ID NO: 33254 - DNA, 20 bp, Artificial Sequence
  MKO10033254_A_Napepld
  gRNA
cactacgaccacctagacta

SEQ ID NO: 33255 - DNA, 20 bp, Artificial Sequence
  MKO10033255_A_Napepld
  gRNA
gacgtttgccttagctaatg

SEQ ID NO: 33256 - DNA, 20 bp, Artificial Sequence
  MKO10033256_A_Napg
  gRNA
tctcgttctagcctgaaaac

SEQ ID NO: 33257 - DNA, 20 bp, Artificial Sequence
  MKO10033257_A_Napg
  gRNA
gacagtgccgcttctgaata

SEQ ID NO: 33258 - DNA, 20 bp, Artificial Sequence
  MKO10033258_A_Napg
  gRNA
tgcagagcttatgagcaagc

SEQ ID NO: 33259 - DNA, 20 bp, Artificial Sequence
  MKO10033259_A_Naprt1
  gRNA
acaactgagaggtgtaccgg

SEQ ID NO: 33260 - DNA, 20 bp, Artificial Sequence
  MKO10033260_A_Naprt1
  gRNA
tagtgaggtaccccccgacc

SEQ ID NO: 33261 - DNA, 20 bp, Artificial Sequence
  MKO10033261_A_Naprt1
  gRNA
caagcgtagccgagcagcat

SEQ ID NO: 33262 - DNA, 20 bp, Artificial Sequence
  MKO10033262_A_Napsa
  gRNA
cctcttcaacgaatccacct

SEQ ID NO: 33263 - DNA, 20 bp, Artificial Sequence
  MKO10033263_A_Napsa
  gRNA
caggattccgctcagccgcc

SEQ ID NO: 33264 - DNA, 20 bp, Artificial Sequence
  MKO10033264_A_Napsa
  gRNA
gggcggagttcagcctccgc

SEQ ID NO: 33265 - DNA, 20 bp, Artificial Sequence
  MKO10033265_A_Narfl
  gRNA
tgtggggtccagccgaaacc

SEQ ID NO: 33266 - DNA, 20 bp, Artificial Sequence
  MKO10033266_A_Narfl
  gRNA
tctttgatactgccttcgcg

SEQ ID NO: 33267 - DNA, 20 bp, Artificial Sequence
  MKO10033267_A_Narfl
  gRNA
tgacacagccgctgcacgcc

SEQ ID NO: 33268 - DNA, 20 bp, Artificial Sequence
  MKO10033268_A_Narf
  gRNA
gtcagaaggagtttgtacgc

SEQ ID NO: 33269 - DNA, 20 bp, Artificial Sequence
  MKO10033269_A_Narf
  gRNA
gctgaaatctgcagcgattg

SEQ ID NO: 33270 - DNA, 20 bp, Artificial Sequence
  MKO10033270_A_Narf
  gRNA
gatggggcccagccaagcga

SEQ ID NO: 33271 - DNA, 20 bp, Artificial Sequence
  MKO10033271_A_Narg2
  gRNA
tgagttgctgaactaactgc

SEQ ID NO: 33272 - DNA, 20 bp, Artificial Sequence
  MKO10033272_A_Narg2
  gRNA
tcatgaagttaccagcctaa

SEQ ID NO: 33273 - DNA, 20 bp, Artificial Sequence
  MKO10033273_A_Narg2
  gRNA
ccctcaagttccaagactgt

SEQ ID NO: 33274 - DNA, 20 bp, Artificial Sequence
  MKO10033274_A_Nars2
  gRNA
tgtcgctccttatactttat

SEQ ID NO: 33275 - DNA, 20 bp, Artificial Sequence
  MKO10033275_A_Nars2
  gRNA
actcacatccaacgactgtg

SEQ ID NO: 33276 - DNA, 20 bp, Artificial Sequence
  MKO10033276_A_Nars2
  gRNA
aagatccgtcatttacatgc

SEQ ID NO: 33277 - DNA, 20 bp, Artificial Sequence
  MKO10033277_A_Nars
  gRNA
ctgtatgtatctgaccgaga

SEQ ID NO: 33278 - DNA, 20 bp, Artificial Sequence
  MKO10033278_A_Nars
  gRNA
atactcacacaggccggctc

SEQ ID NO: 33279 - DNA, 20 bp, Artificial Sequence
  MKO10033279_A_Nars
  gRNA
aacagatgaagaacgactct

SEQ ID NO: 33280 - DNA, 20 bp, Artificial Sequence
  MKO10033280_A_Nasp
  gRNA
gtcagcggaaaccagctccg

SEQ ID NO: 33281 - DNA, 20 bp, Artificial Sequence
  MKO10033281_A_Nasp
  gRNA
agtcacttctggagttagcc

SEQ ID NO: 33282 - DNA, 20 bp, Artificial Sequence
  MKO10033282_A_Nasp
  gRNA
agccgctgctgccatcgccg

SEQ ID NO: 33283 - DNA, 20 bp, Artificial Sequence
  MKO10033283_A_Nat10
  gRNA
gcagctgtacacgatgacta

SEQ ID NO: 33284 - DNA, 20 bp, Artificial Sequence
  MKO10033284_A_Nat10
  gRNA
gtagcagtagcgaatgtttg

SEQ ID NO: 33285 - DNA, 20 bp, Artificial Sequence
  MKO10033285_A_Nat10
  gRNA
agcgttaactccgaacttgt

SEQ ID NO: 33286 - DNA, 20 bp, Artificial Sequence
  MKO10033286_A_Nat14
  gRNA
ccgaggctcgagcccgagca

SEQ ID NO: 33287 - DNA, 20 bp, Artificial Sequence
  MKO10033287_A_Nat14
  gRNA
tcgggctccatcccccacgt

SEQ ID NO: 33288 - DNA, 20 bp, Artificial Sequence
  MKO10033288_A_Nat14
  gRNA
ccctcatttcccgcactgac

SEQ ID NO: 33289 - DNA, 20 bp, Artificial Sequence
  MKO10033289_A_Nat1
  gRNA
tacattgtggattccgccta

SEQ ID NO: 33290 - DNA, 20 bp, Artificial Sequence
  MKO10033290_A_Nat1
  gRNA
tcttgagccccgagttatcg

SEQ ID NO: 33291 - DNA, 20 bp, Artificial Sequence
  MKO10033291_A_Nat1
  gRNA
attcaaaatcctcgataact

SEQ ID NO: 33292 - DNA, 20 bp, Artificial Sequence
  MKO10033292_A_Nat2
  gRNA
ttggacgttcctaccagatg

SEQ ID NO: 33293 - DNA, 20 bp, Artificial Sequence
  MKO10033293_A_Nat2
  gRNA
ttgctagtaaacacagacgc

SEQ ID NO: 33294 - DNA, 20 bp, Artificial Sequence
  MKO10033294_A_Nat2
  gRNA
caaagggaatagcccgtatc

SEQ ID NO: 33295 - DNA, 20 bp, Artificial Sequence
  MKO10033295_A_Nat3
  gRNA
cagaaatcttcaatcgttcg

SEQ ID NO: 33296 - DNA, 20 bp, Artificial Sequence
  MKO10033296_A_Nat3
  gRNA
cacgaacgattgaagatttc

SEQ ID NO: 33297 - DNA, 20 bp, Artificial Sequence
  MKO10033297_A_Nat3
  gRNA
tatgatacaccttctactac

SEQ ID NO: 33298 - DNA, 20 bp, Artificial Sequence
  MKO10033298_A_Nat6
  gRNA
ggtctagtacccgtgataag

SEQ ID NO: 33299 - DNA, 20 bp, Artificial Sequence
  MKO10033299_A_Nat6
  gRNA
tgggccatgcccgcttatca

SEQ ID NO: 33300 - DNA, 20 bp, Artificial Sequence
  MKO10033300_A_Nat6
  gRNA
ggtgtagccgtcggaaaccc

SEQ ID NO: 33301 - DNA, 20 bp, Artificial Sequence
  MKO10033301_A_Nat8l
  gRNA
gcgcgccgcatcttctacga

SEQ ID NO: 33302 - DNA, 20 bp, Artificial Sequence
  MKO10033302_A_Nat8l
  gRNA
gcgctactactacagccgca

SEQ ID NO: 33303 - DNA, 20 bp, Artificial Sequence
  MKO10033303_A_Nat8l
  gRNA
gacgcgctgctcgtcgccgc

SEQ ID NO: 33304 - DNA, 20 bp, Artificial Sequence
  MKO10033304_A_Nat8
  gRNA
gagggactacaaacaggtcg

SEQ ID NO: 33305 - DNA, 20 bp, Artificial Sequence
  MKO10033305_A_Nat8
  gRNA
gaagacaggtgaatccttcg

SEQ ID NO: 33306 - DNA, 20 bp, Artificial Sequence
  MKO10033306_A_Nat8
  gRNA
ttcggggcagtgtcagcaag

SEQ ID NO: 33307 - DNA, 20 bp, Artificial Sequence
  MKO10033307_A_Nat9
  gRNA
tcttaccgtaggacatgatc

SEQ ID NO: 33308 - DNA, 20 bp, Artificial Sequence
  MKO10033308_A_Nat9
  gRNA
actggaggtgtgacgaagtt

SEQ ID NO: 33309 - DNA, 20 bp, Artificial Sequence
  MKO10033309_A_Nat9
  gRNA
acccctgcagataccacgag

SEQ ID NO: 33310 - DNA, 20 bp, Artificial Sequence
  MKO10033310_A_Nav1
  gRNA
gcgtcatcgctgtcgtaaca

SEQ ID NO: 33311 - DNA, 20 bp, Artificial Sequence
  MKO10033311_A_Nav1
  gRNA
ctgtcgttccgaggggccac

SEQ ID NO: 33312 - DNA, 20 bp, Artificial Sequence
  MKO10033312_A_Nav1
  gRNA
agttgagcccactctccgcc

SEQ ID NO: 33313 - DNA, 20 bp, Artificial Sequence
  MKO10033313_A_Nav2
  gRNA
ctttgtagatctacacggat

SEQ ID NO: 33314 - DNA, 20 bp, Artificial Sequence
  MKO10033314_A_Nav2
  gRNA
gtttgtggccggatttagcg

SEQ ID NO: 33315 - DNA, 20 bp, Artificial Sequence
  MKO10033315_A_Nav2
  gRNA
cgccccggccacctgagacc

SEQ ID NO: 33316 - DNA, 20 bp, Artificial Sequence
  MKO10033316_A_Nav3
  gRNA
cattgcggacggggtccttc

SEQ ID NO: 33317 - DNA, 20 bp, Artificial Sequence
  MKO10033317_A_Nav3
  gRNA
agtccttgatcagccgcttg

SEQ ID NO: 33318 - DNA, 20 bp, Artificial Sequence
  MKO10033318_A_Nav3
  gRNA
cccagcaagatatgcagtcc

SEQ ID NO: 33319 - DNA, 20 bp, Artificial Sequence
  MKO10033319_A_Nbas
  gRNA
accaagcgaaccagtccatc

SEQ ID NO: 33320 - DNA, 20 bp, Artificial Sequence
  MKO10033320_A_Nbas
  gRNA
tgaatgatgcaccgtgcttt

SEQ ID NO: 33321 - DNA, 20 bp, Artificial Sequence
  MKO10033321_A_Nbas
  gRNA
ctcagaggcaaccgaaagca

SEQ ID NO: 33322 - DNA, 20 bp, Artificial Sequence
  MKO10033322_A_Nbeal1
  gRNA
agggtggatgatatgcctcc

SEQ ID NO: 33323 - DNA, 20 bp, Artificial Sequence
  MKO10033323_A_Nbeal1
  gRNA
agaacctgcagaatattatc

SEQ ID NO: 33324 - DNA, 20 bp, Artificial Sequence
  MKO10033324_A_Nbeal1
  gRNA
ctatgtctccaatttctata

SEQ ID NO: 33325 - DNA, 20 bp, Artificial Sequence
  MKO10033325_A_Nbeal2
  gRNA
gcagggccacgttctctagc

SEQ ID NO: 33326 - DNA, 20 bp, Artificial Sequence
  MKO10033326_A_Nbeal2
  gRNA
gactatctcgttatcctccc

SEQ ID NO: 33327 - DNA, 20 bp, Artificial Sequence
  MKO10033327_A_Nbeal2
  gRNA
agccttaccttcgaggttcc

SEQ ID NO: 33328 - DNA, 20 bp, Artificial Sequence
  MKO10033328_A_Nbea
  gRNA
aattccgaacactcttccgt

SEQ ID NO: 33329 - DNA, 20 bp, Artificial Sequence
  MKO10033329_A_Nbea
  gRNA
cttaccgcagcactacaccc

SEQ ID NO: 33330 - DNA, 20 bp, Artificial Sequence
  MKO10033330_A_Nbea
  gRNA
aagctacagcattactgtca

SEQ ID NO: 33331 - DNA, 20 bp, Artificial Sequence
  MKO10033331_A_Nbl1
  gRNA
caccctgcacatagacgttc

SEQ ID NO: 33332 - DNA, 20 bp, Artificial Sequence
  MKO10033332_A_Nbl1
  gRNA
cccgccacctatcaacaagc

SEQ ID NO: 33333 - DNA, 20 bp, Artificial Sequence
  MKO10033333_A_Nbl1
  gRNA
caagaacatcacgcagattg

SEQ ID NO: 33334 - DNA, 20 bp, Artificial Sequence
  MKO10033334_A_Nbn
  gRNA
ccggcgtggagtacgttgtt

SEQ ID NO: 33335 - DNA, 20 bp, Artificial Sequence
  MKO10033335_A_Nbn
  gRNA
cccaacaacgtactccacgc

SEQ ID NO: 33336 - DNA, 20 bp, Artificial Sequence
  MKO10033336_A_Nbn
  gRNA
acttaccgcaaacaactgga

SEQ ID NO: 33337 - DNA, 20 bp, Artificial Sequence
  MKO10033337_A_Nbr1
  gRNA
cggatccagaaaatacaacc

SEQ ID NO: 33338 - DNA, 20 bp, Artificial Sequence
  MKO10033338_A_Nbr1
  gRNA
gaacttaccttgactattga

SEQ ID NO: 33339 - DNA, 20 bp, Artificial Sequence
  MKO10033339_A_Nbr1
  gRNA
gccagacagcatggaaccac

SEQ ID NO: 33340 - DNA, 20 bp, Artificial Sequence
  MKO10033340_A_Ncald
  gRNA
ttccattgataaatgtccgc

SEQ ID NO: 33341 - DNA, 20 bp, Artificial Sequence
  MKO10033341_A_Ncald
  gRNA
ttccgcaccttcgatgcaaa

SEQ ID NO: 33342 - DNA, 20 bp, Artificial Sequence
  MKO10033342_A_Ncald
  gRNA
cccctcggatgaattcttcc

SEQ ID NO: 33343 - DNA, 20 bp, Artificial Sequence
  MKO10033343_A_Ncam1
  gRNA
aacgccaacatcgacgatgc

SEQ ID NO: 33344 - DNA, 20 bp, Artificial Sequence
  MKO10033344_A_Ncam1
  gRNA
acaccactgagatccgctgc

SEQ ID NO: 33345 - DNA, 20 bp, Artificial Sequence
  MKO10033345_A_Ncam1
  gRNA
agccaaggagaaatcagcgt

SEQ ID NO: 33346 - DNA, 20 bp, Artificial Sequence
  MKO10033346_A_Ncam2
  gRNA
tggtacaaccagctgaccgc

SEQ ID NO: 33347 - DNA, 20 bp, Artificial Sequence
  MKO10033347_A_Ncam2
  gRNA
ttataccagtcgatactctc

SEQ ID NO: 33348 - DNA, 20 bp, Artificial Sequence
  MKO10033348_A_Ncam2
  gRNA
tcctgacaagcaacccgagc

SEQ ID NO: 33349 - DNA, 20 bp, Artificial Sequence
  MKO10033349_A_Ncan
  gRNA
gcgcgcgggcacaatgtcag

SEQ ID NO: 33350 - DNA, 20 bp, Artificial Sequence
  MKO10033350_A_Ncan
  gRNA
taccgcttcgccaaccgcac

SEQ ID NO: 33351 - DNA, 20 bp, Artificial Sequence
  MKO10033351_A_Ncan
  gRNA
ccgatcactcagtcgcgtcc

SEQ ID NO: 33352 - DNA, 20 bp, Artificial Sequence
  MKO10033352_A_Ncapd2
  gRNA
tgtatcgaagtgctccagta

SEQ ID NO: 33353 - DNA, 20 bp, Artificial Sequence
  MKO10033353_A_Ncapd2
  gRNA
ctatgccctgatacgccttt

SEQ ID NO: 33354 - DNA, 20 bp, Artificial Sequence
  MKO10033354_A_Ncapd2
  gRNA
ttaccttcccaccgatgtcc

SEQ ID NO: 33355 - DNA, 20 bp, Artificial Sequence
  MKO10033355_A_Ncapd3
  gRNA
ccctttgcgactgacgaaag

SEQ ID NO: 33356 - DNA, 20 bp, Artificial Sequence
  MKO10033356_A_Ncapd3
  gRNA
tccactttcgtcagtcgcaa

SEQ ID NO: 33357 - DNA, 20 bp, Artificial Sequence
  MKO10033357_A_Ncapd3
  gRNA
agtgcacaatatcgagagta

SEQ ID NO: 33358 - DNA, 20 bp, Artificial Sequence
  MKO10033358_A_Ncapg2
  gRNA
agtcgagggtgcagacgata

SEQ ID NO: 33359 - DNA, 20 bp, Artificial Sequence
  MKO10033359_A_Ncapg2
  gRNA
agtagttcacttaagctgaa

SEQ ID NO: 33360 - DNA, 20 bp, Artificial Sequence
  MKO10033360_A_Ncapg2
  gRNA
tcaatataacagcacactcc

SEQ ID NO: 33361 - DNA, 20 bp, Artificial Sequence
  MKO10033361_A_Ncapg
  gRNA
atataagcgtgaacctgccg

SEQ ID NO: 33362 - DNA, 20 bp, Artificial Sequence
  MKO10033362_A_Ncapg
  gRNA
aatcatcgtccttgggatct

SEQ ID NO: 33363 - DNA, 20 bp, Artificial Sequence
  MKO10033363_A_Ncapg
  gRNA
aacactgcacgtctaacttc

SEQ ID NO: 33364 - DNA, 20 bp, Artificial Sequence
  MKO10033364_A_Ncaph2
  gRNA
ccctgactcccgggctaatg

SEQ ID NO: 33365 - DNA, 20 bp, Artificial Sequence
  MKO10033365_A_Ncaph2
  gRNA
gctcccatcttcctgaacta

SEQ ID NO: 33366 - DNA, 20 bp, Artificial Sequence
  MKO10033366_A_Ncaph2
  gRNA
tccctgtgaaacagagaatg

SEQ ID NO: 33367 - DNA, 20 bp, Artificial Sequence
  MKO10033367_A_Ncaph
  gRNA
gctgggggcacccgttccaa

SEQ ID NO: 33368 - DNA, 20 bp, Artificial Sequence
  MKO10033368_A_Ncaph
  gRNA
cagtacagattcgattcatc

SEQ ID NO: 33369 - DNA, 20 bp, Artificial Sequence
  MKO10033369_A_Ncaph
  gRNA
cacacggacagcatagatct

SEQ ID NO: 33370 - DNA, 20 bp, Artificial Sequence
  MKO10033370_A_Ncbp1
  gRNA
tgtgatcgctgccccgtcta

SEQ ID NO: 33371 - DNA, 20 bp, Artificial Sequence
  MKO10033371_A_Ncbp1
  gRNA
tctttagagagcaatctcga

SEQ ID NO: 33372 - DNA, 20 bp, Artificial Sequence
  MKO10033372_A_Ncbp1
  gRNA
taggtggacaacctcacaaa

SEQ ID NO: 33373 - DNA, 20 bp, Artificial Sequence
  MKO10033373_A_Ncbp2
  gRNA
cccagtctgtccgtatgatc

SEQ ID NO: 33374 - DNA, 20 bp, Artificial Sequence
  MKO10033374_A_Ncbp2
  gRNA
cccgcctcacccgaaagtgc

SEQ ID NO: 33375 - DNA, 20 bp, Artificial Sequence
  MKO10033375_A_Ncbp2
  gRNA
ttaaggttcgggacgagtat

SEQ ID NO: 33376 - DNA, 20 bp, Artificial Sequence
  MKO10033376_A_Nccrp1
  gRNA
gttagcagctgaccgccgca

SEQ ID NO: 33377 - DNA, 20 bp, Artificial Sequence
  MKO10033377_A_Nccrp1
  gRNA
cactggccaggtaatttccg

SEQ ID NO: 33378 - DNA, 20 bp, Artificial Sequence
  MKO10033378_A_Nccrp1
  gRNA
gagtggtaatgtaccatcca

SEQ ID NO: 33379 - DNA, 20 bp, Artificial Sequence
  MKO10033379_A_Ncdn
  gRNA
gctcgtgaatctagcgtgcg

SEQ ID NO: 33380 - DNA, 20 bp, Artificial Sequence
  MKO10033380_A_Ncdn
  gRNA
cgcacgctagattcacgagc

SEQ ID NO: 33381 - DNA, 20 bp, Artificial Sequence
  MKO10033381_A_Ncdn
  gRNA
ggagacctcatccctgcgta

SEQ ID NO: 33382 - DNA, 20 bp, Artificial Sequence
  MKO10033382_A_Nceh1
  gRNA
acatgatcccatcgtcccgc

SEQ ID NO: 33383 - DNA, 20 bp, Artificial Sequence
  MKO10033383_A_Nceh1
  gRNA
gatcatgtacgccaagcgct

SEQ ID NO: 33384 - DNA, 20 bp, Artificial Sequence
  MKO10033384_A_Nceh1
  gRNA
tagatgacgctgcgtcgcag

SEQ ID NO: 33385 - DNA, 20 bp, Artificial Sequence
  MKO10033385_A_Ncf1
  gRNA
acgagccgctgagagtcgcc

SEQ ID NO: 33386 - DNA, 20 bp, Artificial Sequence
  MKO10033386_A_Ncf1
  gRNA
tcgttgcccatcaaaccacc

SEQ ID NO: 33387 - DNA, 20 bp, Artificial Sequence
  MKO10033387_A_Ncf1
  gRNA
cacatggaactcgtagatct

SEQ ID NO: 33388 - DNA, 20 bp, Artificial Sequence
  MKO10033388_A_Ncf2
  gRNA
ggtggctcagctggccaaaa

SEQ ID NO: 33389 - DNA, 20 bp, Artificial Sequence
  MKO10033389_A_Ncf2
  gRNA
actcacccagatgctctcca

SEQ ID NO: 33390 - DNA, 20 bp, Artificial Sequence
  MKO10033390_A_Ncf2
  gRNA
tgagccacctgcctctcatt

SEQ ID NO: 33391 - DNA, 20 bp, Artificial Sequence
  MKO10033391_A_Ncf4
  gRNA
cgtagaactggcgatagcgg

SEQ ID NO: 33392 - DNA, 20 bp, Artificial Sequence
  MKO10033392_A_Ncf4
  gRNA
ctcctcgatgtcagcgatgt

SEQ ID NO: 33393 - DNA, 20 bp, Artificial Sequence
  MKO10033393_A_Ncf4
  gRNA
ccatcagcacgcagaccggc

SEQ ID NO: 33394 - DNA, 20 bp, Artificial Sequence
  MKO10033394_A_Nck1
  gRNA
aatcaatggcatggttggcc

SEQ ID NO: 33395 - DNA, 20 bp, Artificial Sequence
  MKO10033395_A_Nck1
  gRNA
gcaatacttgacccgtattt

SEQ ID NO: 33396 - DNA, 20 bp, Artificial Sequence
  MKO10033396_A_Nck1
  gRNA
acttacctaaggtgtccttc

SEQ ID NO: 33397 - DNA, 20 bp, Artificial Sequence
  MKO10033397_A_Nck2
  gRNA
cgcttcctccaaaacgtagt

SEQ ID NO: 33398 - DNA, 20 bp, Artificial Sequence
  MKO10033398_A_Nck2
  gRNA
tccgtgtctctcaaagcgtc

SEQ ID NO: 33399 - DNA, 20 bp, Artificial Sequence
  MKO10033399_A_Nck2
  gRNA
gttcccctccaactacgttt

SEQ ID NO: 33400 - DNA, 20 bp, Artificial Sequence
  MKO10033400_A_Nckap1l
  gRNA
tgtacgtcacaattaagtcc

SEQ ID NO: 33401 - DNA, 20 bp, Artificial Sequence
  MKO10033401_A_Nckap1l
  gRNA
gaggaccgcaggatactcat

SEQ ID NO: 33402 - DNA, 20 bp, Artificial Sequence
  MKO10033402_A_Nckap1l
  gRNA
catagatgtccgaaatagca

SEQ ID NO: 33403 - DNA, 20 bp, Artificial Sequence
  MKO10033403_A_Nckap1
  gRNA
ttgttgcgcgtttctacagc

SEQ ID NO: 33404 - DNA, 20 bp, Artificial Sequence
  MKO10033404_A_Nckap1
  gRNA
ttaggcatgtggcgacccca

SEQ ID NO: 33405 - DNA, 20 bp, Artificial Sequence
  MKO10033405_A_Nckap1
  gRNA
cattaatgatactgctgtcc

SEQ ID NO: 33406 - DNA, 20 bp, Artificial Sequence
  MKO10033406_A_Nckap5l
  gRNA
agcgttcgtaagtctcccgc

SEQ ID NO: 33407 - DNA, 20 bp, Artificial Sequence
  MKO10033407_A_Nckap5l
  gRNA
gtttgatacactcttcccgc

SEQ ID NO: 33408 - DNA, 20 bp, Artificial Sequence
  MKO10033408_A_Nckap5l
  gRNA
tcagtagagcctgtaccacg

SEQ ID NO: 33409 - DNA, 20 bp, Artificial Sequence
  MKO10033409_A_Nckap5
  gRNA
gcacttgcggctacagagtg

SEQ ID NO: 33410 - DNA, 20 bp, Artificial Sequence
  MKO10033410_A_Nckap5
  gRNA
cgcaacaggatccagatgct

SEQ ID NO: 33411 - DNA, 20 bp, Artificial Sequence
  MKO10033411_A_Nckap5
  gRNA
cttggctctgcaacagactt

SEQ ID NO: 33412 - DNA, 20 bp, Artificial Sequence
  MKO10033412_A_Nckipsd
  gRNA
tcacggtctcggcgcttcac

SEQ ID NO: 33413 - DNA, 20 bp, Artificial Sequence
  MKO10033413_A_Nckipsd
  gRNA
gcccctcggcgaggtaccgg

SEQ ID NO: 33414 - DNA, 20 bp, Artificial Sequence
  MKO10033414_A_Nckipsd
  gRNA
gtgacccaccacgacgccga

SEQ ID NO: 33415 - DNA, 20 bp, Artificial Sequence
  MKO10033415_A_Ncln
  gRNA
ccgtgccccaggatgtcgtc

SEQ ID NO: 33416 - DNA, 20 bp, Artificial Sequence
  MKO10033416_A_Ncln
  gRNA
cgattggctcatcaccagcg

SEQ ID NO: 33417 - DNA, 20 bp, Artificial Sequence
  MKO10033417_A_Ncln
  gRNA
gccgccgctgcgtgcttatg

SEQ ID NO: 33418 - DNA, 20 bp, Artificial Sequence
  MKO10033418_A_Ncl
  gRNA
ccgttcttagcccccttagc

SEQ ID NO: 33419 - DNA, 20 bp, Artificial Sequence
  MKO10033419_A_Ncl
  gRNA
gggagctgccactccagcta

SEQ ID NO: 33420 - DNA, 20 bp, Artificial Sequence
  MKO10033420_A_Ncl
  gRNA
ttgtaggctggcaaaaccca

SEQ ID NO: 33421 - DNA, 20 bp, Artificial Sequence
  MKO10033421_A_Ncmap
  gRNA
gggtcgaaggtcacagtagc

SEQ ID NO: 33422 - DNA, 20 bp, Artificial Sequence
  MKO10033422_A_Ncmap
  gRNA
acctgttgtacatcttcagc

SEQ ID NO: 33423 - DNA, 20 bp, Artificial Sequence
  MKO10033423_A_Ncmap
  gRNA
cgaccctgccaatgtccatg

SEQ ID NO: 33424 - DNA, 20 bp, Artificial Sequence
  MKO10033424_A_Ncoa1
  gRNA
ctgcacgtcatcatcagtcg

SEQ ID NO: 33425 - DNA, 20 bp, Artificial Sequence
  MKO10033425_A_Ncoa1
  gRNA
tttcggcgtgttgcctcttg

SEQ ID NO: 33426 - DNA, 20 bp, Artificial Sequence
  MKO10033426_A_Ncoa1
  gRNA
cgtctacagcatactgcatg

SEQ ID NO: 33427 - DNA, 20 bp, Artificial Sequence
  MKO10033427_A_Ncoa2
  gRNA
aaaacacctctgacccgtcc

SEQ ID NO: 33428 - DNA, 20 bp, Artificial Sequence
  MKO10033428_A_Ncoa2
  gRNA
tgtcatcgacaaggatgcac

SEQ ID NO: 33429 - DNA, 20 bp, Artificial Sequence
  MKO10033429_A_Ncoa2
  gRNA
aaagtttgcgaagatcagct

SEQ ID NO: 33430 - DNA, 20 bp, Artificial Sequence
  MKO10033430_A_Ncoa3
  gRNA
gtctcagcctcgcgctatgc

SEQ ID NO: 33431 - DNA, 20 bp, Artificial Sequence
  MKO10033431_A_Ncoa3
  gRNA
tgagaagtggcgacgggagc

SEQ ID NO: 33432 - DNA, 20 bp, Artificial Sequence
  MKO10033432_A_Ncoa3
  gRNA
ccttcttccagcatagcgcg

SEQ ID NO: 33433 - DNA, 20 bp, Artificial Sequence
  MKO10033433_A_Ncoa4
  gRNA
ggcttacctgctctggcacc

SEQ ID NO: 33434 - DNA, 20 bp, Artificial Sequence
  MKO10033434_A_Ncoa4
  gRNA
cattacttacaatggtctta

SEQ ID NO: 33435 - DNA, 20 bp, Artificial Sequence
  MKO10033435_A_Ncoa4
  gRNA
gcaaatccctgagcatctga

SEQ ID NO: 33436 - DNA, 20 bp, Artificial Sequence
  MKO10033436_A_Ncoa5
  gRNA
cgtgatcgctctccaattcg

SEQ ID NO: 33437 - DNA, 20 bp, Artificial Sequence
  MKO10033437_A_Ncoa5
  gRNA
tctcagcatcaaagcgtcgc

SEQ ID NO: 33438 - DNA, 20 bp, Artificial Sequence
  MKO10033438_A_Ncoa5
  gRNA
agtacgagtcatccttcctc

SEQ ID NO: 33439 - DNA, 20 bp, Artificial Sequence
  MKO10033439_A_Ncoa6
  gRNA
cccaatgcaagcgcaacttc

SEQ ID NO: 33440 - DNA, 20 bp, Artificial Sequence
  MKO10033440_A_Ncoa6
  gRNA
agcagaacggctacggatcc

SEQ ID NO: 33441 - DNA, 20 bp, Artificial Sequence
  MKO10033441_A_Ncoa6
  gRNA
aggtgtctgtaccgtagcta

SEQ ID NO: 33442 - DNA, 20 bp, Artificial Sequence
  MKO10033442_A_Ncoa7
  gRNA
tttcgcctgtgccataatag

SEQ ID NO: 33443 - DNA, 20 bp, Artificial Sequence
  MKO10033443_A_Ncoa7
  gRNA
aagttcagtgaccactatta

SEQ ID NO: 33444 - DNA, 20 bp, Artificial Sequence
  MKO10033444_A_Ncoa7
  gRNA
tggcccgacgacttccagcc

SEQ ID NO: 33445 - DNA, 20 bp, Artificial Sequence
  MKO10033445_A_Ncor1
  gRNA
ggatatgaacagtttcactc

SEQ ID NO: 33446 - DNA, 20 bp, Artificial Sequence
  MKO10033446_A_Ncor1
  gRNA
aatgtattaggcctcaagaa

SEQ ID NO: 33447 - DNA, 20 bp, Artificial Sequence
  MKO10033447_A_Ncor1
  gRNA
tatgccttacctgctggtgt

SEQ ID NO: 33448 - DNA, 20 bp, Artificial Sequence
  MKO10033448_A_Ncor2
  gRNA
gcatagagaacaatccgcga

SEQ ID NO: 33449 - DNA, 20 bp, Artificial Sequence
  MKO10033449_A_Ncor2
  gRNA
tcagcttcttccgcatcgcc

SEQ ID NO: 33450 - DNA, 20 bp, Artificial Sequence
  MKO10033450_A_Ncor2
  gRNA
actggcgtgtgtcagacggc

SEQ ID NO: 33451 - DNA, 20 bp, Artificial Sequence
  MKO10033451_A_Ncr1
  gRNA
actttattcatcgatctcga

SEQ ID NO: 33452 - DNA, 20 bp, Artificial Sequence
  MKO10033452_A_Ncr1
  gRNA
gctcttacaacgactatgca

SEQ ID NO: 33453 - DNA, 20 bp, Artificial Sequence
  MKO10033453_A_Ncr1
  gRNA
ccctctgtgagccctagtca

SEQ ID NO: 33454 - DNA, 20 bp, Artificial Sequence
  MKO10033454_A_Ncs1
  gRNA
tatgtcgagcatctcgttcc

SEQ ID NO: 33455 - DNA, 20 bp, Artificial Sequence
  MKO10033455_A_Ncs1
  gRNA
caacgtcttcgacgagaaca

SEQ ID NO: 33456 - DNA, 20 bp, Artificial Sequence
  MKO10033456_A_Ncs1
  gRNA
cactgtcggtgacctcaagg

SEQ ID NO: 33457 - DNA, 20 bp, Artificial Sequence
  MKO10033457_A_Ncstn
  gRNA
ctcaacgccactcatcagat

SEQ ID NO: 33458 - DNA, 20 bp, Artificial Sequence
  MKO10033458_A_Ncstn
  gRNA
ggcaagaccagcgattctac

SEQ ID NO: 33459 - DNA, 20 bp, Artificial Sequence
  MKO10033459_A_Ncstn
  gRNA
gttctggcagcttcaattag

SEQ ID NO: 33460 - DNA, 20 bp, Artificial Sequence
  MKO10033460_A_Ndc1
  gRNA
gatgcaggatccgcgctatc

SEQ ID NO: 33461 - DNA, 20 bp, Artificial Sequence
  MKO10033461_A_Ndc1
  gRNA
ccagactggccctgatagcg

SEQ ID NO: 33462 - DNA, 20 bp, Artificial Sequence
  MKO10033462_A_Ndc1
  gRNA
tctcccgtttcctattatac

SEQ ID NO: 33463 - DNA, 20 bp, Artificial Sequence
  MKO10033463_A_Ndc80
  gRNA
gcttctaggactagcggaca

SEQ ID NO: 33464 - DNA, 20 bp, Artificial Sequence
  MKO10033464_A_Ndc80
  gRNA
gagtacacacaaaccgacat

SEQ ID NO: 33465 - DNA, 20 bp, Artificial Sequence
  MKO10033465_A_Ndc80
  gRNA
tgcccgtcgtatgaacttcc

SEQ ID NO: 33466 - DNA, 20 bp, Artificial Sequence
  MKO10033466_A_Nde1
  gRNA
taatggctttcgtctgcgcc

SEQ ID NO: 33467 - DNA, 20 bp, Artificial Sequence
  MKO10033467_A_Nde1
  gRNA
agagaataaccgccttcgca

SEQ ID NO: 33468 - DNA, 20 bp, Artificial Sequence
  MKO10033468_A_Nde1
  gRNA
ccaattcagcttcgtattct

SEQ ID NO: 33469 - DNA, 20 bp, Artificial Sequence
  MKO10033469_A_Ndel1
  gRNA
tccttgcctgcaacgcctgt

SEQ ID NO: 33470 - DNA, 20 bp, Artificial Sequence
  MKO10033470_A_Ndel1
  gRNA
atgacctggagcgagcaaaa

SEQ ID NO: 33471 - DNA, 20 bp, Artificial Sequence
  MKO10033471_A_Ndel1
  gRNA
aagatgatttaagtcagacc

SEQ ID NO: 33472 - DNA, 20 bp, Artificial Sequence
  MKO10033472_A_Ndfip1
  gRNA
gttgtagccacattatacga

SEQ ID NO: 33473 - DNA, 20 bp, Artificial Sequence
  MKO10033473_A_Ndfip1
  gRNA
gactgaagctacgatccctt

SEQ ID NO: 33474 - DNA, 20 bp, Artificial Sequence
  MKO10033474_A_Ndfip1
  gRNA
catcgtttcctatcctcagc

SEQ ID NO: 33475 - DNA, 20 bp, Artificial Sequence
  MKO10033475_A_Ndfip2
  gRNA
tgtatcaccaataccatcgc

SEQ ID NO: 33476 - DNA, 20 bp, Artificial Sequence
  MKO10033476_A_Ndfip2
  gRNA
agcaccgtatcttccagcga

SEQ ID NO: 33477 - DNA, 20 bp, Artificial Sequence
  MKO10033477_A_Ndfip2
  gRNA
tagcttagcagcgccgactg

SEQ ID NO: 33478 - DNA, 20 bp, Artificial Sequence
  MKO10033478_A_Ndnf
  gRNA
ctgctggatgtttacgtcgt

SEQ ID NO: 33479 - DNA, 20 bp, Artificial Sequence
  MKO10033479_A_Ndnf
  gRNA
cactccaaaggtgcatcgca

SEQ ID NO: 33480 - DNA, 20 bp, Artificial Sequence
  MKO10033480_A_Ndnf
  gRNA
ctacgacgtaaacatccagc

SEQ ID NO: 33481 - DNA, 20 bp, Artificial Sequence
  MKO10033481_A_Ndnl2
  gRNA
ccccacggtcggggccgaca

SEQ ID NO: 33482 - DNA, 20 bp, Artificial Sequence
  MKO10033482_A_Ndnl2
  gRNA
tgtacccgaacacgtattgc

SEQ ID NO: 33483 - DNA, 20 bp, Artificial Sequence
  MKO10033483_A_Ndnl2
  gRNA
cctgcgtgctgggccgaccg

SEQ ID NO: 33484 - DNA, 20 bp, Artificial Sequence
  MKO10033484_A_Ndn
  gRNA
aacaaccgtatgcccatgac

SEQ ID NO: 33485 - DNA, 20 bp, Artificial Sequence
  MKO10033485_A_Ndn
  gRNA
cgaccctaactttgcagccg

SEQ ID NO: 33486 - DNA, 20 bp, Artificial Sequence
  MKO10033486_A_Ndn
  gRNA
attccagaccgcaccctctc

SEQ ID NO: 33487 - DNA, 20 bp, Artificial Sequence
  MKO10033487_A_Ndor1
  gRNA
gcggctaggttgccgcgtgc

SEQ ID NO: 33488 - DNA, 20 bp, Artificial Sequence
  MKO10033488_A_Ndor1
  gRNA
tcctcgaggcgaatctcatt

SEQ ID NO: 33489 - DNA, 20 bp, Artificial Sequence
  MKO10033489_A_Ndor1
  gRNA
atatttgtttgtgcgaccac

SEQ ID NO: 33490 - DNA, 20 bp, Artificial Sequence
  MKO10033490_A_Ndp
  gRNA
tgcgacttactgccacttac

SEQ ID NO: 33491 - DNA, 20 bp, Artificial Sequence
  MKO10033491_A_Ndp
  gRNA
gactgatagaatcgacataa

SEQ ID NO: 33492 - DNA, 20 bp, Artificial Sequence
  MKO10033492_A_Ndp
  gRNA
atttctccagatggtgctcc

SEQ ID NO: 33493 - DNA, 20 bp, Artificial Sequence
  MKO10033493_A_Ndrg1
  gRNA
tgccgatgtcgtgatacgtg

SEQ ID NO: 33494 - DNA, 20 bp, Artificial Sequence
  MKO10033494_A_Ndrg1
  gRNA
cctgcaagagttcgatgttc

SEQ ID NO: 33495 - DNA, 20 bp, Artificial Sequence
  MKO10033495_A_Ndrg1
  gRNA
caggatattgagaccctaca

SEQ ID NO: 33496 - DNA, 20 bp, Artificial Sequence
  MKO10033496_A_Ndrg2
  gRNA
ggtgaatatcgccgggcgtt

SEQ ID NO: 33497 - DNA, 20 bp, Artificial Sequence
  MKO10033497_A_Ndrg2
  gRNA
gtaaaagtgaccgagccata

SEQ ID NO: 33498 - DNA, 20 bp, Artificial Sequence
  MKO10033498_A_Ndrg2
  gRNA
atatccccgaaccgaaacag

SEQ ID NO: 33499 - DNA, 20 bp, Artificial Sequence
  MKO10033499_A_Ndrg3
  gRNA
tacggttgagcccaatgtcg

SEQ ID NO: 33500 - DNA, 20 bp, Artificial Sequence
  MKO10033500_A_Ndrg3
  gRNA
gaatggcacacgaaacttcc

SEQ ID NO: 33501 - DNA, 20 bp, Artificial Sequence
  MKO10033501_A_Ndrg3
  gRNA
atggtccacgtcaccataag

SEQ ID NO: 33502 - DNA, 20 bp, Artificial Sequence
  MKO10033502_A_Ndrg4
  gRNA
catgacatcgagacgcctta

SEQ ID NO: 33503 - DNA, 20 bp, Artificial Sequence
  MKO10033503_A_Ndrg4
  gRNA
tcggcaagatgccggagtgc

SEQ ID NO: 33504 - DNA, 20 bp, Artificial Sequence
  MKO10033504_A_Ndrg4
  gRNA
tgtgccacgtggatgcccct

SEQ ID NO: 33505 - DNA, 20 bp, Artificial Sequence
  MKO10033505_A_Ndst1
  gRNA
aagccacggcggtaccgggc

SEQ ID NO: 33506 - DNA, 20 bp, Artificial Sequence
  MKO10033506_A_Ndst1
  gRNA
tgctgcgctgcacgctactg

SEQ ID NO: 33507 - DNA, 20 bp, Artificial Sequence
  MKO10033507_A_Ndst1
  gRNA
ggattcggaggagcgtgtct

SEQ ID NO: 33508 - DNA, 20 bp, Artificial Sequence
  MKO10033508_A_Ndst2
  gRNA
cgtcctgctcgctaccgccg

SEQ ID NO: 33509 - DNA, 20 bp, Artificial Sequence
  MKO10033509_A_Ndst2
  gRNA
gaactagatcgaagcatccg

SEQ ID NO: 33510 - DNA, 20 bp, Artificial Sequence
  MKO10033510_A_Ndst2
  gRNA
actcattatagaagatcgtg

SEQ ID NO: 33511 - DNA, 20 bp, Artificial Sequence
  MKO10033511_A_Ndst3
  gRNA
actgcatatcccatatcggt

SEQ ID NO: 33512 - DNA, 20 bp, Artificial Sequence
  MKO10033512_A_Ndst3
  gRNA
gcacggcatccctaccgata

SEQ ID NO: 33513 - DNA, 20 bp, Artificial Sequence
  MKO10033513_A_Ndst3
  gRNA
ctattaaagacgactcattg

SEQ ID NO: 33514 - DNA, 20 bp, Artificial Sequence
  MKO10033514_A_Ndst4
  gRNA
acatggaattccgatcaacc

SEQ ID NO: 33515 - DNA, 20 bp, Artificial Sequence
  MKO10033515_A_Ndst4
  gRNA
aagcccttcctgtaccgcgc

SEQ ID NO: 33516 - DNA, 20 bp, Artificial Sequence
  MKO10033516_A_Ndst4
  gRNA
gcccacgtactggatttaga

SEQ ID NO: 33517 - DNA, 20 bp, Artificial Sequence
  MKO10033517_A_Ndufa10
  gRNA
tcgatatagatgactgcgtg

SEQ ID NO: 33518 - DNA, 20 bp, Artificial Sequence
  MKO10033518_A_Ndufa10
  gRNA
ctatatcgatgtgcccgtgc

SEQ ID NO: 33519 - DNA, 20 bp, Artificial Sequence
  MKO10033519_A_Ndufa10
  gRNA
cccctcgacatagagtttag

SEQ ID NO: 33520 - DNA, 20 bp, Artificial Sequence
  MKO10033520_A_Ndufa11
  gRNA
ctcaccgcaaatgccgccta

SEQ ID NO: 33521 - DNA, 20 bp, Artificial Sequence
  MKO10033521_A_Ndufa11
  gRNA
tcgcaagacctacatcacca

SEQ ID NO: 33522 - DNA, 20 bp, Artificial Sequence
  MKO10033522_A_Ndufa11
  gRNA
gctgctattggagcgatgtt

SEQ ID NO: 33523 - DNA, 20 bp, Artificial Sequence
  MKO10033523_A_Ndufa12
  gRNA
cctacctgaagaaaacccgt

SEQ ID NO: 33524 - DNA, 20 bp, Artificial Sequence
  MKO10033524_A_Ndufa12
  gRNA
cccactcaggccgccaccga

SEQ ID NO: 33525 - DNA, 20 bp, Artificial Sequence
  MKO10033525_A_Ndufa12
  gRNA
cctgctgcacgccgcgcttc

SEQ ID NO: 33526 - DNA, 20 bp, Artificial Sequence
  MKO10033526_A_Ndufa13
  gRNA
tgcaagtatggcggcgtcga

SEQ ID NO: 33527 - DNA, 20 bp, Artificial Sequence
  MKO10033527_A_Ndufa13
  gRNA
acggccccatcgactacaag

SEQ ID NO: 33528 - DNA, 20 bp, Artificial Sequence
  MKO10033528_A_Ndufa13
  gRNA
gtggcacccatcgtgtggta

SEQ ID NO: 33529 - DNA, 20 bp, Artificial Sequence
  MKO10033529_A_Ndufa1
  gRNA
gaacgcgatagacgtatctc

SEQ ID NO: 33530 - DNA, 20 bp, Artificial Sequence
  MKO10033530_A_Ndufa1
  gRNA
cgcgttccatcagataccac

SEQ ID NO: 33531 - DNA, 20 bp, Artificial Sequence
  MKO10033531_A_Ndufa1
  gRNA
ccgccttaccttgcccccgt

SEQ ID NO: 33532 - DNA, 20 bp, Artificial Sequence
  MKO10033532_A_Ndufa2
  gRNA
cattctgatccgcgaatgct

SEQ ID NO: 33533 - DNA, 20 bp, Artificial Sequence
  MKO10033533_A_Ndufa2
  gRNA
cacttatgccagcgttcccc

SEQ ID NO: 33534 - DNA, 20 bp, Artificial Sequence
  MKO10033534_A_Ndufa2
  gRNA
ccagctttgcgccgaccgct

SEQ ID NO: 33535 - DNA, 20 bp, Artificial Sequence
  MKO10033535_A_Ndufa3
  gRNA
cagcaccggctccttcgccc

SEQ ID NO: 33536 - DNA, 20 bp, Artificial Sequence
  MKO10033536_A_Ndufa3
  gRNA
atgttcccgtcatctctcac

SEQ ID NO: 33537 - DNA, 20 bp, Artificial Sequence
  MKO10033537_A_Ndufa3
  gRNA
gtatgctagcatgatcaaca

SEQ ID NO: 33538 - DNA, 20 bp, Artificial Sequence
  MKO10033538_A_Ndufa4l2
  gRNA
accagacatcaggactgcgc

SEQ ID NO: 33539 - DNA, 20 bp, Artificial Sequence
  MKO10033539_A_Ndufa4l2
  gRNA
gagtcccaatgaccagtaca

SEQ ID NO: 33540 - DNA, 20 bp, Artificial Sequence
  MKO10033540_A_Ndufa4l2
  gRNA
ctcaggcggttccagggctc

SEQ ID NO: 33541 - DNA, 20 bp, Artificial Sequence
  MKO10033541_A_Ndufa4
  gRNA
acttacgctgggatgcttct

SEQ ID NO: 33542 - DNA, 20 bp, Artificial Sequence
  MKO10033542_A_Ndufa4
  gRNA
gggtcccaatgaacaatata

SEQ ID NO: 33543 - DNA, 20 bp, Artificial Sequence
  MKO10033543_A_Ndufa4
  gRNA
ccttaccttatattgttcat

SEQ ID NO: 33544 - DNA, 20 bp, Artificial Sequence
  MKO10033544_A_Ndufa5
  gRNA
ggtgtgcgacactccacacg

SEQ ID NO: 33545 - DNA, 20 bp, Artificial Sequence
  MKO10033545_A_Ndufa5
  gRNA
aagagccgcctgctaaccag

SEQ ID NO: 33546 - DNA, 20 bp, Artificial Sequence
  MKO10033546_A_Ndufa5
  gRNA
cgcacaccgccaaccccacc

SEQ ID NO: 33547 - DNA, 20 bp, Artificial Sequence
  MKO10033547_A_Ndufa6
  gRNA
tatcgggaggtgccgaacac

SEQ ID NO: 33548 - DNA, 20 bp, Artificial Sequence
  MKO10033548_A_Ndufa6
  gRNA
gcacctcccgataccaagcg

SEQ ID NO: 33549 - DNA, 20 bp, Artificial Sequence
  MKO10033549_A_Ndufa6
  gRNA
ccgctgcttccatactttga

SEQ ID NO: 33550 - DNA, 20 bp, Artificial Sequence
  MKO10033550_A_Ndufa7
  gRNA
ctcaccgcttggcgatctcc

SEQ ID NO: 33551 - DNA, 20 bp, Artificial Sequence
  MKO10033551_A_Ndufa7
  gRNA
gaagctacagctgcgctacc

SEQ ID NO: 33552 - DNA, 20 bp, Artificial Sequence
  MKO10033552_A_Ndufa7
  gRNA
tgtcaggcaaggccgccgag

SEQ ID NO: 33553 - DNA, 20 bp, Artificial Sequence
  MKO10033553_A_Ndufa8
  gRNA
cgccgtcatgccggggatag

SEQ ID NO: 33554 - DNA, 20 bp, Artificial Sequence
  MKO10033554_A_Ndufa8
  gRNA
ttaccttagacaactgcccc

SEQ ID NO: 33555 - DNA, 20 bp, Artificial Sequence
  MKO10033555_A_Ndufa8
  gRNA
tcagtgcgataaaaccaata

SEQ ID NO: 33556 - DNA, 20 bp, Artificial Sequence
  MKO10033556_A_Ndufa9
  gRNA
ggttaacaacgtatcgaccc

SEQ ID NO: 33557 - DNA, 20 bp, Artificial Sequence
  MKO10033557_A_Ndufa9
  gRNA
cgatacgttgttaaccacct

SEQ ID NO: 33558 - DNA, 20 bp, Artificial Sequence
  MKO10033558_A_Ndufa9
  gRNA
tcatatacatcacaccgata

SEQ ID NO: 33559 - DNA, 20 bp, Artificial Sequence
  MKO10033559_A_Ndufab1
  gRNA
gttaccaaattcgtcttcca

SEQ ID NO: 33560 - DNA, 20 bp, Artificial Sequence
  MKO10033560_A_Ndufab1
  gRNA
tgataagattgatccagaaa

SEQ ID NO: 33561 - DNA, 20 bp, Artificial Sequence
  MKO10033561_A_Ndufab1
  gRNA
agtcacctgcgcgagcgcca

SEQ ID NO: 33562 - DNA, 20 bp, Artificial Sequence
  MKO10033562_A_Ndufaf1
  gRNA
tgtccaaggcccactcgtat

SEQ ID NO: 33563 - DNA, 20 bp, Artificial Sequence
  MKO10033563_A_Ndufaf1
  gRNA
aaccgaagtgccctgcttta

SEQ ID NO: 33564 - DNA, 20 bp, Artificial Sequence
  MKO10033564_A_Ndufaf1
  gRNA
acgaaactgccagacaaccc

SEQ ID NO: 33565 - DNA, 20 bp, Artificial Sequence
  MKO10033565_A_Ndufaf2
  gRNA
acgtcgccgagtacaagaac

SEQ ID NO: 33566 - DNA, 20 bp, Artificial Sequence
  MKO10033566_A_Ndufaf2
  gRNA
cacgcctctgccccgtattt

SEQ ID NO: 33567 - DNA, 20 bp, Artificial Sequence
  MKO10033567_A_Ndufaf2
  gRNA
gcacgtgggcacggaccatc

SEQ ID NO: 33568 - DNA, 20 bp, Artificial Sequence
  MKO10033568_A_Ndufaf3
  gRNA
atctgcggaaatcgcgtgtt

SEQ ID NO: 33569 - DNA, 20 bp, Artificial Sequence
  MKO10033569_A_Ndufaf3
  gRNA
catcgtccgccggagaaagc

SEQ ID NO: 33570 - DNA, 20 bp, Artificial Sequence
  MKO10033570_A_Ndufaf3
  gRNA
ctcctgtcactcgaccttcg

SEQ ID NO: 33571 - DNA, 20 bp, Artificial Sequence
  MKO10033571_A_Ndufaf4
  gRNA
gtatacattaccggcaaggc

SEQ ID NO: 33572 - DNA, 20 bp, Artificial Sequence
  MKO10033572_A_Ndufaf4
  gRNA
ctcgcgtgacccgcgcctta

SEQ ID NO: 33573 - DNA, 20 bp, Artificial Sequence
  MKO10033573_A_Ndufaf4
  gRNA
gtcgcgggtagaagggtgct

SEQ ID NO: 33574 - DNA, 20 bp, Artificial Sequence
  MKO10033574_A_Ndufaf5
  gRNA
ccaagaaaacacgtttgacc

SEQ ID NO: 33575 - DNA, 20 bp, Artificial Sequence
  MKO10033575_A_Ndufaf5
  gRNA
accgtgtttatgacatagcc

SEQ ID NO: 33576 - DNA, 20 bp, Artificial Sequence
  MKO10033576_A_Ndufaf5
  gRNA
acctggctatgtcataaaca

SEQ ID NO: 33577 - DNA, 20 bp, Artificial Sequence
  MKO10033577_A_Ndufaf6
  gRNA
caaagcgtaccgcagtatgc

SEQ ID NO: 33578 - DNA, 20 bp, Artificial Sequence
  MKO10033578_A_Ndufaf6
  gRNA
tgcactgcgggccttcaatg

SEQ ID NO: 33579 - DNA, 20 bp, Artificial Sequence
  MKO10033579_A_Ndufaf6
  gRNA
aaattatgctgagaatacgc

SEQ ID NO: 33580 - DNA, 20 bp, Artificial Sequence
  MKO10033580_A_Ndufaf7
  gRNA
ttattacctccccgaagatt

SEQ ID NO: 33581 - DNA, 20 bp, Artificial Sequence
  MKO10033581_A_Ndufaf7
  gRNA
gtttctggctcacctctaca

SEQ ID NO: 33582 - DNA, 20 bp, Artificial Sequence
  MKO10033582_A_Ndufaf7
  gRNA
ctcctggtaccgagacctga

SEQ ID NO: 33583 - DNA, 20 bp, Artificial Sequence
  MKO10033583_A_Ndufb10
  gRNA
tcacgggccagtccacgacg

SEQ ID NO: 33584 - DNA, 20 bp, Artificial Sequence
  MKO10033584_A_Ndufb10
  gRNA
cctacgacctcgtcgtggac

SEQ ID NO: 33585 - DNA, 20 bp, Artificial Sequence
  MKO10033585_A_Ndufb10
  gRNA
caaagtgactaaagcctacc

SEQ ID NO: 33586 - DNA, 20 bp, Artificial Sequence
  MKO10033586_A_Ndufb11
  gRNA
ggacgaaaacgtctacgcga

SEQ ID NO: 33587 - DNA, 20 bp, Artificial Sequence
  MKO10033587_A_Ndufb11
  gRNA
tcccggctgctcgcgttcgc

SEQ ID NO: 33588 - DNA, 20 bp, Artificial Sequence
  MKO10033588_A_Ndufb11
  gRNA
cttgctgggatcgaagtagt

SEQ ID NO: 33589 - DNA, 20 bp, Artificial Sequence
  MKO10033589_A_Ndufb2
  gRNA
tatgtctgcgctcacccgtc

SEQ ID NO: 33590 - DNA, 20 bp, Artificial Sequence
  MKO10033590_A_Ndufb2
  gRNA
tgtctccagccgcccgcgcg

SEQ ID NO: 33591 - DNA, 20 bp, Artificial Sequence
  MKO10033591_A_Ndufb2
  gRNA
gggaatccctcctgatgacg

SEQ ID NO: 33592 - DNA, 20 bp, Artificial Sequence
  MKO10033592_A_Ndufb3
  gRNA
gtagacatggctgctggaca

SEQ ID NO: 33593 - DNA, 20 bp, Artificial Sequence
  MKO10033593_A_Ndufb3
  gRNA
cagaagaagcttgctgcccg

SEQ ID NO: 33594 - DNA, 20 bp, Artificial Sequence
  MKO10033594_A_Ndufb3
  gRNA
ttcccgagtgtaatattaaa

SEQ ID NO: 33595 - DNA, 20 bp, Artificial Sequence
  MKO10033595_A_Ndufb4
  gRNA
cacgatgtgcgacacgcgtt

SEQ ID NO: 33596 - DNA, 20 bp, Artificial Sequence
  MKO10033596_A_Ndufb4
  gRNA
caagtataagcctgcgcccc

SEQ ID NO: 33597 - DNA, 20 bp, Artificial Sequence
  MKO10033597_A_Ndufb4
  gRNA
aggatcctgccttgattcgc

SEQ ID NO: 33598 - DNA, 20 bp, Artificial Sequence
  MKO10033598_A_Ndufb5
  gRNA
cgggcgatccatcttgatat

SEQ ID NO: 33599 - DNA, 20 bp, Artificial Sequence
  MKO10033599_A_Ndufb5
  gRNA
atcgcccggaatttctatga

SEQ ID NO: 33600 - DNA, 20 bp, Artificial Sequence
  MKO10033600_A_Ndufb5
  gRNA
cgagcgtcatagtataaaga

SEQ ID NO: 33601 - DNA, 20 bp, Artificial Sequence
  MKO10033601_A_Ndufb6
  gRNA
agttatcccagaatcgctcc

SEQ ID NO: 33602 - DNA, 20 bp, Artificial Sequence
  MKO10033602_A_Ndufb6
  gRNA
catcctgcgcgggggcaaca

SEQ ID NO: 33603 - DNA, 20 bp, Artificial Sequence
  MKO10033603_A_Ndufb6
  gRNA
tccctagggtgatacaattc

SEQ ID NO: 33604 - DNA, 20 bp, Artificial Sequence
  MKO10033604_A_Ndufb7
  gRNA
cccacagatagcgccgggtc

SEQ ID NO: 33605 - DNA, 20 bp, Artificial Sequence
  MKO10033605_A_Ndufb7
  gRNA
cagttacgtgaaacgcatga

SEQ ID NO: 33606 - DNA, 20 bp, Artificial Sequence
  MKO10033606_A_Ndufb7
  gRNA
gtcgtgctgctcgtgcttgc

SEQ ID NO: 33607 - DNA, 20 bp, Artificial Sequence
  MKO10033607_A_Ndufb8
  gRNA
cggccgcggcgcgttcctct

SEQ ID NO: 33608 - DNA, 20 bp, Artificial Sequence
  MKO10033608_A_Ndufb8
  gRNA
caagaagtataacatgcgag

SEQ ID NO: 33609 - DNA, 20 bp, Artificial Sequence
  MKO10033609_A_Ndufb8
  gRNA
gggacctagacatgtacatc

SEQ ID NO: 33610 - DNA, 20 bp, Artificial Sequence
  MKO10033610_A_Ndufb9
  gRNA
tatggcgttctgcgctcccc

SEQ ID NO: 33611 - DNA, 20 bp, Artificial Sequence
  MKO10033611_A_Ndufb9
  gRNA
tcgatttaagggacaagtac

SEQ ID NO: 33612 - DNA, 20 bp, Artificial Sequence
  MKO10033612_A_Ndufb9
  gRNA
gtagcactcatatctctcga

SEQ ID NO: 33613 - DNA, 20 bp, Artificial Sequence
  MKO10033613_A_Ndufc1
  gRNA
cacggtcgaagttctatgtc

SEQ ID NO: 33614 - DNA, 20 bp, Artificial Sequence
  MKO10033614_A_Ndufc1
  gRNA
ttggcagttggactgtccgt

SEQ ID NO: 33615 - DNA, 20 bp, Artificial Sequence
  MKO10033615_A_Ndufc1
  gRNA
cgaaaacgagcgcagcacta

SEQ ID NO: 33616 - DNA, 20 bp, Artificial Sequence
  MKO10033616_A_Ndufc2
  gRNA
atgcgaccggtgatgagagc

SEQ ID NO: 33617 - DNA, 20 bp, Artificial Sequence
  MKO10033617_A_Ndufc2
  gRNA
cgcccaagctgaacgacccg

SEQ ID NO: 33618 - DNA, 20 bp, Artificial Sequence
  MKO10033618_A_Ndufc2
  gRNA
gttacgtcctttgtctttgc

SEQ ID NO: 33619 - DNA, 20 bp, Artificial Sequence
  MKO10033619_A_Ndufs1
  gRNA
tgatggccagttcgcacaac

SEQ ID NO: 33620 - DNA, 20 bp, Artificial Sequence
  MKO10033620_A_Ndufs1
  gRNA
cttattagcaaatcacccat

SEQ ID NO: 33621 - DNA, 20 bp, Artificial Sequence
  MKO10033621_A_Ndufs1
  gRNA
tgtcctatttgtgaccaggg

SEQ ID NO: 33622 - DNA, 20 bp, Artificial Sequence
  MKO10033622_A_Ndufs2
  gRNA
ggatatacgccgcgtgcatc

SEQ ID NO: 33623 - DNA, 20 bp, Artificial Sequence
  MKO10033623_A_Ndufs2
  gRNA
gtctggggcccggatgcacg

SEQ ID NO: 33624 - DNA, 20 bp, Artificial Sequence
  MKO10033624_A_Ndufs2
  gRNA
aggcccttccatactttgac

SEQ ID NO: 33625 - DNA, 20 bp, Artificial Sequence
  MKO10033625_A_Ndufs3
  gRNA
ctgggcgaccctccgtgctg

SEQ ID NO: 33626 - DNA, 20 bp, Artificial Sequence
  MKO10033626_A_Ndufs3
  gRNA
cgaatattacctgaacttgt

SEQ ID NO: 33627 - DNA, 20 bp, Artificial Sequence
  MKO10033627_A_Ndufs3
  gRNA
gcacgtaagaagggagagcg

SEQ ID NO: 33628 - DNA, 20 bp, Artificial Sequence
  MKO10033628_A_Ndufs4
  gRNA
gactgcatgttattgcgagc

SEQ ID NO: 33629 - DNA, 20 bp, Artificial Sequence
  MKO10033629_A_Ndufs4
  gRNA
taggatatcacaactttaac

SEQ ID NO: 33630 - DNA, 20 bp, Artificial Sequence
  MKO10033630_A_Ndufs4
  gRNA
agctggcagacaaccagact

SEQ ID NO: 33631 - DNA, 20 bp, Artificial Sequence
  MKO10033631_A_Ndufs5
  gRNA
caccgagcggcgttcttata

SEQ ID NO: 33632 - DNA, 20 bp, Artificial Sequence
  MKO10033632_A_Ndufs5
  gRNA
agccctataagaacgccgct

SEQ ID NO: 33633 - DNA, 20 bp, Artificial Sequence
  MKO10033633_A_Ndufs5
  gRNA
tgcatgatatcaagaaacag

SEQ ID NO: 33634 - DNA, 20 bp, Artificial Sequence
  MKO10033634_A_Ndufs6
  gRNA
ggggttcaagtgtcgccgag

SEQ ID NO: 33635 - DNA, 20 bp, Artificial Sequence
  MKO10033635_A_Ndufs6
  gRNA
caccgcatcatagcctgcga

SEQ ID NO: 33636 - DNA, 20 bp, Artificial Sequence
  MKO10033636_A_Ndufs6
  gRNA
cccgaaaccccgtgcagccc

SEQ ID NO: 33637 - DNA, 20 bp, Artificial Sequence
  MKO10033637_A_Ndufs7
  gRNA
cagatgtacctttcggagcg

SEQ ID NO: 33638 - DNA, 20 bp, Artificial Sequence
  MKO10033638_A_Ndufs7
  gRNA
cacggaacaccacaccgaag

SEQ ID NO: 33639 - DNA, 20 bp, Artificial Sequence
  MKO10033639_A_Ndufs7
  gRNA
tctgatgaactctgcgcagc

SEQ ID NO: 33640 - DNA, 20 bp, Artificial Sequence
  MKO10033640_A_Ndufs8
  gRNA
cgatgtcatagcgtgtcgtt

SEQ ID NO: 33641 - DNA, 20 bp, Artificial Sequence
  MKO10033641_A_Ndufs8
  gRNA
gcactgcgccgctacccatc

SEQ ID NO: 33642 - DNA, 20 bp, Artificial Sequence
  MKO10033642_A_Ndufs8
  gRNA
ccactgagtccgcgcttccg

SEQ ID NO: 33643 - DNA, 20 bp, Artificial Sequence
  MKO10033643_A_Ndufv1
  gRNA
cccacaggtagctatccgag

SEQ ID NO: 33644 - DNA, 20 bp, Artificial Sequence
  MKO10033644_A_Ndufv1
  gRNA
cggatctttaccaacctgta

SEQ ID NO: 33645 - DNA, 20 bp, Artificial Sequence
  MKO10033645_A_Ndufv1
  gRNA
cctcgttgtagaattcccct

SEQ ID NO: 33646 - DNA, 20 bp, Artificial Sequence
  MKO10033646_A_Ndufv2
  gRNA
tgctggaggagccttatttg

SEQ ID NO: 33647 - DNA, 20 bp, Artificial Sequence
  MKO10033647_A_Ndufv2
  gRNA
tagtagtgcagacctggata

SEQ ID NO: 33648 - DNA, 20 bp, Artificial Sequence
  MKO10033648_A_Ndufv2
  gRNA
gcgagattctgacagcatat

SEQ ID NO: 33649 - DNA, 20 bp, Artificial Sequence
  MKO10033649_A_Ndufv3
  gRNA
aggacggatccgggcgctga

SEQ ID NO: 33650 - DNA, 20 bp, Artificial Sequence
  MKO10033650_A_Ndufv3
  gRNA
agtgtcttcgaatagctcac

SEQ ID NO: 33651 - DNA, 20 bp, Artificial Sequence
  MKO10033651_A_Ndufv3
  gRNA
gcctcccggcccttgacgac

SEQ ID NO: 33652 - DNA, 20 bp, Artificial Sequence
  MKO10033652_A_Nebl
  gRNA
caggacttacgcattgcaat

SEQ ID NO: 33653 - DNA, 20 bp, Artificial Sequence
  MKO10033653_A_Nebl
  gRNA
aagaggcttcactcccgttg

SEQ ID NO: 33654 - DNA, 20 bp, Artificial Sequence
  MKO10033654_A_Nebl
  gRNA
atcctgtgactgaacgggtg

SEQ ID NO: 33655 - DNA, 20 bp, Artificial Sequence
  MKO10033655_A_Neb
  gRNA
gtatcacttgtgatggcgta

SEQ ID NO: 33656 - DNA, 20 bp, Artificial Sequence
  MKO10033656_A_Neb
  gRNA
gaagaaggtcatccgaaaga

SEQ ID NO: 33657 - DNA, 20 bp, Artificial Sequence
  MKO10033657_A_Neb
  gRNA
gtccgatgtccttgtcgttg

SEQ ID NO: 33658 - DNA, 20 bp, Artificial Sequence
  MKO10033658_A_Necab1
  gRNA
ctcgacacagaagaactatg

SEQ ID NO: 33659 - DNA, 20 bp, Artificial Sequence
  MKO10033659_A_Necab1
  gRNA
tgatggaaaattgtcctttg

SEQ ID NO: 33660 - DNA, 20 bp, Artificial Sequence
  MKO10033660_A_Necab1
  gRNA
ttgtcttgcccattgccttc

SEQ ID NO: 33661 - DNA, 20 bp, Artificial Sequence
  MKO10033661_A_Necab2
  gRNA
ttccgccgcgccgataaaaa

SEQ ID NO: 33662 - DNA, 20 bp, Artificial Sequence
  MKO10033662_A_Necab2
  gRNA
cttggtgttgtctgaatcga

SEQ ID NO: 33663 - DNA, 20 bp, Artificial Sequence
  MKO10033663_A_Necab2
  gRNA
ttatagccacgtggacacca

SEQ ID NO: 33664 - DNA, 20 bp, Artificial Sequence
  MKO10033664_A_Necab3
  gRNA
ccggtagacacccaggtgtg

SEQ ID NO: 33665 - DNA, 20 bp, Artificial Sequence
  MKO10033665_A_Necab3
  gRNA
ccgtgcggtgctcactgcca

SEQ ID NO: 33666 - DNA, 20 bp, Artificial Sequence
  MKO10033666_A_Necab3
  gRNA
ccccatcagcaaagtaattc

SEQ ID NO: 33667 - DNA, 20 bp, Artificial Sequence
  MKO10033667_A_Necap1
  gRNA
acagggcgcagcgcgtttat

SEQ ID NO: 33668 - DNA, 20 bp, Artificial Sequence
  MKO10033668_A_Necap1
  gRNA
cgcctgcgaatcacttcaaa

SEQ ID NO: 33669 - DNA, 20 bp, Artificial Sequence
  MKO10033669_A_Necap1
  gRNA
cccccgtagaacagtatcct

SEQ ID NO: 33670 - DNA, 20 bp, Artificial Sequence
  MKO10033670_A_Necap2
  gRNA
tgccgggaaactggtccacg

SEQ ID NO: 33671 - DNA, 20 bp, Artificial Sequence
  MKO10033671_A_Necap2
  gRNA
cggctgcggatcactgcgaa

SEQ ID NO: 33672 - DNA, 20 bp, Artificial Sequence
  MKO10033672_A_Necap2
  gRNA
ctttcgcagtgatccgcagc

SEQ ID NO: 33673 - DNA, 20 bp, Artificial Sequence
  MKO10033673_A_Nedd1
  gRNA
aagagaccgatgaagtcgtt

SEQ ID NO: 33674 - DNA, 20 bp, Artificial Sequence
  MKO10033674_A_Nedd1
  gRNA
taaagtccaaacgacttcat

SEQ ID NO: 33675 - DNA, 20 bp, Artificial Sequence
  MKO10033675_A_Nedd1
  gRNA
ccttccgcaagctccaaaag

SEQ ID NO: 33676 - DNA, 20 bp, Artificial Sequence
  MKO10033676_A_Nedd4l
  gRNA
cacaccgacgcttccgctct

SEQ ID NO: 33677 - DNA, 20 bp, Artificial Sequence
  MKO10033677_A_Nedd4l
  gRNA
cagtcataaatctcgagtca

SEQ ID NO: 33678 - DNA, 20 bp, Artificial Sequence
  MKO10033678_A_Nedd4l
  gRNA
atggcctacatgccgaaaaa

SEQ ID NO: 33679 - DNA, 20 bp, Artificial Sequence
  MKO10033679_A_Nedd4
  gRNA
acattgtatgacccgatgag

SEQ ID NO: 33680 - DNA, 20 bp, Artificial Sequence
  MKO10033680_A_Nedd4
  gRNA
gttcactgctgatccgtacc

SEQ ID NO: 33681 - DNA, 20 bp, Artificial Sequence
  MKO10033681_A_Nedd4
  gRNA
tacaatgtcactcttacgta

SEQ ID NO: 33682 - DNA, 20 bp, Artificial Sequence
  MKO10033682_A_Nedd8
  gRNA
tccaaaggtggagcgaatca

SEQ ID NO: 33683 - DNA, 20 bp, Artificial Sequence
  MKO10033683_A_Nedd8
  gRNA
cagcagcggctcatctacag

SEQ ID NO: 33684 - DNA, 20 bp, Artificial Sequence
  MKO10033684_A_Nedd8
  gRNA
ctcctctaagagccaacacc

SEQ ID NO: 33685 - DNA, 20 bp, Artificial Sequence
  MKO10033685_A_Nedd9
  gRNA
ggacaatgccttggcgaccg

SEQ ID NO: 33686 - DNA, 20 bp, Artificial Sequence
  MKO10033686_A_Nedd9
  gRNA
tctaaagagggtctccgcgt

SEQ ID NO: 33687 - DNA, 20 bp, Artificial Sequence
  MKO10033687_A_Nedd9
  gRNA
ccgtcactgctaccgcagtc

SEQ ID NO: 33688 - DNA, 20 bp, Artificial Sequence
  MKO10033688_A_Nefh
  gRNA
gagatccgcgcgcagctcga

SEQ ID NO: 33689 - DNA, 20 bp, Artificial Sequence
  MKO10033689_A_Nefh
  gRNA
ccgacgtcacgtcgcacttg

SEQ ID NO: 33690 - DNA, 20 bp, Artificial Sequence
  MKO10033690_A_Nefh
  gRNA
tccgacactcttcgccttcc

SEQ ID NO: 33691 - DNA, 20 bp, Artificial Sequence
  MKO10033691_A_Nefl
  gRNA
ccgcgctcagtacgagaagc

SEQ ID NO: 33692 - DNA, 20 bp, Artificial Sequence
  MKO10033692_A_Nefl
  gRNA
tctcggttagcacggtgaag

SEQ ID NO: 33693 - DNA, 20 bp, Artificial Sequence
  MKO10033693_A_Nefl
  gRNA
acgtggctggtatagtaggc

SEQ ID NO: 33694 - DNA, 20 bp, Artificial Sequence
  MKO10033694_A_Nefm
  gRNA
cctcttcgtgattgctccgc

SEQ ID NO: 33695 - DNA, 20 bp, Artificial Sequence
  MKO10033695_A_Nefm
  gRNA
gtctttgcgcagcgcgcgaa

SEQ ID NO: 33696 - DNA, 20 bp, Artificial Sequence
  MKO10033696_A_Nefm
  gRNA
tcgtcatttgcgagaatacc

SEQ ID NO: 33697 - DNA, 20 bp, Artificial Sequence
  MKO10033697_A_Negr1
  gRNA
gcgcttgttgctcgaaccag

SEQ ID NO: 33698 - DNA, 20 bp, Artificial Sequence
  MKO10033698_A_Negr1
  gRNA
agcaacaagcgccctgcgcc

SEQ ID NO: 33699 - DNA, 20 bp, Artificial Sequence
  MKO10033699_A_Negr1
  gRNA
gatacttgacctgttgagcc

SEQ ID NO: 33700 - DNA, 20 bp, Artificial Sequence
  MKO10033700_A_Neil1
  gRNA
tacggccatgccggtctcgc

SEQ ID NO: 33701 - DNA, 20 bp, Artificial Sequence
  MKO10033701_A_Neil1
  gRNA
agctccctgcgagaccggca

SEQ ID NO: 33702 - DNA, 20 bp, Artificial Sequence
  MKO10033702_A_Neil1
  gRNA
cctgcagagagaacgtactt

SEQ ID NO: 33703 - DNA, 20 bp, Artificial Sequence
  MKO10033703_A_Neil2
  gRNA
ggccctcgtggatcacgtgg

SEQ ID NO: 33704 - DNA, 20 bp, Artificial Sequence
  MKO10033704_A_Neil2
  gRNA
actccaccacgtgatccacg

SEQ ID NO: 33705 - DNA, 20 bp, Artificial Sequence
  MKO10033705_A_Neil2
  gRNA
cccccgtcttgaccaccttc

SEQ ID NO: 33706 - DNA, 20 bp, Artificial Sequence
  MKO10033706_A_Neil3
  gRNA
ttgatgatgttgcccacgcc

SEQ ID NO: 33707 - DNA, 20 bp, Artificial Sequence
  MKO10033707_A_Neil3
  gRNA
aatcccgagtcatcttcaca

SEQ ID NO: 33708 - DNA, 20 bp, Artificial Sequence
  MKO10033708_A_Neil3
  gRNA
tcagagggtgttgcctggcg

SEQ ID NO: 33709 - DNA, 20 bp, Artificial Sequence
  MKO10033709_A_Nek10
  gRNA
gatgcgggatccatgttatc

SEQ ID NO: 33710 - DNA, 20 bp, Artificial Sequence
  MKO10033710_A_Nek10
  gRNA
tgcttgactgaacgttcaac

SEQ ID NO: 33711 - DNA, 20 bp, Artificial Sequence
  MKO10033711_A_Nek10
  gRNA
acagggggacatagagctcg

SEQ ID NO: 33712 - DNA, 20 bp, Artificial Sequence
  MKO10033712_A_Nek11
  gRNA
tttctttcagggccgagatc

SEQ ID NO: 33713 - DNA, 20 bp, Artificial Sequence
  MKO10033713_A_Nek11
  gRNA
cccccattatatgagtcccg

SEQ ID NO: 33714 - DNA, 20 bp, Artificial Sequence
  MKO10033714_A_Nek11
  gRNA
gcctcgggactcatataatg

SEQ ID NO: 33715 - DNA, 20 bp, Artificial Sequence
  MKO10033715_A_Nek1
  gRNA
aaggagagaagttgctgtat

SEQ ID NO: 33716 - DNA, 20 bp, Artificial Sequence
  MKO10033716_A_Nek1
  gRNA
cgctctgtttcaagaagacc

SEQ ID NO: 33717 - DNA, 20 bp, Artificial Sequence
  MKO10033717_A_Nek1
  gRNA
aagctgcactgtcccatctt

SEQ ID NO: 33718 - DNA, 20 bp, Artificial Sequence
  MKO10033718_A_Nek2
  gRNA
gatgtccgacttctcgttgt

SEQ ID NO: 33719 - DNA, 20 bp, Artificial Sequence
  MKO10033719_A_Nek2
  gRNA
cttatcctacaacgagaagt

SEQ ID NO: 33720 - DNA, 20 bp, Artificial Sequence
  MKO10033720_A_Nek2
  gRNA
agtgatgactcagttgacgc

SEQ ID NO: 33721 - DNA, 20 bp, Artificial Sequence
  MKO10033721_A_Nek3
  gRNA
cggcttcttaccgtgtcttc

SEQ ID NO: 33722 - DNA, 20 bp, Artificial Sequence
  MKO10033722_A_Nek3
  gRNA
ccccaatattgttgccttta

SEQ ID NO: 33723 - DNA, 20 bp, Artificial Sequence
  MKO10033723_A_Nek3
  gRNA
aatattggggtgcttcattt

SEQ ID NO: 33724 - DNA, 20 bp, Artificial Sequence
  MKO10033724_A_Nek4
  gRNA
gcccgcgtcttagagaatca

SEQ ID NO: 33725 - DNA, 20 bp, Artificial Sequence
  MKO10033725_A_Nek4
  gRNA
caccgtgattctctaagacg

SEQ ID NO: 33726 - DNA, 20 bp, Artificial Sequence
  MKO10033726_A_Nek4
  gRNA
gctcagcagctcgacgctct

SEQ ID NO: 33727 - DNA, 20 bp, Artificial Sequence
  MKO10033727_A_Nek5
  gRNA
cggcaggctgtttattgtaa

SEQ ID NO: 33728 - DNA, 20 bp, Artificial Sequence
  MKO10033728_A_Nek5
  gRNA
gttgccaagctcggggactt

SEQ ID NO: 33729 - DNA, 20 bp, Artificial Sequence
  MKO10033729_A_Nek5
  gRNA
gactgaagcatattcatgac

SEQ ID NO: 33730 - DNA, 20 bp, Artificial Sequence
  MKO10033730_A_Nek6
  gRNA
tcccgacgtgtgatgcaccg

SEQ ID NO: 33731 - DNA, 20 bp, Artificial Sequence
  MKO10033731_A_Nek6
  gRNA
cacctcggtgcatcacacgt

SEQ ID NO: 33732 - DNA, 20 bp, Artificial Sequence
  MKO10033732_A_Nek6
  gRNA
cagctcattgtcttcgatga

SEQ ID NO: 33733 - DNA, 20 bp, Artificial Sequence
  MKO10033733_A_Nek7
  gRNA
ggtagcgttaaaaaaagtac

SEQ ID NO: 33734 - DNA, 20 bp, Artificial Sequence
  MKO10033734_A_Nek7
  gRNA
taatccctgagagaaccgtt

SEQ ID NO: 33735 - DNA, 20 bp, Artificial Sequence
  MKO10033735_A_Nek7
  gRNA
gatacaatcagcacgtgctt

SEQ ID NO: 33736 - DNA, 20 bp, Artificial Sequence
  MKO10033736_A_Nek8
  gRNA
ctcatagtactcgatgacgt

SEQ ID NO: 33737 - DNA, 20 bp, Artificial Sequence
  MKO10033737_A_Nek8
  gRNA
gcttctggtcggcctttcgc

SEQ ID NO: 33738 - DNA, 20 bp, Artificial Sequence
  MKO10033738_A_Nek8
  gRNA
cagcctcaagagggccttcg

SEQ ID NO: 33739 - DNA, 20 bp, Artificial Sequence
  MKO10033739_A_Nek9
  gRNA
tgtgttgcaggacgactcac

SEQ ID NO: 33740 - DNA, 20 bp, Artificial Sequence
  MKO10033740_A_Nek9
  gRNA
acaacttgtccttctgacga

SEQ ID NO: 33741 - DNA, 20 bp, Artificial Sequence
  MKO10033741_A_Nek9
  gRNA
tgacaaaatccttcgtcaga

SEQ ID NO: 33742 - DNA, 20 bp, Artificial Sequence
  MKO10033742_A_Nelfa
  gRNA
tcccattccacgctaagggc

SEQ ID NO: 33743 - DNA, 20 bp, Artificial Sequence
  MKO10033743_A_Nelfa
  gRNA
tatcatccagctggccacgc

SEQ ID NO: 33744 - DNA, 20 bp, Artificial Sequence
  MKO10033744_A_Nelfa
  gRNA
cccagaaggactgaagacgc

SEQ ID NO: 33745 - DNA, 20 bp, Artificial Sequence
  MKO10033745_A_Nelfb
  gRNA
cgccacgctaccttatggca

SEQ ID NO: 33746 - DNA, 20 bp, Artificial Sequence
  MKO10033746_A_Nelfb
  gRNA
tccgcaggaacagtgtgcgc

SEQ ID NO: 33747 - DNA, 20 bp, Artificial Sequence
  MKO10033747_A_Nelfb
  gRNA
ctgcccttcttggatctaca

SEQ ID NO: 33748 - DNA, 20 bp, Artificial Sequence
  MKO10033748_A_Nelfcd
  gRNA
tgatcaagcacttcgaccct

SEQ ID NO: 33749 - DNA, 20 bp, Artificial Sequence
  MKO10033749_A_Nelfcd
  gRNA
ggcccagacagtgaacctgc

SEQ ID NO: 33750 - DNA, 20 bp, Artificial Sequence
  MKO10033750_A_Nelfcd
  gRNA
aagttgagcatcaaacagtc

SEQ ID NO: 33751 - DNA, 20 bp, Artificial Sequence
  MKO10033751_A_Nelfe
  gRNA
tacagcgtttgacaccgccc

SEQ ID NO: 33752 - DNA, 20 bp, Artificial Sequence
  MKO10033752_A_Nelfe
  gRNA
actcaggcttcaaacgttct

SEQ ID NO: 33753 - DNA, 20 bp, Artificial Sequence
  MKO10033753_A_Nelfe
  gRNA
ccactttccagccgttccag

SEQ ID NO: 33754 - DNA, 20 bp, Artificial Sequence
  MKO10033754_A_Nell1
  gRNA
gatactgtcgatccgggagc

SEQ ID NO: 33755 - DNA, 20 bp, Artificial Sequence
  MKO10033755_A_Nell1
  gRNA
catacctattgcagtcgaca

SEQ ID NO: 33756 - DNA, 20 bp, Artificial Sequence
  MKO10033756_A_Nell1
  gRNA
cactcttattccggaatagc

SEQ ID NO: 33757 - DNA, 20 bp, Artificial Sequence
  MKO10033757_A_Nell2
  gRNA
atcagactccactaccgctc

SEQ ID NO: 33758 - DNA, 20 bp, Artificial Sequence
  MKO10033758_A_Nell2
  gRNA
agatggagtgcgccaagtcc

SEQ ID NO: 33759 - DNA, 20 bp, Artificial Sequence
  MKO10033759_A_Nell2
  gRNA
ctgttaagacgtcaatctgt

SEQ ID NO: 33760 - DNA, 20 bp, Artificial Sequence
  MKO10033760_A_Nemf
  gRNA
cttcatcagttcgaaacctt

SEQ ID NO: 33761 - DNA, 20 bp, Artificial Sequence
  MKO10033761_A_Nemf
  gRNA
cagcttcgtcacttccaaac

SEQ ID NO: 33762 - DNA, 20 bp, Artificial Sequence
  MKO10033762_A_Nemf
  gRNA
gctacactgttacttgagtc

SEQ ID NO: 33763 - DNA, 20 bp, Artificial Sequence
  MKO10033763_A_Nenf
  gRNA
gctggcccgctacggcggcg

SEQ ID NO: 33764 - DNA, 20 bp, Artificial Sequence
  MKO10033764_A_Nenf
  gRNA
ccttgctgaagacgtcatcg

SEQ ID NO: 33765 - DNA, 20 bp, Artificial Sequence
  MKO10033765_A_Nenf
  gRNA
gctgctggcggcgctcgtcc

SEQ ID NO: 33766 - DNA, 20 bp, Artificial Sequence
  MKO10033766_A_Neo1
  gRNA
cactgatagaaaccttcgtc

SEQ ID NO: 33767 - DNA, 20 bp, Artificial Sequence
  MKO10033767_A_Neo1
  gRNA
tcagcttcgtcactaaactt

SEQ ID NO: 33768 - DNA, 20 bp, Artificial Sequence
  MKO10033768_A_Neo1
  gRNA
taccgctgcattgttgaaag

SEQ ID NO: 33769 - DNA, 20 bp, Artificial Sequence
  MKO10033769_A_Nepn
  gRNA
ccgagatccggttgttcctg

SEQ ID NO: 33770 - DNA, 20 bp, Artificial Sequence
  MKO10033770_A_Nepn
  gRNA
gttggacaatgcacccgctt

SEQ ID NO: 33771 - DNA, 20 bp, Artificial Sequence
  MKO10033771_A_Nepn
  gRNA
gaatcacaactgcatcgtcc

SEQ ID NO: 33772 - DNA, 20 bp, Artificial Sequence
  MKO10033772_A_Nes
  gRNA
cccgccagcgctgatcgacg

SEQ ID NO: 33773 - DNA, 20 bp, Artificial Sequence
  MKO10033773_A_Nes
  gRNA
gggactccgggcgcagtccg

SEQ ID NO: 33774 - DNA, 20 bp, Artificial Sequence
  MKO10033774_A_Nes
  gRNA
accctactaaaggggccttg

SEQ ID NO: 33775 - DNA, 20 bp, Artificial Sequence
  MKO10033775_A_Net1
  gRNA
gcgcttcggtcagaccatac

SEQ ID NO: 33776 - DNA, 20 bp, Artificial Sequence
  MKO10033776_A_Net1
  gRNA
gcttatatacctctgcacga

SEQ ID NO: 33777 - DNA, 20 bp, Artificial Sequence
  MKO10033777_A_Net1
  gRNA
ctttagtcgtttacccttcg

SEQ ID NO: 33778 - DNA, 20 bp, Artificial Sequence
  MKO10033778_A_Neto1
  gRNA
gctcgatataatttcacacc

SEQ ID NO: 33779 - DNA, 20 bp, Artificial Sequence
  MKO10033779_A_Neto1
  gRNA
aatactcaatcgaaccatct

SEQ ID NO: 33780 - DNA, 20 bp, Artificial Sequence
  MKO10033780_A_Neto1
  gRNA
aacgtggacaaagcatgcag

SEQ ID NO: 33781 - DNA, 20 bp, Artificial Sequence
  MKO10033781_A_Neto2
  gRNA
cccgttgacctaattaatgc

SEQ ID NO: 33782 - DNA, 20 bp, Artificial Sequence
  MKO10033782_A_Neto2
  gRNA
ccacagtaacgatctataag

SEQ ID NO: 33783 - DNA, 20 bp, Artificial Sequence
  MKO10033783_A_Neto2
  gRNA
ttcgaacccaaataccacac

SEQ ID NO: 33784 - DNA, 20 bp, Artificial Sequence
  MKO10033784_A_Neu1
  gRNA
tttcaaccccgacgagtgcc

SEQ ID NO: 33785 - DNA, 20 bp, Artificial Sequence
  MKO10033785_A_Neu1
  gRNA
ctccccatcgtctacgatga

SEQ ID NO: 33786 - DNA, 20 bp, Artificial Sequence
  MKO10033786_A_Neu1
  gRNA
gttgaaatcgtgatcgtgtt

SEQ ID NO: 33787 - DNA, 20 bp, Artificial Sequence
  MKO10033787_A_Neu2
  gRNA
cgaagccaccaaccgtgtca

SEQ ID NO: 33788 - DNA, 20 bp, Artificial Sequence
  MKO10033788_A_Neu2
  gRNA
ccacacttccatgacacccg

SEQ ID NO: 33789 - DNA, 20 bp, Artificial Sequence
  MKO10033789_A_Neu2
  gRNA
ctacaagcttactcactacc

SEQ ID NO: 33790 - DNA, 20 bp, Artificial Sequence
  MKO10033790_A_Neu3
  gRNA
ttgactagtggggcccccaa

SEQ ID NO: 33791 - DNA, 20 bp, Artificial Sequence
  MKO10033791_A_Neu3
  gRNA
cgcccgtggatcttgaaccg

SEQ ID NO: 33792 - DNA, 20 bp, Artificial Sequence
  MKO10033792_A_Neu3
  gRNA
aacagagtggggtgacctac

SEQ ID NO: 33793 - DNA, 20 bp, Artificial Sequence
  MKO10033793_A_Neu4
  gRNA
gctaagtcgctgttccgcga

SEQ ID NO: 33794 - DNA, 20 bp, Artificial Sequence
  MKO10033794_A_Neu4
  gRNA
cttgtgcccaacctacgctc

SEQ ID NO: 33795 - DNA, 20 bp, Artificial Sequence
  MKO10033795_A_Neu4
  gRNA
gaggccgtgcaaatcgccac

SEQ ID NO: 33796 - DNA, 20 bp, Artificial Sequence
  MKO10033796_A_Neurl1a
  gRNA
cattgcccgcctacgctgtc

SEQ ID NO: 33797 - DNA, 20 bp, Artificial Sequence
  MKO10033797_A_Neurl1a
  gRNA
ccgccgcgccgttgtgactc

SEQ ID NO: 33798 - DNA, 20 bp, Artificial Sequence
  MKO10033798_A_Neurl1a
  gRNA
cgcttccacgcgcttcgcgc

SEQ ID NO: 33799 - DNA, 20 bp, Artificial Sequence
  MKO10033799_A_Neurl1b
  gRNA
accgccgcgtaccgcgaaga

SEQ ID NO: 33800 - DNA, 20 bp, Artificial Sequence
  MKO10033800_A_Neurl1b
  gRNA
cactgtagaagacgcgaccg

SEQ ID NO: 33801 - DNA, 20 bp, Artificial Sequence
  MKO10033801_A_Neurl1b
  gRNA
ccccattcgcctgtacgagc

SEQ ID NO: 33802 - DNA, 20 bp, Artificial Sequence
  MKO10033802_A_Neurl2
  gRNA
accgtctggtgggccgcagc

SEQ ID NO: 33803 - DNA, 20 bp, Artificial Sequence
  MKO10033803_A_Neurl2
  gRNA
ccagacggtcccggggaatt

SEQ ID NO: 33804 - DNA, 20 bp, Artificial Sequence
  MKO10033804_A_Neurl2
  gRNA
gccgactagtgatccagaag

SEQ ID NO: 33805 - DNA, 20 bp, Artificial Sequence
  MKO10033805_A_Neurl3
  gRNA
aggcgctcgacgttccacga

SEQ ID NO: 33806 - DNA, 20 bp, Artificial Sequence
  MKO10033806_A_Neurl3
  gRNA
catatgtcgctggcagatcg

SEQ ID NO: 33807 - DNA, 20 bp, Artificial Sequence
  MKO10033807_A_Neurl3
  gRNA
ctcgatctgccagcgacata

SEQ ID NO: 33808 - DNA, 20 bp, Artificial Sequence
  MKO10033808_A_Neurl4
  gRNA
tgtctacaagcttgtcgatc

SEQ ID NO: 33809 - DNA, 20 bp, Artificial Sequence
  MKO10033809_A_Neurl4
  gRNA
ggcccccattgtaggcagac

SEQ ID NO: 33810 - DNA, 20 bp, Artificial Sequence
  MKO10033810_A_Neurl4
  gRNA
gcgggacgggcgctctgtgt

SEQ ID NO: 33811 - DNA, 20 bp, Artificial Sequence
  MKO10033811_A_Neurod1
  gRNA
gccggcgaccaaattggtag

SEQ ID NO: 33812 - DNA, 20 bp, Artificial Sequence
  MKO10033812_A_Neurod1
  gRNA
gtcccagcccactaccaatt

SEQ ID NO: 33813 - DNA, 20 bp, Artificial Sequence
  MKO10033813_A_Neurod1
  gRNA
ttcgtacagacgctctgcaa

SEQ ID NO: 33814 - DNA, 20 bp, Artificial Sequence
  MKO10033814_A_Neurod2
  gRNA
cgcctacgagacgctgtacg

SEQ ID NO: 33815 - DNA, 20 bp, Artificial Sequence
  MKO10033815_A_Neurod2
  gRNA
tttcttcggcccgcgcttct

SEQ ID NO: 33816 - DNA, 20 bp, Artificial Sequence
  MKO10033816_A_Neurod2
  gRNA
cgaacttgggcacgtccgag

SEQ ID NO: 33817 - DNA, 20 bp, Artificial Sequence
  MKO10033817_A_Neurod4
  gRNA
caagatagagactcttcgac

SEQ ID NO: 33818 - DNA, 20 bp, Artificial Sequence
  MKO10033818_A_Neurod4
  gRNA
aagctcgccttgaaagattc

SEQ ID NO: 33819 - DNA, 20 bp, Artificial Sequence
  MKO10033819_A_Neurod4
  gRNA
gactctcctaagattatcca

SEQ ID NO: 33820 - DNA, 20 bp, Artificial Sequence
  MKO10033820_A_Neurod6
  gRNA
ctgcgcagatgtaagtcgta

SEQ ID NO: 33821 - DNA, 20 bp, Artificial Sequence
  MKO10033821_A_Neurod6
  gRNA
ctaatgcgcgcgagaggaac

SEQ ID NO: 33822 - DNA, 20 bp, Artificial Sequence
  MKO10033822_A_Neurod6
  gRNA
attacgacagactcgtcaaa

SEQ ID NO: 33823 - DNA, 20 bp, Artificial Sequence
  MKO10033823_A_Neurog1
  gRNA
accgggaacattcgatgccc

SEQ ID NO: 33824 - DNA, 20 bp, Artificial Sequence
  MKO10033824_A_Neurog1
  gRNA
aacagggcgtcgtgtggagc

SEQ ID NO: 33825 - DNA, 20 bp, Artificial Sequence
  MKO10033825_A_Neurog1
  gRNA
tccggggcatcgaatgttcc

SEQ ID NO: 33826 - DNA, 20 bp, Artificial Sequence
  MKO10033826_A_Neurog2
  gRNA
gagacggcccgtgagcgcga

SEQ ID NO: 33827 - DNA, 20 bp, Artificial Sequence
  MKO10033827_A_Neurog2
  gRNA
ctcgcgcagcgcgtccagcg

SEQ ID NO: 33828 - DNA, 20 bp, Artificial Sequence
  MKO10033828_A_Neurog2
  gRNA
gcagtccggcgtcgggtgcc

SEQ ID NO: 33829 - DNA, 20 bp, Artificial Sequence
  MKO10033829_A_Neurog3
  gRNA
aggaagctccgcgcccgacg

SEQ ID NO: 33830 - DNA, 20 bp, Artificial Sequence
  MKO10033830_A_Neurog3
  gRNA
gcgcatccagcgccgagttg

SEQ ID NO: 33831 - DNA, 20 bp, Artificial Sequence
  MKO10033831_A_Neurog3
  gRNA
gcctgttgcgccctccgcgt

SEQ ID NO: 33832 - DNA, 20 bp, Artificial Sequence
  MKO10033832_A_Nexn
  gRNA
tgttacctctgatgcggact

SEQ ID NO: 33833 - DNA, 20 bp, Artificial Sequence
  MKO10033833_A_Nexn
  gRNA
gcgcgaattagcaaaaagag

SEQ ID NO: 33834 - DNA, 20 bp, Artificial Sequence
  MKO10033834_A_Nexn
  gRNA
tgactcactacttataacag

SEQ ID NO: 33835 - DNA, 20 bp, Artificial Sequence
  MKO10033835_A_Nf1
  gRNA
tccgaagttcggctgcatgt

SEQ ID NO: 33836 - DNA, 20 bp, Artificial Sequence
  MKO10033836_A_Nf1
  gRNA
tctttagtcgcatttctaca

SEQ ID NO: 33837 - DNA, 20 bp, Artificial Sequence
  MKO10033837_A_Nf1
  gRNA
agtcagcaccgagcacaaca

SEQ ID NO: 33838 - DNA, 20 bp, Artificial Sequence
  MKO10033838_A_Nf2
  gRNA
gatccgcaccgtgaatgtct

SEQ ID NO: 33839 - DNA, 20 bp, Artificial Sequence
  MKO10033839_A_Nf2
  gRNA
gaagctcatgcgagaagcga

SEQ ID NO: 33840 - DNA, 20 bp, Artificial Sequence
  MKO10033840_A_Nf2
  gRNA
cttggcgtcatatgctgtcc

SEQ ID NO: 33841 - DNA, 20 bp, Artificial Sequence
  MKO10033841_A_Nfam1
  gRNA
aggctttgtggttccgacgg

SEQ ID NO: 33842 - DNA, 20 bp, Artificial Sequence
  MKO10033842_A_Nfam1
  gRNA
atatccatggccggagacgc

SEQ ID NO: 33843 - DNA, 20 bp, Artificial Sequence
  MKO10033843_A_Nfam1
  gRNA
gtccctacagcgtcgagaga

SEQ ID NO: 33844 - DNA, 20 bp, Artificial Sequence
  MKO10033844_A_Nfasc
  gRNA
acggtccatcggaatctcga

SEQ ID NO: 33845 - DNA, 20 bp, Artificial Sequence
  MKO10033845_A_Nfasc
  gRNA
ggaaaacctagaccccgtcg

SEQ ID NO: 33846 - DNA, 20 bp, Artificial Sequence
  MKO10033846_A_Nfasc
  gRNA
ctacagtgcaaccccccacc

SEQ ID NO: 33847 - DNA, 20 bp, Artificial Sequence
  MKO10033847_A_Nfat5
  gRNA
aaagagcactcgtgccagat

SEQ ID NO: 33848 - DNA, 20 bp, Artificial Sequence
  MKO10033848_A_Nfat5
  gRNA
atttcgcccagttactctac

SEQ ID NO: 33849 - DNA, 20 bp, Artificial Sequence
  MKO10033849_A_Nfat5
  gRNA
atgctgctgaactgtgttac

SEQ ID NO: 33850 - DNA, 20 bp, Artificial Sequence
  MKO10033850_A_Nfatc1
  gRNA
acctcgatccgaagctcgta

SEQ ID NO: 33851 - DNA, 20 bp, Artificial Sequence
  MKO10033851_A_Nfatc1
  gRNA
gggcttcgcccactgatacg

SEQ ID NO: 33852 - DNA, 20 bp, Artificial Sequence
  MKO10033852_A_Nfatc1
  gRNA
attctggtccatacgagctt

SEQ ID NO: 33853 - DNA, 20 bp, Artificial Sequence
  MKO10033853_A_Nfatc2ip
  gRNA
tcactaggtcagcccggcac

SEQ ID NO: 33854 - DNA, 20 bp, Artificial Sequence
  MKO10033854_A_Nfatc2ip
  gRNA
ctttgccccaaccttcgtca

SEQ ID NO: 33855 - DNA, 20 bp, Artificial Sequence
  MKO10033855_A_Nfatc2ip
  gRNA
gactctttacactcaagatc

SEQ ID NO: 33856 - DNA, 20 bp, Artificial Sequence
  MKO10033856_A_Nfatc2
  gRNA
ggacgtgcacgcggaacacc

SEQ ID NO: 33857 - DNA, 20 bp, Artificial Sequence
  MKO10033857_A_Nfatc2
  gRNA
tcctcggcgaggctggttcg

SEQ ID NO: 33858 - DNA, 20 bp, Artificial Sequence
  MKO10033858_A_Nfatc2
  gRNA
acctcgaaccagcctcgccg

SEQ ID NO: 33859 - DNA, 20 bp, Artificial Sequence
  MKO10033859_A_Nfatc3
  gRNA
gatcaagctgccatactacc

SEQ ID NO: 33860 - DNA, 20 bp, Artificial Sequence
  MKO10033860_A_Nfatc3
  gRNA
aggtcgtaaatatctatcat

SEQ ID NO: 33861 - DNA, 20 bp, Artificial Sequence
  MKO10033861_A_Nfatc3
  gRNA
ttccagtaatccgatgcacc

SEQ ID NO: 33862 - DNA, 20 bp, Artificial Sequence
  MKO10033862_A_Nfatc4
  gRNA
ggaatagcgccgcttgccgc

SEQ ID NO: 33863 - DNA, 20 bp, Artificial Sequence
  MKO10033863_A_Nfatc4
  gRNA
gaactagggtcccggaccag

SEQ ID NO: 33864 - DNA, 20 bp, Artificial Sequence
  MKO10033864_A_Nfatc4
  gRNA
taaggtcatctccaacactt

SEQ ID NO: 33865 - DNA, 20 bp, Artificial Sequence
  MKO10033865_A_Nfe2l1
  gRNA
ggcccgattgcttcgagaaa

SEQ ID NO: 33866 - DNA, 20 bp, Artificial Sequence
  MKO10033866_A_Nfe2l1
  gRNA
ttccgcaccctcgcctgacc

SEQ ID NO: 33867 - DNA, 20 bp, Artificial Sequence
  MKO10033867_A_Nfe2l1
  gRNA
gatcaatatcctgtcgccaa

SEQ ID NO: 33868 - DNA, 20 bp, Artificial Sequence
  MKO10033868_A_Nfe2l2
  gRNA
ttactcatcgatctcctcgc

SEQ ID NO: 33869 - DNA, 20 bp, Artificial Sequence
  MKO10033869_A_Nfe2l2
  gRNA
agccttcaatagtcccgtcc

SEQ ID NO: 33870 - DNA, 20 bp, Artificial Sequence
  MKO10033870_A_Nfe2l2
  gRNA
atgtgctgggccggctgaat

SEQ ID NO: 33871 - DNA, 20 bp, Artificial Sequence
  MKO10033871_A_Nfe2l3
  gRNA
cgcgcacttcgtgcagcagc

SEQ ID NO: 33872 - DNA, 20 bp, Artificial Sequence
  MKO10033872_A_Nfe2l3
  gRNA
cgccgcccgcggatgctgac

SEQ ID NO: 33873 - DNA, 20 bp, Artificial Sequence
  MKO10033873_A_Nfe2l3
  gRNA
tgatgtctagtttacgttta

SEQ ID NO: 33874 - DNA, 20 bp, Artificial Sequence
  MKO10033874_A_Nfe2
  gRNA
tagttcgggacatccgtcga

SEQ ID NO: 33875 - DNA, 20 bp, Artificial Sequence
  MKO10033875_A_Nfe2
  gRNA
tcgggacgagcggcgagccc

SEQ ID NO: 33876 - DNA, 20 bp, Artificial Sequence
  MKO10033876_A_Nfe2
  gRNA
atctctccaagctccccaac

SEQ ID NO: 33877 - DNA, 20 bp, Artificial Sequence
  MKO10033877_A_Nfia
  gRNA
cttgttcaaaggtattccgc

SEQ ID NO: 33878 - DNA, 20 bp, Artificial Sequence
  MKO10033878_A_Nfia
  gRNA
gaagtgggcttcccgacttc

SEQ ID NO: 33879 - DNA, 20 bp, Artificial Sequence
  MKO10033879_A_Nfia
  gRNA
cacaggacatttgggcttcc

SEQ ID NO: 33880 - DNA, 20 bp, Artificial Sequence
  MKO10033880_A_Nfib
  gRNA
actgcgcaaagatatccgcc

SEQ ID NO: 33881 - DNA, 20 bp, Artificial Sequence
  MKO10033881_A_Nfib
  gRNA
gcggatatctttgcgcagtt

SEQ ID NO: 33882 - DNA, 20 bp, Artificial Sequence
  MKO10033882_A_Nfib
  gRNA
tttacagattctggacaatc

SEQ ID NO: 33883 - DNA, 20 bp, Artificial Sequence
  MKO10033883_A_Nfic
  gRNA
accgcgctcccgcacaaagt

SEQ ID NO: 33884 - DNA, 20 bp, Artificial Sequence
  MKO10033884_A_Nfic
  gRNA
tgtgtgcagccgcaccatat

SEQ ID NO: 33885 - DNA, 20 bp, Artificial Sequence
  MKO10033885_A_Nfic
  gRNA
agctgactcacccagcgtta

SEQ ID NO: 33886 - DNA, 20 bp, Artificial Sequence
  MKO10033886_A_Nfil3
  gRNA
ccgccgtttctcccaataca

SEQ ID NO: 33887 - DNA, 20 bp, Artificial Sequence
  MKO10033887_A_Nfil3
  gRNA
gcgcttctcccgagatcttt

SEQ ID NO: 33888 - DNA, 20 bp, Artificial Sequence
  MKO10033888_A_Nfil3
  gRNA
ctggagtccgaagccgagat

SEQ ID NO: 33889 - DNA, 20 bp, Artificial Sequence
  MKO10033889_A_Nfix
  gRNA
gctccagttgcgactgcatc

SEQ ID NO: 33890 - DNA, 20 bp, Artificial Sequence
  MKO10033890_A_Nfix
  gRNA
caacttctcactggcggacc

SEQ ID NO: 33891 - DNA, 20 bp, Artificial Sequence
  MKO10033891_A_Nfix
  gRNA
acaggccggggttcgagcac

SEQ ID NO: 33892 - DNA, 20 bp, Artificial Sequence
  MKO10033892_A_Nfkb1
  gRNA
tgcaaaggttatcgttcagt

SEQ ID NO: 33893 - DNA, 20 bp, Artificial Sequence
  MKO10033893_A_Nfkb1
  gRNA
cccggaagccctccgtgtga

SEQ ID NO: 33894 - DNA, 20 bp, Artificial Sequence
  MKO10033894_A_Nfkb1
  gRNA
cgattccgctatgtgtgtga

SEQ ID NO: 33895 - DNA, 20 bp, Artificial Sequence
  MKO10033895_A_Nfkb2
  gRNA
cgaggcttcagatttcgata

SEQ ID NO: 33896 - DNA, 20 bp, Artificial Sequence
  MKO10033896_A_Nfkb2
  gRNA
tcgtgcgcatgcccacagtc

SEQ ID NO: 33897 - DNA, 20 bp, Artificial Sequence
  MKO10033897_A_Nfkb2
  gRNA
ggccaagattgaggtggacc

SEQ ID NO: 33898 - DNA, 20 bp, Artificial Sequence
  MKO10033898_A_Nfkbia
  gRNA
gagggctgtccggccattgc

SEQ ID NO: 33899 - DNA, 20 bp, Artificial Sequence
  MKO10033899_A_Nfkbia
  gRNA
gggtgctgatgtcaacgctc

SEQ ID NO: 33900 - DNA, 20 bp, Artificial Sequence
  MKO10033900_A_Nfkbia
  gRNA
ctgcgtcaagactgctacac

SEQ ID NO: 33901 - DNA, 20 bp, Artificial Sequence
  MKO10033901_A_Nfkbib
  gRNA
cggagccgacctcaataaac

SEQ ID NO: 33902 - DNA, 20 bp, Artificial Sequence
  MKO10033902_A_Nfkbib
  gRNA
agccgcgtgatgaagactgg

SEQ ID NO: 33903 - DNA, 20 bp, Artificial Sequence
  MKO10033903_A_Nfkbib
  gRNA
ggtgcggcccccatacatgc

SEQ ID NO: 33904 - DNA, 20 bp, Artificial Sequence
  MKO10033904_A_Nfkbid
  gRNA
tgacttacagacgccgctcc

SEQ ID NO: 33905 - DNA, 20 bp, Artificial Sequence
  MKO10033905_A_Nfkbid
  gRNA
tgtctccagggacggtccgg

SEQ ID NO: 33906 - DNA, 20 bp, Artificial Sequence
  MKO10033906_A_Nfkbid
  gRNA
gttacagatgtaccgacagc

SEQ ID NO: 33907 - DNA, 20 bp, Artificial Sequence
  MKO10033907_A_Nfkbie
  gRNA
gggggccagccgaattctgc

SEQ ID NO: 33908 - DNA, 20 bp, Artificial Sequence
  MKO10033908_A_Nfkbie
  gRNA
catctacccgggcaccggcc

SEQ ID NO: 33909 - DNA, 20 bp, Artificial Sequence
  MKO10033909_A_Nfkbie
  gRNA
ggcgccgacaggccacatgc

SEQ ID NO: 33910 - DNA, 20 bp, Artificial Sequence
  MKO10033910_A_Nfkbil1
  gRNA
accgccgagagcgacgcttc

SEQ ID NO: 33911 - DNA, 20 bp, Artificial Sequence
  MKO10033911_A_Nfkbil1
  gRNA
agcgtcgctctcggcggtgc

SEQ ID NO: 33912 - DNA, 20 bp, Artificial Sequence
  MKO10033912_A_Nfkbil1
  gRNA
tacccgacagacagacgtag

SEQ ID NO: 33913 - DNA, 20 bp, Artificial Sequence
  MKO10033913_A_Nfkbiz
  gRNA
cgtcgtcggggtgcacgatg

SEQ ID NO: 33914 - DNA, 20 bp, Artificial Sequence
  MKO10033914_A_Nfkbiz
  gRNA
aatactggtacattgacgcc

SEQ ID NO: 33915 - DNA, 20 bp, Artificial Sequence
  MKO10033915_A_Nfkbiz
  gRNA
acgcttaccacgaagtgaga

SEQ ID NO: 33916 - DNA, 20 bp, Artificial Sequence
  MKO10033916_A_Nfrkb
  gRNA
agactttcaagtaacgctgc

SEQ ID NO: 33917 - DNA, 20 bp, Artificial Sequence
  MKO10033917_A_Nfrkb
  gRNA
gtccgccactcccgctcctc

SEQ ID NO: 33918 - DNA, 20 bp, Artificial Sequence
  MKO10033918_A_Nfrkb
  gRNA
tgacgatacttgaccacctc

SEQ ID NO: 33919 - DNA, 20 bp, Artificial Sequence
  MKO10033919_A_Nfs1
  gRNA
ctagtgaaaatgatctcccg

SEQ ID NO: 33920 - DNA, 20 bp, Artificial Sequence
  MKO10033920_A_Nfs1
  gRNA
aacctggcgagcacgttcca

SEQ ID NO: 33921 - DNA, 20 bp, Artificial Sequence
  MKO10033921_A_Nfs1
  gRNA
ccatagtagttgacaaggta

SEQ ID NO: 33922 - DNA, 20 bp, Artificial Sequence
  MKO10033922_A_Nfu1
  gRNA
atggtcctcgtctcaagaac

SEQ ID NO: 33923 - DNA, 20 bp, Artificial Sequence
  MKO10033923_A_Nfu1
  gRNA
cgcgcacccttgtgtaacac

SEQ ID NO: 33924 - DNA, 20 bp, Artificial Sequence
  MKO10033924_A_Nfu1
  gRNA
ctccgtacatattgatgcag

SEQ ID NO: 33925 - DNA, 20 bp, Artificial Sequence
  MKO10033925_A_Nfx1
  gRNA
aaccgacctgcatgcgatgc

SEQ ID NO: 33926 - DNA, 20 bp, Artificial Sequence
  MKO10033926_A_Nfx1
  gRNA
aggtggttatcgcagatccc

SEQ ID NO: 33927 - DNA, 20 bp, Artificial Sequence
  MKO10033927_A_Nfx1
  gRNA
ctgtagttagctgctcaatc

SEQ ID NO: 33928 - DNA, 20 bp, Artificial Sequence
  MKO10033928_A_Nfxl1
  gRNA
aagatccacctttagatccg

SEQ ID NO: 33929 - DNA, 20 bp, Artificial Sequence
  MKO10033929_A_Nfxl1
  gRNA
tctgtgacagacgatgattt

SEQ ID NO: 33930 - DNA, 20 bp, Artificial Sequence
  MKO10033930_A_Nfxl1
  gRNA
cacgaatgaggtacaagcca

SEQ ID NO: 33931 - DNA, 20 bp, Artificial Sequence
  MKO10033931_A_Nfya
  gRNA
ggtccaggggcagccgttaa

SEQ ID NO: 33932 - DNA, 20 bp, Artificial Sequence
  MKO10033932_A_Nfya
  gRNA
ggccagcttattacatcaac

SEQ ID NO: 33933 - DNA, 20 bp, Artificial Sequence
  MKO10033933_A_Nfya
  gRNA
gtttgtcgtatactgctcca

SEQ ID NO: 33934 - DNA, 20 bp, Artificial Sequence
  MKO10033934_A_Nfyb
  gRNA
atttataagcttcatcacgt

SEQ ID NO: 33935 - DNA, 20 bp, Artificial Sequence
  MKO10033935_A_Nfyb
  gRNA
atttctgcagactacatcgg

SEQ ID NO: 33936 - DNA, 20 bp, Artificial Sequence
  MKO10033936_A_Nfyb
  gRNA
gtagctgtcaaagcctagag

SEQ ID NO: 33937 - DNA, 20 bp, Artificial Sequence
  MKO10033937_A_Nfyc
  gRNA
taacaagcgtcgtactcttc

SEQ ID NO: 33938 - DNA, 20 bp, Artificial Sequence
  MKO10033938_A_Nfyc
  gRNA
tcccagctcacctggcgctt

SEQ ID NO: 33939 - DNA, 20 bp, Artificial Sequence
  MKO10033939_A_Nfyc
  gRNA
tcagaaagatttccgagtac

SEQ ID NO: 33940 - DNA, 20 bp, Artificial Sequence
  MKO10033940_A_Ngb
  gRNA
accgcctggagccgactcta

SEQ ID NO: 33941 - DNA, 20 bp, Artificial Sequence
  MKO10033941_A_Ngb
  gRNA
ctccaggcggtccttgtagc

SEQ ID NO: 33942 - DNA, 20 bp, Artificial Sequence
  MKO10033942_A_Ngb
  gRNA
tgatgctgcagtgaccaacg

SEQ ID NO: 33943 - DNA, 20 bp, Artificial Sequence
  MKO10033943_A_Ngdn
  gRNA
ctgacgacaaaagttcgagc

SEQ ID NO: 33944 - DNA, 20 bp, Artificial Sequence
  MKO10033944_A_Ngdn
  gRNA
gctgttgctcatgtacctta

SEQ ID NO: 33945 - DNA, 20 bp, Artificial Sequence
  MKO10033945_A_Ngdn
  gRNA
tttagaaaaacttcgtcctt

SEQ ID NO: 33946 - DNA, 20 bp, Artificial Sequence
  MKO10033946_A_Ngef
  gRNA
agaagtgatcagctgcgtaa

SEQ ID NO: 33947 - DNA, 20 bp, Artificial Sequence
  MKO10033947_A_Ngef
  gRNA
atcccattcccgccgactcc

SEQ ID NO: 33948 - DNA, 20 bp, Artificial Sequence
  MKO10033948_A_Ngef
  gRNA
cgtcagtaaccagacctacc

SEQ ID NO: 33949 - DNA, 20 bp, Artificial Sequence
  MKO10033949_A_Ngfrap1
  gRNA
gaatggcccatcggaagtta

SEQ ID NO: 33950 - DNA, 20 bp, Artificial Sequence
  MKO10033950_A_Ngfrap1
  gRNA
gacttgcccctaacttccga

SEQ ID NO: 33951 - DNA, 20 bp, Artificial Sequence
  MKO10033951_A_Ngfrap1
  gRNA
agaattcatcatggtgatcg

SEQ ID NO: 33952 - DNA, 20 bp, Artificial Sequence
  MKO10033952_A_Ngfr
  gRNA
agttacgcgagtgcacgccc

SEQ ID NO: 33953 - DNA, 20 bp, Artificial Sequence
  MKO10033953_A_Ngfr
  gRNA
agggcgtgcactcgcgtaac

SEQ ID NO: 33954 - DNA, 20 bp, Artificial Sequence
  MKO10033954_A_Ngfr
  gRNA
acggtctggttggctccgca

SEQ ID NO: 33955 - DNA, 20 bp, Artificial Sequence
  MKO10033955_A_Ngf
  gRNA
tgttgtcaacgccttgacga

SEQ ID NO: 33956 - DNA, 20 bp, Artificial Sequence
  MKO10033956_A_Ngf
  gRNA
cacgactcacaccttcgtca

SEQ ID NO: 33957 - DNA, 20 bp, Artificial Sequence
  MKO10033957_A_Ngf
  gRNA
tttctatactggccgcagtg

SEQ ID NO: 33958 - DNA, 20 bp, Artificial Sequence
  MKO10033958_A_Ngly1
  gRNA
gagtgccgtattaacccagc

SEQ ID NO: 33959 - DNA, 20 bp, Artificial Sequence
  MKO10033959_A_Ngly1
  gRNA
agttgagcaaccgcttccca

SEQ ID NO: 33960 - DNA, 20 bp, Artificial Sequence
  MKO10033960_A_Ngly1
  gRNA
agagaattgcaccttcttac

SEQ ID NO: 33961 - DNA, 20 bp, Artificial Sequence
  MKO10033961_A_Ngp
  gRNA
tgccactccgccttctagtc

SEQ ID NO: 33962 - DNA, 20 bp, Artificial Sequence
  MKO10033962_A_Ngp
  gRNA
ccttcgacaactaagatatg

SEQ ID NO: 33963 - DNA, 20 bp, Artificial Sequence
  MKO10033963_A_Ngp
  gRNA
tcgactgcaatccctgtcgc

SEQ ID NO: 33964 - DNA, 20 bp, Artificial Sequence
  MKO10033964_A_Ngrn
  gRNA
tgcgattccagaaaatacga

SEQ ID NO: 33965 - DNA, 20 bp, Artificial Sequence
  MKO10033965_A_Ngrn
  gRNA
cgtaggctcaaattctgtag

SEQ ID NO: 33966 - DNA, 20 bp, Artificial Sequence
  MKO10033966_A_Ngrn
  gRNA
gttcgcgtcccaggtcatgg

SEQ ID NO: 33967 - DNA, 20 bp, Artificial Sequence
  MKO10033967_A_Nhej1
  gRNA
ccctatgcatagagctcggc

SEQ ID NO: 33968 - DNA, 20 bp, Artificial Sequence
  MKO10033968_A_Nhej1
  gRNA
accagccgagctctatgcat

SEQ ID NO: 33969 - DNA, 20 bp, Artificial Sequence
  MKO10033969_A_Nhej1
  gRNA
ggctggttatcagttcctcg

SEQ ID NO: 33970 - DNA, 20 bp, Artificial Sequence
  MKO10033970_A_Nhlh1
  gRNA
accgcacggcacacgccacg

SEQ ID NO: 33971 - DNA, 20 bp, Artificial Sequence
  MKO10033971_A_Nhlh1
  gRNA
ctaggttgaaggcttccacg

SEQ ID NO: 33972 - DNA, 20 bp, Artificial Sequence
  MKO10033972_A_Nhlh1
  gRNA
gatgctcaactccgatacca

SEQ ID NO: 33973 - DNA, 20 bp, Artificial Sequence
  MKO10033973_A_Nhlh2
  gRNA
cgcgggtggcgtgggccgat

SEQ ID NO: 33974 - DNA, 20 bp, Artificial Sequence
  MKO10033974_A_Nhlh2
  gRNA
cacccgcgagcgcatccgag

SEQ ID NO: 33975 - DNA, 20 bp, Artificial Sequence
  MKO10033975_A_Nhlh2
  gRNA
gcgaagaaaagcgccgccgc

SEQ ID NO: 33976 - DNA, 20 bp, Artificial Sequence
  MKO10033976_A_Nhlrc1
  gRNA
gcacgacgtgaagtacccac

SEQ ID NO: 33977 - DNA, 20 bp, Artificial Sequence
  MKO10033977_A_Nhlrc1
  gRNA
tcgccgctctcgcgcacccg

SEQ ID NO: 33978 - DNA, 20 bp, Artificial Sequence
  MKO10033978_A_Nhlrc1
  gRNA
gcttcgagaggttcggccac

SEQ ID NO: 33979 - DNA, 20 bp, Artificial Sequence
  MKO10033979_A_Nhlrc2
  gRNA
gtcccaagcgcaacgtccca

SEQ ID NO: 33980 - DNA, 20 bp, Artificial Sequence
  MKO10033980_A_Nhlrc2
  gRNA
tatcagagaatctgcgctcc

SEQ ID NO: 33981 - DNA, 20 bp, Artificial Sequence
  MKO10033981_A_Nhlrc2
  gRNA
ctggtcatactgggaccccg

SEQ ID NO: 33982 - DNA, 20 bp, Artificial Sequence
  MKO10033982_A_Nhlrc3
  gRNA
ctacgtaaactaacccgttg

SEQ ID NO: 33983 - DNA, 20 bp, Artificial Sequence
  MKO10033983_A_Nhlrc3
  gRNA
caccatttgaacagtccgtc

SEQ ID NO: 33984 - DNA, 20 bp, Artificial Sequence
  MKO10033984_A_Nhlrc3
  gRNA
agcgttacacttgacgcagt

SEQ ID NO: 33985 - DNA, 20 bp, Artificial Sequence
  MKO10033985_A_Nhlrc4
  gRNA
aggccatctcccccagatac

SEQ ID NO: 33986 - DNA, 20 bp, Artificial Sequence
  MKO10033986_A_Nhlrc4
  gRNA
actaaagaggcccttgggta

SEQ ID NO: 33987 - DNA, 20 bp, Artificial Sequence
  MKO10033987_A_Nhlrc4
  gRNA
gcttcatgttaggaccaacc

SEQ ID NO: 33988 - DNA, 20 bp, Artificial Sequence
  MKO10033988_A_Nhp2l1
  gRNA
agaggctgatgtgaatccga

SEQ ID NO: 33989 - DNA, 20 bp, Artificial Sequence
  MKO10033989_A_Nhp2l1
  gRNA
agttacatgactgttgaaca

SEQ ID NO: 33990 - DNA, 20 bp, Artificial Sequence
  MKO10033990_A_Nhp2l1
  gRNA
gccaccaaaaccctcaacag

SEQ ID NO: 33991 - DNA, 20 bp, Artificial Sequence
  MKO10033991_A_Nhp2
  gRNA
gcgcacgtacaaagagctgc

SEQ ID NO: 33992 - DNA, 20 bp, Artificial Sequence
  MKO10033992_A_Nhp2
  gRNA
aggagatacattgccgattg

SEQ ID NO: 33993 - DNA, 20 bp, Artificial Sequence
  MKO10033993_A_Nhp2
  gRNA
tcccgaagagtccgaggcgc

SEQ ID NO: 33994 - DNA, 20 bp, Artificial Sequence
  MKO10033994_A_Nhsl1
  gRNA
tctcgcctcagtaacgatac

SEQ ID NO: 33995 - DNA, 20 bp, Artificial Sequence
  MKO10033995_A_Nhsl1
  gRNA
cggaagcgagctcgtcacag

SEQ ID NO: 33996 - DNA, 20 bp, Artificial Sequence
  MKO10033996_A_Nhsl1
  gRNA
ttcatcttgataatcgtcgc

SEQ ID NO: 33997 - DNA, 20 bp, Artificial Sequence
  MKO10033997_A_Nhsl2
  gRNA
gtcgccatgacgacctcgag

SEQ ID NO: 33998 - DNA, 20 bp, Artificial Sequence
  MKO10033998_A_Nhsl2
  gRNA
tgtagaggaactgcttcgcg

SEQ ID NO: 33999 - DNA, 20 bp, Artificial Sequence
  MKO10033999_A_Nhsl2
  gRNA
cgaggatgagaccacgaccc

SEQ ID NO: 34000 - DNA, 20 bp, Artificial Sequence
  MKO10034000_A_Nhs
  gRNA
ggatcagttacctctacgaa

SEQ ID NO: 34001 - DNA, 20 bp, Artificial Sequence
  MKO10034001_A_Nhs
  gRNA
ccatgcttaccgttaggaag

SEQ ID NO: 34002 - DNA, 20 bp, Artificial Sequence
  MKO10034002_A_Nhs
  gRNA
gtgtatactaccgtgcacca

SEQ ID NO: 34003 - DNA, 20 bp, Artificial Sequence
  MKO10034003_A_Niacr1
  gRNA
taataaccgaagcactagtg

SEQ ID NO: 34004 - DNA, 20 bp, Artificial Sequence
  MKO10034004_A_Niacr1
  gRNA
ccgagatgaaaacatcgcca

SEQ ID NO: 34005 - DNA, 20 bp, Artificial Sequence
  MKO10034005_A_Niacr1
  gRNA
tggctgtggaccgctacttc

SEQ ID NO: 34006 - DNA, 20 bp, Artificial Sequence
  MKO10034006_A_Nicn1
  gRNA
gtcgaagcggccgatcctcg

SEQ ID NO: 34007 - DNA, 20 bp, Artificial Sequence
  MKO10034007_A_Nicn1
  gRNA
agagagcttacctcaaggcg

SEQ ID NO: 34008 - DNA, 20 bp, Artificial Sequence
  MKO10034008_A_Nicn1
  gRNA
aagccacttggggaacgcca

SEQ ID NO: 34009 - DNA, 20 bp, Artificial Sequence
  MKO10034009_A_Nid1
  gRNA
tgctgagggaacctctccgc

SEQ ID NO: 34010 - DNA, 20 bp, Artificial Sequence
  MKO10034010_A_Nid1
  gRNA
cttggacacaaccgatggcc

SEQ ID NO: 34011 - DNA, 20 bp, Artificial Sequence
  MKO10034011_A_Nid1
  gRNA
catggcgatgataccatttg

SEQ ID NO: 34012 - DNA, 20 bp, Artificial Sequence
  MKO10034012_A_Nid2
  gRNA
ggagcacgtgggcgcctacg

SEQ ID NO: 34013 - DNA, 20 bp, Artificial Sequence
  MKO10034013_A_Nid2
  gRNA
atgaggtgccgacgtccaca

SEQ ID NO: 34014 - DNA, 20 bp, Artificial Sequence
  MKO10034014_A_Nid2
  gRNA
cgtttccgtaaaacctcgac

SEQ ID NO: 34015 - DNA, 20 bp, Artificial Sequence
  MKO10034015_A_Nif3l1
  gRNA
ttcgctctatcattattgcc

SEQ ID NO: 34016 - DNA, 20 bp, Artificial Sequence
  MKO10034016_A_Nif3l1
  gRNA
aatgggacggttgtgcacac

SEQ ID NO: 34017 - DNA, 20 bp, Artificial Sequence
  MKO10034017_A_Nif3l1
  gRNA
tgtgaaccgcagccaagacc

SEQ ID NO: 34018 - DNA, 20 bp, Artificial Sequence
  MKO10034018_A_Nifk
  gRNA
cgattatagcgcttcactgc

SEQ ID NO: 34019 - DNA, 20 bp, Artificial Sequence
  MKO10034019_A_Nifk
  gRNA
cagcagtgaagcgctataat

SEQ ID NO: 34020 - DNA, 20 bp, Artificial Sequence
  MKO10034020_A_Nifk
  gRNA
atctgctaatgtcgccaaac

SEQ ID NO: 34021 - DNA, 20 bp, Artificial Sequence
  MKO10034021_A_Nim1
  gRNA
tttcgagaccaacactacgt

SEQ ID NO: 34022 - DNA, 20 bp, Artificial Sequence
  MKO10034022_A_Nim1
  gRNA
gccatttcgagcggagaccg

SEQ ID NO: 34023 - DNA, 20 bp, Artificial Sequence
  MKO10034023_A_Nim1
  gRNA
cgtccgtctttatgaagtcg

SEQ ID NO: 34024 - DNA, 20 bp, Artificial Sequence
  MKO10034024_A_Ninj1
  gRNA
gctcaacggcgacctgcgcc

SEQ ID NO: 34025 - DNA, 20 bp, Artificial Sequence
  MKO10034025_A_Ninj1
  gRNA
cgcgtcgcagctgaaggccg

SEQ ID NO: 34026 - DNA, 20 bp, Artificial Sequence
  MKO10034026_A_Ninj1
  gRNA
acctgggcgttctactgccg

SEQ ID NO: 34027 - DNA, 20 bp, Artificial Sequence
  MKO10034027_A_Ninj2
  gRNA
gtggtgtagtactccgcgaa

SEQ ID NO: 34028 - DNA, 20 bp, Artificial Sequence
  MKO10034028_A_Ninj2
  gRNA
aaaagttcaggtctatgcgc

SEQ ID NO: 34029 - DNA, 20 bp, Artificial Sequence
  MKO10034029_A_Ninj2
  gRNA
agccatcctgaacctgaatg

SEQ ID NO: 34030 - DNA, 20 bp, Artificial Sequence
  MKO10034030_A_Ninl
  gRNA
actccggcaggttaactttg

SEQ ID NO: 34031 - DNA, 20 bp, Artificial Sequence
  MKO10034031_A_Ninl
  gRNA
gctgtggtctgccgaagcat

SEQ ID NO: 34032 - DNA, 20 bp, Artificial Sequence
  MKO10034032_A_Ninl
  gRNA
tggcgtagagccctccgatg

SEQ ID NO: 34033 - DNA, 20 bp, Artificial Sequence
  MKO10034033_A_Nin
  gRNA
agtagcgtctgttgcagcac

SEQ ID NO: 34034 - DNA, 20 bp, Artificial Sequence
  MKO10034034_A_Nin
  gRNA
gctcagcccaaatatgttag

SEQ ID NO: 34035 - DNA, 20 bp, Artificial Sequence
  MKO10034035_A_Nin
  gRNA
gacagtgcttgagccactag

SEQ ID NO: 34036 - DNA, 20 bp, Artificial Sequence
  MKO10034036_A_Nip7
  gRNA
ccacaacgtaccttggcata

SEQ ID NO: 34037 - DNA, 20 bp, Artificial Sequence
  MKO10034037_A_Nip7
  gRNA
acgaccgagtgtactatgtg

SEQ ID NO: 34038 - DNA, 20 bp, Artificial Sequence
  MKO10034038_A_Nip7
  gRNA
ccgcttgcacgtgacagctc

SEQ ID NO: 34039 - DNA, 20 bp, Artificial Sequence
  MKO10034039_A_Nipa1
  gRNA
ctcacccaaacggtactcca

SEQ ID NO: 34040 - DNA, 20 bp, Artificial Sequence
  MKO10034040_A_Nipa1
  gRNA
ccacgggcccaccaacatca

SEQ ID NO: 34041 - DNA, 20 bp, Artificial Sequence
  MKO10034041_A_Nipa1
  gRNA
tgcttcgactcctctgtatt

SEQ ID NO: 34042 - DNA, 20 bp, Artificial Sequence
  MKO10034042_A_Nipa2
  gRNA
gtgcgctcagcgtcctcgta

SEQ ID NO: 34043 - DNA, 20 bp, Artificial Sequence
  MKO10034043_A_Nipa2
  gRNA
aggacgctgagcgcacctag

SEQ ID NO: 34044 - DNA, 20 bp, Artificial Sequence
  MKO10034044_A_Nipa2
  gRNA
ttctgcagcaccccctcgcc

SEQ ID NO: 34045 - DNA, 20 bp, Artificial Sequence
  MKO10034045_A_Nipal1
  gRNA
ttcaggttcgtgtagacgac

SEQ ID NO: 34046 - DNA, 20 bp, Artificial Sequence
  MKO10034046_A_Nipal1
  gRNA
accagggtatgtactgtcgc

SEQ ID NO: 34047 - DNA, 20 bp, Artificial Sequence
  MKO10034047_A_Nipal1
  gRNA
ggttatccacgccccacaag

SEQ ID NO: 34048 - DNA, 20 bp, Artificial Sequence
  MKO10034048_A_Nipal2
  gRNA
ttactcacctagtaaatccg

SEQ ID NO: 34049 - DNA, 20 bp, Artificial Sequence
  MKO10034049_A_Nipal2
  gRNA
acaggcaatttcgcagccta

SEQ ID NO: 34050 - DNA, 20 bp, Artificial Sequence
  MKO10034050_A_Nipal2
  gRNA
catcactctgatcgcaccac

SEQ ID NO: 34051 - DNA, 20 bp, Artificial Sequence
  MKO10034051_A_Nipal3
  gRNA
tactgccacatccgcctagc

SEQ ID NO: 34052 - DNA, 20 bp, Artificial Sequence
  MKO10034052_A_Nipal3
  gRNA
gatgaatatgattccgatga

SEQ ID NO: 34053 - DNA, 20 bp, Artificial Sequence
  MKO10034053_A_Nipal3
  gRNA
ctcagtgccgtctccgtgat

SEQ ID NO: 34054 - DNA, 20 bp, Artificial Sequence
  MKO10034054_A_Nipal4
  gRNA
cgtcgcaggtgcaaatgcat

SEQ ID NO: 34055 - DNA, 20 bp, Artificial Sequence
  MKO10034055_A_Nipal4
  gRNA
ctgtggccacaagccgaatg

SEQ ID NO: 34056 - DNA, 20 bp, Artificial Sequence
  MKO10034056_A_Nipal4
  gRNA
gtcctctgtcagatcgtgag

SEQ ID NO: 34057 - DNA, 20 bp, Artificial Sequence
  MKO10034057_A_Nipbl
  gRNA
cgatatacccgtcttgttgc

SEQ ID NO: 34058 - DNA, 20 bp, Artificial Sequence
  MKO10034058_A_Nipbl
  gRNA
gcttgtccatagtctcaacc

SEQ ID NO: 34059 - DNA, 20 bp, Artificial Sequence
  MKO10034059_A_Nipbl
  gRNA
aaccaaattgtcatccctac

SEQ ID NO: 34060 - DNA, 20 bp, Artificial Sequence
  MKO10034060_A_Nipsnap1
  gRNA
gtggagtgggcgtccttccg

SEQ ID NO: 34061 - DNA, 20 bp, Artificial Sequence
  MKO10034061_A_Nipsnap1
  gRNA
ggactatccctgctcgcttg

SEQ ID NO: 34062 - DNA, 20 bp, Artificial Sequence
  MKO10034062_A_Nipsnap1
  gRNA
caacgtgaagcccgaatgtc

SEQ ID NO: 34063 - DNA, 20 bp, Artificial Sequence
  MKO10034063_A_Nipsnap3a
  gRNA
ttaccttaagcccgcaagtg

SEQ ID NO: 34064 - DNA, 20 bp, Artificial Sequence
  MKO10034064_A_Nipsnap3a
  gRNA
cttccacacttgcgggctta

SEQ ID NO: 34065 - DNA, 20 bp, Artificial Sequence
  MKO10034065_A_Nipsnap3a
  gRNA
ggtgtgagaacgcagacgct

SEQ ID NO: 34066 - DNA, 20 bp, Artificial Sequence
  MKO10034066_A_Nipsnap3b
  gRNA
tttcagagtgagctgtccga

SEQ ID NO: 34067 - DNA, 20 bp, Artificial Sequence
  MKO10034067_A_Nipsnap3b
  gRNA
agaggttgagattacctact

SEQ ID NO: 34068 - DNA, 20 bp, Artificial Sequence
  MKO10034068_A_Nipsnap3b
  gRNA
aactgcagtccgcaaagcct

SEQ ID NO: 34069 - DNA, 20 bp, Artificial Sequence
  MKO10034069_A_Nisch
  gRNA
ggtgtttgatcgtccactca

SEQ ID NO: 34070 - DNA, 20 bp, Artificial Sequence
  MKO10034070_A_Nisch
  gRNA
ttaccgatggcaaccatgag

SEQ ID NO: 34071 - DNA, 20 bp, Artificial Sequence
  MKO10034071_A_Nisch
  gRNA
aggttgtgaggagcgtctgg

SEQ ID NO: 34072 - DNA, 20 bp, Artificial Sequence
  MKO10034072_A_Nit1
  gRNA
ttgggcggtttccacgagcg

SEQ ID NO: 34073 - DNA, 20 bp, Artificial Sequence
  MKO10034073_A_Nit1
  gRNA
acgctcgtggaaaccgccca

SEQ ID NO: 34074 - DNA, 20 bp, Artificial Sequence
  MKO10034074_A_Nit1
  gRNA
ctgtgcgatgtagagatccc

SEQ ID NO: 34075 - DNA, 20 bp, Artificial Sequence
  MKO10034075_A_Nit2
  gRNA
gtacgtacgcgtatcaaatg

SEQ ID NO: 34076 - DNA, 20 bp, Artificial Sequence
  MKO10034076_A_Nit2
  gRNA
gaatctaaaacattgagccc

SEQ ID NO: 34077 - DNA, 20 bp, Artificial Sequence
  MKO10034077_A_Nit2
  gRNA
ggtaaggttatctgatttaa

SEQ ID NO: 34078 - DNA, 20 bp, Artificial Sequence
  MKO10034078_A_Nkain1
  gRNA
tctttggtaccgtgcagtat

SEQ ID NO: 34079 - DNA, 20 bp, Artificial Sequence
  MKO10034079_A_Nkain1
  gRNA
ggaggaccaccacgtcatct

SEQ ID NO: 34080 - DNA, 20 bp, Artificial Sequence
  MKO10034080_A_Nkain1
  gRNA
acacatccctgcatcgctcc

SEQ ID NO: 34081 - DNA, 20 bp, Artificial Sequence
  MKO10034081_A_Nkain2
  gRNA
tatagacctcgttacgtaac

SEQ ID NO: 34082 - DNA, 20 bp, Artificial Sequence
  MKO10034082_A_Nkain2
  gRNA
tcccacgtcggccaccgtcg

SEQ ID NO: 34083 - DNA, 20 bp, Artificial Sequence
  MKO10034083_A_Nkain2
  gRNA
tatgtgtggcgggcgcggct

SEQ ID NO: 34084 - DNA, 20 bp, Artificial Sequence
  MKO10034084_A_Nkain3
  gRNA
cttaccaccatgatgtaacg

SEQ ID NO: 34085 - DNA, 20 bp, Artificial Sequence
  MKO10034085_A_Nkain3
  gRNA
cgctgtacaaatactgctat

SEQ ID NO: 34086 - DNA, 20 bp, Artificial Sequence
  MKO10034086_A_Nkain3
  gRNA
gtatagaccacgttacatca

SEQ ID NO: 34087 - DNA, 20 bp, Artificial Sequence
  MKO10034087_A_Nkain4
  gRNA
ctcaccaccacgatgtagcg

SEQ ID NO: 34088 - DNA, 20 bp, Artificial Sequence
  MKO10034088_A_Nkain4
  gRNA
caacttcacccacatcatcg

SEQ ID NO: 34089 - DNA, 20 bp, Artificial Sequence
  MKO10034089_A_Nkain4
  gRNA
tcaccgctagcaggatctgc

SEQ ID NO: 34090 - DNA, 20 bp, Artificial Sequence
  MKO10034090_A_Nkapl
  gRNA
cggctagtctgtaacgccga

SEQ ID NO: 34091 - DNA, 20 bp, Artificial Sequence
  MKO10034091_A_Nkapl
  gRNA
tcagaaacgacgacgtttct

SEQ ID NO: 34092 - DNA, 20 bp, Artificial Sequence
  MKO10034092_A_Nkapl
  gRNA
tggagaacgaccgctaccgc

SEQ ID NO: 34093 - DNA, 20 bp, Artificial Sequence
  MKO10034093_A_Nkap
  gRNA
tgatgaacatacaccagtag

SEQ ID NO: 34094 - DNA, 20 bp, Artificial Sequence
  MKO10034094_A_Nkap
  gRNA
aattgggagctcctgaagtt

SEQ ID NO: 34095 - DNA, 20 bp, Artificial Sequence
  MKO10034095_A_Nkap
  gRNA
tactctggttcaggattctt

SEQ ID NO: 34096 - DNA, 20 bp, Artificial Sequence
  MKO10034096_A_Nkd1
  gRNA
agcagacaccaaacccgctg

SEQ ID NO: 34097 - DNA, 20 bp, Artificial Sequence
  MKO10034097_A_Nkd1
  gRNA
ctatatgacttcgacaacaa

SEQ ID NO: 34098 - DNA, 20 bp, Artificial Sequence
  MKO10034098_A_Nkd1
  gRNA
tcttaccggtatggttgaaa

SEQ ID NO: 34099 - DNA, 20 bp, Artificial Sequence
  MKO10034099_A_Nkd2
  gRNA
ggaagaaacggaccggcgcg

SEQ ID NO: 34100 - DNA, 20 bp, Artificial Sequence
  MKO10034100_A_Nkd2
  gRNA
ctgcgtacgggagcggtcgc

SEQ ID NO: 34101 - DNA, 20 bp, Artificial Sequence
  MKO10034101_A_Nkd2
  gRNA
gaacccttgtcgtcccagaa

SEQ ID NO: 34102 - DNA, 20 bp, Artificial Sequence
  MKO10034102_A_Nkg7
  gRNA
aggtttcatactcagcccga

SEQ ID NO: 34103 - DNA, 20 bp, Artificial Sequence
  MKO10034103_A_Nkg7
  gRNA
gtgctcactgtagaacccgt

SEQ ID NO: 34104 - DNA, 20 bp, Artificial Sequence
  MKO10034104_A_Nkg7
  gRNA
gccacggccgggagcagaca

SEQ ID NO: 34105 - DNA, 20 bp, Artificial Sequence
  MKO10034105_A_Nkiras1
  gRNA
caggtggcaatcgttgtgtt

SEQ ID NO: 34106 - DNA, 20 bp, Artificial Sequence
  MKO10034106_A_Nkiras1
  gRNA
ctgcacttgtatgacacccg

SEQ ID NO: 34107 - DNA, 20 bp, Artificial Sequence
  MKO10034107_A_Nkiras1
  gRNA
gattgaacccttcactttac

SEQ ID NO: 34108 - DNA, 20 bp, Artificial Sequence
  MKO10034108_A_Nkiras2
  gRNA
gcgtcgcgtagaccctgacg

SEQ ID NO: 34109 - DNA, 20 bp, Artificial Sequence
  MKO10034109_A_Nkiras2
  gRNA
tcttgagcagctcgacgcgc

SEQ ID NO: 34110 - DNA, 20 bp, Artificial Sequence
  MKO10034110_A_Nkiras2
  gRNA
ggctccatcgagacagaccg

SEQ ID NO: 34111 - DNA, 20 bp, Artificial Sequence
  MKO10034111_A_Nkpd1
  gRNA
ggctacgcaccgcatcgtgc

SEQ ID NO: 34112 - DNA, 20 bp, Artificial Sequence
  MKO10034112_A_Nkpd1
  gRNA
tagcaccgagtacacgctaa

SEQ ID NO: 34113 - DNA, 20 bp, Artificial Sequence
  MKO10034113_A_Nkpd1
  gRNA
cgatcgcgggtgaccccttc

SEQ ID NO: 34114 - DNA, 20 bp, Artificial Sequence
  MKO10034114_A_Nkrf
  gRNA
atactcgacaccgccatgtg

SEQ ID NO: 34115 - DNA, 20 bp, Artificial Sequence
  MKO10034115_A_Nkrf
  gRNA
tatgctaactcgttgtattc

SEQ ID NO: 34116 - DNA, 20 bp, Artificial Sequence
  MKO10034116_A_Nkrf
  gRNA
cgctacctttcaacctacga

SEQ ID NO: 34117 - DNA, 20 bp, Artificial Sequence
  MKO10034117_A_Nktr
  gRNA
ctcgatttgccattgacaaa

SEQ ID NO: 34118 - DNA, 20 bp, Artificial Sequence
  MKO10034118_A_Nktr
  gRNA
aatcgagggaaacataccaa

SEQ ID NO: 34119 - DNA, 20 bp, Artificial Sequence
  MKO10034119_A_Nktr
  gRNA
aacttcctatgcctgtgctc

SEQ ID NO: 34120 - DNA, 20 bp, Artificial Sequence
  MKO10034120_A_Nkx1-2
  gRNA
tcgagccacgcgctatctgt

SEQ ID NO: 34121 - DNA, 20 bp, Artificial Sequence
  MKO10034121_A_Nkx1-2
  gRNA
ggccgacggcgccgtgcagg

SEQ ID NO: 34122 - DNA, 20 bp, Artificial Sequence
  MKO10034122_A_Nkx1-2
  gRNA
cacgcgagctgccctcccgc

SEQ ID NO: 34123 - DNA, 20 bp, Artificial Sequence
  MKO10034123_A_Nkx2-1
  gRNA
gcccgaagcgctgttccgca

SEQ ID NO: 34124 - DNA, 20 bp, Artificial Sequence
  MKO10034124_A_Nkx2-1
  gRNA
tccgctcgcagcgtacagac

SEQ ID NO: 34125 - DNA, 20 bp, Artificial Sequence
  MKO10034125_A_Nkx2-1
  gRNA
ctcatattcatgccgctcgc

SEQ ID NO: 34126 - DNA, 20 bp, Artificial Sequence
  MKO10034126_A_Nkx2-2
  gRNA
catccgtctcacgccgacac

SEQ ID NO: 34127 - DNA, 20 bp, Artificial Sequence
  MKO10034127_A_Nkx2-2
  gRNA
gtccggtgactcgtcagccg

SEQ ID NO: 34128 - DNA, 20 bp, Artificial Sequence
  MKO10034128_A_Nkx2-2
  gRNA
gcgacaacccctacactcgc

SEQ ID NO: 34129 - DNA, 20 bp, Artificial Sequence
  MKO10034129_A_Nkx2-3
  gRNA
tcgccctacggcgtgggcgc

SEQ ID NO: 34130 - DNA, 20 bp, Artificial Sequence
  MKO10034130_A_Nkx2-3
  gRNA
tacggctgcgcctatccgac

SEQ ID NO: 34131 - DNA, 20 bp, Artificial Sequence
  MKO10034131_A_Nkx2-3
  gRNA
aagcgtctcggagaactgta

SEQ ID NO: 34132 - DNA, 20 bp, Artificial Sequence
  MKO10034132_A_Nkx2-4
  gRNA
gacgccgccgaacttcttgt

SEQ ID NO: 34133 - DNA, 20 bp, Artificial Sequence
  MKO10034133_A_Nkx2-4
  gRNA
caagaagttcggcggcgtca

SEQ ID NO: 34134 - DNA, 20 bp, Artificial Sequence
  MKO10034134_A_Nkx2-4
  gRNA
cacgcctccgccgtagtccc

SEQ ID NO: 34135 - DNA, 20 bp, Artificial Sequence
  MKO10034135_A_Nkx2-5
  gRNA
cttcccgtcgcgcaccagca

SEQ ID NO: 34136 - DNA, 20 bp, Artificial Sequence
  MKO10034136_A_Nkx2-5
  gRNA
ggcattgagacccacgccgt

SEQ ID NO: 34137 - DNA, 20 bp, Artificial Sequence
  MKO10034137_A_Nkx2-5
  gRNA
ggacctgtctgcgcgcctcg

SEQ ID NO: 34138 - DNA, 20 bp, Artificial Sequence
  MKO10034138_A_Nkx2-6
  gRNA
cccacgccgcgatcggtcat

SEQ ID NO: 34139 - DNA, 20 bp, Artificial Sequence
  MKO10034139_A_Nkx2-6
  gRNA
cccaatgaccgatcgcggcg

SEQ ID NO: 34140 - DNA, 20 bp, Artificial Sequence
  MKO10034140_A_Nkx2-6
  gRNA
tacttacgtggctcccccac

SEQ ID NO: 34141 - DNA, 20 bp, Artificial Sequence
  MKO10034141_A_Nkx2-9
  gRNA
gtaccactacgcggcgcagc

SEQ ID NO: 34142 - DNA, 20 bp, Artificial Sequence
  MKO10034142_A_Nkx2-9
  gRNA
ccgcgtagtggtacccgtgc

SEQ ID NO: 34143 - DNA, 20 bp, Artificial Sequence
  MKO10034143_A_Nkx2-9
  gRNA
catcctgttcaggtaaattc

SEQ ID NO: 34144 - DNA, 20 bp, Artificial Sequence
  MKO10034144_A_Nkx3-1
  gRNA
ttccgacagctgctttcgct

SEQ ID NO: 34145 - DNA, 20 bp, Artificial Sequence
  MKO10034145_A_Nkx3-1
  gRNA
gcggggctatgccggatact

SEQ ID NO: 34146 - DNA, 20 bp, Artificial Sequence
  MKO10034146_A_Nkx3-1
  gRNA
acaccgactgaacccgagtc

SEQ ID NO: 34147 - DNA, 20 bp, Artificial Sequence
  MKO10034147_A_Nkx3-2
  gRNA
gaggcgctgcgccgatgtcc

SEQ ID NO: 34148 - DNA, 20 bp, Artificial Sequence
  MKO10034148_A_Nkx3-2
  gRNA
cgcccgaaccagaacagccg

SEQ ID NO: 34149 - DNA, 20 bp, Artificial Sequence
  MKO10034149_A_Nkx3-2
  gRNA
ctgggcgctgtccacgtgcg

SEQ ID NO: 34150 - DNA, 20 bp, Artificial Sequence
  MKO10034150_A_Nkx6-1
  gRNA
ccggcatagagggccggctc

SEQ ID NO: 34151 - DNA, 20 bp, Artificial Sequence
  MKO10034151_A_Nkx6-1
  gRNA
tccgaccgggcagctcggcc

SEQ ID NO: 34152 - DNA, 20 bp, Artificial Sequence
  MKO10034152_A_Nkx6-1
  gRNA
tcgcgctcaggacgagccct

SEQ ID NO: 34153 - DNA, 20 bp, Artificial Sequence
  MKO10034153_A_Nkx6-2
  gRNA
gctaacgagcgccaagttcg

SEQ ID NO: 34154 - DNA, 20 bp, Artificial Sequence
  MKO10034154_A_Nkx6-2
  gRNA
cgcgtgccgcttgcgccact

SEQ ID NO: 34155 - DNA, 20 bp, Artificial Sequence
  MKO10034155_A_Nkx6-2
  gRNA
tttagccgcgctgcacaaca

SEQ ID NO: 34156 - DNA, 20 bp, Artificial Sequence
  MKO10034156_A_Nkx6-3
  gRNA
aagagttctgcaccgagtac

SEQ ID NO: 34157 - DNA, 20 bp, Artificial Sequence
  MKO10034157_A_Nkx6-3
  gRNA
cgatgagtacaacaagccgc

SEQ ID NO: 34158 - DNA, 20 bp, Artificial Sequence
  MKO10034158_A_Nkx6-3
  gRNA
cctgggcatgacggagtcac

SEQ ID NO: 34159 - DNA, 20 bp, Artificial Sequence
  MKO10034159_A_Nle1
  gRNA
catcgtggacgtagaacgcc

SEQ ID NO: 34160 - DNA, 20 bp, Artificial Sequence
  MKO10034160_A_Nle1
  gRNA
atgtccactggcacgtcgaa

SEQ ID NO: 34161 - DNA, 20 bp, Artificial Sequence
  MKO10034161_A_Nle1
  gRNA
ctccccgttcgacgtgccag

SEQ ID NO: 34162 - DNA, 20 bp, Artificial Sequence
  MKO10034162_A_Nlgn1
  gRNA
gtgagccaaagttcgagtga

SEQ ID NO: 34163 - DNA, 20 bp, Artificial Sequence
  MKO10034163_A_Nlgn1
  gRNA
ccatatgccgctccaccaac

SEQ ID NO: 34164 - DNA, 20 bp, Artificial Sequence
  MKO10034164_A_Nlgn1
  gRNA
aaagaacccaatgttctcgc

SEQ ID NO: 34165 - DNA, 20 bp, Artificial Sequence
  MKO10034165_A_Nlgn2
  gRNA
acgctcaatccgccagacac

SEQ ID NO: 34166 - DNA, 20 bp, Artificial Sequence
  MKO10034166_A_Nlgn2
  gRNA
gtctgcgccggaagtcttcc

SEQ ID NO: 34167 - DNA, 20 bp, Artificial Sequence
  MKO10034167_A_Nlgn2
  gRNA
accagccgctcaagtacacg

SEQ ID NO: 34168 - DNA, 20 bp, Artificial Sequence
  MKO10034168_A_Nlgn3
  gRNA
gcaccccgacccgatagttg

SEQ ID NO: 34169 - DNA, 20 bp, Artificial Sequence
  MKO10034169_A_Nlgn3
  gRNA
gccgatctgcacgcccgcta

SEQ ID NO: 34170 - DNA, 20 bp, Artificial Sequence
  MKO10034170_A_Nlgn3
  gRNA
ctcgccctgtttcttagcgc

SEQ ID NO: 34171 - DNA, 20 bp, Artificial Sequence
  MKO10034171_A_Nlk
  gRNA
ttgcatcgagacattaagcc

SEQ ID NO: 34172 - DNA, 20 bp, Artificial Sequence
  MKO10034172_A_Nlk
  gRNA
ttgaaatatctccattcagc

SEQ ID NO: 34173 - DNA, 20 bp, Artificial Sequence
  MKO10034173_A_Nlk
  gRNA
gcccaacgtcttccagaatc

SEQ ID NO: 34174 - DNA, 20 bp, Artificial Sequence
  MKO10034174_A_Nln
  gRNA
atgtcttcctacaccgccgc

SEQ ID NO: 34175 - DNA, 20 bp, Artificial Sequence
  MKO10034175_A_Nln
  gRNA
cgtcattctgagccgaatcc

SEQ ID NO: 34176 - DNA, 20 bp, Artificial Sequence
  MKO10034176_A_Nln
  gRNA
atttaaggaaacgtgcgatt

SEQ ID NO: 34177 - DNA, 20 bp, Artificial Sequence
  MKO10034177_A_Nlrc3
  gRNA
actgtcgcattcgaaagatc

SEQ ID NO: 34178 - DNA, 20 bp, Artificial Sequence
  MKO10034178_A_Nlrc3
  gRNA
tgggtcacttgtatcgcacc

SEQ ID NO: 34179 - DNA, 20 bp, Artificial Sequence
  MKO10034179_A_Nlrc3
  gRNA
tgggcaagaccacgctagtg

SEQ ID NO: 34180 - DNA, 20 bp, Artificial Sequence
  MKO10034180_A_Nlrc4
  gRNA
tgtttcgaatagtccccccc

SEQ ID NO: 34181 - DNA, 20 bp, Artificial Sequence
  MKO10034181_A_Nlrc4
  gRNA
attgatgccacactctacga

SEQ ID NO: 34182 - DNA, 20 bp, Artificial Sequence
  MKO10034182_A_Nlrc4
  gRNA
gaacctcgagagactcatac

SEQ ID NO: 34183 - DNA, 20 bp, Artificial Sequence
  MKO10034183_A_Nlrc5
  gRNA
acctcgagtgacagtactac

SEQ ID NO: 34184 - DNA, 20 bp, Artificial Sequence
  MKO10034184_A_Nlrc5
  gRNA
tgatgaccacctcccgtcct

SEQ ID NO: 34185 - DNA, 20 bp, Artificial Sequence
  MKO10034185_A_Nlrc5
  gRNA
cggctcaccccagcgtcttc

SEQ ID NO: 34186 - DNA, 20 bp, Artificial Sequence
  MKO10034186_A_Nlrp10
  gRNA
ctactcaaccccgcccatag

SEQ ID NO: 34187 - DNA, 20 bp, Artificial Sequence
  MKO10034187_A_Nlrp10
  gRNA
gttgagtaggactccgcctc

SEQ ID NO: 34188 - DNA, 20 bp, Artificial Sequence
  MKO10034188_A_Nlrp10
  gRNA
attgggtcacatctcgtaag

SEQ ID NO: 34189 - DNA, 20 bp, Artificial Sequence
  MKO10034189_A_Nlrp12
  gRNA
ggctcggggcgttcttcgtc

SEQ ID NO: 34190 - DNA, 20 bp, Artificial Sequence
  MKO10034190_A_Nlrp12
  gRNA
attcgcctaatcgtgcattg

SEQ ID NO: 34191 - DNA, 20 bp, Artificial Sequence
  MKO10034191_A_Nlrp12
  gRNA
gcccaaggcatttcggtata

SEQ ID NO: 34192 - DNA, 20 bp, Artificial Sequence
  MKO10034192_A_Nlrp14
  gRNA
cctcaacgtgtaaagctgtc

SEQ ID NO: 34193 - DNA, 20 bp, Artificial Sequence
  MKO10034193_A_Nlrp14
  gRNA
cctgacagctttacacgttg

SEQ ID NO: 34194 - DNA, 20 bp, Artificial Sequence
  MKO10034194_A_Nlrp14
  gRNA
ctgttcaagtcattcactac

SEQ ID NO: 34195 - DNA, 20 bp, Artificial Sequence
  MKO10034195_A_Nlrp1a
  gRNA
gacataagtttacggcccct

SEQ ID NO: 34196 - DNA, 20 bp, Artificial Sequence
  MKO10034196_A_Nlrp1a
  gRNA
tgtacgaccctgagaaagcg

SEQ ID NO: 34197 - DNA, 20 bp, Artificial Sequence
  MKO10034197_A_Nlrp1a
  gRNA
acgtacgaagcaagtaaaag

SEQ ID NO: 34198 - DNA, 20 bp, Artificial Sequence
  MKO10034198_A_Nlrp1b
  gRNA
ctaaatgacctgtgtgacga

SEQ ID NO: 34199 - DNA, 20 bp, Artificial Sequence
  MKO10034199_A_Nlrp1b
  gRNA
tgtgatgccatgatataccc

SEQ ID NO: 34200 - DNA, 20 bp, Artificial Sequence
  MKO10034200_A_Nlrp1b
  gRNA
tccttacaccatcgtcacac

SEQ ID NO: 34201 - DNA, 20 bp, Artificial Sequence
  MKO10034201_A_Nlrp2
  gRNA
gttaacatgcgttgttcatc

SEQ ID NO: 34202 - DNA, 20 bp, Artificial Sequence
  MKO10034202_A_Nlrp2
  gRNA
cccagagtttctactagtag

SEQ ID NO: 34203 - DNA, 20 bp, Artificial Sequence
  MKO10034203_A_Nlrp2
  gRNA
cctaaacaatttgcatccca

SEQ ID NO: 34204 - DNA, 20 bp, Artificial Sequence
  MKO10034204_A_Nlrp3
  gRNA
aaggacaggaacgcgcgtct

SEQ ID NO: 34205 - DNA, 20 bp, Artificial Sequence
  MKO10034205_A_Nlrp3
  gRNA
aggctccgagtgcccgtcct

SEQ ID NO: 34206 - DNA, 20 bp, Artificial Sequence
  MKO10034206_A_Nlrp3
  gRNA
gtcctcctggcataccatag

SEQ ID NO: 34207 - DNA, 20 bp, Artificial Sequence
  MKO10034207_A_Nlrp4a
  gRNA
agacttacacaagaacgtta

SEQ ID NO: 34208 - DNA, 20 bp, Artificial Sequence
  MKO10034208_A_Nlrp4a
  gRNA
gttcatagcttctactaaga

SEQ ID NO: 34209 - DNA, 20 bp, Artificial Sequence
  MKO10034209_A_Nlrp4a
  gRNA
tatacagggaggtagtacaa

SEQ ID NO: 34210 - DNA, 20 bp, Artificial Sequence
  MKO10034210_A_Nlrp4b
  gRNA
atgtgataagcgcctattct

SEQ ID NO: 34211 - DNA, 20 bp, Artificial Sequence
  MKO10034211_A_Nlrp4b
  gRNA
agagtgcaacatacgcatac

SEQ ID NO: 34212 - DNA, 20 bp, Artificial Sequence
  MKO10034212_A_Nlrp4b
  gRNA
taacaatagcgaagacctgc

SEQ ID NO: 34213 - DNA, 20 bp, Artificial Sequence
  MKO10034213_A_Nlrp4c
  gRNA
atccttacgtccagcagtgt

SEQ ID NO: 34214 - DNA, 20 bp, Artificial Sequence
  MKO10034214_A_Nlrp4c
  gRNA
cactggctgcttctccgtgc

SEQ ID NO: 34215 - DNA, 20 bp, Artificial Sequence
  MKO10034215_A_Nlrp4c
  gRNA
aagttcttcagaacgcagtc

SEQ ID NO: 34216 - DNA, 20 bp, Artificial Sequence
  MKO10034216_A_Nlrp4e
  gRNA
tccatacagttcataacttg

SEQ ID NO: 34217 - DNA, 20 bp, Artificial Sequence
  MKO10034217_A_Nlrp4e
  gRNA
tcaacatcttgctgctgatc

SEQ ID NO: 34218 - DNA, 20 bp, Artificial Sequence
  MKO10034218_A_Nlrp4e
  gRNA
cctttcacctgatgactgca

SEQ ID NO: 34219 - DNA, 20 bp, Artificial Sequence
  MKO10034219_A_Nlrp4f
  gRNA
gaggtccaagtattgcaaac

SEQ ID NO: 34220 - DNA, 20 bp, Artificial Sequence
  MKO10034220_A_Nlrp4f
  gRNA
gatgagcagcaagtcgttga

SEQ ID NO: 34221 - DNA, 20 bp, Artificial Sequence
  MKO10034221_A_Nlrp4f
  gRNA
gtatgttcttggacaaccgg

SEQ ID NO: 34222 - DNA, 20 bp, Artificial Sequence
  MKO10034222_A_Nlrp4g
  gRNA
atattcatacaagattcgaa

SEQ ID NO: 34223 - DNA, 20 bp, Artificial Sequence
  MKO10034223_A_Nlrp4g
  gRNA
gttgtagattcttcccctct

SEQ ID NO: 34224 - DNA, 20 bp, Artificial Sequence
  MKO10034224_A_Nlrp4g
  gRNA
cttgggctctgatcttatct

SEQ ID NO: 34225 - DNA, 20 bp, Artificial Sequence
  MKO10034225_A_Nlrp5
  gRNA
gaagaagtggaacaggcgtc

SEQ ID NO: 34226 - DNA, 20 bp, Artificial Sequence
  MKO10034226_A_Nlrp5
  gRNA
cttctgatccactgtctttc

SEQ ID NO: 34227 - DNA, 20 bp, Artificial Sequence
  MKO10034227_A_Nlrp5
  gRNA
ctccattgcagaaagcacaa

SEQ ID NO: 34228 - DNA, 20 bp, Artificial Sequence
  MKO10034228_A_Nlrp6
  gRNA
gtccgagcgccgagcgcgtt

SEQ ID NO: 34229 - DNA, 20 bp, Artificial Sequence
  MKO10034229_A_Nlrp6
  gRNA
caccaatggaccccgggttc

SEQ ID NO: 34230 - DNA, 20 bp, Artificial Sequence
  MKO10034230_A_Nlrp6
  gRNA
ctcgaatatccgacctcttc

SEQ ID NO: 34231 - DNA, 20 bp, Artificial Sequence
  MKO10034231_A_Nlrp9a
  gRNA
aacagaacagggcccgtata

SEQ ID NO: 34232 - DNA, 20 bp, Artificial Sequence
  MKO10034232_A_Nlrp9a
  gRNA
agagaggtagcaagtcgttt

SEQ ID NO: 34233 - DNA, 20 bp, Artificial Sequence
  MKO10034233_A_Nlrp9a
  gRNA
ttaaacttaaacctatctcc

SEQ ID NO: 34234 - DNA, 20 bp, Artificial Sequence
  MKO10034234_A_Nlrp9b
  gRNA
gcagaaatacagccgaatat

SEQ ID NO: 34235 - DNA, 20 bp, Artificial Sequence
  MKO10034235_A_Nlrp9b
  gRNA
gcagcaatccttatctatgc

SEQ ID NO: 34236 - DNA, 20 bp, Artificial Sequence
  MKO10034236_A_Nlrp9b
  gRNA
tgggatatctgaatccgata

SEQ ID NO: 34237 - DNA, 20 bp, Artificial Sequence
  MKO10034237_A_Nlrp9c
  gRNA
gcagcaatcctagtatgttg

SEQ ID NO: 34238 - DNA, 20 bp, Artificial Sequence
  MKO10034238_A_Nlrp9c
  gRNA
tttgtattgacgatctataa

SEQ ID NO: 34239 - DNA, 20 bp, Artificial Sequence
  MKO10034239_A_Nlrp9c
  gRNA
gaaatgttcaacatgtcgag

SEQ ID NO: 34240 - DNA, 20 bp, Artificial Sequence
  MKO10034240_A_Nlrx1
  gRNA
atcgccggaacctcaccgag

SEQ ID NO: 34241 - DNA, 20 bp, Artificial Sequence
  MKO10034241_A_Nlrx1
  gRNA
cggtgaacacgaaggtaccc

SEQ ID NO: 34242 - DNA, 20 bp, Artificial Sequence
  MKO10034242_A_Nlrx1
  gRNA
tcgggatgacacgccctcgt

SEQ ID NO: 34243 - DNA, 20 bp, Artificial Sequence
  MKO10034243_A_Nmbr
  gRNA
gacattccgcatggcgctgt

SEQ ID NO: 34244 - DNA, 20 bp, Artificial Sequence
  MKO10034244_A_Nmbr
  gRNA
accacgtcctctacttgtat

SEQ ID NO: 34245 - DNA, 20 bp, Artificial Sequence
  MKO10034245_A_Nmbr
  gRNA
accggacgtctgcatgtcca

SEQ ID NO: 34246 - DNA, 20 bp, Artificial Sequence
  MKO10034246_A_Nmb
  gRNA
gcaagattcgagtgcaccct

SEQ ID NO: 34247 - DNA, 20 bp, Artificial Sequence
  MKO10034247_A_Nmb
  gRNA
aacacttaccggtcgcccag

SEQ ID NO: 34248 - DNA, 20 bp, Artificial Sequence
  MKO10034248_A_Nmb
  gRNA
cagcaccccctaacaccccg

SEQ ID NO: 34249 - DNA, 20 bp, Artificial Sequence
  MKO10034249_A_Nmd3
  gRNA
aaggttcggcttgtcgatgc

SEQ ID NO: 34250 - DNA, 20 bp, Artificial Sequence
  MKO10034250_A_Nmd3
  gRNA
gtcaactttacttcgtaaac

SEQ ID NO: 34251 - DNA, 20 bp, Artificial Sequence
  MKO10034251_A_Nmd3
  gRNA
tactgacctaccttactcag

SEQ ID NO: 34252 - DNA, 20 bp, Artificial Sequence
  MKO10034252_A_Nme1
  gRNA
cagaaggggttccgccttgt

SEQ ID NO: 34253 - DNA, 20 bp, Artificial Sequence
  MKO10034253_A_Nme1
  gRNA
aagtctcctcgtatggtccc

SEQ ID NO: 34254 - DNA, 20 bp, Artificial Sequence
  MKO10034254_A_Nme1
  gRNA
aaggaccgccccttctttac

SEQ ID NO: 34255 - DNA, 20 bp, Artificial Sequence
  MKO10034255_A_Nme2
  gRNA
tgttacccgaaggaacttca

SEQ ID NO: 34256 - DNA, 20 bp, Artificial Sequence
  MKO10034256_A_Nme2
  gRNA
tggtgggcgagatcatcaaa

SEQ ID NO: 34257 - DNA, 20 bp, Artificial Sequence
  MKO10034257_A_Nme2
  gRNA
agcactcaccatggccacca

SEQ ID NO: 34258 - DNA, 20 bp, Artificial Sequence
  MKO10034258_A_Nme3
  gRNA
cgtgaacgagcgcacgttct

SEQ ID NO: 34259 - DNA, 20 bp, Artificial Sequence
  MKO10034259_A_Nme3
  gRNA
tgaagcccgacggcgtgcag

SEQ ID NO: 34260 - DNA, 20 bp, Artificial Sequence
  MKO10034260_A_Nme3
  gRNA
gaaacccttctacagccgac

SEQ ID NO: 34261 - DNA, 20 bp, Artificial Sequence
  MKO10034261_A_Nme4
  gRNA
catccacagaatcgctagca

SEQ ID NO: 34262 - DNA, 20 bp, Artificial Sequence
  MKO10034262_A_Nme4
  gRNA
cagcaaccagcgtccgctct

SEQ ID NO: 34263 - DNA, 20 bp, Artificial Sequence
  MKO10034263_A_Nme4
  gRNA
ctgtgatacaacgctttgag

SEQ ID NO: 34264 - DNA, 20 bp, Artificial Sequence
  MKO10034264_A_Nme5
  gRNA
tctagcttaagggcgatata

SEQ ID NO: 34265 - DNA, 20 bp, Artificial Sequence
  MKO10034265_A_Nme5
  gRNA
gtagcgccaaccctacttca

SEQ ID NO: 34266 - DNA, 20 bp, Artificial Sequence
  MKO10034266_A_Nme5
  gRNA
gaacctgatctctcgctctg

SEQ ID NO: 34267 - DNA, 20 bp, Artificial Sequence
  MKO10034267_A_Nme6
  gRNA
agttcctcattgtacgaacg

SEQ ID NO: 34268 - DNA, 20 bp, Artificial Sequence
  MKO10034268_A_Nme6
  gRNA
gacacccgaaatactaccca

SEQ ID NO: 34269 - DNA, 20 bp, Artificial Sequence
  MKO10034269_A_Nme6
  gRNA
gttccctcgttcgtacaatg

SEQ ID NO: 34270 - DNA, 20 bp, Artificial Sequence
  MKO10034270_A_Nme7
  gRNA
atcgtcgcaccttcttaaag

SEQ ID NO: 34271 - DNA, 20 bp, Artificial Sequence
  MKO10034271_A_Nme7
  gRNA
ccaatacacagcccgccagc

SEQ ID NO: 34272 - DNA, 20 bp, Artificial Sequence
  MKO10034272_A_Nme7
  gRNA
aaaacagcagctcatagcgt

SEQ ID NO: 34273 - DNA, 20 bp, Artificial Sequence
  MKO10034273_A_Nme8
  gRNA
tcgtcaatagtcagaacttg

SEQ ID NO: 34274 - DNA, 20 bp, Artificial Sequence
  MKO10034274_A_Nme8
  gRNA
aaagcgtgaagtccagctac

SEQ ID NO: 34275 - DNA, 20 bp, Artificial Sequence
  MKO10034275_A_Nme8
  gRNA
cacatttatctctaaatggc

SEQ ID NO: 34276 - DNA, 20 bp, Artificial Sequence
  MKO10034276_A_Nme9
  gRNA
ggcagttgtggacgtctacc

SEQ ID NO: 34277 - DNA, 20 bp, Artificial Sequence
  MKO10034277_A_Nme9
  gRNA
ggcagaccgccttgatgttc

SEQ ID NO: 34278 - DNA, 20 bp, Artificial Sequence
  MKO10034278_A_Nme9
  gRNA
cttaatgatgcccaatgtac

SEQ ID NO: 34279 - DNA, 20 bp, Artificial Sequence
  MKO10034279_A_Nmi
  gRNA
cgcacaaaatgtgatatcga

SEQ ID NO: 34280 - DNA, 20 bp, Artificial Sequence
  MKO10034280_A_Nmi
  gRNA
cggcggcgaagtggaaagcg

SEQ ID NO: 34281 - DNA, 20 bp, Artificial Sequence
  MKO10034281_A_Nmi
  gRNA
cacttcgccgccgccattcc

SEQ ID NO: 34282 - DNA, 20 bp, Artificial Sequence
  MKO10034282_A_Nmnat1
  gRNA
ggaggacatcacgcaaatcg

SEQ ID NO: 34283 - DNA, 20 bp, Artificial Sequence
  MKO10034283_A_Nmnat1
  gRNA
gggccagagcatccgctact

SEQ ID NO: 34284 - DNA, 20 bp, Artificial Sequence
  MKO10034284_A_Nmnat1
  gRNA
ttcttgtacgcatcaccgac

SEQ ID NO: 34285 - DNA, 20 bp, Artificial Sequence
  MKO10034285_A_Nmnat2
  gRNA
tgctgtggctgtccgatcac

SEQ ID NO: 34286 - DNA, 20 bp, Artificial Sequence
  MKO10034286_A_Nmnat2
  gRNA
catggaaggtgtgttgacgt

SEQ ID NO: 34287 - DNA, 20 bp, Artificial Sequence
  MKO10034287_A_Nmnat2
  gRNA
tctccggtccatgactccta

SEQ ID NO: 34288 - DNA, 20 bp, Artificial Sequence
  MKO10034288_A_Nmnat3
  gRNA
tctacatcaatgacggttcc

SEQ ID NO: 34289 - DNA, 20 bp, Artificial Sequence
  MKO10034289_A_Nmnat3
  gRNA
tcggcttggtgtgcgtgagc

SEQ ID NO: 34290 - DNA, 20 bp, Artificial Sequence
  MKO10034290_A_Nmnat3
  gRNA
tggccacctcaaacaagcgc

SEQ ID NO: 34291 - DNA, 20 bp, Artificial Sequence
  MKO10034291_A_Nmral1
  gRNA
ctcttcacaggtgcgcaagg

SEQ ID NO: 34292 - DNA, 20 bp, Artificial Sequence
  MKO10034292_A_Nmral1
  gRNA
gaggaatacttccgagacat

SEQ ID NO: 34293 - DNA, 20 bp, Artificial Sequence
  MKO10034293_A_Nmral1
  gRNA
agccgatctagccaaacgct

SEQ ID NO: 34294 - DNA, 20 bp, Artificial Sequence
  MKO10034294_A_Nmrk1
  gRNA
agtgcttgaagcgctaaata

SEQ ID NO: 34295 - DNA, 20 bp, Artificial Sequence
  MKO10034295_A_Nmrk1
  gRNA
gtaggcctctggacaccata

SEQ ID NO: 34296 - DNA, 20 bp, Artificial Sequence
  MKO10034296_A_Nmrk1
  gRNA
gcagccttggaaagtgctca

SEQ ID NO: 34297 - DNA, 20 bp, Artificial Sequence
  MKO10034297_A_Nmrk2
  gRNA
cgtcctctccgactgctatt

SEQ ID NO: 34298 - DNA, 20 bp, Artificial Sequence
  MKO10034298_A_Nmrk2
  gRNA
cttcctgaccgtgccgtatg

SEQ ID NO: 34299 - DNA, 20 bp, Artificial Sequence
  MKO10034299_A_Nmrk2
  gRNA
caactgctgcgtgatccatc

SEQ ID NO: 34300 - DNA, 20 bp, Artificial Sequence
  MKO10034300_A_Nms
  gRNA
gtacggacctcagcgctaac

SEQ ID NO: 34301 - DNA, 20 bp, Artificial Sequence
  MKO10034301_A_Nms
  gRNA
atgtgtcggtttccgagttc

SEQ ID NO: 34302 - DNA, 20 bp, Artificial Sequence
  MKO10034302_A_Nms
  gRNA
cctttagctgattctcccga

SEQ ID NO: 34303 - DNA, 20 bp, Artificial Sequence
  MKO10034303_A_Nmt1
  gRNA
gtaaacggagctaccagttc

SEQ ID NO: 34304 - DNA, 20 bp, Artificial Sequence
  MKO10034304_A_Nmt1
  gRNA
cttccacgtagttctcgttc

SEQ ID NO: 34305 - DNA, 20 bp, Artificial Sequence
  MKO10034305_A_Nmt1
  gRNA
gaactggtagctccgtttac

SEQ ID NO: 34306 - DNA, 20 bp, Artificial Sequence
  MKO10034306_A_Nmt2
  gRNA
ctgcatagcacaacgccatc

SEQ ID NO: 34307 - DNA, 20 bp, Artificial Sequence
  MKO10034307_A_Nmt2
  gRNA
agcttactcaatttgggcac

SEQ ID NO: 34308 - DNA, 20 bp, Artificial Sequence
  MKO10034308_A_Nmt2
  gRNA
ctccccaggtggtgatacta

SEQ ID NO: 34309 - DNA, 20 bp, Artificial Sequence
  MKO10034309_A_Nmur1
  gRNA
cgactcagctatatgttcgc

SEQ ID NO: 34310 - DNA, 20 bp, Artificial Sequence
  MKO10034310_A_Nmur1
  gRNA
gcccatgtgcgccgcatggt

SEQ ID NO: 34311 - DNA, 20 bp, Artificial Sequence
  MKO10034311_A_Nmur1
  gRNA
tccatgctgaccgtatcatg

SEQ ID NO: 34312 - DNA, 20 bp, Artificial Sequence
  MKO10034312_A_Nmur2
  gRNA
gtagcgctcaatgctaaccg

SEQ ID NO: 34313 - DNA, 20 bp, Artificial Sequence
  MKO10034313_A_Nmur2
  gRNA
gcacacggcgacgggccctc

SEQ ID NO: 34314 - DNA, 20 bp, Artificial Sequence
  MKO10034314_A_Nmur2
  gRNA
caacattccgaaaggccgcc

SEQ ID NO: 34315 - DNA, 20 bp, Artificial Sequence
  MKO10034315_A_Nmu
  gRNA
tgcaatctttgaggtgatat

SEQ ID NO: 34316 - DNA, 20 bp, Artificial Sequence
  MKO10034316_A_Nmu
  gRNA
gtgagaaagataatactaag

SEQ ID NO: 34317 - DNA, 20 bp, Artificial Sequence
  MKO10034317_A_Nmu
  gRNA
cttaggcatctgttgcactg

SEQ ID NO: 34318 - DNA, 20 bp, Artificial Sequence
  MKO10034318_A_Nnat
  gRNA
cgcacacggtgtcccggacc

SEQ ID NO: 34319 - DNA, 20 bp, Artificial Sequence
  MKO10034319_A_Nnat
  gRNA
acagcccattgcgagaagtg

SEQ ID NO: 34320 - DNA, 20 bp, Artificial Sequence
  MKO10034320_A_Nnat
  gRNA
gtatacctcacttctcgcaa

SEQ ID NO: 34321 - DNA, 20 bp, Artificial Sequence
  MKO10034321_A_Nnmt
  gRNA
gtgcgataggccgggaggtc

SEQ ID NO: 34322 - DNA, 20 bp, Artificial Sequence
  MKO10034322_A_Nnmt
  gRNA
tccctagtggggcgaaagcc

SEQ ID NO: 34323 - DNA, 20 bp, Artificial Sequence
  MKO10034323_A_Nnmt
  gRNA
gaccactggggaccagtcaa

SEQ ID NO: 34324 - DNA, 20 bp, Artificial Sequence
  MKO10034324_A_Nnt
  gRNA
gcttcgtgagcgcctaacgt

SEQ ID NO: 34325 - DNA, 20 bp, Artificial Sequence
  MKO10034325_A_Nnt
  gRNA
aattggggatccgaaacgtt

SEQ ID NO: 34326 - DNA, 20 bp, Artificial Sequence
  MKO10034326_A_Nnt
  gRNA
atgcaactcgcttctcgttt

SEQ ID NO: 34327 - DNA, 20 bp, Artificial Sequence
  MKO10034327_A_Noa1
  gRNA
agcccgaatagatttcctac

SEQ ID NO: 34328 - DNA, 20 bp, Artificial Sequence
  MKO10034328_A_Noa1
  gRNA
tgggcgtctttcacgtcctc

SEQ ID NO: 34329 - DNA, 20 bp, Artificial Sequence
  MKO10034329_A_Noa1
  gRNA
gcaaatagagctaaccccag

SEQ ID NO: 34330 - DNA, 20 bp, Artificial Sequence
  MKO10034330_A_Nob1
  gRNA
ggtgcgagagattcgcgaca

SEQ ID NO: 34331 - DNA, 20 bp, Artificial Sequence
  MKO10034331_A_Nob1
  gRNA
ccgatccactgcttcttgta

SEQ ID NO: 34332 - DNA, 20 bp, Artificial Sequence
  MKO10034332_A_Nob1
  gRNA
gaatctctcgcaccacctcc

SEQ ID NO: 34333 - DNA, 20 bp, Artificial Sequence
  MKO10034333_A_Nobox
  gRNA
acccgaaccctgtaccgctc

SEQ ID NO: 34334 - DNA, 20 bp, Artificial Sequence
  MKO10034334_A_Nobox
  gRNA
aggactaacctgagcggtac

SEQ ID NO: 34335 - DNA, 20 bp, Artificial Sequence
  MKO10034335_A_Nobox
  gRNA
gccactgtcgaagacctctg

SEQ ID NO: 34336 - DNA, 20 bp, Artificial Sequence
  MKO10034336_A_Noc2l
  gRNA
gccccgcgtaccgtcctgcg

SEQ ID NO: 34337 - DNA, 20 bp, Artificial Sequence
  MKO10034337_A_Noc2l
  gRNA
tcagaggcgcggcccttacg

SEQ ID NO: 34338 - DNA, 20 bp, Artificial Sequence
  MKO10034338_A_Noc2l
  gRNA
gacagtgacgcgttgcccag

SEQ ID NO: 34339 - DNA, 20 bp, Artificial Sequence
  MKO10034339_A_Noc3l
  gRNA
gtctaaaaaacccattccgc

SEQ ID NO: 34340 - DNA, 20 bp, Artificial Sequence
  MKO10034340_A_Noc3l
  gRNA
aagaactctgcaaaccgcac

SEQ ID NO: 34341 - DNA, 20 bp, Artificial Sequence
  MKO10034341_A_Noc3l
  gRNA
tttatcaacttgcgaaagct

SEQ ID NO: 34342 - DNA, 20 bp, Artificial Sequence
  MKO10034342_A_Noc4l
  gRNA
ctcgctgccgagcgaagaca

SEQ ID NO: 34343 - DNA, 20 bp, Artificial Sequence
  MKO10034343_A_Noc4l
  gRNA
cagctgctgtaaccgcctag

SEQ ID NO: 34344 - DNA, 20 bp, Artificial Sequence
  MKO10034344_A_Noc4l
  gRNA
catccggtaccacacaatgc

SEQ ID NO: 34345 - DNA, 20 bp, Artificial Sequence
  MKO10034345_A_Nod1
  gRNA
acctgcgcgcctatgcccgc

SEQ ID NO: 34346 - DNA, 20 bp, Artificial Sequence
  MKO10034346_A_Nod1
  gRNA
cttcgacctgagccgcgtgc

SEQ ID NO: 34347 - DNA, 20 bp, Artificial Sequence
  MKO10034347_A_Nod1
  gRNA
cgtcaaccagatcaccgaca

SEQ ID NO: 34348 - DNA, 20 bp, Artificial Sequence
  MKO10034348_A_Nod2
  gRNA
acatcgtcctgagcgacatc

SEQ ID NO: 34349 - DNA, 20 bp, Artificial Sequence
  MKO10034349_A_Nod2
  gRNA
ggcacgtgcccgctcgtgtc

SEQ ID NO: 34350 - DNA, 20 bp, Artificial Sequence
  MKO10034350_A_Nod2
  gRNA
tacgtaccctcgtaaggcag

SEQ ID NO: 34351 - DNA, 20 bp, Artificial Sequence
  MKO10034351_A_Nodal
  gRNA
ggggttggtatcgtttcagc

SEQ ID NO: 34352 - DNA, 20 bp, Artificial Sequence
  MKO10034352_A_Nodal
  gRNA
ctgcggatgatgtccgcccg

SEQ ID NO: 34353 - DNA, 20 bp, Artificial Sequence
  MKO10034353_A_Nodal
  gRNA
gtacaatgcctatcgctgtg

SEQ ID NO: 34354 - DNA, 20 bp, Artificial Sequence
  MKO10034354_A_Nog
  gRNA
ctgcccaccttcacgtagcg

SEQ ID NO: 34355 - DNA, 20 bp, Artificial Sequence
  MKO10034355_A_Nog
  gRNA
atgacctaggcagccgcttt

SEQ ID NO: 34356 - DNA, 20 bp, Artificial Sequence
  MKO10034356_A_Nog
  gRNA
gccatgccgagcgagatcaa

SEQ ID NO: 34357 - DNA, 20 bp, Artificial Sequence
  MKO10034357_A_Nol10
  gRNA
taggagaattgaacttattc

SEQ ID NO: 34358 - DNA, 20 bp, Artificial Sequence
  MKO10034358_A_Nol10
  gRNA
tactgtgtgtactactatca

SEQ ID NO: 34359 - DNA, 20 bp, Artificial Sequence
  MKO10034359_A_Nol10
  gRNA
actgatatgtgtcataacac

SEQ ID NO: 34360 - DNA, 20 bp, Artificial Sequence
  MKO10034360_A_Nol11
  gRNA
agccgaccagttcctagtga

SEQ ID NO: 34361 - DNA, 20 bp, Artificial Sequence
  MKO10034361_A_Nol11
  gRNA
cgaatctgtcatacctgatg

SEQ ID NO: 34362 - DNA, 20 bp, Artificial Sequence
  MKO10034362_A_Nol11
  gRNA
tcctgccgctgtccgtcact

SEQ ID NO: 34363 - DNA, 20 bp, Artificial Sequence
  MKO10034363_A_Nol12
  gRNA
gcggaaggtagagcgcaaga

SEQ ID NO: 34364 - DNA, 20 bp, Artificial Sequence
  MKO10034364_A_Nol12
  gRNA
ctagcagccgggcccctgag

SEQ ID NO: 34365 - DNA, 20 bp, Artificial Sequence
  MKO10034365_A_Nol12
  gRNA
tcttgcagggagtacctgac

SEQ ID NO: 34366 - DNA, 20 bp, Artificial Sequence
  MKO10034366_A_Nol3
  gRNA
aacagtgcgcatgccagacc

SEQ ID NO: 34367 - DNA, 20 bp, Artificial Sequence
  MKO10034367_A_Nol3
  gRNA
cgcatccaaggcttcgtact

SEQ ID NO: 34368 - DNA, 20 bp, Artificial Sequence
  MKO10034368_A_Nol3
  gRNA
cgagcccgacttccaagaag

SEQ ID NO: 34369 - DNA, 20 bp, Artificial Sequence
  MKO10034369_A_Nol4
  gRNA
aaccgtgtcaccgcttctct

SEQ ID NO: 34370 - DNA, 20 bp, Artificial Sequence
  MKO10034370_A_Nol4
  gRNA
ggccgaatggagagcaaatc

SEQ ID NO: 34371 - DNA, 20 bp, Artificial Sequence
  MKO10034371_A_Nol4
  gRNA
cctttgtgatccgttccatc

SEQ ID NO: 34372 - DNA, 20 bp, Artificial Sequence
  MKO10034372_A_Nol6
  gRNA
ccgcaagcgagccctttacc

SEQ ID NO: 34373 - DNA, 20 bp, Artificial Sequence
  MKO10034373_A_Nol6
  gRNA
tatgcgaccagatatcaatg

SEQ ID NO: 34374 - DNA, 20 bp, Artificial Sequence
  MKO10034374_A_Nol6
  gRNA
gtgatggaacttgccttcga

SEQ ID NO: 34375 - DNA, 20 bp, Artificial Sequence
  MKO10034375_A_Nol7
  gRNA
cagggataaaacgctgttga

SEQ ID NO: 34376 - DNA, 20 bp, Artificial Sequence
  MKO10034376_A_Nol7
  gRNA
ggagctgttcatcgaacaga

SEQ ID NO: 34377 - DNA, 20 bp, Artificial Sequence
  MKO10034377_A_Nol7
  gRNA
aaatcaccagaaaacgtaaa

SEQ ID NO: 34378 - DNA, 20 bp, Artificial Sequence
  MKO10034378_A_Nol8
  gRNA
atttggagaagtttctgacg

SEQ ID NO: 34379 - DNA, 20 bp, Artificial Sequence
  MKO10034379_A_Nol8
  gRNA
atcactcggaaagatgacca

SEQ ID NO: 34380 - DNA, 20 bp, Artificial Sequence
  MKO10034380_A_Nol8
  gRNA
gaaggactcactttatgccc

SEQ ID NO: 34381 - DNA, 20 bp, Artificial Sequence
  MKO10034381_A_Nol9
  gRNA
tcgagctgcgacgcctgcga

SEQ ID NO: 34382 - DNA, 20 bp, Artificial Sequence
  MKO10034382_A_Nol9
  gRNA
cgcggacgcggtgcatggcg

SEQ ID NO: 34383 - DNA, 20 bp, Artificial Sequence
  MKO10034383_A_Nol9
  gRNA
caattacctagtttcgtgta

SEQ ID NO: 34384 - DNA, 20 bp, Artificial Sequence
  MKO10034384_A_Nolc1
  gRNA
agtcagacctcctgcgaaga

SEQ ID NO: 34385 - DNA, 20 bp, Artificial Sequence
  MKO10034385_A_Nolc1
  gRNA
gagctctctgccttcttcgc

SEQ ID NO: 34386 - DNA, 20 bp, Artificial Sequence
  MKO10034386_A_Nolc1
  gRNA
actggctcgcttgacctgtg

SEQ ID NO: 34387 - DNA, 20 bp, Artificial Sequence
  MKO10034387_A_Nom1
  gRNA
agtacatccctcctcggctg

SEQ ID NO: 34388 - DNA, 20 bp, Artificial Sequence
  MKO10034388_A_Nom1
  gRNA
gtacctctattccgaccgtg

SEQ ID NO: 34389 - DNA, 20 bp, Artificial Sequence
  MKO10034389_A_Nom1
  gRNA
atgttaaaggcctaattaac

SEQ ID NO: 34390 - DNA, 20 bp, Artificial Sequence
  MKO10034390_A_Nomo1
  gRNA
tgtgagcgacatctgcacga

SEQ ID NO: 34391 - DNA, 20 bp, Artificial Sequence
  MKO10034391_A_Nomo1
  gRNA
atcataaagtagccgttgtt

SEQ ID NO: 34392 - DNA, 20 bp, Artificial Sequence
  MKO10034392_A_Nomo1
  gRNA
agtcagcaccggtgcttctc

SEQ ID NO: 34393 - DNA, 20 bp, Artificial Sequence
  MKO10034393_A_Nono
  gRNA
tacttacgtagtcagcaaga

SEQ ID NO: 34394 - DNA, 20 bp, Artificial Sequence
  MKO10034394_A_Nono
  gRNA
ccacacacttgtggaattgc

SEQ ID NO: 34395 - DNA, 20 bp, Artificial Sequence
  MKO10034395_A_Nono
  gRNA
agttcgttcgacacgtactg

SEQ ID NO: 34396 - DNA, 20 bp, Artificial Sequence
  MKO10034396_A_Nop10
  gRNA
cgatcgcgtttatacgctga

SEQ ID NO: 34397 - DNA, 20 bp, Artificial Sequence
  MKO10034397_A_Nop10
  gRNA
cgcgatcgccctgctcgttg

SEQ ID NO: 34398 - DNA, 20 bp, Artificial Sequence
  MKO10034398_A_Nop10
  gRNA
ttaacgagccctcagaggac

SEQ ID NO: 34399 - DNA, 20 bp, Artificial Sequence
  MKO10034399_A_Nop14
  gRNA
gtgttcgcagacaaacgctt

SEQ ID NO: 34400 - DNA, 20 bp, Artificial Sequence
  MKO10034400_A_Nop14
  gRNA
gcgtttgtctgcgaacacat

SEQ ID NO: 34401 - DNA, 20 bp, Artificial Sequence
  MKO10034401_A_Nop14
  gRNA
atcagttccttccgtgtctt

SEQ ID NO: 34402 - DNA, 20 bp, Artificial Sequence
  MKO10034402_A_Nop16
  gRNA
tgtaccgcacatagtcgatg

SEQ ID NO: 34403 - DNA, 20 bp, Artificial Sequence
  MKO10034403_A_Nop16
  gRNA
gttcccacatacgacatgcc

SEQ ID NO: 34404 - DNA, 20 bp, Artificial Sequence
  MKO10034404_A_Nop16
  gRNA
tagacacggaggagcgaccc

SEQ ID NO: 34405 - DNA, 20 bp, Artificial Sequence
  MKO10034405_A_Nop2
  gRNA
ggcgcttcttacctcgagcc

SEQ ID NO: 34406 - DNA, 20 bp, Artificial Sequence
  MKO10034406_A_Nop2
  gRNA
tgtcgagtcgtgcccgaaag

SEQ ID NO: 34407 - DNA, 20 bp, Artificial Sequence
  MKO10034407_A_Nop2
  gRNA
ggcacgactcgacagcctct

SEQ ID NO: 34408 - DNA, 20 bp, Artificial Sequence
  MKO10034408_A_Nop56
  gRNA
ttacctgacgcgcatcgaga

SEQ ID NO: 34409 - DNA, 20 bp, Artificial Sequence
  MKO10034409_A_Nop56
  gRNA
ataccttctcgatgcgcgtc

SEQ ID NO: 34410 - DNA, 20 bp, Artificial Sequence
  MKO10034410_A_Nop56
  gRNA
attccacaatgtcgttcgtc

SEQ ID NO: 34411 - DNA, 20 bp, Artificial Sequence
  MKO10034411_A_Nop58
  gRNA
gtcgctgatgctaaactagg

SEQ ID NO: 34412 - DNA, 20 bp, Artificial Sequence
  MKO10034412_A_Nop58
  gRNA
gttgttaatgaacttatgag

SEQ ID NO: 34413 - DNA, 20 bp, Artificial Sequence
  MKO10034413_A_Nop58
  gRNA
gtgggccaatccaagacaca

SEQ ID NO: 34414 - DNA, 20 bp, Artificial Sequence
  MKO10034414_A_Nop9
  gRNA
gcgccccaacttgcgcttcg

SEQ ID NO: 34415 - DNA, 20 bp, Artificial Sequence
  MKO10034415_A_Nop9
  gRNA
gagcggcccacactcgacac

SEQ ID NO: 34416 - DNA, 20 bp, Artificial Sequence
  MKO10034416_A_Nop9
  gRNA
aaccttcttgaatcgccttc

SEQ ID NO: 34417 - DNA, 20 bp, Artificial Sequence
  MKO10034417_A_Nos1ap
  gRNA
actcacccggattctgcgca

SEQ ID NO: 34418 - DNA, 20 bp, Artificial Sequence
  MKO10034418_A_Nos1ap
  gRNA
tgatgcaggaccctatctac

SEQ ID NO: 34419 - DNA, 20 bp, Artificial Sequence
  MKO10034419_A_Nos1ap
  gRNA
agggctcttacctgtagata

SEQ ID NO: 34420 - DNA, 20 bp, Artificial Sequence
  MKO10034420_A_Nos1
  gRNA
cccgtattcagagaacgaac

SEQ ID NO: 34421 - DNA, 20 bp, Artificial Sequence
  MKO10034421_A_Nos1
  gRNA
cggaacgcctctcgctgtgt

SEQ ID NO: 34422 - DNA, 20 bp, Artificial Sequence
  MKO10034422_A_Nos1
  gRNA
acagcgagaggcgttccgcc

SEQ ID NO: 34423 - DNA, 20 bp, Artificial Sequence
  MKO10034423_A_Nos2
  gRNA
cgacccgtccacagtatgtg

SEQ ID NO: 34424 - DNA, 20 bp, Artificial Sequence
  MKO10034424_A_Nos2
  gRNA
aggaatgcccctcgctgcat

SEQ ID NO: 34425 - DNA, 20 bp, Artificial Sequence
  MKO10034425_A_Nos2
  gRNA
gcagcgaggggcattcctcc

SEQ ID NO: 34426 - DNA, 20 bp, Artificial Sequence
  MKO10034426_A_Nos3
  gRNA
acaacagccccccgctaacc

SEQ ID NO: 34427 - DNA, 20 bp, Artificial Sequence
  MKO10034427_A_Nos3
  gRNA
acagcggggagcattgcgcc

SEQ ID NO: 34428 - DNA, 20 bp, Artificial Sequence
  MKO10034428_A_Nos3
  gRNA
gcgcaatgctccccgctgtg

SEQ ID NO: 34429 - DNA, 20 bp, Artificial Sequence
  MKO10034429_A_Nosip
  gRNA
gttctgggtcccatagcccg

SEQ ID NO: 34430 - DNA, 20 bp, Artificial Sequence
  MKO10034430_A_Nosip
  gRNA
cccagaacattcgactgagc

SEQ ID NO: 34431 - DNA, 20 bp, Artificial Sequence
  MKO10034431_A_Nosip
  gRNA
ttagacaggatgacgcggca

SEQ ID NO: 34432 - DNA, 20 bp, Artificial Sequence
  MKO10034432_A_Nostrin
  gRNA
ctggagattagctacgccaa

SEQ ID NO: 34433 - DNA, 20 bp, Artificial Sequence
  MKO10034433_A_Nostrin
  gRNA
ctttggcgtagctaatctcc

SEQ ID NO: 34434 - DNA, 20 bp, Artificial Sequence
  MKO10034434_A_Nostrin
  gRNA
agcgataaagccaacacacc

SEQ ID NO: 34435 - DNA, 20 bp, Artificial Sequence
  MKO10034435_A_Notch1
  gRNA
atatacatacccgtccactc

SEQ ID NO: 34436 - DNA, 20 bp, Artificial Sequence
  MKO10034436_A_Notch1
  gRNA
agcacaccgtgtaagaatgc

SEQ ID NO: 34437 - DNA, 20 bp, Artificial Sequence
  MKO10034437_A_Notch1
  gRNA
ggtattcacgccgtccacac

SEQ ID NO: 34438 - DNA, 20 bp, Artificial Sequence
  MKO10034438_A_Notch2
  gRNA
gtcgtcgatattccgctcac

SEQ ID NO: 34439 - DNA, 20 bp, Artificial Sequence
  MKO10034439_A_Notch2
  gRNA
gcctccgttgacgcagggcg

SEQ ID NO: 34440 - DNA, 20 bp, Artificial Sequence
  MKO10034440_A_Notch2
  gRNA
tacgagtgcacctgccaagt

SEQ ID NO: 34441 - DNA, 20 bp, Artificial Sequence
  MKO10034441_A_Notch3
  gRNA
ccaccattacgacacgggga

SEQ ID NO: 34442 - DNA, 20 bp, Artificial Sequence
  MKO10034442_A_Notch3
  gRNA
gccccttccccgtgtcgtaa

SEQ ID NO: 34443 - DNA, 20 bp, Artificial Sequence
  MKO10034443_A_Notch3
  gRNA
ccattgagacaccgatgtcc

SEQ ID NO: 34444 - DNA, 20 bp, Artificial Sequence
  MKO10034444_A_Notch4
  gRNA
ctcgttgatgtcgcgttcac

SEQ ID NO: 34445 - DNA, 20 bp, Artificial Sequence
  MKO10034445_A_Notch4
  gRNA
aacatagcagtgacccccgt

SEQ ID NO: 34446 - DNA, 20 bp, Artificial Sequence
  MKO10034446_A_Notch4
  gRNA
tgatcgatgccaaacccatc

SEQ ID NO: 34447 - DNA, 20 bp, Artificial Sequence
  MKO10034447_A_Noto
  gRNA
cgtactgcgacaccgcaccg

SEQ ID NO: 34448 - DNA, 20 bp, Artificial Sequence
  MKO10034448_A_Noto
  gRNA
ttgtcccgcgccgactagct

SEQ ID NO: 34449 - DNA, 20 bp, Artificial Sequence
  MKO10034449_A_Noto
  gRNA
gatacttcaccctgcgattt

SEQ ID NO: 34450 - DNA, 20 bp, Artificial Sequence
  MKO10034450_A_Notum
  gRNA
taaccaccgccgactgccct

SEQ ID NO: 34451 - DNA, 20 bp, Artificial Sequence
  MKO10034451_A_Notum
  gRNA
ggagctcatgaggcgccgca

SEQ ID NO: 34452 - DNA, 20 bp, Artificial Sequence
  MKO10034452_A_Notum
  gRNA
gcggctggtattgcttcaac

SEQ ID NO: 34453 - DNA, 20 bp, Artificial Sequence
  MKO10034453_A_Nova1
  gRNA
ctcacttgtttgatgcgatc

SEQ ID NO: 34454 - DNA, 20 bp, Artificial Sequence
  MKO10034454_A_Nova1
  gRNA
aaaaagggagaattcgtacc

SEQ ID NO: 34455 - DNA, 20 bp, Artificial Sequence
  MKO10034455_A_Nova1
  gRNA
ctcatacctagttatgctgc

SEQ ID NO: 34456 - DNA, 20 bp, Artificial Sequence
  MKO10034456_A_Nova2
  gRNA
ccacctcggggggcgtctcg

SEQ ID NO: 34457 - DNA, 20 bp, Artificial Sequence
  MKO10034457_A_Nova2
  gRNA
cgtgagcgccatcgtgcaga

SEQ ID NO: 34458 - DNA, 20 bp, Artificial Sequence
  MKO10034458_A_Nova2
  gRNA
caacatcagctacgccaacg

SEQ ID NO: 34459 - DNA, 20 bp, Artificial Sequence
  MKO10034459_A_Nov
  gRNA
ccggcagtagcacgtctagc

SEQ ID NO: 34460 - DNA, 20 bp, Artificial Sequence
  MKO10034460_A_Nov
  gRNA
cagaacaactctccccgcgc

SEQ ID NO: 34461 - DNA, 20 bp, Artificial Sequence
  MKO10034461_A_Nov
  gRNA
attcctgttggtgacccggg

SEQ ID NO: 34462 - DNA, 20 bp, Artificial Sequence
  MKO10034462_A_Nox1
  gRNA
tgtagcgttcgaagttaaat

SEQ ID NO: 34463 - DNA, 20 bp, Artificial Sequence
  MKO10034463_A_Nox1
  gRNA
gatttcgacacacaggaatc

SEQ ID NO: 34464 - DNA, 20 bp, Artificial Sequence
  MKO10034464_A_Nox1
  gRNA
agaagcgagagatccatcca

SEQ ID NO: 34465 - DNA, 20 bp, Artificial Sequence
  MKO10034465_A_Nox3
  gRNA
tgaattgacagctatcccgt

SEQ ID NO: 34466 - DNA, 20 bp, Artificial Sequence
  MKO10034466_A_Nox3
  gRNA
caacctggagcgttatcacc

SEQ ID NO: 34467 - DNA, 20 bp, Artificial Sequence
  MKO10034467_A_Nox3
  gRNA
ttccacaaactcgttgccta

SEQ ID NO: 34468 - DNA, 20 bp, Artificial Sequence
  MKO10034468_A_Nox4
  gRNA
tgtgcatgtagccgcccact

SEQ ID NO: 34469 - DNA, 20 bp, Artificial Sequence
  MKO10034469_A_Nox4
  gRNA
tccagaaaagtagaacgttt

SEQ ID NO: 34470 - DNA, 20 bp, Artificial Sequence
  MKO10034470_A_Nox4
  gRNA
attcacttacgcccaacatt

SEQ ID NO: 34471 - DNA, 20 bp, Artificial Sequence
  MKO10034471_A_Noxa1
  gRNA
tggccgtggcacgcgaagac

SEQ ID NO: 34472 - DNA, 20 bp, Artificial Sequence
  MKO10034472_A_Noxa1
  gRNA
gtcccagtcttcgcgtgcca

SEQ ID NO: 34473 - DNA, 20 bp, Artificial Sequence
  MKO10034473_A_Noxa1
  gRNA
aattggccactccccgctgg

SEQ ID NO: 34474 - DNA, 20 bp, Artificial Sequence
  MKO10034474_A_Noxo1
  gRNA
cttgttcagatctccgtagc

SEQ ID NO: 34475 - DNA, 20 bp, Artificial Sequence
  MKO10034475_A_Noxo1
  gRNA
atgctccattgctgacacgt

SEQ ID NO: 34476 - DNA, 20 bp, Artificial Sequence
  MKO10034476_A_Noxo1
  gRNA
tgcccccgacgtgtcagcaa

SEQ ID NO: 34477 - DNA, 20 bp, Artificial Sequence
  MKO10034477_A_Noxred1
  gRNA
cccggataatcgttgtatct

SEQ ID NO: 34478 - DNA, 20 bp, Artificial Sequence
  MKO10034478_A_Noxred1
  gRNA
ccaggtgagttacggaaact

SEQ ID NO: 34479 - DNA, 20 bp, Artificial Sequence
  MKO10034479_A_Noxred1
  gRNA
atttgataacgccgctactg

SEQ ID NO: 34480 - DNA, 20 bp, Artificial Sequence
  MKO10034480_A_Npas1
  gRNA
ccagcgcggcaaaacgacgc

SEQ ID NO: 34481 - DNA, 20 bp, Artificial Sequence
  MKO10034481_A_Npas1
  gRNA
ggtgacgctaagacgcacga

SEQ ID NO: 34482 - DNA, 20 bp, Artificial Sequence
  MKO10034482_A_Npas1
  gRNA
gtcttcgactacatccatcc

SEQ ID NO: 34483 - DNA, 20 bp, Artificial Sequence
  MKO10034483_A_Npas2
  gRNA
gggaatccgtcacaagcata

SEQ ID NO: 34484 - DNA, 20 bp, Artificial Sequence
  MKO10034484_A_Npas2
  gRNA
gtcatcgtcgtgacaacaga

SEQ ID NO: 34485 - DNA, 20 bp, Artificial Sequence
  MKO10034485_A_Npas2
  gRNA
aatggacaaaaccaccgtgc

SEQ ID NO: 34486 - DNA, 20 bp, Artificial Sequence
  MKO10034486_A_Npas3
  gRNA
aagttataggtgcacaacga

SEQ ID NO: 34487 - DNA, 20 bp, Artificial Sequence
  MKO10034487_A_Npas3
  gRNA
gagatgctgctcgatcccgc

SEQ ID NO: 34488 - DNA, 20 bp, Artificial Sequence
  MKO10034488_A_Npas3
  gRNA
gaaaccgtctctatctacct

SEQ ID NO: 34489 - DNA, 20 bp, Artificial Sequence
  MKO10034489_A_Npas4
  gRNA
tatcgtagatactgtcgccc

SEQ ID NO: 34490 - DNA, 20 bp, Artificial Sequence
  MKO10034490_A_Npas4
  gRNA
ggtccttagcatgccggctc

SEQ ID NO: 34491 - DNA, 20 bp, Artificial Sequence
  MKO10034491_A_Npas4
  gRNA
gcgcagaaagcggtgaacac

SEQ ID NO: 34492 - DNA, 20 bp, Artificial Sequence
  MKO10034492_A_Npat
  gRNA
accacacactctctcagatc

SEQ ID NO: 34493 - DNA, 20 bp, Artificial Sequence
  MKO10034493_A_Npat
  gRNA
catagagatgacattattgt

SEQ ID NO: 34494 - DNA, 20 bp, Artificial Sequence
  MKO10034494_A_Npat
  gRNA
taactcaccagtaagcaggc

SEQ ID NO: 34495 - DNA, 20 bp, Artificial Sequence
  MKO10034495_A_Npbwr1
  gRNA
cagccgagcgaataccgcaa

SEQ ID NO: 34496 - DNA, 20 bp, Artificial Sequence
  MKO10034496_A_Npbwr1
  gRNA
cgctgcaccgtaagtgcgcc

SEQ ID NO: 34497 - DNA, 20 bp, Artificial Sequence
  MKO10034497_A_Npbwr1
  gRNA
cgacctcccgcaaacgccgc

SEQ ID NO: 34498 - DNA, 20 bp, Artificial Sequence
  MKO10034498_A_Npb
  gRNA
ctcggctgttgagttgccgc

SEQ ID NO: 34499 - DNA, 20 bp, Artificial Sequence
  MKO10034499_A_Npb
  gRNA
gactcggagcgtcgcgtgga

SEQ ID NO: 34500 - DNA, 20 bp, Artificial Sequence
  MKO10034500_A_Npb
  gRNA
ccgcgggcttgtaccacgcg

SEQ ID NO: 34501 - DNA, 20 bp, Artificial Sequence
  MKO10034501_A_Npc1l1
  gRNA
cttcatcaatgttactcgcg

SEQ ID NO: 34502 - DNA, 20 bp, Artificial Sequence
  MKO10034502_A_Npc1l1
  gRNA
ataggcggggacagacgcgc

SEQ ID NO: 34503 - DNA, 20 bp, Artificial Sequence
  MKO10034503_A_Npc1l1
  gRNA
gatcaatcgcactaccatcc

SEQ ID NO: 34504 - DNA, 20 bp, Artificial Sequence
  MKO10034504_A_Npc1
  gRNA
actaagtcatagccgtcctt

SEQ ID NO: 34505 - DNA, 20 bp, Artificial Sequence
  MKO10034505_A_Npc1
  gRNA
ggcgccttccagtaacgaga

SEQ ID NO: 34506 - DNA, 20 bp, Artificial Sequence
  MKO10034506_A_Npc1
  gRNA
gtacaatgcctgccgtgatg

SEQ ID NO: 34507 - DNA, 20 bp, Artificial Sequence
  MKO10034507_A_Npc2
  gRNA
attccactcttacaaccgtc

SEQ ID NO: 34508 - DNA, 20 bp, Artificial Sequence
  MKO10034508_A_Npc2
  gRNA
catctactcaccgctggtaa

SEQ ID NO: 34509 - DNA, 20 bp, Artificial Sequence
  MKO10034509_A_Npc2
  gRNA
cagctacctgaataagcttc

SEQ ID NO: 34510 - DNA, 20 bp, Artificial Sequence
  MKO10034510_A_Npcd
  gRNA
ccgaatccatcattaaacgc

SEQ ID NO: 34511 - DNA, 20 bp, Artificial Sequence
  MKO10034511_A_Npcd
  gRNA
gagggctcaccttgcggatc

SEQ ID NO: 34512 - DNA, 20 bp, Artificial Sequence
  MKO10034512_A_Npcd
  gRNA
tcagggacgcatcgagtacc

SEQ ID NO: 34513 - DNA, 20 bp, Artificial Sequence
  MKO10034513_A_Npdc1
  gRNA
ctcacagtggggtcaacgac

SEQ ID NO: 34514 - DNA, 20 bp, Artificial Sequence
  MKO10034514_A_Npdc1
  gRNA
cttagcaagctcagccgccc

SEQ ID NO: 34515 - DNA, 20 bp, Artificial Sequence
  MKO10034515_A_Npdc1
  gRNA
acctgtgcagatgtccccgc

SEQ ID NO: 34516 - DNA, 20 bp, Artificial Sequence
  MKO10034516_A_Npepl1
  gRNA
tagctgctcatcgcggatga

SEQ ID NO: 34517 - DNA, 20 bp, Artificial Sequence
  MKO10034517_A_Npepl1
  gRNA
ccgactagcagctcgcattg

SEQ ID NO: 34518 - DNA, 20 bp, Artificial Sequence
  MKO10034518_A_Npepl1
  gRNA
catcccggcgcgcagagaag

SEQ ID NO: 34519 - DNA, 20 bp, Artificial Sequence
  MKO10034519_A_Npepps
  gRNA
agcagcatagcgcacctcgc

SEQ ID NO: 34520 - DNA, 20 bp, Artificial Sequence
  MKO10034520_A_Npepps
  gRNA
ttaaggctactgatgcccga

SEQ ID NO: 34521 - DNA, 20 bp, Artificial Sequence
  MKO10034521_A_Npepps
  gRNA
tttccagaaatccatgcgac

SEQ ID NO: 34522 - DNA, 20 bp, Artificial Sequence
  MKO10034522_A_Npffr1
  gRNA
gctcttcgcgcacatctatc

SEQ ID NO: 34523 - DNA, 20 bp, Artificial Sequence
  MKO10034523_A_Npffr1
  gRNA
cactctgaccgtcacgcgag

SEQ ID NO: 34524 - DNA, 20 bp, Artificial Sequence
  MKO10034524_A_Npffr1
  gRNA
cgcgtaggcggcgatgaaca

SEQ ID NO: 34525 - DNA, 20 bp, Artificial Sequence
  MKO10034525_A_Npffr2
  gRNA
ggtccaccatgagcgagaaa

SEQ ID NO: 34526 - DNA, 20 bp, Artificial Sequence
  MKO10034526_A_Npffr2
  gRNA
ccttgccataagtgatttac

SEQ ID NO: 34527 - DNA, 20 bp, Artificial Sequence
  MKO10034527_A_Npffr2
  gRNA
gatggtggcaaatagcaccg

SEQ ID NO: 34528 - DNA, 20 bp, Artificial Sequence
  MKO10034528_A_Npff
  gRNA
ctggccgctcctcagcgctt

SEQ ID NO: 34529 - DNA, 20 bp, Artificial Sequence
  MKO10034529_A_Npff
  gRNA
caaggaacagctaaatccgc

SEQ ID NO: 34530 - DNA, 20 bp, Artificial Sequence
  MKO10034530_A_Npff
  gRNA
cctggagcagaacacgaaag

SEQ ID NO: 34531 - DNA, 20 bp, Artificial Sequence
  MKO10034531_A_Nphp1
  gRNA
agcttgccgtgagcatcagc

SEQ ID NO: 34532 - DNA, 20 bp, Artificial Sequence
  MKO10034532_A_Nphp1
  gRNA
actgtcacatacatcgctct

SEQ ID NO: 34533 - DNA, 20 bp, Artificial Sequence
  MKO10034533_A_Nphp1
  gRNA
ctctgctcatagttccccac

SEQ ID NO: 34534 - DNA, 20 bp, Artificial Sequence
  MKO10034534_A_Nphp3
  gRNA
gggatccaagtgttcgaccc

SEQ ID NO: 34535 - DNA, 20 bp, Artificial Sequence
  MKO10034535_A_Nphp3
  gRNA
ccctttgcaaacatcaaccg

SEQ ID NO: 34536 - DNA, 20 bp, Artificial Sequence
  MKO10034536_A_Nphp3
  gRNA
tcatccgagtcagactcccc

SEQ ID NO: 34537 - DNA, 20 bp, Artificial Sequence
  MKO10034537_A_Nphp4
  gRNA
ttctaccacagccacgatgc

SEQ ID NO: 34538 - DNA, 20 bp, Artificial Sequence
  MKO10034538_A_Nphp4
  gRNA
tcttacgttctatgggatcc

SEQ ID NO: 34539 - DNA, 20 bp, Artificial Sequence
  MKO10034539_A_Nphp4
  gRNA
gtggtagaagtggtcaccga

SEQ ID NO: 34540 - DNA, 20 bp, Artificial Sequence
  MKO10034540_A_Nphs1
  gRNA
ccaactcggagcggccgact

SEQ ID NO: 34541 - DNA, 20 bp, Artificial Sequence
  MKO10034541_A_Nphs1
  gRNA
ccaagtcggccgctccgagt

SEQ ID NO: 34542 - DNA, 20 bp, Artificial Sequence
  MKO10034542_A_Nphs1
  gRNA
aagggtcgacagttaagctg

SEQ ID NO: 34543 - DNA, 20 bp, Artificial Sequence
  MKO10034543_A_Nphs2
  gRNA
cgctgtctgctactaccgca

SEQ ID NO: 34544 - DNA, 20 bp, Artificial Sequence
  MKO10034544_A_Nphs2
  gRNA
aagagtaattatattccgac

SEQ ID NO: 34545 - DNA, 20 bp, Artificial Sequence
  MKO10034545_A_Nphs2
  gRNA
aaccaccatgaagcgcctct

SEQ ID NO: 34546 - DNA, 20 bp, Artificial Sequence
  MKO10034546_A_Nploc4
  gRNA
ggcctttggtgctcctaacg

SEQ ID NO: 34547 - DNA, 20 bp, Artificial Sequence
  MKO10034547_A_Nploc4
  gRNA
aaaggcctttaaccctaccg

SEQ ID NO: 34548 - DNA, 20 bp, Artificial Sequence
  MKO10034548_A_Nploc4
  gRNA
actcacgatgctctcggcca

SEQ ID NO: 34549 - DNA, 20 bp, Artificial Sequence
  MKO10034549_A_Npl
  gRNA
taacccattcctccgcgacc

SEQ ID NO: 34550 - DNA, 20 bp, Artificial Sequence
  MKO10034550_A_Npl
  gRNA
gagcgtctctgaacgtcgcc

SEQ ID NO: 34551 - DNA, 20 bp, Artificial Sequence
  MKO10034551_A_Npl
  gRNA
cgtgggagcactaaacgtga

SEQ ID NO: 34552 - DNA, 20 bp, Artificial Sequence
  MKO10034552_A_Npm1
  gRNA
attagtggacagcatctagt

SEQ ID NO: 34553 - DNA, 20 bp, Artificial Sequence
  MKO10034553_A_Npm1
  gRNA
tcacaggtcagtttaggagc

SEQ ID NO: 34554 - DNA, 20 bp, Artificial Sequence
  MKO10034554_A_Npm1
  gRNA
acatacaggctgtgaactaa

SEQ ID NO: 34555 - DNA, 20 bp, Artificial Sequence
  MKO10034555_A_Npm2
  gRNA
aatcactattgctacgctga

SEQ ID NO: 34556 - DNA, 20 bp, Artificial Sequence
  MKO10034556_A_Npm2
  gRNA
tgcaggtagtgaactcaatc

SEQ ID NO: 34557 - DNA, 20 bp, Artificial Sequence
  MKO10034557_A_Npm2
  gRNA
agctgtccttcttctcgcct

SEQ ID NO: 34558 - DNA, 20 bp, Artificial Sequence
  MKO10034558_A_Npm3
  gRNA
ctttcagctgtgccttaccg

SEQ ID NO: 34559 - DNA, 20 bp, Artificial Sequence
  MKO10034559_A_Npm3
  gRNA
tcttctcaccgatctgatgc

SEQ ID NO: 34560 - DNA, 20 bp, Artificial Sequence
  MKO10034560_A_Npm3
  gRNA
caccacattacactcgtccg

SEQ ID NO: 34561 - DNA, 20 bp, Artificial Sequence
  MKO10034561_A_Npnt
  gRNA
tccgcagatttaaacgagtg

SEQ ID NO: 34562 - DNA, 20 bp, Artificial Sequence
  MKO10034562_A_Npnt
  gRNA
gcctcacctcccgtcgaagt

SEQ ID NO: 34563 - DNA, 20 bp, Artificial Sequence
  MKO10034563_A_Npnt
  gRNA
tggctgccgacttcgacggg

SEQ ID NO: 34564 - DNA, 20 bp, Artificial Sequence
  MKO10034564_A_Nppa
  gRNA
tgttgcagcctagtccactc

SEQ ID NO: 34565 - DNA, 20 bp, Artificial Sequence
  MKO10034565_A_Nppa
  gRNA
aatcctacccccgaagcagc

SEQ ID NO: 34566 - DNA, 20 bp, Artificial Sequence
  MKO10034566_A_Nppa
  gRNA
cacagatctgatggatttca

SEQ ID NO: 34567 - DNA, 20 bp, Artificial Sequence
  MKO10034567_A_Nppb
  gRNA
gatcggatccgtcagtcgtt

SEQ ID NO: 34568 - DNA, 20 bp, Artificial Sequence
  MKO10034568_A_Nppb
  gRNA
gttacagcccaaacgactga

SEQ ID NO: 34569 - DNA, 20 bp, Artificial Sequence
  MKO10034569_A_Nppb
  gRNA
ctgcggcatggatctcctga

SEQ ID NO: 34570 - DNA, 20 bp, Artificial Sequence
  MKO10034570_A_Nppc
  gRNA
gagaccgatcgcgactgctc

SEQ ID NO: 34571 - DNA, 20 bp, Artificial Sequence
  MKO10034571_A_Nppc
  gRNA
cgatcggtctcccttgagat

SEQ ID NO: 34572 - DNA, 20 bp, Artificial Sequence
  MKO10034572_A_Nppc
  gRNA
caagcccgggacaccaccga

SEQ ID NO: 34573 - DNA, 20 bp, Artificial Sequence
  MKO10034573_A_Npr1
  gRNA
catagagcaggagcccgtca

SEQ ID NO: 34574 - DNA, 20 bp, Artificial Sequence
  MKO10034574_A_Npr1
  gRNA
agaacatcactcagcggatg

SEQ ID NO: 34575 - DNA, 20 bp, Artificial Sequence
  MKO10034575_A_Npr1
  gRNA
acccgataatcctgagtact

SEQ ID NO: 34576 - DNA, 20 bp, Artificial Sequence
  MKO10034576_A_Npr2
  gRNA
gcgagactgatttcgtcctg

SEQ ID NO: 34577 - DNA, 20 bp, Artificial Sequence
  MKO10034577_A_Npr2
  gRNA
gcaggccccacccgtgcaac

SEQ ID NO: 34578 - DNA, 20 bp, Artificial Sequence
  MKO10034578_A_Npr2
  gRNA
atggcaggacaatcgaaccc

SEQ ID NO: 34579 - DNA, 20 bp, Artificial Sequence
  MKO10034579_A_Npr3
  gRNA
cgccaacatgattctccgaa

SEQ ID NO: 34580 - DNA, 20 bp, Artificial Sequence
  MKO10034580_A_Npr3
  gRNA
tcctgtaggtatcgccgggc

SEQ ID NO: 34581 - DNA, 20 bp, Artificial Sequence
  MKO10034581_A_Npr3
  gRNA
ctcccgtaggagatggctcg

SEQ ID NO: 34582 - DNA, 20 bp, Artificial Sequence
  MKO10034582_A_Nprl2
  gRNA
gctgctcgatcaccttcaag

SEQ ID NO: 34583 - DNA, 20 bp, Artificial Sequence
  MKO10034583_A_Nprl2
  gRNA
gccagaccctcctgttgcgc

SEQ ID NO: 34584 - DNA, 20 bp, Artificial Sequence
  MKO10034584_A_Nprl2
  gRNA
tctcgcgagatgaaatcctc

SEQ ID NO: 34585 - DNA, 20 bp, Artificial Sequence
  MKO10034585_A_Nprl3
  gRNA
agcggcgctcctcatgctgc

SEQ ID NO: 34586 - DNA, 20 bp, Artificial Sequence
  MKO10034586_A_Nprl3
  gRNA
ctgccagtacctcactcgag

SEQ ID NO: 34587 - DNA, 20 bp, Artificial Sequence
  MKO10034587_A_Nprl3
  gRNA
aaggttctcggatgttattc

SEQ ID NO: 34588 - DNA, 20 bp, Artificial Sequence
  MKO10034588_A_Npsr1
  gRNA
cgctattccgatgaggactt

SEQ ID NO: 34589 - DNA, 20 bp, Artificial Sequence
  MKO10034589_A_Npsr1
  gRNA
catgaccatcgtcgcctttc

SEQ ID NO: 34590 - DNA, 20 bp, Artificial Sequence
  MKO10034590_A_Npsr1
  gRNA
gtatgcctctacctacgtcc

SEQ ID NO: 34591 - DNA, 20 bp, Artificial Sequence
  MKO10034591_A_Nps
  gRNA
tgagccgactccgttgcgaa

SEQ ID NO: 34592 - DNA, 20 bp, Artificial Sequence
  MKO10034592_A_Nps
  gRNA
atgaaaaggtcctttcgcaa

SEQ ID NO: 34593 - DNA, 20 bp, Artificial Sequence
  MKO10034593_A_Nps
  gRNA
acgcccttaccttggaagag

SEQ ID NO: 34594 - DNA, 20 bp, Artificial Sequence
  MKO10034594_A_Nptn
  gRNA
gcattacattcatactctcc

SEQ ID NO: 34595 - DNA, 20 bp, Artificial Sequence
  MKO10034595_A_Nptn
  gRNA
cctccgtttccaccgtcctc

SEQ ID NO: 34596 - DNA, 20 bp, Artificial Sequence
  MKO10034596_A_Nptn
  gRNA
ttcttgcgccatatccactc

SEQ ID NO: 34597 - DNA, 20 bp, Artificial Sequence
  MKO10034597_A_Nptx1
  gRNA
ctgccgtttgtaatcaacga

SEQ ID NO: 34598 - DNA, 20 bp, Artificial Sequence
  MKO10034598_A_Nptx1
  gRNA
acgaactggtcctcatcgag

SEQ ID NO: 34599 - DNA, 20 bp, Artificial Sequence
  MKO10034599_A_Nptx1
  gRNA
ctcaagtccagtgcggcgcc

SEQ ID NO: 34600 - DNA, 20 bp, Artificial Sequence
  MKO10034600_A_Nptx2
  gRNA
gagcacgccccctggcttaa

SEQ ID NO: 34601 - DNA, 20 bp, Artificial Sequence
  MKO10034601_A_Nptx2
  gRNA
cgcggtcccatatgttgaac

SEQ ID NO: 34602 - DNA, 20 bp, Artificial Sequence
  MKO10034602_A_Nptx2
  gRNA
gacaacaatgtcgatgtgtt

SEQ ID NO: 34603 - DNA, 20 bp, Artificial Sequence
  MKO10034603_A_Nptxr
  gRNA
ccggcagcgccttgcgcacg

SEQ ID NO: 34604 - DNA, 20 bp, Artificial Sequence
  MKO10034604_A_Nptxr
  gRNA
ggccaatgagatcgtgcttc

SEQ ID NO: 34605 - DNA, 20 bp, Artificial Sequence
  MKO10034605_A_Nptxr
  gRNA
aaccccgcagttctccgtcc

SEQ ID NO: 34606 - DNA, 20 bp, Artificial Sequence
  MKO10034606_A_Npvf
  gRNA
catgacgtagagcaactcgc

SEQ ID NO: 34607 - DNA, 20 bp, Artificial Sequence
  MKO10034607_A_Npvf
  gRNA
tacctcgttcgctttccacc

SEQ ID NO: 34608 - DNA, 20 bp, Artificial Sequence
  MKO10034608_A_Npvf
  gRNA
tttaaggagaggagcgtttg

SEQ ID NO: 34609 - DNA, 20 bp, Artificial Sequence
  MKO10034609_A_Npw
  gRNA
actcgccacgtgcttatacc

SEQ ID NO: 34610 - DNA, 20 bp, Artificial Sequence
  MKO10034610_A_Npw
  gRNA
tgcgccgctcgccctaccag

SEQ ID NO: 34611 - DNA, 20 bp, Artificial Sequence
  MKO10034611_A_Npw
  gRNA
catcggttcttgggcctgac

SEQ ID NO: 34612 - DNA, 20 bp, Artificial Sequence
  MKO10034612_A_Npy1r
  gRNA
cgtagtcatcgtctcgagac

SEQ ID NO: 34613 - DNA, 20 bp, Artificial Sequence
  MKO10034613_A_Npy1r
  gRNA
ttcaccttggctctcgctta

SEQ ID NO: 34614 - DNA, 20 bp, Artificial Sequence
  MKO10034614_A_Npy1r
  gRNA
tcttcaacactgtgttcgac

SEQ ID NO: 34615 - DNA, 20 bp, Artificial Sequence
  MKO10034615_A_Npy2r
  gRNA
ctttctcctacacccgtatc

SEQ ID NO: 34616 - DNA, 20 bp, Artificial Sequence
  MKO10034616_A_Npy2r
  gRNA
ggtggtagacaatgcaacga

SEQ ID NO: 34617 - DNA, 20 bp, Artificial Sequence
  MKO10034617_A_Npy2r
  gRNA
gttctgaagatgggcccggt

SEQ ID NO: 34618 - DNA, 20 bp, Artificial Sequence
  MKO10034618_A_Npy4r
  gRNA
acctatccaagggatcgatg

SEQ ID NO: 34619 - DNA, 20 bp, Artificial Sequence
  MKO10034619_A_Npy4r
  gRNA
gtgagctgcaagcgtgcgca

SEQ ID NO: 34620 - DNA, 20 bp, Artificial Sequence
  MKO10034620_A_Npy4r
  gRNA
acccatcctcatcgatccct

SEQ ID NO: 34621 - DNA, 20 bp, Artificial Sequence
  MKO10034621_A_Npy5r
  gRNA
cttactgttaaacatactag

SEQ ID NO: 34622 - DNA, 20 bp, Artificial Sequence
  MKO10034622_A_Npy5r
  gRNA
tgcgtgttacccgccccagc

SEQ ID NO: 34623 - DNA, 20 bp, Artificial Sequence
  MKO10034623_A_Npy5r
  gRNA
aggggaggccgtgttctgac

SEQ ID NO: 34624 - DNA, 20 bp, Artificial Sequence
  MKO10034624_A_Npy6r
  gRNA
ggctccaaaagtcactacga

SEQ ID NO: 34625 - DNA, 20 bp, Artificial Sequence
  MKO10034625_A_Npy6r
  gRNA
cgagttgttgctcttgccac

SEQ ID NO: 34626 - DNA, 20 bp, Artificial Sequence
  MKO10034626_A_Npy6r
  gRNA
agagtgtagatgaccgtaaa

SEQ ID NO: 34627 - DNA, 20 bp, Artificial Sequence
  MKO10034627_A_Npy
  gRNA
gcgtcctcgcccggattgtc

SEQ ID NO: 34628 - DNA, 20 bp, Artificial Sequence
  MKO10034628_A_Npy
  gRNA
tgaggggtacccctccaagc

SEQ ID NO: 34629 - DNA, 20 bp, Artificial Sequence
  MKO10034629_A_Npy
  gRNA
ggcttgaagacccttccatg

SEQ ID NO: 34630 - DNA, 20 bp, Artificial Sequence
  MKO10034630_A_Nqo1
  gRNA
atcattcaactacgccatga

SEQ ID NO: 34631 - DNA, 20 bp, Artificial Sequence
  MKO10034631_A_Nqo1
  gRNA
gaatgacgttcatgtccccg

SEQ ID NO: 34632 - DNA, 20 bp, Artificial Sequence
  MKO10034632_A_Nqo1
  gRNA
tttgagagagtgctcgtagc

SEQ ID NO: 34633 - DNA, 20 bp, Artificial Sequence
  MKO10034633_A_Nqo2
  gRNA
ggaacgctgaaccagtatag

SEQ ID NO: 34634 - DNA, 20 bp, Artificial Sequence
  MKO10034634_A_Nqo2
  gRNA
atggatagggtgctgtgccg

SEQ ID NO: 34635 - DNA, 20 bp, Artificial Sequence
  MKO10034635_A_Nqo2
  gRNA
catctccgctgtacctcccg

SEQ ID NO: 34636 - DNA, 20 bp, Artificial Sequence
  MKO10034636_A_Nr0b1
  gRNA
cccggagaccaacacgacgc

SEQ ID NO: 34637 - DNA, 20 bp, Artificial Sequence
  MKO10034637_A_Nr0b1
  gRNA
gagaatcacccgcgccaggg

SEQ ID NO: 34638 - DNA, 20 bp, Artificial Sequence
  MKO10034638_A_Nr0b1
  gRNA
cgctattgatgaatctcagc

SEQ ID NO: 34639 - DNA, 20 bp, Artificial Sequence
  MKO10034639_A_Nr0b2
  gRNA
gttgtggccggtctgatggc

SEQ ID NO: 34640 - DNA, 20 bp, Artificial Sequence
  MKO10034640_A_Nr0b2
  gRNA
caaggagtatgcgtacctga

SEQ ID NO: 34641 - DNA, 20 bp, Artificial Sequence
  MKO10034641_A_Nr0b2
  gRNA
ccatgaggaggattcgggcc

SEQ ID NO: 34642 - DNA, 20 bp, Artificial Sequence
  MKO10034642_A_Nr1d1
  gRNA
gttgcgattgatgcgaacga

SEQ ID NO: 34643 - DNA, 20 bp, Artificial Sequence
  MKO10034643_A_Nr1d1
  gRNA
cgtcataatgaagcgctgaa

SEQ ID NO: 34644 - DNA, 20 bp, Artificial Sequence
  MKO10034644_A_Nr1d1
  gRNA
cttctggggccgaatatacg

SEQ ID NO: 34645 - DNA, 20 bp, Artificial Sequence
  MKO10034645_A_Nr1d2
  gRNA
ctcttcatagctgttcgatt

SEQ ID NO: 34646 - DNA, 20 bp, Artificial Sequence
  MKO10034646_A_Nr1d2
  gRNA
gctagagatatcagcgttct

SEQ ID NO: 34647 - DNA, 20 bp, Artificial Sequence
  MKO10034647_A_Nr1d2
  gRNA
gctgatatctctagcatcga

SEQ ID NO: 34648 - DNA, 20 bp, Artificial Sequence
  MKO10034648_A_Nr1h2
  gRNA
cagggcgataccgtgacttt

SEQ ID NO: 34649 - DNA, 20 bp, Artificial Sequence
  MKO10034649_A_Nr1h2
  gRNA
cctcaatggtggacgccttc

SEQ ID NO: 34650 - DNA, 20 bp, Artificial Sequence
  MKO10034650_A_Nr1h2
  gRNA
gggccgggcgctatgcctgt

SEQ ID NO: 34651 - DNA, 20 bp, Artificial Sequence
  MKO10034651_A_Nr1h3
  gRNA
ggtcaagtaccgtgacgcgc

SEQ ID NO: 34652 - DNA, 20 bp, Artificial Sequence
  MKO10034652_A_Nr1h3
  gRNA
ctcagaccgcctgcgcgtca

SEQ ID NO: 34653 - DNA, 20 bp, Artificial Sequence
  MKO10034653_A_Nr1h3
  gRNA
tcgacttcgcaaatgccgcc

SEQ ID NO: 34654 - DNA, 20 bp, Artificial Sequence
  MKO10034654_A_Nr1h4
  gRNA
tattctgcctgccgatgccg

SEQ ID NO: 34655 - DNA, 20 bp, Artificial Sequence
  MKO10034655_A_Nr1h4
  gRNA
attcgcggcttctttgtcac

SEQ ID NO: 34656 - DNA, 20 bp, Artificial Sequence
  MKO10034656_A_Nr1h4
  gRNA
gccgtgtacaagtgtaagaa

SEQ ID NO: 34657 - DNA, 20 bp, Artificial Sequence
  MKO10034657_A_Nr1h5
  gRNA
ggactcgacgctcgagaatc

SEQ ID NO: 34658 - DNA, 20 bp, Artificial Sequence
  MKO10034658_A_Nr1h5
  gRNA
gaagtctcttcgacttacac

SEQ ID NO: 34659 - DNA, 20 bp, Artificial Sequence
  MKO10034659_A_Nr1h5
  gRNA
gagcaacttgttctttacgc

SEQ ID NO: 34660 - DNA, 20 bp, Artificial Sequence
  MKO10034660_A_Nr1i2
  gRNA
cgaacatcgtgttgaacctc

SEQ ID NO: 34661 - DNA, 20 bp, Artificial Sequence
  MKO10034661_A_Nr1i2
  gRNA
tactgcttcgaagaccctaa

SEQ ID NO: 34662 - DNA, 20 bp, Artificial Sequence
  MKO10034662_A_Nr1i2
  gRNA
gatcatgtccgatgccgctg

SEQ ID NO: 34663 - DNA, 20 bp, Artificial Sequence
  MKO10034663_A_Nr1i3
  gRNA
tggggcccacatggcgagtg

SEQ ID NO: 34664 - DNA, 20 bp, Artificial Sequence
  MKO10034664_A_Nr1i3
  gRNA
ccggtgatgcatgaacagat

SEQ ID NO: 34665 - DNA, 20 bp, Artificial Sequence
  MKO10034665_A_Nr1i3
  gRNA
ccatctgtccgtttgctgga

SEQ ID NO: 34666 - DNA, 20 bp, Artificial Sequence
  MKO10034666_A_Nr2c1
  gRNA
aacctagtctattcctgtcg

SEQ ID NO: 34667 - DNA, 20 bp, Artificial Sequence
  MKO10034667_A_Nr2c1
  gRNA
atcctcgacaggaatagact

SEQ ID NO: 34668 - DNA, 20 bp, Artificial Sequence
  MKO10034668_A_Nr2c1
  gRNA
tccctggcgtggatccctcg

SEQ ID NO: 34669 - DNA, 20 bp, Artificial Sequence
  MKO10034669_A_Nr2c2ap
  gRNA
ctgtgctcaatcgcaacagc

SEQ ID NO: 34670 - DNA, 20 bp, Artificial Sequence
  MKO10034670_A_Nr2c2ap
  gRNA
gaaactcgagtgacacccac

SEQ ID NO: 34671 - DNA, 20 bp, Artificial Sequence
  MKO10034671_A_Nr2c2ap
  gRNA
tccattgcaggttcacgggg

SEQ ID NO: 34672 - DNA, 20 bp, Artificial Sequence
  MKO10034672_A_Nr2c2
  gRNA
tttctcccgttgcacatcaa

SEQ ID NO: 34673 - DNA, 20 bp, Artificial Sequence
  MKO10034673_A_Nr2c2
  gRNA
gatccagatagtcaccgcag

SEQ ID NO: 34674 - DNA, 20 bp, Artificial Sequence
  MKO10034674_A_Nr2c2
  gRNA
aactgacagccccatagtgc

SEQ ID NO: 34675 - DNA, 20 bp, Artificial Sequence
  MKO10034675_A_Nr2e1
  gRNA
gacgtccaccatccgcaaac

SEQ ID NO: 34676 - DNA, 20 bp, Artificial Sequence
  MKO10034676_A_Nr2e1
  gRNA
cccaatgtatctctacgaag

SEQ ID NO: 34677 - DNA, 20 bp, Artificial Sequence
  MKO10034677_A_Nr2e1
  gRNA
gcggccaactccagaccgtg

SEQ ID NO: 34678 - DNA, 20 bp, Artificial Sequence
  MKO10034678_A_Nr2e3
  gRNA
cgccgaaacttgtgctaaac

SEQ ID NO: 34679 - DNA, 20 bp, Artificial Sequence
  MKO10034679_A_Nr2e3
  gRNA
tcgctccagtgccgagtgtg

SEQ ID NO: 34680 - DNA, 20 bp, Artificial Sequence
  MKO10034680_A_Nr2e3
  gRNA
aggcctggcactgattgcga

SEQ ID NO: 34681 - DNA, 20 bp, Artificial Sequence
  MKO10034681_A_Nr2f1
  gRNA
gcaactcttcttcgtacgtt

SEQ ID NO: 34682 - DNA, 20 bp, Artificial Sequence
  MKO10034682_A_Nr2f1
  gRNA
ctggctgccataacgcgacg

SEQ ID NO: 34683 - DNA, 20 bp, Artificial Sequence
  MKO10034683_A_Nr2f1
  gRNA
ccctaccccacgtcgcgtta

SEQ ID NO: 34684 - DNA, 20 bp, Artificial Sequence
  MKO10034684_A_Nr2f2
  gRNA
tatatccggacaggtacgag

SEQ ID NO: 34685 - DNA, 20 bp, Artificial Sequence
  MKO10034685_A_Nr2f2
  gRNA
tggcgcggcacgtgtagctc

SEQ ID NO: 34686 - DNA, 20 bp, Artificial Sequence
  MKO10034686_A_Nr2f2
  gRNA
ggtccataaaagcgaccacc

SEQ ID NO: 34687 - DNA, 20 bp, Artificial Sequence
  MKO10034687_A_Nr2f6
  gRNA
acgattcggcgtcacctccc

SEQ ID NO: 34688 - DNA, 20 bp, Artificial Sequence
  MKO10034688_A_Nr2f6
  gRNA
ggttcgacgcccgtcgcgcc

SEQ ID NO: 34689 - DNA, 20 bp, Artificial Sequence
  MKO10034689_A_Nr2f6
  gRNA
gacgggcgtcgaacctttca

SEQ ID NO: 34690 - DNA, 20 bp, Artificial Sequence
  MKO10034690_A_Nr3c1
  gRNA
atgaccacgctcaacatgtt

SEQ ID NO: 34691 - DNA, 20 bp, Artificial Sequence
  MKO10034691_A_Nr3c1
  gRNA
cacacgtcagcaccccataa

SEQ ID NO: 34692 - DNA, 20 bp, Artificial Sequence
  MKO10034692_A_Nr3c1
  gRNA
cagcacaattacctttgtgc

SEQ ID NO: 34693 - DNA, 20 bp, Artificial Sequence
  MKO10034693_A_Nr3c2
  gRNA
cgtgagcgcacgcgtgatcg

SEQ ID NO: 34694 - DNA, 20 bp, Artificial Sequence
  MKO10034694_A_Nr3c2
  gRNA
gtagcctgcatacacgatct

SEQ ID NO: 34695 - DNA, 20 bp, Artificial Sequence
  MKO10034695_A_Nr3c2
  gRNA
cactatggggtagtgacctg

SEQ ID NO: 34696 - DNA, 20 bp, Artificial Sequence
  MKO10034696_A_Nr4a1
  gRNA
cccactttcggataacgtcc

SEQ ID NO: 34697 - DNA, 20 bp, Artificial Sequence
  MKO10034697_A_Nr4a1
  gRNA
ccctggacgttatccgaaag

SEQ ID NO: 34698 - DNA, 20 bp, Artificial Sequence
  MKO10034698_A_Nr4a1
  gRNA
ttccgccgcctcttgtccac

SEQ ID NO: 34699 - DNA, 20 bp, Artificial Sequence
  MKO10034699_A_Nr4a2
  gRNA
ttgccggattggaatcgacg

SEQ ID NO: 34700 - DNA, 20 bp, Artificial Sequence
  MKO10034700_A_Nr4a2
  gRNA
tcgagggtaaacgacctctc

SEQ ID NO: 34701 - DNA, 20 bp, Artificial Sequence
  MKO10034701_A_Nr4a2
  gRNA
gacagtactgacaacgattt

SEQ ID NO: 34702 - DNA, 20 bp, Artificial Sequence
  MKO10034702_A_Nr4a3
  gRNA
ccagtactgtcccaccgacc

SEQ ID NO: 34703 - DNA, 20 bp, Artificial Sequence
  MKO10034703_A_Nr4a3
  gRNA
cgtcaatggaggccgtcaga

SEQ ID NO: 34704 - DNA, 20 bp, Artificial Sequence
  MKO10034704_A_Nr4a3
  gRNA
catcgacttcagtgccttcg

SEQ ID NO: 34705 - DNA, 20 bp, Artificial Sequence
  MKO10034705_A_Nr5a1
  gRNA
gttggaccacatctaccgcc

SEQ ID NO: 34706 - DNA, 20 bp, Artificial Sequence
  MKO10034706_A_Nr5a1
  gRNA
ccaggtgcgcgctcgcatcg

SEQ ID NO: 34707 - DNA, 20 bp, Artificial Sequence
  MKO10034707_A_Nr5a1
  gRNA
ctgtgcgtgctgatcgaatg

SEQ ID NO: 34708 - DNA, 20 bp, Artificial Sequence
  MKO10034708_A_Nr5a2
  gRNA
gtaagagccgaccgcatgcg

SEQ ID NO: 34709 - DNA, 20 bp, Artificial Sequence
  MKO10034709_A_Nr5a2
  gRNA
ccttgcagctttcgcacgtg

SEQ ID NO: 34710 - DNA, 20 bp, Artificial Sequence
  MKO10034710_A_Nr5a2
  gRNA
tatttctgccccctcgcatg

SEQ ID NO: 34711 - DNA, 20 bp, Artificial Sequence
  MKO10034711_A_Nr6a1
  gRNA
catagtgcaagcccgtagcg

SEQ ID NO: 34712 - DNA, 20 bp, Artificial Sequence
  MKO10034712_A_Nr6a1
  gRNA
cgcgctacgggcttgcacta

SEQ ID NO: 34713 - DNA, 20 bp, Artificial Sequence
  MKO10034713_A_Nr6a1
  gRNA
gacagcgaccacagttcccc

SEQ ID NO: 34714 - DNA, 20 bp, Artificial Sequence
  MKO10034714_A_Nradd
  gRNA
cagctggcgagctcaaaacc

SEQ ID NO: 34715 - DNA, 20 bp, Artificial Sequence
  MKO10034715_A_Nradd
  gRNA
cgttgctgtcaccacgcctc

SEQ ID NO: 34716 - DNA, 20 bp, Artificial Sequence
  MKO10034716_A_Nradd
  gRNA
aaagctcggactgtagagct

SEQ ID NO: 34717 - DNA, 20 bp, Artificial Sequence
  MKO10034717_A_Nrap
  gRNA
catttaaatccgttctccat

SEQ ID NO: 34718 - DNA, 20 bp, Artificial Sequence
  MKO10034718_A_Nrap
  gRNA
gacacttacgcgtgacagta

SEQ ID NO: 34719 - DNA, 20 bp, Artificial Sequence
  MKO10034719_A_Nrap
  gRNA
ctagtgaacgtgttgttctt

SEQ ID NO: 34720 - DNA, 20 bp, Artificial Sequence
  MKO10034720_A_Nrarp
  gRNA
atccgcctagctaaccgcga

SEQ ID NO: 34721 - DNA, 20 bp, Artificial Sequence
  MKO10034721_A_Nrarp
  gRNA
gcgctacacatcgccgcttt

SEQ ID NO: 34722 - DNA, 20 bp, Artificial Sequence
  MKO10034722_A_Nrarp
  gRNA
gaattcaacgtgaactcgtt

SEQ ID NO: 34723 - DNA, 20 bp, Artificial Sequence
  MKO10034723_A_Nras
  gRNA
ctagcatacctgtcgggtct

SEQ ID NO: 34724 - DNA, 20 bp, Artificial Sequence
  MKO10034724_A_Nras
  gRNA
gacctcagccaagacccgac

SEQ ID NO: 34725 - DNA, 20 bp, Artificial Sequence
  MKO10034725_A_Nras
  gRNA
ttgcagatattaacctctac

SEQ ID NO: 34726 - DNA, 20 bp, Artificial Sequence
  MKO10034726_A_Nrbf2
  gRNA
cgaccactcacaaggttgag

SEQ ID NO: 34727 - DNA, 20 bp, Artificial Sequence
  MKO10034727_A_Nrbf2
  gRNA
gtctcaggctcacttatcac

SEQ ID NO: 34728 - DNA, 20 bp, Artificial Sequence
  MKO10034728_A_Nrbf2
  gRNA
gagccatcagagccctgtat

SEQ ID NO: 34729 - DNA, 20 bp, Artificial Sequence
  MKO10034729_A_Nrbp1
  gRNA
gtgaatcagcgtaatgtacc

SEQ ID NO: 34730 - DNA, 20 bp, Artificial Sequence
  MKO10034730_A_Nrbp1
  gRNA
ttacctaccttagggcagag

SEQ ID NO: 34731 - DNA, 20 bp, Artificial Sequence
  MKO10034731_A_Nrbp1
  gRNA
atcacagaatacatgtcctc

SEQ ID NO: 34732 - DNA, 20 bp, Artificial Sequence
  MKO10034732_A_Nrbp2
  gRNA
tgagtgcctggctcgagcga

SEQ ID NO: 34733 - DNA, 20 bp, Artificial Sequence
  MKO10034733_A_Nrbp2
  gRNA
aagctgctcacccgcatgtt

SEQ ID NO: 34734 - DNA, 20 bp, Artificial Sequence
  MKO10034734_A_Nrbp2
  gRNA
cttccaccgagtgctctttg

SEQ ID NO: 34735 - DNA, 20 bp, Artificial Sequence
  MKO10034735_A_Nrcam
  gRNA
gtgagttccattacgagtcc

SEQ ID NO: 34736 - DNA, 20 bp, Artificial Sequence
  MKO10034736_A_Nrcam
  gRNA
gtgccagatgatcagcgcgc

SEQ ID NO: 34737 - DNA, 20 bp, Artificial Sequence
  MKO10034737_A_Nrcam
  gRNA
catccagcgcgctgatcatc

SEQ ID NO: 34738 - DNA, 20 bp, Artificial Sequence
  MKO10034738_A_Nrd1
  gRNA
gcatcaaatccattctcatc

SEQ ID NO: 34739 - DNA, 20 bp, Artificial Sequence
  MKO10034739_A_Nrd1
  gRNA
tgtgcgttcacaatcagttg

SEQ ID NO: 34740 - DNA, 20 bp, Artificial Sequence
  MKO10034740_A_Nrd1
  gRNA
gctgatccagatgacctgcc

SEQ ID NO: 34741 - DNA, 20 bp, Artificial Sequence
  MKO10034741_A_Nrde2
  gRNA
acgatctgaccgacgtcttc

SEQ ID NO: 34742 - DNA, 20 bp, Artificial Sequence
  MKO10034742_A_Nrde2
  gRNA
atccatagttgcgtgtccca

SEQ ID NO: 34743 - DNA, 20 bp, Artificial Sequence
  MKO10034743_A_Nrde2
  gRNA
cacgacgcaccagggtttct

SEQ ID NO: 34744 - DNA, 20 bp, Artificial Sequence
  MKO10034744_A_Nrep
  gRNA
gctgcctcgctgactccgcc

SEQ ID NO: 34745 - DNA, 20 bp, Artificial Sequence
  MKO10034745_A_Nrep
  gRNA
ctgacccagaccaagagttc

SEQ ID NO: 34746 - DNA, 20 bp, Artificial Sequence
  MKO10034746_A_Nrep
  gRNA
ggtgggacgattaaaaaggg

SEQ ID NO: 34747 - DNA, 20 bp, Artificial Sequence
  MKO10034747_A_Nrf1
  gRNA
cgtcgtgtactcatccaacg

SEQ ID NO: 34748 - DNA, 20 bp, Artificial Sequence
  MKO10034748_A_Nrf1
  gRNA
ctgccgcctctcaccatcga

SEQ ID NO: 34749 - DNA, 20 bp, Artificial Sequence
  MKO10034749_A_Nrf1
  gRNA
tgatgaggtaactgcccatc

SEQ ID NO: 34750 - DNA, 20 bp, Artificial Sequence
  MKO10034750_A_Nrg1
  gRNA
tcgttgccaaaactacgtaa

SEQ ID NO: 34751 - DNA, 20 bp, Artificial Sequence
  MKO10034751_A_Nrg1
  gRNA
acatgatgccgaccaccaac

SEQ ID NO: 34752 - DNA, 20 bp, Artificial Sequence
  MKO10034752_A_Nrg1
  gRNA
cccagtcgtggatgtagatg

SEQ ID NO: 34753 - DNA, 20 bp, Artificial Sequence
  MKO10034753_A_Nrg2
  gRNA
tgatgcgaatatcacgactc

SEQ ID NO: 34754 - DNA, 20 bp, Artificial Sequence
  MKO10034754_A_Nrg2
  gRNA
gccatccttgaaccagcgat

SEQ ID NO: 34755 - DNA, 20 bp, Artificial Sequence
  MKO10034755_A_Nrg2
  gRNA
ctctgtccgaagaatccgtt

SEQ ID NO: 34756 - DNA, 20 bp, Artificial Sequence
  MKO10034756_A_Nrg3
  gRNA
gctaatccggttaggcgtcc

SEQ ID NO: 34757 - DNA, 20 bp, Artificial Sequence
  MKO10034757_A_Nrg3
  gRNA
ggaaggcatcgcctgcgtac

SEQ ID NO: 34758 - DNA, 20 bp, Artificial Sequence
  MKO10034758_A_Nrg3
  gRNA
cctacttggatccgataaga

SEQ ID NO: 34759 - DNA, 20 bp, Artificial Sequence
  MKO10034759_A_Nrg4
  gRNA
gccgacagattactttcgct

SEQ ID NO: 34760 - DNA, 20 bp, Artificial Sequence
  MKO10034760_A_Nrg4
  gRNA
aacctcttcgcagcgtgctc

SEQ ID NO: 34761 - DNA, 20 bp, Artificial Sequence
  MKO10034761_A_Nrg4
  gRNA
cataacaaatccccccattg

SEQ ID NO: 34762 - DNA, 20 bp, Artificial Sequence
  MKO10034762_A_Nrgn
  gRNA
atgtcaagaatatcgtcgtc

SEQ ID NO: 34763 - DNA, 20 bp, Artificial Sequence
  MKO10034763_A_Nrgn
  gRNA
cgatattcttgacatcccgc

SEQ ID NO: 34764 - DNA, 20 bp, Artificial Sequence
  MKO10034764_A_Nrgn
  gRNA
accggcaatggactgctgca

SEQ ID NO: 34765 - DNA, 20 bp, Artificial Sequence
  MKO10034765_A_Nrip1
  gRNA
aacgacccgtagagtacttc

SEQ ID NO: 34766 - DNA, 20 bp, Artificial Sequence
  MKO10034766_A_Nrip1
  gRNA
gatgcattagtaacccttcg

SEQ ID NO: 34767 - DNA, 20 bp, Artificial Sequence
  MKO10034767_A_Nrip1
  gRNA
attgtcttaacttacctcga

SEQ ID NO: 34768 - DNA, 20 bp, Artificial Sequence
  MKO10034768_A_Nrip2
  gRNA
cctgtttgagttggcgctgc

SEQ ID NO: 34769 - DNA, 20 bp, Artificial Sequence
  MKO10034769_A_Nrip2
  gRNA
ccagcagcgccaactcaaac

SEQ ID NO: 34770 - DNA, 20 bp, Artificial Sequence
  MKO10034770_A_Nrip2
  gRNA
ccaggaccagatgcttcgag

SEQ ID NO: 34771 - DNA, 20 bp, Artificial Sequence
  MKO10034771_A_Nrip3
  gRNA
cccaagggacacgagtgctc

SEQ ID NO: 34772 - DNA, 20 bp, Artificial Sequence
  MKO10034772_A_Nrip3
  gRNA
cgcctctgcagaatgttatg

SEQ ID NO: 34773 - DNA, 20 bp, Artificial Sequence
  MKO10034773_A_Nrip3
  gRNA
ccacggcatctcaaagtagt

SEQ ID NO: 34774 - DNA, 20 bp, Artificial Sequence
  MKO10034774_A_Nrk
  gRNA
atctccatccaacagacttt

SEQ ID NO: 34775 - DNA, 20 bp, Artificial Sequence
  MKO10034775_A_Nrk
  gRNA
ggacggaactcaacctgctg

SEQ ID NO: 34776 - DNA, 20 bp, Artificial Sequence
  MKO10034776_A_Nrk
  gRNA
ctcacccgtcttcctatctc

SEQ ID NO: 34777 - DNA, 20 bp, Artificial Sequence
  MKO10034777_A_Nrl
  gRNA
agaggtcgcgctcgcgagcc

SEQ ID NO: 34778 - DNA, 20 bp, Artificial Sequence
  MKO10034778_A_Nrl
  gRNA
tcgcgagcgcgacctctata

SEQ ID NO: 34779 - DNA, 20 bp, Artificial Sequence
  MKO10034779_A_Nrl
  gRNA
gagccttctgagggccgatc

SEQ ID NO: 34780 - DNA, 20 bp, Artificial Sequence
  MKO10034780_A_Nrm
  gRNA
gagccgatcggtgcccaagg

SEQ ID NO: 34781 - DNA, 20 bp, Artificial Sequence
  MKO10034781_A_Nrm
  gRNA
gcacagccttatggcgactg

SEQ ID NO: 34782 - DNA, 20 bp, Artificial Sequence
  MKO10034782_A_Nrm
  gRNA
tcaccgggaccgccagactc

SEQ ID NO: 34783 - DNA, 20 bp, Artificial Sequence
  MKO10034783_A_Nrn1l
  gRNA
tatatggtatcacagcggtt

SEQ ID NO: 34784 - DNA, 20 bp, Artificial Sequence
  MKO10034784_A_Nrn1l
  gRNA
atccgctcccgaacactcac

SEQ ID NO: 34785 - DNA, 20 bp, Artificial Sequence
  MKO10034785_A_Nrn1l
  gRNA
cgctgtgataccatatacca

SEQ ID NO: 34786 - DNA, 20 bp, Artificial Sequence
  MKO10034786_A_Nrn1
  gRNA
tgatgttcgtcttgtcgtcc

SEQ ID NO: 34787 - DNA, 20 bp, Artificial Sequence
  MKO10034787_A_Nrn1
  gRNA
gcacggaaagcgccgggagc

SEQ ID NO: 34788 - DNA, 20 bp, Artificial Sequence
  MKO10034788_A_Nrn1
  gRNA
acttacctatttgcaccgcg

SEQ ID NO: 34789 - DNA, 20 bp, Artificial Sequence
  MKO10034789_A_Nrp1
  gRNA
ctcttcaggcgttctatcca

SEQ ID NO: 34790 - DNA, 20 bp, Artificial Sequence
  MKO10034790_A_Nrp1
  gRNA
ccacaataacgcccaatgtg

SEQ ID NO: 34791 - DNA, 20 bp, Artificial Sequence
  MKO10034791_A_Nrp1
  gRNA
cttcaacccacatttcgatt

SEQ ID NO: 34792 - DNA, 20 bp, Artificial Sequence
  MKO10034792_A_Nrp2
  gRNA
ttcagccgacctccgcaggg

SEQ ID NO: 34793 - DNA, 20 bp, Artificial Sequence
  MKO10034793_A_Nrp2
  gRNA
ggatagtcctgggggtagcc

SEQ ID NO: 34794 - DNA, 20 bp, Artificial Sequence
  MKO10034794_A_Nrp2
  gRNA
catgctccaggtcaaaggtc

SEQ ID NO: 34795 - DNA, 20 bp, Artificial Sequence
  MKO10034795_A_Nrp
  gRNA
ccgactgggccacccgagac

SEQ ID NO: 34796 - DNA, 20 bp, Artificial Sequence
  MKO10034796_A_Nrp
  gRNA
gtctcaaaccgttaatccgt

SEQ ID NO: 34797 - DNA, 20 bp, Artificial Sequence
  MKO10034797_A_Nrp
  gRNA
ggcccagtcggccgctaggc

SEQ ID NO: 34798 - DNA, 20 bp, Artificial Sequence
  MKO10034798_A_Nrros
  gRNA
tagagtcgtcgagcctcatg

SEQ ID NO: 34799 - DNA, 20 bp, Artificial Sequence
  MKO10034799_A_Nrros
  gRNA
catccggcaagtgccggaac

SEQ ID NO: 34800 - DNA, 20 bp, Artificial Sequence
  MKO10034800_A_Nrros
  gRNA
aggggcgggaactccatctc

SEQ ID NO: 34801 - DNA, 20 bp, Artificial Sequence
  MKO10034801_A_Nrsn1
  gRNA
agatccagagatcgcctaac

SEQ ID NO: 34802 - DNA, 20 bp, Artificial Sequence
  MKO10034802_A_Nrsn1
  gRNA
ttcgccaaaagcttcgattt

SEQ ID NO: 34803 - DNA, 20 bp, Artificial Sequence
  MKO10034803_A_Nrsn1
  gRNA
accgaactccatagcgctgc

SEQ ID NO: 34804 - DNA, 20 bp, Artificial Sequence
  MKO10034804_A_Nrsn2
  gRNA
agcgacgctgtgcggagtag

SEQ ID NO: 34805 - DNA, 20 bp, Artificial Sequence
  MKO10034805_A_Nrsn2
  gRNA
gggtcggttgatataccgaa

SEQ ID NO: 34806 - DNA, 20 bp, Artificial Sequence
  MKO10034806_A_Nrsn2
  gRNA
caagaacggcgactgactac

SEQ ID NO: 34807 - DNA, 20 bp, Artificial Sequence
  MKO10034807_A_Nrtn
  gRNA
gcgtcgtagcggggcaagcg

SEQ ID NO: 34808 - DNA, 20 bp, Artificial Sequence
  MKO10034808_A_Nrtn
  gRNA
gcacccgtgttgtcgcccga

SEQ ID NO: 34809 - DNA, 20 bp, Artificial Sequence
  MKO10034809_A_Nrtn
  gRNA
cccgggaccgcgccgtcgag

SEQ ID NO: 34810 - DNA, 20 bp, Artificial Sequence
  MKO10034810_A_Nrxn1
  gRNA
cgccggtcaacgacggcgcc

SEQ ID NO: 34811 - DNA, 20 bp, Artificial Sequence
  MKO10034811_A_Nrxn1
  gRNA
gctctacatcgaccgcgccg

SEQ ID NO: 34812 - DNA, 20 bp, Artificial Sequence
  MKO10034812_A_Nrxn1
  gRNA
agagtatattgccacgttca

SEQ ID NO: 34813 - DNA, 20 bp, Artificial Sequence
  MKO10034813_A_Nrxn2
  gRNA
gctcgctacgcgcgttgggc

SEQ ID NO: 34814 - DNA, 20 bp, Artificial Sequence
  MKO10034814_A_Nrxn2
  gRNA
tgttgctgacccgcgacgcg

SEQ ID NO: 34815 - DNA, 20 bp, Artificial Sequence
  MKO10034815_A_Nrxn2
  gRNA
cacctgacgttaaacagcga

SEQ ID NO: 34816 - DNA, 20 bp, Artificial Sequence
  MKO10034816_A_Nrxn3
  gRNA
atccgcgacctgttcatcga

SEQ ID NO: 34817 - DNA, 20 bp, Artificial Sequence
  MKO10034817_A_Nrxn3
  gRNA
atactacgcacctctttcgc

SEQ ID NO: 34818 - DNA, 20 bp, Artificial Sequence
  MKO10034818_A_Nrxn3
  gRNA
agatacactgcgtctagagt

SEQ ID NO: 34819 - DNA, 20 bp, Artificial Sequence
  MKO10034819_A_Nsa2
  gRNA
gaattgcaccgcaaacgata

SEQ ID NO: 34820 - DNA, 20 bp, Artificial Sequence
  MKO10034820_A_Nsa2
  gRNA
gagaaaaagagaaagaaaga

SEQ ID NO: 34821 - DNA, 20 bp, Artificial Sequence
  MKO10034821_A_Nsa2
  gRNA
gaagagaaacaccaagcaga

SEQ ID NO: 34822 - DNA, 20 bp, Artificial Sequence
  MKO10034822_A_Nsd1
  gRNA
tctacgtagtattcgcgata

SEQ ID NO: 34823 - DNA, 20 bp, Artificial Sequence
  MKO10034823_A_Nsd1
  gRNA
aaatctgttagcacgctttc

SEQ ID NO: 34824 - DNA, 20 bp, Artificial Sequence
  MKO10034824_A_Nsd1
  gRNA
atatcgcgaatactacgtag

SEQ ID NO: 34825 - DNA, 20 bp, Artificial Sequence
  MKO10034825_A_Nsdhl
  gRNA
cggcccaagggacccccagt

SEQ ID NO: 34826 - DNA, 20 bp, Artificial Sequence
  MKO10034826_A_Nsdhl
  gRNA
cgcctataaagaactgcacc

SEQ ID NO: 34827 - DNA, 20 bp, Artificial Sequence
  MKO10034827_A_Nsdhl
  gRNA
ccccgggtgcagttctttat

SEQ ID NO: 34828 - DNA, 20 bp, Artificial Sequence
  MKO10034828_A_Nsfl1c
  gRNA
tatgctcactctcggtttac

SEQ ID NO: 34829 - DNA, 20 bp, Artificial Sequence
  MKO10034829_A_Nsfl1c
  gRNA
ttacctaggagctgtgcctc

SEQ ID NO: 34830 - DNA, 20 bp, Artificial Sequence
  MKO10034830_A_Nsfl1c
  gRNA
cattcatgaccaagatgaag

SEQ ID NO: 34831 - DNA, 20 bp, Artificial Sequence
  MKO10034831_A_Nsf
  gRNA
gccatcttgtcggtgtcgta

SEQ ID NO: 34832 - DNA, 20 bp, Artificial Sequence
  MKO10034832_A_Nsf
  gRNA
cccttacgacaccgacaaga

SEQ ID NO: 34833 - DNA, 20 bp, Artificial Sequence
  MKO10034833_A_Nsf
  gRNA
aagctgaacgcgatgcatcc

SEQ ID NO: 34834 - DNA, 20 bp, Artificial Sequence
  MKO10034834_A_Nsg1
  gRNA
tcacccgctccgtgtcgcca

SEQ ID NO: 34835 - DNA, 20 bp, Artificial Sequence
  MKO10034835_A_Nsg1
  gRNA
tatgaacctgatcgcaaaaa

SEQ ID NO: 34836 - DNA, 20 bp, Artificial Sequence
  MKO10034836_A_Nsg1
  gRNA
tatgaccgcgcctgccctga

SEQ ID NO: 34837 - DNA, 20 bp, Artificial Sequence
  MKO10034837_A_Nsg2
  gRNA
cgagtagtaagcatccagcg

SEQ ID NO: 34838 - DNA, 20 bp, Artificial Sequence
  MKO10034838_A_Nsg2
  gRNA
cctctaatggccctgcgtct

SEQ ID NO: 34839 - DNA, 20 bp, Artificial Sequence
  MKO10034839_A_Nsg2
  gRNA
gggggccaagccgccttccg

SEQ ID NO: 34840 - DNA, 20 bp, Artificial Sequence
  MKO10034840_A_Nsl1
  gRNA
gaaagcacagcacgcgagtc

SEQ ID NO: 34841 - DNA, 20 bp, Artificial Sequence
  MKO10034841_A_Nsl1
  gRNA
gtagaagatttgaaatgccg

SEQ ID NO: 34842 - DNA, 20 bp, Artificial Sequence
  MKO10034842_A_Nsl1
  gRNA
caggagaacgtcagctttaa

SEQ ID NO: 34843 - DNA, 20 bp, Artificial Sequence
  MKO10034843_A_Nsmaf
  gRNA
ctccaagttgagaagcagta

SEQ ID NO: 34844 - DNA, 20 bp, Artificial Sequence
  MKO10034844_A_Nsmaf
  gRNA
aatatctcagcccattctta

SEQ ID NO: 34845 - DNA, 20 bp, Artificial Sequence
  MKO10034845_A_Nsmaf
  gRNA
aacacctttaccttaagaat

SEQ ID NO: 34846 - DNA, 20 bp, Artificial Sequence
  MKO10034846_A_Nsmce1
  gRNA
agcacttacggtcatggacc

SEQ ID NO: 34847 - DNA, 20 bp, Artificial Sequence
  MKO10034847_A_Nsmce1
  gRNA
aaatgcgactgtagataagc

SEQ ID NO: 34848 - DNA, 20 bp, Artificial Sequence
  MKO10034848_A_Nsmce1
  gRNA
tccctttgagttgatcaact

SEQ ID NO: 34849 - DNA, 20 bp, Artificial Sequence
  MKO10034849_A_Nsmce2
  gRNA
acccgttacatatccttcag

SEQ ID NO: 34850 - DNA, 20 bp, Artificial Sequence
  MKO10034850_A_Nsmce2
  gRNA
acttactttgagtctccaca

SEQ ID NO: 34851 - DNA, 20 bp, Artificial Sequence
  MKO10034851_A_Nsmce2
  gRNA
agtaccagatttaaaattac

SEQ ID NO: 34852 - DNA, 20 bp, Artificial Sequence
  MKO10034852_A_Nsmce4a
  gRNA
ttaacatatcaaacgagctc

SEQ ID NO: 34853 - DNA, 20 bp, Artificial Sequence
  MKO10034853_A_Nsmce4a
  gRNA
tgtcttggccgatcacttcg

SEQ ID NO: 34854 - DNA, 20 bp, Artificial Sequence
  MKO10034854_A_Nsmce4a
  gRNA
actaggttgggttcaataca

SEQ ID NO: 34855 - DNA, 20 bp, Artificial Sequence
  MKO10034855_A_Nsmf
  gRNA
ccttactttggccgctaccg

SEQ ID NO: 34856 - DNA, 20 bp, Artificial Sequence
  MKO10034856_A_Nsmf
  gRNA
aactcacgcttgcatagttg

SEQ ID NO: 34857 - DNA, 20 bp, Artificial Sequence
  MKO10034857_A_Nsmf
  gRNA
gacgcctactctggccacga

SEQ ID NO: 34858 - DNA, 20 bp, Artificial Sequence
  MKO10034858_A_Nsun2
  gRNA
gctcttcgagcactactatc

SEQ ID NO: 34859 - DNA, 20 bp, Artificial Sequence
  MKO10034859_A_Nsun2
  gRNA
tggtacgctaccttatggtg

SEQ ID NO: 34860 - DNA, 20 bp, Artificial Sequence
  MKO10034860_A_Nsun2
  gRNA
cagactcagtctcgctgacc

SEQ ID NO: 34861 - DNA, 20 bp, Artificial Sequence
  MKO10034861_A_Nsun3
  gRNA
aacgagtatgatcgcccgag

SEQ ID NO: 34862 - DNA, 20 bp, Artificial Sequence
  MKO10034862_A_Nsun3
  gRNA
accttacgagttctacctgt

SEQ ID NO: 34863 - DNA, 20 bp, Artificial Sequence
  MKO10034863_A_Nsun3
  gRNA
gtgatagcccctcagatgca

SEQ ID NO: 34864 - DNA, 20 bp, Artificial Sequence
  MKO10034864_A_Nsun4
  gRNA
gaatggcggtccgtggtaca

SEQ ID NO: 34865 - DNA, 20 bp, Artificial Sequence
  MKO10034865_A_Nsun4
  gRNA
accaagtccgagttacctca

SEQ ID NO: 34866 - DNA, 20 bp, Artificial Sequence
  MKO10034866_A_Nsun4
  gRNA
gacctctccacttcccgaac

SEQ ID NO: 34867 - DNA, 20 bp, Artificial Sequence
  MKO10034867_A_Nsun5
  gRNA
tcagcttcttctcggcgcga

SEQ ID NO: 34868 - DNA, 20 bp, Artificial Sequence
  MKO10034868_A_Nsun5
  gRNA
tcggggtgtgagccgaaatg

SEQ ID NO: 34869 - DNA, 20 bp, Artificial Sequence
  MKO10034869_A_Nsun5
  gRNA
gagcatccactctaccgtgc

SEQ ID NO: 34870 - DNA, 20 bp, Artificial Sequence
  MKO10034870_A_Nsun6
  gRNA
gtcagagtgaatacgcattt

SEQ ID NO: 34871 - DNA, 20 bp, Artificial Sequence
  MKO10034871_A_Nsun6
  gRNA
ggatgagcaagacatccggg

SEQ ID NO: 34872 - DNA, 20 bp, Artificial Sequence
  MKO10034872_A_Nsun6
  gRNA
gccgttaatatcagaataca

SEQ ID NO: 34873 - DNA, 20 bp, Artificial Sequence
  MKO10034873_A_Nsun7
  gRNA
tttgattcgacatctcgcca

SEQ ID NO: 34874 - DNA, 20 bp, Artificial Sequence
  MKO10034874_A_Nsun7
  gRNA
tggtctcttcattctcggaa

SEQ ID NO: 34875 - DNA, 20 bp, Artificial Sequence
  MKO10034875_A_Nsun7
  gRNA
cagaatatggtaaatcgaga

SEQ ID NO: 34876 - DNA, 20 bp, Artificial Sequence
  MKO10034876_A_Nt5c1a
  gRNA
ggagtacgtgcgataccagc

SEQ ID NO: 34877 - DNA, 20 bp, Artificial Sequence
  MKO10034877_A_Nt5c1a
  gRNA
cgagaacaaacctttggcgc

SEQ ID NO: 34878 - DNA, 20 bp, Artificial Sequence
  MKO10034878_A_Nt5c1a
  gRNA
ggctctggaggacaccgcga

SEQ ID NO: 34879 - DNA, 20 bp, Artificial Sequence
  MKO10034879_A_Nt5c1b
  gRNA
gccgatgttcgtctcgagtt

SEQ ID NO: 34880 - DNA, 20 bp, Artificial Sequence
  MKO10034880_A_Nt5c1b
  gRNA
tgtatacgggcagtgatccg

SEQ ID NO: 34881 - DNA, 20 bp, Artificial Sequence
  MKO10034881_A_Nt5c1b
  gRNA
gccagcgttccggtttgtca

SEQ ID NO: 34882 - DNA, 20 bp, Artificial Sequence
  MKO10034882_A_Nt5c2
  gRNA
accgtcgagaagcctatcac

SEQ ID NO: 34883 - DNA, 20 bp, Artificial Sequence
  MKO10034883_A_Nt5c2
  gRNA
tgtgaaccgaagtttagcca

SEQ ID NO: 34884 - DNA, 20 bp, Artificial Sequence
  MKO10034884_A_Nt5c2
  gRNA
accggtgataggcttctcga

SEQ ID NO: 34885 - DNA, 20 bp, Artificial Sequence
  MKO10034885_A_Nt5c3b
  gRNA
aaattgtgggcgcccttcgc

SEQ ID NO: 34886 - DNA, 20 bp, Artificial Sequence
  MKO10034886_A_Nt5c3b
  gRNA
acggtcctgatgcggcagcc

SEQ ID NO: 34887 - DNA, 20 bp, Artificial Sequence
  MKO10034887_A_Nt5c3b
  gRNA
cattgtaagcaaatctgctc

SEQ ID NO: 34888 - DNA, 20 bp, Artificial Sequence
  MKO10034888_A_Nt5c3
  gRNA
actcaccactctaccatgta

SEQ ID NO: 34889 - DNA, 20 bp, Artificial Sequence
  MKO10034889_A_Nt5c3
  gRNA
tctcacttactatgacacgt

SEQ ID NO: 34890 - DNA, 20 bp, Artificial Sequence
  MKO10034890_A_Nt5c3
  gRNA
aggaggcgctgccaaacttc

SEQ ID NO: 34891 - DNA, 20 bp, Artificial Sequence
  MKO10034891_A_Nt5c
  gRNA
catctctcgcaaagcgtcca

SEQ ID NO: 34892 - DNA, 20 bp, Artificial Sequence
  MKO10034892_A_Nt5c
  gRNA
gcctatacagtaccgctggg

SEQ ID NO: 34893 - DNA, 20 bp, Artificial Sequence
  MKO10034893_A_Nt5c
  gRNA
ataatccgctccacaaactc

SEQ ID NO: 34894 - DNA, 20 bp, Artificial Sequence
  MKO10034894_A_Nt5dc1
  gRNA
tccgacattccttgctgctc

SEQ ID NO: 34895 - DNA, 20 bp, Artificial Sequence
  MKO10034895_A_Nt5dc1
  gRNA
cgctgtacatcagacaagcc

SEQ ID NO: 34896 - DNA, 20 bp, Artificial Sequence
  MKO10034896_A_Nt5dc1
  gRNA
tgataactactttgacctgc

SEQ ID NO: 34897 - DNA, 20 bp, Artificial Sequence
  MKO10034897_A_Nt5dc2
  gRNA
atcacttcatcgtccggcac

SEQ ID NO: 34898 - DNA, 20 bp, Artificial Sequence
  MKO10034898_A_Nt5dc2
  gRNA
ccatgtcttgctcgatccac

SEQ ID NO: 34899 - DNA, 20 bp, Artificial Sequence
  MKO10034899_A_Nt5dc2
  gRNA
tatccgcgatgtgcatgtaa

SEQ ID NO: 34900 - DNA, 20 bp, Artificial Sequence
  MKO10034900_A_Nt5dc3
  gRNA
gactccattacgacgtccag

SEQ ID NO: 34901 - DNA, 20 bp, Artificial Sequence
  MKO10034901_A_Nt5dc3
  gRNA
accttctcatcaacgaacac

SEQ ID NO: 34902 - DNA, 20 bp, Artificial Sequence
  MKO10034902_A_Nt5dc3
  gRNA
tcacccgctggacgtcgtaa

SEQ ID NO: 34903 - DNA, 20 bp, Artificial Sequence
  MKO10034903_A_Nt5e
  gRNA
ccactcagacgtgccgcttc

SEQ ID NO: 34904 - DNA, 20 bp, Artificial Sequence
  MKO10034904_A_Nt5e
  gRNA
cgggagaacgatcgtctacc

SEQ ID NO: 34905 - DNA, 20 bp, Artificial Sequence
  MKO10034905_A_Nt5e
  gRNA
cttatcgctcagaaagttcg

SEQ ID NO: 34906 - DNA, 20 bp, Artificial Sequence
  MKO10034906_A_Nt5m
  gRNA
agctgcagccccctcgccgc

SEQ ID NO: 34907 - DNA, 20 bp, Artificial Sequence
  MKO10034907_A_Nt5m
  gRNA
ccgaccttctcatagatgac

SEQ ID NO: 34908 - DNA, 20 bp, Artificial Sequence
  MKO10034908_A_Nt5m
  gRNA
tgcactcatgggcagacgac

SEQ ID NO: 34909 - DNA, 20 bp, Artificial Sequence
  MKO10034909_A_Ntan1
  gRNA
cagatccatcacaatgtgtc

SEQ ID NO: 34910 - DNA, 20 bp, Artificial Sequence
  MKO10034910_A_Ntan1
  gRNA
attgtagtcctgagacatac

SEQ ID NO: 34911 - DNA, 20 bp, Artificial Sequence
  MKO10034911_A_Ntan1
  gRNA
caggctggaagtacatcttg

SEQ ID NO: 34912 - DNA, 20 bp, Artificial Sequence
  MKO10034912_A_Ntf3
  gRNA
agagacgctacaattcgccc

SEQ ID NO: 34913 - DNA, 20 bp, Artificial Sequence
  MKO10034913_A_Ntf3
  gRNA
tctgcatagcgtttcctccg

SEQ ID NO: 34914 - DNA, 20 bp, Artificial Sequence
  MKO10034914_A_Ntf3
  gRNA
taccgtggcagaagtaacca

SEQ ID NO: 34915 - DNA, 20 bp, Artificial Sequence
  MKO10034915_A_Ntf5
  gRNA
agaccgcacccgcaagccgc

SEQ ID NO: 34916 - DNA, 20 bp, Artificial Sequence
  MKO10034916_A_Ntf5
  gRNA
cttcttcgagacgcgctgca

SEQ ID NO: 34917 - DNA, 20 bp, Artificial Sequence
  MKO10034917_A_Ntf5
  gRNA
gcagtatgcgacgcagtgag

SEQ ID NO: 34918 - DNA, 20 bp, Artificial Sequence
  MKO10034918_A_Nthl1
  gRNA
acagaatagccaaccgactg

SEQ ID NO: 34919 - DNA, 20 bp, Artificial Sequence
  MKO10034919_A_Nthl1
  gRNA
atcctgcagcagcgctacga

SEQ ID NO: 34920 - DNA, 20 bp, Artificial Sequence
  MKO10034920_A_Nthl1
  gRNA
tctgcctagcgtgtcatcat

SEQ ID NO: 34921 - DNA, 20 bp, Artificial Sequence
  MKO10034921_A_Ntmt1
  gRNA
tggtgacgtcatgacgagcg

SEQ ID NO: 34922 - DNA, 20 bp, Artificial Sequence
  MKO10034922_A_Ntmt1
  gRNA
ggtcgacatggtcgacgtga

SEQ ID NO: 34923 - DNA, 20 bp, Artificial Sequence
  MKO10034923_A_Ntmt1
  gRNA
cgccggatcatccgcactgc

SEQ ID NO: 34924 - DNA, 20 bp, Artificial Sequence
  MKO10034924_A_Ntm
  gRNA
gtctgtaccgagcaggtata

SEQ ID NO: 34925 - DNA, 20 bp, Artificial Sequence
  MKO10034925_A_Ntm
  gRNA
accttcactcttcgtaccac

SEQ ID NO: 34926 - DNA, 20 bp, Artificial Sequence
  MKO10034926_A_Ntm
  gRNA
gtggtgcctagatcctcgtg

SEQ ID NO: 34927 - DNA, 20 bp, Artificial Sequence
  MKO10034927_A_Ntn1
  gRNA
gcccgtcacgccgtccttgc

SEQ ID NO: 34928 - DNA, 20 bp, Artificial Sequence
  MKO10034928_A_Ntn1
  gRNA
ttccggttcctccacgctgc

SEQ ID NO: 34929 - DNA, 20 bp, Artificial Sequence
  MKO10034929_A_Ntn1
  gRNA
gcctttggcacatcggttgc

SEQ ID NO: 34930 - DNA, 20 bp, Artificial Sequence
  MKO10034930_A_Ntn3
  gRNA
cgactgtccggccgccgcag

SEQ ID NO: 34931 - DNA, 20 bp, Artificial Sequence
  MKO10034931_A_Ntn3
  gRNA
tcacattgcagacctgcgcg

SEQ ID NO: 34932 - DNA, 20 bp, Artificial Sequence
  MKO10034932_A_Ntn3
  gRNA
gatcacgatagaagccctcc

SEQ ID NO: 34933 - DNA, 20 bp, Artificial Sequence
  MKO10034933_A_Ntn4
  gRNA
gtcgcttgagcagccgcact

SEQ ID NO: 34934 - DNA, 20 bp, Artificial Sequence
  MKO10034934_A_Ntn4
  gRNA
tgcgtacctttgcaagcgtc

SEQ ID NO: 34935 - DNA, 20 bp, Artificial Sequence
  MKO10034935_A_Ntn4
  gRNA
cacgttgacgtcgaagtgac

SEQ ID NO: 34936 - DNA, 20 bp, Artificial Sequence
  MKO10034936_A_Ntn5
  gRNA
gtcgcccatcccatcgagac

SEQ ID NO: 34937 - DNA, 20 bp, Artificial Sequence
  MKO10034937_A_Ntn5
  gRNA
acccctgttgcatctcgatc

SEQ ID NO: 34938 - DNA, 20 bp, Artificial Sequence
  MKO10034938_A_Ntn5
  gRNA
gtcccgctgtgcagaaacgc

SEQ ID NO: 34939 - DNA, 20 bp, Artificial Sequence
  MKO10034939_A_Ntng1
  gRNA
gaagccatatttcgtagccg

SEQ ID NO: 34940 - DNA, 20 bp, Artificial Sequence
  MKO10034940_A_Ntng1
  gRNA
ctagagaaatctctcgacta

SEQ ID NO: 34941 - DNA, 20 bp, Artificial Sequence
  MKO10034941_A_Ntng1
  gRNA
tcatgtccgtggattccggc

SEQ ID NO: 34942 - DNA, 20 bp, Artificial Sequence
  MKO10034942_A_Ntng2
  gRNA
gcaccgaggagtactcacgc

SEQ ID NO: 34943 - DNA, 20 bp, Artificial Sequence
  MKO10034943_A_Ntng2
  gRNA
acgtaggtgccacccagcgc

SEQ ID NO: 34944 - DNA, 20 bp, Artificial Sequence
  MKO10034944_A_Ntng2
  gRNA
agaacttccgcacacgcgcc

SEQ ID NO: 34945 - DNA, 20 bp, Artificial Sequence
  MKO10034945_A_Ntpcr
  gRNA
acagcatctggcggaccgct

SEQ ID NO: 34946 - DNA, 20 bp, Artificial Sequence
  MKO10034946_A_Ntpcr
  gRNA
cgtccggctgctctgcacga

SEQ ID NO: 34947 - DNA, 20 bp, Artificial Sequence
  MKO10034947_A_Ntpcr
  gRNA
atactgccccactcgacact

SEQ ID NO: 34948 - DNA, 20 bp, Artificial Sequence
  MKO10034948_A_Ntrk1
  gRNA
cctcaaactccaagcgttgc

SEQ ID NO: 34949 - DNA, 20 bp, Artificial Sequence
  MKO10034949_A_Ntrk1
  gRNA
cctagaaccatcgtgaagag

SEQ ID NO: 34950 - DNA, 20 bp, Artificial Sequence
  MKO10034950_A_Ntrk1
  gRNA
gcggaggccactcttcacga

SEQ ID NO: 34951 - DNA, 20 bp, Artificial Sequence
  MKO10034951_A_Ntrk2
  gRNA
taagccccagagccgcgcca

SEQ ID NO: 34952 - DNA, 20 bp, Artificial Sequence
  MKO10034952_A_Ntrk2
  gRNA
ggcagctcgggatgtcgccc

SEQ ID NO: 34953 - DNA, 20 bp, Artificial Sequence
  MKO10034953_A_Ntrk2
  gRNA
agatgacgttgaagcttacg

SEQ ID NO: 34954 - DNA, 20 bp, Artificial Sequence
  MKO10034954_A_Ntrk3
  gRNA
aatccgccagaaactacact

SEQ ID NO: 34955 - DNA, 20 bp, Artificial Sequence
  MKO10034955_A_Ntrk3
  gRNA
tccgaacttacaattcccga

SEQ ID NO: 34956 - DNA, 20 bp, Artificial Sequence
  MKO10034956_A_Ntrk3
  gRNA
ggactatgtgggctccgtgc

SEQ ID NO: 34957 - DNA, 20 bp, Artificial Sequence
  MKO10034957_A_Ntsr1
  gRNA
ggcgccgccgccgaaagaag

SEQ ID NO: 34958 - DNA, 20 bp, Artificial Sequence
  MKO10034958_A_Ntsr1
  gRNA
tacgtaagacgaggactcca

SEQ ID NO: 34959 - DNA, 20 bp, Artificial Sequence
  MKO10034959_A_Ntsr1
  gRNA
gctggtgaccgctgtatacc

SEQ ID NO: 34960 - DNA, 20 bp, Artificial Sequence
  MKO10034960_A_Ntsr2
  gRNA
agtaagtcgcgccacgctcc

SEQ ID NO: 34961 - DNA, 20 bp, Artificial Sequence
  MKO10034961_A_Ntsr2
  gRNA
tattcgctcatcttcgcgct

SEQ ID NO: 34962 - DNA, 20 bp, Artificial Sequence
  MKO10034962_A_Ntsr2
  gRNA
gtgtggtgaacagcgctccg

SEQ ID NO: 34963 - DNA, 20 bp, Artificial Sequence
  MKO10034963_A_Nts
  gRNA
cgtcaatgataaaaacgaga

SEQ ID NO: 34964 - DNA, 20 bp, Artificial Sequence
  MKO10034964_A_Nts
  gRNA
atgcatgatgacgaccttgt

SEQ ID NO: 34965 - DNA, 20 bp, Artificial Sequence
  MKO10034965_A_Nts
  gRNA
tccagaaaatctgccgcagc

SEQ ID NO: 34966 - DNA, 20 bp, Artificial Sequence
  MKO10034966_A_Nuak1
  gRNA
gcgtcgcccgagattgtcaa

SEQ ID NO: 34967 - DNA, 20 bp, Artificial Sequence
  MKO10034967_A_Nuak1
  gRNA
atgattacatcagtgagcgc

SEQ ID NO: 34968 - DNA, 20 bp, Artificial Sequence
  MKO10034968_A_Nuak1
  gRNA
aggcctgccgttgacaatct

SEQ ID NO: 34969 - DNA, 20 bp, Artificial Sequence
  MKO10034969_A_Nuak2
  gRNA
tgtaatcatacagatcgcct

SEQ ID NO: 34970 - DNA, 20 bp, Artificial Sequence
  MKO10034970_A_Nuak2
  gRNA
ttgatgagcccgtccgccag

SEQ ID NO: 34971 - DNA, 20 bp, Artificial Sequence
  MKO10034971_A_Nuak2
  gRNA
agcgcccggccgctggcgga

SEQ ID NO: 34972 - DNA, 20 bp, Artificial Sequence
  MKO10034972_A_Nub1
  gRNA
cgcgctcaattgctttgcgt

SEQ ID NO: 34973 - DNA, 20 bp, Artificial Sequence
  MKO10034973_A_Nub1
  gRNA
cgacgcaaagcaattgagcg

SEQ ID NO: 34974 - DNA, 20 bp, Artificial Sequence
  MKO10034974_A_Nub1
  gRNA
atggtgtacctctctccgcc

SEQ ID NO: 34975 - DNA, 20 bp, Artificial Sequence
  MKO10034975_A_Nubp1
  gRNA
gccatcgattcccaagatca

SEQ ID NO: 34976 - DNA, 20 bp, Artificial Sequence
  MKO10034976_A_Nubp1
  gRNA
ttcagtgcacacctcgccca

SEQ ID NO: 34977 - DNA, 20 bp, Artificial Sequence
  MKO10034977_A_Nubp1
  gRNA
accgggatccggagcagcgc

SEQ ID NO: 34978 - DNA, 20 bp, Artificial Sequence
  MKO10034978_A_Nubp2
  gRNA
gatccacaggcggtgtctat

SEQ ID NO: 34979 - DNA, 20 bp, Artificial Sequence
  MKO10034979_A_Nubp2
  gRNA
tgatgtgtcgcaccccggcc

SEQ ID NO: 34980 - DNA, 20 bp, Artificial Sequence
  MKO10034980_A_Nubp2
  gRNA
ggggcgcagggcttccatag

SEQ ID NO: 34981 - DNA, 20 bp, Artificial Sequence
  MKO10034981_A_Nubpl
  gRNA
ttcttgcagtccaaggcggt

SEQ ID NO: 34982 - DNA, 20 bp, Artificial Sequence
  MKO10034982_A_Nubpl
  gRNA
gttggaaagtctaccaccgc

SEQ ID NO: 34983 - DNA, 20 bp, Artificial Sequence
  MKO10034983_A_Nubpl
  gRNA
tactcacttggtgataattc

SEQ ID NO: 34984 - DNA, 20 bp, Artificial Sequence
  MKO10034984_A_Nucb1
  gRNA
cccgagcctcaaacgtgtgc

SEQ ID NO: 34985 - DNA, 20 bp, Artificial Sequence
  MKO10034985_A_Nucb1
  gRNA
cgtagcgtttgaactcttca

SEQ ID NO: 34986 - DNA, 20 bp, Artificial Sequence
  MKO10034986_A_Nucb1
  gRNA
tcaagcgacaggaggtgtcg

SEQ ID NO: 34987 - DNA, 20 bp, Artificial Sequence
  MKO10034987_A_Nucb2
  gRNA
gctttaggctaccgcggatc

SEQ ID NO: 34988 - DNA, 20 bp, Artificial Sequence
  MKO10034988_A_Nucb2
  gRNA
taaactcttcatgccgagtc

SEQ ID NO: 34989 - DNA, 20 bp, Artificial Sequence
  MKO10034989_A_Nucb2
  gRNA
acttagtaagtcacaaagtg

SEQ ID NO: 34990 - DNA, 20 bp, Artificial Sequence
  MKO10034990_A_Nucks1
  gRNA
aaatgtacgccagcaacgac

SEQ ID NO: 34991 - DNA, 20 bp, Artificial Sequence
  MKO10034991_A_Nucks1
  gRNA
tagatgctgcctgtcgttgc

SEQ ID NO: 34992 - DNA, 20 bp, Artificial Sequence
  MKO10034992_A_Nucks1
  gRNA
gatgaccgaatcttcttagc

SEQ ID NO: 34993 - DNA, 20 bp, Artificial Sequence
  MKO10034993_A_Nudcd1
  gRNA
tctttctaggacaccgcctt

SEQ ID NO: 34994 - DNA, 20 bp, Artificial Sequence
  MKO10034994_A_Nudcd1
  gRNA
acaaagcatcatgttctccg

SEQ ID NO: 34995 - DNA, 20 bp, Artificial Sequence
  MKO10034995_A_Nudcd1
  gRNA
cctgcttcttcgaatagaga

SEQ ID NO: 34996 - DNA, 20 bp, Artificial Sequence
  MKO10034996_A_Nudcd2
  gRNA
gatgtcctgcgcgcgagtgc

SEQ ID NO: 34997 - DNA, 20 bp, Artificial Sequence
  MKO10034997_A_Nudcd2
  gRNA
cagaatgtccgccccgtttg

SEQ ID NO: 34998 - DNA, 20 bp, Artificial Sequence
  MKO10034998_A_Nudcd2
  gRNA
aatctcagggaactacacga

SEQ ID NO: 34999 - DNA, 20 bp, Artificial Sequence
  MKO10034999_A_Nudcd3
  gRNA
gttgatcttgtcgatgtcga

SEQ ID NO: 35000 - DNA, 20 bp, Artificial Sequence
  MKO10035000_A_Nudcd3
  gRNA
atggcaccgttgtaactgtc

SEQ ID NO: 35001 - DNA, 20 bp, Artificial Sequence
  MKO10035001_A_Nudcd3
  gRNA
gcaagactacaccgacctgg

SEQ ID NO: 35002 - DNA, 20 bp, Artificial Sequence
  MKO10035002_A_Nudc
  gRNA
acatccagcggcggcatctc

SEQ ID NO: 35003 - DNA, 20 bp, Artificial Sequence
  MKO10035003_A_Nudc
  gRNA
gatcaaggagttgactgatg

SEQ ID NO: 35004 - DNA, 20 bp, Artificial Sequence
  MKO10035004_A_Nudc
  gRNA
cccggagagagaagcgagct

SEQ ID NO: 35005 - DNA, 20 bp, Artificial Sequence
  MKO10035005_A_Nudt10
  gRNA
actcggcgtgcacgggctta

SEQ ID NO: 35006 - DNA, 20 bp, Artificial Sequence
  MKO10035006_A_Nudt10
  gRNA
agtgcaagccgaaccagacg

SEQ ID NO: 35007 - DNA, 20 bp, Artificial Sequence
  MKO10035007_A_Nudt10
  gRNA
acatactagggctcgctctc

SEQ ID NO: 35008 - DNA, 20 bp, Artificial Sequence
  MKO10035008_A_Nudt11
  gRNA
actcggcgtgcacgggcttg

SEQ ID NO: 35009 - DNA, 20 bp, Artificial Sequence
  MKO10035009_A_Nudt11
  gRNA
acatactagggctcgctctc

SEQ ID NO: 35010 - DNA, 20 bp, Artificial Sequence
  MKO10035010_A_Nudt11
  gRNA
agtgcaagccgaaccagacg

SEQ ID NO: 35011 - DNA, 20 bp, Artificial Sequence
  MKO10035011_A_Nudt12
  gRNA
atgacctgcataattacgac

SEQ ID NO: 35012 - DNA, 20 bp, Artificial Sequence
  MKO10035012_A_Nudt12
  gRNA
agatccagtcgtaattatgc

SEQ ID NO: 35013 - DNA, 20 bp, Artificial Sequence
  MKO10035013_A_Nudt12
  gRNA
gaacttgtatcgactatgcc

SEQ ID NO: 35014 - DNA, 20 bp, Artificial Sequence
  MKO10035014_A_Nudt13
  gRNA
ggtatcgatgtcctgacgcc

SEQ ID NO: 35015 - DNA, 20 bp, Artificial Sequence
  MKO10035015_A_Nudt13
  gRNA
gggggacataccacggctgg

SEQ ID NO: 35016 - DNA, 20 bp, Artificial Sequence
  MKO10035016_A_Nudt13
  gRNA
aggagtccaccgagttcagc

SEQ ID NO: 35017 - DNA, 20 bp, Artificial Sequence
  MKO10035017_A_Nudt14
  gRNA
tgtcacctccgcgtagaaca

SEQ ID NO: 35018 - DNA, 20 bp, Artificial Sequence
  MKO10035018_A_Nudt14
  gRNA
gggcgtcatctaaattcaga

SEQ ID NO: 35019 - DNA, 20 bp, Artificial Sequence
  MKO10035019_A_Nudt14
  gRNA
tgtggcaactctgcgcagat

SEQ ID NO: 35020 - DNA, 20 bp, Artificial Sequence
  MKO10035020_A_Nudt15
  gRNA
ctgctcacccgaattccaaa

SEQ ID NO: 35021 - DNA, 20 bp, Artificial Sequence
  MKO10035021_A_Nudt15
  gRNA
aaatgtgtgctttgcctccg

SEQ ID NO: 35022 - DNA, 20 bp, Artificial Sequence
  MKO10035022_A_Nudt15
  gRNA
tggccgctaacgcagagccg

SEQ ID NO: 35023 - DNA, 20 bp, Artificial Sequence
  MKO10035023_A_Nudt16l1
  gRNA
tggcggcgtatagcatggcg

SEQ ID NO: 35024 - DNA, 20 bp, Artificial Sequence
  MKO10035024_A_Nudt16l1
  gRNA
ccggcgcttctggtcgctgg

SEQ ID NO: 35025 - DNA, 20 bp, Artificial Sequence
  MKO10035025_A_Nudt16l1
  gRNA
gatacgtccgaaaagctgcc

SEQ ID NO: 35026 - DNA, 20 bp, Artificial Sequence
  MKO10035026_A_Nudt16
  gRNA
tgcgcgtccacgaagccgcc

SEQ ID NO: 35027 - DNA, 20 bp, Artificial Sequence
  MKO10035027_A_Nudt16
  gRNA
gatgcggccgaacagcttgc

SEQ ID NO: 35028 - DNA, 20 bp, Artificial Sequence
  MKO10035028_A_Nudt16
  gRNA
cgggcgcgtagagcagcgca

SEQ ID NO: 35029 - DNA, 20 bp, Artificial Sequence
  MKO10035029_A_Nudt17
  gRNA
gttgcgcctcgccgggcgcc

SEQ ID NO: 35030 - DNA, 20 bp, Artificial Sequence
  MKO10035030_A_Nudt17
  gRNA
gctgcgcgatggctgccgca

SEQ ID NO: 35031 - DNA, 20 bp, Artificial Sequence
  MKO10035031_A_Nudt17
  gRNA
agactgtactgttgacccga

SEQ ID NO: 35032 - DNA, 20 bp, Artificial Sequence
  MKO10035032_A_Nudt18
  gRNA
ggatacctgttggtcgagcg

SEQ ID NO: 35033 - DNA, 20 bp, Artificial Sequence
  MKO10035033_A_Nudt18
  gRNA
gtgttcctcgctcgaccaac

SEQ ID NO: 35034 - DNA, 20 bp, Artificial Sequence
  MKO10035034_A_Nudt18
  gRNA
ggccgtgttcctcaacgagc

SEQ ID NO: 35035 - DNA, 20 bp, Artificial Sequence
  MKO10035035_A_Nudt19
  gRNA
gatgcgcagcgctacgtcat

SEQ ID NO: 35036 - DNA, 20 bp, Artificial Sequence
  MKO10035036_A_Nudt19
  gRNA
ccacgcgcggaatgtcgcgc

SEQ ID NO: 35037 - DNA, 20 bp, Artificial Sequence
  MKO10035037_A_Nudt19
  gRNA
tgtggatcacaactcggtta

SEQ ID NO: 35038 - DNA, 20 bp, Artificial Sequence
  MKO10035038_A_Nudt1
  gRNA
cctcagttactcgctgcgag

SEQ ID NO: 35039 - DNA, 20 bp, Artificial Sequence
  MKO10035039_A_Nudt1
  gRNA
agatcccctttgccgacctg

SEQ ID NO: 35040 - DNA, 20 bp, Artificial Sequence
  MKO10035040_A_Nudt1
  gRNA
atatgcacgtccatcagctc

SEQ ID NO: 35041 - DNA, 20 bp, Artificial Sequence
  MKO10035041_A_Nudt21
  gRNA
actaaaacgcttaatgacag

SEQ ID NO: 35042 - DNA, 20 bp, Artificial Sequence
  MKO10035042_A_Nudt21
  gRNA
acctgaggaggttcaaaatt

SEQ ID NO: 35043 - DNA, 20 bp, Artificial Sequence
  MKO10035043_A_Nudt21
  gRNA
ctggttcagcttcaagagaa

SEQ ID NO: 35044 - DNA, 20 bp, Artificial Sequence
  MKO10035044_A_Nudt22
  gRNA
cgcttgcaatgagaccagcg

SEQ ID NO: 35045 - DNA, 20 bp, Artificial Sequence
  MKO10035045_A_Nudt22
  gRNA
ctggggcgctagggtgactc

SEQ ID NO: 35046 - DNA, 20 bp, Artificial Sequence
  MKO10035046_A_Nudt22
  gRNA
caagcgattcccaacaacag

SEQ ID NO: 35047 - DNA, 20 bp, Artificial Sequence
  MKO10035047_A_Nudt2
  gRNA
gcatcaagcctaccgctggc

SEQ ID NO: 35048 - DNA, 20 bp, Artificial Sequence
  MKO10035048_A_Nudt2
  gRNA
cagaagggagctcaattacg

SEQ ID NO: 35049 - DNA, 20 bp, Artificial Sequence
  MKO10035049_A_Nudt2
  gRNA
tgatcaagccacatgccctc

SEQ ID NO: 35050 - DNA, 20 bp, Artificial Sequence
  MKO10035050_A_Nudt3
  gRNA
cgtgtatgtgctcatcgtca

SEQ ID NO: 35051 - DNA, 20 bp, Artificial Sequence
  MKO10035051_A_Nudt3
  gRNA
gtagccgccatccagaccga

SEQ ID NO: 35052 - DNA, 20 bp, Artificial Sequence
  MKO10035052_A_Nudt3
  gRNA
ctcaaagtatgacgcctgca

SEQ ID NO: 35053 - DNA, 20 bp, Artificial Sequence
  MKO10035053_A_Nudt4
  gRNA
accgaggaatttccattggt

SEQ ID NO: 35054 - DNA, 20 bp, Artificial Sequence
  MKO10035054_A_Nudt4
  gRNA
cagactgctcggaatatttg

SEQ ID NO: 35055 - DNA, 20 bp, Artificial Sequence
  MKO10035055_A_Nudt4
  gRNA
gtgactgctgcgccgccctc

SEQ ID NO: 35056 - DNA, 20 bp, Artificial Sequence
  MKO10035056_A_Nudt5
  gRNA
gaagcagttccggcccccga

SEQ ID NO: 35057 - DNA, 20 bp, Artificial Sequence
  MKO10035057_A_Nudt5
  gRNA
gcaccatgagtgcgtcatcc

SEQ ID NO: 35058 - DNA, 20 bp, Artificial Sequence
  MKO10035058_A_Nudt5
  gRNA
cctccagggttcatcgaaga

SEQ ID NO: 35059 - DNA, 20 bp, Artificial Sequence
  MKO10035059_A_Nudt6
  gRNA
gtacatgtctgacatcccga

SEQ ID NO: 35060 - DNA, 20 bp, Artificial Sequence
  MKO10035060_A_Nudt6
  gRNA
tattcagtctgctcccgttg

SEQ ID NO: 35061 - DNA, 20 bp, Artificial Sequence
  MKO10035061_A_Nudt6
  gRNA
ccaggaggcctgtcggagcc

SEQ ID NO: 35062 - DNA, 20 bp, Artificial Sequence
  MKO10035062_A_Nudt7
  gRNA
gtccttacatcaaatacgta

SEQ ID NO: 35063 - DNA, 20 bp, Artificial Sequence
  MKO10035063_A_Nudt7
  gRNA
gggctgatgtcgcgaccttg

SEQ ID NO: 35064 - DNA, 20 bp, Artificial Sequence
  MKO10035064_A_Nudt7
  gRNA
tcccgacatcagactttctc

SEQ ID NO: 35065 - DNA, 20 bp, Artificial Sequence
  MKO10035065_A_Nudt8
  gRNA
cacgctgcgttctagtcgcc

SEQ ID NO: 35066 - DNA, 20 bp, Artificial Sequence
  MKO10035066_A_Nudt8
  gRNA
ccgcgagcgtaaccgggcag

SEQ ID NO: 35067 - DNA, 20 bp, Artificial Sequence
  MKO10035067_A_Nudt8
  gRNA
atgtattacatcttggtcgt

SEQ ID NO: 35068 - DNA, 20 bp, Artificial Sequence
  MKO10035068_A_Nudt9
  gRNA
ccgcagatcctattataacc

SEQ ID NO: 35069 - DNA, 20 bp, Artificial Sequence
  MKO10035069_A_Nudt9
  gRNA
ttcaaaagtcgagcgaagtc

SEQ ID NO: 35070 - DNA, 20 bp, Artificial Sequence
  MKO10035070_A_Nudt9
  gRNA
gagaccgcggtgtactccac

SEQ ID NO: 35071 - DNA, 20 bp, Artificial Sequence
  MKO10035071_A_Nuf2
  gRNA
ccggctggagcacttctaca

SEQ ID NO: 35072 - DNA, 20 bp, Artificial Sequence
  MKO10035072_A_Nuf2
  gRNA
cacttaaaaaacgacttgtc

SEQ ID NO: 35073 - DNA, 20 bp, Artificial Sequence
  MKO10035073_A_Nuf2
  gRNA
ccatgtagaagtgctccagc

SEQ ID NO: 35074 - DNA, 20 bp, Artificial Sequence
  MKO10035074_A_Nufip1
  gRNA
agcttgatcttcttcatacc

SEQ ID NO: 35075 - DNA, 20 bp, Artificial Sequence
  MKO10035075_A_Nufip1
  gRNA
tgcccctagatgcatgctcc

SEQ ID NO: 35076 - DNA, 20 bp, Artificial Sequence
  MKO10035076_A_Nufip1
  gRNA
ttctgtgatacctgtgatcg

SEQ ID NO: 35077 - DNA, 20 bp, Artificial Sequence
  MKO10035077_A_Nufip2
  gRNA
tatcggtcttatctacagcc

SEQ ID NO: 35078 - DNA, 20 bp, Artificial Sequence
  MKO10035078_A_Nufip2
  gRNA
gagcctaacaaagtgttcgt

SEQ ID NO: 35079 - DNA, 20 bp, Artificial Sequence
  MKO10035079_A_Nufip2
  gRNA
agtctggtccttcattgatc

SEQ ID NO: 35080 - DNA, 20 bp, Artificial Sequence
  MKO10035080_A_Nuggc
  gRNA
ctggaatagccggtcccaag

SEQ ID NO: 35081 - DNA, 20 bp, Artificial Sequence
  MKO10035081_A_Nuggc
  gRNA
gacgcaggttgcatcgagac

SEQ ID NO: 35082 - DNA, 20 bp, Artificial Sequence
  MKO10035082_A_Nuggc
  gRNA
aattcaccttctgtccgatc

SEQ ID NO: 35083 - DNA, 20 bp, Artificial Sequence
  MKO10035083_A_Numa1
  gRNA
gttgcccctctttagtgtca

SEQ ID NO: 35084 - DNA, 20 bp, Artificial Sequence
  MKO10035084_A_Numa1
  gRNA
tctgcatgttgctgaccccg

SEQ ID NO: 35085 - DNA, 20 bp, Artificial Sequence
  MKO10035085_A_Numa1
  gRNA
atccgagatggaactggcca

SEQ ID NO: 35086 - DNA, 20 bp, Artificial Sequence
  MKO10035086_A_Numbl
  gRNA
gatgaggatgcggtgcgcaa

SEQ ID NO: 35087 - DNA, 20 bp, Artificial Sequence
  MKO10035087_A_Numbl
  gRNA
cggggccccctgaaaccttc

SEQ ID NO: 35088 - DNA, 20 bp, Artificial Sequence
  MKO10035088_A_Numbl
  gRNA
atcacgcccacaccagtggc

SEQ ID NO: 35089 - DNA, 20 bp, Artificial Sequence
  MKO10035089_A_Numb
  gRNA
ttgactcatcaacttctacg

SEQ ID NO: 35090 - DNA, 20 bp, Artificial Sequence
  MKO10035090_A_Numb
  gRNA
agttgtggacgagaaaacta

SEQ ID NO: 35091 - DNA, 20 bp, Artificial Sequence
  MKO10035091_A_Numb
  gRNA
gaaagacgtttatgtcccag

SEQ ID NO: 35092 - DNA, 20 bp, Artificial Sequence
  MKO10035092_A_Nup107
  gRNA
cggaggtgacgaggactgcc

SEQ ID NO: 35093 - DNA, 20 bp, Artificial Sequence
  MKO10035093_A_Nup107
  gRNA
aatcttacaaggctgtcgaa

SEQ ID NO: 35094 - DNA, 20 bp, Artificial Sequence
  MKO10035094_A_Nup107
  gRNA
ttgtgtagagccctaaacgc

SEQ ID NO: 35095 - DNA, 20 bp, Artificial Sequence
  MKO10035095_A_Nup133
  gRNA
aagaggggtccatccgctat

SEQ ID NO: 35096 - DNA, 20 bp, Artificial Sequence
  MKO10035096_A_Nup133
  gRNA
ccaccaaatcagcgctcccg

SEQ ID NO: 35097 - DNA, 20 bp, Artificial Sequence
  MKO10035097_A_Nup133
  gRNA
tggtgggggaatatccgagt

SEQ ID NO: 35098 - DNA, 20 bp, Artificial Sequence
  MKO10035098_A_Nup153
  gRNA
agtacgaagtacaccttacc

SEQ ID NO: 35099 - DNA, 20 bp, Artificial Sequence
  MKO10035099_A_Nup153
  gRNA
gaaaatccagaactgccgat

SEQ ID NO: 35100 - DNA, 20 bp, Artificial Sequence
  MKO10035100_A_Nup153
  gRNA
agatgagcatgcgatttatg

SEQ ID NO: 35101 - DNA, 20 bp, Artificial Sequence
  MKO10035101_A_Nup155
  gRNA
gtcactgtcaatcgtaagcc

SEQ ID NO: 35102 - DNA, 20 bp, Artificial Sequence
  MKO10035102_A_Nup155
  gRNA
agttcccctcccgcctgagc

SEQ ID NO: 35103 - DNA, 20 bp, Artificial Sequence
  MKO10035103_A_Nup155
  gRNA
ccaagaattactatatccac

SEQ ID NO: 35104 - DNA, 20 bp, Artificial Sequence
  MKO10035104_A_Nup160
  gRNA
gtacttcaccgttccaaacg

SEQ ID NO: 35105 - DNA, 20 bp, Artificial Sequence
  MKO10035105_A_Nup160
  gRNA
gggactgcaagtgccgcgtt

SEQ ID NO: 35106 - DNA, 20 bp, Artificial Sequence
  MKO10035106_A_Nup160
  gRNA
ctgcctccttatgacgtacc

SEQ ID NO: 35107 - DNA, 20 bp, Artificial Sequence
  MKO10035107_A_Nup188
  gRNA
agacgtagcgtcacctctga

SEQ ID NO: 35108 - DNA, 20 bp, Artificial Sequence
  MKO10035108_A_Nup188
  gRNA
gggtactcgggactcactaa

SEQ ID NO: 35109 - DNA, 20 bp, Artificial Sequence
  MKO10035109_A_Nup188
  gRNA
gaggtcagctcttagagaat

SEQ ID NO: 35110 - DNA, 20 bp, Artificial Sequence
  MKO10035110_A_Nup205
  gRNA
atctgtaaagcgtgttgtca

SEQ ID NO: 35111 - DNA, 20 bp, Artificial Sequence
  MKO10035111_A_Nup205
  gRNA
gttgcgatccaggggcaaca

SEQ ID NO: 35112 - DNA, 20 bp, Artificial Sequence
  MKO10035112_A_Nup205
  gRNA
cagtgagaaacaccgcaaag

SEQ ID NO: 35113 - DNA, 20 bp, Artificial Sequence
  MKO10035113_A_Nup210l
  gRNA
gtatgtggacgatgcaccgc

SEQ ID NO: 35114 - DNA, 20 bp, Artificial Sequence
  MKO10035114_A_Nup210l
  gRNA
catcattcttgctcgagaag

SEQ ID NO: 35115 - DNA, 20 bp, Artificial Sequence
  MKO10035115_A_Nup210l
  gRNA
tgagctacgctgtgatgtaa

SEQ ID NO: 35116 - DNA, 20 bp, Artificial Sequence
  MKO10035116_A_Nup210
  gRNA
ggtagccagcatagagccgt

SEQ ID NO: 35117 - DNA, 20 bp, Artificial Sequence
  MKO10035117_A_Nup210
  gRNA
tagagacaatctgaatgccg

SEQ ID NO: 35118 - DNA, 20 bp, Artificial Sequence
  MKO10035118_A_Nup210
  gRNA
cctcttaccggagtgcattg

SEQ ID NO: 35119 - DNA, 20 bp, Artificial Sequence
  MKO10035119_A_Nup214
  gRNA
ttcaaacgatgccagcggaa

SEQ ID NO: 35120 - DNA, 20 bp, Artificial Sequence
  MKO10035120_A_Nup214
  gRNA
aagcacactcgagcgctcct

SEQ ID NO: 35121 - DNA, 20 bp, Artificial Sequence
  MKO10035121_A_Nup214
  gRNA
acgtccatttacctatcaca

SEQ ID NO: 35122 - DNA, 20 bp, Artificial Sequence
  MKO10035122_A_Nup35
  gRNA
attaacccacctgctagtaa

SEQ ID NO: 35123 - DNA, 20 bp, Artificial Sequence
  MKO10035123_A_Nup35
  gRNA
ttgttgcagagtcctcttgt

SEQ ID NO: 35124 - DNA, 20 bp, Artificial Sequence
  MKO10035124_A_Nup35
  gRNA
acctgtcttcttgaagtcaa

SEQ ID NO: 35125 - DNA, 20 bp, Artificial Sequence
  MKO10035125_A_Nup37
  gRNA
cactcacgcttgcgagctcc

SEQ ID NO: 35126 - DNA, 20 bp, Artificial Sequence
  MKO10035126_A_Nup37
  gRNA
tccaggcaatgccgtcaact

SEQ ID NO: 35127 - DNA, 20 bp, Artificial Sequence
  MKO10035127_A_Nup37
  gRNA
tccgagttgacggcattgcc

SEQ ID NO: 35128 - DNA, 20 bp, Artificial Sequence
  MKO10035128_A_Nup43
  gRNA
ctgtgcgatattagacatca

SEQ ID NO: 35129 - DNA, 20 bp, Artificial Sequence
  MKO10035129_A_Nup43
  gRNA
ttcgaaggaaggttacggca

SEQ ID NO: 35130 - DNA, 20 bp, Artificial Sequence
  MKO10035130_A_Nup43
  gRNA
attgtagctgcttcgtcaac

SEQ ID NO: 35131 - DNA, 20 bp, Artificial Sequence
  MKO10035131_A_Nup50
  gRNA
tgaactgctccgtccgcgat

SEQ ID NO: 35132 - DNA, 20 bp, Artificial Sequence
  MKO10035132_A_Nup50
  gRNA
cgtgcttcactatccaatcg

SEQ ID NO: 35133 - DNA, 20 bp, Artificial Sequence
  MKO10035133_A_Nup50
  gRNA
gtgtttcagtctgatagcgg

SEQ ID NO: 35134 - DNA, 20 bp, Artificial Sequence
  MKO10035134_A_Nup54
  gRNA
tgataccttaaaccggcaaa

SEQ ID NO: 35135 - DNA, 20 bp, Artificial Sequence
  MKO10035135_A_Nup54
  gRNA
tcattgaaaggccttctcgg

SEQ ID NO: 35136 - DNA, 20 bp, Artificial Sequence
  MKO10035136_A_Nup54
  gRNA
tctcttcagtcagccgaccc

SEQ ID NO: 35137 - DNA, 20 bp, Artificial Sequence
  MKO10035137_A_Nup62-il4i1
  gRNA
ggggccgtatcttcactttc

SEQ ID NO: 35138 - DNA, 20 bp, Artificial Sequence
  MKO10035138_A_Nup62-il4i1
  gRNA
tgagtagctgctcataatcg

SEQ ID NO: 35139 - DNA, 20 bp, Artificial Sequence
  MKO10035139_A_Nup62-il4i1
  gRNA
gttcaacaagcatacgcttc

SEQ ID NO: 35140 - DNA, 20 bp, Artificial Sequence
  MKO10035140_A_Nup62cl
  gRNA
gccacttgtaatcgtggtag

SEQ ID NO: 35141 - DNA, 20 bp, Artificial Sequence
  MKO10035141_A_Nup62cl
  gRNA
tggagagtatggcgaacaat

SEQ ID NO: 35142 - DNA, 20 bp, Artificial Sequence
  MKO10035142_A_Nup62cl
  gRNA
accactaccacgattacaag

SEQ ID NO: 35143 - DNA, 20 bp, Artificial Sequence
  MKO10035143_A_Nup62
  gRNA
gctcctcatcagcgtgctga

SEQ ID NO: 35144 - DNA, 20 bp, Artificial Sequence
  MKO10035144_A_Nup62
  gRNA
ataccttcagcacgctgatg

SEQ ID NO: 35145 - DNA, 20 bp, Artificial Sequence
  MKO10035145_A_Nup62
  gRNA
gtgtggcagctgcgttactc

SEQ ID NO: 35146 - DNA, 20 bp, Artificial Sequence
  MKO10035146_A_Nup85
  gRNA
aagaactgtcggggaagtcc

SEQ ID NO: 35147 - DNA, 20 bp, Artificial Sequence
  MKO10035147_A_Nup85
  gRNA
tgttggcctgcaaaaaattg

SEQ ID NO: 35148 - DNA, 20 bp, Artificial Sequence
  MKO10035148_A_Nup85
  gRNA
ctgcctacctgtttggttga

SEQ ID NO: 35149 - DNA, 20 bp, Artificial Sequence
  MKO10035149_A_Nup88
  gRNA
aggctccacgccaccaccgc

SEQ ID NO: 35150 - DNA, 20 bp, Artificial Sequence
  MKO10035150_A_Nup88
  gRNA
ccgaagaccaggtttctcgt

SEQ ID NO: 35151 - DNA, 20 bp, Artificial Sequence
  MKO10035151_A_Nup88
  gRNA
tgacatcagacaacgtgata

SEQ ID NO: 35152 - DNA, 20 bp, Artificial Sequence
  MKO10035152_A_Nup93
  gRNA
gtatcatcgagaatcaatgc

SEQ ID NO: 35153 - DNA, 20 bp, Artificial Sequence
  MKO10035153_A_Nup93
  gRNA
ttcacatcaccgatgtaact

SEQ ID NO: 35154 - DNA, 20 bp, Artificial Sequence
  MKO10035154_A_Nup93
  gRNA
tccccctgggcgaagctctc

SEQ ID NO: 35155 - DNA, 20 bp, Artificial Sequence
  MKO10035155_A_Nup98
  gRNA
atctcttcaggaggattatt

SEQ ID NO: 35156 - DNA, 20 bp, Artificial Sequence
  MKO10035156_A_Nup98
  gRNA
ggtgctgctgtaaaactact

SEQ ID NO: 35157 - DNA, 20 bp, Artificial Sequence
  MKO10035157_A_Nup98
  gRNA
acgactagtggaggagcatt

SEQ ID NO: 35158 - DNA, 20 bp, Artificial Sequence
  MKO10035158_A_Nupl1
  gRNA
tcctcctagagtaaatccag

SEQ ID NO: 35159 - DNA, 20 bp, Artificial Sequence
  MKO10035159_A_Nupl1
  gRNA
tctttagggggagccttagc

SEQ ID NO: 35160 - DNA, 20 bp, Artificial Sequence
  MKO10035160_A_Nupl1
  gRNA
acaacatctgcgtctacaac

SEQ ID NO: 35161 - DNA, 20 bp, Artificial Sequence
  MKO10035161_A_Nupl2
  gRNA
aatctaactatgtcgaccaa

SEQ ID NO: 35162 - DNA, 20 bp, Artificial Sequence
  MKO10035162_A_Nupl2
  gRNA
tgctggcattccaccctcga

SEQ ID NO: 35163 - DNA, 20 bp, Artificial Sequence
  MKO10035163_A_Nupl2
  gRNA
ggatgacgttggagtacctc

SEQ ID NO: 35164 - DNA, 20 bp, Artificial Sequence
  MKO10035164_A_Nupr1l
  gRNA
gcccaccgtcggcttcgaag

SEQ ID NO: 35165 - DNA, 20 bp, Artificial Sequence
  MKO10035165_A_Nupr1l
  gRNA
gcccggcggccacgagcgca

SEQ ID NO: 35166 - DNA, 20 bp, Artificial Sequence
  MKO10035166_A_Nupr1l
  gRNA
cacctcctcttcgaagccga

SEQ ID NO: 35167 - DNA, 20 bp, Artificial Sequence
  MKO10035167_A_Nupr1
  gRNA
aataccaaccgccctagccc

SEQ ID NO: 35168 - DNA, 20 bp, Artificial Sequence
  MKO10035168_A_Nupr1
  gRNA
tcttcatcctctaggtttag

SEQ ID NO: 35169 - DNA, 20 bp, Artificial Sequence
  MKO10035169_A_Nupr1
  gRNA
agcttcctctcatgcccgcc

SEQ ID NO: 35170 - DNA, 20 bp, Artificial Sequence
  MKO10035170_A_Nus1
  gRNA
cgcaagctgcatactgccga

SEQ ID NO: 35171 - DNA, 20 bp, Artificial Sequence
  MKO10035171_A_Nus1
  gRNA
gacagcaccttcactgccga

SEQ ID NO: 35172 - DNA, 20 bp, Artificial Sequence
  MKO10035172_A_Nus1
  gRNA
tcacctaaacatcagctatg

SEQ ID NO: 35173 - DNA, 20 bp, Artificial Sequence
  MKO10035173_A_Nusap1
  gRNA
acggtaccttcatgttagcc

SEQ ID NO: 35174 - DNA, 20 bp, Artificial Sequence
  MKO10035174_A_Nusap1
  gRNA
gaagccgcattgccgtcctc

SEQ ID NO: 35175 - DNA, 20 bp, Artificial Sequence
  MKO10035175_A_Nusap1
  gRNA
tgagatacacgttagcagtg

SEQ ID NO: 35176 - DNA, 20 bp, Artificial Sequence
  MKO10035176_A_Nutf2
  gRNA
ttacataaattgcgcctagt

SEQ ID NO: 35177 - DNA, 20 bp, Artificial Sequence
  MKO10035177_A_Nutf2
  gRNA
cacagatagcttctccacaa

SEQ ID NO: 35178 - DNA, 20 bp, Artificial Sequence
  MKO10035178_A_Nutf2
  gRNA
ggatgggagacaagccaatt

SEQ ID NO: 35179 - DNA, 20 bp, Artificial Sequence
  MKO10035179_A_Nutm1
  gRNA
tttatgagaactatcgtcgc

SEQ ID NO: 35180 - DNA, 20 bp, Artificial Sequence
  MKO10035180_A_Nutm1
  gRNA
ggtttgcgttgccgccgccg

SEQ ID NO: 35181 - DNA, 20 bp, Artificial Sequence
  MKO10035181_A_Nutm1
  gRNA
agcggaccagcaactttgac

SEQ ID NO: 35182 - DNA, 20 bp, Artificial Sequence
  MKO10035182_A_Nvl
  gRNA
ccgacttgcaaagactgtac

SEQ ID NO: 35183 - DNA, 20 bp, Artificial Sequence
  MKO10035183_A_Nvl
  gRNA
ttctgatgatgattcgaaca

SEQ ID NO: 35184 - DNA, 20 bp, Artificial Sequence
  MKO10035184_A_Nvl
  gRNA
cctgtacagtctttgcaagt

SEQ ID NO: 35185 - DNA, 20 bp, Artificial Sequence
  MKO10035185_A_Nwd1
  gRNA
tggatgtgctatcaccgatc

SEQ ID NO: 35186 - DNA, 20 bp, Artificial Sequence
  MKO10035186_A_Nwd1
  gRNA
gaaccgggcaggggccgtac

SEQ ID NO: 35187 - DNA, 20 bp, Artificial Sequence
  MKO10035187_A_Nwd1
  gRNA
gcagttgagcgagcagttcg

SEQ ID NO: 35188 - DNA, 20 bp, Artificial Sequence
  MKO10035188_A_Nxf1
  gRNA
tgtacagtcttcccgatttg

SEQ ID NO: 35189 - DNA, 20 bp, Artificial Sequence
  MKO10035189_A_Nxf1
  gRNA
caaccatctccccgacgatt

SEQ ID NO: 35190 - DNA, 20 bp, Artificial Sequence
  MKO10035190_A_Nxf1
  gRNA
gggcctttccgatggaagtg

SEQ ID NO: 35191 - DNA, 20 bp, Artificial Sequence
  MKO10035191_A_Nxf2
  gRNA
gagacatataaacaacgata

SEQ ID NO: 35192 - DNA, 20 bp, Artificial Sequence
  MKO10035192_A_Nxf2
  gRNA
tcctagtgctccatatgcca

SEQ ID NO: 35193 - DNA, 20 bp, Artificial Sequence
  MKO10035193_A_Nxf2
  gRNA
tctgagagattctatcattc

SEQ ID NO: 35194 - DNA, 20 bp, Artificial Sequence
  MKO10035194_A_Nxf3
  gRNA
cttacctgcaccggagtgaa

SEQ ID NO: 35195 - DNA, 20 bp, Artificial Sequence
  MKO10035195_A_Nxf3
  gRNA
actgtatcactgacgtgagc

SEQ ID NO: 35196 - DNA, 20 bp, Artificial Sequence
  MKO10035196_A_Nxf3
  gRNA
cctccatgttaacatccgtt

SEQ ID NO: 35197 - DNA, 20 bp, Artificial Sequence
  MKO10035197_A_Nxf7
  gRNA
accgatcattatgagcatac

SEQ ID NO: 35198 - DNA, 20 bp, Artificial Sequence
  MKO10035198_A_Nxf7
  gRNA
ttgtaggaacaactaatgcc

SEQ ID NO: 35199 - DNA, 20 bp, Artificial Sequence
  MKO10035199_A_Nxf7
  gRNA
cccagtatgctcataatgat

SEQ ID NO: 35200 - DNA, 20 bp, Artificial Sequence
  MKO10035200_A_Nxnl1
  gRNA
gtcgcaagtaccgagtagac

SEQ ID NO: 35201 - DNA, 20 bp, Artificial Sequence
  MKO10035201_A_Nxnl1
  gRNA
caccagagtcgcggccgttt

SEQ ID NO: 35202 - DNA, 20 bp, Artificial Sequence
  MKO10035202_A_Nxnl1
  gRNA
ctgacgagttctacgtgctg

SEQ ID NO: 35203 - DNA, 20 bp, Artificial Sequence
  MKO10035203_A_Nxnl2
  gRNA
agcaagctagcccgcgctct

SEQ ID NO: 35204 - DNA, 20 bp, Artificial Sequence
  MKO10035204_A_Nxnl2
  gRNA
cgacacgaaaaccacctcga

SEQ ID NO: 35205 - DNA, 20 bp, Artificial Sequence
  MKO10035205_A_Nxnl2
  gRNA
agtcgcggctgggcgagcac

SEQ ID NO: 35206 - DNA, 20 bp, Artificial Sequence
  MKO10035206_A_Nxn
  gRNA
ccccgcaataacttcccgga

SEQ ID NO: 35207 - DNA, 20 bp, Artificial Sequence
  MKO10035207_A_Nxn
  gRNA
gcgtctaggaatattagcga

SEQ ID NO: 35208 - DNA, 20 bp, Artificial Sequence
  MKO10035208_A_Nxn
  gRNA
tctcgtctcaaccgactgta

SEQ ID NO: 35209 - DNA, 20 bp, Artificial Sequence
  MKO10035209_A_Nxpe2
  gRNA
cctacgcagtaggtacgctg

SEQ ID NO: 35210 - DNA, 20 bp, Artificial Sequence
  MKO10035210_A_Nxpe2
  gRNA
ccgcagcgtacctactgcgt

SEQ ID NO: 35211 - DNA, 20 bp, Artificial Sequence
  MKO10035211_A_Nxpe2
  gRNA
gtgattcaacactgcgccag

SEQ ID NO: 35212 - DNA, 20 bp, Artificial Sequence
  MKO10035212_A_Nxpe3
  gRNA
aaagacgctcgtgaagcgaa

SEQ ID NO: 35213 - DNA, 20 bp, Artificial Sequence
  MKO10035213_A_Nxpe3
  gRNA
gtctttacctttcgttcgcc

SEQ ID NO: 35214 - DNA, 20 bp, Artificial Sequence
  MKO10035214_A_Nxpe3
  gRNA
taccacgcggcccacggcgc

SEQ ID NO: 35215 - DNA, 20 bp, Artificial Sequence
  MKO10035215_A_Nxpe4
  gRNA
actgcaacaccaacttgccg

SEQ ID NO: 35216 - DNA, 20 bp, Artificial Sequence
  MKO10035216_A_Nxpe4
  gRNA
ggaccacttactgttgcatt

SEQ ID NO: 35217 - DNA, 20 bp, Artificial Sequence
  MKO10035217_A_Nxpe4
  gRNA
cccacacagtgtgtatcccg

SEQ ID NO: 35218 - DNA, 20 bp, Artificial Sequence
  MKO10035218_A_Nxpe5
  gRNA
ctcatgttcccctgcgttgc

SEQ ID NO: 35219 - DNA, 20 bp, Artificial Sequence
  MKO10035219_A_Nxpe5
  gRNA
atcatcaaactggccaatac

SEQ ID NO: 35220 - DNA, 20 bp, Artificial Sequence
  MKO10035220_A_Nxpe5
  gRNA
cctggtcttaccagcaacgc

SEQ ID NO: 35221 - DNA, 20 bp, Artificial Sequence
  MKO10035221_A_Nxph1
  gRNA
gccacttaccaagtagacgg

SEQ ID NO: 35222 - DNA, 20 bp, Artificial Sequence
  MKO10035222_A_Nxph1
  gRNA
tatttcaggcataactccac

SEQ ID NO: 35223 - DNA, 20 bp, Artificial Sequence
  MKO10035223_A_Nxph1
  gRNA
aaatcggaactactgaagtc

SEQ ID NO: 35224 - DNA, 20 bp, Artificial Sequence
  MKO10035224_A_Nxph2
  gRNA
tgggtcgaaattgcacaaag

SEQ ID NO: 35225 - DNA, 20 bp, Artificial Sequence
  MKO10035225_A_Nxph2
  gRNA
tcactatggtaattgtagtc

SEQ ID NO: 35226 - DNA, 20 bp, Artificial Sequence
  MKO10035226_A_Nxph2
  gRNA
cagctggcacgatgagcttg

SEQ ID NO: 35227 - DNA, 20 bp, Artificial Sequence
  MKO10035227_A_Nxph3
  gRNA
tcgatagtccgtgctataga

SEQ ID NO: 35228 - DNA, 20 bp, Artificial Sequence
  MKO10035228_A_Nxph3
  gRNA
cctagggtgcctcgcaagcg

SEQ ID NO: 35229 - DNA, 20 bp, Artificial Sequence
  MKO10035229_A_Nxph3
  gRNA
gatagaggctgccctgcact

SEQ ID NO: 35230 - DNA, 20 bp, Artificial Sequence
  MKO10035230_A_Nxph4
  gRNA
actcctagcgcgcttccgag

SEQ ID NO: 35231 - DNA, 20 bp, Artificial Sequence
  MKO10035231_A_Nxph4
  gRNA
cgtccgtgccgcgcaccaag

SEQ ID NO: 35232 - DNA, 20 bp, Artificial Sequence
  MKO10035232_A_Nxph4
  gRNA
aagagcaagaggagccattc

SEQ ID NO: 35233 - DNA, 20 bp, Artificial Sequence
  MKO10035233_A_Nxt1
  gRNA
aagccagaccaccgtgcttg

SEQ ID NO: 35234 - DNA, 20 bp, Artificial Sequence
  MKO10035234_A_Nxt1
  gRNA
ggcttggtgtagcgtcatca

SEQ ID NO: 35235 - DNA, 20 bp, Artificial Sequence
  MKO10035235_A_Nxt1
  gRNA
cgtcacccagtaacacggtg

SEQ ID NO: 35236 - DNA, 20 bp, Artificial Sequence
  MKO10035236_A_Nxt2
  gRNA
catattgatctggaattcgc

SEQ ID NO: 35237 - DNA, 20 bp, Artificial Sequence
  MKO10035237_A_Nxt2
  gRNA
tcacaacgagcactgtagtt

SEQ ID NO: 35238 - DNA, 20 bp, Artificial Sequence
  MKO10035238_A_Nxt2
  gRNA
ttagattgccaaccagttca

SEQ ID NO: 35239 - DNA, 20 bp, Artificial Sequence
  MKO10035239_A_Nyap1
  gRNA
ctcgacaccgttgccacccc

SEQ ID NO: 35240 - DNA, 20 bp, Artificial Sequence
  MKO10035240_A_Nyap1
  gRNA
ggcgtctcccgctctcgtgc

SEQ ID NO: 35241 - DNA, 20 bp, Artificial Sequence
  MKO10035241_A_Nyap1
  gRNA
tgcggctccctcctcgatca

SEQ ID NO: 35242 - DNA, 20 bp, Artificial Sequence
  MKO10035242_A_Nyap2
  gRNA
gaacgagaaacgtcgacgac

SEQ ID NO: 35243 - DNA, 20 bp, Artificial Sequence
  MKO10035243_A_Nyap2
  gRNA
tgacgcccttgagtctcaag

SEQ ID NO: 35244 - DNA, 20 bp, Artificial Sequence
  MKO10035244_A_Nyap2
  gRNA
atcattctcgcgagcaatgt

SEQ ID NO: 35245 - DNA, 20 bp, Artificial Sequence
  MKO10035245_A_Nynrin
  gRNA
gcttcgggtacttgagccag

SEQ ID NO: 35246 - DNA, 20 bp, Artificial Sequence
  MKO10035246_A_Nynrin
  gRNA
ctctgagcgcgtacacatcc

SEQ ID NO: 35247 - DNA, 20 bp, Artificial Sequence
  MKO10035247_A_Nynrin
  gRNA
agatcaccacttacgattac

SEQ ID NO: 35248 - DNA, 20 bp, Artificial Sequence
  MKO10035248_A_Nyx
  gRNA
tttcgagcgcagccgcatcg

SEQ ID NO: 35249 - DNA, 20 bp, Artificial Sequence
  MKO10035249_A_Nyx
  gRNA
cagggcgccgcagtcgccaa

SEQ ID NO: 35250 - DNA, 20 bp, Artificial Sequence
  MKO10035250_A_Nyx
  gRNA
atgctgatcctgcttcttca

SEQ ID NO: 35251 - DNA, 20 bp, Artificial Sequence
  MKO10035251_A_OTTMUSG00000016609
  gRNA
tctgttcttagtgtcttcgc

SEQ ID NO: 35252 - DNA, 20 bp, Artificial Sequence
  MKO10035252_A_OTTMUSG00000016609
  gRNA
caagctcagaacttcacaca

SEQ ID NO: 35253 - DNA, 20 bp, Artificial Sequence
  MKO10035253_A_OTTMUSG00000016609
  gRNA
cgtgcatgtgaacttcactc

SEQ ID NO: 35254 - DNA, 20 bp, Artificial Sequence
  MKO10035254_A_Oacyl
  gRNA
gagtctgcctttgcgaaaca

SEQ ID NO: 35255 - DNA, 20 bp, Artificial Sequence
  MKO10035255_A_Oacyl
  gRNA
actccccttggggctccggg

SEQ ID NO: 35256 - DNA, 20 bp, Artificial Sequence
  MKO10035256_A_Oacyl
  gRNA
agccccaaggggagtttccg

SEQ ID NO: 35257 - DNA, 20 bp, Artificial Sequence
  MKO10035257_A_Oaf
  gRNA
cgtcgggtttgcgcagatca

SEQ ID NO: 35258 - DNA, 20 bp, Artificial Sequence
  MKO10035258_A_Oaf
  gRNA
agaaaaacccccgcgcagtg

SEQ ID NO: 35259 - DNA, 20 bp, Artificial Sequence
  MKO10035259_A_Oaf
  gRNA
cttgatctgcgcaaacccga

SEQ ID NO: 35260 - DNA, 20 bp, Artificial Sequence
  MKO10035260_A_Oard1
  gRNA
tgtatctgcgattctcgaag

SEQ ID NO: 35261 - DNA, 20 bp, Artificial Sequence
  MKO10035261_A_Oard1
  gRNA
tctagcccattgtatcagtg

SEQ ID NO: 35262 - DNA, 20 bp, Artificial Sequence
  MKO10035262_A_Oard1
  gRNA
tcccttgcctgggcatggag

SEQ ID NO: 35263 - DNA, 20 bp, Artificial Sequence
  MKO10035263_A_Oas1a
  gRNA
aatctatgccatcctcatcg

SEQ ID NO: 35264 - DNA, 20 bp, Artificial Sequence
  MKO10035264_A_Oas1a
  gRNA
ggtacattcctcgatgagga

SEQ ID NO: 35265 - DNA, 20 bp, Artificial Sequence
  MKO10035265_A_Oas1a
  gRNA
gtattatgactttcaacacc

SEQ ID NO: 35266 - DNA, 20 bp, Artificial Sequence
  MKO10035266_A_Oas1b
  gRNA
gggcaaaggcaccgcgctca

SEQ ID NO: 35267 - DNA, 20 bp, Artificial Sequence
  MKO10035267_A_Oas1b
  gRNA
gtttaaggagtcccaactcc

SEQ ID NO: 35268 - DNA, 20 bp, Artificial Sequence
  MKO10035268_A_Oas1b
  gRNA
tactcgactcccatactccc

SEQ ID NO: 35269 - DNA, 20 bp, Artificial Sequence
  MKO10035269_A_Oas1c
  gRNA
gattcgaagattcttgtaat

SEQ ID NO: 35270 - DNA, 20 bp, Artificial Sequence
  MKO10035270_A_Oas1c
  gRNA
cgaccagttctaagaaggtc

SEQ ID NO: 35271 - DNA, 20 bp, Artificial Sequence
  MKO10035271_A_Oas1c
  gRNA
cgtagactttgttgtagaat

SEQ ID NO: 35272 - DNA, 20 bp, Artificial Sequence
  MKO10035272_A_Oas1d
  gRNA
ccccgagcgccagcatgagt

SEQ ID NO: 35273 - DNA, 20 bp, Artificial Sequence
  MKO10035273_A_Oas1d
  gRNA
cgagatctctgactacctgc

SEQ ID NO: 35274 - DNA, 20 bp, Artificial Sequence
  MKO10035274_A_Oas1d
  gRNA
tacgggatccacgaaaaccc

SEQ ID NO: 35275 - DNA, 20 bp, Artificial Sequence
  MKO10035275_A_Oas1e
  gRNA
acacttgctgccactttaac

SEQ ID NO: 35276 - DNA, 20 bp, Artificial Sequence
  MKO10035276_A_Oas1e
  gRNA
gtgctccccagagcgccagc

SEQ ID NO: 35277 - DNA, 20 bp, Artificial Sequence
  MKO10035277_A_Oas1e
  gRNA
accatgtccagtagattaga

SEQ ID NO: 35278 - DNA, 20 bp, Artificial Sequence
  MKO10035278_A_Oas1f
  gRNA
gaactgtgatacgtgcctcg

SEQ ID NO: 35279 - DNA, 20 bp, Artificial Sequence
  MKO10035279_A_Oas1f
  gRNA
gagtgcagtgtgttcgtcgt

SEQ ID NO: 35280 - DNA, 20 bp, Artificial Sequence
  MKO10035280_A_Oas1f
  gRNA
gctgaagaacctcatccgtt

SEQ ID NO: 35281 - DNA, 20 bp, Artificial Sequence
  MKO10035281_A_Oas1g
  gRNA
taatctacaccatcctcatc

SEQ ID NO: 35282 - DNA, 20 bp, Artificial Sequence
  MKO10035282_A_Oas1g
  gRNA
gttggtaccagtgtttgacc

SEQ ID NO: 35283 - DNA, 20 bp, Artificial Sequence
  MKO10035283_A_Oas1g
  gRNA
gtattatgactttcaacaca

SEQ ID NO: 35284 - DNA, 20 bp, Artificial Sequence
  MKO10035284_A_Oas1h
  gRNA
gagcacagtgtatcgattgt

SEQ ID NO: 35285 - DNA, 20 bp, Artificial Sequence
  MKO10035285_A_Oas1h
  gRNA
gagcaatccgagtgctgcta

SEQ ID NO: 35286 - DNA, 20 bp, Artificial Sequence
  MKO10035286_A_Oas1h
  gRNA
catccgtgagtgcaccatgc

SEQ ID NO: 35287 - DNA, 20 bp, Artificial Sequence
  MKO10035287_A_Oas2
  gRNA
ccgctggataagtcgcagca

SEQ ID NO: 35288 - DNA, 20 bp, Artificial Sequence
  MKO10035288_A_Oas2
  gRNA
ccgtgctgcgacttatccag

SEQ ID NO: 35289 - DNA, 20 bp, Artificial Sequence
  MKO10035289_A_Oas2
  gRNA
gccacagttcaatgacgtca

SEQ ID NO: 35290 - DNA, 20 bp, Artificial Sequence
  MKO10035290_A_Oas3
  gRNA
cggtccggagcccttgggcc

SEQ ID NO: 35291 - DNA, 20 bp, Artificial Sequence
  MKO10035291_A_Oas3
  gRNA
agctgatccaacgtgggacg

SEQ ID NO: 35292 - DNA, 20 bp, Artificial Sequence
  MKO10035292_A_Oas3
  gRNA
gcaacgggacagcctggcgc

SEQ ID NO: 35293 - DNA, 20 bp, Artificial Sequence
  MKO10035293_A_Oasl1
  gRNA
agcgaaacttcgtgaagcat

SEQ ID NO: 35294 - DNA, 20 bp, Artificial Sequence
  MKO10035294_A_Oasl1
  gRNA
gatcagatttgcgtagacct

SEQ ID NO: 35295 - DNA, 20 bp, Artificial Sequence
  MKO10035295_A_Oasl1
  gRNA
gcagctccatcaccgtggcg

SEQ ID NO: 35296 - DNA, 20 bp, Artificial Sequence
  MKO10035296_A_Oasl2
  gRNA
ctgtacattccagcgctcgc

SEQ ID NO: 35297 - DNA, 20 bp, Artificial Sequence
  MKO10035297_A_Oasl2
  gRNA
ctgtaggccccagcgagcgc

SEQ ID NO: 35298 - DNA, 20 bp, Artificial Sequence
  MKO10035298_A_Oasl2
  gRNA
agttcctgacgacctcgttt

SEQ ID NO: 35299 - DNA, 20 bp, Artificial Sequence
  MKO10035299_A_Oat
  gRNA
catgtaagctcgctcgtcgt

SEQ ID NO: 35300 - DNA, 20 bp, Artificial Sequence
  MKO10035300_A_Oat
  gRNA
acagatccgaccagttatga

SEQ ID NO: 35301 - DNA, 20 bp, Artificial Sequence
  MKO10035301_A_Oat
  gRNA
atataacgatctgcccgcac

SEQ ID NO: 35302 - DNA, 20 bp, Artificial Sequence
  MKO10035302_A_Oaz1
  gRNA
tacctgtccttactgccctc

SEQ ID NO: 35303 - DNA, 20 bp, Artificial Sequence
  MKO10035303_A_Oaz1
  gRNA
aataccaacctctgtcctca

SEQ ID NO: 35304 - DNA, 20 bp, Artificial Sequence
  MKO10035304_A_Oaz1
  gRNA
ggacatcaggagcaccaccg

SEQ ID NO: 35305 - DNA, 20 bp, Artificial Sequence
  MKO10035305_A_Oaz2
  gRNA
gaacaatgtgcctgcagcac

SEQ ID NO: 35306 - DNA, 20 bp, Artificial Sequence
  MKO10035306_A_Oaz2
  gRNA
catcgttcacagggaggtcc

SEQ ID NO: 35307 - DNA, 20 bp, Artificial Sequence
  MKO10035307_A_Oaz2
  gRNA
agctggggacacttactcaa

SEQ ID NO: 35308 - DNA, 20 bp, Artificial Sequence
  MKO10035308_A_Oaz3
  gRNA
ctctgtccttccgatcgatt

SEQ ID NO: 35309 - DNA, 20 bp, Artificial Sequence
  MKO10035309_A_Oaz3
  gRNA
gtgtgatcaccgactcttcc

SEQ ID NO: 35310 - DNA, 20 bp, Artificial Sequence
  MKO10035310_A_Oaz3
  gRNA
ttgtgaacttccaaatcgat

SEQ ID NO: 35311 - DNA, 20 bp, Artificial Sequence
  MKO10035311_A_Obfc1
  gRNA
ggagatatcatccgagtccg

SEQ ID NO: 35312 - DNA, 20 bp, Artificial Sequence
  MKO10035312_A_Obfc1
  gRNA
atgatatctacccgccttat

SEQ ID NO: 35313 - DNA, 20 bp, Artificial Sequence
  MKO10035313_A_Obfc1
  gRNA
cttccgtaacccagccctac

SEQ ID NO: 35314 - DNA, 20 bp, Artificial Sequence
  MKO10035314_A_Obox1
  gRNA
tgtgtacaccaaagaacagc

SEQ ID NO: 35315 - DNA, 20 bp, Artificial Sequence
  MKO10035315_A_Obox1
  gRNA
gtacttgttcaatattctgg

SEQ ID NO: 35316 - DNA, 20 bp, Artificial Sequence
  MKO10035316_A_Obox1
  gRNA
cttgagactcttgcttaagt

SEQ ID NO: 35317 - DNA, 20 bp, Artificial Sequence
  MKO10035317_A_Obox2
  gRNA
tgtgtacaccaaagaagagc

SEQ ID NO: 35318 - DNA, 20 bp, Artificial Sequence
  MKO10035318_A_Obox2
  gRNA
taacaaacaaactagcccaa

SEQ ID NO: 35319 - DNA, 20 bp, Artificial Sequence
  MKO10035319_A_Obox2
  gRNA
cttcagactcttgcttaagt

SEQ ID NO: 35320 - DNA, 20 bp, Artificial Sequence
  MKO10035320_A_Obox3
  gRNA
cagaatcccctaatgactcc

SEQ ID NO: 35321 - DNA, 20 bp, Artificial Sequence
  MKO10035321_A_Obox3
  gRNA
ttccatacctgttgttgact

SEQ ID NO: 35322 - DNA, 20 bp, Artificial Sequence
  MKO10035322_A_Obox3
  gRNA
ccattgtccgagtcaacaac

SEQ ID NO: 35323 - DNA, 20 bp, Artificial Sequence
  MKO10035323_A_Obox5
  gRNA
gcagcatatgccagcctgac

SEQ ID NO: 35324 - DNA, 20 bp, Artificial Sequence
  MKO10035324_A_Obox5
  gRNA
tatttgggatctgatttcta

SEQ ID NO: 35325 - DNA, 20 bp, Artificial Sequence
  MKO10035325_A_Obox5
  gRNA
ccacaagaatacctgcttga

SEQ ID NO: 35326 - DNA, 20 bp, Artificial Sequence
  MKO10035326_A_Obox6
  gRNA
atcttctccgcctcattatc

SEQ ID NO: 35327 - DNA, 20 bp, Artificial Sequence
  MKO10035327_A_Obox6
  gRNA
taactaggtgaccgcaccat

SEQ ID NO: 35328 - DNA, 20 bp, Artificial Sequence
  MKO10035328_A_Obox6
  gRNA
gatgaggtgaatgcattaag

SEQ ID NO: 35329 - DNA, 20 bp, Artificial Sequence
  MKO10035329_A_Obp1a
  gRNA
gaataatcgttataaacttg

SEQ ID NO: 35330 - DNA, 20 bp, Artificial Sequence
  MKO10035330_A_Obp1a
  gRNA
ccctttaacttctgaacaaa

SEQ ID NO: 35331 - DNA, 20 bp, Artificial Sequence
  MKO10035331_A_Obp1a
  gRNA
atcagagaagtcctgattac

SEQ ID NO: 35332 - DNA, 20 bp, Artificial Sequence
  MKO10035332_A_Obp2a
  gRNA
cacaatgggacgtcgtcatt

SEQ ID NO: 35333 - DNA, 20 bp, Artificial Sequence
  MKO10035333_A_Obp2a
  gRNA
aaagcgcatgaatctccgac

SEQ ID NO: 35334 - DNA, 20 bp, Artificial Sequence
  MKO10035334_A_Obp2a
  gRNA
cacgtaccagaatacaactg

SEQ ID NO: 35335 - DNA, 20 bp, Artificial Sequence
  MKO10035335_A_Obp2b
  gRNA
catcattgtacccgagcagc

SEQ ID NO: 35336 - DNA, 20 bp, Artificial Sequence
  MKO10035336_A_Obp2b
  gRNA
ccctatgaccgtgatagccc

SEQ ID NO: 35337 - DNA, 20 bp, Artificial Sequence
  MKO10035337_A_Obp2b
  gRNA
caagaagaccatctatatac

SEQ ID NO: 35338 - DNA, 20 bp, Artificial Sequence
  MKO10035338_A_Obscn
  gRNA
gagcgcgcttcgcatccgtt

SEQ ID NO: 35339 - DNA, 20 bp, Artificial Sequence
  MKO10035339_A_Obscn
  gRNA
gtgagcctccaacgcgacat

SEQ ID NO: 35340 - DNA, 20 bp, Artificial Sequence
  MKO10035340_A_Obscn
  gRNA
gtctgccgagacgttgcgca

SEQ ID NO: 35341 - DNA, 20 bp, Artificial Sequence
  MKO10035341_A_Obsl1
  gRNA
gcggtgggaattcgagagtt

SEQ ID NO: 35342 - DNA, 20 bp, Artificial Sequence
  MKO10035342_A_Obsl1
  gRNA
gcttccggggtaaacgcttc

SEQ ID NO: 35343 - DNA, 20 bp, Artificial Sequence
  MKO10035343_A_Obsl1
  gRNA
ggccgggtgaaccgtaggcg

SEQ ID NO: 35344 - DNA, 20 bp, Artificial Sequence
  MKO10035344_A_Oc90
  gRNA
tacatatcagactcgtccac

SEQ ID NO: 35345 - DNA, 20 bp, Artificial Sequence
  MKO10035345_A_Oc90
  gRNA
cctcatagcacctgcgatgc

SEQ ID NO: 35346 - DNA, 20 bp, Artificial Sequence
  MKO10035346_A_Oc90
  gRNA
acttacaggggcccatgctc

SEQ ID NO: 35347 - DNA, 20 bp, Artificial Sequence
  MKO10035347_A_Oca2
  gRNA
gggaaaatggccttactgcc

SEQ ID NO: 35348 - DNA, 20 bp, Artificial Sequence
  MKO10035348_A_Oca2
  gRNA
cattggcctcctcagagaaa

SEQ ID NO: 35349 - DNA, 20 bp, Artificial Sequence
  MKO10035349_A_Oca2
  gRNA
gagtgtcttccttaaaagaa

SEQ ID NO: 35350 - DNA, 20 bp, Artificial Sequence
  MKO10035350_A_Ocel1
  gRNA
ggcactcacagctcgtagtc

SEQ ID NO: 35351 - DNA, 20 bp, Artificial Sequence
  MKO10035351_A_Ocel1
  gRNA
catccgcaaacacgatcttc

SEQ ID NO: 35352 - DNA, 20 bp, Artificial Sequence
  MKO10035352_A_Ocel1
  gRNA
ccgcaaatttgatgaccagc

SEQ ID NO: 35353 - DNA, 20 bp, Artificial Sequence
  MKO10035353_A_Ociad1
  gRNA
tctgcctatagctgtgccgt

SEQ ID NO: 35354 - DNA, 20 bp, Artificial Sequence
  MKO10035354_A_Ociad1
  gRNA
acaagtatgctgattactca

SEQ ID NO: 35355 - DNA, 20 bp, Artificial Sequence
  MKO10035355_A_Ociad1
  gRNA
caagtgtcaagacctattcc

SEQ ID NO: 35356 - DNA, 20 bp, Artificial Sequence
  MKO10035356_A_Ociad2
  gRNA
taccttggtggacgagtccc

SEQ ID NO: 35357 - DNA, 20 bp, Artificial Sequence
  MKO10035357_A_Ociad2
  gRNA
accacggagctgatcttcaa

SEQ ID NO: 35358 - DNA, 20 bp, Artificial Sequence
  MKO10035358_A_Ociad2
  gRNA
actctggcacactcttatat

SEQ ID NO: 35359 - DNA, 20 bp, Artificial Sequence
  MKO10035359_A_Ocln
  gRNA
tgccacgatcgtgtacataa

SEQ ID NO: 35360 - DNA, 20 bp, Artificial Sequence
  MKO10035360_A_Ocln
  gRNA
tcccattatgtacacgatcg

SEQ ID NO: 35361 - DNA, 20 bp, Artificial Sequence
  MKO10035361_A_Ocln
  gRNA
tatgaaacagactacacgac

SEQ ID NO: 35362 - DNA, 20 bp, Artificial Sequence
  MKO10035362_A_Ocm
  gRNA
tcagttctctagcgtcgctc

SEQ ID NO: 35363 - DNA, 20 bp, Artificial Sequence
  MKO10035363_A_Ocm
  gRNA
ttcatagacaacgaccagag

SEQ ID NO: 35364 - DNA, 20 bp, Artificial Sequence
  MKO10035364_A_Ocm
  gRNA
tctggtcgttgtctatgaac

SEQ ID NO: 35365 - DNA, 20 bp, Artificial Sequence
  MKO10035365_A_Ocrl
  gRNA
aatttcaaagtggcgctctc

SEQ ID NO: 35366 - DNA, 20 bp, Artificial Sequence
  MKO10035366_A_Ocrl
  gRNA
cctgcatatggtggcgggtt

SEQ ID NO: 35367 - DNA, 20 bp, Artificial Sequence
  MKO10035367_A_Ocrl
  gRNA
gtttaccttcctgagcttcg

SEQ ID NO: 35368 - DNA, 20 bp, Artificial Sequence
  MKO10035368_A_Ocstamp
  gRNA
cgtagatattgtcgaaacgc

SEQ ID NO: 35369 - DNA, 20 bp, Artificial Sequence
  MKO10035369_A_Ocstamp
  gRNA
cgcacattgcctaagacgtt

SEQ ID NO: 35370 - DNA, 20 bp, Artificial Sequence
  MKO10035370_A_Ocstamp
  gRNA
ttcccgggtggccatagtgc

SEQ ID NO: 35371 - DNA, 20 bp, Artificial Sequence
  MKO10035371_A_Odam
  gRNA
agtccaacctgtcttgataa

SEQ ID NO: 35372 - DNA, 20 bp, Artificial Sequence
  MKO10035372_A_Odam
  gRNA
ctactcctgaatcttaataa

SEQ ID NO: 35373 - DNA, 20 bp, Artificial Sequence
  MKO10035373_A_Odam
  gRNA
agtacctcaagatcaaacac

SEQ ID NO: 35374 - DNA, 20 bp, Artificial Sequence
  MKO10035374_A_Odc1
  gRNA
ttccacctaggttggttcta

SEQ ID NO: 35375 - DNA, 20 bp, Artificial Sequence
  MKO10035375_A_Odc1
  gRNA
ctttcagactgaaatacagt

SEQ ID NO: 35376 - DNA, 20 bp, Artificial Sequence
  MKO10035376_A_Odc1
  gRNA
aggatttgactgtgcaagca

SEQ ID NO: 35377 - DNA, 20 bp, Artificial Sequence
  MKO10035377_A_Odf1
  gRNA
aaggacgtgacgtactccta

SEQ ID NO: 35378 - DNA, 20 bp, Artificial Sequence
  MKO10035378_A_Odf1
  gRNA
acgcgcactttgacttgatc

SEQ ID NO: 35379 - DNA, 20 bp, Artificial Sequence
  MKO10035379_A_Odf1
  gRNA
tccaagcgatcccgctcctg

SEQ ID NO: 35380 - DNA, 20 bp, Artificial Sequence
  MKO10035380_A_Odf2l
  gRNA
aacgcttaaggaagctcagt

SEQ ID NO: 35381 - DNA, 20 bp, Artificial Sequence
  MKO10035381_A_Odf2l
  gRNA
gaaagacttccatcactagt

SEQ ID NO: 35382 - DNA, 20 bp, Artificial Sequence
  MKO10035382_A_Odf2l
  gRNA
agacgtcgcaaatacaaaga

SEQ ID NO: 35383 - DNA, 20 bp, Artificial Sequence
  MKO10035383_A_Odf2
  gRNA
acacaacatcgagcgtatca

SEQ ID NO: 35384 - DNA, 20 bp, Artificial Sequence
  MKO10035384_A_Odf2
  gRNA
gattgacagtctaatgaacg

SEQ ID NO: 35385 - DNA, 20 bp, Artificial Sequence
  MKO10035385_A_Odf2
  gRNA
tctacagaagacgacgattc

SEQ ID NO: 35386 - DNA, 20 bp, Artificial Sequence
  MKO10035386_A_Odf3b
  gRNA
gtaactcggcccgggtccgc

SEQ ID NO: 35387 - DNA, 20 bp, Artificial Sequence
  MKO10035387_A_Odf3b
  gRNA
acaaactgcacgacccgtct

SEQ ID NO: 35388 - DNA, 20 bp, Artificial Sequence
  MKO10035388_A_Odf3b
  gRNA
gtcacatttctcgcgcgttc

SEQ ID NO: 35389 - DNA, 20 bp, Artificial Sequence
  MKO10035389_A_Odf3l1
  gRNA
accggtagccaaaagtgtac

SEQ ID NO: 35390 - DNA, 20 bp, Artificial Sequence
  MKO10035390_A_Odf3l1
  gRNA
cttgagaagactcgaccctc

SEQ ID NO: 35391 - DNA, 20 bp, Artificial Sequence
  MKO10035391_A_Odf3l1
  gRNA
aatcccaaagtaactcgttt

SEQ ID NO: 35392 - DNA, 20 bp, Artificial Sequence
  MKO10035392_A_Odf3l2
  gRNA
acctcggacaccacggcccc

SEQ ID NO: 35393 - DNA, 20 bp, Artificial Sequence
  MKO10035393_A_Odf3l2
  gRNA
cctacgctgccggtaggtgt

SEQ ID NO: 35394 - DNA, 20 bp, Artificial Sequence
  MKO10035394_A_Odf3l2
  gRNA
cttcactgggcctccgagcg

SEQ ID NO: 35395 - DNA, 20 bp, Artificial Sequence
  MKO10035395_A_Odf3
  gRNA
gggttactcacccgggccgg

SEQ ID NO: 35396 - DNA, 20 bp, Artificial Sequence
  MKO10035396_A_Odf3
  gRNA
tcttggtatggtagcgcccc

SEQ ID NO: 35397 - DNA, 20 bp, Artificial Sequence
  MKO10035397_A_Odf3
  gRNA
ggtcttagtccgggcagaaa

SEQ ID NO: 35398 - DNA, 20 bp, Artificial Sequence
  MKO10035398_A_Odf4
  gRNA
atcttagccaccccaaaaac

SEQ ID NO: 35399 - DNA, 20 bp, Artificial Sequence
  MKO10035399_A_Odf4
  gRNA
atcggctggagctatttcat

SEQ ID NO: 35400 - DNA, 20 bp, Artificial Sequence
  MKO10035400_A_Odf4
  gRNA
aatgaaatagctccagccga

SEQ ID NO: 35401 - DNA, 20 bp, Artificial Sequence
  MKO10035401_A_Ofcc1
  gRNA
catcagaaattcagccgacg

SEQ ID NO: 35402 - DNA, 20 bp, Artificial Sequence
  MKO10035402_A_Ofcc1
  gRNA
accgaaggtgccgggaatcc

SEQ ID NO: 35403 - DNA, 20 bp, Artificial Sequence
  MKO10035403_A_Ofcc1
  gRNA
caggctctcagtggaacgtc

SEQ ID NO: 35404 - DNA, 20 bp, Artificial Sequence
  MKO10035404_A_Ofd1
  gRNA
caccccgatccttaaacgtc

SEQ ID NO: 35405 - DNA, 20 bp, Artificial Sequence
  MKO10035405_A_Ofd1
  gRNA
gcgagttagaagcccctatt

SEQ ID NO: 35406 - DNA, 20 bp, Artificial Sequence
  MKO10035406_A_Ofd1
  gRNA
aagggagtgccctcctaata

SEQ ID NO: 35407 - DNA, 20 bp, Artificial Sequence
  MKO10035407_A_Ogdhl
  gRNA
tcgagagatcatacgtcgct

SEQ ID NO: 35408 - DNA, 20 bp, Artificial Sequence
  MKO10035408_A_Ogdhl
  gRNA
acggaaaactgcatcacgcc

SEQ ID NO: 35409 - DNA, 20 bp, Artificial Sequence
  MKO10035409_A_Ogdhl
  gRNA
gcccccgatgaaagtcgtgg

SEQ ID NO: 35410 - DNA, 20 bp, Artificial Sequence
  MKO10035410_A_Ogdh
  gRNA
acctaacgtcgacaaactcg

SEQ ID NO: 35411 - DNA, 20 bp, Artificial Sequence
  MKO10035411_A_Ogdh
  gRNA
tccacgagtttgtcgacgtt

SEQ ID NO: 35412 - DNA, 20 bp, Artificial Sequence
  MKO10035412_A_Ogdh
  gRNA
cctggtggatcgtacaagcc

SEQ ID NO: 35413 - DNA, 20 bp, Artificial Sequence
  MKO10035413_A_Ogfod1
  gRNA
tgtgcgaaatacgagttcac

SEQ ID NO: 35414 - DNA, 20 bp, Artificial Sequence
  MKO10035414_A_Ogfod1
  gRNA
tttcgcacacgacatgtcaa

SEQ ID NO: 35415 - DNA, 20 bp, Artificial Sequence
  MKO10035415_A_Ogfod1
  gRNA
cgcgctgggccaggatccgc

SEQ ID NO: 35416 - DNA, 20 bp, Artificial Sequence
  MKO10035416_A_Ogfod2
  gRNA
gctgaatatagtacgtcccc

SEQ ID NO: 35417 - DNA, 20 bp, Artificial Sequence
  MKO10035417_A_Ogfod2
  gRNA
cctagccgggtggtaggagc

SEQ ID NO: 35418 - DNA, 20 bp, Artificial Sequence
  MKO10035418_A_Ogfod2
  gRNA
tcgtagctcctgcgcagccg

SEQ ID NO: 35419 - DNA, 20 bp, Artificial Sequence
  MKO10035419_A_Ogfod3
  gRNA
ctctccctaggtggatcgga

SEQ ID NO: 35420 - DNA, 20 bp, Artificial Sequence
  MKO10035420_A_Ogfod3
  gRNA
gatggtcaccgaaggtttga

SEQ ID NO: 35421 - DNA, 20 bp, Artificial Sequence
  MKO10035421_A_Ogfod3
  gRNA
accatcgtagtcctcagagc

SEQ ID NO: 35422 - DNA, 20 bp, Artificial Sequence
  MKO10035422_A_Ogfrl1
  gRNA
tactcaccatccggcttaaa

SEQ ID NO: 35423 - DNA, 20 bp, Artificial Sequence
  MKO10035423_A_Ogfrl1
  gRNA
agagaagcttctatgccgcg

SEQ ID NO: 35424 - DNA, 20 bp, Artificial Sequence
  MKO10035424_A_Ogfrl1
  gRNA
ctgaccattggatgtacgtg

SEQ ID NO: 35425 - DNA, 20 bp, Artificial Sequence
  MKO10035425_A_Ogfr
  gRNA
ccgaaactggcgtgctatgc

SEQ ID NO: 35426 - DNA, 20 bp, Artificial Sequence
  MKO10035426_A_Ogfr
  gRNA
tacctaccgggtagttgtgc

SEQ ID NO: 35427 - DNA, 20 bp, Artificial Sequence
  MKO10035427_A_Ogfr
  gRNA
ttggcatgccagttcactcc

SEQ ID NO: 35428 - DNA, 20 bp, Artificial Sequence
  MKO10035428_A_Ogg1
  gRNA
gatgccagccgtagtcacga

SEQ ID NO: 35429 - DNA, 20 bp, Artificial Sequence
  MKO10035429_A_Ogg1
  gRNA
cagattgcccatcgtgacta

SEQ ID NO: 35430 - DNA, 20 bp, Artificial Sequence
  MKO10035430_A_Ogg1
  gRNA
gcgtgctggcagatcaagta

SEQ ID NO: 35431 - DNA, 20 bp, Artificial Sequence
  MKO10035431_A_Ogn
  gRNA
tgaattacacgtagactttc

SEQ ID NO: 35432 - DNA, 20 bp, Artificial Sequence
  MKO10035432_A_Ogn
  gRNA
tctacgtgtaattcaccttc

SEQ ID NO: 35433 - DNA, 20 bp, Artificial Sequence
  MKO10035433_A_Ogn
  gRNA
ccgtaaaatcaagtcttctt

SEQ ID NO: 35434 - DNA, 20 bp, Artificial Sequence
  MKO10035434_A_Ogt
  gRNA
ctatacacttccagtgtcga

SEQ ID NO: 35435 - DNA, 20 bp, Artificial Sequence
  MKO10035435_A_Ogt
  gRNA
aaggaaagcatacgtttcgt

SEQ ID NO: 35436 - DNA, 20 bp, Artificial Sequence
  MKO10035436_A_Ogt
  gRNA
agcattatcgacatgccttg

SEQ ID NO: 35437 - DNA, 20 bp, Artificial Sequence
  MKO10035437_A_Oip5
  gRNA
tactcgtctaaactcactga

SEQ ID NO: 35438 - DNA, 20 bp, Artificial Sequence
  MKO10035438_A_Oip5
  gRNA
ctgtactctaccttgcttgt

SEQ ID NO: 35439 - DNA, 20 bp, Artificial Sequence
  MKO10035439_A_Oip5
  gRNA
atattctacccatgctgcta

SEQ ID NO: 35440 - DNA, 20 bp, Artificial Sequence
  MKO10035440_A_Oit1
  gRNA
ctgcccacgttgtttcgcac

SEQ ID NO: 35441 - DNA, 20 bp, Artificial Sequence
  MKO10035441_A_Oit1
  gRNA
aaacaattcgtctgccacgc

SEQ ID NO: 35442 - DNA, 20 bp, Artificial Sequence
  MKO10035442_A_Oit1
  gRNA
gagtccagtgcgaaacaacg

SEQ ID NO: 35443 - DNA, 20 bp, Artificial Sequence
  MKO10035443_A_Oit3
  gRNA
ccgatacacgtagtagcctc

SEQ ID NO: 35444 - DNA, 20 bp, Artificial Sequence
  MKO10035444_A_Oit3
  gRNA
gtggtatcgcttcacgggga

SEQ ID NO: 35445 - DNA, 20 bp, Artificial Sequence
  MKO10035445_A_Oit3
  gRNA
tcccgtcgctcctgagcacg

SEQ ID NO: 35446 - DNA, 20 bp, Artificial Sequence
  MKO10035446_A_Ola1
  gRNA
cgtgaattatctctatgtct

SEQ ID NO: 35447 - DNA, 20 bp, Artificial Sequence
  MKO10035447_A_Ola1
  gRNA
gatgatatcacgcatgttga

SEQ ID NO: 35448 - DNA, 20 bp, Artificial Sequence
  MKO10035448_A_Ola1
  gRNA
agaaagtcgaacctctcatc

SEQ ID NO: 35449 - DNA, 20 bp, Artificial Sequence
  MKO10035449_A_Olah
  gRNA
caagcatctcatcgaagacc

SEQ ID NO: 35450 - DNA, 20 bp, Artificial Sequence
  MKO10035450_A_Olah
  gRNA
tattactgcactgcacctaa

SEQ ID NO: 35451 - DNA, 20 bp, Artificial Sequence
  MKO10035451_A_Olah
  gRNA
tgacatctaccagatagctg

SEQ ID NO: 35452 - DNA, 20 bp, Artificial Sequence
  MKO10035452_A_Olfm1
  gRNA
cccgcgaacacatggtctgc

SEQ ID NO: 35453 - DNA, 20 bp, Artificial Sequence
  MKO10035453_A_Olfm1
  gRNA
cgccgctggcggccgaaagc

SEQ ID NO: 35454 - DNA, 20 bp, Artificial Sequence
  MKO10035454_A_Olfm1
  gRNA
ggtattgaggcccaccagcg

SEQ ID NO: 35455 - DNA, 20 bp, Artificial Sequence
  MKO10035455_A_Olfm2
  gRNA
ttgcaagtcctcgtacccgt

SEQ ID NO: 35456 - DNA, 20 bp, Artificial Sequence
  MKO10035456_A_Olfm2
  gRNA
aatgggtgcctacgggtacg

SEQ ID NO: 35457 - DNA, 20 bp, Artificial Sequence
  MKO10035457_A_Olfm2
  gRNA
gcagctttatacgtcagccc

SEQ ID NO: 35458 - DNA, 20 bp, Artificial Sequence
  MKO10035458_A_Olfm3
  gRNA
gtacaaatgcatcgcccatc

SEQ ID NO: 35459 - DNA, 20 bp, Artificial Sequence
  MKO10035459_A_Olfm3
  gRNA
atcttcaatctgccgaaact

SEQ ID NO: 35460 - DNA, 20 bp, Artificial Sequence
  MKO10035460_A_Olfm3
  gRNA
ttcggcagattgaagatgat

SEQ ID NO: 35461 - DNA, 20 bp, Artificial Sequence
  MKO10035461_A_Olfm4
  gRNA
tagcattcgccgccagatct

SEQ ID NO: 35462 - DNA, 20 bp, Artificial Sequence
  MKO10035462_A_Olfm4
  gRNA
gaacctgacggtccgagtag

SEQ ID NO: 35463 - DNA, 20 bp, Artificial Sequence
  MKO10035463_A_Olfm4
  gRNA
tattattgacatgctcgaag

SEQ ID NO: 35464 - DNA, 20 bp, Artificial Sequence
  MKO10035464_A_Olfml1
  gRNA
gcaggtagtcgatctcctgc

SEQ ID NO: 35465 - DNA, 20 bp, Artificial Sequence
  MKO10035465_A_Olfml1
  gRNA
tgcaaacttgcgggcattca

SEQ ID NO: 35466 - DNA, 20 bp, Artificial Sequence
  MKO10035466_A_Olfml1
  gRNA
ctggtagatgtagtgtacca

SEQ ID NO: 35467 - DNA, 20 bp, Artificial Sequence
  MKO10035467_A_Olfml2a
  gRNA
gcatgcagccgggtgcgaag

SEQ ID NO: 35468 - DNA, 20 bp, Artificial Sequence
  MKO10035468_A_Olfml2a
  gRNA
gtgctcgcccacttcgcacc

SEQ ID NO: 35469 - DNA, 20 bp, Artificial Sequence
  MKO10035469_A_Olfml2a
  gRNA
ggcctcccagatgaatacgc

SEQ ID NO: 35470 - DNA, 20 bp, Artificial Sequence
  MKO10035470_A_Olfml2b
  gRNA
cactaaactcgtggggcgag

SEQ ID NO: 35471 - DNA, 20 bp, Artificial Sequence
  MKO10035471_A_Olfml2b
  gRNA
cactcgccccacgagtttag

SEQ ID NO: 35472 - DNA, 20 bp, Artificial Sequence
  MKO10035472_A_Olfml2b
  gRNA
cgaacggagctgaacaagcg

SEQ ID NO: 35473 - DNA, 20 bp, Artificial Sequence
  MKO10035473_A_Olfml3
  gRNA
gctcacgggggttatagcga

SEQ ID NO: 35474 - DNA, 20 bp, Artificial Sequence
  MKO10035474_A_Olfml3
  gRNA
gcatgggcaccatatcggcg

SEQ ID NO: 35475 - DNA, 20 bp, Artificial Sequence
  MKO10035475_A_Olfml3
  gRNA
acgccgactagctgccttag

SEQ ID NO: 35476 - DNA, 20 bp, Artificial Sequence
  MKO10035476_A_Olfr1000
  gRNA
tgacacgcagatgattaagt

SEQ ID NO: 35477 - DNA, 20 bp, Artificial Sequence
  MKO10035477_A_Olfr1000
  gRNA
tgactgtcgctatcctgtat

SEQ ID NO: 35478 - DNA, 20 bp, Artificial Sequence
  MKO10035478_A_Olfr1000
  gRNA
gttcactggtctgataattc

SEQ ID NO: 35479 - DNA, 20 bp, Artificial Sequence
  MKO10035479_A_Olfr1002
  gRNA
cataggccttataagcactg

SEQ ID NO: 35480 - DNA, 20 bp, Artificial Sequence
  MKO10035480_A_Olfr1002
  gRNA
cttataaggcctatgctgta

SEQ ID NO: 35481 - DNA, 20 bp, Artificial Sequence
  MKO10035481_A_Olfr1002
  gRNA
gaataaatgcagaagtagta

SEQ ID NO: 35482 - DNA, 20 bp, Artificial Sequence
  MKO10035482_A_Olfr1006
  gRNA
ctagtagctgggtgttacat

SEQ ID NO: 35483 - DNA, 20 bp, Artificial Sequence
  MKO10035483_A_Olfr1006
  gRNA
atagacacgggtatctgtac

SEQ ID NO: 35484 - DNA, 20 bp, Artificial Sequence
  MKO10035484_A_Olfr1006
  gRNA
tatgcagtctagaatcaatt

SEQ ID NO: 35485 - DNA, 20 bp, Artificial Sequence
  MKO10035485_A_Olfr1008
  gRNA
gaatcaggacatataatcca

SEQ ID NO: 35486 - DNA, 20 bp, Artificial Sequence
  MKO10035486_A_Olfr1008
  gRNA
atatctctacagcaccttcc

SEQ ID NO: 35487 - DNA, 20 bp, Artificial Sequence
  MKO10035487_A_Olfr1008
  gRNA
aggtaaaaaatgctttcaac

SEQ ID NO: 35488 - DNA, 20 bp, Artificial Sequence
  MKO10035488_A_Olfr1009
  gRNA
catacctaagtttcccgtca

SEQ ID NO: 35489 - DNA, 20 bp, Artificial Sequence
  MKO10035489_A_Olfr1009
  gRNA
catttgcttctcgtcagtcg

SEQ ID NO: 35490 - DNA, 20 bp, Artificial Sequence
  MKO10035490_A_Olfr1009
  gRNA
ccctcatatgtgctgacata

SEQ ID NO: 35491 - DNA, 20 bp, Artificial Sequence
  MKO10035491_A_Olfr100
  gRNA
tgctgcaagaacgagtcttg

SEQ ID NO: 35492 - DNA, 20 bp, Artificial Sequence
  MKO10035492_A_Olfr100
  gRNA
ccacaggccagatccaacaa

SEQ ID NO: 35493 - DNA, 20 bp, Artificial Sequence
  MKO10035493_A_Olfr100
  gRNA
attaaaccctattctctttg

SEQ ID NO: 35494 - DNA, 20 bp, Artificial Sequence
  MKO10035494_A_Olfr1010
  gRNA
acaagactggcacgtaacct

SEQ ID NO: 35495 - DNA, 20 bp, Artificial Sequence
  MKO10035495_A_Olfr1010
  gRNA
gcacaagttatgccctggag

SEQ ID NO: 35496 - DNA, 20 bp, Artificial Sequence
  MKO10035496_A_Olfr1010
  gRNA
atttacatcattagtctgct

SEQ ID NO: 35497 - DNA, 20 bp, Artificial Sequence
  MKO10035497_A_Olfr1012
  gRNA
atgctcaagctatgtcacga

SEQ ID NO: 35498 - DNA, 20 bp, Artificial Sequence
  MKO10035498_A_Olfr1012
  gRNA
attgacaaatcctcctgtat

SEQ ID NO: 35499 - DNA, 20 bp, Artificial Sequence
  MKO10035499_A_Olfr1012
  gRNA
ttggttgtatattcctatac

SEQ ID NO: 35500 - DNA, 20 bp, Artificial Sequence
  MKO10035500_A_Olfr1013
  gRNA
tgtgtacacattgactttga

SEQ ID NO: 35501 - DNA, 20 bp, Artificial Sequence
  MKO10035501_A_Olfr1013
  gRNA
tgttagtgagttcatcatgt

SEQ ID NO: 35502 - DNA, 20 bp, Artificial Sequence
  MKO10035502_A_Olfr1013
  gRNA
tgtagacagaagacaatcca

SEQ ID NO: 35503 - DNA, 20 bp, Artificial Sequence
  MKO10035503_A_Olfr1014
  gRNA
tgccacatgagagctttacc

SEQ ID NO: 35504 - DNA, 20 bp, Artificial Sequence
  MKO10035504_A_Olfr1014
  gRNA
cattgcagatcaacacaatg

SEQ ID NO: 35505 - DNA, 20 bp, Artificial Sequence
  MKO10035505_A_Olfr1014
  gRNA
gtatactgagtgttatctgt

SEQ ID NO: 35506 - DNA, 20 bp, Artificial Sequence
  MKO10035506_A_Olfr1015
  gRNA
agcgtgtcgatcatatgcca

SEQ ID NO: 35507 - DNA, 20 bp, Artificial Sequence
  MKO10035507_A_Olfr1015
  gRNA
gacagtgaagcccaccatac

SEQ ID NO: 35508 - DNA, 20 bp, Artificial Sequence
  MKO10035508_A_Olfr1015
  gRNA
agaggataagcgtatttctt

SEQ ID NO: 35509 - DNA, 20 bp, Artificial Sequence
  MKO10035509_A_Olfr1016
  gRNA
agaaggccttcatgcgaccc

SEQ ID NO: 35510 - DNA, 20 bp, Artificial Sequence
  MKO10035510_A_Olfr1016
  gRNA
cttgagaatccgttccaccc

SEQ ID NO: 35511 - DNA, 20 bp, Artificial Sequence
  MKO10035511_A_Olfr1016
  gRNA
gttcttcttctctgcgggac

SEQ ID NO: 35512 - DNA, 20 bp, Artificial Sequence
  MKO10035512_A_Olfr1018
  gRNA
aagcatctgcggaacattag

SEQ ID NO: 35513 - DNA, 20 bp, Artificial Sequence
  MKO10035513_A_Olfr1018
  gRNA
atctgatcccaaggtacagc

SEQ ID NO: 35514 - DNA, 20 bp, Artificial Sequence
  MKO10035514_A_Olfr1018
  gRNA
ccaaaacacctgtatccaac

SEQ ID NO: 35515 - DNA, 20 bp, Artificial Sequence
  MKO10035515_A_Olfr1019
  gRNA
tatgcgccactaaactcact

SEQ ID NO: 35516 - DNA, 20 bp, Artificial Sequence
  MKO10035516_A_Olfr1019
  gRNA
gccgctttcaagaaactgat

SEQ ID NO: 35517 - DNA, 20 bp, Artificial Sequence
  MKO10035517_A_Olfr1019
  gRNA
atcagaattcgatcagctga

SEQ ID NO: 35518 - DNA, 20 bp, Artificial Sequence
  MKO10035518_A_Olfr101
  gRNA
tggcactgttacagtagaat

SEQ ID NO: 35519 - DNA, 20 bp, Artificial Sequence
  MKO10035519_A_Olfr101
  gRNA
ctgtgatattaagccattgc

SEQ ID NO: 35520 - DNA, 20 bp, Artificial Sequence
  MKO10035520_A_Olfr101
  gRNA
ccacaggccagatccagcaa

SEQ ID NO: 35521 - DNA, 20 bp, Artificial Sequence
  MKO10035521_A_Olfr1020
  gRNA
aagaggacaccttgcaagtc

SEQ ID NO: 35522 - DNA, 20 bp, Artificial Sequence
  MKO10035522_A_Olfr1020
  gRNA
tcagacaatccagacttgca

SEQ ID NO: 35523 - DNA, 20 bp, Artificial Sequence
  MKO10035523_A_Olfr1020
  gRNA
ccctacctctagctactcta

SEQ ID NO: 35524 - DNA, 20 bp, Artificial Sequence
  MKO10035524_A_Olfr1022
  gRNA
tgatggctgcaaaaatgtac

SEQ ID NO: 35525 - DNA, 20 bp, Artificial Sequence
  MKO10035525_A_Olfr1022
  gRNA
tgtgtatgattgtgctgatc

SEQ ID NO: 35526 - DNA, 20 bp, Artificial Sequence
  MKO10035526_A_Olfr1022
  gRNA
catcactgcagtgttgttta

SEQ ID NO: 35527 - DNA, 20 bp, Artificial Sequence
  MKO10035527_A_Olfr1023
  gRNA
gagcaagctagcatgatcag

SEQ ID NO: 35528 - DNA, 20 bp, Artificial Sequence
  MKO10035528_A_Olfr1023
  gRNA
tgttcatgattgtgctgatc

SEQ ID NO: 35529 - DNA, 20 bp, Artificial Sequence
  MKO10035529_A_Olfr1023
  gRNA
tttgccttcccttagctgaa

SEQ ID NO: 35530 - DNA, 20 bp, Artificial Sequence
  MKO10035530_A_Olfr1024
  gRNA
ttccagtgaagggcaacgaa

SEQ ID NO: 35531 - DNA, 20 bp, Artificial Sequence
  MKO10035531_A_Olfr1024
  gRNA
ttggcatgatcttattaatc

SEQ ID NO: 35532 - DNA, 20 bp, Artificial Sequence
  MKO10035532_A_Olfr1024
  gRNA
agcctttcgttgcccttcac

SEQ ID NO: 35533 - DNA, 20 bp, Artificial Sequence
  MKO10035533_A_Olfr1026
  gRNA
ctgctcgatctgtcaatcct

SEQ ID NO: 35534 - DNA, 20 bp, Artificial Sequence
  MKO10035534_A_Olfr1026
  gRNA
aaagccgtaaatgtactgtg

SEQ ID NO: 35535 - DNA, 20 bp, Artificial Sequence
  MKO10035535_A_Olfr1026
  gRNA
ctactatatgcttgcagtta

SEQ ID NO: 35536 - DNA, 20 bp, Artificial Sequence
  MKO10035536_A_Olfr1028
  gRNA
gtttatattgtcaccgtctt

SEQ ID NO: 35537 - DNA, 20 bp, Artificial Sequence
  MKO10035537_A_Olfr1028
  gRNA
catggtggctctgattagac

SEQ ID NO: 35538 - DNA, 20 bp, Artificial Sequence
  MKO10035538_A_Olfr1028
  gRNA
aaagctcgctgatattaaca

SEQ ID NO: 35539 - DNA, 20 bp, Artificial Sequence
  MKO10035539_A_Olfr1029
  gRNA
atttaccttgtcaccgtctt

SEQ ID NO: 35540 - DNA, 20 bp, Artificial Sequence
  MKO10035540_A_Olfr1029
  gRNA
atcagctgaaggaagacgca

SEQ ID NO: 35541 - DNA, 20 bp, Artificial Sequence
  MKO10035541_A_Olfr1029
  gRNA
cttgatggctctgattagac

SEQ ID NO: 35542 - DNA, 20 bp, Artificial Sequence
  MKO10035542_A_Olfr102
  gRNA
tgctgcaagaacgagtcttg

SEQ ID NO: 35543 - DNA, 20 bp, Artificial Sequence
  MKO10035543_A_Olfr102
  gRNA
ccacaggccagatccaacaa

SEQ ID NO: 35544 - DNA, 20 bp, Artificial Sequence
  MKO10035544_A_Olfr102
  gRNA
attaaaccctattctctttg

SEQ ID NO: 35545 - DNA, 20 bp, Artificial Sequence
  MKO10035545_A_Olfr1030
  gRNA
cagtgatcagatagatcacc

SEQ ID NO: 35546 - DNA, 20 bp, Artificial Sequence
  MKO10035546_A_Olfr1030
  gRNA
tacagtagcaagatgtccaa

SEQ ID NO: 35547 - DNA, 20 bp, Artificial Sequence
  MKO10035547_A_Olfr1030
  gRNA
ctgctccactgatttatctg

SEQ ID NO: 35548 - DNA, 20 bp, Artificial Sequence
  MKO10035548_A_Olfr1031
  gRNA
tgatccaccattgattaagc

SEQ ID NO: 35549 - DNA, 20 bp, Artificial Sequence
  MKO10035549_A_Olfr1031
  gRNA
agccaggttgtaagtccaca

SEQ ID NO: 35550 - DNA, 20 bp, Artificial Sequence
  MKO10035550_A_Olfr1031
  gRNA
acctccatgcttgttgtagc

SEQ ID NO: 35551 - DNA, 20 bp, Artificial Sequence
  MKO10035551_A_Olfr1032
  gRNA
tatacaatgattatacttgc

SEQ ID NO: 35552 - DNA, 20 bp, Artificial Sequence
  MKO10035552_A_Olfr1032
  gRNA
aacttgcagttcctttctgc

SEQ ID NO: 35553 - DNA, 20 bp, Artificial Sequence
  MKO10035553_A_Olfr1032
  gRNA
agatccaccccttatcaaga

SEQ ID NO: 35554 - DNA, 20 bp, Artificial Sequence
  MKO10035554_A_Olfr1033
  gRNA
agatccacccctcatcaaga

SEQ ID NO: 35555 - DNA, 20 bp, Artificial Sequence
  MKO10035555_A_Olfr1033
  gRNA
tatacaatgctatttcttgc

SEQ ID NO: 35556 - DNA, 20 bp, Artificial Sequence
  MKO10035556_A_Olfr1033
  gRNA
ggagatgatgacaacaatca

SEQ ID NO: 35557 - DNA, 20 bp, Artificial Sequence
  MKO10035557_A_Olfr1034
  gRNA
gcacgtggaggtctatattc

SEQ ID NO: 35558 - DNA, 20 bp, Artificial Sequence
  MKO10035558_A_Olfr1034
  gRNA
ttacgcatgcactcagctga

SEQ ID NO: 35559 - DNA, 20 bp, Artificial Sequence
  MKO10035559_A_Olfr1034
  gRNA
cttcacgtattccttgtcag

SEQ ID NO: 35560 - DNA, 20 bp, Artificial Sequence
  MKO10035560_A_Olfr1036
  gRNA
tcatattcatgtatctgaga

SEQ ID NO: 35561 - DNA, 20 bp, Artificial Sequence
  MKO10035561_A_Olfr1036
  gRNA
agtctgcaagatagttgcca

SEQ ID NO: 35562 - DNA, 20 bp, Artificial Sequence
  MKO10035562_A_Olfr1036
  gRNA
gatggccttcgatcgctacg

SEQ ID NO: 35563 - DNA, 20 bp, Artificial Sequence
  MKO10035563_A_Olfr1037
  gRNA
tacaatcgtgtagaatactg

SEQ ID NO: 35564 - DNA, 20 bp, Artificial Sequence
  MKO10035564_A_Olfr1037
  gRNA
gatgatttcactaatcagga

SEQ ID NO: 35565 - DNA, 20 bp, Artificial Sequence
  MKO10035565_A_Olfr1037
  gRNA
ttgtaatcctcttctgtata

SEQ ID NO: 35566 - DNA, 20 bp, Artificial Sequence
  MKO10035566_A_Olfr1038-ps
  gRNA
acctttcgcttgacatattg

SEQ ID NO: 35567 - DNA, 20 bp, Artificial Sequence
  MKO10035567_A_Olfr1038-ps
  gRNA
tccacaatatgtcaagcgaa

SEQ ID NO: 35568 - DNA, 20 bp, Artificial Sequence
  MKO10035568_A_Olfr1038-ps
  gRNA
tacttaaataaatcaacata

SEQ ID NO: 35569 - DNA, 20 bp, Artificial Sequence
  MKO10035569_A_Olfr1039
  gRNA
tgactactactcagactttc

SEQ ID NO: 35570 - DNA, 20 bp, Artificial Sequence
  MKO10035570_A_Olfr1039
  gRNA
tgaactgttaccttcagcca

SEQ ID NO: 35571 - DNA, 20 bp, Artificial Sequence
  MKO10035571_A_Olfr1039
  gRNA
agaaagtttataattgtgtt

SEQ ID NO: 35572 - DNA, 20 bp, Artificial Sequence
  MKO10035572_A_Olfr103
  gRNA
acctatatccgtcccacctc

SEQ ID NO: 35573 - DNA, 20 bp, Artificial Sequence
  MKO10035573_A_Olfr103
  gRNA
tgtaacagtgccaaaaatgc

SEQ ID NO: 35574 - DNA, 20 bp, Artificial Sequence
  MKO10035574_A_Olfr103
  gRNA
tgaggcaatggtacctgtaa

SEQ ID NO: 35575 - DNA, 20 bp, Artificial Sequence
  MKO10035575_A_Olfr1040
  gRNA
gtacatcagttcatcctcgt

SEQ ID NO: 35576 - DNA, 20 bp, Artificial Sequence
  MKO10035576_A_Olfr1040
  gRNA
cttcaacagaacgaattctc

SEQ ID NO: 35577 - DNA, 20 bp, Artificial Sequence
  MKO10035577_A_Olfr1040
  gRNA
ctgagaattcgttctgttga

SEQ ID NO: 35578 - DNA, 20 bp, Artificial Sequence
  MKO10035578_A_Olfr1042
  gRNA
tctatgcggtccgcatgcct

SEQ ID NO: 35579 - DNA, 20 bp, Artificial Sequence
  MKO10035579_A_Olfr1042
  gRNA
catctacctaactagtgttg

SEQ ID NO: 35580 - DNA, 20 bp, Artificial Sequence
  MKO10035580_A_Olfr1042
  gRNA
cattacccacaacactagtt

SEQ ID NO: 35581 - DNA, 20 bp, Artificial Sequence
  MKO10035581_A_Olfr1043
  gRNA
ctgtgtcacgccaaatgcgc

SEQ ID NO: 35582 - DNA, 20 bp, Artificial Sequence
  MKO10035582_A_Olfr1043
  gRNA
gaattgcagacacgatgaat

SEQ ID NO: 35583 - DNA, 20 bp, Artificial Sequence
  MKO10035583_A_Olfr1043
  gRNA
aaaaaattcaccagcgcatt

SEQ ID NO: 35584 - DNA, 20 bp, Artificial Sequence
  MKO10035584_A_Olfr1044
  gRNA
aatttcatgacgataacatt

SEQ ID NO: 35585 - DNA, 20 bp, Artificial Sequence
  MKO10035585_A_Olfr1044
  gRNA
tcagctcctcgcgatctgtg

SEQ ID NO: 35586 - DNA, 20 bp, Artificial Sequence
  MKO10035586_A_Olfr1044
  gRNA
attaggaccatatagagtag

SEQ ID NO: 35587 - DNA, 20 bp, Artificial Sequence
  MKO10035587_A_Olfr1045
  gRNA
acatcgtgttgtctatccta

SEQ ID NO: 35588 - DNA, 20 bp, Artificial Sequence
  MKO10035588_A_Olfr1045
  gRNA
atgtgagcgacaccaacaga

SEQ ID NO: 35589 - DNA, 20 bp, Artificial Sequence
  MKO10035589_A_Olfr1045
  gRNA
ctacgaatgtgccactcagc

SEQ ID NO: 35590 - DNA, 20 bp, Artificial Sequence
  MKO10035590_A_Olfr1046
  gRNA
cagctctcatctgacagtag

SEQ ID NO: 35591 - DNA, 20 bp, Artificial Sequence
  MKO10035591_A_Olfr1046
  gRNA
actgatgggcaatctgggca

SEQ ID NO: 35592 - DNA, 20 bp, Artificial Sequence
  MKO10035592_A_Olfr1046
  gRNA
tgtcagatgagagctgcacg

SEQ ID NO: 35593 - DNA, 20 bp, Artificial Sequence
  MKO10035593_A_Olfr1047
  gRNA
tcttggttattctacatccg

SEQ ID NO: 35594 - DNA, 20 bp, Artificial Sequence
  MKO10035594_A_Olfr1047
  gRNA
agaagacaatgactactgtc

SEQ ID NO: 35595 - DNA, 20 bp, Artificial Sequence
  MKO10035595_A_Olfr1047
  gRNA
ttgtagcttggagtccactg

SEQ ID NO: 35596 - DNA, 20 bp, Artificial Sequence
  MKO10035596_A_Olfr1048
  gRNA
ctatgcttgtgccgtgcaga

SEQ ID NO: 35597 - DNA, 20 bp, Artificial Sequence
  MKO10035597_A_Olfr1048
  gRNA
atctacggagttgccatgat

SEQ ID NO: 35598 - DNA, 20 bp, Artificial Sequence
  MKO10035598_A_Olfr1048
  gRNA
gcagagacgctgtcatgttc

SEQ ID NO: 35599 - DNA, 20 bp, Artificial Sequence
  MKO10035599_A_Olfr1049
  gRNA
agacgctgtcaagtgcttat

SEQ ID NO: 35600 - DNA, 20 bp, Artificial Sequence
  MKO10035600_A_Olfr1049
  gRNA
cactatctatgcaatcaccg

SEQ ID NO: 35601 - DNA, 20 bp, Artificial Sequence
  MKO10035601_A_Olfr1049
  gRNA
tgcagaacgcatttgaaata

SEQ ID NO: 35602 - DNA, 20 bp, Artificial Sequence
  MKO10035602_A_Olfr1051
  gRNA
agacgctgtcaagtgctcat

SEQ ID NO: 35603 - DNA, 20 bp, Artificial Sequence
  MKO10035603_A_Olfr1051
  gRNA
tgctatctatgcaatcaccg

SEQ ID NO: 35604 - DNA, 20 bp, Artificial Sequence
  MKO10035604_A_Olfr1051
  gRNA
tgcagaacgcattcgaaata

SEQ ID NO: 35605 - DNA, 20 bp, Artificial Sequence
  MKO10035605_A_Olfr1052
  gRNA
ggtgtcggtgttctatacac

SEQ ID NO: 35606 - DNA, 20 bp, Artificial Sequence
  MKO10035606_A_Olfr1052
  gRNA
ggttaacaactgccacataa

SEQ ID NO: 35607 - DNA, 20 bp, Artificial Sequence
  MKO10035607_A_Olfr1052
  gRNA
agctgagcgtattctcaaaa

SEQ ID NO: 35608 - DNA, 20 bp, Artificial Sequence
  MKO10035608_A_Olfr1053
  gRNA
gtacctctacagcaccgtcc

SEQ ID NO: 35609 - DNA, 20 bp, Artificial Sequence
  MKO10035609_A_Olfr1053
  gRNA
gagcctggacggtgctgtag

SEQ ID NO: 35610 - DNA, 20 bp, Artificial Sequence
  MKO10035610_A_Olfr1053
  gRNA
accctttagtaccctgtaga

SEQ ID NO: 35611 - DNA, 20 bp, Artificial Sequence
  MKO10035611_A_Olfr1054
  gRNA
ttgcaatcgggagtccacca

SEQ ID NO: 35612 - DNA, 20 bp, Artificial Sequence
  MKO10035612_A_Olfr1054
  gRNA
atgagaaacaagccgaacaa

SEQ ID NO: 35613 - DNA, 20 bp, Artificial Sequence
  MKO10035613_A_Olfr1054
  gRNA
taatttggtttcatctctcg

SEQ ID NO: 35614 - DNA, 20 bp, Artificial Sequence
  MKO10035614_A_Olfr1055
  gRNA
tgcgacttgaccagtctcaa

SEQ ID NO: 35615 - DNA, 20 bp, Artificial Sequence
  MKO10035615_A_Olfr1055
  gRNA
cgcatctttgttctatacac

SEQ ID NO: 35616 - DNA, 20 bp, Artificial Sequence
  MKO10035616_A_Olfr1055
  gRNA
cagagatcatgtatataatg

SEQ ID NO: 35617 - DNA, 20 bp, Artificial Sequence
  MKO10035617_A_Olfr1056
  gRNA
ttgcaacctctcatccaact

SEQ ID NO: 35618 - DNA, 20 bp, Artificial Sequence
  MKO10035618_A_Olfr1056
  gRNA
cgtgtcctatacctttatcc

SEQ ID NO: 35619 - DNA, 20 bp, Artificial Sequence
  MKO10035619_A_Olfr1056
  gRNA
aaaataccatcccctataat

SEQ ID NO: 35620 - DNA, 20 bp, Artificial Sequence
  MKO10035620_A_Olfr1057
  gRNA
ataagattgaatcgtttgca

SEQ ID NO: 35621 - DNA, 20 bp, Artificial Sequence
  MKO10035621_A_Olfr1057
  gRNA
tgccaaagttgatgatcgcc

SEQ ID NO: 35622 - DNA, 20 bp, Artificial Sequence
  MKO10035622_A_Olfr1057
  gRNA
tgtagcagagatctttatgc

SEQ ID NO: 35623 - DNA, 20 bp, Artificial Sequence
  MKO10035623_A_Olfr1058
  gRNA
gagatatcagatagattatg

SEQ ID NO: 35624 - DNA, 20 bp, Artificial Sequence
  MKO10035624_A_Olfr1058
  gRNA
ttgtagtctggagtccacca

SEQ ID NO: 35625 - DNA, 20 bp, Artificial Sequence
  MKO10035625_A_Olfr1058
  gRNA
cacctctctactacagacct

SEQ ID NO: 35626 - DNA, 20 bp, Artificial Sequence
  MKO10035626_A_Olfr1061
  gRNA
gcccaagttatcgaccagtg

SEQ ID NO: 35627 - DNA, 20 bp, Artificial Sequence
  MKO10035627_A_Olfr1061
  gRNA
aatcactttaccagtgtcaa

SEQ ID NO: 35628 - DNA, 20 bp, Artificial Sequence
  MKO10035628_A_Olfr1061
  gRNA
gacaattatactgtagagat

SEQ ID NO: 35629 - DNA, 20 bp, Artificial Sequence
  MKO10035629_A_Olfr1062
  gRNA
ctatgaatgtgccacgcagc

SEQ ID NO: 35630 - DNA, 20 bp, Artificial Sequence
  MKO10035630_A_Olfr1062
  gRNA
gttcaacattggtattatta

SEQ ID NO: 35631 - DNA, 20 bp, Artificial Sequence
  MKO10035631_A_Olfr1062
  gRNA
ggtatcagagatcttcatgc

SEQ ID NO: 35632 - DNA, 20 bp, Artificial Sequence
  MKO10035632_A_Olfr1065
  gRNA
tcatcctaagtatagctata

SEQ ID NO: 35633 - DNA, 20 bp, Artificial Sequence
  MKO10035633_A_Olfr1065
  gRNA
gagctgcaatcctcattgtt

SEQ ID NO: 35634 - DNA, 20 bp, Artificial Sequence
  MKO10035634_A_Olfr1065
  gRNA
gggcatgattgtccttacaa

SEQ ID NO: 35635 - DNA, 20 bp, Artificial Sequence
  MKO10035635_A_Olfr1066
  gRNA
caccttgctactactgatct

SEQ ID NO: 35636 - DNA, 20 bp, Artificial Sequence
  MKO10035636_A_Olfr1066
  gRNA
gcccaagttgccaaacagtg

SEQ ID NO: 35637 - DNA, 20 bp, Artificial Sequence
  MKO10035637_A_Olfr1066
  gRNA
agtccctttaccagtgtcaa

SEQ ID NO: 35638 - DNA, 20 bp, Artificial Sequence
  MKO10035638_A_Olfr1076
  gRNA
agccaccttgtcagtgttta

SEQ ID NO: 35639 - DNA, 20 bp, Artificial Sequence
  MKO10035639_A_Olfr1076
  gRNA
agaaatgactgataatattg

SEQ ID NO: 35640 - DNA, 20 bp, Artificial Sequence
  MKO10035640_A_Olfr1076
  gRNA
tgtctgcaatgtcttatgac

SEQ ID NO: 35641 - DNA, 20 bp, Artificial Sequence
  MKO10035641_A_Olfr1079
  gRNA
ggcggtcagtgatgcccctg

SEQ ID NO: 35642 - DNA, 20 bp, Artificial Sequence
  MKO10035642_A_Olfr1079
  gRNA
cacctagctatcacagatct

SEQ ID NO: 35643 - DNA, 20 bp, Artificial Sequence
  MKO10035643_A_Olfr1079
  gRNA
tagtgactgaatttatcctc

SEQ ID NO: 35644 - DNA, 20 bp, Artificial Sequence
  MKO10035644_A_Olfr107
  gRNA
agatgcgaagttcttgccag

SEQ ID NO: 35645 - DNA, 20 bp, Artificial Sequence
  MKO10035645_A_Olfr107
  gRNA
cctgaaacttgtccatgttc

SEQ ID NO: 35646 - DNA, 20 bp, Artificial Sequence
  MKO10035646_A_Olfr107
  gRNA
agctattccccatgacccac

SEQ ID NO: 35647 - DNA, 20 bp, Artificial Sequence
  MKO10035647_A_Olfr1080
  gRNA
ctagaacccaacatacttta

SEQ ID NO: 35648 - DNA, 20 bp, Artificial Sequence
  MKO10035648_A_Olfr1080
  gRNA
agaatactgtaactactgtc

SEQ ID NO: 35649 - DNA, 20 bp, Artificial Sequence
  MKO10035649_A_Olfr1080
  gRNA
acagtagttacagtattcta

SEQ ID NO: 35650 - DNA, 20 bp, Artificial Sequence
  MKO10035650_A_Olfr1082
  gRNA
cttatagttatgatctttgc

SEQ ID NO: 35651 - DNA, 20 bp, Artificial Sequence
  MKO10035651_A_Olfr1082
  gRNA
ctttgtttattcgacaactg

SEQ ID NO: 35652 - DNA, 20 bp, Artificial Sequence
  MKO10035652_A_Olfr1082
  gRNA
aagatgctctacaaagaaca

SEQ ID NO: 35653 - DNA, 20 bp, Artificial Sequence
  MKO10035653_A_Olfr1084
  gRNA
aggacataagcacgacgaca

SEQ ID NO: 35654 - DNA, 20 bp, Artificial Sequence
  MKO10035654_A_Olfr1084
  gRNA
tcaattgaatgactagatac

SEQ ID NO: 35655 - DNA, 20 bp, Artificial Sequence
  MKO10035655_A_Olfr1084
  gRNA
cccaagattgccaaccactg

SEQ ID NO: 35656 - DNA, 20 bp, Artificial Sequence
  MKO10035656_A_Olfr1085
  gRNA
atctgctgcaggcagatgca

SEQ ID NO: 35657 - DNA, 20 bp, Artificial Sequence
  MKO10035657_A_Olfr1085
  gRNA
catcatcattattactaatg

SEQ ID NO: 35658 - DNA, 20 bp, Artificial Sequence
  MKO10035658_A_Olfr1085
  gRNA
aatgtcttatgaccgttacg

SEQ ID NO: 35659 - DNA, 20 bp, Artificial Sequence
  MKO10035659_A_Olfr1086
  gRNA
ggtgataacagtagaatagc

SEQ ID NO: 35660 - DNA, 20 bp, Artificial Sequence
  MKO10035660_A_Olfr1086
  gRNA
tgtcagaacatgaaattgcc

SEQ ID NO: 35661 - DNA, 20 bp, Artificial Sequence
  MKO10035661_A_Olfr1086
  gRNA
acaaagtcaactaccatttg

SEQ ID NO: 35662 - DNA, 20 bp, Artificial Sequence
  MKO10035662_A_Olfr1087
  gRNA
tactgagcgccctgaactac

SEQ ID NO: 35663 - DNA, 20 bp, Artificial Sequence
  MKO10035663_A_Olfr1087
  gRNA
ggtttaacatgggtataatc

SEQ ID NO: 35664 - DNA, 20 bp, Artificial Sequence
  MKO10035664_A_Olfr1087
  gRNA
acactgtcatcatgtcgcaa

SEQ ID NO: 35665 - DNA, 20 bp, Artificial Sequence
  MKO10035665_A_Olfr1089
  gRNA
cactaatcggcctgagctga

SEQ ID NO: 35666 - DNA, 20 bp, Artificial Sequence
  MKO10035666_A_Olfr1089
  gRNA
atagtaattgcttatctgta

SEQ ID NO: 35667 - DNA, 20 bp, Artificial Sequence
  MKO10035667_A_Olfr1089
  gRNA
catgatcatactcacaatag

SEQ ID NO: 35668 - DNA, 20 bp, Artificial Sequence
  MKO10035668_A_Olfr108
  gRNA
ttctgacactcacctcaatg

SEQ ID NO: 35669 - DNA, 20 bp, Artificial Sequence
  MKO10035669_A_Olfr108
  gRNA
aagaagtgctgccacttctc

SEQ ID NO: 35670 - DNA, 20 bp, Artificial Sequence
  MKO10035670_A_Olfr108
  gRNA
gtcccagcaagtaaagacct

SEQ ID NO: 35671 - DNA, 20 bp, Artificial Sequence
  MKO10035671_A_Olfr1090
  gRNA
atccaagatctgtaatagcc

SEQ ID NO: 35672 - DNA, 20 bp, Artificial Sequence
  MKO10035672_A_Olfr1090
  gRNA
tcccaaattacctaccattg

SEQ ID NO: 35673 - DNA, 20 bp, Artificial Sequence
  MKO10035673_A_Olfr1090
  gRNA
attcagcatgggtataacga

SEQ ID NO: 35674 - DNA, 20 bp, Artificial Sequence
  MKO10035674_A_Olfr1093
  gRNA
taggcctcatataagtgaaa

SEQ ID NO: 35675 - DNA, 20 bp, Artificial Sequence
  MKO10035675_A_Olfr1093
  gRNA
gtcatgatttgaagcataac

SEQ ID NO: 35676 - DNA, 20 bp, Artificial Sequence
  MKO10035676_A_Olfr1093
  gRNA
ctgtagaatagcaagcatcc

SEQ ID NO: 35677 - DNA, 20 bp, Artificial Sequence
  MKO10035677_A_Olfr1094
  gRNA
cgttgtcactccgaagatgt

SEQ ID NO: 35678 - DNA, 20 bp, Artificial Sequence
  MKO10035678_A_Olfr1094
  gRNA
gaaatgtcgatacattcacc

SEQ ID NO: 35679 - DNA, 20 bp, Artificial Sequence
  MKO10035679_A_Olfr1094
  gRNA
attcttcgtacagtgtaacc

SEQ ID NO: 35680 - DNA, 20 bp, Artificial Sequence
  MKO10035680_A_Olfr1095
  gRNA
atgagtggtaaatagactcg

SEQ ID NO: 35681 - DNA, 20 bp, Artificial Sequence
  MKO10035681_A_Olfr1095
  gRNA
atcactccaaatatgttagt

SEQ ID NO: 35682 - DNA, 20 bp, Artificial Sequence
  MKO10035682_A_Olfr1095
  gRNA
cttcagctgaattcatcttc

SEQ ID NO: 35683 - DNA, 20 bp, Artificial Sequence
  MKO10035683_A_Olfr1097
  gRNA
atccaaaactccaatcatgt

SEQ ID NO: 35684 - DNA, 20 bp, Artificial Sequence
  MKO10035684_A_Olfr1097
  gRNA
tgaacctgagttcacgcttg

SEQ ID NO: 35685 - DNA, 20 bp, Artificial Sequence
  MKO10035685_A_Olfr1097
  gRNA
accagctaaaacgaatatag

SEQ ID NO: 35686 - DNA, 20 bp, Artificial Sequence
  MKO10035686_A_Olfr1098
  gRNA
atctatagctccaacgatgt

SEQ ID NO: 35687 - DNA, 20 bp, Artificial Sequence
  MKO10035687_A_Olfr1098
  gRNA
accagctaaaacgaatattg

SEQ ID NO: 35688 - DNA, 20 bp, Artificial Sequence
  MKO10035688_A_Olfr1098
  gRNA
atcactgtgtcctacatcgt

SEQ ID NO: 35689 - DNA, 20 bp, Artificial Sequence
  MKO10035689_A_Olfr1099
  gRNA
cactgtcaatatgttatgca

SEQ ID NO: 35690 - DNA, 20 bp, Artificial Sequence
  MKO10035690_A_Olfr1099
  gRNA
ttctgtagtgccctccttac

SEQ ID NO: 35691 - DNA, 20 bp, Artificial Sequence
  MKO10035691_A_Olfr1099
  gRNA
aacactcagtagctgccaaa

SEQ ID NO: 35692 - DNA, 20 bp, Artificial Sequence
  MKO10035692_A_Olfr109
  gRNA
tggccctacgcctcgagaga

SEQ ID NO: 35693 - DNA, 20 bp, Artificial Sequence
  MKO10035693_A_Olfr109
  gRNA
tatattaatgatcgtcactc

SEQ ID NO: 35694 - DNA, 20 bp, Artificial Sequence
  MKO10035694_A_Olfr109
  gRNA
cgtagggccatatcattcct

SEQ ID NO: 35695 - DNA, 20 bp, Artificial Sequence
  MKO10035695_A_Olfr10
  gRNA
gggaaccttcaatatcagtt

SEQ ID NO: 35696 - DNA, 20 bp, Artificial Sequence
  MKO10035696_A_Olfr10
  gRNA
tcctcccaaactgatattga

SEQ ID NO: 35697 - DNA, 20 bp, Artificial Sequence
  MKO10035697_A_Olfr10
  gRNA
gtcagtaactgcacgcagaa

SEQ ID NO: 35698 - DNA, 20 bp, Artificial Sequence
  MKO10035698_A_Olfr1100
  gRNA
gttcgttcacaatgaacacc

SEQ ID NO: 35699 - DNA, 20 bp, Artificial Sequence
  MKO10035699_A_Olfr1100
  gRNA
ccaagtaattcctactactc

SEQ ID NO: 35700 - DNA, 20 bp, Artificial Sequence
  MKO10035700_A_Olfr1100
  gRNA
aagggtactacagaatcttg

SEQ ID NO: 35701 - DNA, 20 bp, Artificial Sequence
  MKO10035701_A_Olfr1101
  gRNA
actggcgtgtccatatatta

SEQ ID NO: 35702 - DNA, 20 bp, Artificial Sequence
  MKO10035702_A_Olfr1101
  gRNA
gtcatgctctaatgtgtagc

SEQ ID NO: 35703 - DNA, 20 bp, Artificial Sequence
  MKO10035703_A_Olfr1101
  gRNA
ggactgatctcagtagtcat

SEQ ID NO: 35704 - DNA, 20 bp, Artificial Sequence
  MKO10035704_A_Olfr1102
  gRNA
tacgaatacaaaaactacac

SEQ ID NO: 35705 - DNA, 20 bp, Artificial Sequence
  MKO10035705_A_Olfr1102
  gRNA
gtcttgttcaagtgtgtagt

SEQ ID NO: 35706 - DNA, 20 bp, Artificial Sequence
  MKO10035706_A_Olfr1102
  gRNA
agtactaactcccaaaatgt

SEQ ID NO: 35707 - DNA, 20 bp, Artificial Sequence
  MKO10035707_A_Olfr1104
  gRNA
gatcaccaattccgtgctga

SEQ ID NO: 35708 - DNA, 20 bp, Artificial Sequence
  MKO10035708_A_Olfr1104
  gRNA
gcagtaataccatacatgat

SEQ ID NO: 35709 - DNA, 20 bp, Artificial Sequence
  MKO10035709_A_Olfr1104
  gRNA
gtgagggatgatgtgttatc

SEQ ID NO: 35710 - DNA, 20 bp, Artificial Sequence
  MKO10035710_A_Olfr1105
  gRNA
actgtcatgagtatcagagc

SEQ ID NO: 35711 - DNA, 20 bp, Artificial Sequence
  MKO10035711_A_Olfr1105
  gRNA
cacaaggtagatgcaaaacg

SEQ ID NO: 35712 - DNA, 20 bp, Artificial Sequence
  MKO10035712_A_Olfr1105
  gRNA
caaaacagcatctcgtacca

SEQ ID NO: 35713 - DNA, 20 bp, Artificial Sequence
  MKO10035713_A_Olfr1106
  gRNA
cacgatctgtcagtcccaaa

SEQ ID NO: 35714 - DNA, 20 bp, Artificial Sequence
  MKO10035714_A_Olfr1106
  gRNA
tgtgtctgcctgccgctgaa

SEQ ID NO: 35715 - DNA, 20 bp, Artificial Sequence
  MKO10035715_A_Olfr1106
  gRNA
gacagatcgtgatgaactta

SEQ ID NO: 35716 - DNA, 20 bp, Artificial Sequence
  MKO10035716_A_Olfr1107
  gRNA
ggtttgcgattgccacataa

SEQ ID NO: 35717 - DNA, 20 bp, Artificial Sequence
  MKO10035717_A_Olfr1107
  gRNA
gtcaaggaattcatgctcct

SEQ ID NO: 35718 - DNA, 20 bp, Artificial Sequence
  MKO10035718_A_Olfr1107
  gRNA
gcagtatacataactacaga

SEQ ID NO: 35719 - DNA, 20 bp, Artificial Sequence
  MKO10035719_A_Olfr1109
  gRNA
cacaataagtctactgagac

SEQ ID NO: 35720 - DNA, 20 bp, Artificial Sequence
  MKO10035720_A_Olfr1109
  gRNA
ttcacaactgtatgattccc

SEQ ID NO: 35721 - DNA, 20 bp, Artificial Sequence
  MKO10035721_A_Olfr1109
  gRNA
tctgaaaatccgctcaactg

SEQ ID NO: 35722 - DNA, 20 bp, Artificial Sequence
  MKO10035722_A_Olfr110
  gRNA
atcctgtaatttatacgcta

SEQ ID NO: 35723 - DNA, 20 bp, Artificial Sequence
  MKO10035723_A_Olfr110
  gRNA
ttagcagcttcatgctggac

SEQ ID NO: 35724 - DNA, 20 bp, Artificial Sequence
  MKO10035724_A_Olfr110
  gRNA
tctcaactcagtgttgcaca

SEQ ID NO: 35725 - DNA, 20 bp, Artificial Sequence
  MKO10035725_A_Olfr1110
  gRNA
gcctgactgaaaatcctaat

SEQ ID NO: 35726 - DNA, 20 bp, Artificial Sequence
  MKO10035726_A_Olfr1110
  gRNA
aggtgtgagtgaattcattc

SEQ ID NO: 35727 - DNA, 20 bp, Artificial Sequence
  MKO10035727_A_Olfr1110
  gRNA
tgcaaatcccttaatgtata

SEQ ID NO: 35728 - DNA, 20 bp, Artificial Sequence
  MKO10035728_A_Olfr1111
  gRNA
tagcggaagcgtgacctcac

SEQ ID NO: 35729 - DNA, 20 bp, Artificial Sequence
  MKO10035729_A_Olfr1111
  gRNA
gcaactaccttatcagtgtc

SEQ ID NO: 35730 - DNA, 20 bp, Artificial Sequence
  MKO10035730_A_Olfr1111
  gRNA
acaatattggacctacagta

SEQ ID NO: 35731 - DNA, 20 bp, Artificial Sequence
  MKO10035731_A_Olfr1112
  gRNA
ggtctatctaattattctga

SEQ ID NO: 35732 - DNA, 20 bp, Artificial Sequence
  MKO10035732_A_Olfr1112
  gRNA
ccagtcctgaccctagcttg

SEQ ID NO: 35733 - DNA, 20 bp, Artificial Sequence
  MKO10035733_A_Olfr1112
  gRNA
tagagatctgttaataacct

SEQ ID NO: 35734 - DNA, 20 bp, Artificial Sequence
  MKO10035734_A_Olfr1113
  gRNA
gtctgtcccctcaaacttat

SEQ ID NO: 35735 - DNA, 20 bp, Artificial Sequence
  MKO10035735_A_Olfr1113
  gRNA
acctaagtccaataagtttg

SEQ ID NO: 35736 - DNA, 20 bp, Artificial Sequence
  MKO10035736_A_Olfr1113
  gRNA
aatgtgtctattcctgatcc

SEQ ID NO: 35737 - DNA, 20 bp, Artificial Sequence
  MKO10035737_A_Olfr1115
  gRNA
acctaagtctaataagtatg

SEQ ID NO: 35738 - DNA, 20 bp, Artificial Sequence
  MKO10035738_A_Olfr1115
  gRNA
tcctcatacttattagactt

SEQ ID NO: 35739 - DNA, 20 bp, Artificial Sequence
  MKO10035739_A_Olfr1115
  gRNA
ccacatgccaatctgagtag

SEQ ID NO: 35740 - DNA, 20 bp, Artificial Sequence
  MKO10035740_A_Olfr1116-ps
  gRNA
actctgtgcctcccaacgta

SEQ ID NO: 35741 - DNA, 20 bp, Artificial Sequence
  MKO10035741_A_Olfr1116-ps
  gRNA
tagctgcctcctggatcagt

SEQ ID NO: 35742 - DNA, 20 bp, Artificial Sequence
  MKO10035742_A_Olfr1116-ps
  gRNA
agaacaagattacaactatc

SEQ ID NO: 35743 - DNA, 20 bp, Artificial Sequence
  MKO10035743_A_Olfr1118
  gRNA
tgctagcaagaggcactctg

SEQ ID NO: 35744 - DNA, 20 bp, Artificial Sequence
  MKO10035744_A_Olfr1118
  gRNA
tagctgcctcttggatcagt

SEQ ID NO: 35745 - DNA, 20 bp, Artificial Sequence
  MKO10035745_A_Olfr1118
  gRNA
taggtctgcccaatttgtac

SEQ ID NO: 35746 - DNA, 20 bp, Artificial Sequence
  MKO10035746_A_Olfr111
  gRNA
ctctagcgagtaagatgaga

SEQ ID NO: 35747 - DNA, 20 bp, Artificial Sequence
  MKO10035747_A_Olfr111
  gRNA
atcctataatttatgcactg

SEQ ID NO: 35748 - DNA, 20 bp, Artificial Sequence
  MKO10035748_A_Olfr111
  gRNA
gcagcctcatgctggacatg

SEQ ID NO: 35749 - DNA, 20 bp, Artificial Sequence
  MKO10035749_A_Olfr1120
  gRNA
cccgcattctctacaatctt

SEQ ID NO: 35750 - DNA, 20 bp, Artificial Sequence
  MKO10035750_A_Olfr1120
  gRNA
tcttgctataacaagtatag

SEQ ID NO: 35751 - DNA, 20 bp, Artificial Sequence
  MKO10035751_A_Olfr1120
  gRNA
tgttcccccaattctcaagc

SEQ ID NO: 35752 - DNA, 20 bp, Artificial Sequence
  MKO10035752_A_Olfr1121
  gRNA
cataccccctgtgcttaaac

SEQ ID NO: 35753 - DNA, 20 bp, Artificial Sequence
  MKO10035753_A_Olfr1121
  gRNA
ttcgatcgtccttcagcagt

SEQ ID NO: 35754 - DNA, 20 bp, Artificial Sequence
  MKO10035754_A_Olfr1121
  gRNA
aatgtgcttcttcctaatgt

SEQ ID NO: 35755 - DNA, 20 bp, Artificial Sequence
  MKO10035755_A_Olfr1122
  gRNA
atatcccaaaaagcatccac

SEQ ID NO: 35756 - DNA, 20 bp, Artificial Sequence
  MKO10035756_A_Olfr1122
  gRNA
tatctgcaacgttctaaaac

SEQ ID NO: 35757 - DNA, 20 bp, Artificial Sequence
  MKO10035757_A_Olfr1122
  gRNA
cactactgaagcaatataga

SEQ ID NO: 35758 - DNA, 20 bp, Artificial Sequence
  MKO10035758_A_Olfr1123
  gRNA
agcagtctacgtagttgcga

SEQ ID NO: 35759 - DNA, 20 bp, Artificial Sequence
  MKO10035759_A_Olfr1123
  gRNA
agtgtcataccagttgtaat

SEQ ID NO: 35760 - DNA, 20 bp, Artificial Sequence
  MKO10035760_A_Olfr1123
  gRNA
ctgattgaatttatcctact

SEQ ID NO: 35761 - DNA, 20 bp, Artificial Sequence
  MKO10035761_A_Olfr1124
  gRNA
agatccaatagtagtcattc

SEQ ID NO: 35762 - DNA, 20 bp, Artificial Sequence
  MKO10035762_A_Olfr1124
  gRNA
tcataactagaggataatgc

SEQ ID NO: 35763 - DNA, 20 bp, Artificial Sequence
  MKO10035763_A_Olfr1124
  gRNA
gatgtctgccctatctgaat

SEQ ID NO: 35764 - DNA, 20 bp, Artificial Sequence
  MKO10035764_A_Olfr1126
  gRNA
gtgtattgaagtatctccac

SEQ ID NO: 35765 - DNA, 20 bp, Artificial Sequence
  MKO10035765_A_Olfr1126
  gRNA
actcagtagctcccagcata

SEQ ID NO: 35766 - DNA, 20 bp, Artificial Sequence
  MKO10035766_A_Olfr1126
  gRNA
gagagtagtttatcagttcc

SEQ ID NO: 35767 - DNA, 20 bp, Artificial Sequence
  MKO10035767_A_Olfr1128
  gRNA
atatttagtacactcgtgat

SEQ ID NO: 35768 - DNA, 20 bp, Artificial Sequence
  MKO10035768_A_Olfr1128
  gRNA
gtccatggagtaaagtgagc

SEQ ID NO: 35769 - DNA, 20 bp, Artificial Sequence
  MKO10035769_A_Olfr1128
  gRNA
ttacagttatgccgtaaaca

SEQ ID NO: 35770 - DNA, 20 bp, Artificial Sequence
  MKO10035770_A_Olfr1129
  gRNA
taatgagctatctgtctatt

SEQ ID NO: 35771 - DNA, 20 bp, Artificial Sequence
  MKO10035771_A_Olfr1129
  gRNA
attaattgacgtgtctccgc

SEQ ID NO: 35772 - DNA, 20 bp, Artificial Sequence
  MKO10035772_A_Olfr1129
  gRNA
tgttggcaacttcagaattg

SEQ ID NO: 35773 - DNA, 20 bp, Artificial Sequence
  MKO10035773_A_Olfr112
  gRNA
gatgacaatcccagtgaaac

SEQ ID NO: 35774 - DNA, 20 bp, Artificial Sequence
  MKO10035774_A_Olfr112
  gRNA
taaccatgtccattattaca

SEQ ID NO: 35775 - DNA, 20 bp, Artificial Sequence
  MKO10035775_A_Olfr112
  gRNA
taatgaccaccttgtaataa

SEQ ID NO: 35776 - DNA, 20 bp, Artificial Sequence
  MKO10035776_A_Olfr1130
  gRNA
tgagctatctgtctatttag

SEQ ID NO: 35777 - DNA, 20 bp, Artificial Sequence
  MKO10035777_A_Olfr1130
  gRNA
actcagtggctgccagcata

SEQ ID NO: 35778 - DNA, 20 bp, Artificial Sequence
  MKO10035778_A_Olfr1130
  gRNA
acaactgggtggcacagctg

SEQ ID NO: 35779 - DNA, 20 bp, Artificial Sequence
  MKO10035779_A_Olfr1131
  gRNA
aaacatatctagcagcatct

SEQ ID NO: 35780 - DNA, 20 bp, Artificial Sequence
  MKO10035780_A_Olfr1131
  gRNA
ttaaaaatccgttcagctga

SEQ ID NO: 35781 - DNA, 20 bp, Artificial Sequence
  MKO10035781_A_Olfr1131
  gRNA
tagacccgcagaaacacaag

SEQ ID NO: 35782 - DNA, 20 bp, Artificial Sequence
  MKO10035782_A_Olfr1132
  gRNA
gacctcactcttctacaccc

SEQ ID NO: 35783 - DNA, 20 bp, Artificial Sequence
  MKO10035783_A_Olfr1132
  gRNA
taattaagatgatcatccca

SEQ ID NO: 35784 - DNA, 20 bp, Artificial Sequence
  MKO10035784_A_Olfr1132
  gRNA
gaagatgaattcatctactg

SEQ ID NO: 35785 - DNA, 20 bp, Artificial Sequence
  MKO10035785_A_Olfr1133
  gRNA
atagtgatgttcacattaat

SEQ ID NO: 35786 - DNA, 20 bp, Artificial Sequence
  MKO10035786_A_Olfr1133
  gRNA
atctgaatgcacaggatgtg

SEQ ID NO: 35787 - DNA, 20 bp, Artificial Sequence
  MKO10035787_A_Olfr1133
  gRNA
aagcagagttccataaaaaa

SEQ ID NO: 35788 - DNA, 20 bp, Artificial Sequence
  MKO10035788_A_Olfr1134
  gRNA
acatcgcaattgtatagagt

SEQ ID NO: 35789 - DNA, 20 bp, Artificial Sequence
  MKO10035789_A_Olfr1134
  gRNA
atcggaatgtacagcttgta

SEQ ID NO: 35790 - DNA, 20 bp, Artificial Sequence
  MKO10035790_A_Olfr1134
  gRNA
caccgtctctcccaagatgc

SEQ ID NO: 35791 - DNA, 20 bp, Artificial Sequence
  MKO10035791_A_Olfr1135
  gRNA
tatctgagcaagatagtagc

SEQ ID NO: 35792 - DNA, 20 bp, Artificial Sequence
  MKO10035792_A_Olfr1135
  gRNA
ataccgactacatacatcag

SEQ ID NO: 35793 - DNA, 20 bp, Artificial Sequence
  MKO10035793_A_Olfr1135
  gRNA
aaagatgctagttgacctaa

SEQ ID NO: 35794 - DNA, 20 bp, Artificial Sequence
  MKO10035794_A_Olfr1136
  gRNA
gtcttaaagattagttctac

SEQ ID NO: 35795 - DNA, 20 bp, Artificial Sequence
  MKO10035795_A_Olfr1136
  gRNA
actattcttctgacaaacgt

SEQ ID NO: 35796 - DNA, 20 bp, Artificial Sequence
  MKO10035796_A_Olfr1136
  gRNA
ttatcatagggataacaagg

SEQ ID NO: 35797 - DNA, 20 bp, Artificial Sequence
  MKO10035797_A_Olfr1137
  gRNA
ttgaatgtttctcggctact

SEQ ID NO: 35798 - DNA, 20 bp, Artificial Sequence
  MKO10035798_A_Olfr1137
  gRNA
tacctgacaagtactataga

SEQ ID NO: 35799 - DNA, 20 bp, Artificial Sequence
  MKO10035799_A_Olfr1137
  gRNA
aaactggtagcacaccttgc

SEQ ID NO: 35800 - DNA, 20 bp, Artificial Sequence
  MKO10035800_A_Olfr1138
  gRNA
gtgtgcttccaattattgac

SEQ ID NO: 35801 - DNA, 20 bp, Artificial Sequence
  MKO10035801_A_Olfr1138
  gRNA
actaatctgctgacaaatct

SEQ ID NO: 35802 - DNA, 20 bp, Artificial Sequence
  MKO10035802_A_Olfr1138
  gRNA
gaacaagacagtactaacac

SEQ ID NO: 35803 - DNA, 20 bp, Artificial Sequence
  MKO10035803_A_Olfr113
  gRNA
ctattgagttcaaaattcac

SEQ ID NO: 35804 - DNA, 20 bp, Artificial Sequence
  MKO10035804_A_Olfr113
  gRNA
cagccactccaactgttaca

SEQ ID NO: 35805 - DNA, 20 bp, Artificial Sequence
  MKO10035805_A_Olfr113
  gRNA
gatgattaccttgtaacagt

SEQ ID NO: 35806 - DNA, 20 bp, Artificial Sequence
  MKO10035806_A_Olfr1140
  gRNA
gttgagttgtgcactatttc

SEQ ID NO: 35807 - DNA, 20 bp, Artificial Sequence
  MKO10035807_A_Olfr1140
  gRNA
aaagatgctggtagatttac

SEQ ID NO: 35808 - DNA, 20 bp, Artificial Sequence
  MKO10035808_A_Olfr1140
  gRNA
ctcaacatctataaagacac

SEQ ID NO: 35809 - DNA, 20 bp, Artificial Sequence
  MKO10035809_A_Olfr1141
  gRNA
gaattggtagcatactctat

SEQ ID NO: 35810 - DNA, 20 bp, Artificial Sequence
  MKO10035810_A_Olfr1141
  gRNA
tagagtatgctaccaattcc

SEQ ID NO: 35811 - DNA, 20 bp, Artificial Sequence
  MKO10035811_A_Olfr1141
  gRNA
agtattagcactttcatgtc

SEQ ID NO: 35812 - DNA, 20 bp, Artificial Sequence
  MKO10035812_A_Olfr1143
  gRNA
ctgtgctccttgttagtggc

SEQ ID NO: 35813 - DNA, 20 bp, Artificial Sequence
  MKO10035813_A_Olfr1143
  gRNA
ataaactccagccactaaca

SEQ ID NO: 35814 - DNA, 20 bp, Artificial Sequence
  MKO10035814_A_Olfr1143
  gRNA
tctatctaatcaatctcatt

SEQ ID NO: 35815 - DNA, 20 bp, Artificial Sequence
  MKO10035815_A_Olfr1145
  gRNA
gacagcaatttatcaattcc

SEQ ID NO: 35816 - DNA, 20 bp, Artificial Sequence
  MKO10035816_A_Olfr1145
  gRNA
aattggaatgccacttagcc

SEQ ID NO: 35817 - DNA, 20 bp, Artificial Sequence
  MKO10035817_A_Olfr1145
  gRNA
ccaaagtctacgcattcccc

SEQ ID NO: 35818 - DNA, 20 bp, Artificial Sequence
  MKO10035818_A_Olfr1148
  gRNA
ttgccaacagccaaaggtcg

SEQ ID NO: 35819 - DNA, 20 bp, Artificial Sequence
  MKO10035819_A_Olfr1148
  gRNA
cataccaccaattctcacgc

SEQ ID NO: 35820 - DNA, 20 bp, Artificial Sequence
  MKO10035820_A_Olfr1148
  gRNA
ggatgtaagcaccaatataa

SEQ ID NO: 35821 - DNA, 20 bp, Artificial Sequence
  MKO10035821_A_Olfr114
  gRNA
tggctaagcagcagtattcc

SEQ ID NO: 35822 - DNA, 20 bp, Artificial Sequence
  MKO10035822_A_Olfr114
  gRNA
cagccactcccattattaca

SEQ ID NO: 35823 - DNA, 20 bp, Artificial Sequence
  MKO10035823_A_Olfr114
  gRNA
atgccataaagagtgttgta

SEQ ID NO: 35824 - DNA, 20 bp, Artificial Sequence
  MKO10035824_A_Olfr1151
  gRNA
aaccatctgttgttgccacc

SEQ ID NO: 35825 - DNA, 20 bp, Artificial Sequence
  MKO10035825_A_Olfr1151
  gRNA
gtgtctactgctagcagtaa

SEQ ID NO: 35826 - DNA, 20 bp, Artificial Sequence
  MKO10035826_A_Olfr1151
  gRNA
tacctggtggcaacaacaga

SEQ ID NO: 35827 - DNA, 20 bp, Artificial Sequence
  MKO10035827_A_Olfr1152
  gRNA
catatctactgcatatagca

SEQ ID NO: 35828 - DNA, 20 bp, Artificial Sequence
  MKO10035828_A_Olfr1152
  gRNA
gtgtactacagcatctacaa

SEQ ID NO: 35829 - DNA, 20 bp, Artificial Sequence
  MKO10035829_A_Olfr1152
  gRNA
caccaaggtgtaaaacagtg

SEQ ID NO: 35830 - DNA, 20 bp, Artificial Sequence
  MKO10035830_A_Olfr1153
  gRNA
ctagttatattcaccctatt

SEQ ID NO: 35831 - DNA, 20 bp, Artificial Sequence
  MKO10035831_A_Olfr1153
  gRNA
agtggtatgctatcagctcc

SEQ ID NO: 35832 - DNA, 20 bp, Artificial Sequence
  MKO10035832_A_Olfr1153
  gRNA
tatctgaacaagatagtaat

SEQ ID NO: 35833 - DNA, 20 bp, Artificial Sequence
  MKO10035833_A_Olfr1154
  gRNA
aagacgtcaaatttgcgttt

SEQ ID NO: 35834 - DNA, 20 bp, Artificial Sequence
  MKO10035834_A_Olfr1154
  gRNA
tacacatgacattatactcg

SEQ ID NO: 35835 - DNA, 20 bp, Artificial Sequence
  MKO10035835_A_Olfr1154
  gRNA
gataaatagtaactactgtc

SEQ ID NO: 35836 - DNA, 20 bp, Artificial Sequence
  MKO10035836_A_Olfr1155
  gRNA
acatgactactgtgtacagc

SEQ ID NO: 35837 - DNA, 20 bp, Artificial Sequence
  MKO10035837_A_Olfr1155
  gRNA
agatagtgatggctgtcata

SEQ ID NO: 35838 - DNA, 20 bp, Artificial Sequence
  MKO10035838_A_Olfr1155
  gRNA
aaccccgaaaatataaattt

SEQ ID NO: 35839 - DNA, 20 bp, Artificial Sequence
  MKO10035839_A_Olfr1156
  gRNA
atttattgtcagcccaactc

SEQ ID NO: 35840 - DNA, 20 bp, Artificial Sequence
  MKO10035840_A_Olfr1156
  gRNA
gagaacacactgatgcatag

SEQ ID NO: 35841 - DNA, 20 bp, Artificial Sequence
  MKO10035841_A_Olfr1156
  gRNA
gaatcagtacagtcatgccc

SEQ ID NO: 35842 - DNA, 20 bp, Artificial Sequence
  MKO10035842_A_Olfr1157
  gRNA
atgatagccgtatatagtag

SEQ ID NO: 35843 - DNA, 20 bp, Artificial Sequence
  MKO10035843_A_Olfr1157
  gRNA
ctcaaatctccgtatgatac

SEQ ID NO: 35844 - DNA, 20 bp, Artificial Sequence
  MKO10035844_A_Olfr1157
  gRNA
agtcaccgccctggccaacc

SEQ ID NO: 35845 - DNA, 20 bp, Artificial Sequence
  MKO10035845_A_Olfr1158
  gRNA
gataaatggtgattactgcc

SEQ ID NO: 35846 - DNA, 20 bp, Artificial Sequence
  MKO10035846_A_Olfr1158
  gRNA
cagctgagtacagaccctct

SEQ ID NO: 35847 - DNA, 20 bp, Artificial Sequence
  MKO10035847_A_Olfr1158
  gRNA
ttacacacatgacattatac

SEQ ID NO: 35848 - DNA, 20 bp, Artificial Sequence
  MKO10035848_A_Olfr115
  gRNA
tagcaactccaattgttaca

SEQ ID NO: 35849 - DNA, 20 bp, Artificial Sequence
  MKO10035849_A_Olfr115
  gRNA
tgctaatatcctgtctgcag

SEQ ID NO: 35850 - DNA, 20 bp, Artificial Sequence
  MKO10035850_A_Olfr115
  gRNA
gaaaatataaccacgatgag

SEQ ID NO: 35851 - DNA, 20 bp, Artificial Sequence
  MKO10035851_A_Olfr1160
  gRNA
gccatgatagatggtgatta

SEQ ID NO: 35852 - DNA, 20 bp, Artificial Sequence
  MKO10035852_A_Olfr1160
  gRNA
ctacacacatgacataatat

SEQ ID NO: 35853 - DNA, 20 bp, Artificial Sequence
  MKO10035853_A_Olfr1160
  gRNA
caactgaatacagactctct

SEQ ID NO: 35854 - DNA, 20 bp, Artificial Sequence
  MKO10035854_A_Olfr1161
  gRNA
caaggatcaacgtactttag

SEQ ID NO: 35855 - DNA, 20 bp, Artificial Sequence
  MKO10035855_A_Olfr1161
  gRNA
caagccatgttactgacata

SEQ ID NO: 35856 - DNA, 20 bp, Artificial Sequence
  MKO10035856_A_Olfr1161
  gRNA
cacacgtatagaaagccttt

SEQ ID NO: 35857 - DNA, 20 bp, Artificial Sequence
  MKO10035857_A_Olfr1162
  gRNA
catgtacgttatcactgtag

SEQ ID NO: 35858 - DNA, 20 bp, Artificial Sequence
  MKO10035858_A_Olfr1162
  gRNA
gataggcattatggtgccaa

SEQ ID NO: 35859 - DNA, 20 bp, Artificial Sequence
  MKO10035859_A_Olfr1162
  gRNA
tgatgagtgctatcatccca

SEQ ID NO: 35860 - DNA, 20 bp, Artificial Sequence
  MKO10035860_A_Olfr1163
  gRNA
gacaactgcataaaagaccg

SEQ ID NO: 35861 - DNA, 20 bp, Artificial Sequence
  MKO10035861_A_Olfr1163
  gRNA
gctgtccactatggtgccac

SEQ ID NO: 35862 - DNA, 20 bp, Artificial Sequence
  MKO10035862_A_Olfr1163
  gRNA
ggagattaactttgtcctgt

SEQ ID NO: 35863 - DNA, 20 bp, Artificial Sequence
  MKO10035863_A_Olfr1164
  gRNA
aacaggggcaattggaggtt

SEQ ID NO: 35864 - DNA, 20 bp, Artificial Sequence
  MKO10035864_A_Olfr1164
  gRNA
gacagacaccaatagctttc

SEQ ID NO: 35865 - DNA, 20 bp, Artificial Sequence
  MKO10035865_A_Olfr1164
  gRNA
gtaattacttacatatgggc

SEQ ID NO: 35866 - DNA, 20 bp, Artificial Sequence
  MKO10035866_A_Olfr1166
  gRNA
actaactatagcaatgacta

SEQ ID NO: 35867 - DNA, 20 bp, Artificial Sequence
  MKO10035867_A_Olfr1166
  gRNA
catatgatgctagagtgatc

SEQ ID NO: 35868 - DNA, 20 bp, Artificial Sequence
  MKO10035868_A_Olfr1166
  gRNA
tgtatctttcaaagcatgca

SEQ ID NO: 35869 - DNA, 20 bp, Artificial Sequence
  MKO10035869_A_Olfr1167
  gRNA
aaattgttatggcagtcaag

SEQ ID NO: 35870 - DNA, 20 bp, Artificial Sequence
  MKO10035870_A_Olfr1167
  gRNA
catcagtgttactgagtaga

SEQ ID NO: 35871 - DNA, 20 bp, Artificial Sequence
  MKO10035871_A_Olfr1167
  gRNA
ataggaggagtaagatccca

SEQ ID NO: 35872 - DNA, 20 bp, Artificial Sequence
  MKO10035872_A_Olfr1168
  gRNA
gctactaccctcacttaata

SEQ ID NO: 35873 - DNA, 20 bp, Artificial Sequence
  MKO10035873_A_Olfr1168
  gRNA
tagtagccttcttatcacta

SEQ ID NO: 35874 - DNA, 20 bp, Artificial Sequence
  MKO10035874_A_Olfr1168
  gRNA
agtcatttccatattaagtg

SEQ ID NO: 35875 - DNA, 20 bp, Artificial Sequence
  MKO10035875_A_Olfr116
  gRNA
gagaatagctacctcacccc

SEQ ID NO: 35876 - DNA, 20 bp, Artificial Sequence
  MKO10035876_A_Olfr116
  gRNA
taaccatccctattactaca

SEQ ID NO: 35877 - DNA, 20 bp, Artificial Sequence
  MKO10035877_A_Olfr116
  gRNA
tcacagtgatgtcatacgat

SEQ ID NO: 35878 - DNA, 20 bp, Artificial Sequence
  MKO10035878_A_Olfr1170
  gRNA
taagcatgccaactgactaa

SEQ ID NO: 35879 - DNA, 20 bp, Artificial Sequence
  MKO10035879_A_Olfr1170
  gRNA
tgattcctcctttagtcagt

SEQ ID NO: 35880 - DNA, 20 bp, Artificial Sequence
  MKO10035880_A_Olfr1170
  gRNA
catcaatgttactgagtaga

SEQ ID NO: 35881 - DNA, 20 bp, Artificial Sequence
  MKO10035881_A_Olfr1173
  gRNA
aagttatatgtggggaggtc

SEQ ID NO: 35882 - DNA, 20 bp, Artificial Sequence
  MKO10035882_A_Olfr1173
  gRNA
cagctgtcttattgtgaacc

SEQ ID NO: 35883 - DNA, 20 bp, Artificial Sequence
  MKO10035883_A_Olfr1173
  gRNA
actactaacctcatttaaca

SEQ ID NO: 35884 - DNA, 20 bp, Artificial Sequence
  MKO10035884_A_Olfr1176
  gRNA
gttatcaagatccccactaa

SEQ ID NO: 35885 - DNA, 20 bp, Artificial Sequence
  MKO10035885_A_Olfr1176
  gRNA
ctcagagtatccgaacttac

SEQ ID NO: 35886 - DNA, 20 bp, Artificial Sequence
  MKO10035886_A_Olfr1176
  gRNA
aaattaacaagcacgctatc

SEQ ID NO: 35887 - DNA, 20 bp, Artificial Sequence
  MKO10035887_A_Olfr1178
  gRNA
actacaccatccttatgagc

SEQ ID NO: 35888 - DNA, 20 bp, Artificial Sequence
  MKO10035888_A_Olfr1178
  gRNA
agactatgttaccttatgtc

SEQ ID NO: 35889 - DNA, 20 bp, Artificial Sequence
  MKO10035889_A_Olfr1178
  gRNA
gtgtgatcttatacactgtc

SEQ ID NO: 35890 - DNA, 20 bp, Artificial Sequence
  MKO10035890_A_Olfr1179
  gRNA
aagtccgactctgtgcgtat

SEQ ID NO: 35891 - DNA, 20 bp, Artificial Sequence
  MKO10035891_A_Olfr1179
  gRNA
tcaccttcgtagtcttgatg

SEQ ID NO: 35892 - DNA, 20 bp, Artificial Sequence
  MKO10035892_A_Olfr1179
  gRNA
tcactgaccttctcgtagaa

SEQ ID NO: 35893 - DNA, 20 bp, Artificial Sequence
  MKO10035893_A_Olfr117
  gRNA
aaaatagtactactacaatt

SEQ ID NO: 35894 - DNA, 20 bp, Artificial Sequence
  MKO10035894_A_Olfr117
  gRNA
gtaaggaaagattctagcac

SEQ ID NO: 35895 - DNA, 20 bp, Artificial Sequence
  MKO10035895_A_Olfr117
  gRNA
cagctcctatgcacagagtc

SEQ ID NO: 35896 - DNA, 20 bp, Artificial Sequence
  MKO10035896_A_Olfr1180
  gRNA
tttctgccagtaaatcagtc

SEQ ID NO: 35897 - DNA, 20 bp, Artificial Sequence
  MKO10035897_A_Olfr1180
  gRNA
gtgcaagccaatttcaataa

SEQ ID NO: 35898 - DNA, 20 bp, Artificial Sequence
  MKO10035898_A_Olfr1180
  gRNA
taattgcacgcttcatctct

SEQ ID NO: 35899 - DNA, 20 bp, Artificial Sequence
  MKO10035899_A_Olfr1181
  gRNA
ctgcaagcctctctactaca

SEQ ID NO: 35900 - DNA, 20 bp, Artificial Sequence
  MKO10035900_A_Olfr1181
  gRNA
ttcccgaattggcaaccatg

SEQ ID NO: 35901 - DNA, 20 bp, Artificial Sequence
  MKO10035901_A_Olfr1181
  gRNA
aggtctaaggtagacaaaga

SEQ ID NO: 35902 - DNA, 20 bp, Artificial Sequence
  MKO10035902_A_Olfr1182
  gRNA
agccatgactgtcaggatta

SEQ ID NO: 35903 - DNA, 20 bp, Artificial Sequence
  MKO10035903_A_Olfr1182
  gRNA
gaaattctgatatgttcctc

SEQ ID NO: 35904 - DNA, 20 bp, Artificial Sequence
  MKO10035904_A_Olfr1182
  gRNA
tagcagatccccaatcaatt

SEQ ID NO: 35905 - DNA, 20 bp, Artificial Sequence
  MKO10035905_A_Olfr1183
  gRNA
ataatgagccaacgtatttg

SEQ ID NO: 35906 - DNA, 20 bp, Artificial Sequence
  MKO10035906_A_Olfr1183
  gRNA
ctaatatgccacaaatacgt

SEQ ID NO: 35907 - DNA, 20 bp, Artificial Sequence
  MKO10035907_A_Olfr1183
  gRNA
gtgaatacaagaccctaccc

SEQ ID NO: 35908 - DNA, 20 bp, Artificial Sequence
  MKO10035908_A_Olfr1184
  gRNA
tgtaccgacaccaccatcac

SEQ ID NO: 35909 - DNA, 20 bp, Artificial Sequence
  MKO10035909_A_Olfr1184
  gRNA
gcaggtgccatatcctgatc

SEQ ID NO: 35910 - DNA, 20 bp, Artificial Sequence
  MKO10035910_A_Olfr1184
  gRNA
tgttaccttgccatcttgtg

SEQ ID NO: 35911 - DNA, 20 bp, Artificial Sequence
  MKO10035911_A_Olfr1186
  gRNA
gaatgaattcagtcatcgta

SEQ ID NO: 35912 - DNA, 20 bp, Artificial Sequence
  MKO10035912_A_Olfr1186
  gRNA
ataatgagccaacatatctg

SEQ ID NO: 35913 - DNA, 20 bp, Artificial Sequence
  MKO10035913_A_Olfr1186
  gRNA
ctaatacaccacagatatgt

SEQ ID NO: 35914 - DNA, 20 bp, Artificial Sequence
  MKO10035914_A_Olfr1188
  gRNA
acctacatcattactgtcac

SEQ ID NO: 35915 - DNA, 20 bp, Artificial Sequence
  MKO10035915_A_Olfr1188
  gRNA
agtaacaagtatctgaccaa

SEQ ID NO: 35916 - DNA, 20 bp, Artificial Sequence
  MKO10035916_A_Olfr1188
  gRNA
caccaccattgcaagcaacc

SEQ ID NO: 35917 - DNA, 20 bp, Artificial Sequence
  MKO10035917_A_Olfr1189
  gRNA
accatcaagcagcacaccct

SEQ ID NO: 35918 - DNA, 20 bp, Artificial Sequence
  MKO10035918_A_Olfr1189
  gRNA
taaccagaagccctagtctg

SEQ ID NO: 35919 - DNA, 20 bp, Artificial Sequence
  MKO10035919_A_Olfr1189
  gRNA
cttcagaactataagactta

SEQ ID NO: 35920 - DNA, 20 bp, Artificial Sequence
  MKO10035920_A_Olfr118
  gRNA
aaccttgtaagtgagatccg

SEQ ID NO: 35921 - DNA, 20 bp, Artificial Sequence
  MKO10035921_A_Olfr118
  gRNA
ctcaacccgaatgagtcgtg

SEQ ID NO: 35922 - DNA, 20 bp, Artificial Sequence
  MKO10035922_A_Olfr118
  gRNA
acccttcccgagagatacct

SEQ ID NO: 35923 - DNA, 20 bp, Artificial Sequence
  MKO10035923_A_Olfr1193
  gRNA
tctccactatatgactatga

SEQ ID NO: 35924 - DNA, 20 bp, Artificial Sequence
  MKO10035924_A_Olfr1193
  gRNA
aacaatgtaagtgtcagtgc

SEQ ID NO: 35925 - DNA, 20 bp, Artificial Sequence
  MKO10035925_A_Olfr1193
  gRNA
aaatgatgacaacagcaatg

SEQ ID NO: 35926 - DNA, 20 bp, Artificial Sequence
  MKO10035926_A_Olfr1195
  gRNA
tgtacaaagggttccactat

SEQ ID NO: 35927 - DNA, 20 bp, Artificial Sequence
  MKO10035927_A_Olfr1195
  gRNA
tgtagccccgagaacaattg

SEQ ID NO: 35928 - DNA, 20 bp, Artificial Sequence
  MKO10035928_A_Olfr1195
  gRNA
tatatgagaccatgagcata

SEQ ID NO: 35929 - DNA, 20 bp, Artificial Sequence
  MKO10035929_A_Olfr1196
  gRNA
ggccaagtctctgatgagcc

SEQ ID NO: 35930 - DNA, 20 bp, Artificial Sequence
  MKO10035930_A_Olfr1196
  gRNA
atcttagcaattgccaactc

SEQ ID NO: 35931 - DNA, 20 bp, Artificial Sequence
  MKO10035931_A_Olfr1196
  gRNA
aaaaagcaccatcccagagt

SEQ ID NO: 35932 - DNA, 20 bp, Artificial Sequence
  MKO10035932_A_Olfr1197
  gRNA
tgctcagtctgccgttctgt

SEQ ID NO: 35933 - DNA, 20 bp, Artificial Sequence
  MKO10035933_A_Olfr1197
  gRNA
tttccacacctgctagcaag

SEQ ID NO: 35934 - DNA, 20 bp, Artificial Sequence
  MKO10035934_A_Olfr1197
  gRNA
atcttaacaattgccaactc

SEQ ID NO: 35935 - DNA, 20 bp, Artificial Sequence
  MKO10035935_A_Olfr1198
  gRNA
catgagccttgtatctgtgc

SEQ ID NO: 35936 - DNA, 20 bp, Artificial Sequence
  MKO10035936_A_Olfr1198
  gRNA
attgtaatcattaccactac

SEQ ID NO: 35937 - DNA, 20 bp, Artificial Sequence
  MKO10035937_A_Olfr1198
  gRNA
cttgtgatagcctcagctat

SEQ ID NO: 35938 - DNA, 20 bp, Artificial Sequence
  MKO10035938_A_Olfr1199
  gRNA
ctgaactaaagaatgcacgc

SEQ ID NO: 35939 - DNA, 20 bp, Artificial Sequence
  MKO10035939_A_Olfr1199
  gRNA
gataagcaagttgcccagta

SEQ ID NO: 35940 - DNA, 20 bp, Artificial Sequence
  MKO10035940_A_Olfr1199
  gRNA
cataggagaacattagcaca

SEQ ID NO: 35941 - DNA, 20 bp, Artificial Sequence
  MKO10035941_A_Olfr119
  gRNA
accccactactcattcgtgt

SEQ ID NO: 35942 - DNA, 20 bp, Artificial Sequence
  MKO10035942_A_Olfr119
  gRNA
tatggcttatgaccgctgca

SEQ ID NO: 35943 - DNA, 20 bp, Artificial Sequence
  MKO10035943_A_Olfr119
  gRNA
atggattggtgcagatgaca

SEQ ID NO: 35944 - DNA, 20 bp, Artificial Sequence
  MKO10035944_A_Olfr11
  gRNA
ttgaaaatccaatctgccga

SEQ ID NO: 35945 - DNA, 20 bp, Artificial Sequence
  MKO10035945_A_Olfr11
  gRNA
ttcagttggcggctgtatcc

SEQ ID NO: 35946 - DNA, 20 bp, Artificial Sequence
  MKO10035946_A_Olfr11
  gRNA
tgtggagtttaggatccaaa

SEQ ID NO: 35947 - DNA, 20 bp, Artificial Sequence
  MKO10035947_A_Olfr1200
  gRNA
ttacagaccagcttcaaaag

SEQ ID NO: 35948 - DNA, 20 bp, Artificial Sequence
  MKO10035948_A_Olfr1200
  gRNA
atcagagcagaattacaaga

SEQ ID NO: 35949 - DNA, 20 bp, Artificial Sequence
  MKO10035949_A_Olfr1200
  gRNA
caagatcatctgcagggaag

SEQ ID NO: 35950 - DNA, 20 bp, Artificial Sequence
  MKO10035950_A_Olfr1201
  gRNA
ttgtgacaatcaagttcagt

SEQ ID NO: 35951 - DNA, 20 bp, Artificial Sequence
  MKO10035951_A_Olfr1201
  gRNA
ctgcgaaaccatagtgcaga

SEQ ID NO: 35952 - DNA, 20 bp, Artificial Sequence
  MKO10035952_A_Olfr1201
  gRNA
catgatgactgagtaacgca

SEQ ID NO: 35953 - DNA, 20 bp, Artificial Sequence
  MKO10035953_A_Olfr1202
  gRNA
cctactgcttgtctcctacc

SEQ ID NO: 35954 - DNA, 20 bp, Artificial Sequence
  MKO10035954_A_Olfr1202
  gRNA
ttgctgattcactacataaa

SEQ ID NO: 35955 - DNA, 20 bp, Artificial Sequence
  MKO10035955_A_Olfr1202
  gRNA
ttagggagttaagaatgacc

SEQ ID NO: 35956 - DNA, 20 bp, Artificial Sequence
  MKO10035956_A_Olfr1204
  gRNA
aaagtatcagcaagcagttt

SEQ ID NO: 35957 - DNA, 20 bp, Artificial Sequence
  MKO10035957_A_Olfr1204
  gRNA
caaagcgactgctttatcaa

SEQ ID NO: 35958 - DNA, 20 bp, Artificial Sequence
  MKO10035958_A_Olfr1204
  gRNA
ggagttaaggatgaccaagt

SEQ ID NO: 35959 - DNA, 20 bp, Artificial Sequence
  MKO10035959_A_Olfr1205
  gRNA
ctgtgacttacagcccttat

SEQ ID NO: 35960 - DNA, 20 bp, Artificial Sequence
  MKO10035960_A_Olfr1205
  gRNA
atagtagttgtcttatcctt

SEQ ID NO: 35961 - DNA, 20 bp, Artificial Sequence
  MKO10035961_A_Olfr1205
  gRNA
gttgagaaagggtgatccaa

SEQ ID NO: 35962 - DNA, 20 bp, Artificial Sequence
  MKO10035962_A_Olfr1206
  gRNA
gtcacgaagtttatactact

SEQ ID NO: 35963 - DNA, 20 bp, Artificial Sequence
  MKO10035963_A_Olfr1206
  gRNA
tcatcttgattattcttgcc

SEQ ID NO: 35964 - DNA, 20 bp, Artificial Sequence
  MKO10035964_A_Olfr1206
  gRNA
ctgctattagtgtctaacag

SEQ ID NO: 35965 - DNA, 20 bp, Artificial Sequence
  MKO10035965_A_Olfr1208
  gRNA
cattctgacctttgttgcat

SEQ ID NO: 35966 - DNA, 20 bp, Artificial Sequence
  MKO10035966_A_Olfr1208
  gRNA
attgtaatcattactaccac

SEQ ID NO: 35967 - DNA, 20 bp, Artificial Sequence
  MKO10035967_A_Olfr1208
  gRNA
gtagccccaaaatttattat

SEQ ID NO: 35968 - DNA, 20 bp, Artificial Sequence
  MKO10035968_A_Olfr1209
  gRNA
catagctccaagaacaattg

SEQ ID NO: 35969 - DNA, 20 bp, Artificial Sequence
  MKO10035969_A_Olfr1209
  gRNA
cataagagaccatcagcatg

SEQ ID NO: 35970 - DNA, 20 bp, Artificial Sequence
  MKO10035970_A_Olfr1209
  gRNA
atcaagacaagccagaccct

SEQ ID NO: 35971 - DNA, 20 bp, Artificial Sequence
  MKO10035971_A_Olfr120
  gRNA
gttgaagaaccttgtaactg

SEQ ID NO: 35972 - DNA, 20 bp, Artificial Sequence
  MKO10035972_A_Olfr120
  gRNA
cccgagggatctctcgggaa

SEQ ID NO: 35973 - DNA, 20 bp, Artificial Sequence
  MKO10035973_A_Olfr120
  gRNA
gttcagcatggaagtcaccg

SEQ ID NO: 35974 - DNA, 20 bp, Artificial Sequence
  MKO10035974_A_Olfr1211
  gRNA
tgcactgatactcatatctt

SEQ ID NO: 35975 - DNA, 20 bp, Artificial Sequence
  MKO10035975_A_Olfr1211
  gRNA
aggctctgtggcacacttat

SEQ ID NO: 35976 - DNA, 20 bp, Artificial Sequence
  MKO10035976_A_Olfr1211
  gRNA
caatgctgggctacagacaa

SEQ ID NO: 35977 - DNA, 20 bp, Artificial Sequence
  MKO10035977_A_Olfr1212
  gRNA
tgcactaacacttatgtcta

SEQ ID NO: 35978 - DNA, 20 bp, Artificial Sequence
  MKO10035978_A_Olfr1212
  gRNA
tgaactctgttacaatagtt

SEQ ID NO: 35979 - DNA, 20 bp, Artificial Sequence
  MKO10035979_A_Olfr1212
  gRNA
tctatgttgctaatctccta

SEQ ID NO: 35980 - DNA, 20 bp, Artificial Sequence
  MKO10035980_A_Olfr1213
  gRNA
catatgtagtcgtgcacttc

SEQ ID NO: 35981 - DNA, 20 bp, Artificial Sequence
  MKO10035981_A_Olfr1213
  gRNA
aagtgcacgactacatatga

SEQ ID NO: 35982 - DNA, 20 bp, Artificial Sequence
  MKO10035982_A_Olfr1213
  gRNA
ttcatctacattgcaacagt

SEQ ID NO: 35983 - DNA, 20 bp, Artificial Sequence
  MKO10035983_A_Olfr1214
  gRNA
tgtctacagtcctgcactac

SEQ ID NO: 35984 - DNA, 20 bp, Artificial Sequence
  MKO10035984_A_Olfr1214
  gRNA
gcactttcttactgctgtag

SEQ ID NO: 35985 - DNA, 20 bp, Artificial Sequence
  MKO10035985_A_Olfr1214
  gRNA
ccgtgcatatattaatatac

SEQ ID NO: 35986 - DNA, 20 bp, Artificial Sequence
  MKO10035986_A_Olfr1215
  gRNA
gcttcgagtcctgtgttgct

SEQ ID NO: 35987 - DNA, 20 bp, Artificial Sequence
  MKO10035987_A_Olfr1215
  gRNA
ggtgatcattctggcagcta

SEQ ID NO: 35988 - DNA, 20 bp, Artificial Sequence
  MKO10035988_A_Olfr1215
  gRNA
gacaccgttactcaatcctg

SEQ ID NO: 35989 - DNA, 20 bp, Artificial Sequence
  MKO10035989_A_Olfr1216
  gRNA
ttctactgttacacccaaga

SEQ ID NO: 35990 - DNA, 20 bp, Artificial Sequence
  MKO10035990_A_Olfr1216
  gRNA
tgctacagagcctccgagta

SEQ ID NO: 35991 - DNA, 20 bp, Artificial Sequence
  MKO10035991_A_Olfr1216
  gRNA
aagccctaagattatgaact

SEQ ID NO: 35992 - DNA, 20 bp, Artificial Sequence
  MKO10035992_A_Olfr1217
  gRNA
tagaagaagtgcatgcatcc

SEQ ID NO: 35993 - DNA, 20 bp, Artificial Sequence
  MKO10035993_A_Olfr1217
  gRNA
tacgtcgcccttcagaactc

SEQ ID NO: 35994 - DNA, 20 bp, Artificial Sequence
  MKO10035994_A_Olfr1217
  gRNA
tccttattgattgtctccta

SEQ ID NO: 35995 - DNA, 20 bp, Artificial Sequence
  MKO10035995_A_Olfr1218
  gRNA
ttgcatcatgcaacagccaa

SEQ ID NO: 35996 - DNA, 20 bp, Artificial Sequence
  MKO10035996_A_Olfr1218
  gRNA
tggaagagacacatagatcc

SEQ ID NO: 35997 - DNA, 20 bp, Artificial Sequence
  MKO10035997_A_Olfr1218
  gRNA
gtgcaagaagccccctgccc

SEQ ID NO: 35998 - DNA, 20 bp, Artificial Sequence
  MKO10035998_A_Olfr1219
  gRNA
taggtcttgcatatattaat

SEQ ID NO: 35999 - DNA, 20 bp, Artificial Sequence
  MKO10035999_A_Olfr1219
  gRNA
agaagttaatgcatccagta

SEQ ID NO: 36000 - DNA, 20 bp, Artificial Sequence
  MKO10036000_A_Olfr1219
  gRNA
acagagcctccgagtcatga

SEQ ID NO: 36001 - DNA, 20 bp, Artificial Sequence
  MKO10036001_A_Olfr121
  gRNA
gttcagcatggatgtcaccg

SEQ ID NO: 36002 - DNA, 20 bp, Artificial Sequence
  MKO10036002_A_Olfr121
  gRNA
tatgcaacacgaatgagtca

SEQ ID NO: 36003 - DNA, 20 bp, Artificial Sequence
  MKO10036003_A_Olfr121
  gRNA
atccctcccgagagatttct

SEQ ID NO: 36004 - DNA, 20 bp, Artificial Sequence
  MKO10036004_A_Olfr1220
  gRNA
ttggtatacctagcaacaat

SEQ ID NO: 36005 - DNA, 20 bp, Artificial Sequence
  MKO10036005_A_Olfr1220
  gRNA
tgttgcctccgattgttgct

SEQ ID NO: 36006 - DNA, 20 bp, Artificial Sequence
  MKO10036006_A_Olfr1220
  gRNA
aagagctttaagtcgtcctt

SEQ ID NO: 36007 - DNA, 20 bp, Artificial Sequence
  MKO10036007_A_Olfr1221
  gRNA
gtaacacctaagatgatcgt

SEQ ID NO: 36008 - DNA, 20 bp, Artificial Sequence
  MKO10036008_A_Olfr1221
  gRNA
taccgcagtaaagaagtgta

SEQ ID NO: 36009 - DNA, 20 bp, Artificial Sequence
  MKO10036009_A_Olfr1221
  gRNA
acctgtccattatgagcaag

SEQ ID NO: 36010 - DNA, 20 bp, Artificial Sequence
  MKO10036010_A_Olfr1222
  gRNA
gctctgtggcactctcgtaa

SEQ ID NO: 36011 - DNA, 20 bp, Artificial Sequence
  MKO10036011_A_Olfr1222
  gRNA
ggtgattatcttgacatcta

SEQ ID NO: 36012 - DNA, 20 bp, Artificial Sequence
  MKO10036012_A_Olfr1222
  gRNA
cctcaactcctgcaaagaag

SEQ ID NO: 36013 - DNA, 20 bp, Artificial Sequence
  MKO10036013_A_Olfr1223
  gRNA
tggaggcaacatagtaattg

SEQ ID NO: 36014 - DNA, 20 bp, Artificial Sequence
  MKO10036014_A_Olfr1223
  gRNA
ccagagactctgtgtcattc

SEQ ID NO: 36015 - DNA, 20 bp, Artificial Sequence
  MKO10036015_A_Olfr1223
  gRNA
catctcctttgaatgttgta

SEQ ID NO: 36016 - DNA, 20 bp, Artificial Sequence
  MKO10036016_A_Olfr1225
  gRNA
gctctgtggcaatcttgtga

SEQ ID NO: 36017 - DNA, 20 bp, Artificial Sequence
  MKO10036017_A_Olfr1225
  gRNA
tttaaagccctctcaacctg

SEQ ID NO: 36018 - DNA, 20 bp, Artificial Sequence
  MKO10036018_A_Olfr1225
  gRNA
taaactacagaattgagcaa

SEQ ID NO: 36019 - DNA, 20 bp, Artificial Sequence
  MKO10036019_A_Olfr1226
  gRNA
tgaactcagtgacactactg

SEQ ID NO: 36020 - DNA, 20 bp, Artificial Sequence
  MKO10036020_A_Olfr1226
  gRNA
gggaaatgaagaatgctatt

SEQ ID NO: 36021 - DNA, 20 bp, Artificial Sequence
  MKO10036021_A_Olfr1226
  gRNA
cagaagtggtgttatgattg

SEQ ID NO: 36022 - DNA, 20 bp, Artificial Sequence
  MKO10036022_A_Olfr1228
  gRNA
cactgtcacccctaagatga

SEQ ID NO: 36023 - DNA, 20 bp, Artificial Sequence
  MKO10036023_A_Olfr1228
  gRNA
attcagaagtggtgttatga

SEQ ID NO: 36024 - DNA, 20 bp, Artificial Sequence
  MKO10036024_A_Olfr1228
  gRNA
cacagtatgttctcaacatt

SEQ ID NO: 36025 - DNA, 20 bp, Artificial Sequence
  MKO10036025_A_Olfr1229
  gRNA
ggtgactgttgtttctactc

SEQ ID NO: 36026 - DNA, 20 bp, Artificial Sequence
  MKO10036026_A_Olfr1229
  gRNA
caaattccgttataaaactc

SEQ ID NO: 36027 - DNA, 20 bp, Artificial Sequence
  MKO10036027_A_Olfr1229
  gRNA
ctgtggtactctagtgggag

SEQ ID NO: 36028 - DNA, 20 bp, Artificial Sequence
  MKO10036028_A_Olfr122
  gRNA
gccaagagtttatccacttc

SEQ ID NO: 36029 - DNA, 20 bp, Artificial Sequence
  MKO10036029_A_Olfr122
  gRNA
caacgtctgccacctatttg

SEQ ID NO: 36030 - DNA, 20 bp, Artificial Sequence
  MKO10036030_A_Olfr122
  gRNA
cccgagggatctcacgggaa

SEQ ID NO: 36031 - DNA, 20 bp, Artificial Sequence
  MKO10036031_A_Olfr1230
  gRNA
gatcatccttctcatcgtga

SEQ ID NO: 36032 - DNA, 20 bp, Artificial Sequence
  MKO10036032_A_Olfr1230
  gRNA
ttgttagtccccgagtatgc

SEQ ID NO: 36033 - DNA, 20 bp, Artificial Sequence
  MKO10036033_A_Olfr1230
  gRNA
gttgttgcaactagcctgca

SEQ ID NO: 36034 - DNA, 20 bp, Artificial Sequence
  MKO10036034_A_Olfr1231
  gRNA
tatatgaccattatgcgtca

SEQ ID NO: 36035 - DNA, 20 bp, Artificial Sequence
  MKO10036035_A_Olfr1231
  gRNA
atcatagtggccgccaacag

SEQ ID NO: 36036 - DNA, 20 bp, Artificial Sequence
  MKO10036036_A_Olfr1231
  gRNA
atgtaagatccctccaatcc

SEQ ID NO: 36037 - DNA, 20 bp, Artificial Sequence
  MKO10036037_A_Olfr1232
  gRNA
aaggtctgtggcacgctggt

SEQ ID NO: 36038 - DNA, 20 bp, Artificial Sequence
  MKO10036038_A_Olfr1232
  gRNA
tgtctgtagccctacactgc

SEQ ID NO: 36039 - DNA, 20 bp, Artificial Sequence
  MKO10036039_A_Olfr1232
  gRNA
cagcgtgccacagaccttcc

SEQ ID NO: 36040 - DNA, 20 bp, Artificial Sequence
  MKO10036040_A_Olfr1233
  gRNA
ttatccaacataccccgact

SEQ ID NO: 36041 - DNA, 20 bp, Artificial Sequence
  MKO10036041_A_Olfr1233
  gRNA
cgagtatctgtccaaaagag

SEQ ID NO: 36042 - DNA, 20 bp, Artificial Sequence
  MKO10036042_A_Olfr1233
  gRNA
gcacaggccaactgtagtaa

SEQ ID NO: 36043 - DNA, 20 bp, Artificial Sequence
  MKO10036043_A_Olfr1234
  gRNA
gtgatatagcccacttacga

SEQ ID NO: 36044 - DNA, 20 bp, Artificial Sequence
  MKO10036044_A_Olfr1234
  gRNA
aaatctagctccatcgtaag

SEQ ID NO: 36045 - DNA, 20 bp, Artificial Sequence
  MKO10036045_A_Olfr1234
  gRNA
acacactcgtcgattcatga

SEQ ID NO: 36046 - DNA, 20 bp, Artificial Sequence
  MKO10036046_A_Olfr1238
  gRNA
cttactgtggttgcgaatgg

SEQ ID NO: 36047 - DNA, 20 bp, Artificial Sequence
  MKO10036047_A_Olfr1238
  gRNA
tatctcattctcagcttgca

SEQ ID NO: 36048 - DNA, 20 bp, Artificial Sequence
  MKO10036048_A_Olfr1238
  gRNA
tacacttatcgacttatcaa

SEQ ID NO: 36049 - DNA, 20 bp, Artificial Sequence
  MKO10036049_A_Olfr1239
  gRNA
atctatgttgtgacaatggc

SEQ ID NO: 36050 - DNA, 20 bp, Artificial Sequence
  MKO10036050_A_Olfr1239
  gRNA
tgcacagacacctatgttat

SEQ ID NO: 36051 - DNA, 20 bp, Artificial Sequence
  MKO10036051_A_Olfr1239
  gRNA
tacagtcaatgacttatcaa

SEQ ID NO: 36052 - DNA, 20 bp, Artificial Sequence
  MKO10036052_A_Olfr123
  gRNA
gccctgatactgacgtccta

SEQ ID NO: 36053 - DNA, 20 bp, Artificial Sequence
  MKO10036053_A_Olfr123
  gRNA
cggctcttcaatagagcctc

SEQ ID NO: 36054 - DNA, 20 bp, Artificial Sequence
  MKO10036054_A_Olfr123
  gRNA
tcagtatcagggctaagggt

SEQ ID NO: 36055 - DNA, 20 bp, Artificial Sequence
  MKO10036055_A_Olfr1240
  gRNA
atttccgtttcagcttgcat

SEQ ID NO: 36056 - DNA, 20 bp, Artificial Sequence
  MKO10036056_A_Olfr1240
  gRNA
ctattggtggcagcctgtgc

SEQ ID NO: 36057 - DNA, 20 bp, Artificial Sequence
  MKO10036057_A_Olfr1240
  gRNA
tgtactgacacttacttaat

SEQ ID NO: 36058 - DNA, 20 bp, Artificial Sequence
  MKO10036058_A_Olfr1241
  gRNA
gaagtacattggagtcccta

SEQ ID NO: 36059 - DNA, 20 bp, Artificial Sequence
  MKO10036059_A_Olfr1241
  gRNA
tgctatctcacccaagttga

SEQ ID NO: 36060 - DNA, 20 bp, Artificial Sequence
  MKO10036060_A_Olfr1241
  gRNA
gtccaacatgatcttgagtg

SEQ ID NO: 36061 - DNA, 20 bp, Artificial Sequence
  MKO10036061_A_Olfr1242
  gRNA
tgtgacatgaatcaattact

SEQ ID NO: 36062 - DNA, 20 bp, Artificial Sequence
  MKO10036062_A_Olfr1242
  gRNA
tcactgtaagtgcaatgagc

SEQ ID NO: 36063 - DNA, 20 bp, Artificial Sequence
  MKO10036063_A_Olfr1242
  gRNA
attcttctattgctgatagc

SEQ ID NO: 36064 - DNA, 20 bp, Artificial Sequence
  MKO10036064_A_Olfr1243
  gRNA
atctcacccaatttgattat

SEQ ID NO: 36065 - DNA, 20 bp, Artificial Sequence
  MKO10036065_A_Olfr1243
  gRNA
tcaccgtcactgcaatgagc

SEQ ID NO: 36066 - DNA, 20 bp, Artificial Sequence
  MKO10036066_A_Olfr1243
  gRNA
gtgtgatatgaatccattac

SEQ ID NO: 36067 - DNA, 20 bp, Artificial Sequence
  MKO10036067_A_Olfr1245
  gRNA
gtgtgtaaaaccaccagtcc

SEQ ID NO: 36068 - DNA, 20 bp, Artificial Sequence
  MKO10036068_A_Olfr1245
  gRNA
tcactttgttgataattgcc

SEQ ID NO: 36069 - DNA, 20 bp, Artificial Sequence
  MKO10036069_A_Olfr1245
  gRNA
gtgcatgcaagtaccaataa

SEQ ID NO: 36070 - DNA, 20 bp, Artificial Sequence
  MKO10036070_A_Olfr1246
  gRNA
cttaccctcattgccaatgg

SEQ ID NO: 36071 - DNA, 20 bp, Artificial Sequence
  MKO10036071_A_Olfr1246
  gRNA
gagggtaagaccaatgaagt

SEQ ID NO: 36072 - DNA, 20 bp, Artificial Sequence
  MKO10036072_A_Olfr1246
  gRNA
atctctcaagaattatagtc

SEQ ID NO: 36073 - DNA, 20 bp, Artificial Sequence
  MKO10036073_A_Olfr1247
  gRNA
taccgtgaggccaataaagt

SEQ ID NO: 36074 - DNA, 20 bp, Artificial Sequence
  MKO10036074_A_Olfr1247
  gRNA
ctcacggtagttgccaataa

SEQ ID NO: 36075 - DNA, 20 bp, Artificial Sequence
  MKO10036075_A_Olfr1247
  gRNA
tgggggatttgcacatgctc

SEQ ID NO: 36076 - DNA, 20 bp, Artificial Sequence
  MKO10036076_A_Olfr1248
  gRNA
ctcactgtagttagcagtta

SEQ ID NO: 36077 - DNA, 20 bp, Artificial Sequence
  MKO10036077_A_Olfr1248
  gRNA
ctctcttaagactgatagtc

SEQ ID NO: 36078 - DNA, 20 bp, Artificial Sequence
  MKO10036078_A_Olfr1248
  gRNA
tgtgacatatacccattgtt

SEQ ID NO: 36079 - DNA, 20 bp, Artificial Sequence
  MKO10036079_A_Olfr1249
  gRNA
gaagacagccgtattctact

SEQ ID NO: 36080 - DNA, 20 bp, Artificial Sequence
  MKO10036080_A_Olfr1249
  gRNA
cattattgccaatgatagaa

SEQ ID NO: 36081 - DNA, 20 bp, Artificial Sequence
  MKO10036081_A_Olfr1249
  gRNA
ggttgacattgtcattctgc

SEQ ID NO: 36082 - DNA, 20 bp, Artificial Sequence
  MKO10036082_A_Olfr124
  gRNA
gtttgcaaatccgctaatcc

SEQ ID NO: 36083 - DNA, 20 bp, Artificial Sequence
  MKO10036083_A_Olfr124
  gRNA
ccatatgaatgcatcgtttc

SEQ ID NO: 36084 - DNA, 20 bp, Artificial Sequence
  MKO10036084_A_Olfr124
  gRNA
tccgttctgctgagagtcgc

SEQ ID NO: 36085 - DNA, 20 bp, Artificial Sequence
  MKO10036085_A_Olfr1250
  gRNA
ggtttgcattctcttgttgg

SEQ ID NO: 36086 - DNA, 20 bp, Artificial Sequence
  MKO10036086_A_Olfr1250
  gRNA
tgtactgacacctatttcct

SEQ ID NO: 36087 - DNA, 20 bp, Artificial Sequence
  MKO10036087_A_Olfr1250
  gRNA
agcaaaatgatcaatgacat

SEQ ID NO: 36088 - DNA, 20 bp, Artificial Sequence
  MKO10036088_A_Olfr1251
  gRNA
gaagaaagacgtattctaca

SEQ ID NO: 36089 - DNA, 20 bp, Artificial Sequence
  MKO10036089_A_Olfr1251
  gRNA
gtacatgcaagtagcaatag

SEQ ID NO: 36090 - DNA, 20 bp, Artificial Sequence
  MKO10036090_A_Olfr1251
  gRNA
cattgtcattctagttgcaa

SEQ ID NO: 36091 - DNA, 20 bp, Artificial Sequence
  MKO10036091_A_Olfr1252
  gRNA
ggtttgcattctcttattgg

SEQ ID NO: 36092 - DNA, 20 bp, Artificial Sequence
  MKO10036092_A_Olfr1252
  gRNA
aaagtacattggggatccca

SEQ ID NO: 36093 - DNA, 20 bp, Artificial Sequence
  MKO10036093_A_Olfr1252
  gRNA
aaataattccataagagaca

SEQ ID NO: 36094 - DNA, 20 bp, Artificial Sequence
  MKO10036094_A_Olfr1253
  gRNA
ggttgatattgtcattctcg

SEQ ID NO: 36095 - DNA, 20 bp, Artificial Sequence
  MKO10036095_A_Olfr1253
  gRNA
caccattagcaatgatagtg

SEQ ID NO: 36096 - DNA, 20 bp, Artificial Sequence
  MKO10036096_A_Olfr1253
  gRNA
ctcactatcattgctaatgg

SEQ ID NO: 36097 - DNA, 20 bp, Artificial Sequence
  MKO10036097_A_Olfr1254
  gRNA
catacagattgctccatcgt

SEQ ID NO: 36098 - DNA, 20 bp, Artificial Sequence
  MKO10036098_A_Olfr1254
  gRNA
cttactgtcattgccaacga

SEQ ID NO: 36099 - DNA, 20 bp, Artificial Sequence
  MKO10036099_A_Olfr1254
  gRNA
tggagggtttgcacactcca

SEQ ID NO: 36100 - DNA, 20 bp, Artificial Sequence
  MKO10036100_A_Olfr1255
  gRNA
ctgtacatgataacaatttc

SEQ ID NO: 36101 - DNA, 20 bp, Artificial Sequence
  MKO10036101_A_Olfr1255
  gRNA
gtgtgacttgtacccattgt

SEQ ID NO: 36102 - DNA, 20 bp, Artificial Sequence
  MKO10036102_A_Olfr1255
  gRNA
ctacaccctcagaaattctg

SEQ ID NO: 36103 - DNA, 20 bp, Artificial Sequence
  MKO10036103_A_Olfr1256
  gRNA
cgtgcagatcagccctccat

SEQ ID NO: 36104 - DNA, 20 bp, Artificial Sequence
  MKO10036104_A_Olfr1256
  gRNA
ctctctaaagaaccttaatc

SEQ ID NO: 36105 - DNA, 20 bp, Artificial Sequence
  MKO10036105_A_Olfr1256
  gRNA
attcagctcagtactattta

SEQ ID NO: 36106 - DNA, 20 bp, Artificial Sequence
  MKO10036106_A_Olfr1257
  gRNA
ggagcgcaggatggcaacat

SEQ ID NO: 36107 - DNA, 20 bp, Artificial Sequence
  MKO10036107_A_Olfr1257
  gRNA
agtgctacccaatttcttaa

SEQ ID NO: 36108 - DNA, 20 bp, Artificial Sequence
  MKO10036108_A_Olfr1257
  gRNA
aagactatgtagcctgctag

SEQ ID NO: 36109 - DNA, 20 bp, Artificial Sequence
  MKO10036109_A_Olfr1258
  gRNA
tatcactgccagtccatcgc

SEQ ID NO: 36110 - DNA, 20 bp, Artificial Sequence
  MKO10036110_A_Olfr1258
  gRNA
cccataccactcctaccagc

SEQ ID NO: 36111 - DNA, 20 bp, Artificial Sequence
  MKO10036111_A_Olfr1258
  gRNA
gtgcatgcaaggttaagcaa

SEQ ID NO: 36112 - DNA, 20 bp, Artificial Sequence
  MKO10036112_A_Olfr1259
  gRNA
accactttgccacttgataa

SEQ ID NO: 36113 - DNA, 20 bp, Artificial Sequence
  MKO10036113_A_Olfr1259
  gRNA
gtgtgacttgtatccattgt

SEQ ID NO: 36114 - DNA, 20 bp, Artificial Sequence
  MKO10036114_A_Olfr1259
  gRNA
acagcaacacctttatcaag

SEQ ID NO: 36115 - DNA, 20 bp, Artificial Sequence
  MKO10036115_A_Olfr125
  gRNA
ttagtccgactatcagctga

SEQ ID NO: 36116 - DNA, 20 bp, Artificial Sequence
  MKO10036116_A_Olfr125
  gRNA
atatgaggtccattgctgac

SEQ ID NO: 36117 - DNA, 20 bp, Artificial Sequence
  MKO10036117_A_Olfr125
  gRNA
ctatctgggctcctacacac

SEQ ID NO: 36118 - DNA, 20 bp, Artificial Sequence
  MKO10036118_A_Olfr1260
  gRNA
cctgcatattcgtttacctt

SEQ ID NO: 36119 - DNA, 20 bp, Artificial Sequence
  MKO10036119_A_Olfr1260
  gRNA
catacacattagcccgctgt

SEQ ID NO: 36120 - DNA, 20 bp, Artificial Sequence
  MKO10036120_A_Olfr1260
  gRNA
agagcagcagccatctacga

SEQ ID NO: 36121 - DNA, 20 bp, Artificial Sequence
  MKO10036121_A_Olfr1261
  gRNA
acacagaggtcggttcatga

SEQ ID NO: 36122 - DNA, 20 bp, Artificial Sequence
  MKO10036122_A_Olfr1261
  gRNA
gtaatcttaggattcatcca

SEQ ID NO: 36123 - DNA, 20 bp, Artificial Sequence
  MKO10036123_A_Olfr1261
  gRNA
agattacagcagcccccacc

SEQ ID NO: 36124 - DNA, 20 bp, Artificial Sequence
  MKO10036124_A_Olfr1262
  gRNA
ggaatcgtggggtttgttca

SEQ ID NO: 36125 - DNA, 20 bp, Artificial Sequence
  MKO10036125_A_Olfr1262
  gRNA
gtttgacatgatttgacccc

SEQ ID NO: 36126 - DNA, 20 bp, Artificial Sequence
  MKO10036126_A_Olfr1262
  gRNA
tggtcatccttcgctcccta

SEQ ID NO: 36127 - DNA, 20 bp, Artificial Sequence
  MKO10036127_A_Olfr1263
  gRNA
aatcatcttgttgattgcca

SEQ ID NO: 36128 - DNA, 20 bp, Artificial Sequence
  MKO10036128_A_Olfr1263
  gRNA
gtaatcttaggattcattca

SEQ ID NO: 36129 - DNA, 20 bp, Artificial Sequence
  MKO10036129_A_Olfr1263
  gRNA
aatgaatcctaagattacag

SEQ ID NO: 36130 - DNA, 20 bp, Artificial Sequence
  MKO10036130_A_Olfr1264
  gRNA
ccgccaccagcacgacacaa

SEQ ID NO: 36131 - DNA, 20 bp, Artificial Sequence
  MKO10036131_A_Olfr1264
  gRNA
aagagtcgtcccttcataca

SEQ ID NO: 36132 - DNA, 20 bp, Artificial Sequence
  MKO10036132_A_Olfr1264
  gRNA
tgcaccaacacatacgtcat

SEQ ID NO: 36133 - DNA, 20 bp, Artificial Sequence
  MKO10036133_A_Olfr1265
  gRNA
cactgacagagttcccgcat

SEQ ID NO: 36134 - DNA, 20 bp, Artificial Sequence
  MKO10036134_A_Olfr1265
  gRNA
ctatccatgctgttcctacg

SEQ ID NO: 36135 - DNA, 20 bp, Artificial Sequence
  MKO10036135_A_Olfr1265
  gRNA
cacatttcggttcataatgc

SEQ ID NO: 36136 - DNA, 20 bp, Artificial Sequence
  MKO10036136_A_Olfr1269
  gRNA
tgactccataggatgctaag

SEQ ID NO: 36137 - DNA, 20 bp, Artificial Sequence
  MKO10036137_A_Olfr1269
  gRNA
gatgagaagtatttgagcaa

SEQ ID NO: 36138 - DNA, 20 bp, Artificial Sequence
  MKO10036138_A_Olfr1269
  gRNA
ctatccatgctgttcccatg

SEQ ID NO: 36139 - DNA, 20 bp, Artificial Sequence
  MKO10036139_A_Olfr126
  gRNA
cctgtaagatctgcaattca

SEQ ID NO: 36140 - DNA, 20 bp, Artificial Sequence
  MKO10036140_A_Olfr126
  gRNA
tcctgctctaatgattactt

SEQ ID NO: 36141 - DNA, 20 bp, Artificial Sequence
  MKO10036141_A_Olfr126
  gRNA
tctgaagcaactttccactc

SEQ ID NO: 36142 - DNA, 20 bp, Artificial Sequence
  MKO10036142_A_Olfr1270
  gRNA
caatggcctcattgttgcaa

SEQ ID NO: 36143 - DNA, 20 bp, Artificial Sequence
  MKO10036143_A_Olfr1270
  gRNA
cctgcagccattattcaagc

SEQ ID NO: 36144 - DNA, 20 bp, Artificial Sequence
  MKO10036144_A_Olfr1270
  gRNA
caatgaccattgcaacaatg

SEQ ID NO: 36145 - DNA, 20 bp, Artificial Sequence
  MKO10036145_A_Olfr1271
  gRNA
aaaatgctatacgtatgttc

SEQ ID NO: 36146 - DNA, 20 bp, Artificial Sequence
  MKO10036146_A_Olfr1271
  gRNA
tacaataaacctctccataa

SEQ ID NO: 36147 - DNA, 20 bp, Artificial Sequence
  MKO10036147_A_Olfr1271
  gRNA
tgcttgcagtgacaccttta

SEQ ID NO: 36148 - DNA, 20 bp, Artificial Sequence
  MKO10036148_A_Olfr1272
  gRNA
gggcaacagtcttattgttg

SEQ ID NO: 36149 - DNA, 20 bp, Artificial Sequence
  MKO10036149_A_Olfr1272
  gRNA
cataagccatcaccacaagc

SEQ ID NO: 36150 - DNA, 20 bp, Artificial Sequence
  MKO10036150_A_Olfr1272
  gRNA
tctgagccagacagcccttc

SEQ ID NO: 36151 - DNA, 20 bp, Artificial Sequence
  MKO10036151_A_Olfr1273-ps
  gRNA
cactaattgtcacaacaatg

SEQ ID NO: 36152 - DNA, 20 bp, Artificial Sequence
  MKO10036152_A_Olfr1273-ps
  gRNA
ggagtagcaaatctctacta

SEQ ID NO: 36153 - DNA, 20 bp, Artificial Sequence
  MKO10036153_A_Olfr1273-ps
  gRNA
atggaatagtgatgacgatc

SEQ ID NO: 36154 - DNA, 20 bp, Artificial Sequence
  MKO10036154_A_Olfr1274-ps
  gRNA
cataggccatcatcgtaagc

SEQ ID NO: 36155 - DNA, 20 bp, Artificial Sequence
  MKO10036155_A_Olfr1274-ps
  gRNA
gatgttcctgcttacgatga

SEQ ID NO: 36156 - DNA, 20 bp, Artificial Sequence
  MKO10036156_A_Olfr1274-ps
  gRNA
caccagcatcatgaaccgac

SEQ ID NO: 36157 - DNA, 20 bp, Artificial Sequence
  MKO10036157_A_Olfr1275
  gRNA
gatgtttgtcctccatctac

SEQ ID NO: 36158 - DNA, 20 bp, Artificial Sequence
  MKO10036158_A_Olfr1275
  gRNA
tcttcctcgattcatcaaaa

SEQ ID NO: 36159 - DNA, 20 bp, Artificial Sequence
  MKO10036159_A_Olfr1275
  gRNA
tgtgccagtggataagttcc

SEQ ID NO: 36160 - DNA, 20 bp, Artificial Sequence
  MKO10036160_A_Olfr1276
  gRNA
cattctgtagttgtctatgc

SEQ ID NO: 36161 - DNA, 20 bp, Artificial Sequence
  MKO10036161_A_Olfr1276
  gRNA
ggctcatgatggttaaatag

SEQ ID NO: 36162 - DNA, 20 bp, Artificial Sequence
  MKO10036162_A_Olfr1276
  gRNA
atgtgcctattgcttctatc

SEQ ID NO: 36163 - DNA, 20 bp, Artificial Sequence
  MKO10036163_A_Olfr1277
  gRNA
tgtgcattcaataagccaac

SEQ ID NO: 36164 - DNA, 20 bp, Artificial Sequence
  MKO10036164_A_Olfr1277
  gRNA
gtgatggcgtcatggatgat

SEQ ID NO: 36165 - DNA, 20 bp, Artificial Sequence
  MKO10036165_A_Olfr1277
  gRNA
gacagaagtcaatgaacgag

SEQ ID NO: 36166 - DNA, 20 bp, Artificial Sequence
  MKO10036166_A_Olfr1278
  gRNA
tgtgagcagaaagcgtagag

SEQ ID NO: 36167 - DNA, 20 bp, Artificial Sequence
  MKO10036167_A_Olfr1278
  gRNA
aatttatccactggcaccgt

SEQ ID NO: 36168 - DNA, 20 bp, Artificial Sequence
  MKO10036168_A_Olfr1278
  gRNA
actttatgtggccatcgtgc

SEQ ID NO: 36169 - DNA, 20 bp, Artificial Sequence
  MKO10036169_A_Olfr1279
  gRNA
acctgtctttgaacgatgtg

SEQ ID NO: 36170 - DNA, 20 bp, Artificial Sequence
  MKO10036170_A_Olfr1279
  gRNA
atacaactggcgtgcactga

SEQ ID NO: 36171 - DNA, 20 bp, Artificial Sequence
  MKO10036171_A_Olfr1279
  gRNA
cacgccagttgtatgatccg

SEQ ID NO: 36172 - DNA, 20 bp, Artificial Sequence
  MKO10036172_A_Olfr127
  gRNA
agttccctgctgaatccaat

SEQ ID NO: 36173 - DNA, 20 bp, Artificial Sequence
  MKO10036173_A_Olfr127
  gRNA
gagagatgagaagtccataa

SEQ ID NO: 36174 - DNA, 20 bp, Artificial Sequence
  MKO10036174_A_Olfr127
  gRNA
ctgtttgtctattgttgtga

SEQ ID NO: 36175 - DNA, 20 bp, Artificial Sequence
  MKO10036175_A_Olfr1280
  gRNA
atgtacttctcatattatag

SEQ ID NO: 36176 - DNA, 20 bp, Artificial Sequence
  MKO10036176_A_Olfr1280
  gRNA
caccctctacatgatgactg

SEQ ID NO: 36177 - DNA, 20 bp, Artificial Sequence
  MKO10036177_A_Olfr1280
  gRNA
atccagcaatctatacactg

SEQ ID NO: 36178 - DNA, 20 bp, Artificial Sequence
  MKO10036178_A_Olfr1281
  gRNA
tccacccaagtgatgtttac

SEQ ID NO: 36179 - DNA, 20 bp, Artificial Sequence
  MKO10036179_A_Olfr1281
  gRNA
caaatgatagattagctaac

SEQ ID NO: 36180 - DNA, 20 bp, Artificial Sequence
  MKO10036180_A_Olfr1281
  gRNA
ctaccaaagtcaccagatag

SEQ ID NO: 36181 - DNA, 20 bp, Artificial Sequence
  MKO10036181_A_Olfr1282
  gRNA
ctgcctcatataccctacaa

SEQ ID NO: 36182 - DNA, 20 bp, Artificial Sequence
  MKO10036182_A_Olfr1282
  gRNA
gtgacttatgagtttcttta

SEQ ID NO: 36183 - DNA, 20 bp, Artificial Sequence
  MKO10036183_A_Olfr1282
  gRNA
aagtataagatataagcaag

SEQ ID NO: 36184 - DNA, 20 bp, Artificial Sequence
  MKO10036184_A_Olfr1283
  gRNA
tctggctcgttgtgatctcg

SEQ ID NO: 36185 - DNA, 20 bp, Artificial Sequence
  MKO10036185_A_Olfr1283
  gRNA
tgccatgagtcaacttattc

SEQ ID NO: 36186 - DNA, 20 bp, Artificial Sequence
  MKO10036186_A_Olfr1283
  gRNA
aaccagaataagttgactca

SEQ ID NO: 36187 - DNA, 20 bp, Artificial Sequence
  MKO10036187_A_Olfr1284
  gRNA
cgtgtacctgtcaaacgcca

SEQ ID NO: 36188 - DNA, 20 bp, Artificial Sequence
  MKO10036188_A_Olfr1284
  gRNA
gctctatgtaagcatcatcg

SEQ ID NO: 36189 - DNA, 20 bp, Artificial Sequence
  MKO10036189_A_Olfr1284
  gRNA
catgccagttgtatgattcg

SEQ ID NO: 36190 - DNA, 20 bp, Artificial Sequence
  MKO10036190_A_Olfr1286
  gRNA
ggaagactctaatcatactg

SEQ ID NO: 36191 - DNA, 20 bp, Artificial Sequence
  MKO10036191_A_Olfr1286
  gRNA
tctggttccttgtgattcca

SEQ ID NO: 36192 - DNA, 20 bp, Artificial Sequence
  MKO10036192_A_Olfr1286
  gRNA
agaagtgcacacagacgatc

SEQ ID NO: 36193 - DNA, 20 bp, Artificial Sequence
  MKO10036193_A_Olfr1287
  gRNA
tagtataagatatcagtaag

SEQ ID NO: 36194 - DNA, 20 bp, Artificial Sequence
  MKO10036194_A_Olfr1287
  gRNA
atcctctgtgtgtacttctt

SEQ ID NO: 36195 - DNA, 20 bp, Artificial Sequence
  MKO10036195_A_Olfr1287
  gRNA
taaactcagagaccacagtc

SEQ ID NO: 36196 - DNA, 20 bp, Artificial Sequence
  MKO10036196_A_Olfr1288
  gRNA
tgaagaatgttgtcgtacac

SEQ ID NO: 36197 - DNA, 20 bp, Artificial Sequence
  MKO10036197_A_Olfr1288
  gRNA
ggcccaagtcaatgagcgaa

SEQ ID NO: 36198 - DNA, 20 bp, Artificial Sequence
  MKO10036198_A_Olfr1288
  gRNA
caacctttcgctcattgact

SEQ ID NO: 36199 - DNA, 20 bp, Artificial Sequence
  MKO10036199_A_Olfr1289
  gRNA
gaagggtaagcttatagcaa

SEQ ID NO: 36200 - DNA, 20 bp, Artificial Sequence
  MKO10036200_A_Olfr1289
  gRNA
ggtcattagaataataccat

SEQ ID NO: 36201 - DNA, 20 bp, Artificial Sequence
  MKO10036201_A_Olfr1289
  gRNA
gatctgaagttcccgagaat

SEQ ID NO: 36202 - DNA, 20 bp, Artificial Sequence
  MKO10036202_A_Olfr128
  gRNA
agcatgaagtctaaagtagt

SEQ ID NO: 36203 - DNA, 20 bp, Artificial Sequence
  MKO10036203_A_Olfr128
  gRNA
cataagacatcactgtaaga

SEQ ID NO: 36204 - DNA, 20 bp, Artificial Sequence
  MKO10036204_A_Olfr128
  gRNA
gaaggcaatccccataaagc

SEQ ID NO: 36205 - DNA, 20 bp, Artificial Sequence
  MKO10036205_A_Olfr1290
  gRNA
agatcagcaccaccgtaatg

SEQ ID NO: 36206 - DNA, 20 bp, Artificial Sequence
  MKO10036206_A_Olfr1290
  gRNA
ggatgaaggcaatcacacta

SEQ ID NO: 36207 - DNA, 20 bp, Artificial Sequence
  MKO10036207_A_Olfr1290
  gRNA
agtaactaccttagtcacaa

SEQ ID NO: 36208 - DNA, 20 bp, Artificial Sequence
  MKO10036208_A_Olfr1294
  gRNA
agattagcacgactgtaatg

SEQ ID NO: 36209 - DNA, 20 bp, Artificial Sequence
  MKO10036209_A_Olfr1294
  gRNA
ccaaactgctgcatctctta

SEQ ID NO: 36210 - DNA, 20 bp, Artificial Sequence
  MKO10036210_A_Olfr1294
  gRNA
ccttaagagatgcagcagtt

SEQ ID NO: 36211 - DNA, 20 bp, Artificial Sequence
  MKO10036211_A_Olfr1295
  gRNA
atataatggatggaggcaac

SEQ ID NO: 36212 - DNA, 20 bp, Artificial Sequence
  MKO10036212_A_Olfr1295
  gRNA
gttagcaagagctctaaagc

SEQ ID NO: 36213 - DNA, 20 bp, Artificial Sequence
  MKO10036213_A_Olfr1295
  gRNA
tatacatggtataagttact

SEQ ID NO: 36214 - DNA, 20 bp, Artificial Sequence
  MKO10036214_A_Olfr1297
  gRNA
gttcatcagaattcgaaaac

SEQ ID NO: 36215 - DNA, 20 bp, Artificial Sequence
  MKO10036215_A_Olfr1297
  gRNA
tttacatggtataagtcacg

SEQ ID NO: 36216 - DNA, 20 bp, Artificial Sequence
  MKO10036216_A_Olfr1297
  gRNA
ggtcagttgttattaagatt

SEQ ID NO: 36217 - DNA, 20 bp, Artificial Sequence
  MKO10036217_A_Olfr1298
  gRNA
gttcgccagacttcaaaaaa

SEQ ID NO: 36218 - DNA, 20 bp, Artificial Sequence
  MKO10036218_A_Olfr1298
  gRNA
tttatattaggaatttcctt

SEQ ID NO: 36219 - DNA, 20 bp, Artificial Sequence
  MKO10036219_A_Olfr1298
  gRNA
aaaaagtaacagcataaagc

SEQ ID NO: 36220 - DNA, 20 bp, Artificial Sequence
  MKO10036220_A_Olfr1299
  gRNA
ctgcacagattcccatgatt

SEQ ID NO: 36221 - DNA, 20 bp, Artificial Sequence
  MKO10036221_A_Olfr1299
  gRNA
caggctagtttgattactag

SEQ ID NO: 36222 - DNA, 20 bp, Artificial Sequence
  MKO10036222_A_Olfr1299
  gRNA
ctcagttaccacaccaaaaa

SEQ ID NO: 36223 - DNA, 20 bp, Artificial Sequence
  MKO10036223_A_Olfr129
  gRNA
tatacaacccgaatgaatcg

SEQ ID NO: 36224 - DNA, 20 bp, Artificial Sequence
  MKO10036224_A_Olfr129
  gRNA
aacaggttgcattgtagggt

SEQ ID NO: 36225 - DNA, 20 bp, Artificial Sequence
  MKO10036225_A_Olfr129
  gRNA
gatgaacagaaacccgggag

SEQ ID NO: 36226 - DNA, 20 bp, Artificial Sequence
  MKO10036226_A_Olfr12
  gRNA
ccaccagcacaaacactcgc

SEQ ID NO: 36227 - DNA, 20 bp, Artificial Sequence
  MKO10036227_A_Olfr12
  gRNA
gtccctgcgagtgtttgtgc

SEQ ID NO: 36228 - DNA, 20 bp, Artificial Sequence
  MKO10036228_A_Olfr12
  gRNA
aaaacaaagacaccgctgtc

SEQ ID NO: 36229 - DNA, 20 bp, Artificial Sequence
  MKO10036229_A_Olfr1301
  gRNA
ggatggaagtaatcgctccc

SEQ ID NO: 36230 - DNA, 20 bp, Artificial Sequence
  MKO10036230_A_Olfr1301
  gRNA
atttatatgaatgtcgactg

SEQ ID NO: 36231 - DNA, 20 bp, Artificial Sequence
  MKO10036231_A_Olfr1301
  gRNA
atgcacaaaggcaattgccc

SEQ ID NO: 36232 - DNA, 20 bp, Artificial Sequence
  MKO10036232_A_Olfr1302
  gRNA
gcagttccacaatcactacc

SEQ ID NO: 36233 - DNA, 20 bp, Artificial Sequence
  MKO10036233_A_Olfr1302
  gRNA
ctggatattaggacttccct

SEQ ID NO: 36234 - DNA, 20 bp, Artificial Sequence
  MKO10036234_A_Olfr1302
  gRNA
caaattatgagaatccatac

SEQ ID NO: 36235 - DNA, 20 bp, Artificial Sequence
  MKO10036235_A_Olfr1303
  gRNA
tctccactccaccaactaaa

SEQ ID NO: 36236 - DNA, 20 bp, Artificial Sequence
  MKO10036236_A_Olfr1303
  gRNA
ctactctgtttatatatacg

SEQ ID NO: 36237 - DNA, 20 bp, Artificial Sequence
  MKO10036237_A_Olfr1303
  gRNA
aaaacattattaacctttag

SEQ ID NO: 36238 - DNA, 20 bp, Artificial Sequence
  MKO10036238_A_Olfr1305
  gRNA
aagcagcaactaatattagc

SEQ ID NO: 36239 - DNA, 20 bp, Artificial Sequence
  MKO10036239_A_Olfr1305
  gRNA
atgatggtcagatagcgtaa

SEQ ID NO: 36240 - DNA, 20 bp, Artificial Sequence
  MKO10036240_A_Olfr1305
  gRNA
ttctatgtatccagtttgac

SEQ ID NO: 36241 - DNA, 20 bp, Artificial Sequence
  MKO10036241_A_Olfr1306
  gRNA
aacttatcaagatgtgttga

SEQ ID NO: 36242 - DNA, 20 bp, Artificial Sequence
  MKO10036242_A_Olfr1306
  gRNA
ctgcataaatacttaccagc

SEQ ID NO: 36243 - DNA, 20 bp, Artificial Sequence
  MKO10036243_A_Olfr1306
  gRNA
catgcttgccacataaaacg

SEQ ID NO: 36244 - DNA, 20 bp, Artificial Sequence
  MKO10036244_A_Olfr1307
  gRNA
aacttatcaaggtgtgtcga

SEQ ID NO: 36245 - DNA, 20 bp, Artificial Sequence
  MKO10036245_A_Olfr1307
  gRNA
ctgcatagacactaaccagc

SEQ ID NO: 36246 - DNA, 20 bp, Artificial Sequence
  MKO10036246_A_Olfr1307
  gRNA
taattgaatactccaagagt

SEQ ID NO: 36247 - DNA, 20 bp, Artificial Sequence
  MKO10036247_A_Olfr1308
  gRNA
gtgacgattgcatcaaatat

SEQ ID NO: 36248 - DNA, 20 bp, Artificial Sequence
  MKO10036248_A_Olfr1308
  gRNA
agtcaacagtggattcatgt

SEQ ID NO: 36249 - DNA, 20 bp, Artificial Sequence
  MKO10036249_A_Olfr1308
  gRNA
gagagtacttagacagataa

SEQ ID NO: 36250 - DNA, 20 bp, Artificial Sequence
  MKO10036250_A_Olfr1309
  gRNA
cccatatattagtgatcccg

SEQ ID NO: 36251 - DNA, 20 bp, Artificial Sequence
  MKO10036251_A_Olfr1309
  gRNA
acgaatgatgattctgatgt

SEQ ID NO: 36252 - DNA, 20 bp, Artificial Sequence
  MKO10036252_A_Olfr1309
  gRNA
caagtctgaggagtcggggc

SEQ ID NO: 36253 - DNA, 20 bp, Artificial Sequence
  MKO10036253_A_Olfr130
  gRNA
taccagcatgtgcgacccac

SEQ ID NO: 36254 - DNA, 20 bp, Artificial Sequence
  MKO10036254_A_Olfr130
  gRNA
aacctgtgggtcgcacatgc

SEQ ID NO: 36255 - DNA, 20 bp, Artificial Sequence
  MKO10036255_A_Olfr130
  gRNA
catgaatagctgcacttcat

SEQ ID NO: 36256 - DNA, 20 bp, Artificial Sequence
  MKO10036256_A_Olfr1310
  gRNA
tctcggtgccacctactgca

SEQ ID NO: 36257 - DNA, 20 bp, Artificial Sequence
  MKO10036257_A_Olfr1310
  gRNA
tcccctatgtacttcctatt

SEQ ID NO: 36258 - DNA, 20 bp, Artificial Sequence
  MKO10036258_A_Olfr1310
  gRNA
acttgccacgtagaatatac

SEQ ID NO: 36259 - DNA, 20 bp, Artificial Sequence
  MKO10036259_A_Olfr1311
  gRNA
gaccatgaacaccaatttac

SEQ ID NO: 36260 - DNA, 20 bp, Artificial Sequence
  MKO10036260_A_Olfr1311
  gRNA
ccactgagtgaataagtcca

SEQ ID NO: 36261 - DNA, 20 bp, Artificial Sequence
  MKO10036261_A_Olfr1311
  gRNA
gttctacatagcgagtgtga

SEQ ID NO: 36262 - DNA, 20 bp, Artificial Sequence
  MKO10036262_A_Olfr1312
  gRNA
ttactggtctcaatcaatag

SEQ ID NO: 36263 - DNA, 20 bp, Artificial Sequence
  MKO10036263_A_Olfr1312
  gRNA
tagttgaatattccaagaat

SEQ ID NO: 36264 - DNA, 20 bp, Artificial Sequence
  MKO10036264_A_Olfr1312
  gRNA
gagagtattcagtaagctaa

SEQ ID NO: 36265 - DNA, 20 bp, Artificial Sequence
  MKO10036265_A_Olfr1313
  gRNA
aagtgtagacagcgctttgt

SEQ ID NO: 36266 - DNA, 20 bp, Artificial Sequence
  MKO10036266_A_Olfr1313
  gRNA
tatgcactctgtgatacaac

SEQ ID NO: 36267 - DNA, 20 bp, Artificial Sequence
  MKO10036267_A_Olfr1313
  gRNA
gtgcataagaccaactaccc

SEQ ID NO: 36268 - DNA, 20 bp, Artificial Sequence
  MKO10036268_A_Olfr1314
  gRNA
cacacacctggataagtacc

SEQ ID NO: 36269 - DNA, 20 bp, Artificial Sequence
  MKO10036269_A_Olfr1314
  gRNA
ctgaaaccattaattctaat

SEQ ID NO: 36270 - DNA, 20 bp, Artificial Sequence
  MKO10036270_A_Olfr1314
  gRNA
agatatgactagtatgaaga

SEQ ID NO: 36271 - DNA, 20 bp, Artificial Sequence
  MKO10036271_A_Olfr1316
  gRNA
ggtgatgactgcatcaaata

SEQ ID NO: 36272 - DNA, 20 bp, Artificial Sequence
  MKO10036272_A_Olfr1316
  gRNA
gaacagatcataaatcatct

SEQ ID NO: 36273 - DNA, 20 bp, Artificial Sequence
  MKO10036273_A_Olfr1316
  gRNA
tactgacatacatgctaatg

SEQ ID NO: 36274 - DNA, 20 bp, Artificial Sequence
  MKO10036274_A_Olfr1317
  gRNA
agtgtttacgaactgtgacc

SEQ ID NO: 36275 - DNA, 20 bp, Artificial Sequence
  MKO10036275_A_Olfr1317
  gRNA
attcatagaaggagtgataa

SEQ ID NO: 36276 - DNA, 20 bp, Artificial Sequence
  MKO10036276_A_Olfr1317
  gRNA
caatgaggagactctttgct

SEQ ID NO: 36277 - DNA, 20 bp, Artificial Sequence
  MKO10036277_A_Olfr1318
  gRNA
cgatgaggagactatttatt

SEQ ID NO: 36278 - DNA, 20 bp, Artificial Sequence
  MKO10036278_A_Olfr1318
  gRNA
ggatggaggaaatcactcaa

SEQ ID NO: 36279 - DNA, 20 bp, Artificial Sequence
  MKO10036279_A_Olfr1318
  gRNA
tgctaggcctcaccaattca

SEQ ID NO: 36280 - DNA, 20 bp, Artificial Sequence
  MKO10036280_A_Olfr131
  gRNA
agttatcatgtgttgacacc

SEQ ID NO: 36281 - DNA, 20 bp, Artificial Sequence
  MKO10036281_A_Olfr131
  gRNA
agaagagccatttccagtcg

SEQ ID NO: 36282 - DNA, 20 bp, Artificial Sequence
  MKO10036282_A_Olfr131
  gRNA
gcctaccagaataaagccat

SEQ ID NO: 36283 - DNA, 20 bp, Artificial Sequence
  MKO10036283_A_Olfr1320
  gRNA
gtctatgctgtaccattagc

SEQ ID NO: 36284 - DNA, 20 bp, Artificial Sequence
  MKO10036284_A_Olfr1320
  gRNA
caatattgtaccccgaatgc

SEQ ID NO: 36285 - DNA, 20 bp, Artificial Sequence
  MKO10036285_A_Olfr1320
  gRNA
gactaactttagtctcttac

SEQ ID NO: 36286 - DNA, 20 bp, Artificial Sequence
  MKO10036286_A_Olfr1321
  gRNA
atgagagatgggtaccgaag

SEQ ID NO: 36287 - DNA, 20 bp, Artificial Sequence
  MKO10036287_A_Olfr1321
  gRNA
gagcccaaatctcatagata

SEQ ID NO: 36288 - DNA, 20 bp, Artificial Sequence
  MKO10036288_A_Olfr1321
  gRNA
gtcattgtgacagtaacaac

SEQ ID NO: 36289 - DNA, 20 bp, Artificial Sequence
  MKO10036289_A_Olfr1322
  gRNA
tgtacctcattattcgctct

SEQ ID NO: 36290 - DNA, 20 bp, Artificial Sequence
  MKO10036290_A_Olfr1322
  gRNA
agctacttgagtattagtgc

SEQ ID NO: 36291 - DNA, 20 bp, Artificial Sequence
  MKO10036291_A_Olfr1322
  gRNA
actacactattccagtatca

SEQ ID NO: 36292 - DNA, 20 bp, Artificial Sequence
  MKO10036292_A_Olfr1323
  gRNA
acacgtatttgcaaccctct

SEQ ID NO: 36293 - DNA, 20 bp, Artificial Sequence
  MKO10036293_A_Olfr1323
  gRNA
gaattagtaccacaagccct

SEQ ID NO: 36294 - DNA, 20 bp, Artificial Sequence
  MKO10036294_A_Olfr1323
  gRNA
tcaatggagaattcatctac

SEQ ID NO: 36295 - DNA, 20 bp, Artificial Sequence
  MKO10036295_A_Olfr1324
  gRNA
aaccaacagggcacagcgct

SEQ ID NO: 36296 - DNA, 20 bp, Artificial Sequence
  MKO10036296_A_Olfr1324
  gRNA
actagattagagataaccca

SEQ ID NO: 36297 - DNA, 20 bp, Artificial Sequence
  MKO10036297_A_Olfr1324
  gRNA
agcagtgccaataagtgcat

SEQ ID NO: 36298 - DNA, 20 bp, Artificial Sequence
  MKO10036298_A_Olfr1325
  gRNA
cagtgttgtacccttgatca

SEQ ID NO: 36299 - DNA, 20 bp, Artificial Sequence
  MKO10036299_A_Olfr1325
  gRNA
ataaccagattatacctgag

SEQ ID NO: 36300 - DNA, 20 bp, Artificial Sequence
  MKO10036300_A_Olfr1325
  gRNA
attgagagttgcctcctact

SEQ ID NO: 36301 - DNA, 20 bp, Artificial Sequence
  MKO10036301_A_Olfr1328
  gRNA
cagccacttacatctacctt

SEQ ID NO: 36302 - DNA, 20 bp, Artificial Sequence
  MKO10036302_A_Olfr1328
  gRNA
gtgtactttcttcgttgtca

SEQ ID NO: 36303 - DNA, 20 bp, Artificial Sequence
  MKO10036303_A_Olfr1328
  gRNA
tcaaggtgatgggacatagt

SEQ ID NO: 36304 - DNA, 20 bp, Artificial Sequence
  MKO10036304_A_Olfr1329
  gRNA
ctgccagctacatctacctt

SEQ ID NO: 36305 - DNA, 20 bp, Artificial Sequence
  MKO10036305_A_Olfr1329
  gRNA
ctcctacattcgtattgtca

SEQ ID NO: 36306 - DNA, 20 bp, Artificial Sequence
  MKO10036306_A_Olfr1329
  gRNA
ggcctgtgcatacggttggc

SEQ ID NO: 36307 - DNA, 20 bp, Artificial Sequence
  MKO10036307_A_Olfr132
  gRNA
acctgagggtagcagtagat

SEQ ID NO: 36308 - DNA, 20 bp, Artificial Sequence
  MKO10036308_A_Olfr132
  gRNA
tccaatctactgctaccctc

SEQ ID NO: 36309 - DNA, 20 bp, Artificial Sequence
  MKO10036309_A_Olfr132
  gRNA
tatcctcctagtgttaccct

SEQ ID NO: 36310 - DNA, 20 bp, Artificial Sequence
  MKO10036310_A_Olfr1330
  gRNA
ctctgcatacatttgacagc

SEQ ID NO: 36311 - DNA, 20 bp, Artificial Sequence
  MKO10036311_A_Olfr1330
  gRNA
ctgctgtcaaatgtatgcag

SEQ ID NO: 36312 - DNA, 20 bp, Artificial Sequence
  MKO10036312_A_Olfr1330
  gRNA
gctgttggttgtggggtcgc

SEQ ID NO: 36313 - DNA, 20 bp, Artificial Sequence
  MKO10036313_A_Olfr1331
  gRNA
gggcctcaagtaagtgtaag

SEQ ID NO: 36314 - DNA, 20 bp, Artificial Sequence
  MKO10036314_A_Olfr1331
  gRNA
tttctcaaggtgatgggtta

SEQ ID NO: 36315 - DNA, 20 bp, Artificial Sequence
  MKO10036315_A_Olfr1331
  gRNA
cagccacttacacttacttg

SEQ ID NO: 36316 - DNA, 20 bp, Artificial Sequence
  MKO10036316_A_Olfr1333
  gRNA
ttaaggtgatgggttatgac

SEQ ID NO: 36317 - DNA, 20 bp, Artificial Sequence
  MKO10036317_A_Olfr1333
  gRNA
caccaaaaacaaacatctgc

SEQ ID NO: 36318 - DNA, 20 bp, Artificial Sequence
  MKO10036318_A_Olfr1333
  gRNA
gagatctgcttgtcttgctc

SEQ ID NO: 36319 - DNA, 20 bp, Artificial Sequence
  MKO10036319_A_Olfr1335
  gRNA
ggtggacccgtggaccacaa

SEQ ID NO: 36320 - DNA, 20 bp, Artificial Sequence
  MKO10036320_A_Olfr1335
  gRNA
tatctaaggattcaccattg

SEQ ID NO: 36321 - DNA, 20 bp, Artificial Sequence
  MKO10036321_A_Olfr1335
  gRNA
ctcatgtagatgtaagtagc

SEQ ID NO: 36322 - DNA, 20 bp, Artificial Sequence
  MKO10036322_A_Olfr1336
  gRNA
tccatggcttctatgcggct

SEQ ID NO: 36323 - DNA, 20 bp, Artificial Sequence
  MKO10036323_A_Olfr1336
  gRNA
agcccaataggacaaactcc

SEQ ID NO: 36324 - DNA, 20 bp, Artificial Sequence
  MKO10036324_A_Olfr1336
  gRNA
cattggggccacaataggac

SEQ ID NO: 36325 - DNA, 20 bp, Artificial Sequence
  MKO10036325_A_Olfr1337
  gRNA
cttgatcttgagaatcgcca

SEQ ID NO: 36326 - DNA, 20 bp, Artificial Sequence
  MKO10036326_A_Olfr1337
  gRNA
ggcttgtgcatacggttggc

SEQ ID NO: 36327 - DNA, 20 bp, Artificial Sequence
  MKO10036327_A_Olfr1337
  gRNA
atcctgttgggtccacaata

SEQ ID NO: 36328 - DNA, 20 bp, Artificial Sequence
  MKO10036328_A_Olfr1338
  gRNA
gaaatagtggtcaacccttt

SEQ ID NO: 36329 - DNA, 20 bp, Artificial Sequence
  MKO10036329_A_Olfr1338
  gRNA
gttgaccactatttctgtga

SEQ ID NO: 36330 - DNA, 20 bp, Artificial Sequence
  MKO10036330_A_Olfr1338
  gRNA
ttcctacattcacattacca

SEQ ID NO: 36331 - DNA, 20 bp, Artificial Sequence
  MKO10036331_A_Olfr1339
  gRNA
cattgcccacaagcgtagag

SEQ ID NO: 36332 - DNA, 20 bp, Artificial Sequence
  MKO10036332_A_Olfr1339
  gRNA
cctctacctctctacgcttg

SEQ ID NO: 36333 - DNA, 20 bp, Artificial Sequence
  MKO10036333_A_Olfr1339
  gRNA
aaaaggccttcagtcgacct

SEQ ID NO: 36334 - DNA, 20 bp, Artificial Sequence
  MKO10036334_A_Olfr133
  gRNA
acactgcaattgcctctttg

SEQ ID NO: 36335 - DNA, 20 bp, Artificial Sequence
  MKO10036335_A_Olfr133
  gRNA
actctgtaccccccattgtg

SEQ ID NO: 36336 - DNA, 20 bp, Artificial Sequence
  MKO10036336_A_Olfr133
  gRNA
tgcacacctcatgtagctga

SEQ ID NO: 36337 - DNA, 20 bp, Artificial Sequence
  MKO10036337_A_Olfr1340
  gRNA
gacgagcatctattctaatc

SEQ ID NO: 36338 - DNA, 20 bp, Artificial Sequence
  MKO10036338_A_Olfr1340
  gRNA
ctctacccaaggacggatga

SEQ ID NO: 36339 - DNA, 20 bp, Artificial Sequence
  MKO10036339_A_Olfr1340
  gRNA
ggctcatcttgactccatag

SEQ ID NO: 36340 - DNA, 20 bp, Artificial Sequence
  MKO10036340_A_Olfr1341
  gRNA
taccacagcctgttaccttg

SEQ ID NO: 36341 - DNA, 20 bp, Artificial Sequence
  MKO10036341_A_Olfr1341
  gRNA
ggtgtagcctaagtccaaca

SEQ ID NO: 36342 - DNA, 20 bp, Artificial Sequence
  MKO10036342_A_Olfr1341
  gRNA
cttgaagatccgttcagcac

SEQ ID NO: 36343 - DNA, 20 bp, Artificial Sequence
  MKO10036343_A_Olfr1342
  gRNA
tgagcggattcttaagatgg

SEQ ID NO: 36344 - DNA, 20 bp, Artificial Sequence
  MKO10036344_A_Olfr1342
  gRNA
cacatccttcaatgaccgct

SEQ ID NO: 36345 - DNA, 20 bp, Artificial Sequence
  MKO10036345_A_Olfr1342
  gRNA
gccagcttcttgtcccgttc

SEQ ID NO: 36346 - DNA, 20 bp, Artificial Sequence
  MKO10036346_A_Olfr1344
  gRNA
caatgcgcgtcccccgcagc

SEQ ID NO: 36347 - DNA, 20 bp, Artificial Sequence
  MKO10036347_A_Olfr1344
  gRNA
tgtgagtaccacgctaccgc

SEQ ID NO: 36348 - DNA, 20 bp, Artificial Sequence
  MKO10036348_A_Olfr1344
  gRNA
accgctgcattatgcgaccc

SEQ ID NO: 36349 - DNA, 20 bp, Artificial Sequence
  MKO10036349_A_Olfr1346
  gRNA
gggaggtccatgcagtgttg

SEQ ID NO: 36350 - DNA, 20 bp, Artificial Sequence
  MKO10036350_A_Olfr1346
  gRNA
ggttgctctggcctcttatg

SEQ ID NO: 36351 - DNA, 20 bp, Artificial Sequence
  MKO10036351_A_Olfr1346
  gRNA
gatggagagatctctacaac

SEQ ID NO: 36352 - DNA, 20 bp, Artificial Sequence
  MKO10036352_A_Olfr1347
  gRNA
tctttatcgccgagaccaca

SEQ ID NO: 36353 - DNA, 20 bp, Artificial Sequence
  MKO10036353_A_Olfr1347
  gRNA
cattgggaccacagtagatc

SEQ ID NO: 36354 - DNA, 20 bp, Artificial Sequence
  MKO10036354_A_Olfr1347
  gRNA
cgtccacagtcccacgagta

SEQ ID NO: 36355 - DNA, 20 bp, Artificial Sequence
  MKO10036355_A_Olfr1348
  gRNA
cgtccatagacccacaagta

SEQ ID NO: 36356 - DNA, 20 bp, Artificial Sequence
  MKO10036356_A_Olfr1348
  gRNA
tctacagatggctagatcct

SEQ ID NO: 36357 - DNA, 20 bp, Artificial Sequence
  MKO10036357_A_Olfr1348
  gRNA
attgccagtctgtcttactg

SEQ ID NO: 36358 - DNA, 20 bp, Artificial Sequence
  MKO10036358_A_Olfr1349
  gRNA
cgaactccagctcgcgtgct

SEQ ID NO: 36359 - DNA, 20 bp, Artificial Sequence
  MKO10036359_A_Olfr1349
  gRNA
agatctctaccagcgccagt

SEQ ID NO: 36360 - DNA, 20 bp, Artificial Sequence
  MKO10036360_A_Olfr1349
  gRNA
ggtcatccacttgcgcccca

SEQ ID NO: 36361 - DNA, 20 bp, Artificial Sequence
  MKO10036361_A_Olfr134
  gRNA
cctcagatgctaaccaacct

SEQ ID NO: 36362 - DNA, 20 bp, Artificial Sequence
  MKO10036362_A_Olfr134
  gRNA
ctttgtggaacttccaaggt

SEQ ID NO: 36363 - DNA, 20 bp, Artificial Sequence
  MKO10036363_A_Olfr134
  gRNA
ccacaataaactggatcact

SEQ ID NO: 36364 - DNA, 20 bp, Artificial Sequence
  MKO10036364_A_Olfr1350
  gRNA
cggccatgcgcccttgcagt

SEQ ID NO: 36365 - DNA, 20 bp, Artificial Sequence
  MKO10036365_A_Olfr1350
  gRNA
tcatggttaccccatatgtc

SEQ ID NO: 36366 - DNA, 20 bp, Artificial Sequence
  MKO10036366_A_Olfr1350
  gRNA
ccactcatgcatctagcttg

SEQ ID NO: 36367 - DNA, 20 bp, Artificial Sequence
  MKO10036367_A_Olfr1351
  gRNA
tgacagccgtaatgccaaaa

SEQ ID NO: 36368 - DNA, 20 bp, Artificial Sequence
  MKO10036368_A_Olfr1351
  gRNA
ctatgcaaactgcatcaccc

SEQ ID NO: 36369 - DNA, 20 bp, Artificial Sequence
  MKO10036369_A_Olfr1351
  gRNA
tgctgtgactcaaaatgcac

SEQ ID NO: 36370 - DNA, 20 bp, Artificial Sequence
  MKO10036370_A_Olfr1352
  gRNA
tgccatccactgcattatac

SEQ ID NO: 36371 - DNA, 20 bp, Artificial Sequence
  MKO10036371_A_Olfr1352
  gRNA
tcgtatggaggatactatct

SEQ ID NO: 36372 - DNA, 20 bp, Artificial Sequence
  MKO10036372_A_Olfr1352
  gRNA
aacttgcagcctgttatatg

SEQ ID NO: 36373 - DNA, 20 bp, Artificial Sequence
  MKO10036373_A_Olfr1353
  gRNA
ccctaaaaagactcttcgtg

SEQ ID NO: 36374 - DNA, 20 bp, Artificial Sequence
  MKO10036374_A_Olfr1353
  gRNA
gtgagttgaatcacctgatt

SEQ ID NO: 36375 - DNA, 20 bp, Artificial Sequence
  MKO10036375_A_Olfr1353
  gRNA
cgtgcaatgtcctcagttca

SEQ ID NO: 36376 - DNA, 20 bp, Artificial Sequence
  MKO10036376_A_Olfr1354
  gRNA
acaatgactgtgtaatataa

SEQ ID NO: 36377 - DNA, 20 bp, Artificial Sequence
  MKO10036377_A_Olfr1354
  gRNA
ccaacagctctgtatactga

SEQ ID NO: 36378 - DNA, 20 bp, Artificial Sequence
  MKO10036378_A_Olfr1354
  gRNA
ccatcagtatacagagctgt

SEQ ID NO: 36379 - DNA, 20 bp, Artificial Sequence
  MKO10036379_A_Olfr1355
  gRNA
ccaacaactctgtatgctga

SEQ ID NO: 36380 - DNA, 20 bp, Artificial Sequence
  MKO10036380_A_Olfr1355
  gRNA
gaaatggctcccaatagaac

SEQ ID NO: 36381 - DNA, 20 bp, Artificial Sequence
  MKO10036381_A_Olfr1355
  gRNA
ccatcagcatacagagttgt

SEQ ID NO: 36382 - DNA, 20 bp, Artificial Sequence
  MKO10036382_A_Olfr1356
  gRNA
ctgataggagtaaattgtcc

SEQ ID NO: 36383 - DNA, 20 bp, Artificial Sequence
  MKO10036383_A_Olfr1356
  gRNA
ttcttgcttctgtgcgatgc

SEQ ID NO: 36384 - DNA, 20 bp, Artificial Sequence
  MKO10036384_A_Olfr1356
  gRNA
ttgtacttgcccccagctga

SEQ ID NO: 36385 - DNA, 20 bp, Artificial Sequence
  MKO10036385_A_Olfr1357
  gRNA
agctgtctatagtcccaaag

SEQ ID NO: 36386 - DNA, 20 bp, Artificial Sequence
  MKO10036386_A_Olfr1357
  gRNA
accagtagtgcgcagacatg

SEQ ID NO: 36387 - DNA, 20 bp, Artificial Sequence
  MKO10036387_A_Olfr1357
  gRNA
cccacatgtctgcgcactac

SEQ ID NO: 36388 - DNA, 20 bp, Artificial Sequence
  MKO10036388_A_Olfr1359
  gRNA
gcccagcagaaagcattctg

SEQ ID NO: 36389 - DNA, 20 bp, Artificial Sequence
  MKO10036389_A_Olfr1359
  gRNA
actagaaacaccacaaagag

SEQ ID NO: 36390 - DNA, 20 bp, Artificial Sequence
  MKO10036390_A_Olfr1359
  gRNA
ttccacagaatgctttctgc

SEQ ID NO: 36391 - DNA, 20 bp, Artificial Sequence
  MKO10036391_A_Olfr135
  gRNA
tgaagatacatactaatacc

SEQ ID NO: 36392 - DNA, 20 bp, Artificial Sequence
  MKO10036392_A_Olfr135
  gRNA
agttacgccgattcattatg

SEQ ID NO: 36393 - DNA, 20 bp, Artificial Sequence
  MKO10036393_A_Olfr135
  gRNA
tacacacctcaagtagctga

SEQ ID NO: 36394 - DNA, 20 bp, Artificial Sequence
  MKO10036394_A_Olfr1360
  gRNA
attctgtgcaacccaaagcc

SEQ ID NO: 36395 - DNA, 20 bp, Artificial Sequence
  MKO10036395_A_Olfr1360
  gRNA
actagaaataccacaaagag

SEQ ID NO: 36396 - DNA, 20 bp, Artificial Sequence
  MKO10036396_A_Olfr1360
  gRNA
ttgcacagaatgctttctgc

SEQ ID NO: 36397 - DNA, 20 bp, Artificial Sequence
  MKO10036397_A_Olfr1361
  gRNA
acgttgatgttgccccgctg

SEQ ID NO: 36398 - DNA, 20 bp, Artificial Sequence
  MKO10036398_A_Olfr1361
  gRNA
gttaacactaggagtgacaa

SEQ ID NO: 36399 - DNA, 20 bp, Artificial Sequence
  MKO10036399_A_Olfr1361
  gRNA
acttgatcctaaacactgct

SEQ ID NO: 36400 - DNA, 20 bp, Artificial Sequence
  MKO10036400_A_Olfr1362
  gRNA
aattctccggcggccacatc

SEQ ID NO: 36401 - DNA, 20 bp, Artificial Sequence
  MKO10036401_A_Olfr1362
  gRNA
actctacactgccaatcgac

SEQ ID NO: 36402 - DNA, 20 bp, Artificial Sequence
  MKO10036402_A_Olfr1362
  gRNA
attggcgagtccaacccccc

SEQ ID NO: 36403 - DNA, 20 bp, Artificial Sequence
  MKO10036403_A_Olfr1364
  gRNA
gatgatattcccgtaaaaca

SEQ ID NO: 36404 - DNA, 20 bp, Artificial Sequence
  MKO10036404_A_Olfr1364
  gRNA
accatgaagctgcctcgatg

SEQ ID NO: 36405 - DNA, 20 bp, Artificial Sequence
  MKO10036405_A_Olfr1364
  gRNA
gcataatgaccgagtagtga

SEQ ID NO: 36406 - DNA, 20 bp, Artificial Sequence
  MKO10036406_A_Olfr1366
  gRNA
tctcttgcataccctcatga

SEQ ID NO: 36407 - DNA, 20 bp, Artificial Sequence
  MKO10036407_A_Olfr1366
  gRNA
tgtggtgggcctgatatttg

SEQ ID NO: 36408 - DNA, 20 bp, Artificial Sequence
  MKO10036408_A_Olfr1366
  gRNA
atcatgagggtatgcaagag

SEQ ID NO: 36409 - DNA, 20 bp, Artificial Sequence
  MKO10036409_A_Olfr1367
  gRNA
ttgagcctccctgccgcaga

SEQ ID NO: 36410 - DNA, 20 bp, Artificial Sequence
  MKO10036410_A_Olfr1367
  gRNA
cacttgctcatcgcacctgc

SEQ ID NO: 36411 - DNA, 20 bp, Artificial Sequence
  MKO10036411_A_Olfr1367
  gRNA
ctcctacatgttcacattgc

SEQ ID NO: 36412 - DNA, 20 bp, Artificial Sequence
  MKO10036412_A_Olfr1368
  gRNA
cacaacgatctcaatcactc

SEQ ID NO: 36413 - DNA, 20 bp, Artificial Sequence
  MKO10036413_A_Olfr1368
  gRNA
actgccgagaccacccaacc

SEQ ID NO: 36414 - DNA, 20 bp, Artificial Sequence
  MKO10036414_A_Olfr1368
  gRNA
caatgctagtagtataacag

SEQ ID NO: 36415 - DNA, 20 bp, Artificial Sequence
  MKO10036415_A_Olfr136
  gRNA
agtttatgtatgccacacaa

SEQ ID NO: 36416 - DNA, 20 bp, Artificial Sequence
  MKO10036416_A_Olfr136
  gRNA
agccttcttcatccattaca

SEQ ID NO: 36417 - DNA, 20 bp, Artificial Sequence
  MKO10036417_A_Olfr136
  gRNA
tgaaggtacatgctaatggc

SEQ ID NO: 36418 - DNA, 20 bp, Artificial Sequence
  MKO10036418_A_Olfr1370
  gRNA
ttgccatatgcaagccccta

SEQ ID NO: 36419 - DNA, 20 bp, Artificial Sequence
  MKO10036419_A_Olfr1370
  gRNA
tacatcgggctgtccagttg

SEQ ID NO: 36420 - DNA, 20 bp, Artificial Sequence
  MKO10036420_A_Olfr1370
  gRNA
ttattgtagcaactgtgctt

SEQ ID NO: 36421 - DNA, 20 bp, Artificial Sequence
  MKO10036421_A_Olfr1371
  gRNA
gatacctgagccataaaaca

SEQ ID NO: 36422 - DNA, 20 bp, Artificial Sequence
  MKO10036422_A_Olfr1371
  gRNA
tttgaacaccagttcagaag

SEQ ID NO: 36423 - DNA, 20 bp, Artificial Sequence
  MKO10036423_A_Olfr1371
  gRNA
ttcctcagcgtatagatcag

SEQ ID NO: 36424 - DNA, 20 bp, Artificial Sequence
  MKO10036424_A_Olfr1373
  gRNA
aatgaagccctcctctgaac

SEQ ID NO: 36425 - DNA, 20 bp, Artificial Sequence
  MKO10036425_A_Olfr1373
  gRNA
agtgctgaacatcaggtcag

SEQ ID NO: 36426 - DNA, 20 bp, Artificial Sequence
  MKO10036426_A_Olfr1373
  gRNA
gggaactgagtgtgtgcttt

SEQ ID NO: 36427 - DNA, 20 bp, Artificial Sequence
  MKO10036427_A_Olfr1377
  gRNA
caatgcatgaaaacggtgtc

SEQ ID NO: 36428 - DNA, 20 bp, Artificial Sequence
  MKO10036428_A_Olfr1377
  gRNA
ctgaagataccatctgcccg

SEQ ID NO: 36429 - DNA, 20 bp, Artificial Sequence
  MKO10036429_A_Olfr1377
  gRNA
acagggctttccttatcccg

SEQ ID NO: 36430 - DNA, 20 bp, Artificial Sequence
  MKO10036430_A_Olfr1378
  gRNA
atgtacttggtcaccgtttg

SEQ ID NO: 36431 - DNA, 20 bp, Artificial Sequence
  MKO10036431_A_Olfr1378
  gRNA
ggaattctatggctgttgac

SEQ ID NO: 36432 - DNA, 20 bp, Artificial Sequence
  MKO10036432_A_Olfr1378
  gRNA
gcatgtgaacggtgtgatag

SEQ ID NO: 36433 - DNA, 20 bp, Artificial Sequence
  MKO10036433_A_Olfr137
  gRNA
agaagtggtctactttgcga

SEQ ID NO: 36434 - DNA, 20 bp, Artificial Sequence
  MKO10036434_A_Olfr137
  gRNA
agtggtaaagccacataccc

SEQ ID NO: 36435 - DNA, 20 bp, Artificial Sequence
  MKO10036435_A_Olfr137
  gRNA
gaaaactttctgaagtcgag

SEQ ID NO: 36436 - DNA, 20 bp, Artificial Sequence
  MKO10036436_A_Olfr1380
  gRNA
ggcggaggtccagttgagac

SEQ ID NO: 36437 - DNA, 20 bp, Artificial Sequence
  MKO10036437_A_Olfr1380
  gRNA
gatccagacaagctttgtga

SEQ ID NO: 36438 - DNA, 20 bp, Artificial Sequence
  MKO10036438_A_Olfr1380
  gRNA
tggccatcacaaagcttgtc

SEQ ID NO: 36439 - DNA, 20 bp, Artificial Sequence
  MKO10036439_A_Olfr1381
  gRNA
ctctccctagcaccttccac

SEQ ID NO: 36440 - DNA, 20 bp, Artificial Sequence
  MKO10036440_A_Olfr1381
  gRNA
aggatgtgaaaggagccctg

SEQ ID NO: 36441 - DNA, 20 bp, Artificial Sequence
  MKO10036441_A_Olfr1381
  gRNA
tttgaacaccagttcagaag

SEQ ID NO: 36442 - DNA, 20 bp, Artificial Sequence
  MKO10036442_A_Olfr1382
  gRNA
cctcactatcagaatacctg

SEQ ID NO: 36443 - DNA, 20 bp, Artificial Sequence
  MKO10036443_A_Olfr1382
  gRNA
gctcttcataatgctctcac

SEQ ID NO: 36444 - DNA, 20 bp, Artificial Sequence
  MKO10036444_A_Olfr1382
  gRNA
agagaggcatggtcatcaca

SEQ ID NO: 36445 - DNA, 20 bp, Artificial Sequence
  MKO10036445_A_Olfr1383
  gRNA
cacatggacaggttggagat

SEQ ID NO: 36446 - DNA, 20 bp, Artificial Sequence
  MKO10036446_A_Olfr1383
  gRNA
catcatcacaatctcacgaa

SEQ ID NO: 36447 - DNA, 20 bp, Artificial Sequence
  MKO10036447_A_Olfr1383
  gRNA
tgtgaagggggctctatgca

SEQ ID NO: 36448 - DNA, 20 bp, Artificial Sequence
  MKO10036448_A_Olfr1384
  gRNA
cagcctatccacacgtattc

SEQ ID NO: 36449 - DNA, 20 bp, Artificial Sequence
  MKO10036449_A_Olfr1384
  gRNA
cttcactaccagaatacgtg

SEQ ID NO: 36450 - DNA, 20 bp, Artificial Sequence
  MKO10036450_A_Olfr1384
  gRNA
tcaactggaacttatcctcc

SEQ ID NO: 36451 - DNA, 20 bp, Artificial Sequence
  MKO10036451_A_Olfr1385
  gRNA
cggtgttgccaaagatagtt

SEQ ID NO: 36452 - DNA, 20 bp, Artificial Sequence
  MKO10036452_A_Olfr1385
  gRNA
gtgcaagagatatgaaaagc

SEQ ID NO: 36453 - DNA, 20 bp, Artificial Sequence
  MKO10036453_A_Olfr1385
  gRNA
cactgagtgtgtgctcttag

SEQ ID NO: 36454 - DNA, 20 bp, Artificial Sequence
  MKO10036454_A_Olfr1386
  gRNA
tagtgttgccaaagatagtt

SEQ ID NO: 36455 - DNA, 20 bp, Artificial Sequence
  MKO10036455_A_Olfr1386
  gRNA
gctgttcatatatcttgctc

SEQ ID NO: 36456 - DNA, 20 bp, Artificial Sequence
  MKO10036456_A_Olfr1386
  gRNA
gagcaagatatatgaacagc

SEQ ID NO: 36457 - DNA, 20 bp, Artificial Sequence
  MKO10036457_A_Olfr1387
  gRNA
ggttcataatgctggtatag

SEQ ID NO: 36458 - DNA, 20 bp, Artificial Sequence
  MKO10036458_A_Olfr1387
  gRNA
caagtcctcggaggttgatg

SEQ ID NO: 36459 - DNA, 20 bp, Artificial Sequence
  MKO10036459_A_Olfr1387
  gRNA
tggccatcacaagccctgtt

SEQ ID NO: 36460 - DNA, 20 bp, Artificial Sequence
  MKO10036460_A_Olfr1388
  gRNA
ctgccctgcggcacttatcc

SEQ ID NO: 36461 - DNA, 20 bp, Artificial Sequence
  MKO10036461_A_Olfr1388
  gRNA
tgtggcccgaacaatagttt

SEQ ID NO: 36462 - DNA, 20 bp, Artificial Sequence
  MKO10036462_A_Olfr1388
  gRNA
catcattgctctctctcgac

SEQ ID NO: 36463 - DNA, 20 bp, Artificial Sequence
  MKO10036463_A_Olfr1389
  gRNA
gatgcccatattcctgaaat

SEQ ID NO: 36464 - DNA, 20 bp, Artificial Sequence
  MKO10036464_A_Olfr1389
  gRNA
ttggataggaccatcagcta

SEQ ID NO: 36465 - DNA, 20 bp, Artificial Sequence
  MKO10036465_A_Olfr1389
  gRNA
tatgaagcctttccctaaac

SEQ ID NO: 36466 - DNA, 20 bp, Artificial Sequence
  MKO10036466_A_Olfr138
  gRNA
tgaaggtacatgctaatacc

SEQ ID NO: 36467 - DNA, 20 bp, Artificial Sequence
  MKO10036467_A_Olfr138
  gRNA
ctgacaaaatgcatactctt

SEQ ID NO: 36468 - DNA, 20 bp, Artificial Sequence
  MKO10036468_A_Olfr138
  gRNA
acattgcaactgccattatg

SEQ ID NO: 36469 - DNA, 20 bp, Artificial Sequence
  MKO10036469_A_Olfr1390
  gRNA
aattcagacgagcctcatga

SEQ ID NO: 36470 - DNA, 20 bp, Artificial Sequence
  MKO10036470_A_Olfr1390
  gRNA
ctcctatgcaaacattgctc

SEQ ID NO: 36471 - DNA, 20 bp, Artificial Sequence
  MKO10036471_A_Olfr1390
  gRNA
tctcactagctattgtttcg

SEQ ID NO: 36472 - DNA, 20 bp, Artificial Sequence
  MKO10036472_A_Olfr1391
  gRNA
cctgatcaatattgctgcac

SEQ ID NO: 36473 - DNA, 20 bp, Artificial Sequence
  MKO10036473_A_Olfr1391
  gRNA
gctatctcttcttgggtagc

SEQ ID NO: 36474 - DNA, 20 bp, Artificial Sequence
  MKO10036474_A_Olfr1391
  gRNA
ttcagtcgatacctgcagag

SEQ ID NO: 36475 - DNA, 20 bp, Artificial Sequence
  MKO10036475_A_Olfr1392
  gRNA
ggaaagcttcaacatcagtt

SEQ ID NO: 36476 - DNA, 20 bp, Artificial Sequence
  MKO10036476_A_Olfr1392
  gRNA
gctcttcataactcttgctc

SEQ ID NO: 36477 - DNA, 20 bp, Artificial Sequence
  MKO10036477_A_Olfr1392
  gRNA
cagtgttcccaaagagagtt

SEQ ID NO: 36478 - DNA, 20 bp, Artificial Sequence
  MKO10036478_A_Olfr1393
  gRNA
gggaaccttcaacaccagtt

SEQ ID NO: 36479 - DNA, 20 bp, Artificial Sequence
  MKO10036479_A_Olfr1393
  gRNA
catagaacagagataccacc

SEQ ID NO: 36480 - DNA, 20 bp, Artificial Sequence
  MKO10036480_A_Olfr1393
  gRNA
cactgcaacaatcaccactc

SEQ ID NO: 36481 - DNA, 20 bp, Artificial Sequence
  MKO10036481_A_Olfr1394
  gRNA
agtggccgaacaggccggca

SEQ ID NO: 36482 - DNA, 20 bp, Artificial Sequence
  MKO10036482_A_Olfr1394
  gRNA
ccgtggtgggcctctactac

SEQ ID NO: 36483 - DNA, 20 bp, Artificial Sequence
  MKO10036483_A_Olfr1394
  gRNA
gacagccatatacctatcgt

SEQ ID NO: 36484 - DNA, 20 bp, Artificial Sequence
  MKO10036484_A_Olfr1395
  gRNA
tcatgagccgccgtgtctgc

SEQ ID NO: 36485 - DNA, 20 bp, Artificial Sequence
  MKO10036485_A_Olfr1395
  gRNA
ggcctaccactcctccaagc

SEQ ID NO: 36486 - DNA, 20 bp, Artificial Sequence
  MKO10036486_A_Olfr1395
  gRNA
gcccttctgcagagcgcatc

SEQ ID NO: 36487 - DNA, 20 bp, Artificial Sequence
  MKO10036487_A_Olfr1396
  gRNA
cttggggttcggtattgtct

SEQ ID NO: 36488 - DNA, 20 bp, Artificial Sequence
  MKO10036488_A_Olfr1396
  gRNA
acaataccgaaccccaagcc

SEQ ID NO: 36489 - DNA, 20 bp, Artificial Sequence
  MKO10036489_A_Olfr1396
  gRNA
ttgtatgccacaacctacga

SEQ ID NO: 36490 - DNA, 20 bp, Artificial Sequence
  MKO10036490_A_Olfr139
  gRNA
ccgcatgagccgtgaagtgc

SEQ ID NO: 36491 - DNA, 20 bp, Artificial Sequence
  MKO10036491_A_Olfr139
  gRNA
acgttgcagctgcagtacta

SEQ ID NO: 36492 - DNA, 20 bp, Artificial Sequence
  MKO10036492_A_Olfr139
  gRNA
gtagtactgcagctgcaacg

SEQ ID NO: 36493 - DNA, 20 bp, Artificial Sequence
  MKO10036493_A_Olfr13
  gRNA
cacacacctcaatgagacga

SEQ ID NO: 36494 - DNA, 20 bp, Artificial Sequence
  MKO10036494_A_Olfr13
  gRNA
gtaagggtaaaagtaacacg

SEQ ID NO: 36495 - DNA, 20 bp, Artificial Sequence
  MKO10036495_A_Olfr13
  gRNA
accgccattgtcatgtacgt

SEQ ID NO: 36496 - DNA, 20 bp, Artificial Sequence
  MKO10036496_A_Olfr1402
  gRNA
tcatgctagtgaacttcttc

SEQ ID NO: 36497 - DNA, 20 bp, Artificial Sequence
  MKO10036497_A_Olfr1402
  gRNA
aagaagttcactagcatgac

SEQ ID NO: 36498 - DNA, 20 bp, Artificial Sequence
  MKO10036498_A_Olfr1402
  gRNA
ggcagagatgatcagtatat

SEQ ID NO: 36499 - DNA, 20 bp, Artificial Sequence
  MKO10036499_A_Olfr1404
  gRNA
tataatagtcacggtatagc

SEQ ID NO: 36500 - DNA, 20 bp, Artificial Sequence
  MKO10036500_A_Olfr1404
  gRNA
ttccgcagagtgtataccaa

SEQ ID NO: 36501 - DNA, 20 bp, Artificial Sequence
  MKO10036501_A_Olfr1404
  gRNA
agtctcgaaaagcaatcgtg

SEQ ID NO: 36502 - DNA, 20 bp, Artificial Sequence
  MKO10036502_A_Olfr1406
  gRNA
gacgttagctcttagcctta

SEQ ID NO: 36503 - DNA, 20 bp, Artificial Sequence
  MKO10036503_A_Olfr1406
  gRNA
gtcaagatatcattgatgac

SEQ ID NO: 36504 - DNA, 20 bp, Artificial Sequence
  MKO10036504_A_Olfr1406
  gRNA
gttcttgctctcactaattc

SEQ ID NO: 36505 - DNA, 20 bp, Artificial Sequence
  MKO10036505_A_Olfr1408
  gRNA
ctatatatcctgacgctgac

SEQ ID NO: 36506 - DNA, 20 bp, Artificial Sequence
  MKO10036506_A_Olfr1408
  gRNA
actgtagtagtgattcacta

SEQ ID NO: 36507 - DNA, 20 bp, Artificial Sequence
  MKO10036507_A_Olfr1408
  gRNA
ctctgcggaaagtgttgtgt

SEQ ID NO: 36508 - DNA, 20 bp, Artificial Sequence
  MKO10036508_A_Olfr140
  gRNA
ttgtcatcctgcgcactttg

SEQ ID NO: 36509 - DNA, 20 bp, Artificial Sequence
  MKO10036509_A_Olfr140
  gRNA
aaaaattctgtgacattgcg

SEQ ID NO: 36510 - DNA, 20 bp, Artificial Sequence
  MKO10036510_A_Olfr140
  gRNA
cagggagtcagcgatgagtt

SEQ ID NO: 36511 - DNA, 20 bp, Artificial Sequence
  MKO10036511_A_Olfr1410
  gRNA
accatcctcagaatgcgttc

SEQ ID NO: 36512 - DNA, 20 bp, Artificial Sequence
  MKO10036512_A_Olfr1410
  gRNA
tcatggccacatcagtccac

SEQ ID NO: 36513 - DNA, 20 bp, Artificial Sequence
  MKO10036513_A_Olfr1410
  gRNA
ggtctccacaatctacaccc

SEQ ID NO: 36514 - DNA, 20 bp, Artificial Sequence
  MKO10036514_A_Olfr1411
  gRNA
tcatggccatagcagtctac

SEQ ID NO: 36515 - DNA, 20 bp, Artificial Sequence
  MKO10036515_A_Olfr1411
  gRNA
tccattcctgtagactgcta

SEQ ID NO: 36516 - DNA, 20 bp, Artificial Sequence
  MKO10036516_A_Olfr1411
  gRNA
gcccagcaccagacgggtac

SEQ ID NO: 36517 - DNA, 20 bp, Artificial Sequence
  MKO10036517_A_Olfr1412
  gRNA
aggttgcctcaactccattg

SEQ ID NO: 36518 - DNA, 20 bp, Artificial Sequence
  MKO10036518_A_Olfr1412
  gRNA
gaagaaatggtcgatgtgat

SEQ ID NO: 36519 - DNA, 20 bp, Artificial Sequence
  MKO10036519_A_Olfr1412
  gRNA
cccaaatcccaccagcacga

SEQ ID NO: 36520 - DNA, 20 bp, Artificial Sequence
  MKO10036520_A_Olfr1413
  gRNA
actagtcgggcacatgccat

SEQ ID NO: 36521 - DNA, 20 bp, Artificial Sequence
  MKO10036521_A_Olfr1413
  gRNA
ggttcagcatgggaataacc

SEQ ID NO: 36522 - DNA, 20 bp, Artificial Sequence
  MKO10036522_A_Olfr1413
  gRNA
cctgtatgtagtgaccgtcc

SEQ ID NO: 36523 - DNA, 20 bp, Artificial Sequence
  MKO10036523_A_Olfr1414
  gRNA
agctccgggtatcgatggcc

SEQ ID NO: 36524 - DNA, 20 bp, Artificial Sequence
  MKO10036524_A_Olfr1414
  gRNA
gggagcttgacccaagccca

SEQ ID NO: 36525 - DNA, 20 bp, Artificial Sequence
  MKO10036525_A_Olfr1414
  gRNA
tcatgtccaccttggagatc

SEQ ID NO: 36526 - DNA, 20 bp, Artificial Sequence
  MKO10036526_A_Olfr1415
  gRNA
atagagtgtgacccaaaccc

SEQ ID NO: 36527 - DNA, 20 bp, Artificial Sequence
  MKO10036527_A_Olfr1415
  gRNA
accccttgatttattgccta

SEQ ID NO: 36528 - DNA, 20 bp, Artificial Sequence
  MKO10036528_A_Olfr1415
  gRNA
ataaatcaaggggtttaaga

SEQ ID NO: 36529 - DNA, 20 bp, Artificial Sequence
  MKO10036529_A_Olfr1416
  gRNA
cttcatgtatgtgcgacccc

SEQ ID NO: 36530 - DNA, 20 bp, Artificial Sequence
  MKO10036530_A_Olfr1416
  gRNA
attcatcatgggcgtgagga

SEQ ID NO: 36531 - DNA, 20 bp, Artificial Sequence
  MKO10036531_A_Olfr1416
  gRNA
gtagaccttaatcacagaga

SEQ ID NO: 36532 - DNA, 20 bp, Artificial Sequence
  MKO10036532_A_Olfr1417
  gRNA
gctataccctcatcatgagc

SEQ ID NO: 36533 - DNA, 20 bp, Artificial Sequence
  MKO10036533_A_Olfr1417
  gRNA
attcagcacaggagtgatga

SEQ ID NO: 36534 - DNA, 20 bp, Artificial Sequence
  MKO10036534_A_Olfr1417
  gRNA
ggcttccacatccatactgc

SEQ ID NO: 36535 - DNA, 20 bp, Artificial Sequence
  MKO10036535_A_Olfr1418
  gRNA
gacttgtgcatccatactgc

SEQ ID NO: 36536 - DNA, 20 bp, Artificial Sequence
  MKO10036536_A_Olfr1418
  gRNA
tctagagtgcttcttgtgtt

SEQ ID NO: 36537 - DNA, 20 bp, Artificial Sequence
  MKO10036537_A_Olfr1418
  gRNA
cttgtgtgtccagttggccc

SEQ ID NO: 36538 - DNA, 20 bp, Artificial Sequence
  MKO10036538_A_Olfr1419
  gRNA
agagctgccaactcataatg

SEQ ID NO: 36539 - DNA, 20 bp, Artificial Sequence
  MKO10036539_A_Olfr1419
  gRNA
ggaatagccaagctctaatg

SEQ ID NO: 36540 - DNA, 20 bp, Artificial Sequence
  MKO10036540_A_Olfr1419
  gRNA
agctctctttgccatcagcg

SEQ ID NO: 36541 - DNA, 20 bp, Artificial Sequence
  MKO10036541_A_Olfr141
  gRNA
ggtgatatctgtagaataac

SEQ ID NO: 36542 - DNA, 20 bp, Artificial Sequence
  MKO10036542_A_Olfr141
  gRNA
atcaccccaaatatgctagt

SEQ ID NO: 36543 - DNA, 20 bp, Artificial Sequence
  MKO10036543_A_Olfr141
  gRNA
ataagtggtatatagactcg

SEQ ID NO: 36544 - DNA, 20 bp, Artificial Sequence
  MKO10036544_A_Olfr1420
  gRNA
gaggaccactacgatgtgag

SEQ ID NO: 36545 - DNA, 20 bp, Artificial Sequence
  MKO10036545_A_Olfr1420
  gRNA
gtggagacacgcatgttcat

SEQ ID NO: 36546 - DNA, 20 bp, Artificial Sequence
  MKO10036546_A_Olfr1420
  gRNA
ggtcaggtacatcaccaaga

SEQ ID NO: 36547 - DNA, 20 bp, Artificial Sequence
  MKO10036547_A_Olfr1423
  gRNA
cgtgtgcagacgggactcaa

SEQ ID NO: 36548 - DNA, 20 bp, Artificial Sequence
  MKO10036548_A_Olfr1423
  gRNA
ccacccaggaggccgcgatg

SEQ ID NO: 36549 - DNA, 20 bp, Artificial Sequence
  MKO10036549_A_Olfr1423
  gRNA
gcaccgcttactactcatga

SEQ ID NO: 36550 - DNA, 20 bp, Artificial Sequence
  MKO10036550_A_Olfr1424
  gRNA
ctgcgcttacttgctgactt

SEQ ID NO: 36551 - DNA, 20 bp, Artificial Sequence
  MKO10036551_A_Olfr1424
  gRNA
tggagatggaaaactacacc

SEQ ID NO: 36552 - DNA, 20 bp, Artificial Sequence
  MKO10036552_A_Olfr1424
  gRNA
ggtaagatccacaagaacct

SEQ ID NO: 36553 - DNA, 20 bp, Artificial Sequence
  MKO10036553_A_Olfr1425
  gRNA
aaagacttggaccttcttat

SEQ ID NO: 36554 - DNA, 20 bp, Artificial Sequence
  MKO10036554_A_Olfr1425
  gRNA
tacctctctatccaataaga

SEQ ID NO: 36555 - DNA, 20 bp, Artificial Sequence
  MKO10036555_A_Olfr1425
  gRNA
atgagatggaaaactatacc

SEQ ID NO: 36556 - DNA, 20 bp, Artificial Sequence
  MKO10036556_A_Olfr1426
  gRNA
atgatgcttagatctcattc

SEQ ID NO: 36557 - DNA, 20 bp, Artificial Sequence
  MKO10036557_A_Olfr1426
  gRNA
caaaccacagagtagcaacc

SEQ ID NO: 36558 - DNA, 20 bp, Artificial Sequence
  MKO10036558_A_Olfr1426
  gRNA
tattgctcttctctatcaaa

SEQ ID NO: 36559 - DNA, 20 bp, Artificial Sequence
  MKO10036559_A_Olfr1427
  gRNA
caaaccatagcgtagtgatc

SEQ ID NO: 36560 - DNA, 20 bp, Artificial Sequence
  MKO10036560_A_Olfr1427
  gRNA
cgtgtggaggcgggactccc

SEQ ID NO: 36561 - DNA, 20 bp, Artificial Sequence
  MKO10036561_A_Olfr1427
  gRNA
ctcctccattactgttccaa

SEQ ID NO: 36562 - DNA, 20 bp, Artificial Sequence
  MKO10036562_A_Olfr1428
  gRNA
acttactcgcatccgggaac

SEQ ID NO: 36563 - DNA, 20 bp, Artificial Sequence
  MKO10036563_A_Olfr1428
  gRNA
tgcactatgtaaccattatg

SEQ ID NO: 36564 - DNA, 20 bp, Artificial Sequence
  MKO10036564_A_Olfr1428
  gRNA
ccttctgagagcaataagct

SEQ ID NO: 36565 - DNA, 20 bp, Artificial Sequence
  MKO10036565_A_Olfr142
  gRNA
caagcttaaataattgttgc

SEQ ID NO: 36566 - DNA, 20 bp, Artificial Sequence
  MKO10036566_A_Olfr142
  gRNA
aaaatgctatacgaatgtcc

SEQ ID NO: 36567 - DNA, 20 bp, Artificial Sequence
  MKO10036567_A_Olfr142
  gRNA
cacaataaacccctccataa

SEQ ID NO: 36568 - DNA, 20 bp, Artificial Sequence
  MKO10036568_A_Olfr1431
  gRNA
tctacattatgactatgacc

SEQ ID NO: 36569 - DNA, 20 bp, Artificial Sequence
  MKO10036569_A_Olfr1431
  gRNA
gtttctctcttctatagtac

SEQ ID NO: 36570 - DNA, 20 bp, Artificial Sequence
  MKO10036570_A_Olfr1431
  gRNA
agatgtgaatctgtcaaaac

SEQ ID NO: 36571 - DNA, 20 bp, Artificial Sequence
  MKO10036571_A_Olfr1433
  gRNA
aggtcagtgctgtaatatac

SEQ ID NO: 36572 - DNA, 20 bp, Artificial Sequence
  MKO10036572_A_Olfr1433
  gRNA
atacccataggacaccatga

SEQ ID NO: 36573 - DNA, 20 bp, Artificial Sequence
  MKO10036573_A_Olfr1433
  gRNA
gatcactcaatttatcctcc

SEQ ID NO: 36574 - DNA, 20 bp, Artificial Sequence
  MKO10036574_A_Olfr1434
  gRNA
aggtcagtgctgtaatatac

SEQ ID NO: 36575 - DNA, 20 bp, Artificial Sequence
  MKO10036575_A_Olfr1434
  gRNA
atacccataggacaccatga

SEQ ID NO: 36576 - DNA, 20 bp, Artificial Sequence
  MKO10036576_A_Olfr1434
  gRNA
gatcactcaatttatcctcc

SEQ ID NO: 36577 - DNA, 20 bp, Artificial Sequence
  MKO10036577_A_Olfr1436
  gRNA
agctacacagctggatttat

SEQ ID NO: 36578 - DNA, 20 bp, Artificial Sequence
  MKO10036578_A_Olfr1436
  gRNA
atcatggaggcaatgattaa

SEQ ID NO: 36579 - DNA, 20 bp, Artificial Sequence
  MKO10036579_A_Olfr1436
  gRNA
gattactatgttgaaccctt

SEQ ID NO: 36580 - DNA, 20 bp, Artificial Sequence
  MKO10036580_A_Olfr1437
  gRNA
caccatctgagcgcaaagtg

SEQ ID NO: 36581 - DNA, 20 bp, Artificial Sequence
  MKO10036581_A_Olfr1437
  gRNA
tgtatattacaaccctgacc

SEQ ID NO: 36582 - DNA, 20 bp, Artificial Sequence
  MKO10036582_A_Olfr1437
  gRNA
aggtcagggttgtaatatac

SEQ ID NO: 36583 - DNA, 20 bp, Artificial Sequence
  MKO10036583_A_Olfr143
  gRNA
tgagcttatgagttcagttg

SEQ ID NO: 36584 - DNA, 20 bp, Artificial Sequence
  MKO10036584_A_Olfr143
  gRNA
cattgatttctgttattcga

SEQ ID NO: 36585 - DNA, 20 bp, Artificial Sequence
  MKO10036585_A_Olfr143
  gRNA
actcataagctcattaacat

SEQ ID NO: 36586 - DNA, 20 bp, Artificial Sequence
  MKO10036586_A_Olfr1440
  gRNA
gctccgagacgatgcctgga

SEQ ID NO: 36587 - DNA, 20 bp, Artificial Sequence
  MKO10036587_A_Olfr1440
  gRNA
aagccatcttgtcataaccc

SEQ ID NO: 36588 - DNA, 20 bp, Artificial Sequence
  MKO10036588_A_Olfr1440
  gRNA
agagtcctgatccaaaaaag

SEQ ID NO: 36589 - DNA, 20 bp, Artificial Sequence
  MKO10036589_A_Olfr1441
  gRNA
tcatacctccattctaatgc

SEQ ID NO: 36590 - DNA, 20 bp, Artificial Sequence
  MKO10036590_A_Olfr1441
  gRNA
tgtgggaagaaacattagcg

SEQ ID NO: 36591 - DNA, 20 bp, Artificial Sequence
  MKO10036591_A_Olfr1441
  gRNA
acatcattgctgccgtcatg

SEQ ID NO: 36592 - DNA, 20 bp, Artificial Sequence
  MKO10036592_A_Olfr1442
  gRNA
ctggtgcgttcgtcagtcct

SEQ ID NO: 36593 - DNA, 20 bp, Artificial Sequence
  MKO10036593_A_Olfr1442
  gRNA
tgacgaacgcaccagaactg

SEQ ID NO: 36594 - DNA, 20 bp, Artificial Sequence
  MKO10036594_A_Olfr1442
  gRNA
agctgtagctccaacaattt

SEQ ID NO: 36595 - DNA, 20 bp, Artificial Sequence
  MKO10036595_A_Olfr1443
  gRNA
gttaccccaacagttgttgc

SEQ ID NO: 36596 - DNA, 20 bp, Artificial Sequence
  MKO10036596_A_Olfr1443
  gRNA
tgacaaaacttgctccatat

SEQ ID NO: 36597 - DNA, 20 bp, Artificial Sequence
  MKO10036597_A_Olfr1443
  gRNA
ctacttctgcaagtccaatg

SEQ ID NO: 36598 - DNA, 20 bp, Artificial Sequence
  MKO10036598_A_Olfr1444
  gRNA
ctactcacactaaaagacgc

SEQ ID NO: 36599 - DNA, 20 bp, Artificial Sequence
  MKO10036599_A_Olfr1444
  gRNA
gtgtgtaccatcctaaccat

SEQ ID NO: 36600 - DNA, 20 bp, Artificial Sequence
  MKO10036600_A_Olfr1444
  gRNA
cactgttgagtgctatcttt

SEQ ID NO: 36601 - DNA, 20 bp, Artificial Sequence
  MKO10036601_A_Olfr1445
  gRNA
ttgtctattgaaaggagacc

SEQ ID NO: 36602 - DNA, 20 bp, Artificial Sequence
  MKO10036602_A_Olfr1445
  gRNA
caatgatatcttctctattg

SEQ ID NO: 36603 - DNA, 20 bp, Artificial Sequence
  MKO10036603_A_Olfr1445
  gRNA
accataacacacaatgcttg

SEQ ID NO: 36604 - DNA, 20 bp, Artificial Sequence
  MKO10036604_A_Olfr1446
  gRNA
tgtaactttgtctatgtcca

SEQ ID NO: 36605 - DNA, 20 bp, Artificial Sequence
  MKO10036605_A_Olfr1446
  gRNA
caagtgagagccattattgc

SEQ ID NO: 36606 - DNA, 20 bp, Artificial Sequence
  MKO10036606_A_Olfr1446
  gRNA
tgactaaaagtgtgtataca

SEQ ID NO: 36607 - DNA, 20 bp, Artificial Sequence
  MKO10036607_A_Olfr1447
  gRNA
tagtagcccattcatgactg

SEQ ID NO: 36608 - DNA, 20 bp, Artificial Sequence
  MKO10036608_A_Olfr1447
  gRNA
ccaccagagaaagattacca

SEQ ID NO: 36609 - DNA, 20 bp, Artificial Sequence
  MKO10036609_A_Olfr1447
  gRNA
tactgtggagaactatctgt

SEQ ID NO: 36610 - DNA, 20 bp, Artificial Sequence
  MKO10036610_A_Olfr1448
  gRNA
tgtctgagcacgatagggcc

SEQ ID NO: 36611 - DNA, 20 bp, Artificial Sequence
  MKO10036611_A_Olfr1448
  gRNA
cacccaattcttcttcttcg

SEQ ID NO: 36612 - DNA, 20 bp, Artificial Sequence
  MKO10036612_A_Olfr1448
  gRNA
accatatcccataacacttg

SEQ ID NO: 36613 - DNA, 20 bp, Artificial Sequence
  MKO10036613_A_Olfr1449
  gRNA
agactgaacgtgacgaacag

SEQ ID NO: 36614 - DNA, 20 bp, Artificial Sequence
  MKO10036614_A_Olfr1449
  gRNA
tgggcattatcgtgttgata

SEQ ID NO: 36615 - DNA, 20 bp, Artificial Sequence
  MKO10036615_A_Olfr1449
  gRNA
tttgagtctgctatacatac

SEQ ID NO: 36616 - DNA, 20 bp, Artificial Sequence
  MKO10036616_A_Olfr1450
  gRNA
actaactgacaacccagacc

SEQ ID NO: 36617 - DNA, 20 bp, Artificial Sequence
  MKO10036617_A_Olfr1450
  gRNA
acccagttgtttatagctta

SEQ ID NO: 36618 - DNA, 20 bp, Artificial Sequence
  MKO10036618_A_Olfr1450
  gRNA
agatcaacacaatcatgccc

SEQ ID NO: 36619 - DNA, 20 bp, Artificial Sequence
  MKO10036619_A_Olfr1451
  gRNA
aaacacggggctgataatgt

SEQ ID NO: 36620 - DNA, 20 bp, Artificial Sequence
  MKO10036620_A_Olfr1451
  gRNA
catccccacactaaaccctt

SEQ ID NO: 36621 - DNA, 20 bp, Artificial Sequence
  MKO10036621_A_Olfr1451
  gRNA
aacccctgcattactctacc

SEQ ID NO: 36622 - DNA, 20 bp, Artificial Sequence
  MKO10036622_A_Olfr1453
  gRNA
aagatacaatcattactgca

SEQ ID NO: 36623 - DNA, 20 bp, Artificial Sequence
  MKO10036623_A_Olfr1453
  gRNA
ctgaagatccactcatctgc

SEQ ID NO: 36624 - DNA, 20 bp, Artificial Sequence
  MKO10036624_A_Olfr1453
  gRNA
catctgcatgttgaaccctc

SEQ ID NO: 36625 - DNA, 20 bp, Artificial Sequence
  MKO10036625_A_Olfr1454
  gRNA
taatgcatctacagtataaa

SEQ ID NO: 36626 - DNA, 20 bp, Artificial Sequence
  MKO10036626_A_Olfr1454
  gRNA
ctaaagttgcagtcagctgc

SEQ ID NO: 36627 - DNA, 20 bp, Artificial Sequence
  MKO10036627_A_Olfr1454
  gRNA
agaaatccagctatgacttt

SEQ ID NO: 36628 - DNA, 20 bp, Artificial Sequence
  MKO10036628_A_Olfr1457
  gRNA
tactcttgtagtcatagtgc

SEQ ID NO: 36629 - DNA, 20 bp, Artificial Sequence
  MKO10036629_A_Olfr1457
  gRNA
gctaaaatgcactcaagtgc

SEQ ID NO: 36630 - DNA, 20 bp, Artificial Sequence
  MKO10036630_A_Olfr1457
  gRNA
agaagctcagtcatgacact

SEQ ID NO: 36631 - DNA, 20 bp, Artificial Sequence
  MKO10036631_A_Olfr1459
  gRNA
atctatactgttacctttgt

SEQ ID NO: 36632 - DNA, 20 bp, Artificial Sequence
  MKO10036632_A_Olfr1459
  gRNA
aacatgtctatcagagcaag

SEQ ID NO: 36633 - DNA, 20 bp, Artificial Sequence
  MKO10036633_A_Olfr1459
  gRNA
gaagacagctgttaagtgtg

SEQ ID NO: 36634 - DNA, 20 bp, Artificial Sequence
  MKO10036634_A_Olfr145
  gRNA
cctctgtggaactgatgcga

SEQ ID NO: 36635 - DNA, 20 bp, Artificial Sequence
  MKO10036635_A_Olfr145
  gRNA
gacactttcccctggttcat

SEQ ID NO: 36636 - DNA, 20 bp, Artificial Sequence
  MKO10036636_A_Olfr145
  gRNA
gactaccagctcatttacat

SEQ ID NO: 36637 - DNA, 20 bp, Artificial Sequence
  MKO10036637_A_Olfr1461
  gRNA
aagagtaacaaacgtccacc

SEQ ID NO: 36638 - DNA, 20 bp, Artificial Sequence
  MKO10036638_A_Olfr1461
  gRNA
ttaaacatgcgctcaagagc

SEQ ID NO: 36639 - DNA, 20 bp, Artificial Sequence
  MKO10036639_A_Olfr1461
  gRNA
cgaagatattgaagcttgct

SEQ ID NO: 36640 - DNA, 20 bp, Artificial Sequence
  MKO10036640_A_Olfr1462
  gRNA
gaatgcttccatctatacag

SEQ ID NO: 36641 - DNA, 20 bp, Artificial Sequence
  MKO10036641_A_Olfr1462
  gRNA
ctggatttcttacaggagat

SEQ ID NO: 36642 - DNA, 20 bp, Artificial Sequence
  MKO10036642_A_Olfr1462
  gRNA
cactgctacataatgatcat

SEQ ID NO: 36643 - DNA, 20 bp, Artificial Sequence
  MKO10036643_A_Olfr1463
  gRNA
gaatcagcagaatcaacccc

SEQ ID NO: 36644 - DNA, 20 bp, Artificial Sequence
  MKO10036644_A_Olfr1463
  gRNA
agagactaaatgtatctcca

SEQ ID NO: 36645 - DNA, 20 bp, Artificial Sequence
  MKO10036645_A_Olfr1463
  gRNA
tcaagagtgcattcatgaaa

SEQ ID NO: 36646 - DNA, 20 bp, Artificial Sequence
  MKO10036646_A_Olfr1465
  gRNA
tgattagaagtatcatgaag

SEQ ID NO: 36647 - DNA, 20 bp, Artificial Sequence
  MKO10036647_A_Olfr1465
  gRNA
gagtgtggagacacgagtcc

SEQ ID NO: 36648 - DNA, 20 bp, Artificial Sequence
  MKO10036648_A_Olfr1465
  gRNA
gactttgggtgtgacatcag

SEQ ID NO: 36649 - DNA, 20 bp, Artificial Sequence
  MKO10036649_A_Olfr1466
  gRNA
gtcatggctggtctcataat

SEQ ID NO: 36650 - DNA, 20 bp, Artificial Sequence
  MKO10036650_A_Olfr1466
  gRNA
tcatggtggtagcatagtat

SEQ ID NO: 36651 - DNA, 20 bp, Artificial Sequence
  MKO10036651_A_Olfr1466
  gRNA
aagagtaaataacatccacc

SEQ ID NO: 36652 - DNA, 20 bp, Artificial Sequence
  MKO10036652_A_Olfr1467
  gRNA
agctgattgcatcttcacga

SEQ ID NO: 36653 - DNA, 20 bp, Artificial Sequence
  MKO10036653_A_Olfr1467
  gRNA
tgactacaagtgtgtgtacg

SEQ ID NO: 36654 - DNA, 20 bp, Artificial Sequence
  MKO10036654_A_Olfr1467
  gRNA
gccaagttccaatcactcta

SEQ ID NO: 36655 - DNA, 20 bp, Artificial Sequence
  MKO10036655_A_Olfr1469
  gRNA
tgataccgcaatgaagtgtg

SEQ ID NO: 36656 - DNA, 20 bp, Artificial Sequence
  MKO10036656_A_Olfr1469
  gRNA
ggaggcattcaaaaaaccac

SEQ ID NO: 36657 - DNA, 20 bp, Artificial Sequence
  MKO10036657_A_Olfr1469
  gRNA
tgtaaaatgcactcaagttc

SEQ ID NO: 36658 - DNA, 20 bp, Artificial Sequence
  MKO10036658_A_Olfr146
  gRNA
cccatcatcttcccattcga

SEQ ID NO: 36659 - DNA, 20 bp, Artificial Sequence
  MKO10036659_A_Olfr146
  gRNA
aaactcctaaaacgagagaa

SEQ ID NO: 36660 - DNA, 20 bp, Artificial Sequence
  MKO10036660_A_Olfr146
  gRNA
gttgagcatgggaacaatga

SEQ ID NO: 36661 - DNA, 20 bp, Artificial Sequence
  MKO10036661_A_Olfr1471
  gRNA
tgagattacactgcttgtct

SEQ ID NO: 36662 - DNA, 20 bp, Artificial Sequence
  MKO10036662_A_Olfr1471
  gRNA
aagtttgatccttgcctcga

SEQ ID NO: 36663 - DNA, 20 bp, Artificial Sequence
  MKO10036663_A_Olfr1471
  gRNA
gcccagtttcaatcattcca

SEQ ID NO: 36664 - DNA, 20 bp, Artificial Sequence
  MKO10036664_A_Olfr1472
  gRNA
ttccttaaactgtatacgac

SEQ ID NO: 36665 - DNA, 20 bp, Artificial Sequence
  MKO10036665_A_Olfr1472
  gRNA
gttcatagaatgattagaac

SEQ ID NO: 36666 - DNA, 20 bp, Artificial Sequence
  MKO10036666_A_Olfr1472
  gRNA
catcacaagttcccaagata

SEQ ID NO: 36667 - DNA, 20 bp, Artificial Sequence
  MKO10036667_A_Olfr1474
  gRNA
ccaccaccgagagattacag

SEQ ID NO: 36668 - DNA, 20 bp, Artificial Sequence
  MKO10036668_A_Olfr1474
  gRNA
tgagattacactgctcgtct

SEQ ID NO: 36669 - DNA, 20 bp, Artificial Sequence
  MKO10036669_A_Olfr1474
  gRNA
cctgcattctaattgtcact

SEQ ID NO: 36670 - DNA, 20 bp, Artificial Sequence
  MKO10036670_A_Olfr1475
  gRNA
ttccttaaactgtatactac

SEQ ID NO: 36671 - DNA, 20 bp, Artificial Sequence
  MKO10036671_A_Olfr1475
  gRNA
catcacaagtacccaagata

SEQ ID NO: 36672 - DNA, 20 bp, Artificial Sequence
  MKO10036672_A_Olfr1475
  gRNA
accctgtagtatacagttta

SEQ ID NO: 36673 - DNA, 20 bp, Artificial Sequence
  MKO10036673_A_Olfr1477
  gRNA
aatttcatttgtgcgaatac

SEQ ID NO: 36674 - DNA, 20 bp, Artificial Sequence
  MKO10036674_A_Olfr1477
  gRNA
aaaattctcagtaatagcaa

SEQ ID NO: 36675 - DNA, 20 bp, Artificial Sequence
  MKO10036675_A_Olfr1477
  gRNA
gatgataatgctgattctgc

SEQ ID NO: 36676 - DNA, 20 bp, Artificial Sequence
  MKO10036676_A_Olfr147
  gRNA
aggatgtcaaggtggcatta

SEQ ID NO: 36677 - DNA, 20 bp, Artificial Sequence
  MKO10036677_A_Olfr147
  gRNA
ctgtaatccactattgtata

SEQ ID NO: 36678 - DNA, 20 bp, Artificial Sequence
  MKO10036678_A_Olfr147
  gRNA
ttgagtcatgcaccccgcat

SEQ ID NO: 36679 - DNA, 20 bp, Artificial Sequence
  MKO10036679_A_Olfr1480
  gRNA
aaaactctccgtaataacaa

SEQ ID NO: 36680 - DNA, 20 bp, Artificial Sequence
  MKO10036680_A_Olfr1480
  gRNA
ctttgtagcctttgttatta

SEQ ID NO: 36681 - DNA, 20 bp, Artificial Sequence
  MKO10036681_A_Olfr1480
  gRNA
aatttcatttgtgtaaatac

SEQ ID NO: 36682 - DNA, 20 bp, Artificial Sequence
  MKO10036682_A_Olfr1484
  gRNA
gtcacccccaaagtgataga

SEQ ID NO: 36683 - DNA, 20 bp, Artificial Sequence
  MKO10036683_A_Olfr1484
  gRNA
gagaaacccttctatcactt

SEQ ID NO: 36684 - DNA, 20 bp, Artificial Sequence
  MKO10036684_A_Olfr1484
  gRNA
aaaacactcagtaatagcaa

SEQ ID NO: 36685 - DNA, 20 bp, Artificial Sequence
  MKO10036685_A_Olfr1487
  gRNA
gaaactttcaacagtagcaa

SEQ ID NO: 36686 - DNA, 20 bp, Artificial Sequence
  MKO10036686_A_Olfr1487
  gRNA
tactgttgaaagtttcatgc

SEQ ID NO: 36687 - DNA, 20 bp, Artificial Sequence
  MKO10036687_A_Olfr1487
  gRNA
tgccatcttgtcagtatcca

SEQ ID NO: 36688 - DNA, 20 bp, Artificial Sequence
  MKO10036688_A_Olfr1489
  gRNA
caatatagctttaactatat

SEQ ID NO: 36689 - DNA, 20 bp, Artificial Sequence
  MKO10036689_A_Olfr1489
  gRNA
aatatgtaccctgctcattg

SEQ ID NO: 36690 - DNA, 20 bp, Artificial Sequence
  MKO10036690_A_Olfr1489
  gRNA
gggcatctgttaatcccaca

SEQ ID NO: 36691 - DNA, 20 bp, Artificial Sequence
  MKO10036691_A_Olfr148
  gRNA
tgcacagtagactaattgaa

SEQ ID NO: 36692 - DNA, 20 bp, Artificial Sequence
  MKO10036692_A_Olfr148
  gRNA
gatgagtgaatttccgagca

SEQ ID NO: 36693 - DNA, 20 bp, Artificial Sequence
  MKO10036693_A_Olfr148
  gRNA
tgagcttggtaataatagct

SEQ ID NO: 36694 - DNA, 20 bp, Artificial Sequence
  MKO10036694_A_Olfr1490
  gRNA
gacggggcgcaagtacatga

SEQ ID NO: 36695 - DNA, 20 bp, Artificial Sequence
  MKO10036695_A_Olfr1490
  gRNA
aagcagagcatacgtagctc

SEQ ID NO: 36696 - DNA, 20 bp, Artificial Sequence
  MKO10036696_A_Olfr1490
  gRNA
cagcactaccaagtccaatg

SEQ ID NO: 36697 - DNA, 20 bp, Artificial Sequence
  MKO10036697_A_Olfr1491
  gRNA
gacccagaagcctatatcgc

SEQ ID NO: 36698 - DNA, 20 bp, Artificial Sequence
  MKO10036698_A_Olfr1491
  gRNA
aaacttgtccttaaccaatc

SEQ ID NO: 36699 - DNA, 20 bp, Artificial Sequence
  MKO10036699_A_Olfr1491
  gRNA
ccaggatgcccactacgtag

SEQ ID NO: 36700 - DNA, 20 bp, Artificial Sequence
  MKO10036700_A_Olfr1494
  gRNA
agcggggcctcagatataca

SEQ ID NO: 36701 - DNA, 20 bp, Artificial Sequence
  MKO10036701_A_Olfr1494
  gRNA
cagtggtcccagactgattg

SEQ ID NO: 36702 - DNA, 20 bp, Artificial Sequence
  MKO10036702_A_Olfr1494
  gRNA
ggcccagaaacccatatcac

SEQ ID NO: 36703 - DNA, 20 bp, Artificial Sequence
  MKO10036703_A_Olfr1495
  gRNA
ccgtgtcttaaccaatgttc

SEQ ID NO: 36704 - DNA, 20 bp, Artificial Sequence
  MKO10036704_A_Olfr1495
  gRNA
tatcaactagtgtcagaagc

SEQ ID NO: 36705 - DNA, 20 bp, Artificial Sequence
  MKO10036705_A_Olfr1495
  gRNA
tgcagaatgcatgcgtagaa

SEQ ID NO: 36706 - DNA, 20 bp, Artificial Sequence
  MKO10036706_A_Olfr1496
  gRNA
ttgtgtaatgcagccctcat

SEQ ID NO: 36707 - DNA, 20 bp, Artificial Sequence
  MKO10036707_A_Olfr1496
  gRNA
tagtcaatccatttcctatg

SEQ ID NO: 36708 - DNA, 20 bp, Artificial Sequence
  MKO10036708_A_Olfr1496
  gRNA
tgccctgacacatactcttc

SEQ ID NO: 36709 - DNA, 20 bp, Artificial Sequence
  MKO10036709_A_Olfr1497
  gRNA
tttgaagtcggcggttcttc

SEQ ID NO: 36710 - DNA, 20 bp, Artificial Sequence
  MKO10036710_A_Olfr1497
  gRNA
cccgtgtaggtctggtaact

SEQ ID NO: 36711 - DNA, 20 bp, Artificial Sequence
  MKO10036711_A_Olfr1497
  gRNA
ccattgttaaaactcgtatg

SEQ ID NO: 36712 - DNA, 20 bp, Artificial Sequence
  MKO10036712_A_Olfr1499
  gRNA
gtactggtggcctatgtatg

SEQ ID NO: 36713 - DNA, 20 bp, Artificial Sequence
  MKO10036713_A_Olfr1499
  gRNA
ctgggcagcacaatgattat

SEQ ID NO: 36714 - DNA, 20 bp, Artificial Sequence
  MKO10036714_A_Olfr1499
  gRNA
accttcatgtatataagaag

SEQ ID NO: 36715 - DNA, 20 bp, Artificial Sequence
  MKO10036715_A_Olfr149
  gRNA
attatgactgagtagcgtag

SEQ ID NO: 36716 - DNA, 20 bp, Artificial Sequence
  MKO10036716_A_Olfr149
  gRNA
ttgtgcagacacatcgaccc

SEQ ID NO: 36717 - DNA, 20 bp, Artificial Sequence
  MKO10036717_A_Olfr149
  gRNA
ggaccgaactatacagctgt

SEQ ID NO: 36718 - DNA, 20 bp, Artificial Sequence
  MKO10036718_A_Olfr1500
  gRNA
tgtggagcctgcgatccatg

SEQ ID NO: 36719 - DNA, 20 bp, Artificial Sequence
  MKO10036719_A_Olfr1500
  gRNA
ctgagcaacacagcgtgcat

SEQ ID NO: 36720 - DNA, 20 bp, Artificial Sequence
  MKO10036720_A_Olfr1500
  gRNA
agccaagaggtagcaatcga

SEQ ID NO: 36721 - DNA, 20 bp, Artificial Sequence
  MKO10036721_A_Olfr1501
  gRNA
tgagactaagttacgcgaac

SEQ ID NO: 36722 - DNA, 20 bp, Artificial Sequence
  MKO10036722_A_Olfr1501
  gRNA
gcgtaacttagtctcactac

SEQ ID NO: 36723 - DNA, 20 bp, Artificial Sequence
  MKO10036723_A_Olfr1501
  gRNA
taacccgctcctttatgcga

SEQ ID NO: 36724 - DNA, 20 bp, Artificial Sequence
  MKO10036724_A_Olfr1502
  gRNA
ggtggtcattaaagcctatt

SEQ ID NO: 36725 - DNA, 20 bp, Artificial Sequence
  MKO10036725_A_Olfr1502
  gRNA
gtagtaggagcatatatctg

SEQ ID NO: 36726 - DNA, 20 bp, Artificial Sequence
  MKO10036726_A_Olfr1502
  gRNA
ggtgatgactgaagtatagc

SEQ ID NO: 36727 - DNA, 20 bp, Artificial Sequence
  MKO10036727_A_Olfr1504
  gRNA
ctgtagtgagaccaagttac

SEQ ID NO: 36728 - DNA, 20 bp, Artificial Sequence
  MKO10036728_A_Olfr1504
  gRNA
taaccccctcctttatgcca

SEQ ID NO: 36729 - DNA, 20 bp, Artificial Sequence
  MKO10036729_A_Olfr1504
  gRNA
gattacttgttcctgtaact

SEQ ID NO: 36730 - DNA, 20 bp, Artificial Sequence
  MKO10036730_A_Olfr1505
  gRNA
ggtaaaacagtcgtttccta

SEQ ID NO: 36731 - DNA, 20 bp, Artificial Sequence
  MKO10036731_A_Olfr1505
  gRNA
tcactcagtattgtatgctg

SEQ ID NO: 36732 - DNA, 20 bp, Artificial Sequence
  MKO10036732_A_Olfr1505
  gRNA
gtagtaggagcatatgtctg

SEQ ID NO: 36733 - DNA, 20 bp, Artificial Sequence
  MKO10036733_A_Olfr1506
  gRNA
tactagcatcatgaaccgac

SEQ ID NO: 36734 - DNA, 20 bp, Artificial Sequence
  MKO10036734_A_Olfr1506
  gRNA
gagcagacaagtttaagcac

SEQ ID NO: 36735 - DNA, 20 bp, Artificial Sequence
  MKO10036735_A_Olfr1506
  gRNA
gtgtacagtccttgtaggaa

SEQ ID NO: 36736 - DNA, 20 bp, Artificial Sequence
  MKO10036736_A_Olfr1507
  gRNA
caggccagttcgatcacctg

SEQ ID NO: 36737 - DNA, 20 bp, Artificial Sequence
  MKO10036737_A_Olfr1507
  gRNA
caacgagaatctcagtgata

SEQ ID NO: 36738 - DNA, 20 bp, Artificial Sequence
  MKO10036738_A_Olfr1507
  gRNA
gtgccttgaagaagttaatc

SEQ ID NO: 36739 - DNA, 20 bp, Artificial Sequence
  MKO10036739_A_Olfr1508
  gRNA
taacaatcatatatgaccgc

SEQ ID NO: 36740 - DNA, 20 bp, Artificial Sequence
  MKO10036740_A_Olfr1508
  gRNA
atcccattatctacaccctt

SEQ ID NO: 36741 - DNA, 20 bp, Artificial Sequence
  MKO10036741_A_Olfr1508
  gRNA
tcactgaagtttcgttgatg

SEQ ID NO: 36742 - DNA, 20 bp, Artificial Sequence
  MKO10036742_A_Olfr1509
  gRNA
aaccgataccaccttgtcga

SEQ ID NO: 36743 - DNA, 20 bp, Artificial Sequence
  MKO10036743_A_Olfr1509
  gRNA
cgtacctcctgtcatcaagc

SEQ ID NO: 36744 - DNA, 20 bp, Artificial Sequence
  MKO10036744_A_Olfr1509
  gRNA
acacgatcagaatccctgta

SEQ ID NO: 36745 - DNA, 20 bp, Artificial Sequence
  MKO10036745_A_Olfr150
  gRNA
aaaaaatgtcatctcctatc

SEQ ID NO: 36746 - DNA, 20 bp, Artificial Sequence
  MKO10036746_A_Olfr150
  gRNA
cctccgtatcaaatccactg

SEQ ID NO: 36747 - DNA, 20 bp, Artificial Sequence
  MKO10036747_A_Olfr150
  gRNA
tgattattgtggagtagcag

SEQ ID NO: 36748 - DNA, 20 bp, Artificial Sequence
  MKO10036748_A_Olfr1510
  gRNA
agcgtccagcgatgtgtttc

SEQ ID NO: 36749 - DNA, 20 bp, Artificial Sequence
  MKO10036749_A_Olfr1510
  gRNA
tacagcaactgctccgtcaa

SEQ ID NO: 36750 - DNA, 20 bp, Artificial Sequence
  MKO10036750_A_Olfr1510
  gRNA
tgagctgcacaaccaccaaa

SEQ ID NO: 36751 - DNA, 20 bp, Artificial Sequence
  MKO10036751_A_Olfr1511
  gRNA
gtgaagtttaatataatccg

SEQ ID NO: 36752 - DNA, 20 bp, Artificial Sequence
  MKO10036752_A_Olfr1511
  gRNA
accaaatgcgataaccttgc

SEQ ID NO: 36753 - DNA, 20 bp, Artificial Sequence
  MKO10036753_A_Olfr1511
  gRNA
gaagttgtgcacaattctag

SEQ ID NO: 36754 - DNA, 20 bp, Artificial Sequence
  MKO10036754_A_Olfr1512
  gRNA
gtgtttcctatacaccacta

SEQ ID NO: 36755 - DNA, 20 bp, Artificial Sequence
  MKO10036755_A_Olfr1512
  gRNA
tgctaagttgagtatcttgc

SEQ ID NO: 36756 - DNA, 20 bp, Artificial Sequence
  MKO10036756_A_Olfr1512
  gRNA
tgctgtggctgtcaggtcga

SEQ ID NO: 36757 - DNA, 20 bp, Artificial Sequence
  MKO10036757_A_Olfr1513
  gRNA
taagttgagtaccttgctcg

SEQ ID NO: 36758 - DNA, 20 bp, Artificial Sequence
  MKO10036758_A_Olfr1513
  gRNA
tgccatggctgtcaggtcgc

SEQ ID NO: 36759 - DNA, 20 bp, Artificial Sequence
  MKO10036759_A_Olfr1513
  gRNA
ccaagctccagccacgagca

SEQ ID NO: 36760 - DNA, 20 bp, Artificial Sequence
  MKO10036760_A_Olfr151
  gRNA
atcctcgtagtcaccatggt

SEQ ID NO: 36761 - DNA, 20 bp, Artificial Sequence
  MKO10036761_A_Olfr151
  gRNA
tgctgaaccgatgagtccta

SEQ ID NO: 36762 - DNA, 20 bp, Artificial Sequence
  MKO10036762_A_Olfr151
  gRNA
gtctatgccgtaggactcat

SEQ ID NO: 36763 - DNA, 20 bp, Artificial Sequence
  MKO10036763_A_Olfr152
  gRNA
gttaatggatgtgtccgtac

SEQ ID NO: 36764 - DNA, 20 bp, Artificial Sequence
  MKO10036764_A_Olfr152
  gRNA
cttgtgtttctgacgttata

SEQ ID NO: 36765 - DNA, 20 bp, Artificial Sequence
  MKO10036765_A_Olfr152
  gRNA
aaaactgcagtgcacagccg

SEQ ID NO: 36766 - DNA, 20 bp, Artificial Sequence
  MKO10036766_A_Olfr1532-ps1
  gRNA
caggaatatttgcctacatg

SEQ ID NO: 36767 - DNA, 20 bp, Artificial Sequence
  MKO10036767_A_Olfr1532-ps1
  gRNA
ctccaagataatgaatgaaa

SEQ ID NO: 36768 - DNA, 20 bp, Artificial Sequence
  MKO10036768_A_Olfr1532-ps1
  gRNA
catatacagcctgagaaaca

SEQ ID NO: 36769 - DNA, 20 bp, Artificial Sequence
  MKO10036769_A_Olfr1535
  gRNA
ctgccgaccactccactaca

SEQ ID NO: 36770 - DNA, 20 bp, Artificial Sequence
  MKO10036770_A_Olfr1535
  gRNA
accatgagtcgtcccctctg

SEQ ID NO: 36771 - DNA, 20 bp, Artificial Sequence
  MKO10036771_A_Olfr1535
  gRNA
ttgaagttaaacagcgtctg

SEQ ID NO: 36772 - DNA, 20 bp, Artificial Sequence
  MKO10036772_A_Olfr1537
  gRNA
actctgcaataccaaaagtg

SEQ ID NO: 36773 - DNA, 20 bp, Artificial Sequence
  MKO10036773_A_Olfr1537
  gRNA
atctgttcatcctttaacac

SEQ ID NO: 36774 - DNA, 20 bp, Artificial Sequence
  MKO10036774_A_Olfr1537
  gRNA
aagcatgaagccagtgttaa

SEQ ID NO: 36775 - DNA, 20 bp, Artificial Sequence
  MKO10036775_A_Olfr153
  gRNA
ttaaaaatccgttcaactga

SEQ ID NO: 36776 - DNA, 20 bp, Artificial Sequence
  MKO10036776_A_Olfr153
  gRNA
tgaacctcccttcagttgaa

SEQ ID NO: 36777 - DNA, 20 bp, Artificial Sequence
  MKO10036777_A_Olfr153
  gRNA
cataaatagtgaatagtgcc

SEQ ID NO: 36778 - DNA, 20 bp, Artificial Sequence
  MKO10036778_A_Olfr154
  gRNA
cataggctttgtaagcacta

SEQ ID NO: 36779 - DNA, 20 bp, Artificial Sequence
  MKO10036779_A_Olfr154
  gRNA
cttacaaagcctatgctgta

SEQ ID NO: 36780 - DNA, 20 bp, Artificial Sequence
  MKO10036780_A_Olfr154
  gRNA
gcatttgtccttccatactg

SEQ ID NO: 36781 - DNA, 20 bp, Artificial Sequence
  MKO10036781_A_Olfr155
  gRNA
aatgagaccgcccccctgtc

SEQ ID NO: 36782 - DNA, 20 bp, Artificial Sequence
  MKO10036782_A_Olfr155
  gRNA
attagtgataccacctgccc

SEQ ID NO: 36783 - DNA, 20 bp, Artificial Sequence
  MKO10036783_A_Olfr155
  gRNA
ggtctcattggatctgtcca

SEQ ID NO: 36784 - DNA, 20 bp, Artificial Sequence
  MKO10036784_A_Olfr156
  gRNA
ctcctcgattcccttagtcc

SEQ ID NO: 36785 - DNA, 20 bp, Artificial Sequence
  MKO10036785_A_Olfr156
  gRNA
ttcagctaccgtagactgat

SEQ ID NO: 36786 - DNA, 20 bp, Artificial Sequence
  MKO10036786_A_Olfr156
  gRNA
ggaaggagccaatcagtcta

SEQ ID NO: 36787 - DNA, 20 bp, Artificial Sequence
  MKO10036787_A_Olfr157
  gRNA
gctcatcttgtcaatgtacc

SEQ ID NO: 36788 - DNA, 20 bp, Artificial Sequence
  MKO10036788_A_Olfr157
  gRNA
tgacaagatgagcacgaaga

SEQ ID NO: 36789 - DNA, 20 bp, Artificial Sequence
  MKO10036789_A_Olfr157
  gRNA
caaattctgttacagtcgtc

SEQ ID NO: 36790 - DNA, 20 bp, Artificial Sequence
  MKO10036790_A_Olfr159
  gRNA
gaaggccgctgtgacaaacc

SEQ ID NO: 36791 - DNA, 20 bp, Artificial Sequence
  MKO10036791_A_Olfr159
  gRNA
tgaggacgacattgcccagc

SEQ ID NO: 36792 - DNA, 20 bp, Artificial Sequence
  MKO10036792_A_Olfr159
  gRNA
tgggccagaaacacttcaag

SEQ ID NO: 36793 - DNA, 20 bp, Artificial Sequence
  MKO10036793_A_Olfr15
  gRNA
ttcgacgtccctccacagag

SEQ ID NO: 36794 - DNA, 20 bp, Artificial Sequence
  MKO10036794_A_Olfr15
  gRNA
tcttacttgttgacgctggt

SEQ ID NO: 36795 - DNA, 20 bp, Artificial Sequence
  MKO10036795_A_Olfr15
  gRNA
caatacgtgtgtctcccact

SEQ ID NO: 36796 - DNA, 20 bp, Artificial Sequence
  MKO10036796_A_Olfr160
  gRNA
gtctatgccatgggactcat

SEQ ID NO: 36797 - DNA, 20 bp, Artificial Sequence
  MKO10036797_A_Olfr160
  gRNA
ttatgtagatccccaggaag

SEQ ID NO: 36798 - DNA, 20 bp, Artificial Sequence
  MKO10036798_A_Olfr160
  gRNA
ccttcgcatcagctccaatg

SEQ ID NO: 36799 - DNA, 20 bp, Artificial Sequence
  MKO10036799_A_Olfr161
  gRNA
aatcaagccatttcgttctc

SEQ ID NO: 36800 - DNA, 20 bp, Artificial Sequence
  MKO10036800_A_Olfr161
  gRNA
gtgcaacagagcattcagac

SEQ ID NO: 36801 - DNA, 20 bp, Artificial Sequence
  MKO10036801_A_Olfr161
  gRNA
atcctgaaaatctcatccac

SEQ ID NO: 36802 - DNA, 20 bp, Artificial Sequence
  MKO10036802_A_Olfr164
  gRNA
gaagcaataatgattgctac

SEQ ID NO: 36803 - DNA, 20 bp, Artificial Sequence
  MKO10036803_A_Olfr164
  gRNA
tgttccggagactataaatg

SEQ ID NO: 36804 - DNA, 20 bp, Artificial Sequence
  MKO10036804_A_Olfr164
  gRNA
ctgtactacagtaccccaaa

SEQ ID NO: 36805 - DNA, 20 bp, Artificial Sequence
  MKO10036805_A_Olfr165
  gRNA
caacatcgattataccatca

SEQ ID NO: 36806 - DNA, 20 bp, Artificial Sequence
  MKO10036806_A_Olfr165
  gRNA
cactacatgaaatagttagc

SEQ ID NO: 36807 - DNA, 20 bp, Artificial Sequence
  MKO10036807_A_Olfr165
  gRNA
tccgcaacaaagaagtagcc

SEQ ID NO: 36808 - DNA, 20 bp, Artificial Sequence
  MKO10036808_A_Olfr166
  gRNA
aatggttacggtttagttga

SEQ ID NO: 36809 - DNA, 20 bp, Artificial Sequence
  MKO10036809_A_Olfr166
  gRNA
cctcagaacatgccatagtc

SEQ ID NO: 36810 - DNA, 20 bp, Artificial Sequence
  MKO10036810_A_Olfr166
  gRNA
agcaaaaaggacccgaccat

SEQ ID NO: 36811 - DNA, 20 bp, Artificial Sequence
  MKO10036811_A_Olfr167
  gRNA
gagggatcttgggcgtagat

SEQ ID NO: 36812 - DNA, 20 bp, Artificial Sequence
  MKO10036812_A_Olfr167
  gRNA
tccccgccctagaatgcata

SEQ ID NO: 36813 - DNA, 20 bp, Artificial Sequence
  MKO10036813_A_Olfr167
  gRNA
ctctaccattgtccctaaaa

SEQ ID NO: 36814 - DNA, 20 bp, Artificial Sequence
  MKO10036814_A_Olfr168
  gRNA
agcaaaaaggaccctaccat

SEQ ID NO: 36815 - DNA, 20 bp, Artificial Sequence
  MKO10036815_A_Olfr168
  gRNA
tgatgagcatcataagtagt

SEQ ID NO: 36816 - DNA, 20 bp, Artificial Sequence
  MKO10036816_A_Olfr168
  gRNA
tgtcccaaggactcttgtca

SEQ ID NO: 36817 - DNA, 20 bp, Artificial Sequence
  MKO10036817_A_Olfr169
  gRNA
gccaaaaatttatcctgccc

SEQ ID NO: 36818 - DNA, 20 bp, Artificial Sequence
  MKO10036818_A_Olfr169
  gRNA
taacagcgacttcatcctct

SEQ ID NO: 36819 - DNA, 20 bp, Artificial Sequence
  MKO10036819_A_Olfr169
  gRNA
attacgaaagctgtagatta

SEQ ID NO: 36820 - DNA, 20 bp, Artificial Sequence
  MKO10036820_A_Olfr16
  gRNA
tgcgcagcctgccaaggata

SEQ ID NO: 36821 - DNA, 20 bp, Artificial Sequence
  MKO10036821_A_Olfr16
  gRNA
ttacaaccttcccatatcct

SEQ ID NO: 36822 - DNA, 20 bp, Artificial Sequence
  MKO10036822_A_Olfr16
  gRNA
agtgatagagttcgtcttcc

SEQ ID NO: 36823 - DNA, 20 bp, Artificial Sequence
  MKO10036823_A_Olfr170
  gRNA
gttgagtttgggtgtcaaga

SEQ ID NO: 36824 - DNA, 20 bp, Artificial Sequence
  MKO10036824_A_Olfr170
  gRNA
gacacaacacactatgagca

SEQ ID NO: 36825 - DNA, 20 bp, Artificial Sequence
  MKO10036825_A_Olfr170
  gRNA
tagttgtcataatgtactat

SEQ ID NO: 36826 - DNA, 20 bp, Artificial Sequence
  MKO10036826_A_Olfr171
  gRNA
taacagcgacttcatccttt

SEQ ID NO: 36827 - DNA, 20 bp, Artificial Sequence
  MKO10036827_A_Olfr171
  gRNA
tagttgtcataatgtactac

SEQ ID NO: 36828 - DNA, 20 bp, Artificial Sequence
  MKO10036828_A_Olfr171
  gRNA
agttaagcttatctttgaag

SEQ ID NO: 36829 - DNA, 20 bp, Artificial Sequence
  MKO10036829_A_Olfr172
  gRNA
aggctcccgtgatcatctga

SEQ ID NO: 36830 - DNA, 20 bp, Artificial Sequence
  MKO10036830_A_Olfr172
  gRNA
caagcccatattccctatca

SEQ ID NO: 36831 - DNA, 20 bp, Artificial Sequence
  MKO10036831_A_Olfr172
  gRNA
aaacatgagtttatcctcac

SEQ ID NO: 36832 - DNA, 20 bp, Artificial Sequence
  MKO10036832_A_Olfr173
  gRNA
aagctcccgtcgtcatctga

SEQ ID NO: 36833 - DNA, 20 bp, Artificial Sequence
  MKO10036833_A_Olfr173
  gRNA
taatacaagctcgttgatat

SEQ ID NO: 36834 - DNA, 20 bp, Artificial Sequence
  MKO10036834_A_Olfr173
  gRNA
caaactcacgtttcatggtg

SEQ ID NO: 36835 - DNA, 20 bp, Artificial Sequence
  MKO10036835_A_Olfr175-ps1
  gRNA
cgaccaagttctatcaacga

SEQ ID NO: 36836 - DNA, 20 bp, Artificial Sequence
  MKO10036836_A_Olfr175-ps1
  gRNA
tttccttcgttgatagaact

SEQ ID NO: 36837 - DNA, 20 bp, Artificial Sequence
  MKO10036837_A_Olfr175-ps1
  gRNA
gatagatggtagataacacc

SEQ ID NO: 36838 - DNA, 20 bp, Artificial Sequence
  MKO10036838_A_Olfr176
  gRNA
cgaccaagttcacttaatga

SEQ ID NO: 36839 - DNA, 20 bp, Artificial Sequence
  MKO10036839_A_Olfr176
  gRNA
tacccttcattaagtgaact

SEQ ID NO: 36840 - DNA, 20 bp, Artificial Sequence
  MKO10036840_A_Olfr176
  gRNA
gactgaggacaactactcct

SEQ ID NO: 36841 - DNA, 20 bp, Artificial Sequence
  MKO10036841_A_Olfr177
  gRNA
cgaccaagttcacttaatga

SEQ ID NO: 36842 - DNA, 20 bp, Artificial Sequence
  MKO10036842_A_Olfr177
  gRNA
tacccttcattaagtgaact

SEQ ID NO: 36843 - DNA, 20 bp, Artificial Sequence
  MKO10036843_A_Olfr177
  gRNA
gactgaggacaactactcct

SEQ ID NO: 36844 - DNA, 20 bp, Artificial Sequence
  MKO10036844_A_Olfr178
  gRNA
tcccaccaggatgaattgtg

SEQ ID NO: 36845 - DNA, 20 bp, Artificial Sequence
  MKO10036845_A_Olfr178
  gRNA
gagacaccctacatgaagaa

SEQ ID NO: 36846 - DNA, 20 bp, Artificial Sequence
  MKO10036846_A_Olfr178
  gRNA
tctaatatacatgagaagac

SEQ ID NO: 36847 - DNA, 20 bp, Artificial Sequence
  MKO10036847_A_Olfr17
  gRNA
gatcttcggctcatgattat

SEQ ID NO: 36848 - DNA, 20 bp, Artificial Sequence
  MKO10036848_A_Olfr17
  gRNA
tgatacatccctatttgaac

SEQ ID NO: 36849 - DNA, 20 bp, Artificial Sequence
  MKO10036849_A_Olfr17
  gRNA
agcgtggccggaagtatgtg

SEQ ID NO: 36850 - DNA, 20 bp, Artificial Sequence
  MKO10036850_A_Olfr180
  gRNA
tctttattaccttcgtcaaa

SEQ ID NO: 36851 - DNA, 20 bp, Artificial Sequence
  MKO10036851_A_Olfr180
  gRNA
tatattagaccatttgacga

SEQ ID NO: 36852 - DNA, 20 bp, Artificial Sequence
  MKO10036852_A_Olfr180
  gRNA
gagacaccctacatgaatca

SEQ ID NO: 36853 - DNA, 20 bp, Artificial Sequence
  MKO10036853_A_Olfr181
  gRNA
attgtataaaatacacctac

SEQ ID NO: 36854 - DNA, 20 bp, Artificial Sequence
  MKO10036854_A_Olfr181
  gRNA
ctgcattccttgatacatac

SEQ ID NO: 36855 - DNA, 20 bp, Artificial Sequence
  MKO10036855_A_Olfr181
  gRNA
tgtacaggagagtttataca

SEQ ID NO: 36856 - DNA, 20 bp, Artificial Sequence
  MKO10036856_A_Olfr183
  gRNA
taggcgaacacataatctat

SEQ ID NO: 36857 - DNA, 20 bp, Artificial Sequence
  MKO10036857_A_Olfr183
  gRNA
ctattagccttatcatttat

SEQ ID NO: 36858 - DNA, 20 bp, Artificial Sequence
  MKO10036858_A_Olfr183
  gRNA
gctatttaatctcttggaca

SEQ ID NO: 36859 - DNA, 20 bp, Artificial Sequence
  MKO10036859_A_Olfr186
  gRNA
agtcactgcggatgatatcc

SEQ ID NO: 36860 - DNA, 20 bp, Artificial Sequence
  MKO10036860_A_Olfr186
  gRNA
agtctattggtcataataac

SEQ ID NO: 36861 - DNA, 20 bp, Artificial Sequence
  MKO10036861_A_Olfr186
  gRNA
attaagagtaggatcagtac

SEQ ID NO: 36862 - DNA, 20 bp, Artificial Sequence
  MKO10036862_A_Olfr187
  gRNA
catagtataaagacacggat

SEQ ID NO: 36863 - DNA, 20 bp, Artificial Sequence
  MKO10036863_A_Olfr187
  gRNA
tacccagtagttatgaccaa

SEQ ID NO: 36864 - DNA, 20 bp, Artificial Sequence
  MKO10036864_A_Olfr187
  gRNA
taagcaagttatagattcac

SEQ ID NO: 36865 - DNA, 20 bp, Artificial Sequence
  MKO10036865_A_Olfr18
  gRNA
attatgaaccctcgtctttg

SEQ ID NO: 36866 - DNA, 20 bp, Artificial Sequence
  MKO10036866_A_Olfr18
  gRNA
accaacaagccacaaagacg

SEQ ID NO: 36867 - DNA, 20 bp, Artificial Sequence
  MKO10036867_A_Olfr18
  gRNA
tctatgctgatgcatgatga

SEQ ID NO: 36868 - DNA, 20 bp, Artificial Sequence
  MKO10036868_A_Olfr190
  gRNA
cgtcaatagcactagtgtat

SEQ ID NO: 36869 - DNA, 20 bp, Artificial Sequence
  MKO10036869_A_Olfr190
  gRNA
caagaacaatcacaacggtg

SEQ ID NO: 36870 - DNA, 20 bp, Artificial Sequence
  MKO10036870_A_Olfr190
  gRNA
atctatctcattactattgt

SEQ ID NO: 36871 - DNA, 20 bp, Artificial Sequence
  MKO10036871_A_Olfr191
  gRNA
atttgtagtgagtgcaacca

SEQ ID NO: 36872 - DNA, 20 bp, Artificial Sequence
  MKO10036872_A_Olfr191
  gRNA
attcatgctttaattcacga

SEQ ID NO: 36873 - DNA, 20 bp, Artificial Sequence
  MKO10036873_A_Olfr191
  gRNA
atgaatgaatccacctaaaa

SEQ ID NO: 36874 - DNA, 20 bp, Artificial Sequence
  MKO10036874_A_Olfr192
  gRNA
tgctgtttacaattctgcaa

SEQ ID NO: 36875 - DNA, 20 bp, Artificial Sequence
  MKO10036875_A_Olfr192
  gRNA
gtctgtccaaggtatgaaga

SEQ ID NO: 36876 - DNA, 20 bp, Artificial Sequence
  MKO10036876_A_Olfr192
  gRNA
cacagggtcttcagagctac

SEQ ID NO: 36877 - DNA, 20 bp, Artificial Sequence
  MKO10036877_A_Olfr193
  gRNA
acccaattatctatagtttg

SEQ ID NO: 36878 - DNA, 20 bp, Artificial Sequence
  MKO10036878_A_Olfr193
  gRNA
tgccaaaagaaaacattccg

SEQ ID NO: 36879 - DNA, 20 bp, Artificial Sequence
  MKO10036879_A_Olfr193
  gRNA
gcataacatcacaataaaag

SEQ ID NO: 36880 - DNA, 20 bp, Artificial Sequence
  MKO10036880_A_Olfr194
  gRNA
gtgtgtacttgcctgataag

SEQ ID NO: 36881 - DNA, 20 bp, Artificial Sequence
  MKO10036881_A_Olfr194
  gRNA
aataaacctacatgaataag

SEQ ID NO: 36882 - DNA, 20 bp, Artificial Sequence
  MKO10036882_A_Olfr194
  gRNA
tgagaacaaaatcagacacc

SEQ ID NO: 36883 - DNA, 20 bp, Artificial Sequence
  MKO10036883_A_Olfr195
  gRNA
tgaactgatattacttgtct

SEQ ID NO: 36884 - DNA, 20 bp, Artificial Sequence
  MKO10036884_A_Olfr195
  gRNA
ggagtaagacactagaacta

SEQ ID NO: 36885 - DNA, 20 bp, Artificial Sequence
  MKO10036885_A_Olfr195
  gRNA
aaaagccctacttcaatcat

SEQ ID NO: 36886 - DNA, 20 bp, Artificial Sequence
  MKO10036886_A_Olfr196
  gRNA
atatcttgatcgtctacttg

SEQ ID NO: 36887 - DNA, 20 bp, Artificial Sequence
  MKO10036887_A_Olfr196
  gRNA
agtagacgatcaagatatga

SEQ ID NO: 36888 - DNA, 20 bp, Artificial Sequence
  MKO10036888_A_Olfr196
  gRNA
gaaagagatcagtttgctct

SEQ ID NO: 36889 - DNA, 20 bp, Artificial Sequence
  MKO10036889_A_Olfr197
  gRNA
attaagagaagggtcggtac

SEQ ID NO: 36890 - DNA, 20 bp, Artificial Sequence
  MKO10036890_A_Olfr197
  gRNA
tacatgggtatttgaaggcg

SEQ ID NO: 36891 - DNA, 20 bp, Artificial Sequence
  MKO10036891_A_Olfr197
  gRNA
tcctgcatcccaaaaagcac

SEQ ID NO: 36892 - DNA, 20 bp, Artificial Sequence
  MKO10036892_A_Olfr198
  gRNA
gttcattgtaggatcagtgc

SEQ ID NO: 36893 - DNA, 20 bp, Artificial Sequence
  MKO10036893_A_Olfr198
  gRNA
atcttcacctgatccagacc

SEQ ID NO: 36894 - DNA, 20 bp, Artificial Sequence
  MKO10036894_A_Olfr198
  gRNA
ttcctcatgtatgtgcgtcc

SEQ ID NO: 36895 - DNA, 20 bp, Artificial Sequence
  MKO10036895_A_Olfr199
  gRNA
caccgaccatcccaagttaa

SEQ ID NO: 36896 - DNA, 20 bp, Artificial Sequence
  MKO10036896_A_Olfr199
  gRNA
cttcacatttgtaaccgtct

SEQ ID NO: 36897 - DNA, 20 bp, Artificial Sequence
  MKO10036897_A_Olfr199
  gRNA
agcaccaagtaagtatgcca

SEQ ID NO: 36898 - DNA, 20 bp, Artificial Sequence
  MKO10036898_A_Olfr19
  gRNA
tgatgatgagattgcacgta

SEQ ID NO: 36899 - DNA, 20 bp, Artificial Sequence
  MKO10036899_A_Olfr19
  gRNA
ctgtcaccctctgcactata

SEQ ID NO: 36900 - DNA, 20 bp, Artificial Sequence
  MKO10036900_A_Olfr19
  gRNA
gaggatcctctgaaattccc

SEQ ID NO: 36901 - DNA, 20 bp, Artificial Sequence
  MKO10036901_A_Olfr1
  gRNA
caacctgcatagggaatcga

SEQ ID NO: 36902 - DNA, 20 bp, Artificial Sequence
  MKO10036902_A_Olfr1
  gRNA
ctggtggaatgggtaggccc

SEQ ID NO: 36903 - DNA, 20 bp, Artificial Sequence
  MKO10036903_A_Olfr1
  gRNA
ggaagacacaattcttacat

SEQ ID NO: 36904 - DNA, 20 bp, Artificial Sequence
  MKO10036904_A_Olfr201
  gRNA
caccgaccatcccacgctaa

SEQ ID NO: 36905 - DNA, 20 bp, Artificial Sequence
  MKO10036905_A_Olfr201
  gRNA
ggcagaaggaaaccgcactc

SEQ ID NO: 36906 - DNA, 20 bp, Artificial Sequence
  MKO10036906_A_Olfr201
  gRNA
agtctattagacatcaacac

SEQ ID NO: 36907 - DNA, 20 bp, Artificial Sequence
  MKO10036907_A_Olfr202
  gRNA
taattagattaacgttctgc

SEQ ID NO: 36908 - DNA, 20 bp, Artificial Sequence
  MKO10036908_A_Olfr202
  gRNA
acatcaccaccggataaagg

SEQ ID NO: 36909 - DNA, 20 bp, Artificial Sequence
  MKO10036909_A_Olfr202
  gRNA
tctgaattcaacaattcacg

SEQ ID NO: 36910 - DNA, 20 bp, Artificial Sequence
  MKO10036910_A_Olfr203
  gRNA
tgagaataaacgcagtcacc

SEQ ID NO: 36911 - DNA, 20 bp, Artificial Sequence
  MKO10036911_A_Olfr203
  gRNA
gtgatgttatggaggtgaac

SEQ ID NO: 36912 - DNA, 20 bp, Artificial Sequence
  MKO10036912_A_Olfr203
  gRNA
agtagacctacatgaataag

SEQ ID NO: 36913 - DNA, 20 bp, Artificial Sequence
  MKO10036913_A_Olfr204
  gRNA
gtgcaagaaatcgcatagag

SEQ ID NO: 36914 - DNA, 20 bp, Artificial Sequence
  MKO10036914_A_Olfr204
  gRNA
gccaccaatccattaagaga

SEQ ID NO: 36915 - DNA, 20 bp, Artificial Sequence
  MKO10036915_A_Olfr204
  gRNA
ataagaatgacataatatcc

SEQ ID NO: 36916 - DNA, 20 bp, Artificial Sequence
  MKO10036916_A_Olfr205
  gRNA
ttatgcccgtgtcctatttg

SEQ ID NO: 36917 - DNA, 20 bp, Artificial Sequence
  MKO10036917_A_Olfr205
  gRNA
cttcatctatgtcatcacta

SEQ ID NO: 36918 - DNA, 20 bp, Artificial Sequence
  MKO10036918_A_Olfr205
  gRNA
gtgcaagaaattgtgtagag

SEQ ID NO: 36919 - DNA, 20 bp, Artificial Sequence
  MKO10036919_A_Olfr206
  gRNA
agatccatctcttaacacat

SEQ ID NO: 36920 - DNA, 20 bp, Artificial Sequence
  MKO10036920_A_Olfr206
  gRNA
acgaccaatgtgttaagaga

SEQ ID NO: 36921 - DNA, 20 bp, Artificial Sequence
  MKO10036921_A_Olfr206
  gRNA
gtttacaaaaccaattatat

SEQ ID NO: 36922 - DNA, 20 bp, Artificial Sequence
  MKO10036922_A_Olfr207
  gRNA
tgacccatctatcaatgtac

SEQ ID NO: 36923 - DNA, 20 bp, Artificial Sequence
  MKO10036923_A_Olfr207
  gRNA
gctaccagtacattgataga

SEQ ID NO: 36924 - DNA, 20 bp, Artificial Sequence
  MKO10036924_A_Olfr207
  gRNA
tatctaattggacttctaca

SEQ ID NO: 36925 - DNA, 20 bp, Artificial Sequence
  MKO10036925_A_Olfr208
  gRNA
tgacccatctatcaatgtac

SEQ ID NO: 36926 - DNA, 20 bp, Artificial Sequence
  MKO10036926_A_Olfr208
  gRNA
gctaccagtacattgataga

SEQ ID NO: 36927 - DNA, 20 bp, Artificial Sequence
  MKO10036927_A_Olfr208
  gRNA
tatctaattggacttctaca

SEQ ID NO: 36928 - DNA, 20 bp, Artificial Sequence
  MKO10036928_A_Olfr209
  gRNA
tgacccatctatcaatgtac

SEQ ID NO: 36929 - DNA, 20 bp, Artificial Sequence
  MKO10036929_A_Olfr209
  gRNA
gctaccagtacattgataga

SEQ ID NO: 36930 - DNA, 20 bp, Artificial Sequence
  MKO10036930_A_Olfr209
  gRNA
tatctaattggacttctaca

SEQ ID NO: 36931 - DNA, 20 bp, Artificial Sequence
  MKO10036931_A_Olfr20
  gRNA
atatcaccaattcattaacg

SEQ ID NO: 36932 - DNA, 20 bp, Artificial Sequence
  MKO10036932_A_Olfr20
  gRNA
tgacacccacgttaatgaat

SEQ ID NO: 36933 - DNA, 20 bp, Artificial Sequence
  MKO10036933_A_Olfr20
  gRNA
cggtggtgaggtacatgagc

SEQ ID NO: 36934 - DNA, 20 bp, Artificial Sequence
  MKO10036934_A_Olfr211
  gRNA
gatgaagccgtatgacacaa

SEQ ID NO: 36935 - DNA, 20 bp, Artificial Sequence
  MKO10036935_A_Olfr211
  gRNA
ggtcgtaggccatgacagtg

SEQ ID NO: 36936 - DNA, 20 bp, Artificial Sequence
  MKO10036936_A_Olfr211
  gRNA
tctttgacaccagacccctc

SEQ ID NO: 36937 - DNA, 20 bp, Artificial Sequence
  MKO10036937_A_Olfr212
  gRNA
aaatagcatctcaaccgacc

SEQ ID NO: 36938 - DNA, 20 bp, Artificial Sequence
  MKO10036938_A_Olfr212
  gRNA
ctgcaatcggtggtccaagc

SEQ ID NO: 36939 - DNA, 20 bp, Artificial Sequence
  MKO10036939_A_Olfr212
  gRNA
atctctcatgtttagatacc

SEQ ID NO: 36940 - DNA, 20 bp, Artificial Sequence
  MKO10036940_A_Olfr213
  gRNA
ctgcaatcggtggtccacgc

SEQ ID NO: 36941 - DNA, 20 bp, Artificial Sequence
  MKO10036941_A_Olfr213
  gRNA
ttcaattacccagatatcac

SEQ ID NO: 36942 - DNA, 20 bp, Artificial Sequence
  MKO10036942_A_Olfr213
  gRNA
agtaggccagcaaatgcatc

SEQ ID NO: 36943 - DNA, 20 bp, Artificial Sequence
  MKO10036943_A_Olfr214
  gRNA
gcgaggatcggaccacgtga

SEQ ID NO: 36944 - DNA, 20 bp, Artificial Sequence
  MKO10036944_A_Olfr214
  gRNA
agaggccgctctcgtaaaca

SEQ ID NO: 36945 - DNA, 20 bp, Artificial Sequence
  MKO10036945_A_Olfr214
  gRNA
cactaccgtgtttacgagag

SEQ ID NO: 36946 - DNA, 20 bp, Artificial Sequence
  MKO10036946_A_Olfr215
  gRNA
gtatcacggttatccttctg

SEQ ID NO: 36947 - DNA, 20 bp, Artificial Sequence
  MKO10036947_A_Olfr215
  gRNA
tcactactagccacgtgatc

SEQ ID NO: 36948 - DNA, 20 bp, Artificial Sequence
  MKO10036948_A_Olfr215
  gRNA
acgggtactggtgcagatga

SEQ ID NO: 36949 - DNA, 20 bp, Artificial Sequence
  MKO10036949_A_Olfr218
  gRNA
attattccacgaatgctagc

SEQ ID NO: 36950 - DNA, 20 bp, Artificial Sequence
  MKO10036950_A_Olfr218
  gRNA
aggaggccagctagcattcg

SEQ ID NO: 36951 - DNA, 20 bp, Artificial Sequence
  MKO10036951_A_Olfr218
  gRNA
cattgtgacaattattcgtc

SEQ ID NO: 36952 - DNA, 20 bp, Artificial Sequence
  MKO10036952_A_Olfr220
  gRNA
atagctcgactgcgctactg

SEQ ID NO: 36953 - DNA, 20 bp, Artificial Sequence
  MKO10036953_A_Olfr220
  gRNA
ataataacagggtagcgtag

SEQ ID NO: 36954 - DNA, 20 bp, Artificial Sequence
  MKO10036954_A_Olfr220
  gRNA
cagttgcccatcactgcgta

SEQ ID NO: 36955 - DNA, 20 bp, Artificial Sequence
  MKO10036955_A_Olfr221
  gRNA
gagacactatggtcggatag

SEQ ID NO: 36956 - DNA, 20 bp, Artificial Sequence
  MKO10036956_A_Olfr221
  gRNA
agcaatgagatagcactcgc

SEQ ID NO: 36957 - DNA, 20 bp, Artificial Sequence
  MKO10036957_A_Olfr221
  gRNA
aactaacctgagccacgaga

SEQ ID NO: 36958 - DNA, 20 bp, Artificial Sequence
  MKO10036958_A_Olfr222
  gRNA
ctgcaccgagtgcgttgtct

SEQ ID NO: 36959 - DNA, 20 bp, Artificial Sequence
  MKO10036959_A_Olfr222
  gRNA
ggccgccaagacaacgcact

SEQ ID NO: 36960 - DNA, 20 bp, Artificial Sequence
  MKO10036960_A_Olfr222
  gRNA
tgcccgagcaatgaagccgt

SEQ ID NO: 36961 - DNA, 20 bp, Artificial Sequence
  MKO10036961_A_Olfr223
  gRNA
tggaggtacgtgtacatacc

SEQ ID NO: 36962 - DNA, 20 bp, Artificial Sequence
  MKO10036962_A_Olfr223
  gRNA
gcccaccagaacaaatgtgt

SEQ ID NO: 36963 - DNA, 20 bp, Artificial Sequence
  MKO10036963_A_Olfr223
  gRNA
atgcacttctcacttgctcg

SEQ ID NO: 36964 - DNA, 20 bp, Artificial Sequence
  MKO10036964_A_Olfr224
  gRNA
tccaacaggttgatatcagg

SEQ ID NO: 36965 - DNA, 20 bp, Artificial Sequence
  MKO10036965_A_Olfr224
  gRNA
tgaagccatccaatgatcct

SEQ ID NO: 36966 - DNA, 20 bp, Artificial Sequence
  MKO10036966_A_Olfr224
  gRNA
atgttcttatacatgtcact

SEQ ID NO: 36967 - DNA, 20 bp, Artificial Sequence
  MKO10036967_A_Olfr225
  gRNA
gtctacagctagtcggcgca

SEQ ID NO: 36968 - DNA, 20 bp, Artificial Sequence
  MKO10036968_A_Olfr225
  gRNA
tagaaacctgctcgacccgc

SEQ ID NO: 36969 - DNA, 20 bp, Artificial Sequence
  MKO10036969_A_Olfr225
  gRNA
acattgctgccgccgtcctg

SEQ ID NO: 36970 - DNA, 20 bp, Artificial Sequence
  MKO10036970_A_Olfr228
  gRNA
acatattgaagaaagttaac

SEQ ID NO: 36971 - DNA, 20 bp, Artificial Sequence
  MKO10036971_A_Olfr228
  gRNA
gatttaacatggggattatt

SEQ ID NO: 36972 - DNA, 20 bp, Artificial Sequence
  MKO10036972_A_Olfr228
  gRNA
tgactccttaaaaactgaca

SEQ ID NO: 36973 - DNA, 20 bp, Artificial Sequence
  MKO10036973_A_Olfr229
  gRNA
gccatcatcagtaagttcga

SEQ ID NO: 36974 - DNA, 20 bp, Artificial Sequence
  MKO10036974_A_Olfr229
  gRNA
caccgtgggagtttacagtt

SEQ ID NO: 36975 - DNA, 20 bp, Artificial Sequence
  MKO10036975_A_Olfr229
  gRNA
ggggactggaaaccattcaa

SEQ ID NO: 36976 - DNA, 20 bp, Artificial Sequence
  MKO10036976_A_Olfr231
  gRNA
caccagcgatgtatccgtac

SEQ ID NO: 36977 - DNA, 20 bp, Artificial Sequence
  MKO10036977_A_Olfr231
  gRNA
ctgtacggatacatcgctgg

SEQ ID NO: 36978 - DNA, 20 bp, Artificial Sequence
  MKO10036978_A_Olfr231
  gRNA
gtcctatatccgaatcatca

SEQ ID NO: 36979 - DNA, 20 bp, Artificial Sequence
  MKO10036979_A_Olfr235
  gRNA
ggatcgcaaatagacaaaga

SEQ ID NO: 36980 - DNA, 20 bp, Artificial Sequence
  MKO10036980_A_Olfr235
  gRNA
tgcaaatctgtcaaaactag

SEQ ID NO: 36981 - DNA, 20 bp, Artificial Sequence
  MKO10036981_A_Olfr235
  gRNA
agctacacagctggactcac

SEQ ID NO: 36982 - DNA, 20 bp, Artificial Sequence
  MKO10036982_A_Olfr237-ps1
  gRNA
catctttggaataatctgcc

SEQ ID NO: 36983 - DNA, 20 bp, Artificial Sequence
  MKO10036983_A_Olfr237-ps1
  gRNA
cagaagaaagctaaatatcc

SEQ ID NO: 36984 - DNA, 20 bp, Artificial Sequence
  MKO10036984_A_Olfr237-ps1
  gRNA
gatacaagaatgtttgcatt

SEQ ID NO: 36985 - DNA, 20 bp, Artificial Sequence
  MKO10036985_A_Olfr239
  gRNA
ttcctttctactaaccgtca

SEQ ID NO: 36986 - DNA, 20 bp, Artificial Sequence
  MKO10036986_A_Olfr239
  gRNA
ttaccaggcaggcacaacca

SEQ ID NO: 36987 - DNA, 20 bp, Artificial Sequence
  MKO10036987_A_Olfr239
  gRNA
gaacatgacaagcaaaatgg

SEQ ID NO: 36988 - DNA, 20 bp, Artificial Sequence
  MKO10036988_A_Olfr23
  gRNA
acacaatgttgtcagtgccc

SEQ ID NO: 36989 - DNA, 20 bp, Artificial Sequence
  MKO10036989_A_Olfr23
  gRNA
tgaaccgggagatgacagtt

SEQ ID NO: 36990 - DNA, 20 bp, Artificial Sequence
  MKO10036990_A_Olfr23
  gRNA
cccaaacctctgtgtgagta

SEQ ID NO: 36991 - DNA, 20 bp, Artificial Sequence
  MKO10036991_A_Olfr242
  gRNA
ttcaatgataaacgtattag

SEQ ID NO: 36992 - DNA, 20 bp, Artificial Sequence
  MKO10036992_A_Olfr242
  gRNA
ctctacttcttcctcatatt

SEQ ID NO: 36993 - DNA, 20 bp, Artificial Sequence
  MKO10036993_A_Olfr242
  gRNA
ctgggcatgatcacactaat

SEQ ID NO: 36994 - DNA, 20 bp, Artificial Sequence
  MKO10036994_A_Olfr243
  gRNA
acattccaatgtattgagtc

SEQ ID NO: 36995 - DNA, 20 bp, Artificial Sequence
  MKO10036995_A_Olfr243
  gRNA
agatgcctgactcaatacat

SEQ ID NO: 36996 - DNA, 20 bp, Artificial Sequence
  MKO10036996_A_Olfr243
  gRNA
ctgttgctccaagcattgct

SEQ ID NO: 36997 - DNA, 20 bp, Artificial Sequence
  MKO10036997_A_Olfr247
  gRNA
aactctgagctcatgaagaa

SEQ ID NO: 36998 - DNA, 20 bp, Artificial Sequence
  MKO10036998_A_Olfr247
  gRNA
gatgtatgtattcaccatct

SEQ ID NO: 36999 - DNA, 20 bp, Artificial Sequence
  MKO10036999_A_Olfr247
  gRNA
gctgacagagtgttgccttc

SEQ ID NO: 37000 - DNA, 20 bp, Artificial Sequence
  MKO10037000_A_Olfr248
  gRNA
tctcaagaccccttcagccg

SEQ ID NO: 37001 - DNA, 20 bp, Artificial Sequence
  MKO10037001_A_Olfr248
  gRNA
gacaaccgcatttcagacat

SEQ ID NO: 37002 - DNA, 20 bp, Artificial Sequence
  MKO10037002_A_Olfr248
  gRNA
acaacatgtggccactgctt

SEQ ID NO: 37003 - DNA, 20 bp, Artificial Sequence
  MKO10037003_A_Olfr24
  gRNA
ggccacgatgattcgagcat

SEQ ID NO: 37004 - DNA, 20 bp, Artificial Sequence
  MKO10037004_A_Olfr24
  gRNA
ctcctatgctcgaatcatcg

SEQ ID NO: 37005 - DNA, 20 bp, Artificial Sequence
  MKO10037005_A_Olfr24
  gRNA
tacatctgggtcagacaaca

SEQ ID NO: 37006 - DNA, 20 bp, Artificial Sequence
  MKO10037006_A_Olfr250
  gRNA
gttgacatgactgctaccac

SEQ ID NO: 37007 - DNA, 20 bp, Artificial Sequence
  MKO10037007_A_Olfr250
  gRNA
tacaacataagcacttccct

SEQ ID NO: 37008 - DNA, 20 bp, Artificial Sequence
  MKO10037008_A_Olfr250
  gRNA
agtgtgcagcaagcattaac

SEQ ID NO: 37009 - DNA, 20 bp, Artificial Sequence
  MKO10037009_A_Olfr251
  gRNA
gctcacaagctcgttgacat

SEQ ID NO: 37010 - DNA, 20 bp, Artificial Sequence
  MKO10037010_A_Olfr251
  gRNA
gcaatccagacccataaaag

SEQ ID NO: 37011 - DNA, 20 bp, Artificial Sequence
  MKO10037011_A_Olfr251
  gRNA
cagaacaccatatcctatga

SEQ ID NO: 37012 - DNA, 20 bp, Artificial Sequence
  MKO10037012_A_Olfr257
  gRNA
aggtgggcatgacgtagcgc

SEQ ID NO: 37013 - DNA, 20 bp, Artificial Sequence
  MKO10037013_A_Olfr257
  gRNA
accatagtgacgttgtactt

SEQ ID NO: 37014 - DNA, 20 bp, Artificial Sequence
  MKO10037014_A_Olfr257
  gRNA
cataagaacataccacgaga

SEQ ID NO: 37015 - DNA, 20 bp, Artificial Sequence
  MKO10037015_A_Olfr259
  gRNA
tatcagaacacaagtctacg

SEQ ID NO: 37016 - DNA, 20 bp, Artificial Sequence
  MKO10037016_A_Olfr259
  gRNA
gccaagttctcaatactcca

SEQ ID NO: 37017 - DNA, 20 bp, Artificial Sequence
  MKO10037017_A_Olfr259
  gRNA
agacaggagtattacttctg

SEQ ID NO: 37018 - DNA, 20 bp, Artificial Sequence
  MKO10037018_A_Olfr25
  gRNA
tgttactgcaggagatccga

SEQ ID NO: 37019 - DNA, 20 bp, Artificial Sequence
  MKO10037019_A_Olfr25
  gRNA
gctgaaccatactgttatag

SEQ ID NO: 37020 - DNA, 20 bp, Artificial Sequence
  MKO10037020_A_Olfr25
  gRNA
tacccaccactataacagta

SEQ ID NO: 37021 - DNA, 20 bp, Artificial Sequence
  MKO10037021_A_Olfr262
  gRNA
acaccagggaaatgattgcc

SEQ ID NO: 37022 - DNA, 20 bp, Artificial Sequence
  MKO10037022_A_Olfr262
  gRNA
tgacattagttccacaaaaa

SEQ ID NO: 37023 - DNA, 20 bp, Artificial Sequence
  MKO10037023_A_Olfr262
  gRNA
gaaaaagacaatctgcaact

SEQ ID NO: 37024 - DNA, 20 bp, Artificial Sequence
  MKO10037024_A_Olfr263
  gRNA
accacagatttgccgaagta

SEQ ID NO: 37025 - DNA, 20 bp, Artificial Sequence
  MKO10037025_A_Olfr263
  gRNA
atcatcttgacgcatagacg

SEQ ID NO: 37026 - DNA, 20 bp, Artificial Sequence
  MKO10037026_A_Olfr263
  gRNA
atctacatgtatctacaacc

SEQ ID NO: 37027 - DNA, 20 bp, Artificial Sequence
  MKO10037027_A_Olfr266
  gRNA
tcttcccaatatttacgcaa

SEQ ID NO: 37028 - DNA, 20 bp, Artificial Sequence
  MKO10037028_A_Olfr266
  gRNA
agaaacctttgcgtaaatat

SEQ ID NO: 37029 - DNA, 20 bp, Artificial Sequence
  MKO10037029_A_Olfr266
  gRNA
ctctgctttaggttggctat

SEQ ID NO: 37030 - DNA, 20 bp, Artificial Sequence
  MKO10037030_A_Olfr267
  gRNA
gtccacagagtgtatacttc

SEQ ID NO: 37031 - DNA, 20 bp, Artificial Sequence
  MKO10037031_A_Olfr267
  gRNA
agatgcaatgataaaactgc

SEQ ID NO: 37032 - DNA, 20 bp, Artificial Sequence
  MKO10037032_A_Olfr267
  gRNA
agataagagtacagttaccc

SEQ ID NO: 37033 - DNA, 20 bp, Artificial Sequence
  MKO10037033_A_Olfr26
  gRNA
tgaaccctccaataataaat

SEQ ID NO: 37034 - DNA, 20 bp, Artificial Sequence
  MKO10037034_A_Olfr26
  gRNA
ctcttgctccagagagttac

SEQ ID NO: 37035 - DNA, 20 bp, Artificial Sequence
  MKO10037035_A_Olfr26
  gRNA
aacagctagagtaggcacca

SEQ ID NO: 37036 - DNA, 20 bp, Artificial Sequence
  MKO10037036_A_Olfr270
  gRNA
ctacaaatggttatctccct

SEQ ID NO: 37037 - DNA, 20 bp, Artificial Sequence
  MKO10037037_A_Olfr270
  gRNA
ggattatcaagtacatgatg

SEQ ID NO: 37038 - DNA, 20 bp, Artificial Sequence
  MKO10037038_A_Olfr270
  gRNA
ctgttcagcccacctaaccg

SEQ ID NO: 37039 - DNA, 20 bp, Artificial Sequence
  MKO10037039_A_Olfr272
  gRNA
ccagaatttcgcagacgaag

SEQ ID NO: 37040 - DNA, 20 bp, Artificial Sequence
  MKO10037040_A_Olfr272
  gRNA
cccaagtctaaagacaccgc

SEQ ID NO: 37041 - DNA, 20 bp, Artificial Sequence
  MKO10037041_A_Olfr272
  gRNA
cccagcggtgtctttagact

SEQ ID NO: 37042 - DNA, 20 bp, Artificial Sequence
  MKO10037042_A_Olfr273
  gRNA
cccagtcagatcttgagatt

SEQ ID NO: 37043 - DNA, 20 bp, Artificial Sequence
  MKO10037043_A_Olfr273
  gRNA
atgtatctagtgattctaac

SEQ ID NO: 37044 - DNA, 20 bp, Artificial Sequence
  MKO10037044_A_Olfr273
  gRNA
catatcaaatatggccttcc

SEQ ID NO: 37045 - DNA, 20 bp, Artificial Sequence
  MKO10037045_A_Olfr275
  gRNA
gatgtatctgatcaccttgc

SEQ ID NO: 37046 - DNA, 20 bp, Artificial Sequence
  MKO10037046_A_Olfr275
  gRNA
gatatcccattattatgaac

SEQ ID NO: 37047 - DNA, 20 bp, Artificial Sequence
  MKO10037047_A_Olfr275
  gRNA
gaaacaaagtttgccagcat

SEQ ID NO: 37048 - DNA, 20 bp, Artificial Sequence
  MKO10037048_A_Olfr279
  gRNA
cgtaggacgcgacgatcaac

SEQ ID NO: 37049 - DNA, 20 bp, Artificial Sequence
  MKO10037049_A_Olfr279
  gRNA
acacatccaacatcgtgcct

SEQ ID NO: 37050 - DNA, 20 bp, Artificial Sequence
  MKO10037050_A_Olfr279
  gRNA
tgtgtggagggtccgactgg

SEQ ID NO: 37051 - DNA, 20 bp, Artificial Sequence
  MKO10037051_A_Olfr27
  gRNA
ttcaatgataaacgtattag

SEQ ID NO: 37052 - DNA, 20 bp, Artificial Sequence
  MKO10037052_A_Olfr27
  gRNA
ctctacttcttcctcatatt

SEQ ID NO: 37053 - DNA, 20 bp, Artificial Sequence
  MKO10037053_A_Olfr27
  gRNA
ctgggcatgatcacactaat

SEQ ID NO: 37054 - DNA, 20 bp, Artificial Sequence
  MKO10037054_A_Olfr281
  gRNA
agggaagtgcctgcgatact

SEQ ID NO: 37055 - DNA, 20 bp, Artificial Sequence
  MKO10037055_A_Olfr281
  gRNA
cgtgactgcgctgtactgca

SEQ ID NO: 37056 - DNA, 20 bp, Artificial Sequence
  MKO10037056_A_Olfr281
  gRNA
gcagtcactccaagtatcgc

SEQ ID NO: 37057 - DNA, 20 bp, Artificial Sequence
  MKO10037057_A_Olfr282
  gRNA
cacgataccgaaactgctga

SEQ ID NO: 37058 - DNA, 20 bp, Artificial Sequence
  MKO10037058_A_Olfr282
  gRNA
cagcagtttcggtatcgtga

SEQ ID NO: 37059 - DNA, 20 bp, Artificial Sequence
  MKO10037059_A_Olfr282
  gRNA
cgcaaccatcatcgtgctct

SEQ ID NO: 37060 - DNA, 20 bp, Artificial Sequence
  MKO10037060_A_Olfr283
  gRNA
gatcagctcttgagtcgatc

SEQ ID NO: 37061 - DNA, 20 bp, Artificial Sequence
  MKO10037061_A_Olfr283
  gRNA
taaactcggggaccgtgctg

SEQ ID NO: 37062 - DNA, 20 bp, Artificial Sequence
  MKO10037062_A_Olfr283
  gRNA
tccccgagtttatcctgctt

SEQ ID NO: 37063 - DNA, 20 bp, Artificial Sequence
  MKO10037063_A_Olfr284
  gRNA
gccttcttcgtcttcgccac

SEQ ID NO: 37064 - DNA, 20 bp, Artificial Sequence
  MKO10037064_A_Olfr284
  gRNA
gccggtggcgaagacgaaga

SEQ ID NO: 37065 - DNA, 20 bp, Artificial Sequence
  MKO10037065_A_Olfr284
  gRNA
tcctccgtcgtgcatttctt

SEQ ID NO: 37066 - DNA, 20 bp, Artificial Sequence
  MKO10037066_A_Olfr285
  gRNA
aggtgggcatgacgtagcgc

SEQ ID NO: 37067 - DNA, 20 bp, Artificial Sequence
  MKO10037067_A_Olfr285
  gRNA
accatagtgacgttgtactt

SEQ ID NO: 37068 - DNA, 20 bp, Artificial Sequence
  MKO10037068_A_Olfr285
  gRNA
cataagaacataccacgaga

SEQ ID NO: 37069 - DNA, 20 bp, Artificial Sequence
  MKO10037069_A_Olfr286
  gRNA
ggctctgtacaaatcgccgt

SEQ ID NO: 37070 - DNA, 20 bp, Artificial Sequence
  MKO10037070_A_Olfr286
  gRNA
cacaccttcgctccgatgta

SEQ ID NO: 37071 - DNA, 20 bp, Artificial Sequence
  MKO10037071_A_Olfr286
  gRNA
cttgattacatgacattccg

SEQ ID NO: 37072 - DNA, 20 bp, Artificial Sequence
  MKO10037072_A_Olfr287
  gRNA
tgggataggtagcctggctc

SEQ ID NO: 37073 - DNA, 20 bp, Artificial Sequence
  MKO10037073_A_Olfr287
  gRNA
gtcacagtgctgctgttctt

SEQ ID NO: 37074 - DNA, 20 bp, Artificial Sequence
  MKO10037074_A_Olfr287
  gRNA
tatcacccccatgtgcaacc

SEQ ID NO: 37075 - DNA, 20 bp, Artificial Sequence
  MKO10037075_A_Olfr288
  gRNA
gggcctcctcctcaagccat

SEQ ID NO: 37076 - DNA, 20 bp, Artificial Sequence
  MKO10037076_A_Olfr288
  gRNA
catcatgcccatgtgcaacc

SEQ ID NO: 37077 - DNA, 20 bp, Artificial Sequence
  MKO10037077_A_Olfr288
  gRNA
acaaaaagatgaccacagtc

SEQ ID NO: 37078 - DNA, 20 bp, Artificial Sequence
  MKO10037078_A_Olfr290
  gRNA
actggaggttgggcgaatat

SEQ ID NO: 37079 - DNA, 20 bp, Artificial Sequence
  MKO10037079_A_Olfr290
  gRNA
tgcgctttccttcagctgac

SEQ ID NO: 37080 - DNA, 20 bp, Artificial Sequence
  MKO10037080_A_Olfr290
  gRNA
ctactgtgatattccacctg

SEQ ID NO: 37081 - DNA, 20 bp, Artificial Sequence
  MKO10037081_A_Olfr291
  gRNA
actggaggttgggcgcatat

SEQ ID NO: 37082 - DNA, 20 bp, Artificial Sequence
  MKO10037082_A_Olfr291
  gRNA
ttattgtgatattccacctg

SEQ ID NO: 37083 - DNA, 20 bp, Artificial Sequence
  MKO10037083_A_Olfr291
  gRNA
agaagacttcagtcccagct

SEQ ID NO: 37084 - DNA, 20 bp, Artificial Sequence
  MKO10037084_A_Olfr292
  gRNA
gattcaattccttaccacga

SEQ ID NO: 37085 - DNA, 20 bp, Artificial Sequence
  MKO10037085_A_Olfr292
  gRNA
gtcatatcctcaattatttc

SEQ ID NO: 37086 - DNA, 20 bp, Artificial Sequence
  MKO10037086_A_Olfr292
  gRNA
catattatcaacagtgttga

SEQ ID NO: 37087 - DNA, 20 bp, Artificial Sequence
  MKO10037087_A_Olfr293
  gRNA
cctagttaccaattccacct

SEQ ID NO: 37088 - DNA, 20 bp, Artificial Sequence
  MKO10037088_A_Olfr293
  gRNA
ccaaggtggaattggtaact

SEQ ID NO: 37089 - DNA, 20 bp, Artificial Sequence
  MKO10037089_A_Olfr293
  gRNA
actacttccaatgttactac

SEQ ID NO: 37090 - DNA, 20 bp, Artificial Sequence
  MKO10037090_A_Olfr294
  gRNA
gatgaaccctgttattctag

SEQ ID NO: 37091 - DNA, 20 bp, Artificial Sequence
  MKO10037091_A_Olfr294
  gRNA
tgcaattgatgctgaacgtg

SEQ ID NO: 37092 - DNA, 20 bp, Artificial Sequence
  MKO10037092_A_Olfr294
  gRNA
tagtcgtaactgtatgctga

SEQ ID NO: 37093 - DNA, 20 bp, Artificial Sequence
  MKO10037093_A_Olfr295
  gRNA
actatttctgagattgctga

SEQ ID NO: 37094 - DNA, 20 bp, Artificial Sequence
  MKO10037094_A_Olfr295
  gRNA
gctgttcttgttgatgtacc

SEQ ID NO: 37095 - DNA, 20 bp, Artificial Sequence
  MKO10037095_A_Olfr295
  gRNA
tgatgataagattccccaac

SEQ ID NO: 37096 - DNA, 20 bp, Artificial Sequence
  MKO10037096_A_Olfr297
  gRNA
aaatatgctacaatgatgtg

SEQ ID NO: 37097 - DNA, 20 bp, Artificial Sequence
  MKO10037097_A_Olfr297
  gRNA
agcaatctcagaagtagttg

SEQ ID NO: 37098 - DNA, 20 bp, Artificial Sequence
  MKO10037098_A_Olfr297
  gRNA
aagtaaagcaggtaccacta

SEQ ID NO: 37099 - DNA, 20 bp, Artificial Sequence
  MKO10037099_A_Olfr298
  gRNA
atgtcaagcgtgctttgaag

SEQ ID NO: 37100 - DNA, 20 bp, Artificial Sequence
  MKO10037100_A_Olfr298
  gRNA
ttgtaccatcaatttcagac

SEQ ID NO: 37101 - DNA, 20 bp, Artificial Sequence
  MKO10037101_A_Olfr298
  gRNA
gttacatgaagtgaaccact

SEQ ID NO: 37102 - DNA, 20 bp, Artificial Sequence
  MKO10037102_A_Olfr299
  gRNA
aaggatgaacaattccaccc

SEQ ID NO: 37103 - DNA, 20 bp, Artificial Sequence
  MKO10037103_A_Olfr299
  gRNA
gcagctgcaaccaatgataa

SEQ ID NO: 37104 - DNA, 20 bp, Artificial Sequence
  MKO10037104_A_Olfr299
  gRNA
tccttaactacttctaatgt

SEQ ID NO: 37105 - DNA, 20 bp, Artificial Sequence
  MKO10037105_A_Olfr2
  gRNA
ccaggtgcagagtgcgacgt

SEQ ID NO: 37106 - DNA, 20 bp, Artificial Sequence
  MKO10037106_A_Olfr2
  gRNA
atttcttggtattggcgtcc

SEQ ID NO: 37107 - DNA, 20 bp, Artificial Sequence
  MKO10037107_A_Olfr2
  gRNA
cctacgtcgcactctgcacc

SEQ ID NO: 37108 - DNA, 20 bp, Artificial Sequence
  MKO10037108_A_Olfr301
  gRNA
tgtacctgtacagcctgata

SEQ ID NO: 37109 - DNA, 20 bp, Artificial Sequence
  MKO10037109_A_Olfr301
  gRNA
gctacttctaatgttaccac

SEQ ID NO: 37110 - DNA, 20 bp, Artificial Sequence
  MKO10037110_A_Olfr301
  gRNA
tgatgataagattccctatc

SEQ ID NO: 37111 - DNA, 20 bp, Artificial Sequence
  MKO10037111_A_Olfr303
  gRNA
acatcgtggtcacaataatc

SEQ ID NO: 37112 - DNA, 20 bp, Artificial Sequence
  MKO10037112_A_Olfr303
  gRNA
agccacggtgcctaagttgc

SEQ ID NO: 37113 - DNA, 20 bp, Artificial Sequence
  MKO10037113_A_Olfr303
  gRNA
tcggacataggcaaagatta

SEQ ID NO: 37114 - DNA, 20 bp, Artificial Sequence
  MKO10037114_A_Olfr304
  gRNA
gtgatgttccctcgttacta

SEQ ID NO: 37115 - DNA, 20 bp, Artificial Sequence
  MKO10037115_A_Olfr304
  gRNA
caacaattacatttcgattc

SEQ ID NO: 37116 - DNA, 20 bp, Artificial Sequence
  MKO10037116_A_Olfr304
  gRNA
tgttaagtagtatgaatccc

SEQ ID NO: 37117 - DNA, 20 bp, Artificial Sequence
  MKO10037117_A_Olfr305
  gRNA
ttgcagtcccctacattatg

SEQ ID NO: 37118 - DNA, 20 bp, Artificial Sequence
  MKO10037118_A_Olfr305
  gRNA
tagtgatgatgagcgtttcc

SEQ ID NO: 37119 - DNA, 20 bp, Artificial Sequence
  MKO10037119_A_Olfr305
  gRNA
aacgctcatcatcactacac

SEQ ID NO: 37120 - DNA, 20 bp, Artificial Sequence
  MKO10037120_A_Olfr307
  gRNA
aggtggcaaacgctttagac

SEQ ID NO: 37121 - DNA, 20 bp, Artificial Sequence
  MKO10037121_A_Olfr307
  gRNA
tcatgatggcaccatagttc

SEQ ID NO: 37122 - DNA, 20 bp, Artificial Sequence
  MKO10037122_A_Olfr307
  gRNA
gacggcgttctttgacagcc

SEQ ID NO: 37123 - DNA, 20 bp, Artificial Sequence
  MKO10037123_A_Olfr308
  gRNA
atgtacctcctcaccattgg

SEQ ID NO: 37124 - DNA, 20 bp, Artificial Sequence
  MKO10037124_A_Olfr308
  gRNA
cctggcctgtaccagtacac

SEQ ID NO: 37125 - DNA, 20 bp, Artificial Sequence
  MKO10037125_A_Olfr308
  gRNA
tcttctgcgacattgcaccc

SEQ ID NO: 37126 - DNA, 20 bp, Artificial Sequence
  MKO10037126_A_Olfr309
  gRNA
ataatagtactatagcgaag

SEQ ID NO: 37127 - DNA, 20 bp, Artificial Sequence
  MKO10037127_A_Olfr309
  gRNA
gctggatgcaggtcggatat

SEQ ID NO: 37128 - DNA, 20 bp, Artificial Sequence
  MKO10037128_A_Olfr309
  gRNA
ttcctgaagctatatactat

SEQ ID NO: 37129 - DNA, 20 bp, Artificial Sequence
  MKO10037129_A_Olfr30
  gRNA
agaagagattgacgactgtc

SEQ ID NO: 37130 - DNA, 20 bp, Artificial Sequence
  MKO10037130_A_Olfr30
  gRNA
ccgtgttgcctgccatagca

SEQ ID NO: 37131 - DNA, 20 bp, Artificial Sequence
  MKO10037131_A_Olfr30
  gRNA
gttgagggaccctcccaacc

SEQ ID NO: 37132 - DNA, 20 bp, Artificial Sequence
  MKO10037132_A_Olfr310
  gRNA
gagagagttgatacaggtac

SEQ ID NO: 37133 - DNA, 20 bp, Artificial Sequence
  MKO10037133_A_Olfr310
  gRNA
gtattgaagattcccgtcaa

SEQ ID NO: 37134 - DNA, 20 bp, Artificial Sequence
  MKO10037134_A_Olfr310
  gRNA
ctaatacttctgactgtcat

SEQ ID NO: 37135 - DNA, 20 bp, Artificial Sequence
  MKO10037135_A_Olfr311
  gRNA
tacatgtttatcacactgtg

SEQ ID NO: 37136 - DNA, 20 bp, Artificial Sequence
  MKO10037136_A_Olfr311
  gRNA
cactgattaccatctcaatg

SEQ ID NO: 37137 - DNA, 20 bp, Artificial Sequence
  MKO10037137_A_Olfr311
  gRNA
agcccacctcctcattgaga

SEQ ID NO: 37138 - DNA, 20 bp, Artificial Sequence
  MKO10037138_A_Olfr312
  gRNA
tacagaatgctttctactca

SEQ ID NO: 37139 - DNA, 20 bp, Artificial Sequence
  MKO10037139_A_Olfr312
  gRNA
gagctcattcgtcctcacag

SEQ ID NO: 37140 - DNA, 20 bp, Artificial Sequence
  MKO10037140_A_Olfr312
  gRNA
cactgactaccatctcactg

SEQ ID NO: 37141 - DNA, 20 bp, Artificial Sequence
  MKO10037141_A_Olfr313
  gRNA
tggtcactgcctgggtaggt

SEQ ID NO: 37142 - DNA, 20 bp, Artificial Sequence
  MKO10037142_A_Olfr313
  gRNA
cactgactaccatctcagtg

SEQ ID NO: 37143 - DNA, 20 bp, Artificial Sequence
  MKO10037143_A_Olfr313
  gRNA
gtgtaaatgagcaagaaaac

SEQ ID NO: 37144 - DNA, 20 bp, Artificial Sequence
  MKO10037144_A_Olfr314
  gRNA
atgccacccattgcgctatc

SEQ ID NO: 37145 - DNA, 20 bp, Artificial Sequence
  MKO10037145_A_Olfr314
  gRNA
taccgccaagtgcgaggagc

SEQ ID NO: 37146 - DNA, 20 bp, Artificial Sequence
  MKO10037146_A_Olfr314
  gRNA
tggccgctgtcctccgaatg

SEQ ID NO: 37147 - DNA, 20 bp, Artificial Sequence
  MKO10037147_A_Olfr315
  gRNA
ggatcgcatgcggagcaccg

SEQ ID NO: 37148 - DNA, 20 bp, Artificial Sequence
  MKO10037148_A_Olfr315
  gRNA
gttcagcaccggcgtgaaga

SEQ ID NO: 37149 - DNA, 20 bp, Artificial Sequence
  MKO10037149_A_Olfr315
  gRNA
agtggttgattgttcgagag

SEQ ID NO: 37150 - DNA, 20 bp, Artificial Sequence
  MKO10037150_A_Olfr316
  gRNA
agtggtgacatagaacaagc

SEQ ID NO: 37151 - DNA, 20 bp, Artificial Sequence
  MKO10037151_A_Olfr316
  gRNA
tgtgtgcactgatgcagtga

SEQ ID NO: 37152 - DNA, 20 bp, Artificial Sequence
  MKO10037152_A_Olfr316
  gRNA
gtctttggtccagcctgatg

SEQ ID NO: 37153 - DNA, 20 bp, Artificial Sequence
  MKO10037153_A_Olfr317
  gRNA
gtcaacacagctgtcgttga

SEQ ID NO: 37154 - DNA, 20 bp, Artificial Sequence
  MKO10037154_A_Olfr317
  gRNA
aacgacagctgtgttgacac

SEQ ID NO: 37155 - DNA, 20 bp, Artificial Sequence
  MKO10037155_A_Olfr317
  gRNA
cttctctgaccggcctgagc

SEQ ID NO: 37156 - DNA, 20 bp, Artificial Sequence
  MKO10037156_A_Olfr318
  gRNA
atactggaaaagaccaacta

SEQ ID NO: 37157 - DNA, 20 bp, Artificial Sequence
  MKO10037157_A_Olfr318
  gRNA
gtcttcggtccagcctgatg

SEQ ID NO: 37158 - DNA, 20 bp, Artificial Sequence
  MKO10037158_A_Olfr318
  gRNA
gatgtacatcatgtcgatga

SEQ ID NO: 37159 - DNA, 20 bp, Artificial Sequence
  MKO10037159_A_Olfr319
  gRNA
tgtatgcgctaaagcattga

SEQ ID NO: 37160 - DNA, 20 bp, Artificial Sequence
  MKO10037160_A_Olfr319
  gRNA
ctcacatcctaaaacggaaa

SEQ ID NO: 37161 - DNA, 20 bp, Artificial Sequence
  MKO10037161_A_Olfr319
  gRNA
accggtgacatagaacagac

SEQ ID NO: 37162 - DNA, 20 bp, Artificial Sequence
  MKO10037162_A_Olfr31
  gRNA
ctcatcctatgcgcggattc

SEQ ID NO: 37163 - DNA, 20 bp, Artificial Sequence
  MKO10037163_A_Olfr31
  gRNA
agtggccagaatccgcgcat

SEQ ID NO: 37164 - DNA, 20 bp, Artificial Sequence
  MKO10037164_A_Olfr31
  gRNA
catacatcaccgtctcatag

SEQ ID NO: 37165 - DNA, 20 bp, Artificial Sequence
  MKO10037165_A_Olfr320
  gRNA
agagtccagtaacatagaac

SEQ ID NO: 37166 - DNA, 20 bp, Artificial Sequence
  MKO10037166_A_Olfr320
  gRNA
cttggttgttgtactccaga

SEQ ID NO: 37167 - DNA, 20 bp, Artificial Sequence
  MKO10037167_A_Olfr320
  gRNA
catctctaccactgtgccca

SEQ ID NO: 37168 - DNA, 20 bp, Artificial Sequence
  MKO10037168_A_Olfr322
  gRNA
accgtcttcgtcctggcaat

SEQ ID NO: 37169 - DNA, 20 bp, Artificial Sequence
  MKO10037169_A_Olfr322
  gRNA
ttacaaatccgctccgctgc

SEQ ID NO: 37170 - DNA, 20 bp, Artificial Sequence
  MKO10037170_A_Olfr322
  gRNA
gccggtcagagaagcctata

SEQ ID NO: 37171 - DNA, 20 bp, Artificial Sequence
  MKO10037171_A_Olfr323
  gRNA
caggacagctggattaacgg

SEQ ID NO: 37172 - DNA, 20 bp, Artificial Sequence
  MKO10037172_A_Olfr323
  gRNA
tgcagggtccctacgtagtg

SEQ ID NO: 37173 - DNA, 20 bp, Artificial Sequence
  MKO10037173_A_Olfr323
  gRNA
tggatgtgtaccaaatctcc

SEQ ID NO: 37174 - DNA, 20 bp, Artificial Sequence
  MKO10037174_A_Olfr324
  gRNA
gagccccgttccgtaataga

SEQ ID NO: 37175 - DNA, 20 bp, Artificial Sequence
  MKO10037175_A_Olfr324
  gRNA
gaaggtaggagagcgcaatc

SEQ ID NO: 37176 - DNA, 20 bp, Artificial Sequence
  MKO10037176_A_Olfr324
  gRNA
gccttcgatttcttctcgtt

SEQ ID NO: 37177 - DNA, 20 bp, Artificial Sequence
  MKO10037177_A_Olfr325
  gRNA
cttctttcaagaatctttaa

SEQ ID NO: 37178 - DNA, 20 bp, Artificial Sequence
  MKO10037178_A_Olfr325
  gRNA
tccaacataaagacatcagc

SEQ ID NO: 37179 - DNA, 20 bp, Artificial Sequence
  MKO10037179_A_Olfr325
  gRNA
ctttaaagattcttgaaaga

SEQ ID NO: 37180 - DNA, 20 bp, Artificial Sequence
  MKO10037180_A_Olfr328
  gRNA
attctgaccctcctattgac

SEQ ID NO: 37181 - DNA, 20 bp, Artificial Sequence
  MKO10037181_A_Olfr328
  gRNA
atgttcctgtacctgtcaat

SEQ ID NO: 37182 - DNA, 20 bp, Artificial Sequence
  MKO10037182_A_Olfr328
  gRNA
actatgaccttcccaatctg

SEQ ID NO: 37183 - DNA, 20 bp, Artificial Sequence
  MKO10037183_A_Olfr329-ps
  gRNA
catggcactataagggcttc

SEQ ID NO: 37184 - DNA, 20 bp, Artificial Sequence
  MKO10037184_A_Olfr329-ps
  gRNA
tctctacacatctgttgata

SEQ ID NO: 37185 - DNA, 20 bp, Artificial Sequence
  MKO10037185_A_Olfr329-ps
  gRNA
acctggatgaacaactctac

SEQ ID NO: 37186 - DNA, 20 bp, Artificial Sequence
  MKO10037186_A_Olfr32
  gRNA
aaatgtcaccggctggtggc

SEQ ID NO: 37187 - DNA, 20 bp, Artificial Sequence
  MKO10037187_A_Olfr32
  gRNA
tggaggcaggtctcaagtag

SEQ ID NO: 37188 - DNA, 20 bp, Artificial Sequence
  MKO10037188_A_Olfr32
  gRNA
tgttgactgtcacaacaatg

SEQ ID NO: 37189 - DNA, 20 bp, Artificial Sequence
  MKO10037189_A_Olfr330
  gRNA
aacctgctagtgtcacatag

SEQ ID NO: 37190 - DNA, 20 bp, Artificial Sequence
  MKO10037190_A_Olfr330
  gRNA
ttcctctatgtgacactagc

SEQ ID NO: 37191 - DNA, 20 bp, Artificial Sequence
  MKO10037191_A_Olfr330
  gRNA
ataccggagtggatggcaga

SEQ ID NO: 37192 - DNA, 20 bp, Artificial Sequence
  MKO10037192_A_Olfr331
  gRNA
agatagcagcaccatagtag

SEQ ID NO: 37193 - DNA, 20 bp, Artificial Sequence
  MKO10037193_A_Olfr331
  gRNA
actttactgtttcttgaaag

SEQ ID NO: 37194 - DNA, 20 bp, Artificial Sequence
  MKO10037194_A_Olfr331
  gRNA
tccaacagacagacatcagc

SEQ ID NO: 37195 - DNA, 20 bp, Artificial Sequence
  MKO10037195_A_Olfr332
  gRNA
caaggctttattccgcccct

SEQ ID NO: 37196 - DNA, 20 bp, Artificial Sequence
  MKO10037196_A_Olfr332
  gRNA
tacggtatgaacgagggctg

SEQ ID NO: 37197 - DNA, 20 bp, Artificial Sequence
  MKO10037197_A_Olfr332
  gRNA
tgatgatggccgcctccacc

SEQ ID NO: 37198 - DNA, 20 bp, Artificial Sequence
  MKO10037198_A_Olfr338
  gRNA
tcataatggttactccaatg

SEQ ID NO: 37199 - DNA, 20 bp, Artificial Sequence
  MKO10037199_A_Olfr338
  gRNA
atttgcagaagataaggccc

SEQ ID NO: 37200 - DNA, 20 bp, Artificial Sequence
  MKO10037200_A_Olfr338
  gRNA
caactactagaaggacacag

SEQ ID NO: 37201 - DNA, 20 bp, Artificial Sequence
  MKO10037201_A_Olfr339
  gRNA
aagggtgtgcgcaagagcat

SEQ ID NO: 37202 - DNA, 20 bp, Artificial Sequence
  MKO10037202_A_Olfr339
  gRNA
aacacaccctgtatatggga

SEQ ID NO: 37203 - DNA, 20 bp, Artificial Sequence
  MKO10037203_A_Olfr339
  gRNA
ttcttctagtagtaatatca

SEQ ID NO: 37204 - DNA, 20 bp, Artificial Sequence
  MKO10037204_A_Olfr33
  gRNA
ccagtcatcaggaaagattg

SEQ ID NO: 37205 - DNA, 20 bp, Artificial Sequence
  MKO10037205_A_Olfr33
  gRNA
tccaagaatgatctcctcaa

SEQ ID NO: 37206 - DNA, 20 bp, Artificial Sequence
  MKO10037206_A_Olfr33
  gRNA
gtgtcaagtccaaacccatc

SEQ ID NO: 37207 - DNA, 20 bp, Artificial Sequence
  MKO10037207_A_Olfr340
  gRNA
gtgaccaaagtctcccgctg

SEQ ID NO: 37208 - DNA, 20 bp, Artificial Sequence
  MKO10037208_A_Olfr340
  gRNA
atcagtcgcatctccaaaaa

SEQ ID NO: 37209 - DNA, 20 bp, Artificial Sequence
  MKO10037209_A_Olfr340
  gRNA
gttggcagtagataaagtcc

SEQ ID NO: 37210 - DNA, 20 bp, Artificial Sequence
  MKO10037210_A_Olfr341
  gRNA
tgagctcgacaggctcaata

SEQ ID NO: 37211 - DNA, 20 bp, Artificial Sequence
  MKO10037211_A_Olfr341
  gRNA
gtaatgactagtgtacctaa

SEQ ID NO: 37212 - DNA, 20 bp, Artificial Sequence
  MKO10037212_A_Olfr341
  gRNA
aaagaccattattaccactg

SEQ ID NO: 37213 - DNA, 20 bp, Artificial Sequence
  MKO10037213_A_Olfr342
  gRNA
tgaccatagtacctaaagta

SEQ ID NO: 37214 - DNA, 20 bp, Artificial Sequence
  MKO10037214_A_Olfr342
  gRNA
gacaaaatacagtgcaatta

SEQ ID NO: 37215 - DNA, 20 bp, Artificial Sequence
  MKO10037215_A_Olfr342
  gRNA
gagttgcttatccttacttt

SEQ ID NO: 37216 - DNA, 20 bp, Artificial Sequence
  MKO10037216_A_Olfr344
  gRNA
agtcagtccatttcatatga

SEQ ID NO: 37217 - DNA, 20 bp, Artificial Sequence
  MKO10037217_A_Olfr344
  gRNA
aacacacccatcatatgaaa

SEQ ID NO: 37218 - DNA, 20 bp, Artificial Sequence
  MKO10037218_A_Olfr344
  gRNA
tcagggaagagtaaataact

SEQ ID NO: 37219 - DNA, 20 bp, Artificial Sequence
  MKO10037219_A_Olfr345
  gRNA
agtacaaggaaactacgcag

SEQ ID NO: 37220 - DNA, 20 bp, Artificial Sequence
  MKO10037220_A_Olfr345
  gRNA
attggcaatggataaggccc

SEQ ID NO: 37221 - DNA, 20 bp, Artificial Sequence
  MKO10037221_A_Olfr345
  gRNA
tattcttgtcttaggcaatg

SEQ ID NO: 37222 - DNA, 20 bp, Artificial Sequence
  MKO10037222_A_Olfr346
  gRNA
caaggctttgcggattccct

SEQ ID NO: 37223 - DNA, 20 bp, Artificial Sequence
  MKO10037223_A_Olfr346
  gRNA
ttcttctagtagtagtgtcc

SEQ ID NO: 37224 - DNA, 20 bp, Artificial Sequence
  MKO10037224_A_Olfr346
  gRNA
aatgacagatccatagtaca

SEQ ID NO: 37225 - DNA, 20 bp, Artificial Sequence
  MKO10037225_A_Olfr347
  gRNA
atctaataacactaatgtac

SEQ ID NO: 37226 - DNA, 20 bp, Artificial Sequence
  MKO10037226_A_Olfr347
  gRNA
attggcagtggataaggtcc

SEQ ID NO: 37227 - DNA, 20 bp, Artificial Sequence
  MKO10037227_A_Olfr347
  gRNA
ttgcagatacccttcataga

SEQ ID NO: 37228 - DNA, 20 bp, Artificial Sequence
  MKO10037228_A_Olfr348
  gRNA
tcttactagtcattgaatcc

SEQ ID NO: 37229 - DNA, 20 bp, Artificial Sequence
  MKO10037229_A_Olfr348
  gRNA
gactcatgattcttgtatag

SEQ ID NO: 37230 - DNA, 20 bp, Artificial Sequence
  MKO10037230_A_Olfr348
  gRNA
tgagctagatagcttaatta

SEQ ID NO: 37231 - DNA, 20 bp, Artificial Sequence
  MKO10037231_A_Olfr350
  gRNA
tcttactcgtagctatatcc

SEQ ID NO: 37232 - DNA, 20 bp, Artificial Sequence
  MKO10037232_A_Olfr350
  gRNA
gcccttgtcagtagaagtaa

SEQ ID NO: 37233 - DNA, 20 bp, Artificial Sequence
  MKO10037233_A_Olfr350
  gRNA
tgtgctatacactctgcata

SEQ ID NO: 37234 - DNA, 20 bp, Artificial Sequence
  MKO10037234_A_Olfr351
  gRNA
aacccctggtggcggtacaa

SEQ ID NO: 37235 - DNA, 20 bp, Artificial Sequence
  MKO10037235_A_Olfr351
  gRNA
aaggcctttgtaccgccacc

SEQ ID NO: 37236 - DNA, 20 bp, Artificial Sequence
  MKO10037236_A_Olfr351
  gRNA
catgagtactgtacccccta

SEQ ID NO: 37237 - DNA, 20 bp, Artificial Sequence
  MKO10037237_A_Olfr352
  gRNA
gaagataaccagttcgttaa

SEQ ID NO: 37238 - DNA, 20 bp, Artificial Sequence
  MKO10037238_A_Olfr352
  gRNA
agacaccaccattaacgaac

SEQ ID NO: 37239 - DNA, 20 bp, Artificial Sequence
  MKO10037239_A_Olfr352
  gRNA
aatgcatcccgtatatgaga

SEQ ID NO: 37240 - DNA, 20 bp, Artificial Sequence
  MKO10037240_A_Olfr353
  gRNA
ttgaactcccgccagaagtc

SEQ ID NO: 37241 - DNA, 20 bp, Artificial Sequence
  MKO10037241_A_Olfr353
  gRNA
gacttctggcgggagttcaa

SEQ ID NO: 37242 - DNA, 20 bp, Artificial Sequence
  MKO10037242_A_Olfr353
  gRNA
tgtagcagctgcgatgtata

SEQ ID NO: 37243 - DNA, 20 bp, Artificial Sequence
  MKO10037243_A_Olfr354
  gRNA
tgtcgaggccgccaaacatc

SEQ ID NO: 37244 - DNA, 20 bp, Artificial Sequence
  MKO10037244_A_Olfr354
  gRNA
cggcctcgacaactgccttc

SEQ ID NO: 37245 - DNA, 20 bp, Artificial Sequence
  MKO10037245_A_Olfr354
  gRNA
tgagctgatgatcattacca

SEQ ID NO: 37246 - DNA, 20 bp, Artificial Sequence
  MKO10037246_A_Olfr355
  gRNA
ccagtagggcacatcgatga

SEQ ID NO: 37247 - DNA, 20 bp, Artificial Sequence
  MKO10037247_A_Olfr355
  gRNA
ggttccctgttagagtaacc

SEQ ID NO: 37248 - DNA, 20 bp, Artificial Sequence
  MKO10037248_A_Olfr355
  gRNA
ccatcatcgatgtgccctac

SEQ ID NO: 37249 - DNA, 20 bp, Artificial Sequence
  MKO10037249_A_Olfr356
  gRNA
atagggatgtcgtcaccagc

SEQ ID NO: 37250 - DNA, 20 bp, Artificial Sequence
  MKO10037250_A_Olfr356
  gRNA
ctagctgaatcagcagcgta

SEQ ID NO: 37251 - DNA, 20 bp, Artificial Sequence
  MKO10037251_A_Olfr356
  gRNA
tgtttcatatgtccgcattg

SEQ ID NO: 37252 - DNA, 20 bp, Artificial Sequence
  MKO10037252_A_Olfr357
  gRNA
cgttactcctcaatactgac

SEQ ID NO: 37253 - DNA, 20 bp, Artificial Sequence
  MKO10037253_A_Olfr357
  gRNA
tattctacggcactctcaca

SEQ ID NO: 37254 - DNA, 20 bp, Artificial Sequence
  MKO10037254_A_Olfr357
  gRNA
gttgagttgggtgctgctac

SEQ ID NO: 37255 - DNA, 20 bp, Artificial Sequence
  MKO10037255_A_Olfr358
  gRNA
tgcgaatcacagaaccatac

SEQ ID NO: 37256 - DNA, 20 bp, Artificial Sequence
  MKO10037256_A_Olfr358
  gRNA
gtctacctatgacttaaacc

SEQ ID NO: 37257 - DNA, 20 bp, Artificial Sequence
  MKO10037257_A_Olfr358
  gRNA
agttgtccttatcatgtacc

SEQ ID NO: 37258 - DNA, 20 bp, Artificial Sequence
  MKO10037258_A_Olfr360
  gRNA
ttgtgtcatgcaacgattat

SEQ ID NO: 37259 - DNA, 20 bp, Artificial Sequence
  MKO10037259_A_Olfr360
  gRNA
cagcatggaagtctacttgc

SEQ ID NO: 37260 - DNA, 20 bp, Artificial Sequence
  MKO10037260_A_Olfr360
  gRNA
ccatcatccagctatgactt

SEQ ID NO: 37261 - DNA, 20 bp, Artificial Sequence
  MKO10037261_A_Olfr361
  gRNA
aacaatacctatgcgaacat

SEQ ID NO: 37262 - DNA, 20 bp, Artificial Sequence
  MKO10037262_A_Olfr361
  gRNA
caatctagaacaagatcgcc

SEQ ID NO: 37263 - DNA, 20 bp, Artificial Sequence
  MKO10037263_A_Olfr361
  gRNA
aaagtgtgtgcaccagcatc

SEQ ID NO: 37264 - DNA, 20 bp, Artificial Sequence
  MKO10037264_A_Olfr362
  gRNA
gtacactgctattaccccat

SEQ ID NO: 37265 - DNA, 20 bp, Artificial Sequence
  MKO10037265_A_Olfr362
  gRNA
tgtttatagtctccgtaata

SEQ ID NO: 37266 - DNA, 20 bp, Artificial Sequence
  MKO10037266_A_Olfr362
  gRNA
gtactttcctatgcccgaat

SEQ ID NO: 37267 - DNA, 20 bp, Artificial Sequence
  MKO10037267_A_Olfr365
  gRNA
gtagctatcagtgttcccta

SEQ ID NO: 37268 - DNA, 20 bp, Artificial Sequence
  MKO10037268_A_Olfr365
  gRNA
gatggccaccagtcggtcaa

SEQ ID NO: 37269 - DNA, 20 bp, Artificial Sequence
  MKO10037269_A_Olfr365
  gRNA
tatacataacagtagctacc

SEQ ID NO: 37270 - DNA, 20 bp, Artificial Sequence
  MKO10037270_A_Olfr366
  gRNA
caccagcaagcgacagcgcc

SEQ ID NO: 37271 - DNA, 20 bp, Artificial Sequence
  MKO10037271_A_Olfr366
  gRNA
gcgaatgtacactgatatta

SEQ ID NO: 37272 - DNA, 20 bp, Artificial Sequence
  MKO10037272_A_Olfr366
  gRNA
ggcgacccatgagaattgtg

SEQ ID NO: 37273 - DNA, 20 bp, Artificial Sequence
  MKO10037273_A_Olfr367-ps
  gRNA
cttatcactcatactccaga

SEQ ID NO: 37274 - DNA, 20 bp, Artificial Sequence
  MKO10037274_A_Olfr367-ps
  gRNA
ggcttcggttgtttatacaa

SEQ ID NO: 37275 - DNA, 20 bp, Artificial Sequence
  MKO10037275_A_Olfr367-ps
  gRNA
gtgaattcaactactttgat

SEQ ID NO: 37276 - DNA, 20 bp, Artificial Sequence
  MKO10037276_A_Olfr368
  gRNA
attgagactggtgtcgttgc

SEQ ID NO: 37277 - DNA, 20 bp, Artificial Sequence
  MKO10037277_A_Olfr368
  gRNA
cagtcacgagtgctccgccc

SEQ ID NO: 37278 - DNA, 20 bp, Artificial Sequence
  MKO10037278_A_Olfr368
  gRNA
agaatcgatgccaagtgcgc

SEQ ID NO: 37279 - DNA, 20 bp, Artificial Sequence
  MKO10037279_A_Olfr370
  gRNA
atactgatatcagcgcatcc

SEQ ID NO: 37280 - DNA, 20 bp, Artificial Sequence
  MKO10037280_A_Olfr370
  gRNA
agttgattggaagagcggaa

SEQ ID NO: 37281 - DNA, 20 bp, Artificial Sequence
  MKO10037281_A_Olfr370
  gRNA
catcttcctgctttgcgcgc

SEQ ID NO: 37282 - DNA, 20 bp, Artificial Sequence
  MKO10037282_A_Olfr371
  gRNA
taacacaacgttattgatga

SEQ ID NO: 37283 - DNA, 20 bp, Artificial Sequence
  MKO10037283_A_Olfr371
  gRNA
cactacatagtagtgtattc

SEQ ID NO: 37284 - DNA, 20 bp, Artificial Sequence
  MKO10037284_A_Olfr371
  gRNA
ctcagtgcagttaaactctc

SEQ ID NO: 37285 - DNA, 20 bp, Artificial Sequence
  MKO10037285_A_Olfr372
  gRNA
gatacaacgttatcctgttt

SEQ ID NO: 37286 - DNA, 20 bp, Artificial Sequence
  MKO10037286_A_Olfr372
  gRNA
tgggagctgtactgcacatg

SEQ ID NO: 37287 - DNA, 20 bp, Artificial Sequence
  MKO10037287_A_Olfr372
  gRNA
atgccaccccctgcattacc

SEQ ID NO: 37288 - DNA, 20 bp, Artificial Sequence
  MKO10037288_A_Olfr373
  gRNA
cttcagctgaccgcatgagc

SEQ ID NO: 37289 - DNA, 20 bp, Artificial Sequence
  MKO10037289_A_Olfr373
  gRNA
gataccacattatcctgttt

SEQ ID NO: 37290 - DNA, 20 bp, Artificial Sequence
  MKO10037290_A_Olfr373
  gRNA
atgccaccccctgcactacc

SEQ ID NO: 37291 - DNA, 20 bp, Artificial Sequence
  MKO10037291_A_Olfr374
  gRNA
atacaacctcgatcacacca

SEQ ID NO: 37292 - DNA, 20 bp, Artificial Sequence
  MKO10037292_A_Olfr374
  gRNA
atcgaggttgtataatgtag

SEQ ID NO: 37293 - DNA, 20 bp, Artificial Sequence
  MKO10037293_A_Olfr374
  gRNA
tccttcggacaaaggtcatc

SEQ ID NO: 37294 - DNA, 20 bp, Artificial Sequence
  MKO10037294_A_Olfr376
  gRNA
tgacacctatgttaatgaat

SEQ ID NO: 37295 - DNA, 20 bp, Artificial Sequence
  MKO10037295_A_Olfr376
  gRNA
ggcagtttgattcctttctg

SEQ ID NO: 37296 - DNA, 20 bp, Artificial Sequence
  MKO10037296_A_Olfr376
  gRNA
caattcgtgcataggacaca

SEQ ID NO: 37297 - DNA, 20 bp, Artificial Sequence
  MKO10037297_A_Olfr378
  gRNA
catgtctttaatgtacacga

SEQ ID NO: 37298 - DNA, 20 bp, Artificial Sequence
  MKO10037298_A_Olfr378
  gRNA
tatgtctactctgcttaaag

SEQ ID NO: 37299 - DNA, 20 bp, Artificial Sequence
  MKO10037299_A_Olfr378
  gRNA
agctaataacacttatgtga

SEQ ID NO: 37300 - DNA, 20 bp, Artificial Sequence
  MKO10037300_A_Olfr380
  gRNA
attcagtatactaatcaccc

SEQ ID NO: 37301 - DNA, 20 bp, Artificial Sequence
  MKO10037301_A_Olfr380
  gRNA
tcttgataagaacgtttata

SEQ ID NO: 37302 - DNA, 20 bp, Artificial Sequence
  MKO10037302_A_Olfr380
  gRNA
agctaataactttacagcaa

SEQ ID NO: 37303 - DNA, 20 bp, Artificial Sequence
  MKO10037303_A_Olfr381
  gRNA
atacagcatactaatcaccc

SEQ ID NO: 37304 - DNA, 20 bp, Artificial Sequence
  MKO10037304_A_Olfr381
  gRNA
ttccaggcttccaaaaagat

SEQ ID NO: 37305 - DNA, 20 bp, Artificial Sequence
  MKO10037305_A_Olfr381
  gRNA
ggtggagaagaccttgtgta

SEQ ID NO: 37306 - DNA, 20 bp, Artificial Sequence
  MKO10037306_A_Olfr382
  gRNA
tgtgtctgctagtgttatcc

SEQ ID NO: 37307 - DNA, 20 bp, Artificial Sequence
  MKO10037307_A_Olfr382
  gRNA
atacagcacagtaaataccc

SEQ ID NO: 37308 - DNA, 20 bp, Artificial Sequence
  MKO10037308_A_Olfr382
  gRNA
cctggagagcatccttcttt

SEQ ID NO: 37309 - DNA, 20 bp, Artificial Sequence
  MKO10037309_A_Olfr384
  gRNA
cacccggcataggagatgga

SEQ ID NO: 37310 - DNA, 20 bp, Artificial Sequence
  MKO10037310_A_Olfr384
  gRNA
acccatccatctcctatgcc

SEQ ID NO: 37311 - DNA, 20 bp, Artificial Sequence
  MKO10037311_A_Olfr384
  gRNA
aggggatttgcttcttacat

SEQ ID NO: 37312 - DNA, 20 bp, Artificial Sequence
  MKO10037312_A_Olfr385
  gRNA
attcagcatggtaagtaacc

SEQ ID NO: 37313 - DNA, 20 bp, Artificial Sequence
  MKO10037313_A_Olfr385
  gRNA
tgagctaacgatatttatca

SEQ ID NO: 37314 - DNA, 20 bp, Artificial Sequence
  MKO10037314_A_Olfr385
  gRNA
catatctgccgttctcaagt

SEQ ID NO: 37315 - DNA, 20 bp, Artificial Sequence
  MKO10037315_A_Olfr389
  gRNA
cataggacataactatgagt

SEQ ID NO: 37316 - DNA, 20 bp, Artificial Sequence
  MKO10037316_A_Olfr389
  gRNA
gatatcaaagttcctccttc

SEQ ID NO: 37317 - DNA, 20 bp, Artificial Sequence
  MKO10037317_A_Olfr389
  gRNA
aatcattgcccttgttcgac

SEQ ID NO: 37318 - DNA, 20 bp, Artificial Sequence
  MKO10037318_A_Olfr38
  gRNA
aacccttgctgtcgtcagat

SEQ ID NO: 37319 - DNA, 20 bp, Artificial Sequence
  MKO10037319_A_Olfr38
  gRNA
aagccaatctgacgacagca

SEQ ID NO: 37320 - DNA, 20 bp, Artificial Sequence
  MKO10037320_A_Olfr38
  gRNA
gattgcaatcttgttagatg

SEQ ID NO: 37321 - DNA, 20 bp, Artificial Sequence
  MKO10037321_A_Olfr390
  gRNA
ctcgagttgaagggaccttg

SEQ ID NO: 37322 - DNA, 20 bp, Artificial Sequence
  MKO10037322_A_Olfr390
  gRNA
tagaacaagtgctcgtactc

SEQ ID NO: 37323 - DNA, 20 bp, Artificial Sequence
  MKO10037323_A_Olfr390
  gRNA
tgagtcttgtgctgctgatc

SEQ ID NO: 37324 - DNA, 20 bp, Artificial Sequence
  MKO10037324_A_Olfr391-ps
  gRNA
gtggaagctgagttcgtttc

SEQ ID NO: 37325 - DNA, 20 bp, Artificial Sequence
  MKO10037325_A_Olfr391-ps
  gRNA
aatcattgtccttgttcaac

SEQ ID NO: 37326 - DNA, 20 bp, Artificial Sequence
  MKO10037326_A_Olfr391-ps
  gRNA
ttgtagatcccttgaataga

SEQ ID NO: 37327 - DNA, 20 bp, Artificial Sequence
  MKO10037327_A_Olfr392
  gRNA
attattccgttcctactcat

SEQ ID NO: 37328 - DNA, 20 bp, Artificial Sequence
  MKO10037328_A_Olfr392
  gRNA
gtaccaacaatatcctatgc

SEQ ID NO: 37329 - DNA, 20 bp, Artificial Sequence
  MKO10037329_A_Olfr392
  gRNA
gaacaacagctggtactctg

SEQ ID NO: 37330 - DNA, 20 bp, Artificial Sequence
  MKO10037330_A_Olfr393
  gRNA
aagacaatcttgctgcaagc

SEQ ID NO: 37331 - DNA, 20 bp, Artificial Sequence
  MKO10037331_A_Olfr393
  gRNA
ttgtatatgccttgagtaga

SEQ ID NO: 37332 - DNA, 20 bp, Artificial Sequence
  MKO10037332_A_Olfr393
  gRNA
acccatccatcccctatgga

SEQ ID NO: 37333 - DNA, 20 bp, Artificial Sequence
  MKO10037333_A_Olfr394
  gRNA
tatgtacctcactaccatct

SEQ ID NO: 37334 - DNA, 20 bp, Artificial Sequence
  MKO10037334_A_Olfr394
  gRNA
agggccctaataagaattat

SEQ ID NO: 37335 - DNA, 20 bp, Artificial Sequence
  MKO10037335_A_Olfr394
  gRNA
cactagcatcatgagtccta

SEQ ID NO: 37336 - DNA, 20 bp, Artificial Sequence
  MKO10037336_A_Olfr395
  gRNA
caatctgcataggatatcgt

SEQ ID NO: 37337 - DNA, 20 bp, Artificial Sequence
  MKO10037337_A_Olfr395
  gRNA
acagtagaattattgcctga

SEQ ID NO: 37338 - DNA, 20 bp, Artificial Sequence
  MKO10037338_A_Olfr395
  gRNA
cactagtaaagcacaaaatt

SEQ ID NO: 37339 - DNA, 20 bp, Artificial Sequence
  MKO10037339_A_Olfr397
  gRNA
agctaataattcaaccatta

SEQ ID NO: 37340 - DNA, 20 bp, Artificial Sequence
  MKO10037340_A_Olfr397
  gRNA
gtagccaagatagtgccacc

SEQ ID NO: 37341 - DNA, 20 bp, Artificial Sequence
  MKO10037341_A_Olfr397
  gRNA
tctcgagatctgcaaaaagc

SEQ ID NO: 37342 - DNA, 20 bp, Artificial Sequence
  MKO10037342_A_Olfr398
  gRNA
ctcagctcgttatgaccgca

SEQ ID NO: 37343 - DNA, 20 bp, Artificial Sequence
  MKO10037343_A_Olfr398
  gRNA
gtgcttggaattcggaccac

SEQ ID NO: 37344 - DNA, 20 bp, Artificial Sequence
  MKO10037344_A_Olfr398
  gRNA
gcggtcataacgagctgagt

SEQ ID NO: 37345 - DNA, 20 bp, Artificial Sequence
  MKO10037345_A_Olfr399
  gRNA
cttgcttatgtagctacgct

SEQ ID NO: 37346 - DNA, 20 bp, Artificial Sequence
  MKO10037346_A_Olfr399
  gRNA
cagctgcagttcttcgtatc

SEQ ID NO: 37347 - DNA, 20 bp, Artificial Sequence
  MKO10037347_A_Olfr399
  gRNA
gctctataatgatagcagcc

SEQ ID NO: 37348 - DNA, 20 bp, Artificial Sequence
  MKO10037348_A_Olfr39
  gRNA
gcttccttgtgctaatgtgc

SEQ ID NO: 37349 - DNA, 20 bp, Artificial Sequence
  MKO10037349_A_Olfr39
  gRNA
caataatatcgcattatatg

SEQ ID NO: 37350 - DNA, 20 bp, Artificial Sequence
  MKO10037350_A_Olfr39
  gRNA
ggggtttacctcagttcagc

SEQ ID NO: 37351 - DNA, 20 bp, Artificial Sequence
  MKO10037351_A_Olfr3
  gRNA
ggaggatggtgaacccaata

SEQ ID NO: 37352 - DNA, 20 bp, Artificial Sequence
  MKO10037352_A_Olfr3
  gRNA
tattgggttcaccatcctcc

SEQ ID NO: 37353 - DNA, 20 bp, Artificial Sequence
  MKO10037353_A_Olfr3
  gRNA
gactcatgatagtgatgtaa

SEQ ID NO: 37354 - DNA, 20 bp, Artificial Sequence
  MKO10037354_A_Olfr401
  gRNA
gctcaggttgcctccaactg

SEQ ID NO: 37355 - DNA, 20 bp, Artificial Sequence
  MKO10037355_A_Olfr401
  gRNA
tcattcgggtgctataggtg

SEQ ID NO: 37356 - DNA, 20 bp, Artificial Sequence
  MKO10037356_A_Olfr401
  gRNA
gtgtggatgtcgccacagtg

SEQ ID NO: 37357 - DNA, 20 bp, Artificial Sequence
  MKO10037357_A_Olfr402
  gRNA
gaatgaactacactatacag

SEQ ID NO: 37358 - DNA, 20 bp, Artificial Sequence
  MKO10037358_A_Olfr402
  gRNA
cagacaaagcctagaatcaa

SEQ ID NO: 37359 - DNA, 20 bp, Artificial Sequence
  MKO10037359_A_Olfr402
  gRNA
tctgtatagtgtagttcatt

SEQ ID NO: 37360 - DNA, 20 bp, Artificial Sequence
  MKO10037360_A_Olfr403
  gRNA
gcatcatcatctcctatgtc

SEQ ID NO: 37361 - DNA, 20 bp, Artificial Sequence
  MKO10037361_A_Olfr403
  gRNA
taccatagatttcactctcc

SEQ ID NO: 37362 - DNA, 20 bp, Artificial Sequence
  MKO10037362_A_Olfr403
  gRNA
acagctagattgtccttctg

SEQ ID NO: 37363 - DNA, 20 bp, Artificial Sequence
  MKO10037363_A_Olfr406
  gRNA
aaggtttgtaagggtccaac

SEQ ID NO: 37364 - DNA, 20 bp, Artificial Sequence
  MKO10037364_A_Olfr406
  gRNA
gcattgtgtcagccatcatc

SEQ ID NO: 37365 - DNA, 20 bp, Artificial Sequence
  MKO10037365_A_Olfr406
  gRNA
gattccctgctacagtgacc

SEQ ID NO: 37366 - DNA, 20 bp, Artificial Sequence
  MKO10037366_A_Olfr410
  gRNA
cataagcgtacaattccata

SEQ ID NO: 37367 - DNA, 20 bp, Artificial Sequence
  MKO10037367_A_Olfr410
  gRNA
agtcaaccccaactagcaga

SEQ ID NO: 37368 - DNA, 20 bp, Artificial Sequence
  MKO10037368_A_Olfr410
  gRNA
agctgccacatgcatataag

SEQ ID NO: 37369 - DNA, 20 bp, Artificial Sequence
  MKO10037369_A_Olfr411
  gRNA
gatgcagccgacatccaaca

SEQ ID NO: 37370 - DNA, 20 bp, Artificial Sequence
  MKO10037370_A_Olfr411
  gRNA
ttcgcctacttgctcacagt

SEQ ID NO: 37371 - DNA, 20 bp, Artificial Sequence
  MKO10037371_A_Olfr411
  gRNA
catagggaactgtgcgcttg

SEQ ID NO: 37372 - DNA, 20 bp, Artificial Sequence
  MKO10037372_A_Olfr412
  gRNA
tcacatgatgctgatcgcca

SEQ ID NO: 37373 - DNA, 20 bp, Artificial Sequence
  MKO10037373_A_Olfr412
  gRNA
gactcatggctgtagtgtaa

SEQ ID NO: 37374 - DNA, 20 bp, Artificial Sequence
  MKO10037374_A_Olfr412
  gRNA
agcatcagcgcatcctattc

SEQ ID NO: 37375 - DNA, 20 bp, Artificial Sequence
  MKO10037375_A_Olfr414
  gRNA
gcatgagactagggtaacga

SEQ ID NO: 37376 - DNA, 20 bp, Artificial Sequence
  MKO10037376_A_Olfr414
  gRNA
cgagttagtagacttcctgc

SEQ ID NO: 37377 - DNA, 20 bp, Artificial Sequence
  MKO10037377_A_Olfr414
  gRNA
catggctcggggtcgtgcat

SEQ ID NO: 37378 - DNA, 20 bp, Artificial Sequence
  MKO10037378_A_Olfr417
  gRNA
cttacccacttgtacagacc

SEQ ID NO: 37379 - DNA, 20 bp, Artificial Sequence
  MKO10037379_A_Olfr417
  gRNA
cacccaagttaaacccatga

SEQ ID NO: 37380 - DNA, 20 bp, Artificial Sequence
  MKO10037380_A_Olfr417
  gRNA
ggatgaacacgtaagtcaga

SEQ ID NO: 37381 - DNA, 20 bp, Artificial Sequence
  MKO10037381_A_Olfr418-ps1
  gRNA
atgccatttaccgtgctatt

SEQ ID NO: 37382 - DNA, 20 bp, Artificial Sequence
  MKO10037382_A_Olfr418-ps1
  gRNA
tttcccaatagcacggtaaa

SEQ ID NO: 37383 - DNA, 20 bp, Artificial Sequence
  MKO10037383_A_Olfr418-ps1
  gRNA
gcggatgtcacagaaatagt

SEQ ID NO: 37384 - DNA, 20 bp, Artificial Sequence
  MKO10037384_A_Olfr419
  gRNA
tggcttgtccccccataacc

SEQ ID NO: 37385 - DNA, 20 bp, Artificial Sequence
  MKO10037385_A_Olfr419
  gRNA
ccagtgctaagcctcgcctg

SEQ ID NO: 37386 - DNA, 20 bp, Artificial Sequence
  MKO10037386_A_Olfr419
  gRNA
catcatcatagtgatcagac

SEQ ID NO: 37387 - DNA, 20 bp, Artificial Sequence
  MKO10037387_A_Olfr420
  gRNA
taccacctgaatcatgacga

SEQ ID NO: 37388 - DNA, 20 bp, Artificial Sequence
  MKO10037388_A_Olfr420
  gRNA
ctagcctgcttagtgaacga

SEQ ID NO: 37389 - DNA, 20 bp, Artificial Sequence
  MKO10037389_A_Olfr420
  gRNA
atctatgctttcattatcgt

SEQ ID NO: 37390 - DNA, 20 bp, Artificial Sequence
  MKO10037390_A_Olfr421-ps1
  gRNA
ggaggccaccattcttgagc

SEQ ID NO: 37391 - DNA, 20 bp, Artificial Sequence
  MKO10037391_A_Olfr421-ps1
  gRNA
cagagaatcgaagatacata

SEQ ID NO: 37392 - DNA, 20 bp, Artificial Sequence
  MKO10037392_A_Olfr421-ps1
  gRNA
atcttgaaccaagatcactg

SEQ ID NO: 37393 - DNA, 20 bp, Artificial Sequence
  MKO10037393_A_Olfr424
  gRNA
tacggacacctccatgattc

SEQ ID NO: 37394 - DNA, 20 bp, Artificial Sequence
  MKO10037394_A_Olfr424
  gRNA
tcccctctggtgaaggccgt

SEQ ID NO: 37395 - DNA, 20 bp, Artificial Sequence
  MKO10037395_A_Olfr424
  gRNA
gtacatgccaaacgcaacac

SEQ ID NO: 37396 - DNA, 20 bp, Artificial Sequence
  MKO10037396_A_Olfr426
  gRNA
tgtcaccttccaaccactat

SEQ ID NO: 37397 - DNA, 20 bp, Artificial Sequence
  MKO10037397_A_Olfr426
  gRNA
ataatgattgcatagcgaag

SEQ ID NO: 37398 - DNA, 20 bp, Artificial Sequence
  MKO10037398_A_Olfr426
  gRNA
caaaagatactcactgtctc

SEQ ID NO: 37399 - DNA, 20 bp, Artificial Sequence
  MKO10037399_A_Olfr427
  gRNA
tgtcaccttccaaccactat

SEQ ID NO: 37400 - DNA, 20 bp, Artificial Sequence
  MKO10037400_A_Olfr427
  gRNA
ataatgattgcatagcgaag

SEQ ID NO: 37401 - DNA, 20 bp, Artificial Sequence
  MKO10037401_A_Olfr427
  gRNA
gtagtcctgaagattccatc

SEQ ID NO: 37402 - DNA, 20 bp, Artificial Sequence
  MKO10037402_A_Olfr429
  gRNA
ccttgactacgaccgagcct

SEQ ID NO: 37403 - DNA, 20 bp, Artificial Sequence
  MKO10037403_A_Olfr429
  gRNA
tgtgcggattatctgcaagt

SEQ ID NO: 37404 - DNA, 20 bp, Artificial Sequence
  MKO10037404_A_Olfr429
  gRNA
acaggtacttagccatttgc

SEQ ID NO: 37405 - DNA, 20 bp, Artificial Sequence
  MKO10037405_A_Olfr430
  gRNA
catcttcctagtcatacgac

SEQ ID NO: 37406 - DNA, 20 bp, Artificial Sequence
  MKO10037406_A_Olfr430
  gRNA
ctgcatccagtcgtatgact

SEQ ID NO: 37407 - DNA, 20 bp, Artificial Sequence
  MKO10037407_A_Olfr430
  gRNA
accaatgatcctcccataag

SEQ ID NO: 37408 - DNA, 20 bp, Artificial Sequence
  MKO10037408_A_Olfr432
  gRNA
tatttatactcttcgcaata

SEQ ID NO: 37409 - DNA, 20 bp, Artificial Sequence
  MKO10037409_A_Olfr432
  gRNA
aacagttagttggggttaca

SEQ ID NO: 37410 - DNA, 20 bp, Artificial Sequence
  MKO10037410_A_Olfr432
  gRNA
ctgccttcagctcgaatctc

SEQ ID NO: 37411 - DNA, 20 bp, Artificial Sequence
  MKO10037411_A_Olfr433
  gRNA
ggtgtagttgacatgatcca

SEQ ID NO: 37412 - DNA, 20 bp, Artificial Sequence
  MKO10037412_A_Olfr433
  gRNA
tttcaagcaatacggtaaac

SEQ ID NO: 37413 - DNA, 20 bp, Artificial Sequence
  MKO10037413_A_Olfr433
  gRNA
atgaccgagtgctacctgtt

SEQ ID NO: 37414 - DNA, 20 bp, Artificial Sequence
  MKO10037414_A_Olfr434
  gRNA
ggtgttcggaccataaatct

SEQ ID NO: 37415 - DNA, 20 bp, Artificial Sequence
  MKO10037415_A_Olfr434
  gRNA
aggtgaagggcgccctcaag

SEQ ID NO: 37416 - DNA, 20 bp, Artificial Sequence
  MKO10037416_A_Olfr434
  gRNA
agactagtacaaagcatagg

SEQ ID NO: 37417 - DNA, 20 bp, Artificial Sequence
  MKO10037417_A_Olfr435
  gRNA
gctctaggcagattagccca

SEQ ID NO: 37418 - DNA, 20 bp, Artificial Sequence
  MKO10037418_A_Olfr435
  gRNA
ggttcaaatatcacaccaat

SEQ ID NO: 37419 - DNA, 20 bp, Artificial Sequence
  MKO10037419_A_Olfr435
  gRNA
ggctaatctgcctagagccc

SEQ ID NO: 37420 - DNA, 20 bp, Artificial Sequence
  MKO10037420_A_Olfr437
  gRNA
agattattccatttgcgagc

SEQ ID NO: 37421 - DNA, 20 bp, Artificial Sequence
  MKO10037421_A_Olfr437
  gRNA
tttctatacctgcgctgagc

SEQ ID NO: 37422 - DNA, 20 bp, Artificial Sequence
  MKO10037422_A_Olfr437
  gRNA
cgcttcggagtgcttgattt

SEQ ID NO: 37423 - DNA, 20 bp, Artificial Sequence
  MKO10037423_A_Olfr43
  gRNA
gatgtacttcatgataggct

SEQ ID NO: 37424 - DNA, 20 bp, Artificial Sequence
  MKO10037424_A_Olfr43
  gRNA
gcatcatcatctcctacgtc

SEQ ID NO: 37425 - DNA, 20 bp, Artificial Sequence
  MKO10037425_A_Olfr43
  gRNA
acagctagactgtccttctg

SEQ ID NO: 37426 - DNA, 20 bp, Artificial Sequence
  MKO10037426_A_Olfr441
  gRNA
cactaaaatcaggcactcta

SEQ ID NO: 37427 - DNA, 20 bp, Artificial Sequence
  MKO10037427_A_Olfr441
  gRNA
gcctcaggatgagaattaaa

SEQ ID NO: 37428 - DNA, 20 bp, Artificial Sequence
  MKO10037428_A_Olfr441
  gRNA
gaatgagagccaatcagaca

SEQ ID NO: 37429 - DNA, 20 bp, Artificial Sequence
  MKO10037429_A_Olfr444
  gRNA
ttgcattatgcacagaatga

SEQ ID NO: 37430 - DNA, 20 bp, Artificial Sequence
  MKO10037430_A_Olfr444
  gRNA
atcacagaggtaactctgct

SEQ ID NO: 37431 - DNA, 20 bp, Artificial Sequence
  MKO10037431_A_Olfr444
  gRNA
attccaagcagacctgagtg

SEQ ID NO: 37432 - DNA, 20 bp, Artificial Sequence
  MKO10037432_A_Olfr446
  gRNA
gtcttagaatgagcgtgata

SEQ ID NO: 37433 - DNA, 20 bp, Artificial Sequence
  MKO10037433_A_Olfr446
  gRNA
gtgccttgagacgagttctt

SEQ ID NO: 37434 - DNA, 20 bp, Artificial Sequence
  MKO10037434_A_Olfr446
  gRNA
tttccaaagaactcgtctca

SEQ ID NO: 37435 - DNA, 20 bp, Artificial Sequence
  MKO10037435_A_Olfr447
  gRNA
gccaagccaatctctttcgc

SEQ ID NO: 37436 - DNA, 20 bp, Artificial Sequence
  MKO10037436_A_Olfr447
  gRNA
gatatactgctatcatgagc

SEQ ID NO: 37437 - DNA, 20 bp, Artificial Sequence
  MKO10037437_A_Olfr447
  gRNA
ccatgaggtttaccagcatc

SEQ ID NO: 37438 - DNA, 20 bp, Artificial Sequence
  MKO10037438_A_Olfr448
  gRNA
agcatatgaaatatcgacga

SEQ ID NO: 37439 - DNA, 20 bp, Artificial Sequence
  MKO10037439_A_Olfr448
  gRNA
gcctcaggataagaacaacg

SEQ ID NO: 37440 - DNA, 20 bp, Artificial Sequence
  MKO10037440_A_Olfr448
  gRNA
ggcaatcaggatacgtgtgt

SEQ ID NO: 37441 - DNA, 20 bp, Artificial Sequence
  MKO10037441_A_Olfr449
  gRNA
cacggtaacagagatgtacc

SEQ ID NO: 37442 - DNA, 20 bp, Artificial Sequence
  MKO10037442_A_Olfr449
  gRNA
aaacgtgatcatcatcctac

SEQ ID NO: 37443 - DNA, 20 bp, Artificial Sequence
  MKO10037443_A_Olfr449
  gRNA
tcgggcatacataaaaatag

SEQ ID NO: 37444 - DNA, 20 bp, Artificial Sequence
  MKO10037444_A_Olfr44
  gRNA
actccgcaattgcaaatatg

SEQ ID NO: 37445 - DNA, 20 bp, Artificial Sequence
  MKO10037445_A_Olfr44
  gRNA
ttgggcatgatcatactgat

SEQ ID NO: 37446 - DNA, 20 bp, Artificial Sequence
  MKO10037446_A_Olfr44
  gRNA
cttcctcatatttgcaattg

SEQ ID NO: 37447 - DNA, 20 bp, Artificial Sequence
  MKO10037447_A_Olfr450
  gRNA
agtagatcgaatgcgcagaa

SEQ ID NO: 37448 - DNA, 20 bp, Artificial Sequence
  MKO10037448_A_Olfr450
  gRNA
tctgcgcattcgatctactc

SEQ ID NO: 37449 - DNA, 20 bp, Artificial Sequence
  MKO10037449_A_Olfr450
  gRNA
cacaacagttacgacataca

SEQ ID NO: 37450 - DNA, 20 bp, Artificial Sequence
  MKO10037450_A_Olfr452
  gRNA
gacttgagtgccccagtcat

SEQ ID NO: 37451 - DNA, 20 bp, Artificial Sequence
  MKO10037451_A_Olfr452
  gRNA
ttcctgtgaaattctagctg

SEQ ID NO: 37452 - DNA, 20 bp, Artificial Sequence
  MKO10037452_A_Olfr452
  gRNA
atccaatgagattgtgatca

SEQ ID NO: 37453 - DNA, 20 bp, Artificial Sequence
  MKO10037453_A_Olfr453
  gRNA
tactccgccataatgcatac

SEQ ID NO: 37454 - DNA, 20 bp, Artificial Sequence
  MKO10037454_A_Olfr453
  gRNA
gcatagtcctgtatgcatta

SEQ ID NO: 37455 - DNA, 20 bp, Artificial Sequence
  MKO10037455_A_Olfr453
  gRNA
gggggcttggcagaaattac

SEQ ID NO: 37456 - DNA, 20 bp, Artificial Sequence
  MKO10037456_A_Olfr455
  gRNA
tcactatagatgcatatcgc

SEQ ID NO: 37457 - DNA, 20 bp, Artificial Sequence
  MKO10037457_A_Olfr455
  gRNA
gctagtgtgcgatccagtcg

SEQ ID NO: 37458 - DNA, 20 bp, Artificial Sequence
  MKO10037458_A_Olfr455
  gRNA
tgaactctgctacacgctag

SEQ ID NO: 37459 - DNA, 20 bp, Artificial Sequence
  MKO10037459_A_Olfr456
  gRNA
gctgatgataccctgctctc

SEQ ID NO: 37460 - DNA, 20 bp, Artificial Sequence
  MKO10037460_A_Olfr456
  gRNA
tgtcacttgttaaacccata

SEQ ID NO: 37461 - DNA, 20 bp, Artificial Sequence
  MKO10037461_A_Olfr456
  gRNA
ggtagtgatcttctatgctt

SEQ ID NO: 37462 - DNA, 20 bp, Artificial Sequence
  MKO10037462_A_Olfr457
  gRNA
aaccagtgccagtgtctcac

SEQ ID NO: 37463 - DNA, 20 bp, Artificial Sequence
  MKO10037463_A_Olfr457
  gRNA
ggttgtgctattctatgctg

SEQ ID NO: 37464 - DNA, 20 bp, Artificial Sequence
  MKO10037464_A_Olfr457
  gRNA
gacactggcactggttagac

SEQ ID NO: 37465 - DNA, 20 bp, Artificial Sequence
  MKO10037465_A_Olfr458
  gRNA
cttgaaaatccgctctaccc

SEQ ID NO: 37466 - DNA, 20 bp, Artificial Sequence
  MKO10037466_A_Olfr458
  gRNA
aatggccctcttcacacaca

SEQ ID NO: 37467 - DNA, 20 bp, Artificial Sequence
  MKO10037467_A_Olfr458
  gRNA
ccagtgtctcacatgccaca

SEQ ID NO: 37468 - DNA, 20 bp, Artificial Sequence
  MKO10037468_A_Olfr459
  gRNA
tgaacagccgcacttgcatc

SEQ ID NO: 37469 - DNA, 20 bp, Artificial Sequence
  MKO10037469_A_Olfr459
  gRNA
gaacaattgtagttgtaacc

SEQ ID NO: 37470 - DNA, 20 bp, Artificial Sequence
  MKO10037470_A_Olfr459
  gRNA
aaaggatgtagtgtagctct

SEQ ID NO: 37471 - DNA, 20 bp, Artificial Sequence
  MKO10037471_A_Olfr45
  gRNA
gacgatcgagtataacactg

SEQ ID NO: 37472 - DNA, 20 bp, Artificial Sequence
  MKO10037472_A_Olfr45
  gRNA
ccatcagagccattatgtag

SEQ ID NO: 37473 - DNA, 20 bp, Artificial Sequence
  MKO10037473_A_Olfr45
  gRNA
aaataccattatgactcttt

SEQ ID NO: 37474 - DNA, 20 bp, Artificial Sequence
  MKO10037474_A_Olfr460
  gRNA
cacttcacctgcgtcgtcat

SEQ ID NO: 37475 - DNA, 20 bp, Artificial Sequence
  MKO10037475_A_Olfr460
  gRNA
gccgtagccaatgacgacgc

SEQ ID NO: 37476 - DNA, 20 bp, Artificial Sequence
  MKO10037476_A_Olfr460
  gRNA
agcgtttcactccatcccga

SEQ ID NO: 37477 - DNA, 20 bp, Artificial Sequence
  MKO10037477_A_Olfr461
  gRNA
ggagatcctcatcacatccg

SEQ ID NO: 37478 - DNA, 20 bp, Artificial Sequence
  MKO10037478_A_Olfr461
  gRNA
gccgtagccaatcacaacat

SEQ ID NO: 37479 - DNA, 20 bp, Artificial Sequence
  MKO10037479_A_Olfr461
  gRNA
caacagggtggtttcactgc

SEQ ID NO: 37480 - DNA, 20 bp, Artificial Sequence
  MKO10037480_A_Olfr462
  gRNA
accgcctggtggctatctcc

SEQ ID NO: 37481 - DNA, 20 bp, Artificial Sequence
  MKO10037481_A_Olfr462
  gRNA
ggggccgggagatagccacc

SEQ ID NO: 37482 - DNA, 20 bp, Artificial Sequence
  MKO10037482_A_Olfr462
  gRNA
atgctcccgttgccattctg

SEQ ID NO: 37483 - DNA, 20 bp, Artificial Sequence
  MKO10037483_A_Olfr463
  gRNA
agcgcttagcgctttgcaac

SEQ ID NO: 37484 - DNA, 20 bp, Artificial Sequence
  MKO10037484_A_Olfr463
  gRNA
gaggtcgggaaatagccacc

SEQ ID NO: 37485 - DNA, 20 bp, Artificial Sequence
  MKO10037485_A_Olfr463
  gRNA
atgctcccgttgccgttctg

SEQ ID NO: 37486 - DNA, 20 bp, Artificial Sequence
  MKO10037486_A_Olfr464
  gRNA
ggtcaagaccgtgtagctga

SEQ ID NO: 37487 - DNA, 20 bp, Artificial Sequence
  MKO10037487_A_Olfr464
  gRNA
gactaagaccatctcgtacc

SEQ ID NO: 37488 - DNA, 20 bp, Artificial Sequence
  MKO10037488_A_Olfr464
  gRNA
ggccgtgtccatcagctaca

SEQ ID NO: 37489 - DNA, 20 bp, Artificial Sequence
  MKO10037489_A_Olfr466
  gRNA
attgaagatccgcacagtgc

SEQ ID NO: 37490 - DNA, 20 bp, Artificial Sequence
  MKO10037490_A_Olfr466
  gRNA
attcactgcaccccatgaat

SEQ ID NO: 37491 - DNA, 20 bp, Artificial Sequence
  MKO10037491_A_Olfr466
  gRNA
atcatacaatatcctttagt

SEQ ID NO: 37492 - DNA, 20 bp, Artificial Sequence
  MKO10037492_A_Olfr467
  gRNA
atttacacatccacccacat

SEQ ID NO: 37493 - DNA, 20 bp, Artificial Sequence
  MKO10037493_A_Olfr467
  gRNA
cttcaaaaaagatggagcct

SEQ ID NO: 37494 - DNA, 20 bp, Artificial Sequence
  MKO10037494_A_Olfr467
  gRNA
agtcagactcagcaaacagc

SEQ ID NO: 37495 - DNA, 20 bp, Artificial Sequence
  MKO10037495_A_Olfr469
  gRNA
tcagtggagaagcttgattt

SEQ ID NO: 37496 - DNA, 20 bp, Artificial Sequence
  MKO10037496_A_Olfr469
  gRNA
agattgtgcttctctccacc

SEQ ID NO: 37497 - DNA, 20 bp, Artificial Sequence
  MKO10037497_A_Olfr469
  gRNA
acaaaatgaggcaggaacta

SEQ ID NO: 37498 - DNA, 20 bp, Artificial Sequence
  MKO10037498_A_Olfr46
  gRNA
cctgtgcaacttagcgacca

SEQ ID NO: 37499 - DNA, 20 bp, Artificial Sequence
  MKO10037499_A_Olfr46
  gRNA
agatgcatttagtgcgcaga

SEQ ID NO: 37500 - DNA, 20 bp, Artificial Sequence
  MKO10037500_A_Olfr46
  gRNA
gctctgtgggacctttgccg

SEQ ID NO: 37501 - DNA, 20 bp, Artificial Sequence
  MKO10037501_A_Olfr470
  gRNA
actgcagtgactctctatta

SEQ ID NO: 37502 - DNA, 20 bp, Artificial Sequence
  MKO10037502_A_Olfr470
  gRNA
gaatagtgattgactctatt

SEQ ID NO: 37503 - DNA, 20 bp, Artificial Sequence
  MKO10037503_A_Olfr470
  gRNA
gcccaaatccagctactcca

SEQ ID NO: 37504 - DNA, 20 bp, Artificial Sequence
  MKO10037504_A_Olfr472
  gRNA
ttcagtagagtagctcgatt

SEQ ID NO: 37505 - DNA, 20 bp, Artificial Sequence
  MKO10037505_A_Olfr472
  gRNA
catcacgtaaatgacggtaa

SEQ ID NO: 37506 - DNA, 20 bp, Artificial Sequence
  MKO10037506_A_Olfr472
  gRNA
gtcagccgagtgcttcttac

SEQ ID NO: 37507 - DNA, 20 bp, Artificial Sequence
  MKO10037507_A_Olfr473
  gRNA
gtaaggctagcccatgtcca

SEQ ID NO: 37508 - DNA, 20 bp, Artificial Sequence
  MKO10037508_A_Olfr473
  gRNA
atgcattataactgagaccg

SEQ ID NO: 37509 - DNA, 20 bp, Artificial Sequence
  MKO10037509_A_Olfr473
  gRNA
gatgattagctctgccaccg

SEQ ID NO: 37510 - DNA, 20 bp, Artificial Sequence
  MKO10037510_A_Olfr474
  gRNA
aagcattataaccgagacca

SEQ ID NO: 37511 - DNA, 20 bp, Artificial Sequence
  MKO10037511_A_Olfr474
  gRNA
cagaatgtagggtcctctgt

SEQ ID NO: 37512 - DNA, 20 bp, Artificial Sequence
  MKO10037512_A_Olfr474
  gRNA
tggttgaggaatagatacac

SEQ ID NO: 37513 - DNA, 20 bp, Artificial Sequence
  MKO10037513_A_Olfr476
  gRNA
actacgtgtcatcctattta

SEQ ID NO: 37514 - DNA, 20 bp, Artificial Sequence
  MKO10037514_A_Olfr476
  gRNA
atgtcactgtgatgcagaat

SEQ ID NO: 37515 - DNA, 20 bp, Artificial Sequence
  MKO10037515_A_Olfr476
  gRNA
ggtgatgagaatgtaggcgt

SEQ ID NO: 37516 - DNA, 20 bp, Artificial Sequence
  MKO10037516_A_Olfr477
  gRNA
atcacacctataatgcttac

SEQ ID NO: 37517 - DNA, 20 bp, Artificial Sequence
  MKO10037517_A_Olfr477
  gRNA
tcagcatcatcagtttaata

SEQ ID NO: 37518 - DNA, 20 bp, Artificial Sequence
  MKO10037518_A_Olfr477
  gRNA
catctagctcttgtagacat

SEQ ID NO: 37519 - DNA, 20 bp, Artificial Sequence
  MKO10037519_A_Olfr478
  gRNA
agattgtatgtctttccacc

SEQ ID NO: 37520 - DNA, 20 bp, Artificial Sequence
  MKO10037520_A_Olfr478
  gRNA
ggttgcaaattgccatgaag

SEQ ID NO: 37521 - DNA, 20 bp, Artificial Sequence
  MKO10037521_A_Olfr478
  gRNA
ttgctcttaattgcttacat

SEQ ID NO: 37522 - DNA, 20 bp, Artificial Sequence
  MKO10037522_A_Olfr479
  gRNA
tactgcttagtaccttcctc

SEQ ID NO: 37523 - DNA, 20 bp, Artificial Sequence
  MKO10037523_A_Olfr479
  gRNA
atgatgagcagtgtaatcac

SEQ ID NO: 37524 - DNA, 20 bp, Artificial Sequence
  MKO10037524_A_Olfr479
  gRNA
tacaacaaggaatactatga

SEQ ID NO: 37525 - DNA, 20 bp, Artificial Sequence
  MKO10037525_A_Olfr47
  gRNA
ggtgttcccaccacaagcct

SEQ ID NO: 37526 - DNA, 20 bp, Artificial Sequence
  MKO10037526_A_Olfr47
  gRNA
ccccactaaagtgaacacac

SEQ ID NO: 37527 - DNA, 20 bp, Artificial Sequence
  MKO10037527_A_Olfr47
  gRNA
caccgaatgtcttcttcttg

SEQ ID NO: 37528 - DNA, 20 bp, Artificial Sequence
  MKO10037528_A_Olfr480
  gRNA
ggagtacccaatgtctagaa

SEQ ID NO: 37529 - DNA, 20 bp, Artificial Sequence
  MKO10037529_A_Olfr480
  gRNA
aacttcctacctaggtggat

SEQ ID NO: 37530 - DNA, 20 bp, Artificial Sequence
  MKO10037530_A_Olfr480
  gRNA
cgtctattctgttactttaa

SEQ ID NO: 37531 - DNA, 20 bp, Artificial Sequence
  MKO10037531_A_Olfr481
  gRNA
gctgtgggctgctccgaatt

SEQ ID NO: 37532 - DNA, 20 bp, Artificial Sequence
  MKO10037532_A_Olfr481
  gRNA
gaaactactatccctctcgc

SEQ ID NO: 37533 - DNA, 20 bp, Artificial Sequence
  MKO10037533_A_Olfr481
  gRNA
tcgtagagagcgtgctcaca

SEQ ID NO: 37534 - DNA, 20 bp, Artificial Sequence
  MKO10037534_A_Olfr482
  gRNA
agatggtattattctctgcc

SEQ ID NO: 37535 - DNA, 20 bp, Artificial Sequence
  MKO10037535_A_Olfr482
  gRNA
tgcagtgacagagttcattt

SEQ ID NO: 37536 - DNA, 20 bp, Artificial Sequence
  MKO10037536_A_Olfr482
  gRNA
ttcggctcagctactttctt

SEQ ID NO: 37537 - DNA, 20 bp, Artificial Sequence
  MKO10037537_A_Olfr483
  gRNA
aaaagtaaactgtgacgatg

SEQ ID NO: 37538 - DNA, 20 bp, Artificial Sequence
  MKO10037538_A_Olfr483
  gRNA
atccgttgaatgcttccttt

SEQ ID NO: 37539 - DNA, 20 bp, Artificial Sequence
  MKO10037539_A_Olfr483
  gRNA
agattgtgcttctctccaac

SEQ ID NO: 37540 - DNA, 20 bp, Artificial Sequence
  MKO10037540_A_Olfr484
  gRNA
agctctcctgttctgatgtc

SEQ ID NO: 37541 - DNA, 20 bp, Artificial Sequence
  MKO10037541_A_Olfr484
  gRNA
agttactatgctaacagtgt

SEQ ID NO: 37542 - DNA, 20 bp, Artificial Sequence
  MKO10037542_A_Olfr484
  gRNA
aactgtgccagcagaaaatg

SEQ ID NO: 37543 - DNA, 20 bp, Artificial Sequence
  MKO10037543_A_Olfr485
  gRNA
taagcagctatgatatccta

SEQ ID NO: 37544 - DNA, 20 bp, Artificial Sequence
  MKO10037544_A_Olfr485
  gRNA
tccccggagtaggtggattt

SEQ ID NO: 37545 - DNA, 20 bp, Artificial Sequence
  MKO10037545_A_Olfr485
  gRNA
atgccaaaatccacctactc

SEQ ID NO: 37546 - DNA, 20 bp, Artificial Sequence
  MKO10037546_A_Olfr486
  gRNA
ccttaatctcattgttccga

SEQ ID NO: 37547 - DNA, 20 bp, Artificial Sequence
  MKO10037547_A_Olfr486
  gRNA
cttgaagattcgttccactg

SEQ ID NO: 37548 - DNA, 20 bp, Artificial Sequence
  MKO10037548_A_Olfr486
  gRNA
tgcagaagagtatgacttta

SEQ ID NO: 37549 - DNA, 20 bp, Artificial Sequence
  MKO10037549_A_Olfr487
  gRNA
tgcccaagtccatctactcc

SEQ ID NO: 37550 - DNA, 20 bp, Artificial Sequence
  MKO10037550_A_Olfr487
  gRNA
agtggtgtctctgttctacg

SEQ ID NO: 37551 - DNA, 20 bp, Artificial Sequence
  MKO10037551_A_Olfr487
  gRNA
cataagtacctacaaccaac

SEQ ID NO: 37552 - DNA, 20 bp, Artificial Sequence
  MKO10037552_A_Olfr488
  gRNA
cacacgattctgtatccagt

SEQ ID NO: 37553 - DNA, 20 bp, Artificial Sequence
  MKO10037553_A_Olfr488
  gRNA
acagaatcgtgtggacaatt

SEQ ID NO: 37554 - DNA, 20 bp, Artificial Sequence
  MKO10037554_A_Olfr488
  gRNA
cacttagctactgttgacct

SEQ ID NO: 37555 - DNA, 20 bp, Artificial Sequence
  MKO10037555_A_Olfr48
  gRNA
agcagccatctatcagcgac

SEQ ID NO: 37556 - DNA, 20 bp, Artificial Sequence
  MKO10037556_A_Olfr48
  gRNA
caccgctttatcaatagaga

SEQ ID NO: 37557 - DNA, 20 bp, Artificial Sequence
  MKO10037557_A_Olfr48
  gRNA
tatcaccgaattcatccttg

SEQ ID NO: 37558 - DNA, 20 bp, Artificial Sequence
  MKO10037558_A_Olfr490
  gRNA
gcctaagtccagctattcaa

SEQ ID NO: 37559 - DNA, 20 bp, Artificial Sequence
  MKO10037559_A_Olfr490
  gRNA
gaacacgagagctcagctaa

SEQ ID NO: 37560 - DNA, 20 bp, Artificial Sequence
  MKO10037560_A_Olfr490
  gRNA
tccattgaatagctggactt

SEQ ID NO: 37561 - DNA, 20 bp, Artificial Sequence
  MKO10037561_A_Olfr491
  gRNA
gttacacctataatgttaat

SEQ ID NO: 37562 - DNA, 20 bp, Artificial Sequence
  MKO10037562_A_Olfr491
  gRNA
gagatgttaaggaagcgctg

SEQ ID NO: 37563 - DNA, 20 bp, Artificial Sequence
  MKO10037563_A_Olfr491
  gRNA
gctactcaactaagcagaac

SEQ ID NO: 37564 - DNA, 20 bp, Artificial Sequence
  MKO10037564_A_Olfr492
  gRNA
ttgtaggatcttatacaggg

SEQ ID NO: 37565 - DNA, 20 bp, Artificial Sequence
  MKO10037565_A_Olfr492
  gRNA
caatgtcaacagagcccacg

SEQ ID NO: 37566 - DNA, 20 bp, Artificial Sequence
  MKO10037566_A_Olfr492
  gRNA
aaacacaccattgcctacct

SEQ ID NO: 37567 - DNA, 20 bp, Artificial Sequence
  MKO10037567_A_Olfr493
  gRNA
agttactatgatcacaatgt

SEQ ID NO: 37568 - DNA, 20 bp, Artificial Sequence
  MKO10037568_A_Olfr493
  gRNA
ggtacacccaagataggaaa

SEQ ID NO: 37569 - DNA, 20 bp, Artificial Sequence
  MKO10037569_A_Olfr493
  gRNA
catggcttatgatcggttta

SEQ ID NO: 37570 - DNA, 20 bp, Artificial Sequence
  MKO10037570_A_Olfr494
  gRNA
tataagatcccacgactaac

SEQ ID NO: 37571 - DNA, 20 bp, Artificial Sequence
  MKO10037571_A_Olfr494
  gRNA
gtcctgtatccagttagtcg

SEQ ID NO: 37572 - DNA, 20 bp, Artificial Sequence
  MKO10037572_A_Olfr494
  gRNA
gactgaaccagcagaaaatg

SEQ ID NO: 37573 - DNA, 20 bp, Artificial Sequence
  MKO10037573_A_Olfr495
  gRNA
ggaagcactcaactgtcgca

SEQ ID NO: 37574 - DNA, 20 bp, Artificial Sequence
  MKO10037574_A_Olfr495
  gRNA
ctccacagaaagtcgataca

SEQ ID NO: 37575 - DNA, 20 bp, Artificial Sequence
  MKO10037575_A_Olfr495
  gRNA
ggccttgtatcgactttctg

SEQ ID NO: 37576 - DNA, 20 bp, Artificial Sequence
  MKO10037576_A_Olfr497
  gRNA
tagtgaagagtacaactctg

SEQ ID NO: 37577 - DNA, 20 bp, Artificial Sequence
  MKO10037577_A_Olfr497
  gRNA
aaatggtatttctctcaatc

SEQ ID NO: 37578 - DNA, 20 bp, Artificial Sequence
  MKO10037578_A_Olfr497
  gRNA
aaaaaatgatcaactctatt

SEQ ID NO: 37579 - DNA, 20 bp, Artificial Sequence
  MKO10037579_A_Olfr498
  gRNA
gaaggccttgcatcgacttt

SEQ ID NO: 37580 - DNA, 20 bp, Artificial Sequence
  MKO10037580_A_Olfr498
  gRNA
ctccaccgaaagtcgatgca

SEQ ID NO: 37581 - DNA, 20 bp, Artificial Sequence
  MKO10037581_A_Olfr498
  gRNA
atggtcatactgggtaattg

SEQ ID NO: 37582 - DNA, 20 bp, Artificial Sequence
  MKO10037582_A_Olfr49
  gRNA
aacagtagtgctgttcgcca

SEQ ID NO: 37583 - DNA, 20 bp, Artificial Sequence
  MKO10037583_A_Olfr49
  gRNA
cctccgcaactttgccatgc

SEQ ID NO: 37584 - DNA, 20 bp, Artificial Sequence
  MKO10037584_A_Olfr49
  gRNA
gtatttcagcagccgttctg

SEQ ID NO: 37585 - DNA, 20 bp, Artificial Sequence
  MKO10037585_A_Olfr502
  gRNA
gtgaatgagggaacaactgc

SEQ ID NO: 37586 - DNA, 20 bp, Artificial Sequence
  MKO10037586_A_Olfr502
  gRNA
gccacatcctagataggaga

SEQ ID NO: 37587 - DNA, 20 bp, Artificial Sequence
  MKO10037587_A_Olfr502
  gRNA
gttgttccctcattcacagc

SEQ ID NO: 37588 - DNA, 20 bp, Artificial Sequence
  MKO10037588_A_Olfr503
  gRNA
ttagcatggtcatgtcagcg

SEQ ID NO: 37589 - DNA, 20 bp, Artificial Sequence
  MKO10037589_A_Olfr503
  gRNA
aagtgcctaccctactttcg

SEQ ID NO: 37590 - DNA, 20 bp, Artificial Sequence
  MKO10037590_A_Olfr503
  gRNA
tattatattgcctcgaaagt

SEQ ID NO: 37591 - DNA, 20 bp, Artificial Sequence
  MKO10037591_A_Olfr504
  gRNA
ctacaatgacagtatagaag

SEQ ID NO: 37592 - DNA, 20 bp, Artificial Sequence
  MKO10037592_A_Olfr504
  gRNA
agctccgacaaagcaccttt

SEQ ID NO: 37593 - DNA, 20 bp, Artificial Sequence
  MKO10037593_A_Olfr504
  gRNA
ggcccatgtccaccagagaa

SEQ ID NO: 37594 - DNA, 20 bp, Artificial Sequence
  MKO10037594_A_Olfr506
  gRNA
tgtatgctactacaagcaac

SEQ ID NO: 37595 - DNA, 20 bp, Artificial Sequence
  MKO10037595_A_Olfr506
  gRNA
gacagtgccaacagatatag

SEQ ID NO: 37596 - DNA, 20 bp, Artificial Sequence
  MKO10037596_A_Olfr506
  gRNA
cttgtagtagcatacataag

SEQ ID NO: 37597 - DNA, 20 bp, Artificial Sequence
  MKO10037597_A_Olfr507
  gRNA
ctgtcccatgggtatcctga

SEQ ID NO: 37598 - DNA, 20 bp, Artificial Sequence
  MKO10037598_A_Olfr507
  gRNA
tataagatcccactagcaac

SEQ ID NO: 37599 - DNA, 20 bp, Artificial Sequence
  MKO10037599_A_Olfr507
  gRNA
agtctgtatccagttgctag

SEQ ID NO: 37600 - DNA, 20 bp, Artificial Sequence
  MKO10037600_A_Olfr508
  gRNA
tatgctcgcattgcccatta

SEQ ID NO: 37601 - DNA, 20 bp, Artificial Sequence
  MKO10037601_A_Olfr508
  gRNA
atcgaccctgaagagattgc

SEQ ID NO: 37602 - DNA, 20 bp, Artificial Sequence
  MKO10037602_A_Olfr508
  gRNA
atctgcgtggcatagagcag

SEQ ID NO: 37603 - DNA, 20 bp, Artificial Sequence
  MKO10037603_A_Olfr509
  gRNA
gatctgccttcacctcatcg

SEQ ID NO: 37604 - DNA, 20 bp, Artificial Sequence
  MKO10037604_A_Olfr509
  gRNA
ttgatatcaagtccactaac

SEQ ID NO: 37605 - DNA, 20 bp, Artificial Sequence
  MKO10037605_A_Olfr509
  gRNA
gatcctgccccgcctgttag

SEQ ID NO: 37606 - DNA, 20 bp, Artificial Sequence
  MKO10037606_A_Olfr50
  gRNA
ttaggatagtggcccctatg

SEQ ID NO: 37607 - DNA, 20 bp, Artificial Sequence
  MKO10037607_A_Olfr50
  gRNA
agtaatcctcactttagcag

SEQ ID NO: 37608 - DNA, 20 bp, Artificial Sequence
  MKO10037608_A_Olfr50
  gRNA
tgaccaccactgctaaagtg

SEQ ID NO: 37609 - DNA, 20 bp, Artificial Sequence
  MKO10037609_A_Olfr510
  gRNA
agtatatcctacattgggtg

SEQ ID NO: 37610 - DNA, 20 bp, Artificial Sequence
  MKO10037610_A_Olfr510
  gRNA
atatactgctcctctccacc

SEQ ID NO: 37611 - DNA, 20 bp, Artificial Sequence
  MKO10037611_A_Olfr510
  gRNA
gtgtgtatccaattgcttgt

SEQ ID NO: 37612 - DNA, 20 bp, Artificial Sequence
  MKO10037612_A_Olfr512
  gRNA
ttgcctcctcattacaatat

SEQ ID NO: 37613 - DNA, 20 bp, Artificial Sequence
  MKO10037613_A_Olfr512
  gRNA
gttccaatattgtaatgagg

SEQ ID NO: 37614 - DNA, 20 bp, Artificial Sequence
  MKO10037614_A_Olfr512
  gRNA
gactttcctagttatctatc

SEQ ID NO: 37615 - DNA, 20 bp, Artificial Sequence
  MKO10037615_A_Olfr513
  gRNA
gcagacccgctgtgtcatga

SEQ ID NO: 37616 - DNA, 20 bp, Artificial Sequence
  MKO10037616_A_Olfr513
  gRNA
tataaaaattgagccttccc

SEQ ID NO: 37617 - DNA, 20 bp, Artificial Sequence
  MKO10037617_A_Olfr513
  gRNA
gaggacaaattctgttactg

SEQ ID NO: 37618 - DNA, 20 bp, Artificial Sequence
  MKO10037618_A_Olfr514
  gRNA
aaattctcttcaccgtcctg

SEQ ID NO: 37619 - DNA, 20 bp, Artificial Sequence
  MKO10037619_A_Olfr514
  gRNA
aagctccaaacatgtgtact

SEQ ID NO: 37620 - DNA, 20 bp, Artificial Sequence
  MKO10037620_A_Olfr514
  gRNA
ctgcgcaaaacaacccccaa

SEQ ID NO: 37621 - DNA, 20 bp, Artificial Sequence
  MKO10037621_A_Olfr516
  gRNA
tgatgactgtactgaaacag

SEQ ID NO: 37622 - DNA, 20 bp, Artificial Sequence
  MKO10037622_A_Olfr516
  gRNA
tataagacaagagtatcaac

SEQ ID NO: 37623 - DNA, 20 bp, Artificial Sequence
  MKO10037623_A_Olfr516
  gRNA
tgactactctgcagaccaca

SEQ ID NO: 37624 - DNA, 20 bp, Artificial Sequence
  MKO10037624_A_Olfr517
  gRNA
agacaaaagaatcagcacga

SEQ ID NO: 37625 - DNA, 20 bp, Artificial Sequence
  MKO10037625_A_Olfr517
  gRNA
aagccccaaacatttgcctt

SEQ ID NO: 37626 - DNA, 20 bp, Artificial Sequence
  MKO10037626_A_Olfr517
  gRNA
tgactactttgcagaccata

SEQ ID NO: 37627 - DNA, 20 bp, Artificial Sequence
  MKO10037627_A_Olfr518
  gRNA
tggttgctttctcgctggta

SEQ ID NO: 37628 - DNA, 20 bp, Artificial Sequence
  MKO10037628_A_Olfr518
  gRNA
agaggcgcaaaatataagag

SEQ ID NO: 37629 - DNA, 20 bp, Artificial Sequence
  MKO10037629_A_Olfr518
  gRNA
ttgcgcctctaagagcagct

SEQ ID NO: 37630 - DNA, 20 bp, Artificial Sequence
  MKO10037630_A_Olfr519
  gRNA
gtcatgatactcaagaccca

SEQ ID NO: 37631 - DNA, 20 bp, Artificial Sequence
  MKO10037631_A_Olfr519
  gRNA
gtctggtgagtacccggatt

SEQ ID NO: 37632 - DNA, 20 bp, Artificial Sequence
  MKO10037632_A_Olfr519
  gRNA
tgaaattggtgatgtgtcca

SEQ ID NO: 37633 - DNA, 20 bp, Artificial Sequence
  MKO10037633_A_Olfr51
  gRNA
ctttaatgtcacgattcctc

SEQ ID NO: 37634 - DNA, 20 bp, Artificial Sequence
  MKO10037634_A_Olfr51
  gRNA
aggaaagccctgtcgacgtg

SEQ ID NO: 37635 - DNA, 20 bp, Artificial Sequence
  MKO10037635_A_Olfr51
  gRNA
actgtctagtgagtcccaag

SEQ ID NO: 37636 - DNA, 20 bp, Artificial Sequence
  MKO10037636_A_Olfr520
  gRNA
ttaccgagctaacctgccct

SEQ ID NO: 37637 - DNA, 20 bp, Artificial Sequence
  MKO10037637_A_Olfr520
  gRNA
gaatcctgacgtcagtgctt

SEQ ID NO: 37638 - DNA, 20 bp, Artificial Sequence
  MKO10037638_A_Olfr520
  gRNA
tgatccgaagcactgacgtc

SEQ ID NO: 37639 - DNA, 20 bp, Artificial Sequence
  MKO10037639_A_Olfr521
  gRNA
ggagttgatccgaagtactg

SEQ ID NO: 37640 - DNA, 20 bp, Artificial Sequence
  MKO10037640_A_Olfr521
  gRNA
ttaccgggctgacctaccct

SEQ ID NO: 37641 - DNA, 20 bp, Artificial Sequence
  MKO10037641_A_Olfr521
  gRNA
caatgttgtcaaacgccatc

SEQ ID NO: 37642 - DNA, 20 bp, Artificial Sequence
  MKO10037642_A_Olfr522
  gRNA
caactgcagcaacaacgctt

SEQ ID NO: 37643 - DNA, 20 bp, Artificial Sequence
  MKO10037643_A_Olfr522
  gRNA
gcgcaaccgtgacatcagag

SEQ ID NO: 37644 - DNA, 20 bp, Artificial Sequence
  MKO10037644_A_Olfr522
  gRNA
tcgaaggagcttatggcatg

SEQ ID NO: 37645 - DNA, 20 bp, Artificial Sequence
  MKO10037645_A_Olfr523
  gRNA
ctactatcttcttgcacgtg

SEQ ID NO: 37646 - DNA, 20 bp, Artificial Sequence
  MKO10037646_A_Olfr523
  gRNA
gtccaaggagctctctaccg

SEQ ID NO: 37647 - DNA, 20 bp, Artificial Sequence
  MKO10037647_A_Olfr523
  gRNA
atgatgccaccgtagcgcag

SEQ ID NO: 37648 - DNA, 20 bp, Artificial Sequence
  MKO10037648_A_Olfr524
  gRNA
ctgtaccgagtgcgcgctct

SEQ ID NO: 37649 - DNA, 20 bp, Artificial Sequence
  MKO10037649_A_Olfr524
  gRNA
gtgctacgcatgccctccgc

SEQ ID NO: 37650 - DNA, 20 bp, Artificial Sequence
  MKO10037650_A_Olfr524
  gRNA
gacacccaagagcgcgcact

SEQ ID NO: 37651 - DNA, 20 bp, Artificial Sequence
  MKO10037651_A_Olfr525
  gRNA
accccgccatttattctcta

SEQ ID NO: 37652 - DNA, 20 bp, Artificial Sequence
  MKO10037652_A_Olfr525
  gRNA
atctacacctatttgcagcc

SEQ ID NO: 37653 - DNA, 20 bp, Artificial Sequence
  MKO10037653_A_Olfr525
  gRNA
cctgcgcatccgctccacag

SEQ ID NO: 37654 - DNA, 20 bp, Artificial Sequence
  MKO10037654_A_Olfr527
  gRNA
tgtgcacgctggtgttagtc

SEQ ID NO: 37655 - DNA, 20 bp, Artificial Sequence
  MKO10037655_A_Olfr527
  gRNA
agaatggtagacgcaacatc

SEQ ID NO: 37656 - DNA, 20 bp, Artificial Sequence
  MKO10037656_A_Olfr527
  gRNA
attcaattgcgttggagcac

SEQ ID NO: 37657 - DNA, 20 bp, Artificial Sequence
  MKO10037657_A_Olfr52
  gRNA
ctacaagcagctgtctattt

SEQ ID NO: 37658 - DNA, 20 bp, Artificial Sequence
  MKO10037658_A_Olfr52
  gRNA
ctatagctatagtttcctca

SEQ ID NO: 37659 - DNA, 20 bp, Artificial Sequence
  MKO10037659_A_Olfr52
  gRNA
gttctctaaatatagaagtc

SEQ ID NO: 37660 - DNA, 20 bp, Artificial Sequence
  MKO10037660_A_Olfr530
  gRNA
catggcgctggtaaaccagt

SEQ ID NO: 37661 - DNA, 20 bp, Artificial Sequence
  MKO10037661_A_Olfr530
  gRNA
cacagaccttgccgctcatg

SEQ ID NO: 37662 - DNA, 20 bp, Artificial Sequence
  MKO10037662_A_Olfr530
  gRNA
tgaacatggtcacaaccgac

SEQ ID NO: 37663 - DNA, 20 bp, Artificial Sequence
  MKO10037663_A_Olfr531
  gRNA
gccctctgcattatagtacc

SEQ ID NO: 37664 - DNA, 20 bp, Artificial Sequence
  MKO10037664_A_Olfr531
  gRNA
tgaggaaaagtagtatccga

SEQ ID NO: 37665 - DNA, 20 bp, Artificial Sequence
  MKO10037665_A_Olfr531
  gRNA
agaatggtagacgtagcacc

SEQ ID NO: 37666 - DNA, 20 bp, Artificial Sequence
  MKO10037666_A_Olfr532
  gRNA
atctacacctatctacagcc

SEQ ID NO: 37667 - DNA, 20 bp, Artificial Sequence
  MKO10037667_A_Olfr532
  gRNA
tagccatcagcctcaaccca

SEQ ID NO: 37668 - DNA, 20 bp, Artificial Sequence
  MKO10037668_A_Olfr532
  gRNA
ctggtgcgactcaatttctg

SEQ ID NO: 37669 - DNA, 20 bp, Artificial Sequence
  MKO10037669_A_Olfr533
  gRNA
cactggagctttcaattcat

SEQ ID NO: 37670 - DNA, 20 bp, Artificial Sequence
  MKO10037670_A_Olfr533
  gRNA
cctcttgagaactttgagct

SEQ ID NO: 37671 - DNA, 20 bp, Artificial Sequence
  MKO10037671_A_Olfr533
  gRNA
ccaagctcaaagttctcaag

SEQ ID NO: 37672 - DNA, 20 bp, Artificial Sequence
  MKO10037672_A_Olfr535
  gRNA
tctgattggcctagtgtttg

SEQ ID NO: 37673 - DNA, 20 bp, Artificial Sequence
  MKO10037673_A_Olfr535
  gRNA
atgctgaccctgttgtccta

SEQ ID NO: 37674 - DNA, 20 bp, Artificial Sequence
  MKO10037674_A_Olfr535
  gRNA
tctggactatagctagaagc

SEQ ID NO: 37675 - DNA, 20 bp, Artificial Sequence
  MKO10037675_A_Olfr536
  gRNA
aaaacttcgttgatgacccc

SEQ ID NO: 37676 - DNA, 20 bp, Artificial Sequence
  MKO10037676_A_Olfr536
  gRNA
atagagcagtagagtaataa

SEQ ID NO: 37677 - DNA, 20 bp, Artificial Sequence
  MKO10037677_A_Olfr536
  gRNA
tgaacatggttatagctgac

SEQ ID NO: 37678 - DNA, 20 bp, Artificial Sequence
  MKO10037678_A_Olfr538
  gRNA
cctatgcaacttagcaacca

SEQ ID NO: 37679 - DNA, 20 bp, Artificial Sequence
  MKO10037679_A_Olfr538
  gRNA
ctctacttaatttgataaag

SEQ ID NO: 37680 - DNA, 20 bp, Artificial Sequence
  MKO10037680_A_Olfr538
  gRNA
ataacgctatttacatatgt

SEQ ID NO: 37681 - DNA, 20 bp, Artificial Sequence
  MKO10037681_A_Olfr539
  gRNA
gcatcatcatggagagcacc

SEQ ID NO: 37682 - DNA, 20 bp, Artificial Sequence
  MKO10037682_A_Olfr539
  gRNA
agcgtgtcattagaccagtg

SEQ ID NO: 37683 - DNA, 20 bp, Artificial Sequence
  MKO10037683_A_Olfr539
  gRNA
gatacacacaatggtggacc

SEQ ID NO: 37684 - DNA, 20 bp, Artificial Sequence
  MKO10037684_A_Olfr53
  gRNA
gacgaccgagtatagcactg

SEQ ID NO: 37685 - DNA, 20 bp, Artificial Sequence
  MKO10037685_A_Olfr53
  gRNA
ttgttgagtctcaaccagac

SEQ ID NO: 37686 - DNA, 20 bp, Artificial Sequence
  MKO10037686_A_Olfr53
  gRNA
tgatgaagccataagataac

SEQ ID NO: 37687 - DNA, 20 bp, Artificial Sequence
  MKO10037687_A_Olfr541
  gRNA
gtgctaacactgttgtccta

SEQ ID NO: 37688 - DNA, 20 bp, Artificial Sequence
  MKO10037688_A_Olfr541
  gRNA
gatctaagattgttcctcat

SEQ ID NO: 37689 - DNA, 20 bp, Artificial Sequence
  MKO10037689_A_Olfr541
  gRNA
ccctggttggcctagtgtct

SEQ ID NO: 37690 - DNA, 20 bp, Artificial Sequence
  MKO10037690_A_Olfr543
  gRNA
caacagtgcgatgtactcgc

SEQ ID NO: 37691 - DNA, 20 bp, Artificial Sequence
  MKO10037691_A_Olfr543
  gRNA
gctccgcgttatcgcaaaag

SEQ ID NO: 37692 - DNA, 20 bp, Artificial Sequence
  MKO10037692_A_Olfr543
  gRNA
tatctactttacgctccttc

SEQ ID NO: 37693 - DNA, 20 bp, Artificial Sequence
  MKO10037693_A_Olfr544
  gRNA
ccctcgaatagagagcttcc

SEQ ID NO: 37694 - DNA, 20 bp, Artificial Sequence
  MKO10037694_A_Olfr544
  gRNA
tcgcatcttcaaccgagtcc

SEQ ID NO: 37695 - DNA, 20 bp, Artificial Sequence
  MKO10037695_A_Olfr544
  gRNA
catctcgctgaataagacgg

SEQ ID NO: 37696 - DNA, 20 bp, Artificial Sequence
  MKO10037696_A_Olfr545
  gRNA
cctcaggcgtcatgttgggt

SEQ ID NO: 37697 - DNA, 20 bp, Artificial Sequence
  MKO10037697_A_Olfr545
  gRNA
tcgaacctttaatagagtcc

SEQ ID NO: 37698 - DNA, 20 bp, Artificial Sequence
  MKO10037698_A_Olfr545
  gRNA
attcagcgagatgtctccac

SEQ ID NO: 37699 - DNA, 20 bp, Artificial Sequence
  MKO10037699_A_Olfr547
  gRNA
gtaagcgtcgtgaagatccc

SEQ ID NO: 37700 - DNA, 20 bp, Artificial Sequence
  MKO10037700_A_Olfr547
  gRNA
tcttcacgacgcttacacag

SEQ ID NO: 37701 - DNA, 20 bp, Artificial Sequence
  MKO10037701_A_Olfr547
  gRNA
atagcatccgagtaaacatt

SEQ ID NO: 37702 - DNA, 20 bp, Artificial Sequence
  MKO10037702_A_Olfr549
  gRNA
aatccccgactcggcaatga

SEQ ID NO: 37703 - DNA, 20 bp, Artificial Sequence
  MKO10037703_A_Olfr549
  gRNA
tacacgctcacgaatctgtc

SEQ ID NO: 37704 - DNA, 20 bp, Artificial Sequence
  MKO10037704_A_Olfr549
  gRNA
tgctaccttcattgccgagt

SEQ ID NO: 37705 - DNA, 20 bp, Artificial Sequence
  MKO10037705_A_Olfr54
  gRNA
cttgtgccggccctttgcag

SEQ ID NO: 37706 - DNA, 20 bp, Artificial Sequence
  MKO10037706_A_Olfr54
  gRNA
tcaggaagtacgtctgagtt

SEQ ID NO: 37707 - DNA, 20 bp, Artificial Sequence
  MKO10037707_A_Olfr54
  gRNA
aggacttagagcccctgttg

SEQ ID NO: 37708 - DNA, 20 bp, Artificial Sequence
  MKO10037708_A_Olfr550
  gRNA
gatccgtacggatcaggaaa

SEQ ID NO: 37709 - DNA, 20 bp, Artificial Sequence
  MKO10037709_A_Olfr550
  gRNA
gaaagatcagacgccgcaga

SEQ ID NO: 37710 - DNA, 20 bp, Artificial Sequence
  MKO10037710_A_Olfr550
  gRNA
caatgcccagcacagtccgt

SEQ ID NO: 37711 - DNA, 20 bp, Artificial Sequence
  MKO10037711_A_Olfr551
  gRNA
gtagtcggagtgctccatct

SEQ ID NO: 37712 - DNA, 20 bp, Artificial Sequence
  MKO10037712_A_Olfr551
  gRNA
agcactccgactactcaaga

SEQ ID NO: 37713 - DNA, 20 bp, Artificial Sequence
  MKO10037713_A_Olfr551
  gRNA
ggccgggaatccccatgagc

SEQ ID NO: 37714 - DNA, 20 bp, Artificial Sequence
  MKO10037714_A_Olfr552
  gRNA
agacgtttccattactgtcg

SEQ ID NO: 37715 - DNA, 20 bp, Artificial Sequence
  MKO10037715_A_Olfr552
  gRNA
tcactgtgcctcgacagtaa

SEQ ID NO: 37716 - DNA, 20 bp, Artificial Sequence
  MKO10037716_A_Olfr552
  gRNA
cagattagagagcgagtctt

SEQ ID NO: 37717 - DNA, 20 bp, Artificial Sequence
  MKO10037717_A_Olfr553
  gRNA
gcacattgtggccgaaacga

SEQ ID NO: 37718 - DNA, 20 bp, Artificial Sequence
  MKO10037718_A_Olfr553
  gRNA
ttccacttctaattcgccta

SEQ ID NO: 37719 - DNA, 20 bp, Artificial Sequence
  MKO10037719_A_Olfr553
  gRNA
gtccaatgtagaatactcct

SEQ ID NO: 37720 - DNA, 20 bp, Artificial Sequence
  MKO10037720_A_Olfr554
  gRNA
aaccgcaggcggatcataag

SEQ ID NO: 37721 - DNA, 20 bp, Artificial Sequence
  MKO10037721_A_Olfr554
  gRNA
taccacttatgatccgcctg

SEQ ID NO: 37722 - DNA, 20 bp, Artificial Sequence
  MKO10037722_A_Olfr554
  gRNA
gactggagaccttgcacata

SEQ ID NO: 37723 - DNA, 20 bp, Artificial Sequence
  MKO10037723_A_Olfr555
  gRNA
aagcataacgcaatgggtct

SEQ ID NO: 37724 - DNA, 20 bp, Artificial Sequence
  MKO10037724_A_Olfr555
  gRNA
caccatagcttcattctgac

SEQ ID NO: 37725 - DNA, 20 bp, Artificial Sequence
  MKO10037725_A_Olfr555
  gRNA
caccatcctagcagttgtca

SEQ ID NO: 37726 - DNA, 20 bp, Artificial Sequence
  MKO10037726_A_Olfr556
  gRNA
tctcacccgtcatgtgatgc

SEQ ID NO: 37727 - DNA, 20 bp, Artificial Sequence
  MKO10037727_A_Olfr556
  gRNA
aactcggtcctgccctagcc

SEQ ID NO: 37728 - DNA, 20 bp, Artificial Sequence
  MKO10037728_A_Olfr556
  gRNA
tattaggaccagacaaatcc

SEQ ID NO: 37729 - DNA, 20 bp, Artificial Sequence
  MKO10037729_A_Olfr557
  gRNA
cccataaacgacattaactt

SEQ ID NO: 37730 - DNA, 20 bp, Artificial Sequence
  MKO10037730_A_Olfr557
  gRNA
tattcatgccctatctgcca

SEQ ID NO: 37731 - DNA, 20 bp, Artificial Sequence
  MKO10037731_A_Olfr557
  gRNA
ctatcagtggtacataggct

SEQ ID NO: 37732 - DNA, 20 bp, Artificial Sequence
  MKO10037732_A_Olfr558
  gRNA
accatcgacaatccaatgaa

SEQ ID NO: 37733 - DNA, 20 bp, Artificial Sequence
  MKO10037733_A_Olfr558
  gRNA
aaagacgaagaatgcgctgc

SEQ ID NO: 37734 - DNA, 20 bp, Artificial Sequence
  MKO10037734_A_Olfr558
  gRNA
ggtcaggggtgcagtactaa

SEQ ID NO: 37735 - DNA, 20 bp, Artificial Sequence
  MKO10037735_A_Olfr559
  gRNA
gtgtcaagtccaagcccatc

SEQ ID NO: 37736 - DNA, 20 bp, Artificial Sequence
  MKO10037736_A_Olfr559
  gRNA
tctccaaggatgatcccttc

SEQ ID NO: 37737 - DNA, 20 bp, Artificial Sequence
  MKO10037737_A_Olfr559
  gRNA
agatgcatagcgcagtgggt

SEQ ID NO: 37738 - DNA, 20 bp, Artificial Sequence
  MKO10037738_A_Olfr55
  gRNA
gaacatgacaagtaaaatgg

SEQ ID NO: 37739 - DNA, 20 bp, Artificial Sequence
  MKO10037739_A_Olfr55
  gRNA
atgtacctcttcactctgct

SEQ ID NO: 37740 - DNA, 20 bp, Artificial Sequence
  MKO10037740_A_Olfr55
  gRNA
acccatgacagtgagtagaa

SEQ ID NO: 37741 - DNA, 20 bp, Artificial Sequence
  MKO10037741_A_Olfr560
  gRNA
ctcttaagaagtgcgaccat

SEQ ID NO: 37742 - DNA, 20 bp, Artificial Sequence
  MKO10037742_A_Olfr560
  gRNA
atatagctacagccccgata

SEQ ID NO: 37743 - DNA, 20 bp, Artificial Sequence
  MKO10037743_A_Olfr560
  gRNA
cacagctttacgtatctgtt

SEQ ID NO: 37744 - DNA, 20 bp, Artificial Sequence
  MKO10037744_A_Olfr561
  gRNA
cactgcaatgattcgagaat

SEQ ID NO: 37745 - DNA, 20 bp, Artificial Sequence
  MKO10037745_A_Olfr561
  gRNA
gtaggcagtgctctcgttga

SEQ ID NO: 37746 - DNA, 20 bp, Artificial Sequence
  MKO10037746_A_Olfr561
  gRNA
caaatctgtgcaccaatgac

SEQ ID NO: 37747 - DNA, 20 bp, Artificial Sequence
  MKO10037747_A_Olfr564
  gRNA
aagaccgaagcatacctaag

SEQ ID NO: 37748 - DNA, 20 bp, Artificial Sequence
  MKO10037748_A_Olfr564
  gRNA
cacagccttccgtatcttct

SEQ ID NO: 37749 - DNA, 20 bp, Artificial Sequence
  MKO10037749_A_Olfr564
  gRNA
aaactagctctttgtcatgc

SEQ ID NO: 37750 - DNA, 20 bp, Artificial Sequence
  MKO10037750_A_Olfr566
  gRNA
atatggtcggtcagcaccca

SEQ ID NO: 37751 - DNA, 20 bp, Artificial Sequence
  MKO10037751_A_Olfr566
  gRNA
acagagcacgcattatcact

SEQ ID NO: 37752 - DNA, 20 bp, Artificial Sequence
  MKO10037752_A_Olfr566
  gRNA
gtatcgcctcctctgaagaa

SEQ ID NO: 37753 - DNA, 20 bp, Artificial Sequence
  MKO10037753_A_Olfr568
  gRNA
cgggtgctgaatggccgtag

SEQ ID NO: 37754 - DNA, 20 bp, Artificial Sequence
  MKO10037754_A_Olfr568
  gRNA
ttgtctcttgtacaccgcta

SEQ ID NO: 37755 - DNA, 20 bp, Artificial Sequence
  MKO10037755_A_Olfr568
  gRNA
gctcacgaacgatcaccagc

SEQ ID NO: 37756 - DNA, 20 bp, Artificial Sequence
  MKO10037756_A_Olfr569
  gRNA
ggtcaattcggattatgtat

SEQ ID NO: 37757 - DNA, 20 bp, Artificial Sequence
  MKO10037757_A_Olfr569
  gRNA
acagggtcatccgaggattc

SEQ ID NO: 37758 - DNA, 20 bp, Artificial Sequence
  MKO10037758_A_Olfr569
  gRNA
atacaacgcctgcctcatcc

SEQ ID NO: 37759 - DNA, 20 bp, Artificial Sequence
  MKO10037759_A_Olfr56
  gRNA
ctaggagcgcgatatcgcct

SEQ ID NO: 37760 - DNA, 20 bp, Artificial Sequence
  MKO10037760_A_Olfr56
  gRNA
tccgatttgtatgccacagc

SEQ ID NO: 37761 - DNA, 20 bp, Artificial Sequence
  MKO10037761_A_Olfr56
  gRNA
gacttcctatgctcgcatct

SEQ ID NO: 37762 - DNA, 20 bp, Artificial Sequence
  MKO10037762_A_Olfr570
  gRNA
gtattgcatcccatggggag

SEQ ID NO: 37763 - DNA, 20 bp, Artificial Sequence
  MKO10037763_A_Olfr570
  gRNA
gatgattctcaatacctccg

SEQ ID NO: 37764 - DNA, 20 bp, Artificial Sequence
  MKO10037764_A_Olfr570
  gRNA
gaatgaagagatttcgacct

SEQ ID NO: 37765 - DNA, 20 bp, Artificial Sequence
  MKO10037765_A_Olfr571
  gRNA
catgccatattgccgtccac

SEQ ID NO: 37766 - DNA, 20 bp, Artificial Sequence
  MKO10037766_A_Olfr571
  gRNA
caagctaggcgagccatatc

SEQ ID NO: 37767 - DNA, 20 bp, Artificial Sequence
  MKO10037767_A_Olfr571
  gRNA
gatggctactgcccgatcga

SEQ ID NO: 37768 - DNA, 20 bp, Artificial Sequence
  MKO10037768_A_Olfr572
  gRNA
gattgctatgacccgatcaa

SEQ ID NO: 37769 - DNA, 20 bp, Artificial Sequence
  MKO10037769_A_Olfr572
  gRNA
tcgaaccaagattacaacag

SEQ ID NO: 37770 - DNA, 20 bp, Artificial Sequence
  MKO10037770_A_Olfr572
  gRNA
cgtgcgaagtatgaacacat

SEQ ID NO: 37771 - DNA, 20 bp, Artificial Sequence
  MKO10037771_A_Olfr574
  gRNA
tatggcttggcgaataacct

SEQ ID NO: 37772 - DNA, 20 bp, Artificial Sequence
  MKO10037772_A_Olfr574
  gRNA
acgtgagcaagttctaatcc

SEQ ID NO: 37773 - DNA, 20 bp, Artificial Sequence
  MKO10037773_A_Olfr574
  gRNA
acaataagtcagtgccgttc

SEQ ID NO: 37774 - DNA, 20 bp, Artificial Sequence
  MKO10037774_A_Olfr575
  gRNA
ttagcatccatgcaccgctt

SEQ ID NO: 37775 - DNA, 20 bp, Artificial Sequence
  MKO10037775_A_Olfr575
  gRNA
cagtgcaagagtcgccaaaa

SEQ ID NO: 37776 - DNA, 20 bp, Artificial Sequence
  MKO10037776_A_Olfr575
  gRNA
atcccataaagagcgcctca

SEQ ID NO: 37777 - DNA, 20 bp, Artificial Sequence
  MKO10037777_A_Olfr576
  gRNA
caaagcgatgtatggcagcc

SEQ ID NO: 37778 - DNA, 20 bp, Artificial Sequence
  MKO10037778_A_Olfr576
  gRNA
gataatgcagttacccatga

SEQ ID NO: 37779 - DNA, 20 bp, Artificial Sequence
  MKO10037779_A_Olfr576
  gRNA
caaatccgggagaaggtctt

SEQ ID NO: 37780 - DNA, 20 bp, Artificial Sequence
  MKO10037780_A_Olfr577
  gRNA
ggtgcgcagaataagtgcat

SEQ ID NO: 37781 - DNA, 20 bp, Artificial Sequence
  MKO10037781_A_Olfr577
  gRNA
taccctatcccgtatctgtt

SEQ ID NO: 37782 - DNA, 20 bp, Artificial Sequence
  MKO10037782_A_Olfr577
  gRNA
gggaaccgtttgagcatgaa

SEQ ID NO: 37783 - DNA, 20 bp, Artificial Sequence
  MKO10037783_A_Olfr578
  gRNA
gatacgctgtcgtatttgct

SEQ ID NO: 37784 - DNA, 20 bp, Artificial Sequence
  MKO10037784_A_Olfr578
  gRNA
cgatgactccactaaagaca

SEQ ID NO: 37785 - DNA, 20 bp, Artificial Sequence
  MKO10037785_A_Olfr578
  gRNA
gagcacggaggcgctcctga

SEQ ID NO: 37786 - DNA, 20 bp, Artificial Sequence
  MKO10037786_A_Olfr57
  gRNA
tgacagccgtaacaccaaaa

SEQ ID NO: 37787 - DNA, 20 bp, Artificial Sequence
  MKO10037787_A_Olfr57
  gRNA
acttaatcaagttgtacacc

SEQ ID NO: 37788 - DNA, 20 bp, Artificial Sequence
  MKO10037788_A_Olfr57
  gRNA
ttctagttacactccctaac

SEQ ID NO: 37789 - DNA, 20 bp, Artificial Sequence
  MKO10037789_A_Olfr582
  gRNA
gtctggggtgctcatggata

SEQ ID NO: 37790 - DNA, 20 bp, Artificial Sequence
  MKO10037790_A_Olfr582
  gRNA
aactctgtctctgatctgct

SEQ ID NO: 37791 - DNA, 20 bp, Artificial Sequence
  MKO10037791_A_Olfr582
  gRNA
caaacatgatgtgaacaatt

SEQ ID NO: 37792 - DNA, 20 bp, Artificial Sequence
  MKO10037792_A_Olfr583
  gRNA
accagagacagactaaacgt

SEQ ID NO: 37793 - DNA, 20 bp, Artificial Sequence
  MKO10037793_A_Olfr583
  gRNA
ccctacgtttagtctgtctc

SEQ ID NO: 37794 - DNA, 20 bp, Artificial Sequence
  MKO10037794_A_Olfr583
  gRNA
gtagagtgtgcattatcact

SEQ ID NO: 37795 - DNA, 20 bp, Artificial Sequence
  MKO10037795_A_Olfr584
  gRNA
actggggaatgatcttgttg

SEQ ID NO: 37796 - DNA, 20 bp, Artificial Sequence
  MKO10037796_A_Olfr584
  gRNA
caaacatgatgtgaacaact

SEQ ID NO: 37797 - DNA, 20 bp, Artificial Sequence
  MKO10037797_A_Olfr584
  gRNA
aaccctgtctctgatctgtt

SEQ ID NO: 37798 - DNA, 20 bp, Artificial Sequence
  MKO10037798_A_Olfr585
  gRNA
ctcatctgaagaacgacaca

SEQ ID NO: 37799 - DNA, 20 bp, Artificial Sequence
  MKO10037799_A_Olfr585
  gRNA
catagcgatgcaccagagac

SEQ ID NO: 37800 - DNA, 20 bp, Artificial Sequence
  MKO10037800_A_Olfr585
  gRNA
gttgatctcattctgacgac

SEQ ID NO: 37801 - DNA, 20 bp, Artificial Sequence
  MKO10037801_A_Olfr586
  gRNA
cttagacgcactagagttac

SEQ ID NO: 37802 - DNA, 20 bp, Artificial Sequence
  MKO10037802_A_Olfr586
  gRNA
cactcgttaggagaaatgtc

SEQ ID NO: 37803 - DNA, 20 bp, Artificial Sequence
  MKO10037803_A_Olfr586
  gRNA
aaaaagcaagcccgatttga

SEQ ID NO: 37804 - DNA, 20 bp, Artificial Sequence
  MKO10037804_A_Olfr589
  gRNA
agaatggtgctgtaccgaag

SEQ ID NO: 37805 - DNA, 20 bp, Artificial Sequence
  MKO10037805_A_Olfr589
  gRNA
aatcatagaaacgaccttat

SEQ ID NO: 37806 - DNA, 20 bp, Artificial Sequence
  MKO10037806_A_Olfr589
  gRNA
ttgagccgggcttcccgaga

SEQ ID NO: 37807 - DNA, 20 bp, Artificial Sequence
  MKO10037807_A_Olfr58
  gRNA
cgaagctaccatactttccc

SEQ ID NO: 37808 - DNA, 20 bp, Artificial Sequence
  MKO10037808_A_Olfr58
  gRNA
atatacctgctcactatgct

SEQ ID NO: 37809 - DNA, 20 bp, Artificial Sequence
  MKO10037809_A_Olfr58
  gRNA
aatgatgcttgaaagaaaca

SEQ ID NO: 37810 - DNA, 20 bp, Artificial Sequence
  MKO10037810_A_Olfr591
  gRNA
ggcctggctattgtacttcg

SEQ ID NO: 37811 - DNA, 20 bp, Artificial Sequence
  MKO10037811_A_Olfr591
  gRNA
ctccacgaagtacaatagcc

SEQ ID NO: 37812 - DNA, 20 bp, Artificial Sequence
  MKO10037812_A_Olfr591
  gRNA
tgaagtctaccccacctgtg

SEQ ID NO: 37813 - DNA, 20 bp, Artificial Sequence
  MKO10037813_A_Olfr592
  gRNA
atccatatcaacgctgtgta

SEQ ID NO: 37814 - DNA, 20 bp, Artificial Sequence
  MKO10037814_A_Olfr592
  gRNA
tctttcctcactcatcgatt

SEQ ID NO: 37815 - DNA, 20 bp, Artificial Sequence
  MKO10037815_A_Olfr592
  gRNA
gagaaacgctcctattatta

SEQ ID NO: 37816 - DNA, 20 bp, Artificial Sequence
  MKO10037816_A_Olfr593
  gRNA
tgaagtctactccgcctgtg

SEQ ID NO: 37817 - DNA, 20 bp, Artificial Sequence
  MKO10037817_A_Olfr593
  gRNA
taaaacgtagaccatgcaaa

SEQ ID NO: 37818 - DNA, 20 bp, Artificial Sequence
  MKO10037818_A_Olfr593
  gRNA
taggtctagctgttgtcatt

SEQ ID NO: 37819 - DNA, 20 bp, Artificial Sequence
  MKO10037819_A_Olfr594
  gRNA
aggatggtgctatatcgaag

SEQ ID NO: 37820 - DNA, 20 bp, Artificial Sequence
  MKO10037820_A_Olfr594
  gRNA
gttcgtaccccatatatgac

SEQ ID NO: 37821 - DNA, 20 bp, Artificial Sequence
  MKO10037821_A_Olfr594
  gRNA
ttgattcgggcttcccgaga

SEQ ID NO: 37822 - DNA, 20 bp, Artificial Sequence
  MKO10037822_A_Olfr596
  gRNA
tgtttatctgatagcacttg

SEQ ID NO: 37823 - DNA, 20 bp, Artificial Sequence
  MKO10037823_A_Olfr596
  gRNA
agaatagaggtatacctaag

SEQ ID NO: 37824 - DNA, 20 bp, Artificial Sequence
  MKO10037824_A_Olfr596
  gRNA
tcattgctctctcctatgct

SEQ ID NO: 37825 - DNA, 20 bp, Artificial Sequence
  MKO10037825_A_Olfr597
  gRNA
gggttggtgtaagctacgct

SEQ ID NO: 37826 - DNA, 20 bp, Artificial Sequence
  MKO10037826_A_Olfr597
  gRNA
gtccggcattctattggcaa

SEQ ID NO: 37827 - DNA, 20 bp, Artificial Sequence
  MKO10037827_A_Olfr597
  gRNA
actccatgcactgtaaggta

SEQ ID NO: 37828 - DNA, 20 bp, Artificial Sequence
  MKO10037828_A_Olfr598
  gRNA
caatttgaatggaccgaaaa

SEQ ID NO: 37829 - DNA, 20 bp, Artificial Sequence
  MKO10037829_A_Olfr598
  gRNA
cttcttcatccatacccttc

SEQ ID NO: 37830 - DNA, 20 bp, Artificial Sequence
  MKO10037830_A_Olfr598
  gRNA
gggttggtgtaagctatgct

SEQ ID NO: 37831 - DNA, 20 bp, Artificial Sequence
  MKO10037831_A_Olfr599
  gRNA
attcgggcaactgtactcgt

SEQ ID NO: 37832 - DNA, 20 bp, Artificial Sequence
  MKO10037832_A_Olfr599
  gRNA
aacccatttgcggatctcct

SEQ ID NO: 37833 - DNA, 20 bp, Artificial Sequence
  MKO10037833_A_Olfr599
  gRNA
gtgattctgattggcatccc

SEQ ID NO: 37834 - DNA, 20 bp, Artificial Sequence
  MKO10037834_A_Olfr59
  gRNA
aacggttgtaagggtccaac

SEQ ID NO: 37835 - DNA, 20 bp, Artificial Sequence
  MKO10037835_A_Olfr59
  gRNA
ggtgaagaggatgtcaacac

SEQ ID NO: 37836 - DNA, 20 bp, Artificial Sequence
  MKO10037836_A_Olfr59
  gRNA
cactagggccttgggcactg

SEQ ID NO: 37837 - DNA, 20 bp, Artificial Sequence
  MKO10037837_A_Olfr5
  gRNA
ttctaccactgcccgctaca

SEQ ID NO: 37838 - DNA, 20 bp, Artificial Sequence
  MKO10037838_A_Olfr5
  gRNA
tcgtgaggaagcaaccccaa

SEQ ID NO: 37839 - DNA, 20 bp, Artificial Sequence
  MKO10037839_A_Olfr5
  gRNA
cacgactatggcctcctatg

SEQ ID NO: 37840 - DNA, 20 bp, Artificial Sequence
  MKO10037840_A_Olfr600
  gRNA
atcagtcgtggacttgtgcc

SEQ ID NO: 37841 - DNA, 20 bp, Artificial Sequence
  MKO10037841_A_Olfr600
  gRNA
cagtccgaaccaaacagata

SEQ ID NO: 37842 - DNA, 20 bp, Artificial Sequence
  MKO10037842_A_Olfr600
  gRNA
gaagaatcagtgtatacgac

SEQ ID NO: 37843 - DNA, 20 bp, Artificial Sequence
  MKO10037843_A_Olfr601
  gRNA
ccacagccgcatcgccgtga

SEQ ID NO: 37844 - DNA, 20 bp, Artificial Sequence
  MKO10037844_A_Olfr601
  gRNA
cgatgccaaaagcaacacca

SEQ ID NO: 37845 - DNA, 20 bp, Artificial Sequence
  MKO10037845_A_Olfr601
  gRNA
gcctagaacaccttcatgtg

SEQ ID NO: 37846 - DNA, 20 bp, Artificial Sequence
  MKO10037846_A_Olfr603
  gRNA
tgtttatccgatagcacttg

SEQ ID NO: 37847 - DNA, 20 bp, Artificial Sequence
  MKO10037847_A_Olfr603
  gRNA
agaacagaggtatacctaag

SEQ ID NO: 37848 - DNA, 20 bp, Artificial Sequence
  MKO10037848_A_Olfr603
  gRNA
ctctgttctcaccaacaaag

SEQ ID NO: 37849 - DNA, 20 bp, Artificial Sequence
  MKO10037849_A_Olfr605
  gRNA
gcctagaacacctccatgtc

SEQ ID NO: 37850 - DNA, 20 bp, Artificial Sequence
  MKO10037850_A_Olfr605
  gRNA
ttagaaagggcggtaccaga

SEQ ID NO: 37851 - DNA, 20 bp, Artificial Sequence
  MKO10037851_A_Olfr605
  gRNA
caagcgttatagcctcagtg

SEQ ID NO: 37852 - DNA, 20 bp, Artificial Sequence
  MKO10037852_A_Olfr606
  gRNA
taatgttatatacggaatgg

SEQ ID NO: 37853 - DNA, 20 bp, Artificial Sequence
  MKO10037853_A_Olfr606
  gRNA
tggaatagcactccgaagta

SEQ ID NO: 37854 - DNA, 20 bp, Artificial Sequence
  MKO10037854_A_Olfr606
  gRNA
attaaacctgatgtcagcgc

SEQ ID NO: 37855 - DNA, 20 bp, Artificial Sequence
  MKO10037855_A_Olfr608
  gRNA
cgtccaatgttattactgaa

SEQ ID NO: 37856 - DNA, 20 bp, Artificial Sequence
  MKO10037856_A_Olfr608
  gRNA
gccccccacagtcaatccgt

SEQ ID NO: 37857 - DNA, 20 bp, Artificial Sequence
  MKO10037857_A_Olfr608
  gRNA
tacacccagcttaataacca

SEQ ID NO: 37858 - DNA, 20 bp, Artificial Sequence
  MKO10037858_A_Olfr609
  gRNA
atttggcgtatcttccggtg

SEQ ID NO: 37859 - DNA, 20 bp, Artificial Sequence
  MKO10037859_A_Olfr609
  gRNA
catcatatagatcgtcagca

SEQ ID NO: 37860 - DNA, 20 bp, Artificial Sequence
  MKO10037860_A_Olfr609
  gRNA
catgctgacgatctatatga

SEQ ID NO: 37861 - DNA, 20 bp, Artificial Sequence
  MKO10037861_A_Olfr60
  gRNA
cataatgctgtttacgtatg

SEQ ID NO: 37862 - DNA, 20 bp, Artificial Sequence
  MKO10037862_A_Olfr60
  gRNA
gctggttggtctactatctg

SEQ ID NO: 37863 - DNA, 20 bp, Artificial Sequence
  MKO10037863_A_Olfr60
  gRNA
aaagatgtcaagctcgccat

SEQ ID NO: 37864 - DNA, 20 bp, Artificial Sequence
  MKO10037864_A_Olfr610
  gRNA
catcgagtcagccgttctct

SEQ ID NO: 37865 - DNA, 20 bp, Artificial Sequence
  MKO10037865_A_Olfr610
  gRNA
attctcacaacaagacgtat

SEQ ID NO: 37866 - DNA, 20 bp, Artificial Sequence
  MKO10037866_A_Olfr610
  gRNA
aatgcgaactcgaatctctt

SEQ ID NO: 37867 - DNA, 20 bp, Artificial Sequence
  MKO10037867_A_Olfr611
  gRNA
tgcctgcccctatcctcttg

SEQ ID NO: 37868 - DNA, 20 bp, Artificial Sequence
  MKO10037868_A_Olfr611
  gRNA
aacaatagctaaccctatct

SEQ ID NO: 37869 - DNA, 20 bp, Artificial Sequence
  MKO10037869_A_Olfr611
  gRNA
tgtacgaaccttaactctgc

SEQ ID NO: 37870 - DNA, 20 bp, Artificial Sequence
  MKO10037870_A_Olfr612
  gRNA
tgtacgaaccttaactgtgc

SEQ ID NO: 37871 - DNA, 20 bp, Artificial Sequence
  MKO10037871_A_Olfr612
  gRNA
caggatagctttatgatgtc

SEQ ID NO: 37872 - DNA, 20 bp, Artificial Sequence
  MKO10037872_A_Olfr612
  gRNA
aacaatagccaagcctatct

SEQ ID NO: 37873 - DNA, 20 bp, Artificial Sequence
  MKO10037873_A_Olfr613
  gRNA
tgtaacgatgcagtactgca

SEQ ID NO: 37874 - DNA, 20 bp, Artificial Sequence
  MKO10037874_A_Olfr613
  gRNA
gctgccttgcacaagcgatt

SEQ ID NO: 37875 - DNA, 20 bp, Artificial Sequence
  MKO10037875_A_Olfr613
  gRNA
agtactgcatcgttacaccc

SEQ ID NO: 37876 - DNA, 20 bp, Artificial Sequence
  MKO10037876_A_Olfr615
  gRNA
tgacgaactcacgagtcacc

SEQ ID NO: 37877 - DNA, 20 bp, Artificial Sequence
  MKO10037877_A_Olfr615
  gRNA
tcttcaggctatacacaatt

SEQ ID NO: 37878 - DNA, 20 bp, Artificial Sequence
  MKO10037878_A_Olfr615
  gRNA
tccaatagcacatgcagtcc

SEQ ID NO: 37879 - DNA, 20 bp, Artificial Sequence
  MKO10037879_A_Olfr616
  gRNA
tcctatcttaataatccgag

SEQ ID NO: 37880 - DNA, 20 bp, Artificial Sequence
  MKO10037880_A_Olfr616
  gRNA
ccgcttgagcaggattggca

SEQ ID NO: 37881 - DNA, 20 bp, Artificial Sequence
  MKO10037881_A_Olfr616
  gRNA
atctgcacatcttctagtcc

SEQ ID NO: 37882 - DNA, 20 bp, Artificial Sequence
  MKO10037882_A_Olfr617
  gRNA
ttcacagtatgagtgacgaa

SEQ ID NO: 37883 - DNA, 20 bp, Artificial Sequence
  MKO10037883_A_Olfr617
  gRNA
aaatgccatagctagcagta

SEQ ID NO: 37884 - DNA, 20 bp, Artificial Sequence
  MKO10037884_A_Olfr617
  gRNA
tatttactatggtgtgatag

SEQ ID NO: 37885 - DNA, 20 bp, Artificial Sequence
  MKO10037885_A_Olfr618
  gRNA
gtctcaaaatgctcgacgca

SEQ ID NO: 37886 - DNA, 20 bp, Artificial Sequence
  MKO10037886_A_Olfr618
  gRNA
aaccgagtctgccatactgc

SEQ ID NO: 37887 - DNA, 20 bp, Artificial Sequence
  MKO10037887_A_Olfr618
  gRNA
gtttatcgactcaattattg

SEQ ID NO: 37888 - DNA, 20 bp, Artificial Sequence
  MKO10037888_A_Olfr619
  gRNA
gtccacagtgaccattccaa

SEQ ID NO: 37889 - DNA, 20 bp, Artificial Sequence
  MKO10037889_A_Olfr619
  gRNA
agggtggtagaacaacatag

SEQ ID NO: 37890 - DNA, 20 bp, Artificial Sequence
  MKO10037890_A_Olfr619
  gRNA
aagtactacgtctagaaata

SEQ ID NO: 37891 - DNA, 20 bp, Artificial Sequence
  MKO10037891_A_Olfr61
  gRNA
agaacgcatgcgcagaacac

SEQ ID NO: 37892 - DNA, 20 bp, Artificial Sequence
  MKO10037892_A_Olfr61
  gRNA
gctgaggatcgagtacagca

SEQ ID NO: 37893 - DNA, 20 bp, Artificial Sequence
  MKO10037893_A_Olfr61
  gRNA
ccattagagcgattgtgtag

SEQ ID NO: 37894 - DNA, 20 bp, Artificial Sequence
  MKO10037894_A_Olfr620
  gRNA
ggtgatcagcaacttgttag

SEQ ID NO: 37895 - DNA, 20 bp, Artificial Sequence
  MKO10037895_A_Olfr620
  gRNA
atccgcttcaatagcatcta

SEQ ID NO: 37896 - DNA, 20 bp, Artificial Sequence
  MKO10037896_A_Olfr620
  gRNA
acccattaccgtgtgcacag

SEQ ID NO: 37897 - DNA, 20 bp, Artificial Sequence
  MKO10037897_A_Olfr622
  gRNA
accactggattaaccgcaga

SEQ ID NO: 37898 - DNA, 20 bp, Artificial Sequence
  MKO10037898_A_Olfr622
  gRNA
cactcgatcacgaatttgct

SEQ ID NO: 37899 - DNA, 20 bp, Artificial Sequence
  MKO10037899_A_Olfr622
  gRNA
agcttcctatctcatcgtat

SEQ ID NO: 37900 - DNA, 20 bp, Artificial Sequence
  MKO10037900_A_Olfr623
  gRNA
cagagtcgagttctagaata

SEQ ID NO: 37901 - DNA, 20 bp, Artificial Sequence
  MKO10037901_A_Olfr623
  gRNA
gaggtgttgagccaaattac

SEQ ID NO: 37902 - DNA, 20 bp, Artificial Sequence
  MKO10037902_A_Olfr623
  gRNA
caataatcattcgactgaat

SEQ ID NO: 37903 - DNA, 20 bp, Artificial Sequence
  MKO10037903_A_Olfr624
  gRNA
acctctagatttgttcttac

SEQ ID NO: 37904 - DNA, 20 bp, Artificial Sequence
  MKO10037904_A_Olfr624
  gRNA
gtctactgtgcacacggtgc

SEQ ID NO: 37905 - DNA, 20 bp, Artificial Sequence
  MKO10037905_A_Olfr624
  gRNA
acagtctctgaattctcact

SEQ ID NO: 37906 - DNA, 20 bp, Artificial Sequence
  MKO10037906_A_Olfr628
  gRNA
agatgcctgattcaataccc

SEQ ID NO: 37907 - DNA, 20 bp, Artificial Sequence
  MKO10037907_A_Olfr628
  gRNA
accttccagggtattgaatc

SEQ ID NO: 37908 - DNA, 20 bp, Artificial Sequence
  MKO10037908_A_Olfr628
  gRNA
gtctagtccaagtatactga

SEQ ID NO: 37909 - DNA, 20 bp, Artificial Sequence
  MKO10037909_A_Olfr629
  gRNA
agtttcctaacacatcgttt

SEQ ID NO: 37910 - DNA, 20 bp, Artificial Sequence
  MKO10037910_A_Olfr629
  gRNA
gatggctagtggtaacactc

SEQ ID NO: 37911 - DNA, 20 bp, Artificial Sequence
  MKO10037911_A_Olfr629
  gRNA
atcaatcctgacaacgccca

SEQ ID NO: 37912 - DNA, 20 bp, Artificial Sequence
  MKO10037912_A_Olfr62
  gRNA
catgttctccatcccgtgta

SEQ ID NO: 37913 - DNA, 20 bp, Artificial Sequence
  MKO10037913_A_Olfr62
  gRNA
gcgggaatccatgtgtatca

SEQ ID NO: 37914 - DNA, 20 bp, Artificial Sequence
  MKO10037914_A_Olfr62
  gRNA
gtctacctggtcattgagag

SEQ ID NO: 37915 - DNA, 20 bp, Artificial Sequence
  MKO10037915_A_Olfr630
  gRNA
aaggctagacgggctataag

SEQ ID NO: 37916 - DNA, 20 bp, Artificial Sequence
  MKO10037916_A_Olfr630
  gRNA
ccgaaacttattgccaagat

SEQ ID NO: 37917 - DNA, 20 bp, Artificial Sequence
  MKO10037917_A_Olfr630
  gRNA
aataagtttcggcgtgagaa

SEQ ID NO: 37918 - DNA, 20 bp, Artificial Sequence
  MKO10037918_A_Olfr631
  gRNA
cctccattattaccgttcag

SEQ ID NO: 37919 - DNA, 20 bp, Artificial Sequence
  MKO10037919_A_Olfr631
  gRNA
gtttcccaaagcggtgtacc

SEQ ID NO: 37920 - DNA, 20 bp, Artificial Sequence
  MKO10037920_A_Olfr631
  gRNA
accaccttcaacaacctata

SEQ ID NO: 37921 - DNA, 20 bp, Artificial Sequence
  MKO10037921_A_Olfr632
  gRNA
catcttggccgtgacagacc

SEQ ID NO: 37922 - DNA, 20 bp, Artificial Sequence
  MKO10037922_A_Olfr632
  gRNA
acccgcttcaacagactcta

SEQ ID NO: 37923 - DNA, 20 bp, Artificial Sequence
  MKO10037923_A_Olfr632
  gRNA
tcaagacccaacagatccgc

SEQ ID NO: 37924 - DNA, 20 bp, Artificial Sequence
  MKO10037924_A_Olfr633
  gRNA
ctatgtgcctatgatcagcg

SEQ ID NO: 37925 - DNA, 20 bp, Artificial Sequence
  MKO10037925_A_Olfr633
  gRNA
taatgtttagtaccgtgtac

SEQ ID NO: 37926 - DNA, 20 bp, Artificial Sequence
  MKO10037926_A_Olfr633
  gRNA
accagagccacgctgatcat

SEQ ID NO: 37927 - DNA, 20 bp, Artificial Sequence
  MKO10037927_A_Olfr635
  gRNA
catccgagaaatcagctttg

SEQ ID NO: 37928 - DNA, 20 bp, Artificial Sequence
  MKO10037928_A_Olfr635
  gRNA
ctacagtcatgcagctcctt

SEQ ID NO: 37929 - DNA, 20 bp, Artificial Sequence
  MKO10037929_A_Olfr635
  gRNA
tttctcggatgttgaaccaa

SEQ ID NO: 37930 - DNA, 20 bp, Artificial Sequence
  MKO10037930_A_Olfr638
  gRNA
gagaagcatgcttcgcaaag

SEQ ID NO: 37931 - DNA, 20 bp, Artificial Sequence
  MKO10037931_A_Olfr638
  gRNA
agtgcacctttctttgcaac

SEQ ID NO: 37932 - DNA, 20 bp, Artificial Sequence
  MKO10037932_A_Olfr638
  gRNA
catggccaatatctatctgc

SEQ ID NO: 37933 - DNA, 20 bp, Artificial Sequence
  MKO10037933_A_Olfr639
  gRNA
agatgctcgacataagtgtg

SEQ ID NO: 37934 - DNA, 20 bp, Artificial Sequence
  MKO10037934_A_Olfr639
  gRNA
ccaggacaatggccaacccc

SEQ ID NO: 37935 - DNA, 20 bp, Artificial Sequence
  MKO10037935_A_Olfr639
  gRNA
gctgcactgctatcataatt

SEQ ID NO: 37936 - DNA, 20 bp, Artificial Sequence
  MKO10037936_A_Olfr63
  gRNA
tggtggatcgcttattggga

SEQ ID NO: 37937 - DNA, 20 bp, Artificial Sequence
  MKO10037937_A_Olfr63
  gRNA
gctgtagttctgaccgggca

SEQ ID NO: 37938 - DNA, 20 bp, Artificial Sequence
  MKO10037938_A_Olfr63
  gRNA
ctcggcttgtggcatggtct

SEQ ID NO: 37939 - DNA, 20 bp, Artificial Sequence
  MKO10037939_A_Olfr640
  gRNA
atcacacgaacagcgactca

SEQ ID NO: 37940 - DNA, 20 bp, Artificial Sequence
  MKO10037940_A_Olfr640
  gRNA
agcacagtggaatagcgtag

SEQ ID NO: 37941 - DNA, 20 bp, Artificial Sequence
  MKO10037941_A_Olfr640
  gRNA
gtacggtaggaagtgtagat

SEQ ID NO: 37942 - DNA, 20 bp, Artificial Sequence
  MKO10037942_A_Olfr641
  gRNA
gtctctacagttcaccgttt

SEQ ID NO: 37943 - DNA, 20 bp, Artificial Sequence
  MKO10037943_A_Olfr641
  gRNA
actgtagagacccctatcat

SEQ ID NO: 37944 - DNA, 20 bp, Artificial Sequence
  MKO10037944_A_Olfr641
  gRNA
gaaacatgcggaatatggca

SEQ ID NO: 37945 - DNA, 20 bp, Artificial Sequence
  MKO10037945_A_Olfr642
  gRNA
ccttctgtctgtcaacgacc

SEQ ID NO: 37946 - DNA, 20 bp, Artificial Sequence
  MKO10037946_A_Olfr642
  gRNA
gacctgatacgcttgccctg

SEQ ID NO: 37947 - DNA, 20 bp, Artificial Sequence
  MKO10037947_A_Olfr642
  gRNA
agtgcttactgatgcccgtg

SEQ ID NO: 37948 - DNA, 20 bp, Artificial Sequence
  MKO10037948_A_Olfr643
  gRNA
cagggcaggcgaatcatgtc

SEQ ID NO: 37949 - DNA, 20 bp, Artificial Sequence
  MKO10037949_A_Olfr643
  gRNA
gacatgattcgcctgccctg

SEQ ID NO: 37950 - DNA, 20 bp, Artificial Sequence
  MKO10037950_A_Olfr643
  gRNA
cctcccatagcgagcagcca

SEQ ID NO: 37951 - DNA, 20 bp, Artificial Sequence
  MKO10037951_A_Olfr644
  gRNA
gatctgattcgactgccttg

SEQ ID NO: 37952 - DNA, 20 bp, Artificial Sequence
  MKO10037952_A_Olfr644
  gRNA
tctttacagcgtctccatag

SEQ ID NO: 37953 - DNA, 20 bp, Artificial Sequence
  MKO10037953_A_Olfr644
  gRNA
caaggcagtcgaatcagatc

SEQ ID NO: 37954 - DNA, 20 bp, Artificial Sequence
  MKO10037954_A_Olfr645
  gRNA
acgctcctcccgagacgcaa

SEQ ID NO: 37955 - DNA, 20 bp, Artificial Sequence
  MKO10037955_A_Olfr645
  gRNA
gtgtctattgtgcatcgctt

SEQ ID NO: 37956 - DNA, 20 bp, Artificial Sequence
  MKO10037956_A_Olfr645
  gRNA
gctcaccaatgctcgcattg

SEQ ID NO: 37957 - DNA, 20 bp, Artificial Sequence
  MKO10037957_A_Olfr646
  gRNA
ctcgattgtgaccaaagcga

SEQ ID NO: 37958 - DNA, 20 bp, Artificial Sequence
  MKO10037958_A_Olfr646
  gRNA
atcccgtgatgctcaacaca

SEQ ID NO: 37959 - DNA, 20 bp, Artificial Sequence
  MKO10037959_A_Olfr646
  gRNA
gaaccaaggagattcggagt

SEQ ID NO: 37960 - DNA, 20 bp, Artificial Sequence
  MKO10037960_A_Olfr648
  gRNA
gactatcgtcaagattgctg

SEQ ID NO: 37961 - DNA, 20 bp, Artificial Sequence
  MKO10037961_A_Olfr648
  gRNA
cgtgtcaacaagaatacaac

SEQ ID NO: 37962 - DNA, 20 bp, Artificial Sequence
  MKO10037962_A_Olfr648
  gRNA
agcaatcttgacgatagtct

SEQ ID NO: 37963 - DNA, 20 bp, Artificial Sequence
  MKO10037963_A_Olfr649
  gRNA
caggtgggatgattacatac

SEQ ID NO: 37964 - DNA, 20 bp, Artificial Sequence
  MKO10037964_A_Olfr649
  gRNA
gactgtgttccactgcaata

SEQ ID NO: 37965 - DNA, 20 bp, Artificial Sequence
  MKO10037965_A_Olfr649
  gRNA
ttcactctctcgggcatccc

SEQ ID NO: 37966 - DNA, 20 bp, Artificial Sequence
  MKO10037966_A_Olfr64
  gRNA
aagtcctatagctataaccc

SEQ ID NO: 37967 - DNA, 20 bp, Artificial Sequence
  MKO10037967_A_Olfr64
  gRNA
ctgtgcccgccagcatggca

SEQ ID NO: 37968 - DNA, 20 bp, Artificial Sequence
  MKO10037968_A_Olfr64
  gRNA
gatgtaggcctgtaagaagc

SEQ ID NO: 37969 - DNA, 20 bp, Artificial Sequence
  MKO10037969_A_Olfr651
  gRNA
tagcaccatcctgactccgc

SEQ ID NO: 37970 - DNA, 20 bp, Artificial Sequence
  MKO10037970_A_Olfr651
  gRNA
atgacacgggtcttgcaaaa

SEQ ID NO: 37971 - DNA, 20 bp, Artificial Sequence
  MKO10037971_A_Olfr651
  gRNA
ccaaactgctcagtaacctt

SEQ ID NO: 37972 - DNA, 20 bp, Artificial Sequence
  MKO10037972_A_Olfr652
  gRNA
ggatattgtgaccaaaacga

SEQ ID NO: 37973 - DNA, 20 bp, Artificial Sequence
  MKO10037973_A_Olfr652
  gRNA
atgacgagctctcggcagaa

SEQ ID NO: 37974 - DNA, 20 bp, Artificial Sequence
  MKO10037974_A_Olfr652
  gRNA
gagcaattccacgtatggat

SEQ ID NO: 37975 - DNA, 20 bp, Artificial Sequence
  MKO10037975_A_Olfr653
  gRNA
attgaacgtttacccttctg

SEQ ID NO: 37976 - DNA, 20 bp, Artificial Sequence
  MKO10037976_A_Olfr653
  gRNA
ggccacgagtcacgcatgcc

SEQ ID NO: 37977 - DNA, 20 bp, Artificial Sequence
  MKO10037977_A_Olfr653
  gRNA
ggcctggcatgcgtgactcg

SEQ ID NO: 37978 - DNA, 20 bp, Artificial Sequence
  MKO10037978_A_Olfr654
  gRNA
gatgactcgattggcatgaa

SEQ ID NO: 37979 - DNA, 20 bp, Artificial Sequence
  MKO10037979_A_Olfr654
  gRNA
aatgagtccaatgcgactat

SEQ ID NO: 37980 - DNA, 20 bp, Artificial Sequence
  MKO10037980_A_Olfr654
  gRNA
agagatgcatgatagctcgt

SEQ ID NO: 37981 - DNA, 20 bp, Artificial Sequence
  MKO10037981_A_Olfr655
  gRNA
aagagcccataaatccgatt

SEQ ID NO: 37982 - DNA, 20 bp, Artificial Sequence
  MKO10037982_A_Olfr655
  gRNA
gaatatggtggccgatgcgg

SEQ ID NO: 37983 - DNA, 20 bp, Artificial Sequence
  MKO10037983_A_Olfr655
  gRNA
tgaggcgtaccacactctgc

SEQ ID NO: 37984 - DNA, 20 bp, Artificial Sequence
  MKO10037984_A_Olfr656
  gRNA
accagacctaatcgtgtgta

SEQ ID NO: 37985 - DNA, 20 bp, Artificial Sequence
  MKO10037985_A_Olfr656
  gRNA
gacaccatcattgctcgtat

SEQ ID NO: 37986 - DNA, 20 bp, Artificial Sequence
  MKO10037986_A_Olfr656
  gRNA
gtcagcccatacacacgatt

SEQ ID NO: 37987 - DNA, 20 bp, Artificial Sequence
  MKO10037987_A_Olfr657
  gRNA
ttcttgaacaataattccgc

SEQ ID NO: 37988 - DNA, 20 bp, Artificial Sequence
  MKO10037988_A_Olfr657
  gRNA
atgacaatattatgagaccc

SEQ ID NO: 37989 - DNA, 20 bp, Artificial Sequence
  MKO10037989_A_Olfr657
  gRNA
agctccgacaaaacaccttt

SEQ ID NO: 37990 - DNA, 20 bp, Artificial Sequence
  MKO10037990_A_Olfr658
  gRNA
aagcgcctaccctactgtcg

SEQ ID NO: 37991 - DNA, 20 bp, Artificial Sequence
  MKO10037991_A_Olfr658
  gRNA
tattatattgcctcgacagt

SEQ ID NO: 37992 - DNA, 20 bp, Artificial Sequence
  MKO10037992_A_Olfr658
  gRNA
agaatggtggagtaacgcag

SEQ ID NO: 37993 - DNA, 20 bp, Artificial Sequence
  MKO10037993_A_Olfr659
  gRNA
catccatactttcacagcga

SEQ ID NO: 37994 - DNA, 20 bp, Artificial Sequence
  MKO10037994_A_Olfr659
  gRNA
ttgaagcactgcacatgaca

SEQ ID NO: 37995 - DNA, 20 bp, Artificial Sequence
  MKO10037995_A_Olfr659
  gRNA
actccatcgctgtgaaagta

SEQ ID NO: 37996 - DNA, 20 bp, Artificial Sequence
  MKO10037996_A_Olfr65
  gRNA
caatcgtctctatcctgttg

SEQ ID NO: 37997 - DNA, 20 bp, Artificial Sequence
  MKO10037997_A_Olfr65
  gRNA
ggtgccgttgccaagtaata

SEQ ID NO: 37998 - DNA, 20 bp, Artificial Sequence
  MKO10037998_A_Olfr65
  gRNA
caataatcattcgcctgcat

SEQ ID NO: 37999 - DNA, 20 bp, Artificial Sequence
  MKO10037999_A_Olfr661
  gRNA
atatccatcactcatagtgt

SEQ ID NO: 38000 - DNA, 20 bp, Artificial Sequence
  MKO10038000_A_Olfr661
  gRNA
cttatacaaggtgctcaggc

SEQ ID NO: 38001 - DNA, 20 bp, Artificial Sequence
  MKO10038001_A_Olfr661
  gRNA
tgcagcacgttcagcagaac

SEQ ID NO: 38002 - DNA, 20 bp, Artificial Sequence
  MKO10038002_A_Olfr663
  gRNA
aggctagtgacccccgggtt

SEQ ID NO: 38003 - DNA, 20 bp, Artificial Sequence
  MKO10038003_A_Olfr663
  gRNA
tacccatgactgcccatgcc

SEQ ID NO: 38004 - DNA, 20 bp, Artificial Sequence
  MKO10038004_A_Olfr663
  gRNA
ttcagcagaagtaggatgac

SEQ ID NO: 38005 - DNA, 20 bp, Artificial Sequence
  MKO10038005_A_Olfr665
  gRNA
aggctggaggtattgacccc

SEQ ID NO: 38006 - DNA, 20 bp, Artificial Sequence
  MKO10038006_A_Olfr665
  gRNA
attaatcttaatattgccac

SEQ ID NO: 38007 - DNA, 20 bp, Artificial Sequence
  MKO10038007_A_Olfr665
  gRNA
tgggaggtagcaatagatac

SEQ ID NO: 38008 - DNA, 20 bp, Artificial Sequence
  MKO10038008_A_Olfr666
  gRNA
actccattccagtcaacatg

SEQ ID NO: 38009 - DNA, 20 bp, Artificial Sequence
  MKO10038009_A_Olfr666
  gRNA
gataagactgcctctgcaat

SEQ ID NO: 38010 - DNA, 20 bp, Artificial Sequence
  MKO10038010_A_Olfr666
  gRNA
tgtcttacactatgatattg

SEQ ID NO: 38011 - DNA, 20 bp, Artificial Sequence
  MKO10038011_A_Olfr667
  gRNA
atctgctatcctttgcgcta

SEQ ID NO: 38012 - DNA, 20 bp, Artificial Sequence
  MKO10038012_A_Olfr667
  gRNA
tagcaggcaataacagatag

SEQ ID NO: 38013 - DNA, 20 bp, Artificial Sequence
  MKO10038013_A_Olfr667
  gRNA
aagcgcctgccctattgccg

SEQ ID NO: 38014 - DNA, 20 bp, Artificial Sequence
  MKO10038014_A_Olfr668
  gRNA
gataagaatgcttctacaat

SEQ ID NO: 38015 - DNA, 20 bp, Artificial Sequence
  MKO10038015_A_Olfr668
  gRNA
tctccttcactgatgttacc

SEQ ID NO: 38016 - DNA, 20 bp, Artificial Sequence
  MKO10038016_A_Olfr668
  gRNA
gaatgttgcaagacaagcct

SEQ ID NO: 38017 - DNA, 20 bp, Artificial Sequence
  MKO10038017_A_Olfr669
  gRNA
ggcaaacgtttaaccaagaa

SEQ ID NO: 38018 - DNA, 20 bp, Artificial Sequence
  MKO10038018_A_Olfr669
  gRNA
acaggctgaccactgcccgg

SEQ ID NO: 38019 - DNA, 20 bp, Artificial Sequence
  MKO10038019_A_Olfr669
  gRNA
atatgcactgcttcgagacc

SEQ ID NO: 38020 - DNA, 20 bp, Artificial Sequence
  MKO10038020_A_Olfr66
  gRNA
caagacccccgattctacaa

SEQ ID NO: 38021 - DNA, 20 bp, Artificial Sequence
  MKO10038021_A_Olfr66
  gRNA
gtgtcctggtgctaaaccag

SEQ ID NO: 38022 - DNA, 20 bp, Artificial Sequence
  MKO10038022_A_Olfr66
  gRNA
ctcactagccattgtagaat

SEQ ID NO: 38023 - DNA, 20 bp, Artificial Sequence
  MKO10038023_A_Olfr670
  gRNA
cgctcgtagtatccgcatat

SEQ ID NO: 38024 - DNA, 20 bp, Artificial Sequence
  MKO10038024_A_Olfr670
  gRNA
tgggttgatacttatatcaa

SEQ ID NO: 38025 - DNA, 20 bp, Artificial Sequence
  MKO10038025_A_Olfr670
  gRNA
agaatctgactgtaccgcag

SEQ ID NO: 38026 - DNA, 20 bp, Artificial Sequence
  MKO10038026_A_Olfr671
  gRNA
ataaaacagcaccattcccc

SEQ ID NO: 38027 - DNA, 20 bp, Artificial Sequence
  MKO10038027_A_Olfr671
  gRNA
actctatctcattgcagtcc

SEQ ID NO: 38028 - DNA, 20 bp, Artificial Sequence
  MKO10038028_A_Olfr671
  gRNA
tactcgctcccgaatctgct

SEQ ID NO: 38029 - DNA, 20 bp, Artificial Sequence
  MKO10038029_A_Olfr672
  gRNA
caaacagattcgagatcgtg

SEQ ID NO: 38030 - DNA, 20 bp, Artificial Sequence
  MKO10038030_A_Olfr672
  gRNA
ccagaatataccgagtgctc

SEQ ID NO: 38031 - DNA, 20 bp, Artificial Sequence
  MKO10038031_A_Olfr672
  gRNA
aggatagtgttatatcggag

SEQ ID NO: 38032 - DNA, 20 bp, Artificial Sequence
  MKO10038032_A_Olfr675
  gRNA
gtactacttcctagccatgc

SEQ ID NO: 38033 - DNA, 20 bp, Artificial Sequence
  MKO10038033_A_Olfr675
  gRNA
tctctatctcattgcaattc

SEQ ID NO: 38034 - DNA, 20 bp, Artificial Sequence
  MKO10038034_A_Olfr675
  gRNA
tacttgctcccgaatttgct

SEQ ID NO: 38035 - DNA, 20 bp, Artificial Sequence
  MKO10038035_A_Olfr676
  gRNA
gtgtatctgaccgctcttgt

SEQ ID NO: 38036 - DNA, 20 bp, Artificial Sequence
  MKO10038036_A_Olfr676
  gRNA
acaggcttcgtataaccacg

SEQ ID NO: 38037 - DNA, 20 bp, Artificial Sequence
  MKO10038037_A_Olfr676
  gRNA
gagcatcgtactcctcgcca

SEQ ID NO: 38038 - DNA, 20 bp, Artificial Sequence
  MKO10038038_A_Olfr677
  gRNA
cagatcaattatcgacaatg

SEQ ID NO: 38039 - DNA, 20 bp, Artificial Sequence
  MKO10038039_A_Olfr677
  gRNA
agcccccgaaactgatctcc

SEQ ID NO: 38040 - DNA, 20 bp, Artificial Sequence
  MKO10038040_A_Olfr677
  gRNA
aagtgtttagcgccttcaat

SEQ ID NO: 38041 - DNA, 20 bp, Artificial Sequence
  MKO10038041_A_Olfr678
  gRNA
acttctagccaacctatatg

SEQ ID NO: 38042 - DNA, 20 bp, Artificial Sequence
  MKO10038042_A_Olfr678
  gRNA
tgccttaagccgagcatccc

SEQ ID NO: 38043 - DNA, 20 bp, Artificial Sequence
  MKO10038043_A_Olfr678
  gRNA
gtcctgactccatagataac

SEQ ID NO: 38044 - DNA, 20 bp, Artificial Sequence
  MKO10038044_A_Olfr679
  gRNA
cgtctttatcagtttgctat

SEQ ID NO: 38045 - DNA, 20 bp, Artificial Sequence
  MKO10038045_A_Olfr679
  gRNA
ctatagcaaactgataaaga

SEQ ID NO: 38046 - DNA, 20 bp, Artificial Sequence
  MKO10038046_A_Olfr679
  gRNA
tcagcacagctcttagtata

SEQ ID NO: 38047 - DNA, 20 bp, Artificial Sequence
  MKO10038047_A_Olfr67
  gRNA
gactgcgttcagtcactatc

SEQ ID NO: 38048 - DNA, 20 bp, Artificial Sequence
  MKO10038048_A_Olfr67
  gRNA
actaccaaaggatatacccc

SEQ ID NO: 38049 - DNA, 20 bp, Artificial Sequence
  MKO10038049_A_Olfr67
  gRNA
caagcagatccaagatcgag

SEQ ID NO: 38050 - DNA, 20 bp, Artificial Sequence
  MKO10038050_A_Olfr681
  gRNA
taagggcggcaggaatgaca

SEQ ID NO: 38051 - DNA, 20 bp, Artificial Sequence
  MKO10038051_A_Olfr681
  gRNA
aaccgtctttatcagtttgc

SEQ ID NO: 38052 - DNA, 20 bp, Artificial Sequence
  MKO10038052_A_Olfr681
  gRNA
ctccagcaaactgataaaga

SEQ ID NO: 38053 - DNA, 20 bp, Artificial Sequence
  MKO10038053_A_Olfr683
  gRNA
gaatacggaaccttcttagg

SEQ ID NO: 38054 - DNA, 20 bp, Artificial Sequence
  MKO10038054_A_Olfr683
  gRNA
gatattgtgcaagaattatc

SEQ ID NO: 38055 - DNA, 20 bp, Artificial Sequence
  MKO10038055_A_Olfr683
  gRNA
tggtgtcagtcatgatcaga

SEQ ID NO: 38056 - DNA, 20 bp, Artificial Sequence
  MKO10038056_A_Olfr684
  gRNA
gatgggagcttcagaatcgt

SEQ ID NO: 38057 - DNA, 20 bp, Artificial Sequence
  MKO10038057_A_Olfr684
  gRNA
ttatcttccgtgttgtgctc

SEQ ID NO: 38058 - DNA, 20 bp, Artificial Sequence
  MKO10038058_A_Olfr684
  gRNA
ctgctatcttcattataagc

SEQ ID NO: 38059 - DNA, 20 bp, Artificial Sequence
  MKO10038059_A_Olfr685
  gRNA
agattcgccagcgagtgctc

SEQ ID NO: 38060 - DNA, 20 bp, Artificial Sequence
  MKO10038060_A_Olfr685
  gRNA
ccaatgcgccctataatccc

SEQ ID NO: 38061 - DNA, 20 bp, Artificial Sequence
  MKO10038061_A_Olfr685
  gRNA
gattatagggcgcattgggc

SEQ ID NO: 38062 - DNA, 20 bp, Artificial Sequence
  MKO10038062_A_Olfr686
  gRNA
aataagacagtcgacaagcc

SEQ ID NO: 38063 - DNA, 20 bp, Artificial Sequence
  MKO10038063_A_Olfr686
  gRNA
cctggtggcactgcgaggtg

SEQ ID NO: 38064 - DNA, 20 bp, Artificial Sequence
  MKO10038064_A_Olfr686
  gRNA
cacaatctgtccataagagt

SEQ ID NO: 38065 - DNA, 20 bp, Artificial Sequence
  MKO10038065_A_Olfr688
  gRNA
ctgagctgttggtttcatgc

SEQ ID NO: 38066 - DNA, 20 bp, Artificial Sequence
  MKO10038066_A_Olfr688
  gRNA
tcctagacacaaactcactc

SEQ ID NO: 38067 - DNA, 20 bp, Artificial Sequence
  MKO10038067_A_Olfr688
  gRNA
gcagaatgaactcagacacg

SEQ ID NO: 38068 - DNA, 20 bp, Artificial Sequence
  MKO10038068_A_Olfr689
  gRNA
atcttggctgtagtggatat

SEQ ID NO: 38069 - DNA, 20 bp, Artificial Sequence
  MKO10038069_A_Olfr689
  gRNA
acttgagtcattatgtgtcc

SEQ ID NO: 38070 - DNA, 20 bp, Artificial Sequence
  MKO10038070_A_Olfr689
  gRNA
gactcaagtcaaaaaccttc

SEQ ID NO: 38071 - DNA, 20 bp, Artificial Sequence
  MKO10038071_A_Olfr68
  gRNA
tgagccattgaacttgatca

SEQ ID NO: 38072 - DNA, 20 bp, Artificial Sequence
  MKO10038072_A_Olfr68
  gRNA
cccactagtgttaacacaga

SEQ ID NO: 38073 - DNA, 20 bp, Artificial Sequence
  MKO10038073_A_Olfr68
  gRNA
ctcaccatgatcaagttcaa

SEQ ID NO: 38074 - DNA, 20 bp, Artificial Sequence
  MKO10038074_A_Olfr690
  gRNA
ttcttatacgttgatcctcc

SEQ ID NO: 38075 - DNA, 20 bp, Artificial Sequence
  MKO10038075_A_Olfr690
  gRNA
ctcagccgtcttaacaccta

SEQ ID NO: 38076 - DNA, 20 bp, Artificial Sequence
  MKO10038076_A_Olfr690
  gRNA
gtcgggaatccttctggcca

SEQ ID NO: 38077 - DNA, 20 bp, Artificial Sequence
  MKO10038077_A_Olfr691
  gRNA
ccgacacgtgcatatcctgc

SEQ ID NO: 38078 - DNA, 20 bp, Artificial Sequence
  MKO10038078_A_Olfr691
  gRNA
gatatgcaacagtgctaaca

SEQ ID NO: 38079 - DNA, 20 bp, Artificial Sequence
  MKO10038079_A_Olfr691
  gRNA
gtcggccatcttgttagcca

SEQ ID NO: 38080 - DNA, 20 bp, Artificial Sequence
  MKO10038080_A_Olfr692
  gRNA
tggtgcggaccccatagatg

SEQ ID NO: 38081 - DNA, 20 bp, Artificial Sequence
  MKO10038081_A_Olfr692
  gRNA
gtatgggctagcactttcac

SEQ ID NO: 38082 - DNA, 20 bp, Artificial Sequence
  MKO10038082_A_Olfr692
  gRNA
cgggctttagttaccaagat

SEQ ID NO: 38083 - DNA, 20 bp, Artificial Sequence
  MKO10038083_A_Olfr693
  gRNA
gaacacacctaatggagccc

SEQ ID NO: 38084 - DNA, 20 bp, Artificial Sequence
  MKO10038084_A_Olfr693
  gRNA
agtaccccttctgcaaatcc

SEQ ID NO: 38085 - DNA, 20 bp, Artificial Sequence
  MKO10038085_A_Olfr693
  gRNA
gctcaaaatgccctcaaacg

SEQ ID NO: 38086 - DNA, 20 bp, Artificial Sequence
  MKO10038086_A_Olfr694
  gRNA
ggaagtctgcaactccaccc

SEQ ID NO: 38087 - DNA, 20 bp, Artificial Sequence
  MKO10038087_A_Olfr694
  gRNA
aaagtacagggctgtgatag

SEQ ID NO: 38088 - DNA, 20 bp, Artificial Sequence
  MKO10038088_A_Olfr694
  gRNA
ccaagatgaatccacttccc

SEQ ID NO: 38089 - DNA, 20 bp, Artificial Sequence
  MKO10038089_A_Olfr695
  gRNA
catgtggagtcgggcatcca

SEQ ID NO: 38090 - DNA, 20 bp, Artificial Sequence
  MKO10038090_A_Olfr695
  gRNA
gtcaggatggccgcaagagc

SEQ ID NO: 38091 - DNA, 20 bp, Artificial Sequence
  MKO10038091_A_Olfr695
  gRNA
accatcagttatcattccca

SEQ ID NO: 38092 - DNA, 20 bp, Artificial Sequence
  MKO10038092_A_Olfr697
  gRNA
cacctctagttataagcttg

SEQ ID NO: 38093 - DNA, 20 bp, Artificial Sequence
  MKO10038093_A_Olfr697
  gRNA
acatgcctacaacagtcata

SEQ ID NO: 38094 - DNA, 20 bp, Artificial Sequence
  MKO10038094_A_Olfr697
  gRNA
ctgggactaccttaaatgta

SEQ ID NO: 38095 - DNA, 20 bp, Artificial Sequence
  MKO10038095_A_Olfr698
  gRNA
gatagccacctcatggatct

SEQ ID NO: 38096 - DNA, 20 bp, Artificial Sequence
  MKO10038096_A_Olfr698
  gRNA
tgctatatcctagagcactg

SEQ ID NO: 38097 - DNA, 20 bp, Artificial Sequence
  MKO10038097_A_Olfr698
  gRNA
taatgagtcacaaagtctgc

SEQ ID NO: 38098 - DNA, 20 bp, Artificial Sequence
  MKO10038098_A_Olfr699
  gRNA
ggcacagccctctaatgata

SEQ ID NO: 38099 - DNA, 20 bp, Artificial Sequence
  MKO10038099_A_Olfr699
  gRNA
attgggaggtaccttcatct

SEQ ID NO: 38100 - DNA, 20 bp, Artificial Sequence
  MKO10038100_A_Olfr699
  gRNA
ctcttgtttgggactaagat

SEQ ID NO: 38101 - DNA, 20 bp, Artificial Sequence
  MKO10038101_A_Olfr69
  gRNA
catttgatgagcaatatcaa

SEQ ID NO: 38102 - DNA, 20 bp, Artificial Sequence
  MKO10038102_A_Olfr69
  gRNA
tggtagttcgaaagtactta

SEQ ID NO: 38103 - DNA, 20 bp, Artificial Sequence
  MKO10038103_A_Olfr69
  gRNA
tgatgttcacaggggtttct

SEQ ID NO: 38104 - DNA, 20 bp, Artificial Sequence
  MKO10038104_A_Olfr6
  gRNA
cggtgctctaccacctgcta

SEQ ID NO: 38105 - DNA, 20 bp, Artificial Sequence
  MKO10038105_A_Olfr6
  gRNA
atataaggatgacgatggca

SEQ ID NO: 38106 - DNA, 20 bp, Artificial Sequence
  MKO10038106_A_Olfr6
  gRNA
tcttcatgtatgtccgacct

SEQ ID NO: 38107 - DNA, 20 bp, Artificial Sequence
  MKO10038107_A_Olfr700
  gRNA
ggcttggagtgttcatatca

SEQ ID NO: 38108 - DNA, 20 bp, Artificial Sequence
  MKO10038108_A_Olfr700
  gRNA
atcttcacataatggagctt

SEQ ID NO: 38109 - DNA, 20 bp, Artificial Sequence
  MKO10038109_A_Olfr700
  gRNA
cagcaatgggatactgctcc

SEQ ID NO: 38110 - DNA, 20 bp, Artificial Sequence
  MKO10038110_A_Olfr701
  gRNA
gccagcacacgccactgttt

SEQ ID NO: 38111 - DNA, 20 bp, Artificial Sequence
  MKO10038111_A_Olfr701
  gRNA
tcctaaacagtggcgtgtgc

SEQ ID NO: 38112 - DNA, 20 bp, Artificial Sequence
  MKO10038112_A_Olfr701
  gRNA
ctagcatctcttagtgccct

SEQ ID NO: 38113 - DNA, 20 bp, Artificial Sequence
  MKO10038113_A_Olfr702
  gRNA
tacactgtgtatcccttatc

SEQ ID NO: 38114 - DNA, 20 bp, Artificial Sequence
  MKO10038114_A_Olfr702
  gRNA
tatgaagtcgagagtcaatt

SEQ ID NO: 38115 - DNA, 20 bp, Artificial Sequence
  MKO10038115_A_Olfr702
  gRNA
atattccagacccatagtag

SEQ ID NO: 38116 - DNA, 20 bp, Artificial Sequence
  MKO10038116_A_Olfr703
  gRNA
ataaaccatcaactcgtatg

SEQ ID NO: 38117 - DNA, 20 bp, Artificial Sequence
  MKO10038117_A_Olfr703
  gRNA
tacatccacatacgagttga

SEQ ID NO: 38118 - DNA, 20 bp, Artificial Sequence
  MKO10038118_A_Olfr703
  gRNA
gatacatgggcacgcggagc

SEQ ID NO: 38119 - DNA, 20 bp, Artificial Sequence
  MKO10038119_A_Olfr704
  gRNA
cacgtggagccgggtatcca

SEQ ID NO: 38120 - DNA, 20 bp, Artificial Sequence
  MKO10038120_A_Olfr704
  gRNA
cattgcttgtcaaagctaaa

SEQ ID NO: 38121 - DNA, 20 bp, Artificial Sequence
  MKO10038121_A_Olfr704
  gRNA
agatgcaagactccatgaag

SEQ ID NO: 38122 - DNA, 20 bp, Artificial Sequence
  MKO10038122_A_Olfr705
  gRNA
atgatcccttcctagagagt

SEQ ID NO: 38123 - DNA, 20 bp, Artificial Sequence
  MKO10038123_A_Olfr705
  gRNA
agtattcctattgcaaatcc

SEQ ID NO: 38124 - DNA, 20 bp, Artificial Sequence
  MKO10038124_A_Olfr705
  gRNA
taagttgaaatcagttccta

SEQ ID NO: 38125 - DNA, 20 bp, Artificial Sequence
  MKO10038125_A_Olfr706
  gRNA
tcatgagtcctacagtatgc

SEQ ID NO: 38126 - DNA, 20 bp, Artificial Sequence
  MKO10038126_A_Olfr706
  gRNA
actatcagccagcatactgt

SEQ ID NO: 38127 - DNA, 20 bp, Artificial Sequence
  MKO10038127_A_Olfr706
  gRNA
tgaatcctccttaaagagta

SEQ ID NO: 38128 - DNA, 20 bp, Artificial Sequence
  MKO10038128_A_Olfr707
  gRNA
ttcattcattatcttagagt

SEQ ID NO: 38129 - DNA, 20 bp, Artificial Sequence
  MKO10038129_A_Olfr707
  gRNA
cagcaatatttgcctacatg

SEQ ID NO: 38130 - DNA, 20 bp, Artificial Sequence
  MKO10038130_A_Olfr707
  gRNA
ctctaagataatgaatgaaa

SEQ ID NO: 38131 - DNA, 20 bp, Artificial Sequence
  MKO10038131_A_Olfr70
  gRNA
cacgttgctctatgcgatcg

SEQ ID NO: 38132 - DNA, 20 bp, Artificial Sequence
  MKO10038132_A_Olfr70
  gRNA
cgtgataatcttacccacgc

SEQ ID NO: 38133 - DNA, 20 bp, Artificial Sequence
  MKO10038133_A_Olfr70
  gRNA
gcacaaacagagcgatctcg

SEQ ID NO: 38134 - DNA, 20 bp, Artificial Sequence
  MKO10038134_A_Olfr710
  gRNA
ttactttatgcttgacgtac

SEQ ID NO: 38135 - DNA, 20 bp, Artificial Sequence
  MKO10038135_A_Olfr710
  gRNA
gtcgggagtcaacatgaatg

SEQ ID NO: 38136 - DNA, 20 bp, Artificial Sequence
  MKO10038136_A_Olfr710
  gRNA
cacaaatattccactagtcc

SEQ ID NO: 38137 - DNA, 20 bp, Artificial Sequence
  MKO10038137_A_Olfr711
  gRNA
ggtagacactatgtagacgt

SEQ ID NO: 38138 - DNA, 20 bp, Artificial Sequence
  MKO10038138_A_Olfr711
  gRNA
gctggatatgaacattactc

SEQ ID NO: 38139 - DNA, 20 bp, Artificial Sequence
  MKO10038139_A_Olfr711
  gRNA
tcggacgtacatgaaaatca

SEQ ID NO: 38140 - DNA, 20 bp, Artificial Sequence
  MKO10038140_A_Olfr713
  gRNA
ccagtttgacacgtgtctct

SEQ ID NO: 38141 - DNA, 20 bp, Artificial Sequence
  MKO10038141_A_Olfr713
  gRNA
acggtggctacagggaatcc

SEQ ID NO: 38142 - DNA, 20 bp, Artificial Sequence
  MKO10038142_A_Olfr713
  gRNA
ccaagagacacgtgtcaaac

SEQ ID NO: 38143 - DNA, 20 bp, Artificial Sequence
  MKO10038143_A_Olfr714
  gRNA
gttgaagccgatctccatga

SEQ ID NO: 38144 - DNA, 20 bp, Artificial Sequence
  MKO10038144_A_Olfr714
  gRNA
agagacaacgacgagatgtg

SEQ ID NO: 38145 - DNA, 20 bp, Artificial Sequence
  MKO10038145_A_Olfr714
  gRNA
gaagtgattcaccttgttgt

SEQ ID NO: 38146 - DNA, 20 bp, Artificial Sequence
  MKO10038146_A_Olfr715
  gRNA
taatcgctgatccataaaag

SEQ ID NO: 38147 - DNA, 20 bp, Artificial Sequence
  MKO10038147_A_Olfr715
  gRNA
attactctagcatcatgaca

SEQ ID NO: 38148 - DNA, 20 bp, Artificial Sequence
  MKO10038148_A_Olfr715
  gRNA
ggagaatcacaacccccatg

SEQ ID NO: 38149 - DNA, 20 bp, Artificial Sequence
  MKO10038149_A_Olfr716
  gRNA
gactatgttctgccctcgat

SEQ ID NO: 38150 - DNA, 20 bp, Artificial Sequence
  MKO10038150_A_Olfr716
  gRNA
gtttacattctgactgtact

SEQ ID NO: 38151 - DNA, 20 bp, Artificial Sequence
  MKO10038151_A_Olfr716
  gRNA
ccaacaactatgcctgcagt

SEQ ID NO: 38152 - DNA, 20 bp, Artificial Sequence
  MKO10038152_A_Olfr71
  gRNA
gaggaaagagtagccgctcg

SEQ ID NO: 38153 - DNA, 20 bp, Artificial Sequence
  MKO10038153_A_Olfr71
  gRNA
ctggctacccggccctcgag

SEQ ID NO: 38154 - DNA, 20 bp, Artificial Sequence
  MKO10038154_A_Olfr71
  gRNA
caacatgctcaccgccacga

SEQ ID NO: 38155 - DNA, 20 bp, Artificial Sequence
  MKO10038155_A_Olfr720
  gRNA
cataaccccatttgccaata

SEQ ID NO: 38156 - DNA, 20 bp, Artificial Sequence
  MKO10038156_A_Olfr720
  gRNA
agccccaccgaaccaagagc

SEQ ID NO: 38157 - DNA, 20 bp, Artificial Sequence
  MKO10038157_A_Olfr720
  gRNA
agcagaccctccgactcatg

SEQ ID NO: 38158 - DNA, 20 bp, Artificial Sequence
  MKO10038158_A_Olfr722
  gRNA
gatctatacacttcgcaacc

SEQ ID NO: 38159 - DNA, 20 bp, Artificial Sequence
  MKO10038159_A_Olfr722
  gRNA
tatagcgatataacgatcaa

SEQ ID NO: 38160 - DNA, 20 bp, Artificial Sequence
  MKO10038160_A_Olfr722
  gRNA
tatctatacccgccccttcc

SEQ ID NO: 38161 - DNA, 20 bp, Artificial Sequence
  MKO10038161_A_Olfr723
  gRNA
tgagtcacaagttgctgaac

SEQ ID NO: 38162 - DNA, 20 bp, Artificial Sequence
  MKO10038162_A_Olfr723
  gRNA
tctatgtgcagctgacttgt

SEQ ID NO: 38163 - DNA, 20 bp, Artificial Sequence
  MKO10038163_A_Olfr723
  gRNA
cagtggaaagacacatgtcc

SEQ ID NO: 38164 - DNA, 20 bp, Artificial Sequence
  MKO10038164_A_Olfr724
  gRNA
tctatctgcagctcacttgt

SEQ ID NO: 38165 - DNA, 20 bp, Artificial Sequence
  MKO10038165_A_Olfr724
  gRNA
tgagtcacaggttgctgaac

SEQ ID NO: 38166 - DNA, 20 bp, Artificial Sequence
  MKO10038166_A_Olfr724
  gRNA
cagtggaaagacacatgtct

SEQ ID NO: 38167 - DNA, 20 bp, Artificial Sequence
  MKO10038167_A_Olfr725
  gRNA
tcagtatatgaaacctaggc

SEQ ID NO: 38168 - DNA, 20 bp, Artificial Sequence
  MKO10038168_A_Olfr725
  gRNA
agttaacagtgaatgccaac

SEQ ID NO: 38169 - DNA, 20 bp, Artificial Sequence
  MKO10038169_A_Olfr725
  gRNA
catccatacaatgagccagt

SEQ ID NO: 38170 - DNA, 20 bp, Artificial Sequence
  MKO10038170_A_Olfr726
  gRNA
tttcaccaccagcaaattga

SEQ ID NO: 38171 - DNA, 20 bp, Artificial Sequence
  MKO10038171_A_Olfr726
  gRNA
gttgtatctagcaatactgc

SEQ ID NO: 38172 - DNA, 20 bp, Artificial Sequence
  MKO10038172_A_Olfr726
  gRNA
ttctgtgtccatcaatttgc

SEQ ID NO: 38173 - DNA, 20 bp, Artificial Sequence
  MKO10038173_A_Olfr727
  gRNA
atgccaactgactagttgta

SEQ ID NO: 38174 - DNA, 20 bp, Artificial Sequence
  MKO10038174_A_Olfr727
  gRNA
tcgctatctgaaacctggac

SEQ ID NO: 38175 - DNA, 20 bp, Artificial Sequence
  MKO10038175_A_Olfr727
  gRNA
catccatacaactagtcagt

SEQ ID NO: 38176 - DNA, 20 bp, Artificial Sequence
  MKO10038176_A_Olfr728
  gRNA
acccactagaggactgccgt

SEQ ID NO: 38177 - DNA, 20 bp, Artificial Sequence
  MKO10038177_A_Olfr728
  gRNA
tgccacaccgaagatgcttg

SEQ ID NO: 38178 - DNA, 20 bp, Artificial Sequence
  MKO10038178_A_Olfr728
  gRNA
gtccaacggcagtcctctag

SEQ ID NO: 38179 - DNA, 20 bp, Artificial Sequence
  MKO10038179_A_Olfr729
  gRNA
agcccaagagattactacca

SEQ ID NO: 38180 - DNA, 20 bp, Artificial Sequence
  MKO10038180_A_Olfr729
  gRNA
acatgtagtttggttcatga

SEQ ID NO: 38181 - DNA, 20 bp, Artificial Sequence
  MKO10038181_A_Olfr729
  gRNA
ggataacaccaattattcag

SEQ ID NO: 38182 - DNA, 20 bp, Artificial Sequence
  MKO10038182_A_Olfr730
  gRNA
cacctggggacttatgattg

SEQ ID NO: 38183 - DNA, 20 bp, Artificial Sequence
  MKO10038183_A_Olfr730
  gRNA
tgcctcaatcataagtcccc

SEQ ID NO: 38184 - DNA, 20 bp, Artificial Sequence
  MKO10038184_A_Olfr730
  gRNA
gagagtcagatatgacgatg

SEQ ID NO: 38185 - DNA, 20 bp, Artificial Sequence
  MKO10038185_A_Olfr731
  gRNA
agccttagatgatccaattg

SEQ ID NO: 38186 - DNA, 20 bp, Artificial Sequence
  MKO10038186_A_Olfr731
  gRNA
atcaggggccactcctcaat

SEQ ID NO: 38187 - DNA, 20 bp, Artificial Sequence
  MKO10038187_A_Olfr731
  gRNA
caagccaattggatcaccaa

SEQ ID NO: 38188 - DNA, 20 bp, Artificial Sequence
  MKO10038188_A_Olfr732
  gRNA
aaacgactttgtcagctgat

SEQ ID NO: 38189 - DNA, 20 bp, Artificial Sequence
  MKO10038189_A_Olfr732
  gRNA
gtcacatgacattcagcgct

SEQ ID NO: 38190 - DNA, 20 bp, Artificial Sequence
  MKO10038190_A_Olfr732
  gRNA
ccatgaaaaagttaatcatc

SEQ ID NO: 38191 - DNA, 20 bp, Artificial Sequence
  MKO10038191_A_Olfr733
  gRNA
tatttatacccttcgaaacc

SEQ ID NO: 38192 - DNA, 20 bp, Artificial Sequence
  MKO10038192_A_Olfr733
  gRNA
gtcacttgacattcaacgct

SEQ ID NO: 38193 - DNA, 20 bp, Artificial Sequence
  MKO10038193_A_Olfr733
  gRNA
atgacagtggagtaatacaa

SEQ ID NO: 38194 - DNA, 20 bp, Artificial Sequence
  MKO10038194_A_Olfr734
  gRNA
atgctaccatcatgaaccgc

SEQ ID NO: 38195 - DNA, 20 bp, Artificial Sequence
  MKO10038195_A_Olfr734
  gRNA
gtatcttagtggccctctcc

SEQ ID NO: 38196 - DNA, 20 bp, Artificial Sequence
  MKO10038196_A_Olfr734
  gRNA
atgtacgaagccccctgtcc

SEQ ID NO: 38197 - DNA, 20 bp, Artificial Sequence
  MKO10038197_A_Olfr735
  gRNA
tgaataaccacctacgactt

SEQ ID NO: 38198 - DNA, 20 bp, Artificial Sequence
  MKO10038198_A_Olfr735
  gRNA
aagagtatcaagcgacctag

SEQ ID NO: 38199 - DNA, 20 bp, Artificial Sequence
  MKO10038199_A_Olfr735
  gRNA
caaacaccaaccgaagtcgt

SEQ ID NO: 38200 - DNA, 20 bp, Artificial Sequence
  MKO10038200_A_Olfr736
  gRNA
ccctttgcttgtcctgatcc

SEQ ID NO: 38201 - DNA, 20 bp, Artificial Sequence
  MKO10038201_A_Olfr736
  gRNA
caattgtgtatgcagtgtac

SEQ ID NO: 38202 - DNA, 20 bp, Artificial Sequence
  MKO10038202_A_Olfr736
  gRNA
gtcatgaccactatgttctg

SEQ ID NO: 38203 - DNA, 20 bp, Artificial Sequence
  MKO10038203_A_Olfr738
  gRNA
ggtcttatgctctagtaatg

SEQ ID NO: 38204 - DNA, 20 bp, Artificial Sequence
  MKO10038204_A_Olfr738
  gRNA
aattaaagaatttctcacac

SEQ ID NO: 38205 - DNA, 20 bp, Artificial Sequence
  MKO10038205_A_Olfr738
  gRNA
cacagtcaagtgtgacccac

SEQ ID NO: 38206 - DNA, 20 bp, Artificial Sequence
  MKO10038206_A_Olfr739
  gRNA
agctccaacaacaccatcac

SEQ ID NO: 38207 - DNA, 20 bp, Artificial Sequence
  MKO10038207_A_Olfr739
  gRNA
gaacaggtgagggccaacag

SEQ ID NO: 38208 - DNA, 20 bp, Artificial Sequence
  MKO10038208_A_Olfr739
  gRNA
aggtgacataacagatttcc

SEQ ID NO: 38209 - DNA, 20 bp, Artificial Sequence
  MKO10038209_A_Olfr73
  gRNA
gcataccaccccccaagcat

SEQ ID NO: 38210 - DNA, 20 bp, Artificial Sequence
  MKO10038210_A_Olfr73
  gRNA
tattgggatcctatgcttgg

SEQ ID NO: 38211 - DNA, 20 bp, Artificial Sequence
  MKO10038211_A_Olfr73
  gRNA
tgtcagagcgtgaaagtgaa

SEQ ID NO: 38212 - DNA, 20 bp, Artificial Sequence
  MKO10038212_A_Olfr740
  gRNA
gaacaggtgagggccaatag

SEQ ID NO: 38213 - DNA, 20 bp, Artificial Sequence
  MKO10038213_A_Olfr740
  gRNA
gcatcatctttgcagtatgc

SEQ ID NO: 38214 - DNA, 20 bp, Artificial Sequence
  MKO10038214_A_Olfr740
  gRNA
tgatgcaagtgttgcccatg

SEQ ID NO: 38215 - DNA, 20 bp, Artificial Sequence
  MKO10038215_A_Olfr741
  gRNA
gacatatccaatctccatga

SEQ ID NO: 38216 - DNA, 20 bp, Artificial Sequence
  MKO10038216_A_Olfr741
  gRNA
tcttgggcttcgcctacccc

SEQ ID NO: 38217 - DNA, 20 bp, Artificial Sequence
  MKO10038217_A_Olfr741
  gRNA
caggagcatagacattataa

SEQ ID NO: 38218 - DNA, 20 bp, Artificial Sequence
  MKO10038218_A_Olfr742
  gRNA
gagtatgtaaacaatgaaga

SEQ ID NO: 38219 - DNA, 20 bp, Artificial Sequence
  MKO10038219_A_Olfr742
  gRNA
aattataatgtctatgctcc

SEQ ID NO: 38220 - DNA, 20 bp, Artificial Sequence
  MKO10038220_A_Olfr742
  gRNA
aggtgcccagtcatgagaga

SEQ ID NO: 38221 - DNA, 20 bp, Artificial Sequence
  MKO10038221_A_Olfr743
  gRNA
ccagcttcgtgtccagatga

SEQ ID NO: 38222 - DNA, 20 bp, Artificial Sequence
  MKO10038222_A_Olfr743
  gRNA
atgtatatgagcccatcatc

SEQ ID NO: 38223 - DNA, 20 bp, Artificial Sequence
  MKO10038223_A_Olfr743
  gRNA
cgttgcccatgaggatgagt

SEQ ID NO: 38224 - DNA, 20 bp, Artificial Sequence
  MKO10038224_A_Olfr744
  gRNA
aaaatctcccctaattgagc

SEQ ID NO: 38225 - DNA, 20 bp, Artificial Sequence
  MKO10038225_A_Olfr744
  gRNA
tagacccacagaacgacacc

SEQ ID NO: 38226 - DNA, 20 bp, Artificial Sequence
  MKO10038226_A_Olfr744
  gRNA
atcgataccttgctatctgc

SEQ ID NO: 38227 - DNA, 20 bp, Artificial Sequence
  MKO10038227_A_Olfr745
  gRNA
gtaatggtcgacagatagcc

SEQ ID NO: 38228 - DNA, 20 bp, Artificial Sequence
  MKO10038228_A_Olfr745
  gRNA
ttagttcgaccagcaccaga

SEQ ID NO: 38229 - DNA, 20 bp, Artificial Sequence
  MKO10038229_A_Olfr745
  gRNA
agctctgagtactagagtat

SEQ ID NO: 38230 - DNA, 20 bp, Artificial Sequence
  MKO10038230_A_Olfr746
  gRNA
gtcaactgagttgccagatg

SEQ ID NO: 38231 - DNA, 20 bp, Artificial Sequence
  MKO10038231_A_Olfr746
  gRNA
gctgacatacatcaccatta

SEQ ID NO: 38232 - DNA, 20 bp, Artificial Sequence
  MKO10038232_A_Olfr746
  gRNA
gtacaggacagtgctattag

SEQ ID NO: 38233 - DNA, 20 bp, Artificial Sequence
  MKO10038233_A_Olfr747
  gRNA
agcctcctagtcatgatagt

SEQ ID NO: 38234 - DNA, 20 bp, Artificial Sequence
  MKO10038234_A_Olfr747
  gRNA
atgtacatgagtcctacata

SEQ ID NO: 38235 - DNA, 20 bp, Artificial Sequence
  MKO10038235_A_Olfr747
  gRNA
aaagttgaaatgccatatgt

SEQ ID NO: 38236 - DNA, 20 bp, Artificial Sequence
  MKO10038236_A_Olfr748
  gRNA
gtacaggacaggaccattag

SEQ ID NO: 38237 - DNA, 20 bp, Artificial Sequence
  MKO10038237_A_Olfr748
  gRNA
ttcttcagatggacgacaaa

SEQ ID NO: 38238 - DNA, 20 bp, Artificial Sequence
  MKO10038238_A_Olfr748
  gRNA
agtcacatacatcaccatta

SEQ ID NO: 38239 - DNA, 20 bp, Artificial Sequence
  MKO10038239_A_Olfr749
  gRNA
actcttctatggtacagtaa

SEQ ID NO: 38240 - DNA, 20 bp, Artificial Sequence
  MKO10038240_A_Olfr749
  gRNA
atgtatgtgagtcctacata

SEQ ID NO: 38241 - DNA, 20 bp, Artificial Sequence
  MKO10038241_A_Olfr749
  gRNA
aaaattggaatgccatatgt

SEQ ID NO: 38242 - DNA, 20 bp, Artificial Sequence
  MKO10038242_A_Olfr74
  gRNA
gaaagccttacgacgcccac

SEQ ID NO: 38243 - DNA, 20 bp, Artificial Sequence
  MKO10038243_A_Olfr74
  gRNA
tggtgggatcctacgcatgg

SEQ ID NO: 38244 - DNA, 20 bp, Artificial Sequence
  MKO10038244_A_Olfr74
  gRNA
ttgactgatgagagtatcag

SEQ ID NO: 38245 - DNA, 20 bp, Artificial Sequence
  MKO10038245_A_Olfr750
  gRNA
actccgtagtgccgacactc

SEQ ID NO: 38246 - DNA, 20 bp, Artificial Sequence
  MKO10038246_A_Olfr750
  gRNA
gccataggacgcaccagtaa

SEQ ID NO: 38247 - DNA, 20 bp, Artificial Sequence
  MKO10038247_A_Olfr750
  gRNA
aaatggtgtgccgtctcgag

SEQ ID NO: 38248 - DNA, 20 bp, Artificial Sequence
  MKO10038248_A_Olfr761
  gRNA
tgtcagagaaccccacgagg

SEQ ID NO: 38249 - DNA, 20 bp, Artificial Sequence
  MKO10038249_A_Olfr761
  gRNA
ttgttaagtgaagaattagt

SEQ ID NO: 38250 - DNA, 20 bp, Artificial Sequence
  MKO10038250_A_Olfr761
  gRNA
aatggcctttgcctgcttta

SEQ ID NO: 38251 - DNA, 20 bp, Artificial Sequence
  MKO10038251_A_Olfr763
  gRNA
aatttggtcagtgtccccaa

SEQ ID NO: 38252 - DNA, 20 bp, Artificial Sequence
  MKO10038252_A_Olfr763
  gRNA
tgcccccttcttattgattg

SEQ ID NO: 38253 - DNA, 20 bp, Artificial Sequence
  MKO10038253_A_Olfr763
  gRNA
ccaccacagagaagtgacgc

SEQ ID NO: 38254 - DNA, 20 bp, Artificial Sequence
  MKO10038254_A_Olfr765
  gRNA
tgaaaaagttgtctttctcg

SEQ ID NO: 38255 - DNA, 20 bp, Artificial Sequence
  MKO10038255_A_Olfr765
  gRNA
tcacaaacatcttcatcccc

SEQ ID NO: 38256 - DNA, 20 bp, Artificial Sequence
  MKO10038256_A_Olfr765
  gRNA
gagcaactgaagtaatgaaa

SEQ ID NO: 38257 - DNA, 20 bp, Artificial Sequence
  MKO10038257_A_Olfr767
  gRNA
tcacgaacatcttcattccc

SEQ ID NO: 38258 - DNA, 20 bp, Artificial Sequence
  MKO10038258_A_Olfr767
  gRNA
gagcaactgaagtaatgaga

SEQ ID NO: 38259 - DNA, 20 bp, Artificial Sequence
  MKO10038259_A_Olfr767
  gRNA
ttctctgctcttggctaggt

SEQ ID NO: 38260 - DNA, 20 bp, Artificial Sequence
  MKO10038260_A_Olfr768
  gRNA
accaattacgctcaataagt

SEQ ID NO: 38261 - DNA, 20 bp, Artificial Sequence
  MKO10038261_A_Olfr768
  gRNA
acctacttattgagcgtaat

SEQ ID NO: 38262 - DNA, 20 bp, Artificial Sequence
  MKO10038262_A_Olfr768
  gRNA
gcctctatcataaagagcta

SEQ ID NO: 38263 - DNA, 20 bp, Artificial Sequence
  MKO10038263_A_Olfr769
  gRNA
acctatatattgagtgtgac

SEQ ID NO: 38264 - DNA, 20 bp, Artificial Sequence
  MKO10038264_A_Olfr769
  gRNA
ccctgtcacactcaatatat

SEQ ID NO: 38265 - DNA, 20 bp, Artificial Sequence
  MKO10038265_A_Olfr769
  gRNA
ctcctgtggccatcatgtac

SEQ ID NO: 38266 - DNA, 20 bp, Artificial Sequence
  MKO10038266_A_Olfr76
  gRNA
tgacatttggcccgcaaaag

SEQ ID NO: 38267 - DNA, 20 bp, Artificial Sequence
  MKO10038267_A_Olfr76
  gRNA
cacctactgtgatcactatg

SEQ ID NO: 38268 - DNA, 20 bp, Artificial Sequence
  MKO10038268_A_Olfr76
  gRNA
agtgtctgtcttctattcgc

SEQ ID NO: 38269 - DNA, 20 bp, Artificial Sequence
  MKO10038269_A_Olfr770
  gRNA
gctagattatacaagtatct

SEQ ID NO: 38270 - DNA, 20 bp, Artificial Sequence
  MKO10038270_A_Olfr770
  gRNA
gtggatcctctgttagtccc

SEQ ID NO: 38271 - DNA, 20 bp, Artificial Sequence
  MKO10038271_A_Olfr770
  gRNA
agtaacgacattcattctcc

SEQ ID NO: 38272 - DNA, 20 bp, Artificial Sequence
  MKO10038272_A_Olfr771
  gRNA
ccaccgattcctttgccgaa

SEQ ID NO: 38273 - DNA, 20 bp, Artificial Sequence
  MKO10038273_A_Olfr771
  gRNA
gcctacatgctcagcataac

SEQ ID NO: 38274 - DNA, 20 bp, Artificial Sequence
  MKO10038274_A_Olfr771
  gRNA
ggtcttgatgatatgtacgt

SEQ ID NO: 38275 - DNA, 20 bp, Artificial Sequence
  MKO10038275_A_Olfr772
  gRNA
aactgtcacacccttgttga

SEQ ID NO: 38276 - DNA, 20 bp, Artificial Sequence
  MKO10038276_A_Olfr772
  gRNA
gataaaatgatcaatgatat

SEQ ID NO: 38277 - DNA, 20 bp, Artificial Sequence
  MKO10038277_A_Olfr772
  gRNA
ctgttcttcccacatgattg

SEQ ID NO: 38278 - DNA, 20 bp, Artificial Sequence
  MKO10038278_A_Olfr773
  gRNA
aatcatcacacccttgttga

SEQ ID NO: 38279 - DNA, 20 bp, Artificial Sequence
  MKO10038279_A_Olfr773
  gRNA
gacaaaatgatcaataatat

SEQ ID NO: 38280 - DNA, 20 bp, Artificial Sequence
  MKO10038280_A_Olfr773
  gRNA
ctgttcttcccatatgattg

SEQ ID NO: 38281 - DNA, 20 bp, Artificial Sequence
  MKO10038281_A_Olfr774
  gRNA
actgagagtctagcaatgtg

SEQ ID NO: 38282 - DNA, 20 bp, Artificial Sequence
  MKO10038282_A_Olfr774
  gRNA
taaaaaccatgtatctgagc

SEQ ID NO: 38283 - DNA, 20 bp, Artificial Sequence
  MKO10038283_A_Olfr774
  gRNA
tatcaccgagtttctgctct

SEQ ID NO: 38284 - DNA, 20 bp, Artificial Sequence
  MKO10038284_A_Olfr775
  gRNA
ttgagtcaaacagttgttat

SEQ ID NO: 38285 - DNA, 20 bp, Artificial Sequence
  MKO10038285_A_Olfr775
  gRNA
cagaaatcctatcagccatg

SEQ ID NO: 38286 - DNA, 20 bp, Artificial Sequence
  MKO10038286_A_Olfr775
  gRNA
agctgtcttgctcagatacg

SEQ ID NO: 38287 - DNA, 20 bp, Artificial Sequence
  MKO10038287_A_Olfr776
  gRNA
caaactcagtaaccatagag

SEQ ID NO: 38288 - DNA, 20 bp, Artificial Sequence
  MKO10038288_A_Olfr776
  gRNA
tacatagcgatcgtaagaca

SEQ ID NO: 38289 - DNA, 20 bp, Artificial Sequence
  MKO10038289_A_Olfr776
  gRNA
tttattaatcaagtccttga

SEQ ID NO: 38290 - DNA, 20 bp, Artificial Sequence
  MKO10038290_A_Olfr777
  gRNA
agctatatgctgagtatgac

SEQ ID NO: 38291 - DNA, 20 bp, Artificial Sequence
  MKO10038291_A_Olfr777
  gRNA
gcagatagtgatagtttctg

SEQ ID NO: 38292 - DNA, 20 bp, Artificial Sequence
  MKO10038292_A_Olfr777
  gRNA
caagacttatcctcagttgc

SEQ ID NO: 38293 - DNA, 20 bp, Artificial Sequence
  MKO10038293_A_Olfr77
  gRNA
atcatgaaccctcgaatctg

SEQ ID NO: 38294 - DNA, 20 bp, Artificial Sequence
  MKO10038294_A_Olfr77
  gRNA
atagtacatttcctccttat

SEQ ID NO: 38295 - DNA, 20 bp, Artificial Sequence
  MKO10038295_A_Olfr77
  gRNA
ctctgtgtaggatatcttca

SEQ ID NO: 38296 - DNA, 20 bp, Artificial Sequence
  MKO10038296_A_Olfr780
  gRNA
agttaccagttacactcaat

SEQ ID NO: 38297 - DNA, 20 bp, Artificial Sequence
  MKO10038297_A_Olfr780
  gRNA
catgaatgctgccatccaac

SEQ ID NO: 38298 - DNA, 20 bp, Artificial Sequence
  MKO10038298_A_Olfr780
  gRNA
tatcattaccctcactacag

SEQ ID NO: 38299 - DNA, 20 bp, Artificial Sequence
  MKO10038299_A_Olfr781
  gRNA
attgatagctacatcgtcct

SEQ ID NO: 38300 - DNA, 20 bp, Artificial Sequence
  MKO10038300_A_Olfr781
  gRNA
cccaaacctagaccaattgg

SEQ ID NO: 38301 - DNA, 20 bp, Artificial Sequence
  MKO10038301_A_Olfr781
  gRNA
gatcagtgctgctacccaac

SEQ ID NO: 38302 - DNA, 20 bp, Artificial Sequence
  MKO10038302_A_Olfr782
  gRNA
tgacccacaactgcaaattg

SEQ ID NO: 38303 - DNA, 20 bp, Artificial Sequence
  MKO10038303_A_Olfr782
  gRNA
aaaaccacaatttgcagttg

SEQ ID NO: 38304 - DNA, 20 bp, Artificial Sequence
  MKO10038304_A_Olfr782
  gRNA
tgtatactaaaccatctgca

SEQ ID NO: 38305 - DNA, 20 bp, Artificial Sequence
  MKO10038305_A_Olfr784
  gRNA
agaatactcattaagaaccg

SEQ ID NO: 38306 - DNA, 20 bp, Artificial Sequence
  MKO10038306_A_Olfr784
  gRNA
catcttcccccctttactct

SEQ ID NO: 38307 - DNA, 20 bp, Artificial Sequence
  MKO10038307_A_Olfr784
  gRNA
ttctcagctcttgggttact

SEQ ID NO: 38308 - DNA, 20 bp, Artificial Sequence
  MKO10038308_A_Olfr786
  gRNA
ccggcaagcgtttatgaaca

SEQ ID NO: 38309 - DNA, 20 bp, Artificial Sequence
  MKO10038309_A_Olfr786
  gRNA
ccatgttcataaacgcttgc

SEQ ID NO: 38310 - DNA, 20 bp, Artificial Sequence
  MKO10038310_A_Olfr786
  gRNA
gatgtaccggtcataggaca

SEQ ID NO: 38311 - DNA, 20 bp, Artificial Sequence
  MKO10038311_A_Olfr787
  gRNA
atcagacgatccagaagtcc

SEQ ID NO: 38312 - DNA, 20 bp, Artificial Sequence
  MKO10038312_A_Olfr787
  gRNA
tttctcaacgagtaaatgaa

SEQ ID NO: 38313 - DNA, 20 bp, Artificial Sequence
  MKO10038313_A_Olfr787
  gRNA
gattactgagtttgtgctcc

SEQ ID NO: 38314 - DNA, 20 bp, Artificial Sequence
  MKO10038314_A_Olfr788
  gRNA
attgagaattgccacgcctt

SEQ ID NO: 38315 - DNA, 20 bp, Artificial Sequence
  MKO10038315_A_Olfr788
  gRNA
tagaagcacagtaatcctgc

SEQ ID NO: 38316 - DNA, 20 bp, Artificial Sequence
  MKO10038316_A_Olfr788
  gRNA
aggtcaaaacaatgatagtc

SEQ ID NO: 38317 - DNA, 20 bp, Artificial Sequence
  MKO10038317_A_Olfr78
  gRNA
gcagaaccgttcgtatgatc

SEQ ID NO: 38318 - DNA, 20 bp, Artificial Sequence
  MKO10038318_A_Olfr78
  gRNA
gccagtcgcttgatcagtag

SEQ ID NO: 38319 - DNA, 20 bp, Artificial Sequence
  MKO10038319_A_Olfr78
  gRNA
ctgtcagtggtgcaccgttt

SEQ ID NO: 38320 - DNA, 20 bp, Artificial Sequence
  MKO10038320_A_Olfr790
  gRNA
acctacatgctaagtgtgac

SEQ ID NO: 38321 - DNA, 20 bp, Artificial Sequence
  MKO10038321_A_Olfr790
  gRNA
tgatccactgtggcagattg

SEQ ID NO: 38322 - DNA, 20 bp, Artificial Sequence
  MKO10038322_A_Olfr790
  gRNA
tgtccgaataatatttgtgt

SEQ ID NO: 38323 - DNA, 20 bp, Artificial Sequence
  MKO10038323_A_Olfr791
  gRNA
gatggggatccaccaacgta

SEQ ID NO: 38324 - DNA, 20 bp, Artificial Sequence
  MKO10038324_A_Olfr791
  gRNA
gaggtggagtgataatcatt

SEQ ID NO: 38325 - DNA, 20 bp, Artificial Sequence
  MKO10038325_A_Olfr791
  gRNA
tcttactagtcatcacatgt

SEQ ID NO: 38326 - DNA, 20 bp, Artificial Sequence
  MKO10038326_A_Olfr792
  gRNA
caatgagggttaatactgcc

SEQ ID NO: 38327 - DNA, 20 bp, Artificial Sequence
  MKO10038327_A_Olfr792
  gRNA
catctcctatagctcttgcc

SEQ ID NO: 38328 - DNA, 20 bp, Artificial Sequence
  MKO10038328_A_Olfr792
  gRNA
ttaccacagtttccattcct

SEQ ID NO: 38329 - DNA, 20 bp, Artificial Sequence
  MKO10038329_A_Olfr794
  gRNA
cttgcactatatgaccatca

SEQ ID NO: 38330 - DNA, 20 bp, Artificial Sequence
  MKO10038330_A_Olfr794
  gRNA
ccccagttgatatactgtac

SEQ ID NO: 38331 - DNA, 20 bp, Artificial Sequence
  MKO10038331_A_Olfr794
  gRNA
attgtagtttccatcatgta

SEQ ID NO: 38332 - DNA, 20 bp, Artificial Sequence
  MKO10038332_A_Olfr796
  gRNA
ttctagccagagccgccgca

SEQ ID NO: 38333 - DNA, 20 bp, Artificial Sequence
  MKO10038333_A_Olfr796
  gRNA
agaagaccttgcggcggctc

SEQ ID NO: 38334 - DNA, 20 bp, Artificial Sequence
  MKO10038334_A_Olfr796
  gRNA
actctaccctaatgaaccac

SEQ ID NO: 38335 - DNA, 20 bp, Artificial Sequence
  MKO10038335_A_Olfr798
  gRNA
catctcctataactcctgca

SEQ ID NO: 38336 - DNA, 20 bp, Artificial Sequence
  MKO10038336_A_Olfr798
  gRNA
ccatgagagtaaatactgcc

SEQ ID NO: 38337 - DNA, 20 bp, Artificial Sequence
  MKO10038337_A_Olfr798
  gRNA
ggtgttcttcttcatactct

SEQ ID NO: 38338 - DNA, 20 bp, Artificial Sequence
  MKO10038338_A_Olfr799
  gRNA
cccaaacctaggctaattgg

SEQ ID NO: 38339 - DNA, 20 bp, Artificial Sequence
  MKO10038339_A_Olfr799
  gRNA
ttgactgatacaagcagcat

SEQ ID NO: 38340 - DNA, 20 bp, Artificial Sequence
  MKO10038340_A_Olfr799
  gRNA
gttctcccaccaattagcct

SEQ ID NO: 38341 - DNA, 20 bp, Artificial Sequence
  MKO10038341_A_Olfr800
  gRNA
agctacgtgctgagtatgac

SEQ ID NO: 38342 - DNA, 20 bp, Artificial Sequence
  MKO10038342_A_Olfr800
  gRNA
caagacttatcctctgttgc

SEQ ID NO: 38343 - DNA, 20 bp, Artificial Sequence
  MKO10038343_A_Olfr800
  gRNA
cagtaggatgaatgttgtta

SEQ ID NO: 38344 - DNA, 20 bp, Artificial Sequence
  MKO10038344_A_Olfr801
  gRNA
catcttaccccctttagtgt

SEQ ID NO: 38345 - DNA, 20 bp, Artificial Sequence
  MKO10038345_A_Olfr801
  gRNA
caacagaatgtgtcacctac

SEQ ID NO: 38346 - DNA, 20 bp, Artificial Sequence
  MKO10038346_A_Olfr801
  gRNA
atttaaagctaccctctcct

SEQ ID NO: 38347 - DNA, 20 bp, Artificial Sequence
  MKO10038347_A_Olfr802
  gRNA
caatgctggtcttcgcctcc

SEQ ID NO: 38348 - DNA, 20 bp, Artificial Sequence
  MKO10038348_A_Olfr802
  gRNA
taagaacttgggtatagtga

SEQ ID NO: 38349 - DNA, 20 bp, Artificial Sequence
  MKO10038349_A_Olfr802
  gRNA
cttctacagcttgattattg

SEQ ID NO: 38350 - DNA, 20 bp, Artificial Sequence
  MKO10038350_A_Olfr803
  gRNA
gctgagaatagctactgttt

SEQ ID NO: 38351 - DNA, 20 bp, Artificial Sequence
  MKO10038351_A_Olfr803
  gRNA
acttacatagtaagcatcac

SEQ ID NO: 38352 - DNA, 20 bp, Artificial Sequence
  MKO10038352_A_Olfr803
  gRNA
catagaaaccaatcacttct

SEQ ID NO: 38353 - DNA, 20 bp, Artificial Sequence
  MKO10038353_A_Olfr804
  gRNA
tctccgtaatttctcctatc

SEQ ID NO: 38354 - DNA, 20 bp, Artificial Sequence
  MKO10038354_A_Olfr804
  gRNA
tctcaattacatgatgagct

SEQ ID NO: 38355 - DNA, 20 bp, Artificial Sequence
  MKO10038355_A_Olfr804
  gRNA
tgacccacagttgcaaattg

SEQ ID NO: 38356 - DNA, 20 bp, Artificial Sequence
  MKO10038356_A_Olfr805
  gRNA
ttgagttaaacaagatccat

SEQ ID NO: 38357 - DNA, 20 bp, Artificial Sequence
  MKO10038357_A_Olfr805
  gRNA
caagaagtgatctatcagtt

SEQ ID NO: 38358 - DNA, 20 bp, Artificial Sequence
  MKO10038358_A_Olfr805
  gRNA
ggataaaaaccctgtcaccc

SEQ ID NO: 38359 - DNA, 20 bp, Artificial Sequence
  MKO10038359_A_Olfr806
  gRNA
caagaagtgatctacagttt

SEQ ID NO: 38360 - DNA, 20 bp, Artificial Sequence
  MKO10038360_A_Olfr806
  gRNA
tagcaaagtgtgccacatac

SEQ ID NO: 38361 - DNA, 20 bp, Artificial Sequence
  MKO10038361_A_Olfr806
  gRNA
ggataaaaaccctgtcatcc

SEQ ID NO: 38362 - DNA, 20 bp, Artificial Sequence
  MKO10038362_A_Olfr807
  gRNA
catgaaccttgtatcattgc

SEQ ID NO: 38363 - DNA, 20 bp, Artificial Sequence
  MKO10038363_A_Olfr807
  gRNA
gcaagtcaaagaagccctaa

SEQ ID NO: 38364 - DNA, 20 bp, Artificial Sequence
  MKO10038364_A_Olfr807
  gRNA
ataatgaaggggtctacaaa

SEQ ID NO: 38365 - DNA, 20 bp, Artificial Sequence
  MKO10038365_A_Olfr808
  gRNA
tacaaagattctcgagctga

SEQ ID NO: 38366 - DNA, 20 bp, Artificial Sequence
  MKO10038366_A_Olfr808
  gRNA
tttctgatcagcatcattac

SEQ ID NO: 38367 - DNA, 20 bp, Artificial Sequence
  MKO10038367_A_Olfr808
  gRNA
attcagcataggagctacag

SEQ ID NO: 38368 - DNA, 20 bp, Artificial Sequence
  MKO10038368_A_Olfr809
  gRNA
gaaatctagatctaagccca

SEQ ID NO: 38369 - DNA, 20 bp, Artificial Sequence
  MKO10038369_A_Olfr809
  gRNA
gagaattatcagcatcagcg

SEQ ID NO: 38370 - DNA, 20 bp, Artificial Sequence
  MKO10038370_A_Olfr809
  gRNA
cagaatagttctgagaatac

SEQ ID NO: 38371 - DNA, 20 bp, Artificial Sequence
  MKO10038371_A_Olfr810
  gRNA
agattcaagcctaacagcag

SEQ ID NO: 38372 - DNA, 20 bp, Artificial Sequence
  MKO10038372_A_Olfr810
  gRNA
ggccatcattacactcaccc

SEQ ID NO: 38373 - DNA, 20 bp, Artificial Sequence
  MKO10038373_A_Olfr810
  gRNA
agatgcagctgccatatgaa

SEQ ID NO: 38374 - DNA, 20 bp, Artificial Sequence
  MKO10038374_A_Olfr811
  gRNA
ttgagtcccaagagcaaacc

SEQ ID NO: 38375 - DNA, 20 bp, Artificial Sequence
  MKO10038375_A_Olfr811
  gRNA
tgatcatgtagttccccatg

SEQ ID NO: 38376 - DNA, 20 bp, Artificial Sequence
  MKO10038376_A_Olfr811
  gRNA
aacaaccatgtgggaggtac

SEQ ID NO: 38377 - DNA, 20 bp, Artificial Sequence
  MKO10038377_A_Olfr812
  gRNA
gtttagcaagggagccacgg

SEQ ID NO: 38378 - DNA, 20 bp, Artificial Sequence
  MKO10038378_A_Olfr812
  gRNA
tgaactctaactctcctgac

SEQ ID NO: 38379 - DNA, 20 bp, Artificial Sequence
  MKO10038379_A_Olfr812
  gRNA
tcttgaggtggggatccaac

SEQ ID NO: 38380 - DNA, 20 bp, Artificial Sequence
  MKO10038380_A_Olfr813
  gRNA
tataaagctcatgagctcca

SEQ ID NO: 38381 - DNA, 20 bp, Artificial Sequence
  MKO10038381_A_Olfr813
  gRNA
gaaatctagctctaaaccca

SEQ ID NO: 38382 - DNA, 20 bp, Artificial Sequence
  MKO10038382_A_Olfr813
  gRNA
agtgaagtggtcaataatgt

SEQ ID NO: 38383 - DNA, 20 bp, Artificial Sequence
  MKO10038383_A_Olfr814
  gRNA
cacaagtttactagaagtga

SEQ ID NO: 38384 - DNA, 20 bp, Artificial Sequence
  MKO10038384_A_Olfr814
  gRNA
tgacaatgtgagcataagaa

SEQ ID NO: 38385 - DNA, 20 bp, Artificial Sequence
  MKO10038385_A_Olfr814
  gRNA
ttgacaaaaacagccattat

SEQ ID NO: 38386 - DNA, 20 bp, Artificial Sequence
  MKO10038386_A_Olfr815
  gRNA
cacaaatttactagacctga

SEQ ID NO: 38387 - DNA, 20 bp, Artificial Sequence
  MKO10038387_A_Olfr815
  gRNA
gagctaagatgaaagccatc

SEQ ID NO: 38388 - DNA, 20 bp, Artificial Sequence
  MKO10038388_A_Olfr815
  gRNA
tgtttgagcaagagagctgt

SEQ ID NO: 38389 - DNA, 20 bp, Artificial Sequence
  MKO10038389_A_Olfr816
  gRNA
aaattccttcaaccgaacag

SEQ ID NO: 38390 - DNA, 20 bp, Artificial Sequence
  MKO10038390_A_Olfr816
  gRNA
acctatctgcttagcgtcac

SEQ ID NO: 38391 - DNA, 20 bp, Artificial Sequence
  MKO10038391_A_Olfr816
  gRNA
tccagtgacgctaagcagat

SEQ ID NO: 38392 - DNA, 20 bp, Artificial Sequence
  MKO10038392_A_Olfr818
  gRNA
ctcctaaaagaatgcttgtg

SEQ ID NO: 38393 - DNA, 20 bp, Artificial Sequence
  MKO10038393_A_Olfr818
  gRNA
cgaacactacctccagagac

SEQ ID NO: 38394 - DNA, 20 bp, Artificial Sequence
  MKO10038394_A_Olfr818
  gRNA
gtatgttaaaacctcagcca

SEQ ID NO: 38395 - DNA, 20 bp, Artificial Sequence
  MKO10038395_A_Olfr819
  gRNA
tcaagaatgtcagaataatg

SEQ ID NO: 38396 - DNA, 20 bp, Artificial Sequence
  MKO10038396_A_Olfr819
  gRNA
atccgcagagtgtaatgtag

SEQ ID NO: 38397 - DNA, 20 bp, Artificial Sequence
  MKO10038397_A_Olfr819
  gRNA
taaatatcacaatttcattc

SEQ ID NO: 38398 - DNA, 20 bp, Artificial Sequence
  MKO10038398_A_Olfr820
  gRNA
gtttaacagaggtgcaacag

SEQ ID NO: 38399 - DNA, 20 bp, Artificial Sequence
  MKO10038399_A_Olfr820
  gRNA
aaaattcggttgctcccaga

SEQ ID NO: 38400 - DNA, 20 bp, Artificial Sequence
  MKO10038400_A_Olfr820
  gRNA
cccaagatgctaatcaatat

SEQ ID NO: 38401 - DNA, 20 bp, Artificial Sequence
  MKO10038401_A_Olfr821
  gRNA
tgaatactgtcaccgttgtg

SEQ ID NO: 38402 - DNA, 20 bp, Artificial Sequence
  MKO10038402_A_Olfr821
  gRNA
agatgatctacaactgcaag

SEQ ID NO: 38403 - DNA, 20 bp, Artificial Sequence
  MKO10038403_A_Olfr821
  gRNA
tggctgcacagaaatctagc

SEQ ID NO: 38404 - DNA, 20 bp, Artificial Sequence
  MKO10038404_A_Olfr822
  gRNA
tgaaaattgtcacccttgta

SEQ ID NO: 38405 - DNA, 20 bp, Artificial Sequence
  MKO10038405_A_Olfr822
  gRNA
atctttccaccactagtgtt

SEQ ID NO: 38406 - DNA, 20 bp, Artificial Sequence
  MKO10038406_A_Olfr822
  gRNA
agattcaagcctaacactag

SEQ ID NO: 38407 - DNA, 20 bp, Artificial Sequence
  MKO10038407_A_Olfr823
  gRNA
taatgacagttaacatgctg

SEQ ID NO: 38408 - DNA, 20 bp, Artificial Sequence
  MKO10038408_A_Olfr823
  gRNA
gaaactgaaagtcagtgcca

SEQ ID NO: 38409 - DNA, 20 bp, Artificial Sequence
  MKO10038409_A_Olfr823
  gRNA
cattgctgagaaaaataccc

SEQ ID NO: 38410 - DNA, 20 bp, Artificial Sequence
  MKO10038410_A_Olfr824
  gRNA
gaaaatagtagctagagttt

SEQ ID NO: 38411 - DNA, 20 bp, Artificial Sequence
  MKO10038411_A_Olfr824
  gRNA
taatgacagttagcatgctg

SEQ ID NO: 38412 - DNA, 20 bp, Artificial Sequence
  MKO10038412_A_Olfr824
  gRNA
cattgctgagaaaaatatcc

SEQ ID NO: 38413 - DNA, 20 bp, Artificial Sequence
  MKO10038413_A_Olfr825
  gRNA
acagcacactcacgacaccc

SEQ ID NO: 38414 - DNA, 20 bp, Artificial Sequence
  MKO10038414_A_Olfr825
  gRNA
gccgactatcacagtaaaag

SEQ ID NO: 38415 - DNA, 20 bp, Artificial Sequence
  MKO10038415_A_Olfr825
  gRNA
acaatgatgactgtgatagt

SEQ ID NO: 38416 - DNA, 20 bp, Artificial Sequence
  MKO10038416_A_Olfr826
  gRNA
ttacaagataatctctgaac

SEQ ID NO: 38417 - DNA, 20 bp, Artificial Sequence
  MKO10038417_A_Olfr826
  gRNA
acagcacactcacaacaccc

SEQ ID NO: 38418 - DNA, 20 bp, Artificial Sequence
  MKO10038418_A_Olfr826
  gRNA
aatgatgctggataatgaaa

SEQ ID NO: 38419 - DNA, 20 bp, Artificial Sequence
  MKO10038419_A_Olfr827
  gRNA
aggtacaataaccgtggagt

SEQ ID NO: 38420 - DNA, 20 bp, Artificial Sequence
  MKO10038420_A_Olfr827
  gRNA
tttacagcgttcgaatgtca

SEQ ID NO: 38421 - DNA, 20 bp, Artificial Sequence
  MKO10038421_A_Olfr827
  gRNA
ttgacattcgaacgctgtaa

SEQ ID NO: 38422 - DNA, 20 bp, Artificial Sequence
  MKO10038422_A_Olfr828
  gRNA
catgtacttgatcaccatct

SEQ ID NO: 38423 - DNA, 20 bp, Artificial Sequence
  MKO10038423_A_Olfr828
  gRNA
tcatgatcgttgtgtagttc

SEQ ID NO: 38424 - DNA, 20 bp, Artificial Sequence
  MKO10038424_A_Olfr828
  gRNA
taatagaattagcagaccac

SEQ ID NO: 38425 - DNA, 20 bp, Artificial Sequence
  MKO10038425_A_Olfr829
  gRNA
tgaatcctgacacaaccgtt

SEQ ID NO: 38426 - DNA, 20 bp, Artificial Sequence
  MKO10038426_A_Olfr829
  gRNA
ataccattagaccattgacc

SEQ ID NO: 38427 - DNA, 20 bp, Artificial Sequence
  MKO10038427_A_Olfr829
  gRNA
tgccctggtcaatggtctaa

SEQ ID NO: 38428 - DNA, 20 bp, Artificial Sequence
  MKO10038428_A_Olfr830
  gRNA
atatacttgattaccgtttc

SEQ ID NO: 38429 - DNA, 20 bp, Artificial Sequence
  MKO10038429_A_Olfr830
  gRNA
gaggccctgaagaaagttat

SEQ ID NO: 38430 - DNA, 20 bp, Artificial Sequence
  MKO10038430_A_Olfr830
  gRNA
cttaagattcatgtctaaca

SEQ ID NO: 38431 - DNA, 20 bp, Artificial Sequence
  MKO10038431_A_Olfr832
  gRNA
attcgaatctccatacccca

SEQ ID NO: 38432 - DNA, 20 bp, Artificial Sequence
  MKO10038432_A_Olfr832
  gRNA
gaactacagcctgtcttatt

SEQ ID NO: 38433 - DNA, 20 bp, Artificial Sequence
  MKO10038433_A_Olfr832
  gRNA
gagattcgaatcaaaaattg

SEQ ID NO: 38434 - DNA, 20 bp, Artificial Sequence
  MKO10038434_A_Olfr834
  gRNA
gtatttggtgacaagcctgt

SEQ ID NO: 38435 - DNA, 20 bp, Artificial Sequence
  MKO10038435_A_Olfr834
  gRNA
ctgtagccagtattatgaga

SEQ ID NO: 38436 - DNA, 20 bp, Artificial Sequence
  MKO10038436_A_Olfr834
  gRNA
gtcaactcgatcagttatac

SEQ ID NO: 38437 - DNA, 20 bp, Artificial Sequence
  MKO10038437_A_Olfr835
  gRNA
tgagtagtccgtaacatatt

SEQ ID NO: 38438 - DNA, 20 bp, Artificial Sequence
  MKO10038438_A_Olfr835
  gRNA
gactacagtgtacataatgc

SEQ ID NO: 38439 - DNA, 20 bp, Artificial Sequence
  MKO10038439_A_Olfr835
  gRNA
tatctttagccttcgaaata

SEQ ID NO: 38440 - DNA, 20 bp, Artificial Sequence
  MKO10038440_A_Olfr836
  gRNA
cttaagattcatgtgcaaaa

SEQ ID NO: 38441 - DNA, 20 bp, Artificial Sequence
  MKO10038441_A_Olfr836
  gRNA
tgataaatgagacccacacg

SEQ ID NO: 38442 - DNA, 20 bp, Artificial Sequence
  MKO10038442_A_Olfr836
  gRNA
ttcaccaaagaagattgcca

SEQ ID NO: 38443 - DNA, 20 bp, Artificial Sequence
  MKO10038443_A_Olfr837
  gRNA
agtagtaattgattcaccga

SEQ ID NO: 38444 - DNA, 20 bp, Artificial Sequence
  MKO10038444_A_Olfr837
  gRNA
taaaaacaagtcggttgttt

SEQ ID NO: 38445 - DNA, 20 bp, Artificial Sequence
  MKO10038445_A_Olfr837
  gRNA
catgatgtatgattaatctg

SEQ ID NO: 38446 - DNA, 20 bp, Artificial Sequence
  MKO10038446_A_Olfr843
  gRNA
aaaaggctttattccgtccc

SEQ ID NO: 38447 - DNA, 20 bp, Artificial Sequence
  MKO10038447_A_Olfr843
  gRNA
aatcagagcattacctatac

SEQ ID NO: 38448 - DNA, 20 bp, Artificial Sequence
  MKO10038448_A_Olfr843
  gRNA
tcttaagatatcatcagtcc

SEQ ID NO: 38449 - DNA, 20 bp, Artificial Sequence
  MKO10038449_A_Olfr845
  gRNA
caggaacagtccgaaaataa

SEQ ID NO: 38450 - DNA, 20 bp, Artificial Sequence
  MKO10038450_A_Olfr845
  gRNA
tgcactactgctcagtctca

SEQ ID NO: 38451 - DNA, 20 bp, Artificial Sequence
  MKO10038451_A_Olfr845
  gRNA
attgacagcactaatagcca

SEQ ID NO: 38452 - DNA, 20 bp, Artificial Sequence
  MKO10038452_A_Olfr846
  gRNA
cttagcaatgagctttcgta

SEQ ID NO: 38453 - DNA, 20 bp, Artificial Sequence
  MKO10038453_A_Olfr846
  gRNA
gctaaccagtgatcctacaa

SEQ ID NO: 38454 - DNA, 20 bp, Artificial Sequence
  MKO10038454_A_Olfr846
  gRNA
aatatgaggagctccattgt

SEQ ID NO: 38455 - DNA, 20 bp, Artificial Sequence
  MKO10038455_A_Olfr847
  gRNA
cactgctgcaccatagaata

SEQ ID NO: 38456 - DNA, 20 bp, Artificial Sequence
  MKO10038456_A_Olfr847
  gRNA
acagtagagcccctcatctt

SEQ ID NO: 38457 - DNA, 20 bp, Artificial Sequence
  MKO10038457_A_Olfr847
  gRNA
gttcgcagtgctaatgatca

SEQ ID NO: 38458 - DNA, 20 bp, Artificial Sequence
  MKO10038458_A_Olfr849
  gRNA
gggagtcagagctaacagct

SEQ ID NO: 38459 - DNA, 20 bp, Artificial Sequence
  MKO10038459_A_Olfr849
  gRNA
atatatctgatcaccacctt

SEQ ID NO: 38460 - DNA, 20 bp, Artificial Sequence
  MKO10038460_A_Olfr849
  gRNA
gcagcaatatcatcaaagtg

SEQ ID NO: 38461 - DNA, 20 bp, Artificial Sequence
  MKO10038461_A_Olfr850
  gRNA
atgacagtcggagcaccata

SEQ ID NO: 38462 - DNA, 20 bp, Artificial Sequence
  MKO10038462_A_Olfr850
  gRNA
tatatatctgatcaccatcc

SEQ ID NO: 38463 - DNA, 20 bp, Artificial Sequence
  MKO10038463_A_Olfr850
  gRNA
tgatgccactgcagtattcc

SEQ ID NO: 38464 - DNA, 20 bp, Artificial Sequence
  MKO10038464_A_Olfr851
  gRNA
ttacagccagtataatgagt

SEQ ID NO: 38465 - DNA, 20 bp, Artificial Sequence
  MKO10038465_A_Olfr851
  gRNA
agcctatataagtgatgctc

SEQ ID NO: 38466 - DNA, 20 bp, Artificial Sequence
  MKO10038466_A_Olfr851
  gRNA
tgcactactccatacacttc

SEQ ID NO: 38467 - DNA, 20 bp, Artificial Sequence
  MKO10038467_A_Olfr853
  gRNA
aaagccttatgcctaccgcc

SEQ ID NO: 38468 - DNA, 20 bp, Artificial Sequence
  MKO10038468_A_Olfr853
  gRNA
tatgtcatgagtagtgcatt

SEQ ID NO: 38469 - DNA, 20 bp, Artificial Sequence
  MKO10038469_A_Olfr853
  gRNA
atgtacctagtgacagtctc

SEQ ID NO: 38470 - DNA, 20 bp, Artificial Sequence
  MKO10038470_A_Olfr854
  gRNA
gtccctgctaattagcattg

SEQ ID NO: 38471 - DNA, 20 bp, Artificial Sequence
  MKO10038471_A_Olfr854
  gRNA
tataagcatgttcccgaaaa

SEQ ID NO: 38472 - DNA, 20 bp, Artificial Sequence
  MKO10038472_A_Olfr854
  gRNA
ttcatccaggaagactgcgg

SEQ ID NO: 38473 - DNA, 20 bp, Artificial Sequence
  MKO10038473_A_Olfr855
  gRNA
tggtgactaagtatatgaac

SEQ ID NO: 38474 - DNA, 20 bp, Artificial Sequence
  MKO10038474_A_Olfr855
  gRNA
atatacttagtcaccatcct

SEQ ID NO: 38475 - DNA, 20 bp, Artificial Sequence
  MKO10038475_A_Olfr855
  gRNA
gagagtagaacacataagtt

SEQ ID NO: 38476 - DNA, 20 bp, Artificial Sequence
  MKO10038476_A_Olfr857
  gRNA
tagcctattgctggctgtga

SEQ ID NO: 38477 - DNA, 20 bp, Artificial Sequence
  MKO10038477_A_Olfr857
  gRNA
tgaagcgaccatactttccc

SEQ ID NO: 38478 - DNA, 20 bp, Artificial Sequence
  MKO10038478_A_Olfr857
  gRNA
aactcacaagactaatgaaa

SEQ ID NO: 38479 - DNA, 20 bp, Artificial Sequence
  MKO10038479_A_Olfr859
  gRNA
cagtattctactggcagtga

SEQ ID NO: 38480 - DNA, 20 bp, Artificial Sequence
  MKO10038480_A_Olfr859
  gRNA
cttcctctacaacctttcat

SEQ ID NO: 38481 - DNA, 20 bp, Artificial Sequence
  MKO10038481_A_Olfr859
  gRNA
cataagttatggatctgttg

SEQ ID NO: 38482 - DNA, 20 bp, Artificial Sequence
  MKO10038482_A_Olfr860
  gRNA
accaaatatctacacagacg

SEQ ID NO: 38483 - DNA, 20 bp, Artificial Sequence
  MKO10038483_A_Olfr860
  gRNA
ttacatttccccccagatga

SEQ ID NO: 38484 - DNA, 20 bp, Artificial Sequence
  MKO10038484_A_Olfr860
  gRNA
aatggccacccatcggtcgt

SEQ ID NO: 38485 - DNA, 20 bp, Artificial Sequence
  MKO10038485_A_Olfr862
  gRNA
accaaacgtctacacaggcc

SEQ ID NO: 38486 - DNA, 20 bp, Artificial Sequence
  MKO10038486_A_Olfr862
  gRNA
catacgttatcgatttgtta

SEQ ID NO: 38487 - DNA, 20 bp, Artificial Sequence
  MKO10038487_A_Olfr862
  gRNA
gtatgcagcctgcctaactc

SEQ ID NO: 38488 - DNA, 20 bp, Artificial Sequence
  MKO10038488_A_Olfr866
  gRNA
ccatctcatggcactctccg

SEQ ID NO: 38489 - DNA, 20 bp, Artificial Sequence
  MKO10038489_A_Olfr866
  gRNA
tcataaggactgtgtaatga

SEQ ID NO: 38490 - DNA, 20 bp, Artificial Sequence
  MKO10038490_A_Olfr866
  gRNA
cacagtccttatgaaccctc

SEQ ID NO: 38491 - DNA, 20 bp, Artificial Sequence
  MKO10038491_A_Olfr867
  gRNA
ctatatagaatgccttacac

SEQ ID NO: 38492 - DNA, 20 bp, Artificial Sequence
  MKO10038492_A_Olfr867
  gRNA
atcagaagtgcacacagtcg

SEQ ID NO: 38493 - DNA, 20 bp, Artificial Sequence
  MKO10038493_A_Olfr867
  gRNA
cataggaatcacacccagta

SEQ ID NO: 38494 - DNA, 20 bp, Artificial Sequence
  MKO10038494_A_Olfr868
  gRNA
cagtccagtcatatcctacg

SEQ ID NO: 38495 - DNA, 20 bp, Artificial Sequence
  MKO10038495_A_Olfr868
  gRNA
atcatgaatccttgtcgctg

SEQ ID NO: 38496 - DNA, 20 bp, Artificial Sequence
  MKO10038496_A_Olfr868
  gRNA
atgattattgcataacgcaa

SEQ ID NO: 38497 - DNA, 20 bp, Artificial Sequence
  MKO10038497_A_Olfr869
  gRNA
cccttcgctgcagcttccgt

SEQ ID NO: 38498 - DNA, 20 bp, Artificial Sequence
  MKO10038498_A_Olfr869
  gRNA
acagctactgcagtatacat

SEQ ID NO: 38499 - DNA, 20 bp, Artificial Sequence
  MKO10038499_A_Olfr869
  gRNA
gcttattctttgttgagtca

SEQ ID NO: 38500 - DNA, 20 bp, Artificial Sequence
  MKO10038500_A_Olfr870
  gRNA
actagcaaaccacttagttg

SEQ ID NO: 38501 - DNA, 20 bp, Artificial Sequence
  MKO10038501_A_Olfr870
  gRNA
attatgaatcctcaactaag

SEQ ID NO: 38502 - DNA, 20 bp, Artificial Sequence
  MKO10038502_A_Olfr870
  gRNA
cagaactaaggtacacacta

SEQ ID NO: 38503 - DNA, 20 bp, Artificial Sequence
  MKO10038503_A_Olfr871
  gRNA
gaaccagcaagccacttagt

SEQ ID NO: 38504 - DNA, 20 bp, Artificial Sequence
  MKO10038504_A_Olfr871
  gRNA
attatgaatccccaactaag

SEQ ID NO: 38505 - DNA, 20 bp, Artificial Sequence
  MKO10038505_A_Olfr871
  gRNA
tcataatgactgaatagtga

SEQ ID NO: 38506 - DNA, 20 bp, Artificial Sequence
  MKO10038506_A_Olfr872
  gRNA
acatccattggagtatacat

SEQ ID NO: 38507 - DNA, 20 bp, Artificial Sequence
  MKO10038507_A_Olfr872
  gRNA
gtagttctacattctctgag

SEQ ID NO: 38508 - DNA, 20 bp, Artificial Sequence
  MKO10038508_A_Olfr872
  gRNA
tatttaagcttattctttgc

SEQ ID NO: 38509 - DNA, 20 bp, Artificial Sequence
  MKO10038509_A_Olfr873
  gRNA
atcatgaatcctcgcctctg

SEQ ID NO: 38510 - DNA, 20 bp, Artificial Sequence
  MKO10038510_A_Olfr873
  gRNA
ttatacctcccacctttcga

SEQ ID NO: 38511 - DNA, 20 bp, Artificial Sequence
  MKO10038511_A_Olfr873
  gRNA
attctgaaaataccatcgaa

SEQ ID NO: 38512 - DNA, 20 bp, Artificial Sequence
  MKO10038512_A_Olfr874
  gRNA
gattacgagctcatttatga

SEQ ID NO: 38513 - DNA, 20 bp, Artificial Sequence
  MKO10038513_A_Olfr874
  gRNA
gctcgtaatctttattgttg

SEQ ID NO: 38514 - DNA, 20 bp, Artificial Sequence
  MKO10038514_A_Olfr874
  gRNA
aatgggcacaccaatatcaa

SEQ ID NO: 38515 - DNA, 20 bp, Artificial Sequence
  MKO10038515_A_Olfr875
  gRNA
acgaatatcatctcacactc

SEQ ID NO: 38516 - DNA, 20 bp, Artificial Sequence
  MKO10038516_A_Olfr875
  gRNA
tgccatggctgacagaatga

SEQ ID NO: 38517 - DNA, 20 bp, Artificial Sequence
  MKO10038517_A_Olfr875
  gRNA
tgctacaggagagctcaaga

SEQ ID NO: 38518 - DNA, 20 bp, Artificial Sequence
  MKO10038518_A_Olfr876
  gRNA
gccttgccatggatatggtg

SEQ ID NO: 38519 - DNA, 20 bp, Artificial Sequence
  MKO10038519_A_Olfr876
  gRNA
ggaatagcagaaatcgatta

SEQ ID NO: 38520 - DNA, 20 bp, Artificial Sequence
  MKO10038520_A_Olfr876
  gRNA
catggcccacaccatatcca

SEQ ID NO: 38521 - DNA, 20 bp, Artificial Sequence
  MKO10038521_A_Olfr877
  gRNA
ctccacattagttctaaaga

SEQ ID NO: 38522 - DNA, 20 bp, Artificial Sequence
  MKO10038522_A_Olfr877
  gRNA
tgcagcgaacacctcctcag

SEQ ID NO: 38523 - DNA, 20 bp, Artificial Sequence
  MKO10038523_A_Olfr877
  gRNA
tagctcatacatcaatttgt

SEQ ID NO: 38524 - DNA, 20 bp, Artificial Sequence
  MKO10038524_A_Olfr878
  gRNA
caattctgaatgctacgtgc

SEQ ID NO: 38525 - DNA, 20 bp, Artificial Sequence
  MKO10038525_A_Olfr878
  gRNA
ttgggactgatcaccttaat

SEQ ID NO: 38526 - DNA, 20 bp, Artificial Sequence
  MKO10038526_A_Olfr878
  gRNA
atctatgtgctgactgttat

SEQ ID NO: 38527 - DNA, 20 bp, Artificial Sequence
  MKO10038527_A_Olfr881
  gRNA
agtctatatattctccgtgg

SEQ ID NO: 38528 - DNA, 20 bp, Artificial Sequence
  MKO10038528_A_Olfr881
  gRNA
tatggcgcatactgccagta

SEQ ID NO: 38529 - DNA, 20 bp, Artificial Sequence
  MKO10038529_A_Olfr881
  gRNA
attcaacattgggcccataa

SEQ ID NO: 38530 - DNA, 20 bp, Artificial Sequence
  MKO10038530_A_Olfr883
  gRNA
acaccccaactgtcatcagc

SEQ ID NO: 38531 - DNA, 20 bp, Artificial Sequence
  MKO10038531_A_Olfr883
  gRNA
catactaccagtgtgtgcaa

SEQ ID NO: 38532 - DNA, 20 bp, Artificial Sequence
  MKO10038532_A_Olfr883
  gRNA
tttgcctgctgatgacagtt

SEQ ID NO: 38533 - DNA, 20 bp, Artificial Sequence
  MKO10038533_A_Olfr884
  gRNA
attcagcattggacccaaaa

SEQ ID NO: 38534 - DNA, 20 bp, Artificial Sequence
  MKO10038534_A_Olfr884
  gRNA
tgtcataacccctagaatgt

SEQ ID NO: 38535 - DNA, 20 bp, Artificial Sequence
  MKO10038535_A_Olfr884
  gRNA
aaaaactaccatctcattga

SEQ ID NO: 38536 - DNA, 20 bp, Artificial Sequence
  MKO10038536_A_Olfr885
  gRNA
aacatcctcagcatccattc

SEQ ID NO: 38537 - DNA, 20 bp, Artificial Sequence
  MKO10038537_A_Olfr885
  gRNA
ttgacctaccttccccagaa

SEQ ID NO: 38538 - DNA, 20 bp, Artificial Sequence
  MKO10038538_A_Olfr885
  gRNA
aatctacgtggtctctgtga

SEQ ID NO: 38539 - DNA, 20 bp, Artificial Sequence
  MKO10038539_A_Olfr887
  gRNA
gctgagtcatgcactctgca

SEQ ID NO: 38540 - DNA, 20 bp, Artificial Sequence
  MKO10038540_A_Olfr887
  gRNA
ccacacccatcatcatgaag

SEQ ID NO: 38541 - DNA, 20 bp, Artificial Sequence
  MKO10038541_A_Olfr887
  gRNA
ggtctgccacttcatgatga

SEQ ID NO: 38542 - DNA, 20 bp, Artificial Sequence
  MKO10038542_A_Olfr888
  gRNA
catgctaccagtatgtgcca

SEQ ID NO: 38543 - DNA, 20 bp, Artificial Sequence
  MKO10038543_A_Olfr888
  gRNA
cctcagcattcaatctgcag

SEQ ID NO: 38544 - DNA, 20 bp, Artificial Sequence
  MKO10038544_A_Olfr888
  gRNA
caatcagaacaatcagtccc

SEQ ID NO: 38545 - DNA, 20 bp, Artificial Sequence
  MKO10038545_A_Olfr889
  gRNA
acatgtagtgattaattatg

SEQ ID NO: 38546 - DNA, 20 bp, Artificial Sequence
  MKO10038546_A_Olfr889
  gRNA
atcctttcatctatagcata

SEQ ID NO: 38547 - DNA, 20 bp, Artificial Sequence
  MKO10038547_A_Olfr889
  gRNA
catacactctgcatgagaga

SEQ ID NO: 38548 - DNA, 20 bp, Artificial Sequence
  MKO10038548_A_Olfr890
  gRNA
caggtctgcctcttgatgac

SEQ ID NO: 38549 - DNA, 20 bp, Artificial Sequence
  MKO10038549_A_Olfr890
  gRNA
acatcccccctgtcatcaag

SEQ ID NO: 38550 - DNA, 20 bp, Artificial Sequence
  MKO10038550_A_Olfr890
  gRNA
atccgtttatttacagttta

SEQ ID NO: 38551 - DNA, 20 bp, Artificial Sequence
  MKO10038551_A_Olfr891
  gRNA
gcctgatcatacaccctgta

SEQ ID NO: 38552 - DNA, 20 bp, Artificial Sequence
  MKO10038552_A_Olfr891
  gRNA
tccatacagggtgtatgatc

SEQ ID NO: 38553 - DNA, 20 bp, Artificial Sequence
  MKO10038553_A_Olfr891
  gRNA
tgatgatataaatggcaacg

SEQ ID NO: 38554 - DNA, 20 bp, Artificial Sequence
  MKO10038554_A_Olfr893
  gRNA
attagcagggaacacatccg

SEQ ID NO: 38555 - DNA, 20 bp, Artificial Sequence
  MKO10038555_A_Olfr893
  gRNA
atccgctgaatctgtagatc

SEQ ID NO: 38556 - DNA, 20 bp, Artificial Sequence
  MKO10038556_A_Olfr893
  gRNA
ctcatactggctgcatgatt

SEQ ID NO: 38557 - DNA, 20 bp, Artificial Sequence
  MKO10038557_A_Olfr894
  gRNA
attgacatacgtgctactac

SEQ ID NO: 38558 - DNA, 20 bp, Artificial Sequence
  MKO10038558_A_Olfr894
  gRNA
gcttatgagttatattgcag

SEQ ID NO: 38559 - DNA, 20 bp, Artificial Sequence
  MKO10038559_A_Olfr894
  gRNA
attagtgccacagctcacac

SEQ ID NO: 38560 - DNA, 20 bp, Artificial Sequence
  MKO10038560_A_Olfr895
  gRNA
gttagtgccttattccatac

SEQ ID NO: 38561 - DNA, 20 bp, Artificial Sequence
  MKO10038561_A_Olfr895
  gRNA
gttagcttgttctatgtaac

SEQ ID NO: 38562 - DNA, 20 bp, Artificial Sequence
  MKO10038562_A_Olfr895
  gRNA
gccttatcataaaacctgta

SEQ ID NO: 38563 - DNA, 20 bp, Artificial Sequence
  MKO10038563_A_Olfr898
  gRNA
gatgcgagtcatgaagcaaa

SEQ ID NO: 38564 - DNA, 20 bp, Artificial Sequence
  MKO10038564_A_Olfr898
  gRNA
acttacaagctcgttgacat

SEQ ID NO: 38565 - DNA, 20 bp, Artificial Sequence
  MKO10038565_A_Olfr898
  gRNA
cgagcttgtaagttctgctg

SEQ ID NO: 38566 - DNA, 20 bp, Artificial Sequence
  MKO10038566_A_Olfr899
  gRNA
gttgacatgactgctaccac

SEQ ID NO: 38567 - DNA, 20 bp, Artificial Sequence
  MKO10038567_A_Olfr899
  gRNA
tacaacataagcacttccct

SEQ ID NO: 38568 - DNA, 20 bp, Artificial Sequence
  MKO10038568_A_Olfr899
  gRNA
agtgtgcagcaagcattaac

SEQ ID NO: 38569 - DNA, 20 bp, Artificial Sequence
  MKO10038569_A_Olfr8
  gRNA
ccaacatctctgtatactga

SEQ ID NO: 38570 - DNA, 20 bp, Artificial Sequence
  MKO10038570_A_Olfr8
  gRNA
ccatcagtatacagagatgt

SEQ ID NO: 38571 - DNA, 20 bp, Artificial Sequence
  MKO10038571_A_Olfr8
  gRNA
acaatgaatgtgtaatacaa

SEQ ID NO: 38572 - DNA, 20 bp, Artificial Sequence
  MKO10038572_A_Olfr900
  gRNA
gctcacaagctcgttgacat

SEQ ID NO: 38573 - DNA, 20 bp, Artificial Sequence
  MKO10038573_A_Olfr900
  gRNA
gcaatccagacccataaaag

SEQ ID NO: 38574 - DNA, 20 bp, Artificial Sequence
  MKO10038574_A_Olfr900
  gRNA
cagaacaccatatcctatga

SEQ ID NO: 38575 - DNA, 20 bp, Artificial Sequence
  MKO10038575_A_Olfr901
  gRNA
agctattatgtgcgagctac

SEQ ID NO: 38576 - DNA, 20 bp, Artificial Sequence
  MKO10038576_A_Olfr901
  gRNA
tcacatatccgttccactga

SEQ ID NO: 38577 - DNA, 20 bp, Artificial Sequence
  MKO10038577_A_Olfr901
  gRNA
gttgtgggtgtcaatgtgat

SEQ ID NO: 38578 - DNA, 20 bp, Artificial Sequence
  MKO10038578_A_Olfr902
  gRNA
tacccttagaggaacttatg

SEQ ID NO: 38579 - DNA, 20 bp, Artificial Sequence
  MKO10038579_A_Olfr902
  gRNA
aacaggggtatttggcgatc

SEQ ID NO: 38580 - DNA, 20 bp, Artificial Sequence
  MKO10038580_A_Olfr902
  gRNA
atgctttgtgctgacgtcaa

SEQ ID NO: 38581 - DNA, 20 bp, Artificial Sequence
  MKO10038581_A_Olfr904
  gRNA
ctgtaatccactcttgtaca

SEQ ID NO: 38582 - DNA, 20 bp, Artificial Sequence
  MKO10038582_A_Olfr904
  gRNA
ttgcatatgtaccaagcata

SEQ ID NO: 38583 - DNA, 20 bp, Artificial Sequence
  MKO10038583_A_Olfr904
  gRNA
ggacttgatgtgaaaaatgc

SEQ ID NO: 38584 - DNA, 20 bp, Artificial Sequence
  MKO10038584_A_Olfr905
  gRNA
cagggtttgattagcttaat

SEQ ID NO: 38585 - DNA, 20 bp, Artificial Sequence
  MKO10038585_A_Olfr905
  gRNA
acttgtcctttgttgacctc

SEQ ID NO: 38586 - DNA, 20 bp, Artificial Sequence
  MKO10038586_A_Olfr905
  gRNA
ccacatacatcattagaaac

SEQ ID NO: 38587 - DNA, 20 bp, Artificial Sequence
  MKO10038587_A_Olfr906
  gRNA
tatcttaaaccctcctcagt

SEQ ID NO: 38588 - DNA, 20 bp, Artificial Sequence
  MKO10038588_A_Olfr906
  gRNA
aaagaatggctttcggaaat

SEQ ID NO: 38589 - DNA, 20 bp, Artificial Sequence
  MKO10038589_A_Olfr906
  gRNA
tagttactatatacattaca

SEQ ID NO: 38590 - DNA, 20 bp, Artificial Sequence
  MKO10038590_A_Olfr907
  gRNA
gatgtacgtgatagctacat

SEQ ID NO: 38591 - DNA, 20 bp, Artificial Sequence
  MKO10038591_A_Olfr907
  gRNA
ggagaggataaagccgtaag

SEQ ID NO: 38592 - DNA, 20 bp, Artificial Sequence
  MKO10038592_A_Olfr907
  gRNA
ctcaaaataagctccacagc

SEQ ID NO: 38593 - DNA, 20 bp, Artificial Sequence
  MKO10038593_A_Olfr908
  gRNA
attcatcataggcaccaata

SEQ ID NO: 38594 - DNA, 20 bp, Artificial Sequence
  MKO10038594_A_Olfr908
  gRNA
tgccctcagtagatctcatt

SEQ ID NO: 38595 - DNA, 20 bp, Artificial Sequence
  MKO10038595_A_Olfr908
  gRNA
caatccctgcagaatgaatt

SEQ ID NO: 38596 - DNA, 20 bp, Artificial Sequence
  MKO10038596_A_Olfr90
  gRNA
agaatccttatgctcgagag

SEQ ID NO: 38597 - DNA, 20 bp, Artificial Sequence
  MKO10038597_A_Olfr90
  gRNA
acacaaagtcgtcaacctga

SEQ ID NO: 38598 - DNA, 20 bp, Artificial Sequence
  MKO10038598_A_Olfr90
  gRNA
caggacagtcgaatcaaagc

SEQ ID NO: 38599 - DNA, 20 bp, Artificial Sequence
  MKO10038599_A_Olfr910
  gRNA
tacttaaaacccccctcagc

SEQ ID NO: 38600 - DNA, 20 bp, Artificial Sequence
  MKO10038600_A_Olfr910
  gRNA
agaagaatggtcgtgacaaa

SEQ ID NO: 38601 - DNA, 20 bp, Artificial Sequence
  MKO10038601_A_Olfr910
  gRNA
ctcattcaaagatccagctg

SEQ ID NO: 38602 - DNA, 20 bp, Artificial Sequence
  MKO10038602_A_Olfr911-ps1
  gRNA
gaaatagagattctaatcgt

SEQ ID NO: 38603 - DNA, 20 bp, Artificial Sequence
  MKO10038603_A_Olfr911-ps1
  gRNA
cttcaaatgagatccactgc

SEQ ID NO: 38604 - DNA, 20 bp, Artificial Sequence
  MKO10038604_A_Olfr911-ps1
  gRNA
atagtgatgttatacaagag

SEQ ID NO: 38605 - DNA, 20 bp, Artificial Sequence
  MKO10038605_A_Olfr912
  gRNA
ggctttatatctgcccctag

SEQ ID NO: 38606 - DNA, 20 bp, Artificial Sequence
  MKO10038606_A_Olfr912
  gRNA
ttaccaaagagtgatttgtc

SEQ ID NO: 38607 - DNA, 20 bp, Artificial Sequence
  MKO10038607_A_Olfr912
  gRNA
tcctccaaataaagtccact

SEQ ID NO: 38608 - DNA, 20 bp, Artificial Sequence
  MKO10038608_A_Olfr913
  gRNA
ctcagctctatctatcaata

SEQ ID NO: 38609 - DNA, 20 bp, Artificial Sequence
  MKO10038609_A_Olfr913
  gRNA
gatgcttggttcgtatttca

SEQ ID NO: 38610 - DNA, 20 bp, Artificial Sequence
  MKO10038610_A_Olfr913
  gRNA
cagctctatctcattgatat

SEQ ID NO: 38611 - DNA, 20 bp, Artificial Sequence
  MKO10038611_A_Olfr914
  gRNA
gtctcattacacaacctgtg

SEQ ID NO: 38612 - DNA, 20 bp, Artificial Sequence
  MKO10038612_A_Olfr914
  gRNA
ttcagctgtatctatgaatg

SEQ ID NO: 38613 - DNA, 20 bp, Artificial Sequence
  MKO10038613_A_Olfr914
  gRNA
atggcaacactatacaagag

SEQ ID NO: 38614 - DNA, 20 bp, Artificial Sequence
  MKO10038614_A_Olfr915
  gRNA
cagcatctatgtcaacgagc

SEQ ID NO: 38615 - DNA, 20 bp, Artificial Sequence
  MKO10038615_A_Olfr915
  gRNA
ttatatatgagccaagtatg

SEQ ID NO: 38616 - DNA, 20 bp, Artificial Sequence
  MKO10038616_A_Olfr915
  gRNA
atcagcactttctcttactc

SEQ ID NO: 38617 - DNA, 20 bp, Artificial Sequence
  MKO10038617_A_Olfr916
  gRNA
tacaagcttgttgatatatg

SEQ ID NO: 38618 - DNA, 20 bp, Artificial Sequence
  MKO10038618_A_Olfr916
  gRNA
gttaaatgttcctcttgctc

SEQ ID NO: 38619 - DNA, 20 bp, Artificial Sequence
  MKO10038619_A_Olfr916
  gRNA
aattccccaatgcagtgact

SEQ ID NO: 38620 - DNA, 20 bp, Artificial Sequence
  MKO10038620_A_Olfr917
  gRNA
tacaacctcattgacacgtg

SEQ ID NO: 38621 - DNA, 20 bp, Artificial Sequence
  MKO10038621_A_Olfr917
  gRNA
tacgaccacacgtgtcaatg

SEQ ID NO: 38622 - DNA, 20 bp, Artificial Sequence
  MKO10038622_A_Olfr917
  gRNA
agaactgatgcgaaagatac

SEQ ID NO: 38623 - DNA, 20 bp, Artificial Sequence
  MKO10038623_A_Olfr918
  gRNA
aacaacgacttcattaacat

SEQ ID NO: 38624 - DNA, 20 bp, Artificial Sequence
  MKO10038624_A_Olfr918
  gRNA
aataatctacactgtcacag

SEQ ID NO: 38625 - DNA, 20 bp, Artificial Sequence
  MKO10038625_A_Olfr918
  gRNA
agtcgttgttctcatagttg

SEQ ID NO: 38626 - DNA, 20 bp, Artificial Sequence
  MKO10038626_A_Olfr919
  gRNA
tatcctccgtatcaaatcca

SEQ ID NO: 38627 - DNA, 20 bp, Artificial Sequence
  MKO10038627_A_Olfr919
  gRNA
tgttattaccccgaagatgt

SEQ ID NO: 38628 - DNA, 20 bp, Artificial Sequence
  MKO10038628_A_Olfr919
  gRNA
ataaaacatgcaggtgcaaa

SEQ ID NO: 38629 - DNA, 20 bp, Artificial Sequence
  MKO10038629_A_Olfr91
  gRNA
tctttaattcgactctcctg

SEQ ID NO: 38630 - DNA, 20 bp, Artificial Sequence
  MKO10038630_A_Olfr91
  gRNA
cgattactgagctgtagaag

SEQ ID NO: 38631 - DNA, 20 bp, Artificial Sequence
  MKO10038631_A_Olfr91
  gRNA
tcatccaccctcgcctgtgc

SEQ ID NO: 38632 - DNA, 20 bp, Artificial Sequence
  MKO10038632_A_Olfr920
  gRNA
ggcctttgacatgcccttag

SEQ ID NO: 38633 - DNA, 20 bp, Artificial Sequence
  MKO10038633_A_Olfr920
  gRNA
tatcttaaacccaactcaac

SEQ ID NO: 38634 - DNA, 20 bp, Artificial Sequence
  MKO10038634_A_Olfr920
  gRNA
catcacagaacgacagtctc

SEQ ID NO: 38635 - DNA, 20 bp, Artificial Sequence
  MKO10038635_A_Olfr921
  gRNA
ggcccaaagtggatcttatt

SEQ ID NO: 38636 - DNA, 20 bp, Artificial Sequence
  MKO10038636_A_Olfr921
  gRNA
gtctgagcatgcaaccagta

SEQ ID NO: 38637 - DNA, 20 bp, Artificial Sequence
  MKO10038637_A_Olfr921
  gRNA
tctgctgtatctattgatca

SEQ ID NO: 38638 - DNA, 20 bp, Artificial Sequence
  MKO10038638_A_Olfr922
  gRNA
attggtgcatgggcccacac

SEQ ID NO: 38639 - DNA, 20 bp, Artificial Sequence
  MKO10038639_A_Olfr922
  gRNA
tatattctgttaagccaacc

SEQ ID NO: 38640 - DNA, 20 bp, Artificial Sequence
  MKO10038640_A_Olfr922
  gRNA
acatggtaacagtgtacaac

SEQ ID NO: 38641 - DNA, 20 bp, Artificial Sequence
  MKO10038641_A_Olfr923
  gRNA
gacatttgtgtaaaataccg

SEQ ID NO: 38642 - DNA, 20 bp, Artificial Sequence
  MKO10038642_A_Olfr923
  gRNA
cctggcccatacactttgca

SEQ ID NO: 38643 - DNA, 20 bp, Artificial Sequence
  MKO10038643_A_Olfr923
  gRNA
cctggtgacagaatttatcc

SEQ ID NO: 38644 - DNA, 20 bp, Artificial Sequence
  MKO10038644_A_Olfr924
  gRNA
ctcaagcacccatatcaacg

SEQ ID NO: 38645 - DNA, 20 bp, Artificial Sequence
  MKO10038645_A_Olfr924
  gRNA
acagcagtacctcgttgata

SEQ ID NO: 38646 - DNA, 20 bp, Artificial Sequence
  MKO10038646_A_Olfr924
  gRNA
ctgagtcatgcactccaaaa

SEQ ID NO: 38647 - DNA, 20 bp, Artificial Sequence
  MKO10038647_A_Olfr926
  gRNA
ctgagtcatgcactccttaa

SEQ ID NO: 38648 - DNA, 20 bp, Artificial Sequence
  MKO10038648_A_Olfr926
  gRNA
catacatgtgattacagtgg

SEQ ID NO: 38649 - DNA, 20 bp, Artificial Sequence
  MKO10038649_A_Olfr926
  gRNA
agccttctgaaatagctaaa

SEQ ID NO: 38650 - DNA, 20 bp, Artificial Sequence
  MKO10038650_A_Olfr92
  gRNA
cccaagctatacctgccaac

SEQ ID NO: 38651 - DNA, 20 bp, Artificial Sequence
  MKO10038651_A_Olfr92
  gRNA
aaaacctgtatgcccgagag

SEQ ID NO: 38652 - DNA, 20 bp, Artificial Sequence
  MKO10038652_A_Olfr92
  gRNA
acataggtgggggttgattt

SEQ ID NO: 38653 - DNA, 20 bp, Artificial Sequence
  MKO10038653_A_Olfr930
  gRNA
gatcatacgccataacagtc

SEQ ID NO: 38654 - DNA, 20 bp, Artificial Sequence
  MKO10038654_A_Olfr930
  gRNA
gtgctagttgccttcaccct

SEQ ID NO: 38655 - DNA, 20 bp, Artificial Sequence
  MKO10038655_A_Olfr930
  gRNA
gggttacctcctgactgtta

SEQ ID NO: 38656 - DNA, 20 bp, Artificial Sequence
  MKO10038656_A_Olfr933
  gRNA
tgctccagagagttacttga

SEQ ID NO: 38657 - DNA, 20 bp, Artificial Sequence
  MKO10038657_A_Olfr933
  gRNA
cttcttctattcatcattgc

SEQ ID NO: 38658 - DNA, 20 bp, Artificial Sequence
  MKO10038658_A_Olfr933
  gRNA
attcagctttatgtcagagc

SEQ ID NO: 38659 - DNA, 20 bp, Artificial Sequence
  MKO10038659_A_Olfr934
  gRNA
tcttcagatccgctctactg

SEQ ID NO: 38660 - DNA, 20 bp, Artificial Sequence
  MKO10038660_A_Olfr934
  gRNA
caagccagcttcagcattac

SEQ ID NO: 38661 - DNA, 20 bp, Artificial Sequence
  MKO10038661_A_Olfr934
  gRNA
ttgaactgctgcattaagcc

SEQ ID NO: 38662 - DNA, 20 bp, Artificial Sequence
  MKO10038662_A_Olfr935
  gRNA
catcagagcacgagagctta

SEQ ID NO: 38663 - DNA, 20 bp, Artificial Sequence
  MKO10038663_A_Olfr935
  gRNA
cataatgctactataaagta

SEQ ID NO: 38664 - DNA, 20 bp, Artificial Sequence
  MKO10038664_A_Olfr935
  gRNA
gttgagcatgggaacaataa

SEQ ID NO: 38665 - DNA, 20 bp, Artificial Sequence
  MKO10038665_A_Olfr936
  gRNA
cctcagtagatttaatgcgc

SEQ ID NO: 38666 - DNA, 20 bp, Artificial Sequence
  MKO10038666_A_Olfr936
  gRNA
tattagagcatgagagctta

SEQ ID NO: 38667 - DNA, 20 bp, Artificial Sequence
  MKO10038667_A_Olfr936
  gRNA
gttgagcataggcacaaaga

SEQ ID NO: 38668 - DNA, 20 bp, Artificial Sequence
  MKO10038668_A_Olfr937
  gRNA
atcttacgcattcgttctac

SEQ ID NO: 38669 - DNA, 20 bp, Artificial Sequence
  MKO10038669_A_Olfr937
  gRNA
agaacgaatgcgtaagatgt

SEQ ID NO: 38670 - DNA, 20 bp, Artificial Sequence
  MKO10038670_A_Olfr937
  gRNA
ctgtgatcttcttcccctgc

SEQ ID NO: 38671 - DNA, 20 bp, Artificial Sequence
  MKO10038671_A_Olfr938
  gRNA
gagcacgagagctccagtaa

SEQ ID NO: 38672 - DNA, 20 bp, Artificial Sequence
  MKO10038672_A_Olfr938
  gRNA
gttctccacattcaatccac

SEQ ID NO: 38673 - DNA, 20 bp, Artificial Sequence
  MKO10038673_A_Olfr938
  gRNA
cacccatgtattatttactc

SEQ ID NO: 38674 - DNA, 20 bp, Artificial Sequence
  MKO10038674_A_Olfr93
  gRNA
ctggggaaggatgcggcttc

SEQ ID NO: 38675 - DNA, 20 bp, Artificial Sequence
  MKO10038675_A_Olfr93
  gRNA
caagagagtcggattagaga

SEQ ID NO: 38676 - DNA, 20 bp, Artificial Sequence
  MKO10038676_A_Olfr93
  gRNA
ggtcaaccagagcacccccg

SEQ ID NO: 38677 - DNA, 20 bp, Artificial Sequence
  MKO10038677_A_Olfr943
  gRNA
aagtaataaccgttagcaat

SEQ ID NO: 38678 - DNA, 20 bp, Artificial Sequence
  MKO10038678_A_Olfr943
  gRNA
aaatgaggttcttctccatc

SEQ ID NO: 38679 - DNA, 20 bp, Artificial Sequence
  MKO10038679_A_Olfr943
  gRNA
tatctgtgtcccattgctaa

SEQ ID NO: 38680 - DNA, 20 bp, Artificial Sequence
  MKO10038680_A_Olfr944
  gRNA
cagtgattagatagattcca

SEQ ID NO: 38681 - DNA, 20 bp, Artificial Sequence
  MKO10038681_A_Olfr944
  gRNA
gtctgttcatccttaatcac

SEQ ID NO: 38682 - DNA, 20 bp, Artificial Sequence
  MKO10038682_A_Olfr944
  gRNA
ttcattgatatagatattag

SEQ ID NO: 38683 - DNA, 20 bp, Artificial Sequence
  MKO10038683_A_Olfr945
  gRNA
tccatcgaattcactcgtga

SEQ ID NO: 38684 - DNA, 20 bp, Artificial Sequence
  MKO10038684_A_Olfr945
  gRNA
accatcacgagtgaattcga

SEQ ID NO: 38685 - DNA, 20 bp, Artificial Sequence
  MKO10038685_A_Olfr945
  gRNA
gcatcttccacattcgctcc

SEQ ID NO: 38686 - DNA, 20 bp, Artificial Sequence
  MKO10038686_A_Olfr948
  gRNA
caatcaatgcaatcatcccc

SEQ ID NO: 38687 - DNA, 20 bp, Artificial Sequence
  MKO10038687_A_Olfr948
  gRNA
tcagatagattgctacaaat

SEQ ID NO: 38688 - DNA, 20 bp, Artificial Sequence
  MKO10038688_A_Olfr948
  gRNA
gtaacgtagggggttacaaa

SEQ ID NO: 38689 - DNA, 20 bp, Artificial Sequence
  MKO10038689_A_Olfr94
  gRNA
caacgcggcgttggtgctgc

SEQ ID NO: 38690 - DNA, 20 bp, Artificial Sequence
  MKO10038690_A_Olfr94
  gRNA
ccagatgttcgccgcgcgtg

SEQ ID NO: 38691 - DNA, 20 bp, Artificial Sequence
  MKO10038691_A_Olfr94
  gRNA
cagcaccaacgccgcgttgc

SEQ ID NO: 38692 - DNA, 20 bp, Artificial Sequence
  MKO10038692_A_Olfr951
  gRNA
gcatcctccgcattcactct

SEQ ID NO: 38693 - DNA, 20 bp, Artificial Sequence
  MKO10038693_A_Olfr951
  gRNA
gccatcacaagtgagttcaa

SEQ ID NO: 38694 - DNA, 20 bp, Artificial Sequence
  MKO10038694_A_Olfr951
  gRNA
aagaacttcatcacctaccc

SEQ ID NO: 38695 - DNA, 20 bp, Artificial Sequence
  MKO10038695_A_Olfr952
  gRNA
agaattaaatcataccccag

SEQ ID NO: 38696 - DNA, 20 bp, Artificial Sequence
  MKO10038696_A_Olfr952
  gRNA
gcaagaatgaactctgccac

SEQ ID NO: 38697 - DNA, 20 bp, Artificial Sequence
  MKO10038697_A_Olfr952
  gRNA
cacctacagctcccatatct

SEQ ID NO: 38698 - DNA, 20 bp, Artificial Sequence
  MKO10038698_A_Olfr954
  gRNA
tctattgaacttactcgtga

SEQ ID NO: 38699 - DNA, 20 bp, Artificial Sequence
  MKO10038699_A_Olfr954
  gRNA
cctccgcattagctctagtg

SEQ ID NO: 38700 - DNA, 20 bp, Artificial Sequence
  MKO10038700_A_Olfr954
  gRNA
tgccctcactagagctaatg

SEQ ID NO: 38701 - DNA, 20 bp, Artificial Sequence
  MKO10038701_A_Olfr955
  gRNA
aggtaaggaatagaggcaac

SEQ ID NO: 38702 - DNA, 20 bp, Artificial Sequence
  MKO10038702_A_Olfr955
  gRNA
aacctgcagctcccatatct

SEQ ID NO: 38703 - DNA, 20 bp, Artificial Sequence
  MKO10038703_A_Olfr955
  gRNA
aaagatgtttcctcaaaaca

SEQ ID NO: 38704 - DNA, 20 bp, Artificial Sequence
  MKO10038704_A_Olfr957
  gRNA
tcttcctacaaccttataga

SEQ ID NO: 38705 - DNA, 20 bp, Artificial Sequence
  MKO10038705_A_Olfr957
  gRNA
tgtcaaagttgccttctata

SEQ ID NO: 38706 - DNA, 20 bp, Artificial Sequence
  MKO10038706_A_Olfr957
  gRNA
ctccgcattccttccactga

SEQ ID NO: 38707 - DNA, 20 bp, Artificial Sequence
  MKO10038707_A_Olfr958
  gRNA
atgatgaccgagtaccgaag

SEQ ID NO: 38708 - DNA, 20 bp, Artificial Sequence
  MKO10038708_A_Olfr958
  gRNA
taagtctgctaagtcccata

SEQ ID NO: 38709 - DNA, 20 bp, Artificial Sequence
  MKO10038709_A_Olfr958
  gRNA
gaacttgtccgtatttgata

SEQ ID NO: 38710 - DNA, 20 bp, Artificial Sequence
  MKO10038710_A_Olfr959
  gRNA
tacgacggccctcagcagat

SEQ ID NO: 38711 - DNA, 20 bp, Artificial Sequence
  MKO10038711_A_Olfr959
  gRNA
gaagtagtagtccacctcat

SEQ ID NO: 38712 - DNA, 20 bp, Artificial Sequence
  MKO10038712_A_Olfr959
  gRNA
tgtgcaggtcttaaataatc

SEQ ID NO: 38713 - DNA, 20 bp, Artificial Sequence
  MKO10038713_A_Olfr95
  gRNA
cgcagccagagcgcgagatg

SEQ ID NO: 38714 - DNA, 20 bp, Artificial Sequence
  MKO10038714_A_Olfr95
  gRNA
ggtgaccaggatccgtccgt

SEQ ID NO: 38715 - DNA, 20 bp, Artificial Sequence
  MKO10038715_A_Olfr95
  gRNA
cggcgccacatctcgcgctc

SEQ ID NO: 38716 - DNA, 20 bp, Artificial Sequence
  MKO10038716_A_Olfr960
  gRNA
agcccatgtcagagatagag

SEQ ID NO: 38717 - DNA, 20 bp, Artificial Sequence
  MKO10038717_A_Olfr960
  gRNA
tgagagatatgacaacatct

SEQ ID NO: 38718 - DNA, 20 bp, Artificial Sequence
  MKO10038718_A_Olfr960
  gRNA
gaacatgacaaacaacacta

SEQ ID NO: 38719 - DNA, 20 bp, Artificial Sequence
  MKO10038719_A_Olfr961
  gRNA
attgtatcctacactcgaat

SEQ ID NO: 38720 - DNA, 20 bp, Artificial Sequence
  MKO10038720_A_Olfr961
  gRNA
gaatgagaaagtttcccagc

SEQ ID NO: 38721 - DNA, 20 bp, Artificial Sequence
  MKO10038721_A_Olfr961
  gRNA
tgaataatcgcactaagcaa

SEQ ID NO: 38722 - DNA, 20 bp, Artificial Sequence
  MKO10038722_A_Olfr963
  gRNA
caattcgagtgtaggacaca

SEQ ID NO: 38723 - DNA, 20 bp, Artificial Sequence
  MKO10038723_A_Olfr963
  gRNA
gaaataataacccacattgc

SEQ ID NO: 38724 - DNA, 20 bp, Artificial Sequence
  MKO10038724_A_Olfr963
  gRNA
agtgttacctctagcctgtg

SEQ ID NO: 38725 - DNA, 20 bp, Artificial Sequence
  MKO10038725_A_Olfr965
  gRNA
tcagttagctccgaagatca

SEQ ID NO: 38726 - DNA, 20 bp, Artificial Sequence
  MKO10038726_A_Olfr965
  gRNA
aatctacttgttcacggagc

SEQ ID NO: 38727 - DNA, 20 bp, Artificial Sequence
  MKO10038727_A_Olfr965
  gRNA
tcttcggagctaactgatga

SEQ ID NO: 38728 - DNA, 20 bp, Artificial Sequence
  MKO10038728_A_Olfr967
  gRNA
tcgttactgcatagattccg

SEQ ID NO: 38729 - DNA, 20 bp, Artificial Sequence
  MKO10038729_A_Olfr967
  gRNA
atctatgcagtaacgatggt

SEQ ID NO: 38730 - DNA, 20 bp, Artificial Sequence
  MKO10038730_A_Olfr967
  gRNA
tgtcctatcaagtctgcacc

SEQ ID NO: 38731 - DNA, 20 bp, Artificial Sequence
  MKO10038731_A_Olfr968
  gRNA
caaaactgtgtcatacattc

SEQ ID NO: 38732 - DNA, 20 bp, Artificial Sequence
  MKO10038732_A_Olfr968
  gRNA
tgtcctatcaagtttgttcc

SEQ ID NO: 38733 - DNA, 20 bp, Artificial Sequence
  MKO10038733_A_Olfr968
  gRNA
tccatggagttgattgatga

SEQ ID NO: 38734 - DNA, 20 bp, Artificial Sequence
  MKO10038734_A_Olfr969
  gRNA
tccatagagttgaccgaaga

SEQ ID NO: 38735 - DNA, 20 bp, Artificial Sequence
  MKO10038735_A_Olfr969
  gRNA
catccaagaacagactcgat

SEQ ID NO: 38736 - DNA, 20 bp, Artificial Sequence
  MKO10038736_A_Olfr969
  gRNA
ttgtgatatttatccactac

SEQ ID NO: 38737 - DNA, 20 bp, Artificial Sequence
  MKO10038737_A_Olfr96
  gRNA
cccatgggaatcctttccac

SEQ ID NO: 38738 - DNA, 20 bp, Artificial Sequence
  MKO10038738_A_Olfr96
  gRNA
ggtatagacaatctctatga

SEQ ID NO: 38739 - DNA, 20 bp, Artificial Sequence
  MKO10038739_A_Olfr96
  gRNA
catgagtgttccatagaacg

SEQ ID NO: 38740 - DNA, 20 bp, Artificial Sequence
  MKO10038740_A_Olfr970
  gRNA
gtatatagtatagctttaat

SEQ ID NO: 38741 - DNA, 20 bp, Artificial Sequence
  MKO10038741_A_Olfr970
  gRNA
atataccccaaatatcattg

SEQ ID NO: 38742 - DNA, 20 bp, Artificial Sequence
  MKO10038742_A_Olfr970
  gRNA
gtctgttcctcaatgatatt

SEQ ID NO: 38743 - DNA, 20 bp, Artificial Sequence
  MKO10038743_A_Olfr971
  gRNA
taaattcgattatcatcgaa

SEQ ID NO: 38744 - DNA, 20 bp, Artificial Sequence
  MKO10038744_A_Olfr971
  gRNA
ataatcgaatttatcttgac

SEQ ID NO: 38745 - DNA, 20 bp, Artificial Sequence
  MKO10038745_A_Olfr971
  gRNA
atcctgatcgtgctcagctc

SEQ ID NO: 38746 - DNA, 20 bp, Artificial Sequence
  MKO10038746_A_Olfr972
  gRNA
gaatacaccaaatatcatcc

SEQ ID NO: 38747 - DNA, 20 bp, Artificial Sequence
  MKO10038747_A_Olfr972
  gRNA
aacagtctgcatgttaagag

SEQ ID NO: 38748 - DNA, 20 bp, Artificial Sequence
  MKO10038748_A_Olfr972
  gRNA
tattgcagaatgtcagatgt

SEQ ID NO: 38749 - DNA, 20 bp, Artificial Sequence
  MKO10038749_A_Olfr974
  gRNA
tgtatgaactgtagccccga

SEQ ID NO: 38750 - DNA, 20 bp, Artificial Sequence
  MKO10038750_A_Olfr974
  gRNA
gtattcgcagaatgcttgca

SEQ ID NO: 38751 - DNA, 20 bp, Artificial Sequence
  MKO10038751_A_Olfr974
  gRNA
tgattaaaaagactaagccc

SEQ ID NO: 38752 - DNA, 20 bp, Artificial Sequence
  MKO10038752_A_Olfr975
  gRNA
tcgtgtgactatgtccagtg

SEQ ID NO: 38753 - DNA, 20 bp, Artificial Sequence
  MKO10038753_A_Olfr975
  gRNA
ggagatgacgatgcgagagt

SEQ ID NO: 38754 - DNA, 20 bp, Artificial Sequence
  MKO10038754_A_Olfr975
  gRNA
catcagaatgagtaggtttc

SEQ ID NO: 38755 - DNA, 20 bp, Artificial Sequence
  MKO10038755_A_Olfr976
  gRNA
atgatgaccgtatatctcat

SEQ ID NO: 38756 - DNA, 20 bp, Artificial Sequence
  MKO10038756_A_Olfr976
  gRNA
taaaactcacagtctgcgct

SEQ ID NO: 38757 - DNA, 20 bp, Artificial Sequence
  MKO10038757_A_Olfr976
  gRNA
ttgttaccctatgagatata

SEQ ID NO: 38758 - DNA, 20 bp, Artificial Sequence
  MKO10038758_A_Olfr978
  gRNA
ctcacgtattatttatcctg

SEQ ID NO: 38759 - DNA, 20 bp, Artificial Sequence
  MKO10038759_A_Olfr978
  gRNA
aatccaccctgatcaccgtc

SEQ ID NO: 38760 - DNA, 20 bp, Artificial Sequence
  MKO10038760_A_Olfr978
  gRNA
ttctcatcctgacggtgatc

SEQ ID NO: 38761 - DNA, 20 bp, Artificial Sequence
  MKO10038761_A_Olfr979
  gRNA
acccaaaatgttgatgacgt

SEQ ID NO: 38762 - DNA, 20 bp, Artificial Sequence
  MKO10038762_A_Olfr979
  gRNA
aaccaacgtcatcaacattt

SEQ ID NO: 38763 - DNA, 20 bp, Artificial Sequence
  MKO10038763_A_Olfr979
  gRNA
ctacaaagagcatggtgtcc

SEQ ID NO: 38764 - DNA, 20 bp, Artificial Sequence
  MKO10038764_A_Olfr97
  gRNA
ccatctagttctcgttcctc

SEQ ID NO: 38765 - DNA, 20 bp, Artificial Sequence
  MKO10038765_A_Olfr97
  gRNA
gatggatccatctcgttctc

SEQ ID NO: 38766 - DNA, 20 bp, Artificial Sequence
  MKO10038766_A_Olfr97
  gRNA
cctcaatgagagtctaatga

SEQ ID NO: 38767 - DNA, 20 bp, Artificial Sequence
  MKO10038767_A_Olfr980
  gRNA
cacaaagatgaccatctcga

SEQ ID NO: 38768 - DNA, 20 bp, Artificial Sequence
  MKO10038768_A_Olfr980
  gRNA
agacacatctgccatcgaga

SEQ ID NO: 38769 - DNA, 20 bp, Artificial Sequence
  MKO10038769_A_Olfr980
  gRNA
aatccaccctgatcaccatc

SEQ ID NO: 38770 - DNA, 20 bp, Artificial Sequence
  MKO10038770_A_Olfr981
  gRNA
tggctgccattctgcgaatc

SEQ ID NO: 38771 - DNA, 20 bp, Artificial Sequence
  MKO10038771_A_Olfr981
  gRNA
ggctccaccggcccatgtac

SEQ ID NO: 38772 - DNA, 20 bp, Artificial Sequence
  MKO10038772_A_Olfr981
  gRNA
acagacgctgcgagtcatga

SEQ ID NO: 38773 - DNA, 20 bp, Artificial Sequence
  MKO10038773_A_Olfr982
  gRNA
atgaacaagcgggtgtgcgc

SEQ ID NO: 38774 - DNA, 20 bp, Artificial Sequence
  MKO10038774_A_Olfr982
  gRNA
ggtgttgcgcattcgcacag

SEQ ID NO: 38775 - DNA, 20 bp, Artificial Sequence
  MKO10038775_A_Olfr982
  gRNA
ctgtagacagacacgcatca

SEQ ID NO: 38776 - DNA, 20 bp, Artificial Sequence
  MKO10038776_A_Olfr983
  gRNA
aggatgttcaaattgcactg

SEQ ID NO: 38777 - DNA, 20 bp, Artificial Sequence
  MKO10038777_A_Olfr983
  gRNA
tactttaagtcttctcctgt

SEQ ID NO: 38778 - DNA, 20 bp, Artificial Sequence
  MKO10038778_A_Olfr983
  gRNA
acatgatgaccttataaagc

SEQ ID NO: 38779 - DNA, 20 bp, Artificial Sequence
  MKO10038779_A_Olfr984
  gRNA
gctccgaagtcactcaaaag

SEQ ID NO: 38780 - DNA, 20 bp, Artificial Sequence
  MKO10038780_A_Olfr984
  gRNA
gataaaaccacccacccacg

SEQ ID NO: 38781 - DNA, 20 bp, Artificial Sequence
  MKO10038781_A_Olfr984
  gRNA
gaatccagcaaaccattccc

SEQ ID NO: 38782 - DNA, 20 bp, Artificial Sequence
  MKO10038782_A_Olfr985
  gRNA
aagttcgtcaatgtaagtgc

SEQ ID NO: 38783 - DNA, 20 bp, Artificial Sequence
  MKO10038783_A_Olfr985
  gRNA
tatctgaaacccgcttctaa

SEQ ID NO: 38784 - DNA, 20 bp, Artificial Sequence
  MKO10038784_A_Olfr985
  gRNA
atgacggaaccattagaagc

SEQ ID NO: 38785 - DNA, 20 bp, Artificial Sequence
  MKO10038785_A_Olfr986
  gRNA
gcaacgattctcgtgatccc

SEQ ID NO: 38786 - DNA, 20 bp, Artificial Sequence
  MKO10038786_A_Olfr986
  gRNA
ggatcacgagaatcgttgcc

SEQ ID NO: 38787 - DNA, 20 bp, Artificial Sequence
  MKO10038787_A_Olfr986
  gRNA
taatgagtccattgcccgaa

SEQ ID NO: 38788 - DNA, 20 bp, Artificial Sequence
  MKO10038788_A_Olfr987
  gRNA
ttgctgggcagcacaagtct

SEQ ID NO: 38789 - DNA, 20 bp, Artificial Sequence
  MKO10038789_A_Olfr987
  gRNA
caaccagcacagtactcaac

SEQ ID NO: 38790 - DNA, 20 bp, Artificial Sequence
  MKO10038790_A_Olfr987
  gRNA
caacctgttgagtactgtgc

SEQ ID NO: 38791 - DNA, 20 bp, Artificial Sequence
  MKO10038791_A_Olfr988
  gRNA
tttccggacagcacaaatct

SEQ ID NO: 38792 - DNA, 20 bp, Artificial Sequence
  MKO10038792_A_Olfr988
  gRNA
agccatagcagctaagatga

SEQ ID NO: 38793 - DNA, 20 bp, Artificial Sequence
  MKO10038793_A_Olfr988
  gRNA
caacaagtacagtgctcact

SEQ ID NO: 38794 - DNA, 20 bp, Artificial Sequence
  MKO10038794_A_Olfr98
  gRNA
agctgctgtcatgtatactc

SEQ ID NO: 38795 - DNA, 20 bp, Artificial Sequence
  MKO10038795_A_Olfr98
  gRNA
cctcaatgagagtctgatga

SEQ ID NO: 38796 - DNA, 20 bp, Artificial Sequence
  MKO10038796_A_Olfr98
  gRNA
atctagttctcactcctctc

SEQ ID NO: 38797 - DNA, 20 bp, Artificial Sequence
  MKO10038797_A_Olfr992
  gRNA
ctaaatgccactgtaaatac

SEQ ID NO: 38798 - DNA, 20 bp, Artificial Sequence
  MKO10038798_A_Olfr992
  gRNA
gactaacagatctcaagaac

SEQ ID NO: 38799 - DNA, 20 bp, Artificial Sequence
  MKO10038799_A_Olfr992
  gRNA
ttgtcagtaccatgatattg

SEQ ID NO: 38800 - DNA, 20 bp, Artificial Sequence
  MKO10038800_A_Olfr993
  gRNA
atgagtatgggataacgaag

SEQ ID NO: 38801 - DNA, 20 bp, Artificial Sequence
  MKO10038801_A_Olfr993
  gRNA
gtatctgtcttctactacaa

SEQ ID NO: 38802 - DNA, 20 bp, Artificial Sequence
  MKO10038802_A_Olfr993
  gRNA
taacctgatattcactgtgc

SEQ ID NO: 38803 - DNA, 20 bp, Artificial Sequence
  MKO10038803_A_Olfr994
  gRNA
gctaccccataatcatgtct

SEQ ID NO: 38804 - DNA, 20 bp, Artificial Sequence
  MKO10038804_A_Olfr994
  gRNA
gacttgccgagacatgatta

SEQ ID NO: 38805 - DNA, 20 bp, Artificial Sequence
  MKO10038805_A_Olfr994
  gRNA
ttctcctcggaattgtctga

SEQ ID NO: 38806 - DNA, 20 bp, Artificial Sequence
  MKO10038806_A_Olfr995
  gRNA
acagtcactggtcgcaaatg

SEQ ID NO: 38807 - DNA, 20 bp, Artificial Sequence
  MKO10038807_A_Olfr995
  gRNA
tgaccaacacagtgaacgtc

SEQ ID NO: 38808 - DNA, 20 bp, Artificial Sequence
  MKO10038808_A_Olfr995
  gRNA
ccactgccataacagcgagg

SEQ ID NO: 38809 - DNA, 20 bp, Artificial Sequence
  MKO10038809_A_Olfr996
  gRNA
gctcagtggactgataatcc

SEQ ID NO: 38810 - DNA, 20 bp, Artificial Sequence
  MKO10038810_A_Olfr996
  gRNA
caactgtctctatcctgtat

SEQ ID NO: 38811 - DNA, 20 bp, Artificial Sequence
  MKO10038811_A_Olfr996
  gRNA
ttctatcttaagcaccagtt

SEQ ID NO: 38812 - DNA, 20 bp, Artificial Sequence
  MKO10038812_A_Olfr998
  gRNA
gcacacgccaatgataaaag

SEQ ID NO: 38813 - DNA, 20 bp, Artificial Sequence
  MKO10038813_A_Olfr998
  gRNA
ttcaagattcaaactgctga

SEQ ID NO: 38814 - DNA, 20 bp, Artificial Sequence
  MKO10038814_A_Olfr998
  gRNA
cagaccactgaacactccta

SEQ ID NO: 38815 - DNA, 20 bp, Artificial Sequence
  MKO10038815_A_Olfr99
  gRNA
tactcacctcaataaaatcc

SEQ ID NO: 38816 - DNA, 20 bp, Artificial Sequence
  MKO10038816_A_Olfr99
  gRNA
atgagagctgagtagcgcag

SEQ ID NO: 38817 - DNA, 20 bp, Artificial Sequence
  MKO10038817_A_Olfr99
  gRNA
ttccaaccaaaattatcacc

SEQ ID NO: 38818 - DNA, 20 bp, Artificial Sequence
  MKO10038818_A_Olfr9
  gRNA
tgttcccaaatgaatcagcc

SEQ ID NO: 38819 - DNA, 20 bp, Artificial Sequence
  MKO10038819_A_Olfr9
  gRNA
tgtttatagtctgcgaaaca

SEQ ID NO: 38820 - DNA, 20 bp, Artificial Sequence
  MKO10038820_A_Olfr9
  gRNA
ctcatgaagagatacctttg

SEQ ID NO: 38821 - DNA, 20 bp, Artificial Sequence
  MKO10038821_A_Olig1
  gRNA
aacttcgcgcagcgcgtcca

SEQ ID NO: 38822 - DNA, 20 bp, Artificial Sequence
  MKO10038822_A_Olig1
  gRNA
cgcccgggccgacgccaaag

SEQ ID NO: 38823 - DNA, 20 bp, Artificial Sequence
  MKO10038823_A_Olig1
  gRNA
gcttcggccttctcgcgcgc

SEQ ID NO: 38824 - DNA, 20 bp, Artificial Sequence
  MKO10038824_A_Olig2
  gRNA
cgcccatagccgacacgtgg

SEQ ID NO: 38825 - DNA, 20 bp, Artificial Sequence
  MKO10038825_A_Olig2
  gRNA
cgcgcacgccgcgcaccacc

SEQ ID NO: 38826 - DNA, 20 bp, Artificial Sequence
  MKO10038826_A_Olig2
  gRNA
atgcgcgcctgacgcgccca

SEQ ID NO: 38827 - DNA, 20 bp, Artificial Sequence
  MKO10038827_A_Olig3
  gRNA
tcaacggacgcgaacgcaag

SEQ ID NO: 38828 - DNA, 20 bp, Artificial Sequence
  MKO10038828_A_Olig3
  gRNA
gcgacctccctgccgaccat

SEQ ID NO: 38829 - DNA, 20 bp, Artificial Sequence
  MKO10038829_A_Olig3
  gRNA
ggggcattcggccggccacc

SEQ ID NO: 38830 - DNA, 20 bp, Artificial Sequence
  MKO10038830_A_Olr1
  gRNA
ccaagcgaaccttactcagc

SEQ ID NO: 38831 - DNA, 20 bp, Artificial Sequence
  MKO10038831_A_Olr1
  gRNA
cagtgacccttattgtacag

SEQ ID NO: 38832 - DNA, 20 bp, Artificial Sequence
  MKO10038832_A_Olr1
  gRNA
ggatacgatcctgctgagta

SEQ ID NO: 38833 - DNA, 20 bp, Artificial Sequence
  MKO10038833_A_Oma1
  gRNA
tgagatcgcacacgcagtcc

SEQ ID NO: 38834 - DNA, 20 bp, Artificial Sequence
  MKO10038834_A_Oma1
  gRNA
acagtgcaatcgagacgtcc

SEQ ID NO: 38835 - DNA, 20 bp, Artificial Sequence
  MKO10038835_A_Oma1
  gRNA
aacaagtggcggctgcttct

SEQ ID NO: 38836 - DNA, 20 bp, Artificial Sequence
  MKO10038836_A_Omd
  gRNA
ggtcataatcgtcatcccat

SEQ ID NO: 38837 - DNA, 20 bp, Artificial Sequence
  MKO10038837_A_Omd
  gRNA
gccaatatgaagcttaccga

SEQ ID NO: 38838 - DNA, 20 bp, Artificial Sequence
  MKO10038838_A_Omd
  gRNA
ccatttaacataccttcgtg

SEQ ID NO: 38839 - DNA, 20 bp, Artificial Sequence
  MKO10038839_A_Omg
  gRNA
gtgaccctcagcatagctcg

SEQ ID NO: 38840 - DNA, 20 bp, Artificial Sequence
  MKO10038840_A_Omg
  gRNA
tttcttccctccgtaagttg

SEQ ID NO: 38841 - DNA, 20 bp, Artificial Sequence
  MKO10038841_A_Omg
  gRNA
gtgtcagtgagttattagac

SEQ ID NO: 38842 - DNA, 20 bp, Artificial Sequence
  MKO10038842_A_Omp
  gRNA
gtcgggcgtccagttctgcg

SEQ ID NO: 38843 - DNA, 20 bp, Artificial Sequence
  MKO10038843_A_Omp
  gRNA
aagactccgacgccatggat

SEQ ID NO: 38844 - DNA, 20 bp, Artificial Sequence
  MKO10038844_A_Omp
  gRNA
aggctccacgccctcgccaa

SEQ ID NO: 38845 - DNA, 20 bp, Artificial Sequence
  MKO10038845_A_Omt2a
  gRNA
cgaaagtgcacctggaatcg

SEQ ID NO: 38846 - DNA, 20 bp, Artificial Sequence
  MKO10038846_A_Omt2a
  gRNA
ttcgattcttgaactattga

SEQ ID NO: 38847 - DNA, 20 bp, Artificial Sequence
  MKO10038847_A_Omt2a
  gRNA
ctttgtagacccacgattcc

SEQ ID NO: 38848 - DNA, 20 bp, Artificial Sequence
  MKO10038848_A_Omt2b
  gRNA
cacgttcttattacatctga

SEQ ID NO: 38849 - DNA, 20 bp, Artificial Sequence
  MKO10038849_A_Omt2b
  gRNA
tgattgtgtacctagagacc

SEQ ID NO: 38850 - DNA, 20 bp, Artificial Sequence
  MKO10038850_A_Omt2b
  gRNA
ggtacacaatcacaaactcc

SEQ ID NO: 38851 - DNA, 20 bp, Artificial Sequence
  MKO10038851_A_Onecut1
  gRNA
gtcggtgggcatagccgcgc

SEQ ID NO: 38852 - DNA, 20 bp, Artificial Sequence
  MKO10038852_A_Onecut1
  gRNA
atgtcggcgctccgcttagc

SEQ ID NO: 38853 - DNA, 20 bp, Artificial Sequence
  MKO10038853_A_Onecut1
  gRNA
ttgcatgtagagttcgacgt

SEQ ID NO: 38854 - DNA, 20 bp, Artificial Sequence
  MKO10038854_A_Onecut2
  gRNA
agtgtggtgcgcgtcgaaat

SEQ ID NO: 38855 - DNA, 20 bp, Artificial Sequence
  MKO10038855_A_Onecut2
  gRNA
gagcggcgtcagcgtagtgt

SEQ ID NO: 38856 - DNA, 20 bp, Artificial Sequence
  MKO10038856_A_Onecut2
  gRNA
ctcgcagaagaaatcccgcc

SEQ ID NO: 38857 - DNA, 20 bp, Artificial Sequence
  MKO10038857_A_Onecut3
  gRNA
ccttgccataaggcccgtag

SEQ ID NO: 38858 - DNA, 20 bp, Artificial Sequence
  MKO10038858_A_Onecut3
  gRNA
gcgcatcctgtgccgctcgc

SEQ ID NO: 38859 - DNA, 20 bp, Artificial Sequence
  MKO10038859_A_Onecut3
  gRNA
gtcgccgctgcatgaaccgc

SEQ ID NO: 38860 - DNA, 20 bp, Artificial Sequence
  MKO10038860_A_Ooep
  gRNA
tggcgtcagcatcagccgtg

SEQ ID NO: 38861 - DNA, 20 bp, Artificial Sequence
  MKO10038861_A_Ooep
  gRNA
tttcattcgcgtctgtgcac

SEQ ID NO: 38862 - DNA, 20 bp, Artificial Sequence
  MKO10038862_A_Ooep
  gRNA
ctatttctgagatttccgct

SEQ ID NO: 38863 - DNA, 20 bp, Artificial Sequence
  MKO10038863_A_Oog1
  gRNA
ctagagtgctatgatgacag

SEQ ID NO: 38864 - DNA, 20 bp, Artificial Sequence
  MKO10038864_A_Oog1
  gRNA
ctgtcatcatagcactctag

SEQ ID NO: 38865 - DNA, 20 bp, Artificial Sequence
  MKO10038865_A_Oog1
  gRNA
tacttacctgatctggacaa

SEQ ID NO: 38866 - DNA, 20 bp, Artificial Sequence
  MKO10038866_A_Oog2
  gRNA
agtgaacgaaagtacttcca

SEQ ID NO: 38867 - DNA, 20 bp, Artificial Sequence
  MKO10038867_A_Oog2
  gRNA
ctattcgccacccactctga

SEQ ID NO: 38868 - DNA, 20 bp, Artificial Sequence
  MKO10038868_A_Oog2
  gRNA
tagcaagacagtgtctactg

SEQ ID NO: 38869 - DNA, 20 bp, Artificial Sequence
  MKO10038869_A_Oog3
  gRNA
ttgtcagtgctcctacagaa

SEQ ID NO: 38870 - DNA, 20 bp, Artificial Sequence
  MKO10038870_A_Oog3
  gRNA
gacttacttgatctagacac

SEQ ID NO: 38871 - DNA, 20 bp, Artificial Sequence
  MKO10038871_A_Oog3
  gRNA
tgtaacaaaggcaatatcct

SEQ ID NO: 38872 - DNA, 20 bp, Artificial Sequence
  MKO10038872_A_Oog4
  gRNA
ctgactgctacaagtttgcg

SEQ ID NO: 38873 - DNA, 20 bp, Artificial Sequence
  MKO10038873_A_Oog4
  gRNA
aactcagagtgctcgattta

SEQ ID NO: 38874 - DNA, 20 bp, Artificial Sequence
  MKO10038874_A_Oog4
  gRNA
ggtggatcctatgaaggtag

SEQ ID NO: 38875 - DNA, 20 bp, Artificial Sequence
  MKO10038875_A_Oosp1
  gRNA
tactttattggcaatgccgc

SEQ ID NO: 38876 - DNA, 20 bp, Artificial Sequence
  MKO10038876_A_Oosp1
  gRNA
cttgggcctctgaaacgagc

SEQ ID NO: 38877 - DNA, 20 bp, Artificial Sequence
  MKO10038877_A_Oosp1
  gRNA
agatgagcaaactgttccga

SEQ ID NO: 38878 - DNA, 20 bp, Artificial Sequence
  MKO10038878_A_Oosp2
  gRNA
ccgagatgtactttcgtcca

SEQ ID NO: 38879 - DNA, 20 bp, Artificial Sequence
  MKO10038879_A_Oosp2
  gRNA
ctgccggatgggggtctcta

SEQ ID NO: 38880 - DNA, 20 bp, Artificial Sequence
  MKO10038880_A_Oosp2
  gRNA
ggatcctcctcagtagatag

SEQ ID NO: 38881 - DNA, 20 bp, Artificial Sequence
  MKO10038881_A_Oosp3
  gRNA
caatcatctgatgagtgcgt

SEQ ID NO: 38882 - DNA, 20 bp, Artificial Sequence
  MKO10038882_A_Oosp3
  gRNA
tctcaacagcacgcatttga

SEQ ID NO: 38883 - DNA, 20 bp, Artificial Sequence
  MKO10038883_A_Oosp3
  gRNA
cattccgtgttatagctaaa

SEQ ID NO: 38884 - DNA, 20 bp, Artificial Sequence
  MKO10038884_A_Opa1
  gRNA
tctggcgggatgtggcgagc

SEQ ID NO: 38885 - DNA, 20 bp, Artificial Sequence
  MKO10038885_A_Opa1
  gRNA
tgccagtttagctcccgacc

SEQ ID NO: 38886 - DNA, 20 bp, Artificial Sequence
  MKO10038886_A_Opa1
  gRNA
accgctccaaaaactccatc

SEQ ID NO: 38887 - DNA, 20 bp, Artificial Sequence
  MKO10038887_A_Opa3
  gRNA
caagtagaacagcttcgcca

SEQ ID NO: 38888 - DNA, 20 bp, Artificial Sequence
  MKO10038888_A_Opa3
  gRNA
gccgctggccaaccgtatca

SEQ ID NO: 38889 - DNA, 20 bp, Artificial Sequence
  MKO10038889_A_Opa3
  gRNA
ccagactcagcagcgcaata

SEQ ID NO: 38890 - DNA, 20 bp, Artificial Sequence
  MKO10038890_A_Opalin
  gRNA
catcgatgatgagcccgtag

SEQ ID NO: 38891 - DNA, 20 bp, Artificial Sequence
  MKO10038891_A_Opalin
  gRNA
actccactcaccgtattcga

SEQ ID NO: 38892 - DNA, 20 bp, Artificial Sequence
  MKO10038892_A_Opalin
  gRNA
ctctacgggctcatcatcga

SEQ ID NO: 38893 - DNA, 20 bp, Artificial Sequence
  MKO10038893_A_Opcml
  gRNA
gacatcaaacgtgaccagtc

SEQ ID NO: 38894 - DNA, 20 bp, Artificial Sequence
  MKO10038894_A_Opcml
  gRNA
agaccctcgagtgatcattt

SEQ ID NO: 38895 - DNA, 20 bp, Artificial Sequence
  MKO10038895_A_Opcml
  gRNA
ctccatgtcaccgttggttc

SEQ ID NO: 38896 - DNA, 20 bp, Artificial Sequence
  MKO10038896_A_Ophn1
  gRNA
accgatgatgagattaatat

SEQ ID NO: 38897 - DNA, 20 bp, Artificial Sequence
  MKO10038897_A_Ophn1
  gRNA
gttccttccgaaaagtttcc

SEQ ID NO: 38898 - DNA, 20 bp, Artificial Sequence
  MKO10038898_A_Ophn1
  gRNA
cttatcagcggaatcattca

SEQ ID NO: 38899 - DNA, 20 bp, Artificial Sequence
  MKO10038899_A_Oplah
  gRNA
ccgaggaacaatccgcacca

SEQ ID NO: 38900 - DNA, 20 bp, Artificial Sequence
  MKO10038900_A_Oplah
  gRNA
gcgatgtgactggtgtctag

SEQ ID NO: 38901 - DNA, 20 bp, Artificial Sequence
  MKO10038901_A_Oplah
  gRNA
ggtgccggctctcccgtcaa

SEQ ID NO: 38902 - DNA, 20 bp, Artificial Sequence
  MKO10038902_A_Opn1mw
  gRNA
gaggtaccgctgaacacgtc

SEQ ID NO: 38903 - DNA, 20 bp, Artificial Sequence
  MKO10038903_A_Opn1mw
  gRNA
tggacggccccaccaatctt

SEQ ID NO: 38904 - DNA, 20 bp, Artificial Sequence
  MKO10038904_A_Opn1mw
  gRNA
cggggttcagtcttatatga

SEQ ID NO: 38905 - DNA, 20 bp, Artificial Sequence
  MKO10038905_A_Opn1sw
  gRNA
atcgaagcgagtactacacc

SEQ ID NO: 38906 - DNA, 20 bp, Artificial Sequence
  MKO10038906_A_Opn1sw
  gRNA
gtagtactcgcttcgatact

SEQ ID NO: 38907 - DNA, 20 bp, Artificial Sequence
  MKO10038907_A_Opn1sw
  gRNA
cacgtcagattcgtctgcca

SEQ ID NO: 38908 - DNA, 20 bp, Artificial Sequence
  MKO10038908_A_Opn3
  gRNA
ccccaccgcgtacgagcgcc

SEQ ID NO: 38909 - DNA, 20 bp, Artificial Sequence
  MKO10038909_A_Opn3
  gRNA
ctatgaacgttatatccgtg

SEQ ID NO: 38910 - DNA, 20 bp, Artificial Sequence
  MKO10038910_A_Opn3
  gRNA
cagcgccaggcgctcgtacg

SEQ ID NO: 38911 - DNA, 20 bp, Artificial Sequence
  MKO10038911_A_Opn4
  gRNA
cactcgtcctgctaggcgtc

SEQ ID NO: 38912 - DNA, 20 bp, Artificial Sequence
  MKO10038912_A_Opn4
  gRNA
tctggtgatcacacgtccac

SEQ ID NO: 38913 - DNA, 20 bp, Artificial Sequence
  MKO10038913_A_Opn4
  gRNA
agtcttgtcaagcttaactc

SEQ ID NO: 38914 - DNA, 20 bp, Artificial Sequence
  MKO10038914_A_Opn5
  gRNA
gctcaggtgcatagtccccc

SEQ ID NO: 38915 - DNA, 20 bp, Artificial Sequence
  MKO10038915_A_Opn5
  gRNA
tatggattcgactgtcgaaa

SEQ ID NO: 38916 - DNA, 20 bp, Artificial Sequence
  MKO10038916_A_Opn5
  gRNA
tgcgtctagaagacatataa

SEQ ID NO: 38917 - DNA, 20 bp, Artificial Sequence
  MKO10038917_A_Oprd1
  gRNA
cgacgcattggcgcccgcgc

SEQ ID NO: 38918 - DNA, 20 bp, Artificial Sequence
  MKO10038918_A_Oprd1
  gRNA
caatcggcgcgacccacttg

SEQ ID NO: 38919 - DNA, 20 bp, Artificial Sequence
  MKO10038919_A_Oprd1
  gRNA
ccatgcgcgtgatgcgccgc

SEQ ID NO: 38920 - DNA, 20 bp, Artificial Sequence
  MKO10038920_A_Oprk1
  gRNA
acaggagccggacactcttc

SEQ ID NO: 38921 - DNA, 20 bp, Artificial Sequence
  MKO10038921_A_Oprk1
  gRNA
ggtatatcagcgatagtcct

SEQ ID NO: 38922 - DNA, 20 bp, Artificial Sequence
  MKO10038922_A_Oprk1
  gRNA
cttccctattaagatgcgaa

SEQ ID NO: 38923 - DNA, 20 bp, Artificial Sequence
  MKO10038923_A_Oprl1
  gRNA
acgcctagtcatgccggccg

SEQ ID NO: 38924 - DNA, 20 bp, Artificial Sequence
  MKO10038924_A_Oprl1
  gRNA
ctcatgattcgacgacttcg

SEQ ID NO: 38925 - DNA, 20 bp, Artificial Sequence
  MKO10038925_A_Oprl1
  gRNA
atatggccacattaacggcc

SEQ ID NO: 38926 - DNA, 20 bp, Artificial Sequence
  MKO10038926_A_Oprm1
  gRNA
ttcggggggtacggaaatcc

SEQ ID NO: 38927 - DNA, 20 bp, Artificial Sequence
  MKO10038927_A_Oprm1
  gRNA
tcgatccactgtattagccg

SEQ ID NO: 38928 - DNA, 20 bp, Artificial Sequence
  MKO10038928_A_Oprm1
  gRNA
ctcgaatccgtcaaaacact

SEQ ID NO: 38929 - DNA, 20 bp, Artificial Sequence
  MKO10038929_A_Optc
  gRNA
tgactcaccacgaatgcctc

SEQ ID NO: 38930 - DNA, 20 bp, Artificial Sequence
  MKO10038930_A_Optc
  gRNA
tcctggacgtccgcctgaat

SEQ ID NO: 38931 - DNA, 20 bp, Artificial Sequence
  MKO10038931_A_Optc
  gRNA
cgcacttaccatgactgctc

SEQ ID NO: 38932 - DNA, 20 bp, Artificial Sequence
  MKO10038932_A_Optn
  gRNA
gatgcgccttcgggctgaaa

SEQ ID NO: 38933 - DNA, 20 bp, Artificial Sequence
  MKO10038933_A_Optn
  gRNA
cagcccgaaggcgcatcacc

SEQ ID NO: 38934 - DNA, 20 bp, Artificial Sequence
  MKO10038934_A_Optn
  gRNA
gatttgaggagctgtccgcc

SEQ ID NO: 38935 - DNA, 20 bp, Artificial Sequence
  MKO10038935_A_Orai1
  gRNA
ggccgagtttgcccgcttgc

SEQ ID NO: 38936 - DNA, 20 bp, Artificial Sequence
  MKO10038936_A_Orai1
  gRNA
cctgcatcgagtgctcgttg

SEQ ID NO: 38937 - DNA, 20 bp, Artificial Sequence
  MKO10038937_A_Orai1
  gRNA
cctcaacgagcactcgatgc

SEQ ID NO: 38938 - DNA, 20 bp, Artificial Sequence
  MKO10038938_A_Orai2
  gRNA
cgctgatggagttgaggttg

SEQ ID NO: 38939 - DNA, 20 bp, Artificial Sequence
  MKO10038939_A_Orai2
  gRNA
gttgctcaccgcttccacgt

SEQ ID NO: 38940 - DNA, 20 bp, Artificial Sequence
  MKO10038940_A_Orai2
  gRNA
tcaccatggcgaagccagac

SEQ ID NO: 38941 - DNA, 20 bp, Artificial Sequence
  MKO10038941_A_Orai3
  gRNA
ccacgtatctgtgcagtcgt

SEQ ID NO: 38942 - DNA, 20 bp, Artificial Sequence
  MKO10038942_A_Orai3
  gRNA
ccgcgggctcagccacgtac

SEQ ID NO: 38943 - DNA, 20 bp, Artificial Sequence
  MKO10038943_A_Orai3
  gRNA
ccaacgactgcacagatacg

SEQ ID NO: 38944 - DNA, 20 bp, Artificial Sequence
  MKO10038944_A_Oraov1
  gRNA
agtagcttggggatcgttga

SEQ ID NO: 38945 - DNA, 20 bp, Artificial Sequence
  MKO10038945_A_Oraov1
  gRNA
aagcggtatggcatggtaca

SEQ ID NO: 38946 - DNA, 20 bp, Artificial Sequence
  MKO10038946_A_Oraov1
  gRNA
attcacagattggatgctac

SEQ ID NO: 38947 - DNA, 20 bp, Artificial Sequence
  MKO10038947_A_Orc1
  gRNA
ttctttgaccacctcgtgtt

SEQ ID NO: 38948 - DNA, 20 bp, Artificial Sequence
  MKO10038948_A_Orc1
  gRNA
attaatgtggagaccatcat

SEQ ID NO: 38949 - DNA, 20 bp, Artificial Sequence
  MKO10038949_A_Orc1
  gRNA
acaacacacttagccctatc

SEQ ID NO: 38950 - DNA, 20 bp, Artificial Sequence
  MKO10038950_A_Orc2
  gRNA
ggtgccaagcgtgcagtttg

SEQ ID NO: 38951 - DNA, 20 bp, Artificial Sequence
  MKO10038951_A_Orc2
  gRNA
tctcccacaaactgcacgct

SEQ ID NO: 38952 - DNA, 20 bp, Artificial Sequence
  MKO10038952_A_Orc2
  gRNA
tttagcagagccgtttccca

SEQ ID NO: 38953 - DNA, 20 bp, Artificial Sequence
  MKO10038953_A_Orc3
  gRNA
ggccacctcctccgtgtcta

SEQ ID NO: 38954 - DNA, 20 bp, Artificial Sequence
  MKO10038954_A_Orc3
  gRNA
cccacgtaccttagacacgg

SEQ ID NO: 38955 - DNA, 20 bp, Artificial Sequence
  MKO10038955_A_Orc3
  gRNA
acggatgaaatctgaaacag

SEQ ID NO: 38956 - DNA, 20 bp, Artificial Sequence
  MKO10038956_A_Orc4
  gRNA
agtccacatagcaacctctt

SEQ ID NO: 38957 - DNA, 20 bp, Artificial Sequence
  MKO10038957_A_Orc4
  gRNA
gtgatacaagttcacttaaa

SEQ ID NO: 38958 - DNA, 20 bp, Artificial Sequence
  MKO10038958_A_Orc4
  gRNA
ctcaaaagaactgctatcta

SEQ ID NO: 38959 - DNA, 20 bp, Artificial Sequence
  MKO10038959_A_Orc5
  gRNA
aacttacctatgctatagtc

SEQ ID NO: 38960 - DNA, 20 bp, Artificial Sequence
  MKO10038960_A_Orc5
  gRNA
gaccagtgctgaacatctca

SEQ ID NO: 38961 - DNA, 20 bp, Artificial Sequence
  MKO10038961_A_Orc5
  gRNA
tacttacaatatacacagtc

SEQ ID NO: 38962 - DNA, 20 bp, Artificial Sequence
  MKO10038962_A_Orc6
  gRNA
ctgtctcctagctacgagtc

SEQ ID NO: 38963 - DNA, 20 bp, Artificial Sequence
  MKO10038963_A_Orc6
  gRNA
gagcagatcttgacttgtcc

SEQ ID NO: 38964 - DNA, 20 bp, Artificial Sequence
  MKO10038964_A_Orc6
  gRNA
tacagctgaactgtacagct

SEQ ID NO: 38965 - DNA, 20 bp, Artificial Sequence
  MKO10038965_A_Orm1
  gRNA
ctttcagaaaactcgagtac

SEQ ID NO: 38966 - DNA, 20 bp, Artificial Sequence
  MKO10038966_A_Orm1
  gRNA
ttgcccaccttatagtgctg

SEQ ID NO: 38967 - DNA, 20 bp, Artificial Sequence
  MKO10038967_A_Orm1
  gRNA
catgtttcctcagcactata

SEQ ID NO: 38968 - DNA, 20 bp, Artificial Sequence
  MKO10038968_A_Orm2
  gRNA
catcgtgtcatttatcaagt

SEQ ID NO: 38969 - DNA, 20 bp, Artificial Sequence
  MKO10038969_A_Orm2
  gRNA
ctgtcctaaaccctgattac

SEQ ID NO: 38970 - DNA, 20 bp, Artificial Sequence
  MKO10038970_A_Orm2
  gRNA
aacccttaccatacttggag

SEQ ID NO: 38971 - DNA, 20 bp, Artificial Sequence
  MKO10038971_A_Orm3
  gRNA
aaacggggactgtccctgag

SEQ ID NO: 38972 - DNA, 20 bp, Artificial Sequence
  MKO10038972_A_Orm3
  gRNA
caccttcaccatacttgaag

SEQ ID NO: 38973 - DNA, 20 bp, Artificial Sequence
  MKO10038973_A_Orm3
  gRNA
aatgggaccctcttcaagta

SEQ ID NO: 38974 - DNA, 20 bp, Artificial Sequence
  MKO10038974_A_Ormdl1
  gRNA
actcgtgtaatgaacagccg

SEQ ID NO: 38975 - DNA, 20 bp, Artificial Sequence
  MKO10038975_A_Ormdl1
  gRNA
gagcaaggctcctaactcac

SEQ ID NO: 38976 - DNA, 20 bp, Artificial Sequence
  MKO10038976_A_Ormdl1
  gRNA
agccttgctctaccctgatc

SEQ ID NO: 38977 - DNA, 20 bp, Artificial Sequence
  MKO10038977_A_Ormdl2
  gRNA
gaagtgagcagcatcgtact

SEQ ID NO: 38978 - DNA, 20 bp, Artificial Sequence
  MKO10038978_A_Ormdl2
  gRNA
acactcgagtgatgaacagt

SEQ ID NO: 38979 - DNA, 20 bp, Artificial Sequence
  MKO10038979_A_Ormdl2
  gRNA
actgttcatcactcgagtgt

SEQ ID NO: 38980 - DNA, 20 bp, Artificial Sequence
  MKO10038980_A_Ormdl3
  gRNA
tcacagcactataggcgtga

SEQ ID NO: 38981 - DNA, 20 bp, Artificial Sequence
  MKO10038981_A_Ormdl3
  gRNA
acacgggtgatgaacagtcg

SEQ ID NO: 38982 - DNA, 20 bp, Artificial Sequence
  MKO10038982_A_Ormdl3
  gRNA
atcttaccaggttgtggata

SEQ ID NO: 38983 - DNA, 20 bp, Artificial Sequence
  MKO10038983_A_Os9
  gRNA
acaccgcccgtcagacgcgc

SEQ ID NO: 38984 - DNA, 20 bp, Artificial Sequence
  MKO10038984_A_Os9
  gRNA
atcccgggcccctggtaagc

SEQ ID NO: 38985 - DNA, 20 bp, Artificial Sequence
  MKO10038985_A_Os9
  gRNA
cctgttacctgcgcgtctga

SEQ ID NO: 38986 - DNA, 20 bp, Artificial Sequence
  MKO10038986_A_Osbp2
  gRNA
gcgggctctaaattatgagc

SEQ ID NO: 38987 - DNA, 20 bp, Artificial Sequence
  MKO10038987_A_Osbp2
  gRNA
tccttgccccgttgcataga

SEQ ID NO: 38988 - DNA, 20 bp, Artificial Sequence
  MKO10038988_A_Osbp2
  gRNA
cccgccaggggtgttgcaga

SEQ ID NO: 38989 - DNA, 20 bp, Artificial Sequence
  MKO10038989_A_Osbpl10
  gRNA
cgcccgtactgagatgtctc

SEQ ID NO: 38990 - DNA, 20 bp, Artificial Sequence
  MKO10038990_A_Osbpl10
  gRNA
acgcgtgactgagacaacac

SEQ ID NO: 38991 - DNA, 20 bp, Artificial Sequence
  MKO10038991_A_Osbpl10
  gRNA
tgtggctgggtggcgccgcc

SEQ ID NO: 38992 - DNA, 20 bp, Artificial Sequence
  MKO10038992_A_Osbpl11
  gRNA
gagtttatactgctccccgc

SEQ ID NO: 38993 - DNA, 20 bp, Artificial Sequence
  MKO10038993_A_Osbpl11
  gRNA
ggtgtgcgagtcctcatcgc

SEQ ID NO: 38994 - DNA, 20 bp, Artificial Sequence
  MKO10038994_A_Osbpl11
  gRNA
cctttccaatagcttccgtg

SEQ ID NO: 38995 - DNA, 20 bp, Artificial Sequence
  MKO10038995_A_Osbpl1a
  gRNA
tccggtgcgctcccactgag

SEQ ID NO: 38996 - DNA, 20 bp, Artificial Sequence
  MKO10038996_A_Osbpl1a
  gRNA
tgtattcagttagccgctgc

SEQ ID NO: 38997 - DNA, 20 bp, Artificial Sequence
  MKO10038997_A_Osbpl1a
  gRNA
aaagcccttcaacccgcttc

SEQ ID NO: 38998 - DNA, 20 bp, Artificial Sequence
  MKO10038998_A_Osbpl2
  gRNA
ccacacactgaagtcgcttc

SEQ ID NO: 38999 - DNA, 20 bp, Artificial Sequence
  MKO10038999_A_Osbpl2
  gRNA
tgtactctgtgatccgctgc

SEQ ID NO: 39000 - DNA, 20 bp, Artificial Sequence
  MKO10039000_A_Osbpl2
  gRNA
ctcaagtcagtcccagccgc

SEQ ID NO: 39001 - DNA, 20 bp, Artificial Sequence
  MKO10039001_A_Osbpl3
  gRNA
aggggaaatgacttacaccc

SEQ ID NO: 39002 - DNA, 20 bp, Artificial Sequence
  MKO10039002_A_Osbpl3
  gRNA
taagtgtatcgacctagaca

SEQ ID NO: 39003 - DNA, 20 bp, Artificial Sequence
  MKO10039003_A_Osbpl3
  gRNA
agatgtgctcctccgtgtct

SEQ ID NO: 39004 - DNA, 20 bp, Artificial Sequence
  MKO10039004_A_Osbpl5
  gRNA
aatgtacctctccaacgacc

SEQ ID NO: 39005 - DNA, 20 bp, Artificial Sequence
  MKO10039005_A_Osbpl5
  gRNA
ctccgccacgaaggtgccac

SEQ ID NO: 39006 - DNA, 20 bp, Artificial Sequence
  MKO10039006_A_Osbpl5
  gRNA
tcttaccagtggcaccttcg

SEQ ID NO: 39007 - DNA, 20 bp, Artificial Sequence
  MKO10039007_A_Osbpl6
  gRNA
acttacatcaagtggcgcct

SEQ ID NO: 39008 - DNA, 20 bp, Artificial Sequence
  MKO10039008_A_Osbpl6
  gRNA
ataaatccctcgtgcctgtc

SEQ ID NO: 39009 - DNA, 20 bp, Artificial Sequence
  MKO10039009_A_Osbpl6
  gRNA
cagtcggcagttgctagagc

SEQ ID NO: 39010 - DNA, 20 bp, Artificial Sequence
  MKO10039010_A_Osbpl7
  gRNA
gacggatagccggacatcga

SEQ ID NO: 39011 - DNA, 20 bp, Artificial Sequence
  MKO10039011_A_Osbpl7
  gRNA
actcacatcttgtcgagtcg

SEQ ID NO: 39012 - DNA, 20 bp, Artificial Sequence
  MKO10039012_A_Osbpl7
  gRNA
tccacggctccatcgatgtc

SEQ ID NO: 39013 - DNA, 20 bp, Artificial Sequence
  MKO10039013_A_Osbpl8
  gRNA
ttgggttagcgtctctgcct

SEQ ID NO: 39014 - DNA, 20 bp, Artificial Sequence
  MKO10039014_A_Osbpl8
  gRNA
ggaaagatgagtcagcgcca

SEQ ID NO: 39015 - DNA, 20 bp, Artificial Sequence
  MKO10039015_A_Osbpl8
  gRNA
cacgaagaaagagtctctta

SEQ ID NO: 39016 - DNA, 20 bp, Artificial Sequence
  MKO10039016_A_Osbpl9
  gRNA
gatcttgatagaacaattaa

SEQ ID NO: 39017 - DNA, 20 bp, Artificial Sequence
  MKO10039017_A_Osbpl9
  gRNA
tttctctagggtttggattc

SEQ ID NO: 39018 - DNA, 20 bp, Artificial Sequence
  MKO10039018_A_Osbpl9
  gRNA
taaagatgatgaacagagaa

SEQ ID NO: 39019 - DNA, 20 bp, Artificial Sequence
  MKO10039019_A_Osbp
  gRNA
aagagaccagcgaatccgac

SEQ ID NO: 39020 - DNA, 20 bp, Artificial Sequence
  MKO10039020_A_Osbp
  gRNA
gtaggtctgagcaccgccat

SEQ ID NO: 39021 - DNA, 20 bp, Artificial Sequence
  MKO10039021_A_Osbp
  gRNA
gtgaagatgctggccgaatc

SEQ ID NO: 39022 - DNA, 20 bp, Artificial Sequence
  MKO10039022_A_Oscar
  gRNA
gccgctaccgcaagacagac

SEQ ID NO: 39023 - DNA, 20 bp, Artificial Sequence
  MKO10039023_A_Oscar
  gRNA
ttgaggtgcgcggcaagtca

SEQ ID NO: 39024 - DNA, 20 bp, Artificial Sequence
  MKO10039024_A_Oscar
  gRNA
aacgtaagcctgcgctgtgc

SEQ ID NO: 39025 - DNA, 20 bp, Artificial Sequence
  MKO10039025_A_Oscp1
  gRNA
ctcgtccacctgatgtatga

SEQ ID NO: 39026 - DNA, 20 bp, Artificial Sequence
  MKO10039026_A_Oscp1
  gRNA
gcggtcatacacagtccgca

SEQ ID NO: 39027 - DNA, 20 bp, Artificial Sequence
  MKO10039027_A_Oscp1
  gRNA
ctggttcagtcgcatgatgg

SEQ ID NO: 39028 - DNA, 20 bp, Artificial Sequence
  MKO10039028_A_Oser1
  gRNA
tgtactgcaatgtatgaatt

SEQ ID NO: 39029 - DNA, 20 bp, Artificial Sequence
  MKO10039029_A_Oser1
  gRNA
cacaatgaaatccgaagcca

SEQ ID NO: 39030 - DNA, 20 bp, Artificial Sequence
  MKO10039030_A_Oser1
  gRNA
gtccactcttaatttcttga

SEQ ID NO: 39031 - DNA, 20 bp, Artificial Sequence
  MKO10039031_A_Osgepl1
  gRNA
aggctcacgcactgactatt

SEQ ID NO: 39032 - DNA, 20 bp, Artificial Sequence
  MKO10039032_A_Osgepl1
  gRNA
accttgtcaagcatgtcgcc

SEQ ID NO: 39033 - DNA, 20 bp, Artificial Sequence
  MKO10039033_A_Osgepl1
  gRNA
cttactaatactgcgttagc

SEQ ID NO: 39034 - DNA, 20 bp, Artificial Sequence
  MKO10039034_A_Osgep
  gRNA
agaaactattgatatcgccg

SEQ ID NO: 39035 - DNA, 20 bp, Artificial Sequence
  MKO10039035_A_Osgep
  gRNA
tacgctgtcaggtcctggca

SEQ ID NO: 39036 - DNA, 20 bp, Artificial Sequence
  MKO10039036_A_Osgep
  gRNA
agaggcaggattgacctcca

SEQ ID NO: 39037 - DNA, 20 bp, Artificial Sequence
  MKO10039037_A_Osgin1
  gRNA
cgccggtccgtgcatgaccc

SEQ ID NO: 39038 - DNA, 20 bp, Artificial Sequence
  MKO10039038_A_Osgin1
  gRNA
gacctagagtacctttccga

SEQ ID NO: 39039 - DNA, 20 bp, Artificial Sequence
  MKO10039039_A_Osgin1
  gRNA
gtgggcgatgtcaccggctg

SEQ ID NO: 39040 - DNA, 20 bp, Artificial Sequence
  MKO10039040_A_Osgin2
  gRNA
ggggcgatcgtccaatccag

SEQ ID NO: 39041 - DNA, 20 bp, Artificial Sequence
  MKO10039041_A_Osgin2
  gRNA
ctacagaccgtatttatcat

SEQ ID NO: 39042 - DNA, 20 bp, Artificial Sequence
  MKO10039042_A_Osgin2
  gRNA
attgcttccgatgataaata

SEQ ID NO: 39043 - DNA, 20 bp, Artificial Sequence
  MKO10039043_A_Osmr
  gRNA
ctggacgtctgatatccctt

SEQ ID NO: 39044 - DNA, 20 bp, Artificial Sequence
  MKO10039044_A_Osmr
  gRNA
catcaattgtcaagccacga

SEQ ID NO: 39045 - DNA, 20 bp, Artificial Sequence
  MKO10039045_A_Osmr
  gRNA
tgtatggacagaagtgctcg

SEQ ID NO: 39046 - DNA, 20 bp, Artificial Sequence
  MKO10039046_A_Osm
  gRNA
ggaacctaggccctggtcgt

SEQ ID NO: 39047 - DNA, 20 bp, Artificial Sequence
  MKO10039047_A_Osm
  gRNA
gcacccagagcccgacgacc

SEQ ID NO: 39048 - DNA, 20 bp, Artificial Sequence
  MKO10039048_A_Osm
  gRNA
gtgattctgtgttccccgtg

SEQ ID NO: 39049 - DNA, 20 bp, Artificial Sequence
  MKO10039049_A_Osr1
  gRNA
catcagtgtgcgtccgctcg

SEQ ID NO: 39050 - DNA, 20 bp, Artificial Sequence
  MKO10039050_A_Osr1
  gRNA
tcgctttgatttcgctaacc

SEQ ID NO: 39051 - DNA, 20 bp, Artificial Sequence
  MKO10039051_A_Osr1
  gRNA
cttgtgagtgtagcgtcttg

SEQ ID NO: 39052 - DNA, 20 bp, Artificial Sequence
  MKO10039052_A_Osr2
  gRNA
gcaccgcactgagaccgtag

SEQ ID NO: 39053 - DNA, 20 bp, Artificial Sequence
  MKO10039053_A_Osr2
  gRNA
gcgggtgatctcgtgcacac

SEQ ID NO: 39054 - DNA, 20 bp, Artificial Sequence
  MKO10039054_A_Osr2
  gRNA
tcaggcgaaactgcgatctg

SEQ ID NO: 39055 - DNA, 20 bp, Artificial Sequence
  MKO10039055_A_Ost4
  gRNA
cgccatcttcgccaacatgc

SEQ ID NO: 39056 - DNA, 20 bp, Artificial Sequence
  MKO10039056_A_Ost4
  gRNA
aagcgacacgcccagcatgt

SEQ ID NO: 39057 - DNA, 20 bp, Artificial Sequence
  MKO10039057_A_Ost4
  gRNA
ccactttcattcctgcttct

SEQ ID NO: 39058 - DNA, 20 bp, Artificial Sequence
  MKO10039058_A_Ostc
  gRNA
ccgagttacctccggtaatg

SEQ ID NO: 39059 - DNA, 20 bp, Artificial Sequence
  MKO10039059_A_Ostc
  gRNA
ttggtgcattggatcggtcc

SEQ ID NO: 39060 - DNA, 20 bp, Artificial Sequence
  MKO10039060_A_Ostc
  gRNA
gcacatgccgtcggctatga

SEQ ID NO: 39061 - DNA, 20 bp, Artificial Sequence
  MKO10039061_A_Ostf1
  gRNA
ggccgcttaccatagttgct

SEQ ID NO: 39062 - DNA, 20 bp, Artificial Sequence
  MKO10039062_A_Ostf1
  gRNA
tttcaatctagtggctgagc

SEQ ID NO: 39063 - DNA, 20 bp, Artificial Sequence
  MKO10039063_A_Ostf1
  gRNA
gcatgtccctttccaccagc

SEQ ID NO: 39064 - DNA, 20 bp, Artificial Sequence
  MKO10039064_A_Ostm1
  gRNA
gacgcacttgtgcatcgatg

SEQ ID NO: 39065 - DNA, 20 bp, Artificial Sequence
  MKO10039065_A_Ostm1
  gRNA
tcgatgcacaagtgcgtctc

SEQ ID NO: 39066 - DNA, 20 bp, Artificial Sequence
  MKO10039066_A_Ostm1
  gRNA
gctattgcagaatacctccg

SEQ ID NO: 39067 - DNA, 20 bp, Artificial Sequence
  MKO10039067_A_Ostn
  gRNA
gtttctaccaatccgatcca

SEQ ID NO: 39068 - DNA, 20 bp, Artificial Sequence
  MKO10039068_A_Ostn
  gRNA
ggtattcccatggatcggat

SEQ ID NO: 39069 - DNA, 20 bp, Artificial Sequence
  MKO10039069_A_Ostn
  gRNA
acaccagatcatcaagacgc

SEQ ID NO: 39070 - DNA, 20 bp, Artificial Sequence
  MKO10039070_A_Otc
  gRNA
aaagtctcacagacaccgct

SEQ ID NO: 39071 - DNA, 20 bp, Artificial Sequence
  MKO10039071_A_Otc
  gRNA
taatcagccaggatctggat

SEQ ID NO: 39072 - DNA, 20 bp, Artificial Sequence
  MKO10039072_A_Otc
  gRNA
gtatcatcctatccagatcc

SEQ ID NO: 39073 - DNA, 20 bp, Artificial Sequence
  MKO10039073_A_Otoa
  gRNA
ttgcttgaaggtcccatgtc

SEQ ID NO: 39074 - DNA, 20 bp, Artificial Sequence
  MKO10039074_A_Otoa
  gRNA
ctatctgaactcaaagaatg

SEQ ID NO: 39075 - DNA, 20 bp, Artificial Sequence
  MKO10039075_A_Otoa
  gRNA
tggatctcacactatttgaa

SEQ ID NO: 39076 - DNA, 20 bp, Artificial Sequence
  MKO10039076_A_Otof
  gRNA
agaggtgaccgacacgctga

SEQ ID NO: 39077 - DNA, 20 bp, Artificial Sequence
  MKO10039077_A_Otof
  gRNA
tctctccccagacgttccgg

SEQ ID NO: 39078 - DNA, 20 bp, Artificial Sequence
  MKO10039078_A_Otof
  gRNA
cagtggccagcagcatcgac

SEQ ID NO: 39079 - DNA, 20 bp, Artificial Sequence
  MKO10039079_A_Otogl
  gRNA
caccccaattaatagcttcg

SEQ ID NO: 39080 - DNA, 20 bp, Artificial Sequence
  MKO10039080_A_Otogl
  gRNA
tagaacagaaagccccgtta

SEQ ID NO: 39081 - DNA, 20 bp, Artificial Sequence
  MKO10039081_A_Otogl
  gRNA
ctcgggacaaggtgccagat

SEQ ID NO: 39082 - DNA, 20 bp, Artificial Sequence
  MKO10039082_A_Otog
  gRNA
cttacacgacggtgcacact

SEQ ID NO: 39083 - DNA, 20 bp, Artificial Sequence
  MKO10039083_A_Otog
  gRNA
cactggaccccgttgccagt

SEQ ID NO: 39084 - DNA, 20 bp, Artificial Sequence
  MKO10039084_A_Otog
  gRNA
ccgtctttcccacgaagaca

SEQ ID NO: 39085 - DNA, 20 bp, Artificial Sequence
  MKO10039085_A_Otol1
  gRNA
tgggctgtatgtcggccccg

SEQ ID NO: 39086 - DNA, 20 bp, Artificial Sequence
  MKO10039086_A_Otol1
  gRNA
cccgcaggtccggtgaaacc

SEQ ID NO: 39087 - DNA, 20 bp, Artificial Sequence
  MKO10039087_A_Otol1
  gRNA
tggagaagaaaccgtccata

SEQ ID NO: 39088 - DNA, 20 bp, Artificial Sequence
  MKO10039088_A_Otop1
  gRNA
gttctatttgtacgctatca

SEQ ID NO: 39089 - DNA, 20 bp, Artificial Sequence
  MKO10039089_A_Otop1
  gRNA
tcaacatccagcttgcgcgc

SEQ ID NO: 39090 - DNA, 20 bp, Artificial Sequence
  MKO10039090_A_Otop1
  gRNA
tgattcattcaggacgctgt

SEQ ID NO: 39091 - DNA, 20 bp, Artificial Sequence
  MKO10039091_A_Otop2
  gRNA
gagcgatcatgagtagagcg

SEQ ID NO: 39092 - DNA, 20 bp, Artificial Sequence
  MKO10039092_A_Otop2
  gRNA
gatagcgtattggcccaggg

SEQ ID NO: 39093 - DNA, 20 bp, Artificial Sequence
  MKO10039093_A_Otop2
  gRNA
cactacggctgccatccaga

SEQ ID NO: 39094 - DNA, 20 bp, Artificial Sequence
  MKO10039094_A_Otop3
  gRNA
gtcggtctctccgcaacagc

SEQ ID NO: 39095 - DNA, 20 bp, Artificial Sequence
  MKO10039095_A_Otop3
  gRNA
cctgtaccgtgatccccacg

SEQ ID NO: 39096 - DNA, 20 bp, Artificial Sequence
  MKO10039096_A_Otop3
  gRNA
ctccatgcaccgtgagattg

SEQ ID NO: 39097 - DNA, 20 bp, Artificial Sequence
  MKO10039097_A_Otor
  gRNA
gatctatgtttactccaagc

SEQ ID NO: 39098 - DNA, 20 bp, Artificial Sequence
  MKO10039098_A_Otor
  gRNA
gaaggagcagcgtgtatacc

SEQ ID NO: 39099 - DNA, 20 bp, Artificial Sequence
  MKO10039099_A_Otor
  gRNA
acatcgatgaacctacagtc

SEQ ID NO: 39100 - DNA, 20 bp, Artificial Sequence
  MKO10039100_A_Otos
  gRNA
ctacccacagatcgaggaca

SEQ ID NO: 39101 - DNA, 20 bp, Artificial Sequence
  MKO10039101_A_Otos
  gRNA
cgtgcaatatttccagaccc

SEQ ID NO: 39102 - DNA, 20 bp, Artificial Sequence
  MKO10039102_A_Otos
  gRNA
aggagccaagccaatgccag

SEQ ID NO: 39103 - DNA, 20 bp, Artificial Sequence
  MKO10039103_A_Otp
  gRNA
gtatcgggctgaccgagtcg

SEQ ID NO: 39104 - DNA, 20 bp, Artificial Sequence
  MKO10039104_A_Otp
  gRNA
tccacgccaacgacacccgc

SEQ ID NO: 39105 - DNA, 20 bp, Artificial Sequence
  MKO10039105_A_Otp
  gRNA
cgactgcagccccgcgccgt

SEQ ID NO: 39106 - DNA, 20 bp, Artificial Sequence
  MKO10039106_A_Ott
  gRNA
tgtactttacctctccctcg

SEQ ID NO: 39107 - DNA, 20 bp, Artificial Sequence
  MKO10039107_A_Ott
  gRNA
ttctgaagaagaatacaatg

SEQ ID NO: 39108 - DNA, 20 bp, Artificial Sequence
  MKO10039108_A_Ott
  gRNA
tcacttaccagatgaagtag

SEQ ID NO: 39109 - DNA, 20 bp, Artificial Sequence
  MKO10039109_A_Otub1
  gRNA
aactgcttctaccgagcgtt

SEQ ID NO: 39110 - DNA, 20 bp, Artificial Sequence
  MKO10039110_A_Otub1
  gRNA
ggcactgctagatgacagca

SEQ ID NO: 39111 - DNA, 20 bp, Artificial Sequence
  MKO10039111_A_Otub1
  gRNA
agccataatggcttcatcat

SEQ ID NO: 39112 - DNA, 20 bp, Artificial Sequence
  MKO10039112_A_Otub2
  gRNA
gcaaaagattcacctcgatc

SEQ ID NO: 39113 - DNA, 20 bp, Artificial Sequence
  MKO10039113_A_Otub2
  gRNA
gttcttacgcctcctcacgt

SEQ ID NO: 39114 - DNA, 20 bp, Artificial Sequence
  MKO10039114_A_Otub2
  gRNA
ggcgtaagaactgcacgatt

SEQ ID NO: 39115 - DNA, 20 bp, Artificial Sequence
  MKO10039115_A_Otud1
  gRNA
gaacgccgtccgcgacgctc

SEQ ID NO: 39116 - DNA, 20 bp, Artificial Sequence
  MKO10039116_A_Otud1
  gRNA
agttcctgtccggagcgtcg

SEQ ID NO: 39117 - DNA, 20 bp, Artificial Sequence
  MKO10039117_A_Otud1
  gRNA
ccgtcggagcgcgtcagacc

SEQ ID NO: 39118 - DNA, 20 bp, Artificial Sequence
  MKO10039118_A_Otud3
  gRNA
aacactatgacagcgtccgg

SEQ ID NO: 39119 - DNA, 20 bp, Artificial Sequence
  MKO10039119_A_Otud3
  gRNA
tgtgtcgcagattcgaggca

SEQ ID NO: 39120 - DNA, 20 bp, Artificial Sequence
  MKO10039120_A_Otud3
  gRNA
ggaggactttgagcccttcg

SEQ ID NO: 39121 - DNA, 20 bp, Artificial Sequence
  MKO10039121_A_Otud4
  gRNA
cgcgcccgacggcgtggacc

SEQ ID NO: 39122 - DNA, 20 bp, Artificial Sequence
  MKO10039122_A_Otud4
  gRNA
gccgccctggtccacgccgt

SEQ ID NO: 39123 - DNA, 20 bp, Artificial Sequence
  MKO10039123_A_Otud4
  gRNA
gtgccctttcacttatgtac

SEQ ID NO: 39124 - DNA, 20 bp, Artificial Sequence
  MKO10039124_A_Otud5
  gRNA
ggcctaccgtcatttaagcc

SEQ ID NO: 39125 - DNA, 20 bp, Artificial Sequence
  MKO10039125_A_Otud5
  gRNA
ccatccgtgtcagctaccac

SEQ ID NO: 39126 - DNA, 20 bp, Artificial Sequence
  MKO10039126_A_Otud5
  gRNA
acttcaccacctatatcaac

SEQ ID NO: 39127 - DNA, 20 bp, Artificial Sequence
  MKO10039127_A_Otud6a
  gRNA
gtcgccactatcgcgaaaaa

SEQ ID NO: 39128 - DNA, 20 bp, Artificial Sequence
  MKO10039128_A_Otud6a
  gRNA
gtagtgctctccgaagtcgc

SEQ ID NO: 39129 - DNA, 20 bp, Artificial Sequence
  MKO10039129_A_Otud6a
  gRNA
ctgcactacgcctgcgactt

SEQ ID NO: 39130 - DNA, 20 bp, Artificial Sequence
  MKO10039130_A_Otud6b
  gRNA
cgtgtacatatctcctgtgc

SEQ ID NO: 39131 - DNA, 20 bp, Artificial Sequence
  MKO10039131_A_Otud6b
  gRNA
acggcaggaagtcgtctgaa

SEQ ID NO: 39132 - DNA, 20 bp, Artificial Sequence
  MKO10039132_A_Otud6b
  gRNA
tgacgatattgtgaacacag

SEQ ID NO: 39133 - DNA, 20 bp, Artificial Sequence
  MKO10039133_A_Otud7a
  gRNA
ctcttacatgccgcctcgct

SEQ ID NO: 39134 - DNA, 20 bp, Artificial Sequence
  MKO10039134_A_Otud7a
  gRNA
caattctcgctcggcctgct

SEQ ID NO: 39135 - DNA, 20 bp, Artificial Sequence
  MKO10039135_A_Otud7a
  gRNA
cgaacgggacctgatcgagc

SEQ ID NO: 39136 - DNA, 20 bp, Artificial Sequence
  MKO10039136_A_Otud7b
  gRNA
atgggtcgagaagggcgagt

SEQ ID NO: 39137 - DNA, 20 bp, Artificial Sequence
  MKO10039137_A_Otud7b
  gRNA
aacctatccccaccctttag

SEQ ID NO: 39138 - DNA, 20 bp, Artificial Sequence
  MKO10039138_A_Otud7b
  gRNA
gaaagcgctgtatgcactga

SEQ ID NO: 39139 - DNA, 20 bp, Artificial Sequence
  MKO10039139_A_Otx1
  gRNA
taccgagcgctgcatgcacg

SEQ ID NO: 39140 - DNA, 20 bp, Artificial Sequence
  MKO10039140_A_Otx1
  gRNA
ctcagcgccgacatccgtat

SEQ ID NO: 39141 - DNA, 20 bp, Artificial Sequence
  MKO10039141_A_Otx1
  gRNA
gtccagctgtgagcgcgtga

SEQ ID NO: 39142 - DNA, 20 bp, Artificial Sequence
  MKO10039142_A_Otx2
  gRNA
tagggcacagctcgacgttc

SEQ ID NO: 39143 - DNA, 20 bp, Artificial Sequence
  MKO10039143_A_Otx2
  gRNA
caaccgccttacgcagtcaa

SEQ ID NO: 39144 - DNA, 20 bp, Artificial Sequence
  MKO10039144_A_Otx2
  gRNA
ctcagcccattgactgcgta

SEQ ID NO: 39145 - DNA, 20 bp, Artificial Sequence
  MKO10039145_A_Ovca2
  gRNA
cggctagacacagcactcgc

SEQ ID NO: 39146 - DNA, 20 bp, Artificial Sequence
  MKO10039146_A_Ovca2
  gRNA
cggtctgcagtatggcggca

SEQ ID NO: 39147 - DNA, 20 bp, Artificial Sequence
  MKO10039147_A_Ovca2
  gRNA
gttctgtccccgaggcctta

SEQ ID NO: 39148 - DNA, 20 bp, Artificial Sequence
  MKO10039148_A_Ovch2
  gRNA
ctccaacaatgcgactgaaa

SEQ ID NO: 39149 - DNA, 20 bp, Artificial Sequence
  MKO10039149_A_Ovch2
  gRNA
gaactgcgggtgtatgatga

SEQ ID NO: 39150 - DNA, 20 bp, Artificial Sequence
  MKO10039150_A_Ovch2
  gRNA
ccagcattaaagtgttctcc

SEQ ID NO: 39151 - DNA, 20 bp, Artificial Sequence
  MKO10039151_A_Ovgp1
  gRNA
gggggactgcctcgtagtcc

SEQ ID NO: 39152 - DNA, 20 bp, Artificial Sequence
  MKO10039152_A_Ovgp1
  gRNA
ggtggaacttcggcacatca

SEQ ID NO: 39153 - DNA, 20 bp, Artificial Sequence
  MKO10039153_A_Ovgp1
  gRNA
gccaggtactgcctacaaac

SEQ ID NO: 39154 - DNA, 20 bp, Artificial Sequence
  MKO10039154_A_Ovol1
  gRNA
atctcgccgcgctcttcgtc

SEQ ID NO: 39155 - DNA, 20 bp, Artificial Sequence
  MKO10039155_A_Ovol1
  gRNA
agtgtcacaacgacgtcaag

SEQ ID NO: 39156 - DNA, 20 bp, Artificial Sequence
  MKO10039156_A_Ovol1
  gRNA
gaagatgcctcgcgcgttcc

SEQ ID NO: 39157 - DNA, 20 bp, Artificial Sequence
  MKO10039157_A_Ovol2
  gRNA
gcgtgcgtacgtgcctcttc

SEQ ID NO: 39158 - DNA, 20 bp, Artificial Sequence
  MKO10039158_A_Ovol2
  gRNA
cccgaagactgccgcagcga

SEQ ID NO: 39159 - DNA, 20 bp, Artificial Sequence
  MKO10039159_A_Ovol2
  gRNA
tttgtcgcgacgctgcttgt

SEQ ID NO: 39160 - DNA, 20 bp, Artificial Sequence
  MKO10039160_A_Ovol3
  gRNA
ggaatacggccattccgctg

SEQ ID NO: 39161 - DNA, 20 bp, Artificial Sequence
  MKO10039161_A_Ovol3
  gRNA
cgctgcaacgcatgctgact

SEQ ID NO: 39162 - DNA, 20 bp, Artificial Sequence
  MKO10039162_A_Ovol3
  gRNA
cgccacgtgtgccactattg

SEQ ID NO: 39163 - DNA, 20 bp, Artificial Sequence
  MKO10039163_A_Oxa1l
  gRNA
cgaaccgagcttcacagaac

SEQ ID NO: 39164 - DNA, 20 bp, Artificial Sequence
  MKO10039164_A_Oxa1l
  gRNA
gtggccgcccgttaccccgg

SEQ ID NO: 39165 - DNA, 20 bp, Artificial Sequence
  MKO10039165_A_Oxa1l
  gRNA
tcagggacactgcgacgcta

SEQ ID NO: 39166 - DNA, 20 bp, Artificial Sequence
  MKO10039166_A_Oxct1
  gRNA
tctagggcacacttgccgag

SEQ ID NO: 39167 - DNA, 20 bp, Artificial Sequence
  MKO10039167_A_Oxct1
  gRNA
acgaatgatctcctcatatg

SEQ ID NO: 39168 - DNA, 20 bp, Artificial Sequence
  MKO10039168_A_Oxct1
  gRNA
cattgccagcaagccacgag

SEQ ID NO: 39169 - DNA, 20 bp, Artificial Sequence
  MKO10039169_A_Oxct2a
  gRNA
gcccctgaagatcacgttgc

SEQ ID NO: 39170 - DNA, 20 bp, Artificial Sequence
  MKO10039170_A_Oxct2a
  gRNA
gctccggcaacgtgatcttc

SEQ ID NO: 39171 - DNA, 20 bp, Artificial Sequence
  MKO10039171_A_Oxct2a
  gRNA
cgtggacgatggcggcgctg

SEQ ID NO: 39172 - DNA, 20 bp, Artificial Sequence
  MKO10039172_A_Oxct2b
  gRNA
cggtggggcagcgcaggtcg

SEQ ID NO: 39173 - DNA, 20 bp, Artificial Sequence
  MKO10039173_A_Oxct2b
  gRNA
gccgtattgagaaacttgca

SEQ ID NO: 39174 - DNA, 20 bp, Artificial Sequence
  MKO10039174_A_Oxct2b
  gRNA
aaatgcaccatgccgttgac

SEQ ID NO: 39175 - DNA, 20 bp, Artificial Sequence
  MKO10039175_A_Oxgr1
  gRNA
agcagacctattggtccggg

SEQ ID NO: 39176 - DNA, 20 bp, Artificial Sequence
  MKO10039176_A_Oxgr1
  gRNA
atgtgcaagttcatccgctt

SEQ ID NO: 39177 - DNA, 20 bp, Artificial Sequence
  MKO10039177_A_Oxgr1
  gRNA
tgtaccacttgatagtagtg

SEQ ID NO: 39178 - DNA, 20 bp, Artificial Sequence
  MKO10039178_A_Oxld1
  gRNA
cgcgaagcctttcgtgcagc

SEQ ID NO: 39179 - DNA, 20 bp, Artificial Sequence
  MKO10039179_A_Oxld1
  gRNA
gtttccccgttcggggaggc

SEQ ID NO: 39180 - DNA, 20 bp, Artificial Sequence
  MKO10039180_A_Oxld1
  gRNA
attatgccgaagctctgctg

SEQ ID NO: 39181 - DNA, 20 bp, Artificial Sequence
  MKO10039181_A_Oxnad1
  gRNA
agctacgtcctttgtctgcg

SEQ ID NO: 39182 - DNA, 20 bp, Artificial Sequence
  MKO10039182_A_Oxnad1
  gRNA
cccggtggagatctgccgag

SEQ ID NO: 39183 - DNA, 20 bp, Artificial Sequence
  MKO10039183_A_Oxnad1
  gRNA
agacacaaacctcccggcgg

SEQ ID NO: 39184 - DNA, 20 bp, Artificial Sequence
  MKO10039184_A_Oxr1
  gRNA
gtaccgtacacaagcgtcca

SEQ ID NO: 39185 - DNA, 20 bp, Artificial Sequence
  MKO10039185_A_Oxr1
  gRNA
aacctgtcattgttcgataa

SEQ ID NO: 39186 - DNA, 20 bp, Artificial Sequence
  MKO10039186_A_Oxr1
  gRNA
actgcctgatcagattgaaa

SEQ ID NO: 39187 - DNA, 20 bp, Artificial Sequence
  MKO10039187_A_Oxsm
  gRNA
gacaactcgtctgcgcaaca

SEQ ID NO: 39188 - DNA, 20 bp, Artificial Sequence
  MKO10039188_A_Oxsm
  gRNA
tcggatctacgcagaaattt

SEQ ID NO: 39189 - DNA, 20 bp, Artificial Sequence
  MKO10039189_A_Oxsm
  gRNA
agtggcatgtgcgttgacat

SEQ ID NO: 39190 - DNA, 20 bp, Artificial Sequence
  MKO10039190_A_Oxsr1
  gRNA
ggcgatcaagcggataaacc

SEQ ID NO: 39191 - DNA, 20 bp, Artificial Sequence
  MKO10039191_A_Oxsr1
  gRNA
gaatctgcccattcttatgc

SEQ ID NO: 39192 - DNA, 20 bp, Artificial Sequence
  MKO10039192_A_Oxsr1
  gRNA
agggagtggagcaactgccg

SEQ ID NO: 39193 - DNA, 20 bp, Artificial Sequence
  MKO10039193_A_Oxtr
  gRNA
cggacggcgtcttcgattgc

SEQ ID NO: 39194 - DNA, 20 bp, Artificial Sequence
  MKO10039194_A_Oxtr
  gRNA
ctcgttgcgtcgtggcggcc

SEQ ID NO: 39195 - DNA, 20 bp, Artificial Sequence
  MKO10039195_A_Oxtr
  gRNA
cctatggctcatgccgagga

SEQ ID NO: 39196 - DNA, 20 bp, Artificial Sequence
  MKO10039196_A_Oxt
  gRNA
gactcaccttgcgcatatcc

SEQ ID NO: 39197 - DNA, 20 bp, Artificial Sequence
  MKO10039197_A_Oxt
  gRNA
gtgggctcagcgctccgaga

SEQ ID NO: 39198 - DNA, 20 bp, Artificial Sequence
  MKO10039198_A_Oxt
  gRNA
cagactcagggtcgcaggcg

SEQ ID NO: 39199 - DNA, 20 bp, Artificial Sequence
  MKO10039199_A_P2rx1
  gRNA
ctccctacaggtattcgcac

SEQ ID NO: 39200 - DNA, 20 bp, Artificial Sequence
  MKO10039200_A_P2rx1
  gRNA
atcttgtcatccacctctac

SEQ ID NO: 39201 - DNA, 20 bp, Artificial Sequence
  MKO10039201_A_P2rx1
  gRNA
tttcatcatgacccctcagc

SEQ ID NO: 39202 - DNA, 20 bp, Artificial Sequence
  MKO10039202_A_P2rx2
  gRNA
cgagacgcccaaggtgatcg

SEQ ID NO: 39203 - DNA, 20 bp, Artificial Sequence
  MKO10039203_A_P2rx2
  gRNA
cctgggattcgtgcaccgca

SEQ ID NO: 39204 - DNA, 20 bp, Artificial Sequence
  MKO10039204_A_P2rx2
  gRNA
ccggaccggtttcgctatcc

SEQ ID NO: 39205 - DNA, 20 bp, Artificial Sequence
  MKO10039205_A_P2rx3
  gRNA
caatggccgtgtcccgcact

SEQ ID NO: 39206 - DNA, 20 bp, Artificial Sequence
  MKO10039206_A_P2rx3
  gRNA
acgctatgccaacagagtca

SEQ ID NO: 39207 - DNA, 20 bp, Artificial Sequence
  MKO10039207_A_P2rx3
  gRNA
gcctgagcgcttcccgggtg

SEQ ID NO: 39208 - DNA, 20 bp, Artificial Sequence
  MKO10039208_A_P2rx4
  gRNA
cgtcaccgtgaaccagacgc

SEQ ID NO: 39209 - DNA, 20 bp, Artificial Sequence
  MKO10039209_A_P2rx4
  gRNA
ctgggacgtggccgactatg

SEQ ID NO: 39210 - DNA, 20 bp, Artificial Sequence
  MKO10039210_A_P2rx4
  gRNA
tcagacgccaactgcactct

SEQ ID NO: 39211 - DNA, 20 bp, Artificial Sequence
  MKO10039211_A_P2rx5
  gRNA
gagtcgttccccaagcatcg

SEQ ID NO: 39212 - DNA, 20 bp, Artificial Sequence
  MKO10039212_A_P2rx5
  gRNA
tataccaacaccacgatgct

SEQ ID NO: 39213 - DNA, 20 bp, Artificial Sequence
  MKO10039213_A_P2rx5
  gRNA
gaggacaccgactgtcacgc

SEQ ID NO: 39214 - DNA, 20 bp, Artificial Sequence
  MKO10039214_A_P2rx6
  gRNA
gtatgtccccgtctcccctt

SEQ ID NO: 39215 - DNA, 20 bp, Artificial Sequence
  MKO10039215_A_P2rx6
  gRNA
gacgcccacccgacagttcc

SEQ ID NO: 39216 - DNA, 20 bp, Artificial Sequence
  MKO10039216_A_P2rx6
  gRNA
gcagtggtagtctacgtgat

SEQ ID NO: 39217 - DNA, 20 bp, Artificial Sequence
  MKO10039217_A_P2rx7
  gRNA
tgagcgataagctgtaccag

SEQ ID NO: 39218 - DNA, 20 bp, Artificial Sequence
  MKO10039218_A_P2rx7
  gRNA
cataattcgtgctctggatc

SEQ ID NO: 39219 - DNA, 20 bp, Artificial Sequence
  MKO10039219_A_P2rx7
  gRNA
tgataacaggctctttccgc

SEQ ID NO: 39220 - DNA, 20 bp, Artificial Sequence
  MKO10039220_A_P2ry10
  gRNA
ctcgttctcgtctcatgagc

SEQ ID NO: 39221 - DNA, 20 bp, Artificial Sequence
  MKO10039221_A_P2ry10
  gRNA
cgtgaccaactatctcgtca

SEQ ID NO: 39222 - DNA, 20 bp, Artificial Sequence
  MKO10039222_A_P2ry10
  gRNA
agcttccatgacgagatagt

SEQ ID NO: 39223 - DNA, 20 bp, Artificial Sequence
  MKO10039223_A_P2ry12
  gRNA
accgctacctgaagaccacc

SEQ ID NO: 39224 - DNA, 20 bp, Artificial Sequence
  MKO10039224_A_P2ry12
  gRNA
ataagaccgatagagttctt

SEQ ID NO: 39225 - DNA, 20 bp, Artificial Sequence
  MKO10039225_A_P2ry12
  gRNA
cgttcagtgacgtcagccat

SEQ ID NO: 39226 - DNA, 20 bp, Artificial Sequence
  MKO10039226_A_P2ry13
  gRNA
tgggcctcatcgctttcgac

SEQ ID NO: 39227 - DNA, 20 bp, Artificial Sequence
  MKO10039227_A_P2ry13
  gRNA
aaacagtctccatttccgtc

SEQ ID NO: 39228 - DNA, 20 bp, Artificial Sequence
  MKO10039228_A_P2ry13
  gRNA
ccgactcacaccttgcgccc

SEQ ID NO: 39229 - DNA, 20 bp, Artificial Sequence
  MKO10039229_A_P2ry14
  gRNA
tcactacagctgccggacga

SEQ ID NO: 39230 - DNA, 20 bp, Artificial Sequence
  MKO10039230_A_P2ry14
  gRNA
agaattccacctccgtcaag

SEQ ID NO: 39231 - DNA, 20 bp, Artificial Sequence
  MKO10039231_A_P2ry14
  gRNA
cagatcattcccgtgttgta

SEQ ID NO: 39232 - DNA, 20 bp, Artificial Sequence
  MKO10039232_A_P2ry1
  gRNA
tgctaccgtagagatttacg

SEQ ID NO: 39233 - DNA, 20 bp, Artificial Sequence
  MKO10039233_A_P2ry1
  gRNA
aaaggcagcatccgtcccgt

SEQ ID NO: 39234 - DNA, 20 bp, Artificial Sequence
  MKO10039234_A_P2ry1
  gRNA
tgtagatgaaataacttcgc

SEQ ID NO: 39235 - DNA, 20 bp, Artificial Sequence
  MKO10039235_A_P2ry2
  gRNA
atataagatcacccggccgc

SEQ ID NO: 39236 - DNA, 20 bp, Artificial Sequence
  MKO10039236_A_P2ry2
  gRNA
cccacaggctcgtcgcaagc

SEQ ID NO: 39237 - DNA, 20 bp, Artificial Sequence
  MKO10039237_A_P2ry2
  gRNA
atacaagtgtcgtttcaacg

SEQ ID NO: 39238 - DNA, 20 bp, Artificial Sequence
  MKO10039238_A_P2ry4
  gRNA
atccactgcgggcaatacgc

SEQ ID NO: 39239 - DNA, 20 bp, Artificial Sequence
  MKO10039239_A_P2ry4
  gRNA
gactgttgaacgccgaatgc

SEQ ID NO: 39240 - DNA, 20 bp, Artificial Sequence
  MKO10039240_A_P2ry4
  gRNA
ccccagcgtattgcccgcag

SEQ ID NO: 39241 - DNA, 20 bp, Artificial Sequence
  MKO10039241_A_P2ry6
  gRNA
tccggcgggatgcgcagatc

SEQ ID NO: 39242 - DNA, 20 bp, Artificial Sequence
  MKO10039242_A_P2ry6
  gRNA
cccagatctgcgcatcccgc

SEQ ID NO: 39243 - DNA, 20 bp, Artificial Sequence
  MKO10039243_A_P2ry6
  gRNA
cttatctataactacgccag

SEQ ID NO: 39244 - DNA, 20 bp, Artificial Sequence
  MKO10039244_A_P4ha1
  gRNA
ttgttgctgtactcgttagc

SEQ ID NO: 39245 - DNA, 20 bp, Artificial Sequence
  MKO10039245_A_P4ha1
  gRNA
gagctatgcggtgtaccagc

SEQ ID NO: 39246 - DNA, 20 bp, Artificial Sequence
  MKO10039246_A_P4ha1
  gRNA
gctggtacaccgcatagctc

SEQ ID NO: 39247 - DNA, 20 bp, Artificial Sequence
  MKO10039247_A_P4ha2
  gRNA
cgatctgatttacgcagaga

SEQ ID NO: 39248 - DNA, 20 bp, Artificial Sequence
  MKO10039248_A_P4ha2
  gRNA
cagatcagctgccgaccccg

SEQ ID NO: 39249 - DNA, 20 bp, Artificial Sequence
  MKO10039249_A_P4ha2
  gRNA
gatccggacacgatttccag

SEQ ID NO: 39250 - DNA, 20 bp, Artificial Sequence
  MKO10039250_A_P4ha3
  gRNA
tcaaacgtctgcagtccgac

SEQ ID NO: 39251 - DNA, 20 bp, Artificial Sequence
  MKO10039251_A_P4ha3
  gRNA
ggccagtctggaagacgccc

SEQ ID NO: 39252 - DNA, 20 bp, Artificial Sequence
  MKO10039252_A_P4ha3
  gRNA
acacatcctgcagccgcatc

SEQ ID NO: 39253 - DNA, 20 bp, Artificial Sequence
  MKO10039253_A_P4hb
  gRNA
tcaagcgaagtgacggtcat

SEQ ID NO: 39254 - DNA, 20 bp, Artificial Sequence
  MKO10039254_A_P4hb
  gRNA
ctctgagattcgactagcaa

SEQ ID NO: 39255 - DNA, 20 bp, Artificial Sequence
  MKO10039255_A_P4hb
  gRNA
tttacagatgccccgtggtg

SEQ ID NO: 39256 - DNA, 20 bp, Artificial Sequence
  MKO10039256_A_P4htm
  gRNA
gccgacactcctcgtcactc

SEQ ID NO: 39257 - DNA, 20 bp, Artificial Sequence
  MKO10039257_A_P4htm
  gRNA
tcatgcgtgccatccgccag

SEQ ID NO: 39258 - DNA, 20 bp, Artificial Sequence
  MKO10039258_A_P4htm
  gRNA
gtgtcggctcatcatccacc

SEQ ID NO: 39259 - DNA, 20 bp, Artificial Sequence
  MKO10039259_A_Pa2g4
  gRNA
cccaggggtgcttcgatctt

SEQ ID NO: 39260 - DNA, 20 bp, Artificial Sequence
  MKO10039260_A_Pa2g4
  gRNA
ttacaggggacccaggtaac

SEQ ID NO: 39261 - DNA, 20 bp, Artificial Sequence
  MKO10039261_A_Pa2g4
  gRNA
gtaaggcagcttcagcacat

SEQ ID NO: 39262 - DNA, 20 bp, Artificial Sequence
  MKO10039262_A_Pabpc1l
  gRNA
gaagaacctgcacgcgaacg

SEQ ID NO: 39263 - DNA, 20 bp, Artificial Sequence
  MKO10039263_A_Pabpc1l
  gRNA
gctcgtccacgttcgcgtgc

SEQ ID NO: 39264 - DNA, 20 bp, Artificial Sequence
  MKO10039264_A_Pabpc1l
  gRNA
gccagcccatccgaatcatg

SEQ ID NO: 39265 - DNA, 20 bp, Artificial Sequence
  MKO10039265_A_Pabpc1
  gRNA
tcttgtagcggaacgtgctt

SEQ ID NO: 39266 - DNA, 20 bp, Artificial Sequence
  MKO10039266_A_Pabpc1
  gRNA
gatccatcacttcgcaaaag

SEQ ID NO: 39267 - DNA, 20 bp, Artificial Sequence
  MKO10039267_A_Pabpc1
  gRNA
ttgttggacgatttaaatct

SEQ ID NO: 39268 - DNA, 20 bp, Artificial Sequence
  MKO10039268_A_Pabpc2
  gRNA
cgtgatcacacgccgttccc

SEQ ID NO: 39269 - DNA, 20 bp, Artificial Sequence
  MKO10039269_A_Pabpc2
  gRNA
acagtagtcaacgacgatct

SEQ ID NO: 39270 - DNA, 20 bp, Artificial Sequence
  MKO10039270_A_Pabpc2
  gRNA
agcgtgatccatcacttcgc

SEQ ID NO: 39271 - DNA, 20 bp, Artificial Sequence
  MKO10039271_A_Pabpc4l
  gRNA
cgatgatgaaacactgcgca

SEQ ID NO: 39272 - DNA, 20 bp, Artificial Sequence
  MKO10039272_A_Pabpc4l
  gRNA
tggccaaactttgagtgtta

SEQ ID NO: 39273 - DNA, 20 bp, Artificial Sequence
  MKO10039273_A_Pabpc4l
  gRNA
ttgagaccacatgagacgaa

SEQ ID NO: 39274 - DNA, 20 bp, Artificial Sequence
  MKO10039274_A_Pabpc4
  gRNA
tttgacagctgagagggcct

SEQ ID NO: 39275 - DNA, 20 bp, Artificial Sequence
  MKO10039275_A_Pabpc4
  gRNA
actcaccgtcagctggctgc

SEQ ID NO: 39276 - DNA, 20 bp, Artificial Sequence
  MKO10039276_A_Pabpc4
  gRNA
aacttccagcagccagctga

SEQ ID NO: 39277 - DNA, 20 bp, Artificial Sequence
  MKO10039277_A_Pabpc5
  gRNA
catgtgccagatagccctat

SEQ ID NO: 39278 - DNA, 20 bp, Artificial Sequence
  MKO10039278_A_Pabpc5
  gRNA
atctccgccttaattcagcc

SEQ ID NO: 39279 - DNA, 20 bp, Artificial Sequence
  MKO10039279_A_Pabpc5
  gRNA
aaagtcgtatgtgatgacaa

SEQ ID NO: 39280 - DNA, 20 bp, Artificial Sequence
  MKO10039280_A_Pabpc6
  gRNA
acgatgtcgtatagcctgtg

SEQ ID NO: 39281 - DNA, 20 bp, Artificial Sequence
  MKO10039281_A_Pabpc6
  gRNA
gctttaagtctcgtagagac

SEQ ID NO: 39282 - DNA, 20 bp, Artificial Sequence
  MKO10039282_A_Pabpc6
  gRNA
gcttacgaatccgaatcctt

SEQ ID NO: 39283 - DNA, 20 bp, Artificial Sequence
  MKO10039283_A_Pabpn1l
  gRNA
gacccggtgaatctccccac

SEQ ID NO: 39284 - DNA, 20 bp, Artificial Sequence
  MKO10039284_A_Pabpn1l
  gRNA
aggttcctacctacggtctc

SEQ ID NO: 39285 - DNA, 20 bp, Artificial Sequence
  MKO10039285_A_Pabpn1l
  gRNA
gtccagagaacttgtcgcac

SEQ ID NO: 39286 - DNA, 20 bp, Artificial Sequence
  MKO10039286_A_Pabpn1
  gRNA
aagcgatcaaagctcgagtc

SEQ ID NO: 39287 - DNA, 20 bp, Artificial Sequence
  MKO10039287_A_Pabpn1
  gRNA
gatgcccgctctatctacgt

SEQ ID NO: 39288 - DNA, 20 bp, Artificial Sequence
  MKO10039288_A_Pabpn1
  gRNA
gatctactcaccattgcctg

SEQ ID NO: 39289 - DNA, 20 bp, Artificial Sequence
  MKO10039289_A_Pacrgl
  gRNA
ctgcaagaagggctcgtcct

SEQ ID NO: 39290 - DNA, 20 bp, Artificial Sequence
  MKO10039290_A_Pacrgl
  gRNA
gcttctaattacgttagctg

SEQ ID NO: 39291 - DNA, 20 bp, Artificial Sequence
  MKO10039291_A_Pacrgl
  gRNA
tcagctaacgtaattagaag

SEQ ID NO: 39292 - DNA, 20 bp, Artificial Sequence
  MKO10039292_A_Pacrg
  gRNA
ctcccctccgtagcgctcga

SEQ ID NO: 39293 - DNA, 20 bp, Artificial Sequence
  MKO10039293_A_Pacrg
  gRNA
tcgccgagcaaaaaactcat

SEQ ID NO: 39294 - DNA, 20 bp, Artificial Sequence
  MKO10039294_A_Pacrg
  gRNA
gttcagcaagcacgactcat

SEQ ID NO: 39295 - DNA, 20 bp, Artificial Sequence
  MKO10039295_A_Pacs1
  gRNA
agctgtgggactcatcaaca

SEQ ID NO: 39296 - DNA, 20 bp, Artificial Sequence
  MKO10039296_A_Pacs1
  gRNA
gtacaagaaccgaactatct

SEQ ID NO: 39297 - DNA, 20 bp, Artificial Sequence
  MKO10039297_A_Pacs1
  gRNA
agtactaaagcgccctcatt

SEQ ID NO: 39298 - DNA, 20 bp, Artificial Sequence
  MKO10039298_A_Pacs2
  gRNA
cagaacttggccgccctcag

SEQ ID NO: 39299 - DNA, 20 bp, Artificial Sequence
  MKO10039299_A_Pacs2
  gRNA
ctgtcaaggtggccgagatc

SEQ ID NO: 39300 - DNA, 20 bp, Artificial Sequence
  MKO10039300_A_Pacs2
  gRNA
gtacaagaacaggacgatcc

SEQ ID NO: 39301 - DNA, 20 bp, Artificial Sequence
  MKO10039301_A_Pacsin1
  gRNA
cgcgtatgccttctcgatct

SEQ ID NO: 39302 - DNA, 20 bp, Artificial Sequence
  MKO10039302_A_Pacsin1
  gRNA
acggtgaagcgcatcgacga

SEQ ID NO: 39303 - DNA, 20 bp, Artificial Sequence
  MKO10039303_A_Pacsin1
  gRNA
gatgccgtttgatatccagc

SEQ ID NO: 39304 - DNA, 20 bp, Artificial Sequence
  MKO10039304_A_Pacsin2
  gRNA
gggaacttacctagccacat

SEQ ID NO: 39305 - DNA, 20 bp, Artificial Sequence
  MKO10039305_A_Pacsin2
  gRNA
actgtgaagcggattgacga

SEQ ID NO: 39306 - DNA, 20 bp, Artificial Sequence
  MKO10039306_A_Pacsin2
  gRNA
gcaccacacagcgtgcaaag

SEQ ID NO: 39307 - DNA, 20 bp, Artificial Sequence
  MKO10039307_A_Pacsin3
  gRNA
tctcaatgcgggcacgttct

SEQ ID NO: 39308 - DNA, 20 bp, Artificial Sequence
  MKO10039308_A_Pacsin3
  gRNA
tgtagcgatttagctcggcc

SEQ ID NO: 39309 - DNA, 20 bp, Artificial Sequence
  MKO10039309_A_Pacsin3
  gRNA
tcgctacaccccacgctaca

SEQ ID NO: 39310 - DNA, 20 bp, Artificial Sequence
  MKO10039310_A_Padi1
  gRNA
tcgagagtggcagagcccgc

SEQ ID NO: 39311 - DNA, 20 bp, Artificial Sequence
  MKO10039311_A_Padi1
  gRNA
gtgtcccttgatgtcgacac

SEQ ID NO: 39312 - DNA, 20 bp, Artificial Sequence
  MKO10039312_A_Padi1
  gRNA
cactaccaccacgtccacgt

SEQ ID NO: 39313 - DNA, 20 bp, Artificial Sequence
  MKO10039313_A_Padi2
  gRNA
aaggtggaggtcgtacgtga

SEQ ID NO: 39314 - DNA, 20 bp, Artificial Sequence
  MKO10039314_A_Padi2
  gRNA
ccatggtaccttgtcgctgc

SEQ ID NO: 39315 - DNA, 20 bp, Artificial Sequence
  MKO10039315_A_Padi2
  gRNA
gggctcttcctcacggccat

SEQ ID NO: 39316 - DNA, 20 bp, Artificial Sequence
  MKO10039316_A_Padi3
  gRNA
gtggtgcttcaacaagggcc

SEQ ID NO: 39317 - DNA, 20 bp, Artificial Sequence
  MKO10039317_A_Padi3
  gRNA
aactcacatggctgtcgttg

SEQ ID NO: 39318 - DNA, 20 bp, Artificial Sequence
  MKO10039318_A_Padi3
  gRNA
cttgcaggcaacgcacatat

SEQ ID NO: 39319 - DNA, 20 bp, Artificial Sequence
  MKO10039319_A_Padi4
  gRNA
cggccgtggcgccatcctgt

SEQ ID NO: 39320 - DNA, 20 bp, Artificial Sequence
  MKO10039320_A_Padi4
  gRNA
agcgcagatgtcacccgcac

SEQ ID NO: 39321 - DNA, 20 bp, Artificial Sequence
  MKO10039321_A_Padi4
  gRNA
taggttcgagtttcatacta

SEQ ID NO: 39322 - DNA, 20 bp, Artificial Sequence
  MKO10039322_A_Padi6
  gRNA
gtcctctttgccagcgatga

SEQ ID NO: 39323 - DNA, 20 bp, Artificial Sequence
  MKO10039323_A_Padi6
  gRNA
catctatcgagatggacaac

SEQ ID NO: 39324 - DNA, 20 bp, Artificial Sequence
  MKO10039324_A_Padi6
  gRNA
ctcgatagatgtctgcctcc

SEQ ID NO: 39325 - DNA, 20 bp, Artificial Sequence
  MKO10039325_A_Paf1
  gRNA
gtcctacctgttctggtcga

SEQ ID NO: 39326 - DNA, 20 bp, Artificial Sequence
  MKO10039326_A_Paf1
  gRNA
cctaccccttcgaccagaac

SEQ ID NO: 39327 - DNA, 20 bp, Artificial Sequence
  MKO10039327_A_Paf1
  gRNA
acctaccgcattgatcccaa

SEQ ID NO: 39328 - DNA, 20 bp, Artificial Sequence
  MKO10039328_A_Pafah1b1
  gRNA
aatcgtcatatctgctgaac

SEQ ID NO: 39329 - DNA, 20 bp, Artificial Sequence
  MKO10039329_A_Pafah1b1
  gRNA
tggaaaatgactcgagtaac

SEQ ID NO: 39330 - DNA, 20 bp, Artificial Sequence
  MKO10039330_A_Pafah1b1
  gRNA
ttcagaggatgctacaatta

SEQ ID NO: 39331 - DNA, 20 bp, Artificial Sequence
  MKO10039331_A_Pafah1b2
  gRNA
cgaagcccccgtctatatca

SEQ ID NO: 39332 - DNA, 20 bp, Artificial Sequence
  MKO10039332_A_Pafah1b2
  gRNA
cattataggtcattgttgtc

SEQ ID NO: 39333 - DNA, 20 bp, Artificial Sequence
  MKO10039333_A_Pafah1b2
  gRNA
acagctaatgcagcagtacg

SEQ ID NO: 39334 - DNA, 20 bp, Artificial Sequence
  MKO10039334_A_Pafah1b3
  gRNA
gtccccgataaagactactt

SEQ ID NO: 39335 - DNA, 20 bp, Artificial Sequence
  MKO10039335_A_Pafah1b3
  gRNA
gcagcaccatcggtttgtag

SEQ ID NO: 39336 - DNA, 20 bp, Artificial Sequence
  MKO10039336_A_Pafah1b3
  gRNA
ttacctacacctgagccgcc

SEQ ID NO: 39337 - DNA, 20 bp, Artificial Sequence
  MKO10039337_A_Pafah2
  gRNA
cccagcgcttgttatactgc

SEQ ID NO: 39338 - DNA, 20 bp, Artificial Sequence
  MKO10039338_A_Pafah2
  gRNA
gctccccttccgtcgcatca

SEQ ID NO: 39339 - DNA, 20 bp, Artificial Sequence
  MKO10039339_A_Pafah2
  gRNA
gacccatgctgtactcgtag

SEQ ID NO: 39340 - DNA, 20 bp, Artificial Sequence
  MKO10039340_A_Pag1
  gRNA
cgcgaacgcagagagcattc

SEQ ID NO: 39341 - DNA, 20 bp, Artificial Sequence
  MKO10039341_A_Pag1
  gRNA
tgctctctgcgttcgcgctg

SEQ ID NO: 39342 - DNA, 20 bp, Artificial Sequence
  MKO10039342_A_Pag1
  gRNA
gcagaacttactgtcgccat

SEQ ID NO: 39343 - DNA, 20 bp, Artificial Sequence
  MKO10039343_A_Pagr1a
  gRNA
ccagacgcgcctcccgtttc

SEQ ID NO: 39344 - DNA, 20 bp, Artificial Sequence
  MKO10039344_A_Pagr1a
  gRNA
aggtggagctgccggccaat

SEQ ID NO: 39345 - DNA, 20 bp, Artificial Sequence
  MKO10039345_A_Pagr1a
  gRNA
cagtcagtacttccgctgtc

SEQ ID NO: 39346 - DNA, 20 bp, Artificial Sequence
  MKO10039346_A_Pah
  gRNA
cttgctacgcttatccagat

SEQ ID NO: 39347 - DNA, 20 bp, Artificial Sequence
  MKO10039347_A_Pah
  gRNA
gacttactggcggtagttgt

SEQ ID NO: 39348 - DNA, 20 bp, Artificial Sequence
  MKO10039348_A_Pah
  gRNA
taagcgtagcaagcccgtcc

SEQ ID NO: 39349 - DNA, 20 bp, Artificial Sequence
  MKO10039349_A_Paics
  gRNA
attcccgcagtagtgaacat

SEQ ID NO: 39350 - DNA, 20 bp, Artificial Sequence
  MKO10039350_A_Paics
  gRNA
tatgagttgttagacacccc

SEQ ID NO: 39351 - DNA, 20 bp, Artificial Sequence
  MKO10039351_A_Paics
  gRNA
tatcaaccagcgtacagtcc

SEQ ID NO: 39352 - DNA, 20 bp, Artificial Sequence
  MKO10039352_A_Paip1
  gRNA
gtggactaattgtcagatga

SEQ ID NO: 39353 - DNA, 20 bp, Artificial Sequence
  MKO10039353_A_Paip1
  gRNA
gactctctcagaatacgttc

SEQ ID NO: 39354 - DNA, 20 bp, Artificial Sequence
  MKO10039354_A_Paip1
  gRNA
tccgccaattgctacttcaa

SEQ ID NO: 39355 - DNA, 20 bp, Artificial Sequence
  MKO10039355_A_Paip2b
  gRNA
cagatgacgacgctgaacac

SEQ ID NO: 39356 - DNA, 20 bp, Artificial Sequence
  MKO10039356_A_Paip2b
  gRNA
cctcatgtccatttaatcct

SEQ ID NO: 39357 - DNA, 20 bp, Artificial Sequence
  MKO10039357_A_Paip2b
  gRNA
gtgctgggatgaaccagtcc

SEQ ID NO: 39358 - DNA, 20 bp, Artificial Sequence
  MKO10039358_A_Paip2
  gRNA
acatcgtcattgatgatgct

SEQ ID NO: 39359 - DNA, 20 bp, Artificial Sequence
  MKO10039359_A_Paip2
  gRNA
tcgagatctcccacaaacta

SEQ ID NO: 39360 - DNA, 20 bp, Artificial Sequence
  MKO10039360_A_Paip2
  gRNA
gtttgtgggagatctcgagc

SEQ ID NO: 39361 - DNA, 20 bp, Artificial Sequence
  MKO10039361_A_Pak1ip1
  gRNA
agagactacatagcgactgt

SEQ ID NO: 39362 - DNA, 20 bp, Artificial Sequence
  MKO10039362_A_Pak1ip1
  gRNA
aacagtcgctatgtagtctc

SEQ ID NO: 39363 - DNA, 20 bp, Artificial Sequence
  MKO10039363_A_Pak1ip1
  gRNA
aagacggccacatctgcatc

SEQ ID NO: 39364 - DNA, 20 bp, Artificial Sequence
  MKO10039364_A_Pak1
  gRNA
agcaagcgagcccactgttc

SEQ ID NO: 39365 - DNA, 20 bp, Artificial Sequence
  MKO10039365_A_Pak1
  gRNA
tgctgtcacaggggagttta

SEQ ID NO: 39366 - DNA, 20 bp, Artificial Sequence
  MKO10039366_A_Pak1
  gRNA
actcatgtacttctgactat

SEQ ID NO: 39367 - DNA, 20 bp, Artificial Sequence
  MKO10039367_A_Pak2
  gRNA
aacagccgcgcccactgttc

SEQ ID NO: 39368 - DNA, 20 bp, Artificial Sequence
  MKO10039368_A_Pak2
  gRNA
ctcctcccgtcattgcccct

SEQ ID NO: 39369 - DNA, 20 bp, Artificial Sequence
  MKO10039369_A_Pak2
  gRNA
gttcttcttctgctcgagtt

SEQ ID NO: 39370 - DNA, 20 bp, Artificial Sequence
  MKO10039370_A_Pak3
  gRNA
agtagtcgtgcccattgctc

SEQ ID NO: 39371 - DNA, 20 bp, Artificial Sequence
  MKO10039371_A_Pak3
  gRNA
aaatatatgagctttacgtc

SEQ ID NO: 39372 - DNA, 20 bp, Artificial Sequence
  MKO10039372_A_Pak3
  gRNA
ctttgagcatacgattcatg

SEQ ID NO: 39373 - DNA, 20 bp, Artificial Sequence
  MKO10039373_A_Pak4
  gRNA
cgcgataagcgcccactctc

SEQ ID NO: 39374 - DNA, 20 bp, Artificial Sequence
  MKO10039374_A_Pak4
  gRNA
ctaccggcacgagaacgtgg

SEQ ID NO: 39375 - DNA, 20 bp, Artificial Sequence
  MKO10039375_A_Pak4
  gRNA
acagatcgccgccgtgtgcc

SEQ ID NO: 39376 - DNA, 20 bp, Artificial Sequence
  MKO10039376_A_Pak6
  gRNA
tgccaagcatagctccgaag

SEQ ID NO: 39377 - DNA, 20 bp, Artificial Sequence
  MKO10039377_A_Pak6
  gRNA
ggggatcagtgtgctccgac

SEQ ID NO: 39378 - DNA, 20 bp, Artificial Sequence
  MKO10039378_A_Pak6
  gRNA
tgtacatctccaccacgttg

SEQ ID NO: 39379 - DNA, 20 bp, Artificial Sequence
  MKO10039379_A_Pak7
  gRNA
tgtgtagtccgcagtcgtat

SEQ ID NO: 39380 - DNA, 20 bp, Artificial Sequence
  MKO10039380_A_Pak7
  gRNA
cagtgaatccgatacgactg

SEQ ID NO: 39381 - DNA, 20 bp, Artificial Sequence
  MKO10039381_A_Pak7
  gRNA
gccatcgcttgtcagaagaa

SEQ ID NO: 39382 - DNA, 20 bp, Artificial Sequence
  MKO10039382_A_Palb2
  gRNA
gacgaccgccttagtagctt

SEQ ID NO: 39383 - DNA, 20 bp, Artificial Sequence
  MKO10039383_A_Palb2
  gRNA
ctccttggtaagcatcgaaa

SEQ ID NO: 39384 - DNA, 20 bp, Artificial Sequence
  MKO10039384_A_Palb2
  gRNA
actgctgcgcctaacgacag

SEQ ID NO: 39385 - DNA, 20 bp, Artificial Sequence
  MKO10039385_A_Pald1
  gRNA
tcaccttgagtccgtccgtc

SEQ ID NO: 39386 - DNA, 20 bp, Artificial Sequence
  MKO10039386_A_Pald1
  gRNA
gtcttacacacctcgagaca

SEQ ID NO: 39387 - DNA, 20 bp, Artificial Sequence
  MKO10039387_A_Pald1
  gRNA
gcgcggggagccgcacaccg

SEQ ID NO: 39388 - DNA, 20 bp, Artificial Sequence
  MKO10039388_A_Palld
  gRNA
cctatctgtgcccgtccaac

SEQ ID NO: 39389 - DNA, 20 bp, Artificial Sequence
  MKO10039389_A_Palld
  gRNA
cacaggtcgctacacgtgtc

SEQ ID NO: 39390 - DNA, 20 bp, Artificial Sequence
  MKO10039390_A_Palld
  gRNA
acgtccgtttccttaacgat

SEQ ID NO: 39391 - DNA, 20 bp, Artificial Sequence
  MKO10039391_A_Palm2
  gRNA
tctgctctttggcggatatc

SEQ ID NO: 39392 - DNA, 20 bp, Artificial Sequence
  MKO10039392_A_Palm2
  gRNA
gagacgacagcttgacgaac

SEQ ID NO: 39393 - DNA, 20 bp, Artificial Sequence
  MKO10039393_A_Palm2
  gRNA
cgccaaagagcagatcatcc

SEQ ID NO: 39394 - DNA, 20 bp, Artificial Sequence
  MKO10039394_A_Palm3
  gRNA
ccaggctcgaattcgcaacc

SEQ ID NO: 39395 - DNA, 20 bp, Artificial Sequence
  MKO10039395_A_Palm3
  gRNA
ctcctccagctcgcgacgcg

SEQ ID NO: 39396 - DNA, 20 bp, Artificial Sequence
  MKO10039396_A_Palm3
  gRNA
aggagaaactccgcgtggag

SEQ ID NO: 39397 - DNA, 20 bp, Artificial Sequence
  MKO10039397_A_Palmd
  gRNA
cttcagaattgcctcttcgt

SEQ ID NO: 39398 - DNA, 20 bp, Artificial Sequence
  MKO10039398_A_Palmd
  gRNA
gcaaatctcagccaacgaag

SEQ ID NO: 39399 - DNA, 20 bp, Artificial Sequence
  MKO10039399_A_Palmd
  gRNA
tatcttacagtccgtgaagg

SEQ ID NO: 39400 - DNA, 20 bp, Artificial Sequence
  MKO10039400_A_Palm
  gRNA
tggcttgaagccgctcctgc

SEQ ID NO: 39401 - DNA, 20 bp, Artificial Sequence
  MKO10039401_A_Palm
  gRNA
acctggtgatggattcctcc

SEQ ID NO: 39402 - DNA, 20 bp, Artificial Sequence
  MKO10039402_A_Palm
  gRNA
catgtcctcgtcgccctctg

SEQ ID NO: 39403 - DNA, 20 bp, Artificial Sequence
  MKO10039403_A_Pam16
  gRNA
tcctcaggttgtccgtgcaa

SEQ ID NO: 39404 - DNA, 20 bp, Artificial Sequence
  MKO10039404_A_Pam16
  gRNA
ttgcccacaggccaagtacc

SEQ ID NO: 39405 - DNA, 20 bp, Artificial Sequence
  MKO10039405_A_Pam16
  gRNA
cctcaccttctggacctcct

SEQ ID NO: 39406 - DNA, 20 bp, Artificial Sequence
  MKO10039406_A_Pamr1
  gRNA
tctggatgacttctacgtga

SEQ ID NO: 39407 - DNA, 20 bp, Artificial Sequence
  MKO10039407_A_Pamr1
  gRNA
ctcacctgggtgaattagac

SEQ ID NO: 39408 - DNA, 20 bp, Artificial Sequence
  MKO10039408_A_Pamr1
  gRNA
ctcaaagggtcagatcttgt

SEQ ID NO: 39409 - DNA, 20 bp, Artificial Sequence
  MKO10039409_A_Pam
  gRNA
acactggatattcgcatgcc

SEQ ID NO: 39410 - DNA, 20 bp, Artificial Sequence
  MKO10039410_A_Pam
  gRNA
acctctttaggtgtgacccc

SEQ ID NO: 39411 - DNA, 20 bp, Artificial Sequence
  MKO10039411_A_Pam
  gRNA
gtccaccatatgctgctgtt

SEQ ID NO: 39412 - DNA, 20 bp, Artificial Sequence
  MKO10039412_A_Pan2
  gRNA
ggcttctccagtcgccttac

SEQ ID NO: 39413 - DNA, 20 bp, Artificial Sequence
  MKO10039413_A_Pan2
  gRNA
ggagcgctactcatcctttc

SEQ ID NO: 39414 - DNA, 20 bp, Artificial Sequence
  MKO10039414_A_Pan2
  gRNA
tgcgcagatcgtacactttg

SEQ ID NO: 39415 - DNA, 20 bp, Artificial Sequence
  MKO10039415_A_Pan3
  gRNA
gcaagcgaatttatacctaa

SEQ ID NO: 39416 - DNA, 20 bp, Artificial Sequence
  MKO10039416_A_Pan3
  gRNA
ggtataaattcgcttgcagt

SEQ ID NO: 39417 - DNA, 20 bp, Artificial Sequence
  MKO10039417_A_Pan3
  gRNA
atcttaccgtggcctgtgta

SEQ ID NO: 39418 - DNA, 20 bp, Artificial Sequence
  MKO10039418_A_Pank1
  gRNA
caaccgagtcaacgtaaaga

SEQ ID NO: 39419 - DNA, 20 bp, Artificial Sequence
  MKO10039419_A_Pank1
  gRNA
cttctttacgttgactcggt

SEQ ID NO: 39420 - DNA, 20 bp, Artificial Sequence
  MKO10039420_A_Pank1
  gRNA
tgggatccgggacgtccatc

SEQ ID NO: 39421 - DNA, 20 bp, Artificial Sequence
  MKO10039421_A_Pank2
  gRNA
gtgcacgtcccgaatgcctg

SEQ ID NO: 39422 - DNA, 20 bp, Artificial Sequence
  MKO10039422_A_Pank2
  gRNA
tgaccttcagcttcgaaaac

SEQ ID NO: 39423 - DNA, 20 bp, Artificial Sequence
  MKO10039423_A_Pank2
  gRNA
ggacgtgcaccttgagctga

SEQ ID NO: 39424 - DNA, 20 bp, Artificial Sequence
  MKO10039424_A_Pank3
  gRNA
ctagatgccaccgcccaacc

SEQ ID NO: 39425 - DNA, 20 bp, Artificial Sequence
  MKO10039425_A_Pank3
  gRNA
agcactcagcaccgtttgta

SEQ ID NO: 39426 - DNA, 20 bp, Artificial Sequence
  MKO10039426_A_Pank3
  gRNA
ttggcatcgctcgggttctg

SEQ ID NO: 39427 - DNA, 20 bp, Artificial Sequence
  MKO10039427_A_Pank4
  gRNA
acttgcctacctttcccggg

SEQ ID NO: 39428 - DNA, 20 bp, Artificial Sequence
  MKO10039428_A_Pank4
  gRNA
gctgaagaacatcccgcatg

SEQ ID NO: 39429 - DNA, 20 bp, Artificial Sequence
  MKO10039429_A_Pank4
  gRNA
gacgcagcttctcctcgatg

SEQ ID NO: 39430 - DNA, 20 bp, Artificial Sequence
  MKO10039430_A_Panx1
  gRNA
agtctacaaccgcgccatca

SEQ ID NO: 39431 - DNA, 20 bp, Artificial Sequence
  MKO10039431_A_Panx1
  gRNA
actcgtccgagagtgaagag

SEQ ID NO: 39432 - DNA, 20 bp, Artificial Sequence
  MKO10039432_A_Panx1
  gRNA
tgccaagagtgctcgagatt

SEQ ID NO: 39433 - DNA, 20 bp, Artificial Sequence
  MKO10039433_A_Panx2
  gRNA
gtgcgcgaccttcggccgct

SEQ ID NO: 39434 - DNA, 20 bp, Artificial Sequence
  MKO10039434_A_Panx2
  gRNA
gcgctacccaccggcccgtc

SEQ ID NO: 39435 - DNA, 20 bp, Artificial Sequence
  MKO10039435_A_Panx2
  gRNA
ttcgaccgcgtggtcaccat

SEQ ID NO: 39436 - DNA, 20 bp, Artificial Sequence
  MKO10039436_A_Panx3
  gRNA
ctcgctggctcaccatacgc

SEQ ID NO: 39437 - DNA, 20 bp, Artificial Sequence
  MKO10039437_A_Panx3
  gRNA
ttacaaccgttccatccgcc

SEQ ID NO: 39438 - DNA, 20 bp, Artificial Sequence
  MKO10039438_A_Panx3
  gRNA
attcaaagtaccgttccttc

SEQ ID NO: 39439 - DNA, 20 bp, Artificial Sequence
  MKO10039439_A_Paox
  gRNA
gtctctcctagtggctacca

SEQ ID NO: 39440 - DNA, 20 bp, Artificial Sequence
  MKO10039440_A_Paox
  gRNA
tgccctcctaggtggtgtag

SEQ ID NO: 39441 - DNA, 20 bp, Artificial Sequence
  MKO10039441_A_Paox
  gRNA
gtggagtacctgtcactctc

SEQ ID NO: 39442 - DNA, 20 bp, Artificial Sequence
  MKO10039442_A_Papd4
  gRNA
cgctgccgtttaccatcaag

SEQ ID NO: 39443 - DNA, 20 bp, Artificial Sequence
  MKO10039443_A_Papd4
  gRNA
tacttccttcctcgaaataa

SEQ ID NO: 39444 - DNA, 20 bp, Artificial Sequence
  MKO10039444_A_Papd4
  gRNA
acatacgtgggaagagcagc

SEQ ID NO: 39445 - DNA, 20 bp, Artificial Sequence
  MKO10039445_A_Papd5
  gRNA
cgcctccgagtctaccgacc

SEQ ID NO: 39446 - DNA, 20 bp, Artificial Sequence
  MKO10039446_A_Papd5
  gRNA
tccctcgtccccgcgaccgg

SEQ ID NO: 39447 - DNA, 20 bp, Artificial Sequence
  MKO10039447_A_Papd5
  gRNA
ctacagtgacatcgatcttg

SEQ ID NO: 39448 - DNA, 20 bp, Artificial Sequence
  MKO10039448_A_Papd7
  gRNA
agccctccggaagcacaacg

SEQ ID NO: 39449 - DNA, 20 bp, Artificial Sequence
  MKO10039449_A_Papd7
  gRNA
gcttgttccaacaactgtaa

SEQ ID NO: 39450 - DNA, 20 bp, Artificial Sequence
  MKO10039450_A_Papd7
  gRNA
ctcctacagcctcatcctaa

SEQ ID NO: 39451 - DNA, 20 bp, Artificial Sequence
  MKO10039451_A_Papln
  gRNA
cggaagtcccgcacgccgtc

SEQ ID NO: 39452 - DNA, 20 bp, Artificial Sequence
  MKO10039452_A_Papln
  gRNA
gccaccggtagcgccgaccc

SEQ ID NO: 39453 - DNA, 20 bp, Artificial Sequence
  MKO10039453_A_Papln
  gRNA
gcaggggctccattcgcccc

SEQ ID NO: 39454 - DNA, 20 bp, Artificial Sequence
  MKO10039454_A_Papl
  gRNA
accaggacaatgctcgcgtt

SEQ ID NO: 39455 - DNA, 20 bp, Artificial Sequence
  MKO10039455_A_Papl
  gRNA
ccccaacgcgagcattgtcc

SEQ ID NO: 39456 - DNA, 20 bp, Artificial Sequence
  MKO10039456_A_Papl
  gRNA
ggtccattggagcccccgcc

SEQ ID NO: 39457 - DNA, 20 bp, Artificial Sequence
  MKO10039457_A_Papola
  gRNA
tgtgatccctgcgttgtaac

SEQ ID NO: 39458 - DNA, 20 bp, Artificial Sequence
  MKO10039458_A_Papola
  gRNA
tcacttcgatcaacatgtct

SEQ ID NO: 39459 - DNA, 20 bp, Artificial Sequence
  MKO10039459_A_Papola
  gRNA
ttgggggccgctaagctgat

SEQ ID NO: 39460 - DNA, 20 bp, Artificial Sequence
  MKO10039460_A_Papolb
  gRNA
acgttcggctcttaccgatt

SEQ ID NO: 39461 - DNA, 20 bp, Artificial Sequence
  MKO10039461_A_Papolb
  gRNA
taagaagccttaacggttgc

SEQ ID NO: 39462 - DNA, 20 bp, Artificial Sequence
  MKO10039462_A_Papolb
  gRNA
gtgcgttgcaccaagacacg

SEQ ID NO: 39463 - DNA, 20 bp, Artificial Sequence
  MKO10039463_A_Papolg
  gRNA
cataatgcttctgttgacgc

SEQ ID NO: 39464 - DNA, 20 bp, Artificial Sequence
  MKO10039464_A_Papolg
  gRNA
cagcgtcaacagaagcatta

SEQ ID NO: 39465 - DNA, 20 bp, Artificial Sequence
  MKO10039465_A_Papolg
  gRNA
tattataggctggttgttct

SEQ ID NO: 39466 - DNA, 20 bp, Artificial Sequence
  MKO10039466_A_Pappa2
  gRNA
tgggggcgattgccgcctgc

SEQ ID NO: 39467 - DNA, 20 bp, Artificial Sequence
  MKO10039467_A_Pappa2
  gRNA
gctagtagtcgtgaccagtt

SEQ ID NO: 39468 - DNA, 20 bp, Artificial Sequence
  MKO10039468_A_Pappa2
  gRNA
agcaatgcatccgggccact

SEQ ID NO: 39469 - DNA, 20 bp, Artificial Sequence
  MKO10039469_A_Pappa
  gRNA
gggacaacgtgaagcgcact

SEQ ID NO: 39470 - DNA, 20 bp, Artificial Sequence
  MKO10039470_A_Pappa
  gRNA
tcttatacctcacgtgatcg

SEQ ID NO: 39471 - DNA, 20 bp, Artificial Sequence
  MKO10039471_A_Pappa
  gRNA
aacaacttcatgagctacgc

SEQ ID NO: 39472 - DNA, 20 bp, Artificial Sequence
  MKO10039472_A_Papss1
  gRNA
gaacgttcgccgcatagctg

SEQ ID NO: 39473 - DNA, 20 bp, Artificial Sequence
  MKO10039473_A_Papss1
  gRNA
cgtcaacgactgcgtccagc

SEQ ID NO: 39474 - DNA, 20 bp, Artificial Sequence
  MKO10039474_A_Papss1
  gRNA
tgaaggatcgcaacaacgca

SEQ ID NO: 39475 - DNA, 20 bp, Artificial Sequence
  MKO10039475_A_Papss2
  gRNA
ggtcccccgcagagaatccc

SEQ ID NO: 39476 - DNA, 20 bp, Artificial Sequence
  MKO10039476_A_Papss2
  gRNA
tgtgaaagccgagacgtaaa

SEQ ID NO: 39477 - DNA, 20 bp, Artificial Sequence
  MKO10039477_A_Papss2
  gRNA
gattccgaggatgtaccgtg

SEQ ID NO: 39478 - DNA, 20 bp, Artificial Sequence
  MKO10039478_A_Paqr3
  gRNA
ctacctggaaagtaccgttc

SEQ ID NO: 39479 - DNA, 20 bp, Artificial Sequence
  MKO10039479_A_Paqr3
  gRNA
tgtttaccgtctcattagac

SEQ ID NO: 39480 - DNA, 20 bp, Artificial Sequence
  MKO10039480_A_Paqr3
  gRNA
tcatggcaagcacggtgatc

SEQ ID NO: 39481 - DNA, 20 bp, Artificial Sequence
  MKO10039481_A_Paqr4
  gRNA
ggcctggtcgcttcgactac

SEQ ID NO: 39482 - DNA, 20 bp, Artificial Sequence
  MKO10039482_A_Paqr4
  gRNA
ccccagtagtcgaagcgacc

SEQ ID NO: 39483 - DNA, 20 bp, Artificial Sequence
  MKO10039483_A_Paqr4
  gRNA
atacgaacttattgaactgc

SEQ ID NO: 39484 - DNA, 20 bp, Artificial Sequence
  MKO10039484_A_Paqr5
  gRNA
ccatgagtgctacgtagcac

SEQ ID NO: 39485 - DNA, 20 bp, Artificial Sequence
  MKO10039485_A_Paqr5
  gRNA
ccagtgctacgtagcactca

SEQ ID NO: 39486 - DNA, 20 bp, Artificial Sequence
  MKO10039486_A_Paqr5
  gRNA
gctctatgtccaagaacgcc

SEQ ID NO: 39487 - DNA, 20 bp, Artificial Sequence
  MKO10039487_A_Paqr6
  gRNA
tatgggtccgcgcgaaagcc

SEQ ID NO: 39488 - DNA, 20 bp, Artificial Sequence
  MKO10039488_A_Paqr6
  gRNA
aattcgctcaccaggtgggc

SEQ ID NO: 39489 - DNA, 20 bp, Artificial Sequence
  MKO10039489_A_Paqr6
  gRNA
cagaacccaccgcgagtagc

SEQ ID NO: 39490 - DNA, 20 bp, Artificial Sequence
  MKO10039490_A_Paqr7
  gRNA
acgagcctctgcacgcccgt

SEQ ID NO: 39491 - DNA, 20 bp, Artificial Sequence
  MKO10039491_A_Paqr7
  gRNA
acaacgaggctgtgaacgtg

SEQ ID NO: 39492 - DNA, 20 bp, Artificial Sequence
  MKO10039492_A_Paqr7
  gRNA
atcggcgctggcctatgtgc

SEQ ID NO: 39493 - DNA, 20 bp, Artificial Sequence
  MKO10039493_A_Paqr8
  gRNA
gtaacgccactcgtgccccg

SEQ ID NO: 39494 - DNA, 20 bp, Artificial Sequence
  MKO10039494_A_Paqr8
  gRNA
aggccgtcggtagcgatact

SEQ ID NO: 39495 - DNA, 20 bp, Artificial Sequence
  MKO10039495_A_Paqr8
  gRNA
cggtagcccgcgtggatgta

SEQ ID NO: 39496 - DNA, 20 bp, Artificial Sequence
  MKO10039496_A_Paqr9
  gRNA
ggccggcggtcccttcacgc

SEQ ID NO: 39497 - DNA, 20 bp, Artificial Sequence
  MKO10039497_A_Paqr9
  gRNA
ccacgggcagcacgagcgcg

SEQ ID NO: 39498 - DNA, 20 bp, Artificial Sequence
  MKO10039498_A_Paqr9
  gRNA
ggactgcacccgcctcatcg

SEQ ID NO: 39499 - DNA, 20 bp, Artificial Sequence
  MKO10039499_A_Pard3b
  gRNA
ccgatccgcagggtttccac

SEQ ID NO: 39500 - DNA, 20 bp, Artificial Sequence
  MKO10039500_A_Pard3b
  gRNA
actacgatttccccaccgac

SEQ ID NO: 39501 - DNA, 20 bp, Artificial Sequence
  MKO10039501_A_Pard3b
  gRNA
ccaggattccacccagaacg

SEQ ID NO: 39502 - DNA, 20 bp, Artificial Sequence
  MKO10039502_A_Pard3
  gRNA
ctcgtacaagtccccaacga

SEQ ID NO: 39503 - DNA, 20 bp, Artificial Sequence
  MKO10039503_A_Pard3
  gRNA
aggagcgggcgttgtctcgc

SEQ ID NO: 39504 - DNA, 20 bp, Artificial Sequence
  MKO10039504_A_Pard3
  gRNA
ctgccgcctcgagcactgaa

SEQ ID NO: 39505 - DNA, 20 bp, Artificial Sequence
  MKO10039505_A_Pard6a
  gRNA
cccgtaccacattattacgc

SEQ ID NO: 39506 - DNA, 20 bp, Artificial Sequence
  MKO10039506_A_Pard6a
  gRNA
tgccaaccagcgtaataatg

SEQ ID NO: 39507 - DNA, 20 bp, Artificial Sequence
  MKO10039507_A_Pard6a
  gRNA
gagcatccgtatagccaagc

SEQ ID NO: 39508 - DNA, 20 bp, Artificial Sequence
  MKO10039508_A_Pard6b
  gRNA
gtcaacggtatagaagtgtc

SEQ ID NO: 39509 - DNA, 20 bp, Artificial Sequence
  MKO10039509_A_Pard6b
  gRNA
gcccaccaacacgtcgacat

SEQ ID NO: 39510 - DNA, 20 bp, Artificial Sequence
  MKO10039510_A_Pard6b
  gRNA
ccgggcgcacggtgatgatg

SEQ ID NO: 39511 - DNA, 20 bp, Artificial Sequence
  MKO10039511_A_Pard6g
  gRNA
atggggcgtcacccgcacgc

SEQ ID NO: 39512 - DNA, 20 bp, Artificial Sequence
  MKO10039512_A_Pard6g
  gRNA
agtttggcgccgagttccga

SEQ ID NO: 39513 - DNA, 20 bp, Artificial Sequence
  MKO10039513_A_Pard6g
  gRNA
ttcgagatggcaccagcgtg

SEQ ID NO: 39514 - DNA, 20 bp, Artificial Sequence
  MKO10039514_A_Parg
  gRNA
ggcaaatggatcccacaccg

SEQ ID NO: 39515 - DNA, 20 bp, Artificial Sequence
  MKO10039515_A_Parg
  gRNA
gacttaaatgccaagccatc

SEQ ID NO: 39516 - DNA, 20 bp, Artificial Sequence
  MKO10039516_A_Parg
  gRNA
cagcttagtaatgctaacat

SEQ ID NO: 39517 - DNA, 20 bp, Artificial Sequence
  MKO10039517_A_Park2
  gRNA
tgtcagaatcgacctccact

SEQ ID NO: 39518 - DNA, 20 bp, Artificial Sequence
  MKO10039518_A_Park2
  gRNA
gtccaggagcttgacacgag

SEQ ID NO: 39519 - DNA, 20 bp, Artificial Sequence
  MKO10039519_A_Park2
  gRNA
ggagactcacttgaaccgtc

SEQ ID NO: 39520 - DNA, 20 bp, Artificial Sequence
  MKO10039520_A_Park7
  gRNA
ctcgcagggaccatacgatg

SEQ ID NO: 39521 - DNA, 20 bp, Artificial Sequence
  MKO10039521_A_Park7
  gRNA
cctaggtcctacggctctgt

SEQ ID NO: 39522 - DNA, 20 bp, Artificial Sequence
  MKO10039522_A_Park7
  gRNA
tcgtgagccaacagagccgt

SEQ ID NO: 39523 - DNA, 20 bp, Artificial Sequence
  MKO10039523_A_Parl
  gRNA
acaaacctgtcacagtccgc

SEQ ID NO: 39524 - DNA, 20 bp, Artificial Sequence
  MKO10039524_A_Parl
  gRNA
atctgatcatggttcgctgc

SEQ ID NO: 39525 - DNA, 20 bp, Artificial Sequence
  MKO10039525_A_Parl
  gRNA
ggacagcatacggccacaaa

SEQ ID NO: 39526 - DNA, 20 bp, Artificial Sequence
  MKO10039526_A_Parm1
  gRNA
cgttaagagtcatcgtagag

SEQ ID NO: 39527 - DNA, 20 bp, Artificial Sequence
  MKO10039527_A_Parm1
  gRNA
agtcatcgccgtagtgttgc

SEQ ID NO: 39528 - DNA, 20 bp, Artificial Sequence
  MKO10039528_A_Parm1
  gRNA
atcccccgcaacttccctat

SEQ ID NO: 39529 - DNA, 20 bp, Artificial Sequence
  MKO10039529_A_Parn
  gRNA
gctgacttcttcgccatcga

SEQ ID NO: 39530 - DNA, 20 bp, Artificial Sequence
  MKO10039530_A_Parn
  gRNA
acctgaaaactccccatcga

SEQ ID NO: 39531 - DNA, 20 bp, Artificial Sequence
  MKO10039531_A_Parn
  gRNA
agatgtcaagtttgtttgcc

SEQ ID NO: 39532 - DNA, 20 bp, Artificial Sequence
  MKO10039532_A_Parp10
  gRNA
acgccctcagcgagcgcttc

SEQ ID NO: 39533 - DNA, 20 bp, Artificial Sequence
  MKO10039533_A_Parp10
  gRNA
gtcattggtcatgcgcctac

SEQ ID NO: 39534 - DNA, 20 bp, Artificial Sequence
  MKO10039534_A_Parp10
  gRNA
ctggaaaatgagcgtcgcag

SEQ ID NO: 39535 - DNA, 20 bp, Artificial Sequence
  MKO10039535_A_Parp11
  gRNA
cctacctggtagggaacgtc

SEQ ID NO: 39536 - DNA, 20 bp, Artificial Sequence
  MKO10039536_A_Parp11
  gRNA
gacgcacgagtataatgaag

SEQ ID NO: 39537 - DNA, 20 bp, Artificial Sequence
  MKO10039537_A_Parp11
  gRNA
cttcattatactcgtgcgtc

SEQ ID NO: 39538 - DNA, 20 bp, Artificial Sequence
  MKO10039538_A_Parp12
  gRNA
tccaagaattgccaccgata

SEQ ID NO: 39539 - DNA, 20 bp, Artificial Sequence
  MKO10039539_A_Parp12
  gRNA
agctacaactcttccgaata

SEQ ID NO: 39540 - DNA, 20 bp, Artificial Sequence
  MKO10039540_A_Parp12
  gRNA
aaagtgtctccttctcccgc

SEQ ID NO: 39541 - DNA, 20 bp, Artificial Sequence
  MKO10039541_A_Parp14
  gRNA
ggccgcttatattctccacc

SEQ ID NO: 39542 - DNA, 20 bp, Artificial Sequence
  MKO10039542_A_Parp14
  gRNA
ttcagttcggcagaacgttc

SEQ ID NO: 39543 - DNA, 20 bp, Artificial Sequence
  MKO10039543_A_Parp14
  gRNA
acccttccgcccccgttgaa

SEQ ID NO: 39544 - DNA, 20 bp, Artificial Sequence
  MKO10039544_A_Parp16
  gRNA
agttctctaggcggctacca

SEQ ID NO: 39545 - DNA, 20 bp, Artificial Sequence
  MKO10039545_A_Parp16
  gRNA
gattaggtctcgttctcctt

SEQ ID NO: 39546 - DNA, 20 bp, Artificial Sequence
  MKO10039546_A_Parp16
  gRNA
gaaggctatgttgccacccg

SEQ ID NO: 39547 - DNA, 20 bp, Artificial Sequence
  MKO10039547_A_Parp1
  gRNA
cggagtacgccaagtccaac

SEQ ID NO: 39548 - DNA, 20 bp, Artificial Sequence
  MKO10039548_A_Parp1
  gRNA
gatgcgcctgtccaagaaga

SEQ ID NO: 39549 - DNA, 20 bp, Artificial Sequence
  MKO10039549_A_Parp1
  gRNA
ggacaaggatagtagtaagc

SEQ ID NO: 39550 - DNA, 20 bp, Artificial Sequence
  MKO10039550_A_Parp2
  gRNA
cacgtgcgcatcttcttgcc

SEQ ID NO: 39551 - DNA, 20 bp, Artificial Sequence
  MKO10039551_A_Parp2
  gRNA
catcttctaacagctgaata

SEQ ID NO: 39552 - DNA, 20 bp, Artificial Sequence
  MKO10039552_A_Parp2
  gRNA
atgcgcacgtgccagagaaa

SEQ ID NO: 39553 - DNA, 20 bp, Artificial Sequence
  MKO10039553_A_Parp3
  gRNA
cggctgcggccgaagttgtg

SEQ ID NO: 39554 - DNA, 20 bp, Artificial Sequence
  MKO10039554_A_Parp3
  gRNA
gggtacagtcatagtcctcg

SEQ ID NO: 39555 - DNA, 20 bp, Artificial Sequence
  MKO10039555_A_Parp3
  gRNA
agggtagtcgcttcttctgc

SEQ ID NO: 39556 - DNA, 20 bp, Artificial Sequence
  MKO10039556_A_Parp4
  gRNA
gaattatgatcctctgtcgc

SEQ ID NO: 39557 - DNA, 20 bp, Artificial Sequence
  MKO10039557_A_Parp4
  gRNA
caatctgcacatcgttcttt

SEQ ID NO: 39558 - DNA, 20 bp, Artificial Sequence
  MKO10039558_A_Parp4
  gRNA
ggtaggaggccccgagactg

SEQ ID NO: 39559 - DNA, 20 bp, Artificial Sequence
  MKO10039559_A_Parp6
  gRNA
atatggaactatcgatgacg

SEQ ID NO: 39560 - DNA, 20 bp, Artificial Sequence
  MKO10039560_A_Parp6
  gRNA
gtgagaactccgtgtccatc

SEQ ID NO: 39561 - DNA, 20 bp, Artificial Sequence
  MKO10039561_A_Parp6
  gRNA
aaccgtagcctcaacacaat

SEQ ID NO: 39562 - DNA, 20 bp, Artificial Sequence
  MKO10039562_A_Parp8
  gRNA
acctttactttcacctacgt

SEQ ID NO: 39563 - DNA, 20 bp, Artificial Sequence
  MKO10039563_A_Parp8
  gRNA
cacgtctcagaagactaccc

SEQ ID NO: 39564 - DNA, 20 bp, Artificial Sequence
  MKO10039564_A_Parp8
  gRNA
gaattgggtctgtagtgact

SEQ ID NO: 39565 - DNA, 20 bp, Artificial Sequence
  MKO10039565_A_Parp9
  gRNA
tcagtaattcgatagctgtc

SEQ ID NO: 39566 - DNA, 20 bp, Artificial Sequence
  MKO10039566_A_Parp9
  gRNA
ctgttcgtaactgtccaccg

SEQ ID NO: 39567 - DNA, 20 bp, Artificial Sequence
  MKO10039567_A_Parp9
  gRNA
ccacacctcttgataatctg

SEQ ID NO: 39568 - DNA, 20 bp, Artificial Sequence
  MKO10039568_A_Parpbp
  gRNA
tcggtacctgctcgtcattc

SEQ ID NO: 39569 - DNA, 20 bp, Artificial Sequence
  MKO10039569_A_Parpbp
  gRNA
attctcaacatccctgatcg

SEQ ID NO: 39570 - DNA, 20 bp, Artificial Sequence
  MKO10039570_A_Parpbp
  gRNA
agatggccacgtcatttatc

SEQ ID NO: 39571 - DNA, 20 bp, Artificial Sequence
  MKO10039571_A_Pars2
  gRNA
gcgcacgatggtaacacttg

SEQ ID NO: 39572 - DNA, 20 bp, Artificial Sequence
  MKO10039572_A_Pars2
  gRNA
aagtgttaccatcgtgcgcc

SEQ ID NO: 39573 - DNA, 20 bp, Artificial Sequence
  MKO10039573_A_Pars2
  gRNA
ccccggtttggtcttctccg

SEQ ID NO: 39574 - DNA, 20 bp, Artificial Sequence
  MKO10039574_A_Parva
  gRNA
gatctccgactgcgtaacct

SEQ ID NO: 39575 - DNA, 20 bp, Artificial Sequence
  MKO10039575_A_Parva
  gRNA
ctctgcaggtgctcatcgac

SEQ ID NO: 39576 - DNA, 20 bp, Artificial Sequence
  MKO10039576_A_Parva
  gRNA
agtttggatcgaccattgtc

SEQ ID NO: 39577 - DNA, 20 bp, Artificial Sequence
  MKO10039577_A_Parvb
  gRNA
gaggtgacgcagtccgagat

SEQ ID NO: 39578 - DNA, 20 bp, Artificial Sequence
  MKO10039578_A_Parvb
  gRNA
tctagaggtgggatcgatca

SEQ ID NO: 39579 - DNA, 20 bp, Artificial Sequence
  MKO10039579_A_Parvb
  gRNA
cccatggctggccgctgcgt

SEQ ID NO: 39580 - DNA, 20 bp, Artificial Sequence
  MKO10039580_A_Parvg
  gRNA
gaagttggcatcgctcaagc

SEQ ID NO: 39581 - DNA, 20 bp, Artificial Sequence
  MKO10039581_A_Parvg
  gRNA
ctgcggaccacgatgtgctc

SEQ ID NO: 39582 - DNA, 20 bp, Artificial Sequence
  MKO10039582_A_Parvg
  gRNA
actcctcccggagcacatcg

SEQ ID NO: 39583 - DNA, 20 bp, Artificial Sequence
  MKO10039583_A_Pask
  gRNA
gtggacatcgtcagccgaat

SEQ ID NO: 39584 - DNA, 20 bp, Artificial Sequence
  MKO10039584_A_Pask
  gRNA
gctgtagggtcagcatactc

SEQ ID NO: 39585 - DNA, 20 bp, Artificial Sequence
  MKO10039585_A_Pask
  gRNA
tgcacacaggggtcgaaagc

SEQ ID NO: 39586 - DNA, 20 bp, Artificial Sequence
  MKO10039586_A_Pate2
  gRNA
ctgtctatgatttggtacgc

SEQ ID NO: 39587 - DNA, 20 bp, Artificial Sequence
  MKO10039587_A_Pate2
  gRNA
gtaaaagttctcagcagcgc

SEQ ID NO: 39588 - DNA, 20 bp, Artificial Sequence
  MKO10039588_A_Pate2
  gRNA
taactattgcaacctcccaa

SEQ ID NO: 39589 - DNA, 20 bp, Artificial Sequence
  MKO10039589_A_Pate4
  gRNA
agtaccgtatcacactttgt

SEQ ID NO: 39590 - DNA, 20 bp, Artificial Sequence
  MKO10039590_A_Pate4
  gRNA
agcagatgcgttgcaaaacc

SEQ ID NO: 39591 - DNA, 20 bp, Artificial Sequence
  MKO10039591_A_Pate4
  gRNA
aatgtgctcgcctcagtgca

SEQ ID NO: 39592 - DNA, 20 bp, Artificial Sequence
  MKO10039592_A_Patl1
  gRNA
cggtcaacatcacctatcat

SEQ ID NO: 39593 - DNA, 20 bp, Artificial Sequence
  MKO10039593_A_Patl1
  gRNA
gaagttctgaggcgaatccg

SEQ ID NO: 39594 - DNA, 20 bp, Artificial Sequence
  MKO10039594_A_Patl1
  gRNA
ataggtgatgttgaccgcct

SEQ ID NO: 39595 - DNA, 20 bp, Artificial Sequence
  MKO10039595_A_Patl2
  gRNA
gctgttgcggtccaaaatga

SEQ ID NO: 39596 - DNA, 20 bp, Artificial Sequence
  MKO10039596_A_Patl2
  gRNA
gttgttggtacctgagctta

SEQ ID NO: 39597 - DNA, 20 bp, Artificial Sequence
  MKO10039597_A_Patl2
  gRNA
gcacacactaagccttcttc

SEQ ID NO: 39598 - DNA, 20 bp, Artificial Sequence
  MKO10039598_A_Patz1
  gRNA
tctctaggcgcacaacgatt

SEQ ID NO: 39599 - DNA, 20 bp, Artificial Sequence
  MKO10039599_A_Patz1
  gRNA
tgcgacgtgctcctacgagt

SEQ ID NO: 39600 - DNA, 20 bp, Artificial Sequence
  MKO10039600_A_Patz1
  gRNA
caggcggtctcgagtcgcaa

SEQ ID NO: 39601 - DNA, 20 bp, Artificial Sequence
  MKO10039601_A_Pawr
  gRNA
gacccgtcgagaacagttcc

SEQ ID NO: 39602 - DNA, 20 bp, Artificial Sequence
  MKO10039602_A_Pawr
  gRNA
aagaaaaccttcgacttgtg

SEQ ID NO: 39603 - DNA, 20 bp, Artificial Sequence
  MKO10039603_A_Pawr
  gRNA
caacagagatgcaaatgcgc

SEQ ID NO: 39604 - DNA, 20 bp, Artificial Sequence
  MKO10039604_A_Pax1
  gRNA
tgccatccgcctacgaatcg

SEQ ID NO: 39605 - DNA, 20 bp, Artificial Sequence
  MKO10039605_A_Pax1
  gRNA
gtgctagctccacgattcgt

SEQ ID NO: 39606 - DNA, 20 bp, Artificial Sequence
  MKO10039606_A_Pax1
  gRNA
gagcgctgtatactccgtgc

SEQ ID NO: 39607 - DNA, 20 bp, Artificial Sequence
  MKO10039607_A_Pax2
  gRNA
agaacccgactatgttcgcc

SEQ ID NO: 39608 - DNA, 20 bp, Artificial Sequence
  MKO10039608_A_Pax2
  gRNA
cagcgcctctaacgacccag

SEQ ID NO: 39609 - DNA, 20 bp, Artificial Sequence
  MKO10039609_A_Pax2
  gRNA
ctcgctccaacggtgagaag

SEQ ID NO: 39610 - DNA, 20 bp, Artificial Sequence
  MKO10039610_A_Pax3
  gRNA
cgccagcttcgcgtgtccca

SEQ ID NO: 39611 - DNA, 20 bp, Artificial Sequence
  MKO10039611_A_Pax3
  gRNA
cttgggtttgctgccgccga

SEQ ID NO: 39612 - DNA, 20 bp, Artificial Sequence
  MKO10039612_A_Pax3
  gRNA
gggcagaattacccacgcag

SEQ ID NO: 39613 - DNA, 20 bp, Artificial Sequence
  MKO10039613_A_Pax4
  gRNA
ctgtgcggtagtagcgtcct

SEQ ID NO: 39614 - DNA, 20 bp, Artificial Sequence
  MKO10039614_A_Pax4
  gRNA
ccgaagtactcgattgatag

SEQ ID NO: 39615 - DNA, 20 bp, Artificial Sequence
  MKO10039615_A_Pax4
  gRNA
tgggggaagcaaaccacgtc

SEQ ID NO: 39616 - DNA, 20 bp, Artificial Sequence
  MKO10039616_A_Pax5
  gRNA
gtctacaggctccgtgacgc

SEQ ID NO: 39617 - DNA, 20 bp, Artificial Sequence
  MKO10039617_A_Pax5
  gRNA
atcggtgagcaccgactccg

SEQ ID NO: 39618 - DNA, 20 bp, Artificial Sequence
  MKO10039618_A_Pax5
  gRNA
tcccagatgtagtccgccaa

SEQ ID NO: 39619 - DNA, 20 bp, Artificial Sequence
  MKO10039619_A_Pax6
  gRNA
cggttgtgtgagtaaaattc

SEQ ID NO: 39620 - DNA, 20 bp, Artificial Sequence
  MKO10039620_A_Pax6
  gRNA
ccgagacagattattatccg

SEQ ID NO: 39621 - DNA, 20 bp, Artificial Sequence
  MKO10039621_A_Pax6
  gRNA
ttaccttgcgtgggttgccc

SEQ ID NO: 39622 - DNA, 20 bp, Artificial Sequence
  MKO10039622_A_Pax7
  gRNA
gacgcgtgcctccgtgagct

SEQ ID NO: 39623 - DNA, 20 bp, Artificial Sequence
  MKO10039623_A_Pax7
  gRNA
ctgtgaacgtggtccgactg

SEQ ID NO: 39624 - DNA, 20 bp, Artificial Sequence
  MKO10039624_A_Pax7
  gRNA
cacctgagggcaccgtgctt

SEQ ID NO: 39625 - DNA, 20 bp, Artificial Sequence
  MKO10039625_A_Pax8
  gRNA
agttgtacgtcaacgcattg

SEQ ID NO: 39626 - DNA, 20 bp, Artificial Sequence
  MKO10039626_A_Pax8
  gRNA
taggagcccgttgatagagt

SEQ ID NO: 39627 - DNA, 20 bp, Artificial Sequence
  MKO10039627_A_Pax8
  gRNA
atgcgttgacgtacaacttc

SEQ ID NO: 39628 - DNA, 20 bp, Artificial Sequence
  MKO10039628_A_Pax9
  gRNA
cgacaagtacaacgtgccct

SEQ ID NO: 39629 - DNA, 20 bp, Artificial Sequence
  MKO10039629_A_Pax9
  gRNA
agccgtgcgagacccgtagc

SEQ ID NO: 39630 - DNA, 20 bp, Artificial Sequence
  MKO10039630_A_Pax9
  gRNA
gccgccccgcacgcagtgaa

SEQ ID NO: 39631 - DNA, 20 bp, Artificial Sequence
  MKO10039631_A_Paxbp1
  gRNA
gacgatgacgcgttagtaac

SEQ ID NO: 39632 - DNA, 20 bp, Artificial Sequence
  MKO10039632_A_Paxbp1
  gRNA
caaaggccgcctcgtccgcg

SEQ ID NO: 39633 - DNA, 20 bp, Artificial Sequence
  MKO10039633_A_Paxbp1
  gRNA
cattctcgtcctcgcggacg

SEQ ID NO: 39634 - DNA, 20 bp, Artificial Sequence
  MKO10039634_A_Paxip1
  gRNA
gccttggttacgttccacgg

SEQ ID NO: 39635 - DNA, 20 bp, Artificial Sequence
  MKO10039635_A_Paxip1
  gRNA
ttagttggcaactgcccccg

SEQ ID NO: 39636 - DNA, 20 bp, Artificial Sequence
  MKO10039636_A_Paxip1
  gRNA
gtgactctgtccgtgcaatg

SEQ ID NO: 39637 - DNA, 20 bp, Artificial Sequence
  MKO10039637_A_Pbdc1
  gRNA
acgtcgttgccatatgactc

SEQ ID NO: 39638 - DNA, 20 bp, Artificial Sequence
  MKO10039638_A_Pbdc1
  gRNA
ccatgcgctctctcaccctc

SEQ ID NO: 39639 - DNA, 20 bp, Artificial Sequence
  MKO10039639_A_Pbdc1
  gRNA
actgaagagaacaccatctt

SEQ ID NO: 39640 - DNA, 20 bp, Artificial Sequence
  MKO10039640_A_Pbk
  gRNA
tcagcgtttacctaatgaaa

SEQ ID NO: 39641 - DNA, 20 bp, Artificial Sequence
  MKO10039641_A_Pbk
  gRNA
gcagacttacctataatgtt

SEQ ID NO: 39642 - DNA, 20 bp, Artificial Sequence
  MKO10039642_A_Pbk
  gRNA
ccattggatgaaaatatgac

SEQ ID NO: 39643 - DNA, 20 bp, Artificial Sequence
  MKO10039643_A_Pbld1
  gRNA
acgcccatcagcaaattgcg

SEQ ID NO: 39644 - DNA, 20 bp, Artificial Sequence
  MKO10039644_A_Pbld1
  gRNA
tctccctcgcaatttgctga

SEQ ID NO: 39645 - DNA, 20 bp, Artificial Sequence
  MKO10039645_A_Pbld1
  gRNA
cagtgtggcgtggccgcaca

SEQ ID NO: 39646 - DNA, 20 bp, Artificial Sequence
  MKO10039646_A_Pbld2
  gRNA
cttgtgtggccacgccacgc

SEQ ID NO: 39647 - DNA, 20 bp, Artificial Sequence
  MKO10039647_A_Pbld2
  gRNA
tccttgtaaggttcccgttt

SEQ ID NO: 39648 - DNA, 20 bp, Artificial Sequence
  MKO10039648_A_Pbld2
  gRNA
attggatgaagatgctcatc

SEQ ID NO: 39649 - DNA, 20 bp, Artificial Sequence
  MKO10039649_A_Pbp2
  gRNA
cgtgggttccggacctccca

SEQ ID NO: 39650 - DNA, 20 bp, Artificial Sequence
  MKO10039650_A_Pbp2
  gRNA
ggtggccggcacgtgttacc

SEQ ID NO: 39651 - DNA, 20 bp, Artificial Sequence
  MKO10039651_A_Pbp2
  gRNA
gccgctgagcctccacgaag

SEQ ID NO: 39652 - DNA, 20 bp, Artificial Sequence
  MKO10039652_A_Pbrm1
  gRNA
caaactcatttcttgttcga

SEQ ID NO: 39653 - DNA, 20 bp, Artificial Sequence
  MKO10039653_A_Pbrm1
  gRNA
gttgtagccacaaatccatc

SEQ ID NO: 39654 - DNA, 20 bp, Artificial Sequence
  MKO10039654_A_Pbrm1
  gRNA
acatcacttaccactttgga

SEQ ID NO: 39655 - DNA, 20 bp, Artificial Sequence
  MKO10039655_A_Pbsn
  gRNA
agagaatgtacagcgtatca

SEQ ID NO: 39656 - DNA, 20 bp, Artificial Sequence
  MKO10039656_A_Pbsn
  gRNA
gacggagttcatgaacttag

SEQ ID NO: 39657 - DNA, 20 bp, Artificial Sequence
  MKO10039657_A_Pbsn
  gRNA
aagaaatgatgtcacacgag

SEQ ID NO: 39658 - DNA, 20 bp, Artificial Sequence
  MKO10039658_A_Pbx1
  gRNA
cggccatcccgaccccagcg

SEQ ID NO: 39659 - DNA, 20 bp, Artificial Sequence
  MKO10039659_A_Pbx1
  gRNA
tctctccgaaggagatcgag

SEQ ID NO: 39660 - DNA, 20 bp, Artificial Sequence
  MKO10039660_A_Pbx1
  gRNA
agacccccagctcatgcgac

SEQ ID NO: 39661 - DNA, 20 bp, Artificial Sequence
  MKO10039661_A_Pbx2
  gRNA
gtccggggatacgccaccac

SEQ ID NO: 39662 - DNA, 20 bp, Artificial Sequence
  MKO10039662_A_Pbx2
  gRNA
cactcgcccggtcgccccca

SEQ ID NO: 39663 - DNA, 20 bp, Artificial Sequence
  MKO10039663_A_Pbx2
  gRNA
ggtgtggctggacccgagaa

SEQ ID NO: 39664 - DNA, 20 bp, Artificial Sequence
  MKO10039664_A_Pbx3
  gRNA
aaggcgtaacttcagtaaac

SEQ ID NO: 39665 - DNA, 20 bp, Artificial Sequence
  MKO10039665_A_Pbx3
  gRNA
cacaagacgctgaagagcgc

SEQ ID NO: 39666 - DNA, 20 bp, Artificial Sequence
  MKO10039666_A_Pbx3
  gRNA
tgtgatagatttgtctgatc

SEQ ID NO: 39667 - DNA, 20 bp, Artificial Sequence
  MKO10039667_A_Pbx4
  gRNA
ctgtctgtaggcgcaagcgg

SEQ ID NO: 39668 - DNA, 20 bp, Artificial Sequence
  MKO10039668_A_Pbx4
  gRNA
atgtgtggtgaactcacgac

SEQ ID NO: 39669 - DNA, 20 bp, Artificial Sequence
  MKO10039669_A_Pbx4
  gRNA
ctgtgatgactctacgctca

SEQ ID NO: 39670 - DNA, 20 bp, Artificial Sequence
  MKO10039670_A_Pbxip1
  gRNA
acccgtagatgtggaggacc

SEQ ID NO: 39671 - DNA, 20 bp, Artificial Sequence
  MKO10039671_A_Pbxip1
  gRNA
ggtccgaggctcgtcgccac

SEQ ID NO: 39672 - DNA, 20 bp, Artificial Sequence
  MKO10039672_A_Pbxip1
  gRNA
ctccacatctacgggtacca

SEQ ID NO: 39673 - DNA, 20 bp, Artificial Sequence
  MKO10039673_A_Pcbd1
  gRNA
tatatcccgttccgaaagac

SEQ ID NO: 39674 - DNA, 20 bp, Artificial Sequence
  MKO10039674_A_Pcbd1
  gRNA
ttcggaacgggatataaacc

SEQ ID NO: 39675 - DNA, 20 bp, Artificial Sequence
  MKO10039675_A_Pcbd1
  gRNA
agctggaccaccatcccgag

SEQ ID NO: 39676 - DNA, 20 bp, Artificial Sequence
  MKO10039676_A_Pcbd2
  gRNA
acttcacatcccgcttggtc

SEQ ID NO: 39677 - DNA, 20 bp, Artificial Sequence
  MKO10039677_A_Pcbd2
  gRNA
ttgtagacgttgaaccattc

SEQ ID NO: 39678 - DNA, 20 bp, Artificial Sequence
  MKO10039678_A_Pcbd2
  gRNA
atggccgccctgctcgcgcc

SEQ ID NO: 39679 - DNA, 20 bp, Artificial Sequence
  MKO10039679_A_Pcbp1
  gRNA
cgccatgatcatcgacaagc

SEQ ID NO: 39680 - DNA, 20 bp, Artificial Sequence
  MKO10039680_A_Pcbp1
  gRNA
gtcggtgaagaggatccgcg

SEQ ID NO: 39681 - DNA, 20 bp, Artificial Sequence
  MKO10039681_A_Pcbp1
  gRNA
ccgcgtcgctgcagcgatct

SEQ ID NO: 39682 - DNA, 20 bp, Artificial Sequence
  MKO10039682_A_Pcbp2
  gRNA
atctgttaagaagatgcgcg

SEQ ID NO: 39683 - DNA, 20 bp, Artificial Sequence
  MKO10039683_A_Pcbp2
  gRNA
tcctgagagaattatcactt

SEQ ID NO: 39684 - DNA, 20 bp, Artificial Sequence
  MKO10039684_A_Pcbp2
  gRNA
gccaaagtgataattctctc

SEQ ID NO: 39685 - DNA, 20 bp, Artificial Sequence
  MKO10039685_A_Pcbp3
  gRNA
tatgatcgcgtacaagtttg

SEQ ID NO: 39686 - DNA, 20 bp, Artificial Sequence
  MKO10039686_A_Pcbp3
  gRNA
gtgattgtaacgattctctc

SEQ ID NO: 39687 - DNA, 20 bp, Artificial Sequence
  MKO10039687_A_Pcbp3
  gRNA
ttgttccaggtgacgccatc

SEQ ID NO: 39688 - DNA, 20 bp, Artificial Sequence
  MKO10039688_A_Pcbp4
  gRNA
gagagactgtaaagcgaatc

SEQ ID NO: 39689 - DNA, 20 bp, Artificial Sequence
  MKO10039689_A_Pcbp4
  gRNA
tacggctgccgtcttccacg

SEQ ID NO: 39690 - DNA, 20 bp, Artificial Sequence
  MKO10039690_A_Pcbp4
  gRNA
ggggcaggagccctccgaga

SEQ ID NO: 39691 - DNA, 20 bp, Artificial Sequence
  MKO10039691_A_Pcca
  gRNA
ctattcataccaatgcctag

SEQ ID NO: 39692 - DNA, 20 bp, Artificial Sequence
  MKO10039692_A_Pcca
  gRNA
aggcattggtatgaatagac

SEQ ID NO: 39693 - DNA, 20 bp, Artificial Sequence
  MKO10039693_A_Pcca
  gRNA
cagtaaaagctacctcaaca

SEQ ID NO: 39694 - DNA, 20 bp, Artificial Sequence
  MKO10039694_A_Pccb
  gRNA
gagtcattgagcccgatcac

SEQ ID NO: 39695 - DNA, 20 bp, Artificial Sequence
  MKO10039695_A_Pccb
  gRNA
cagatgtgccgacttcggaa

SEQ ID NO: 39696 - DNA, 20 bp, Artificial Sequence
  MKO10039696_A_Pccb
  gRNA
actggacggggccgaatcaa

SEQ ID NO: 39697 - DNA, 20 bp, Artificial Sequence
  MKO10039697_A_Pcdh10
  gRNA
ttcggactgtcgccgcgcac

SEQ ID NO: 39698 - DNA, 20 bp, Artificial Sequence
  MKO10039698_A_Pcdh10
  gRNA
gagagctccgcaccgcgcgc

SEQ ID NO: 39699 - DNA, 20 bp, Artificial Sequence
  MKO10039699_A_Pcdh10
  gRNA
acagacctcgccgagttaac

SEQ ID NO: 39700 - DNA, 20 bp, Artificial Sequence
  MKO10039700_A_Pcdh11x
  gRNA
accattgattcgcattgaag

SEQ ID NO: 39701 - DNA, 20 bp, Artificial Sequence
  MKO10039701_A_Pcdh11x
  gRNA
ttgtagtgtcgagccaaatc

SEQ ID NO: 39702 - DNA, 20 bp, Artificial Sequence
  MKO10039702_A_Pcdh11x
  gRNA
cttgcagtcgacgaactgtc

SEQ ID NO: 39703 - DNA, 20 bp, Artificial Sequence
  MKO10039703_A_Pcdh12
  gRNA
cttctgacaccagcgacgtc

SEQ ID NO: 39704 - DNA, 20 bp, Artificial Sequence
  MKO10039704_A_Pcdh12
  gRNA
ccccgatgctacaacgtcag

SEQ ID NO: 39705 - DNA, 20 bp, Artificial Sequence
  MKO10039705_A_Pcdh12
  gRNA
accagtggaagctgcgtccg

SEQ ID NO: 39706 - DNA, 20 bp, Artificial Sequence
  MKO10039706_A_Pcdh15
  gRNA
ctatcatgaagtacgcatcg

SEQ ID NO: 39707 - DNA, 20 bp, Artificial Sequence
  MKO10039707_A_Pcdh15
  gRNA
atcacagacctcattcacgg

SEQ ID NO: 39708 - DNA, 20 bp, Artificial Sequence
  MKO10039708_A_Pcdh15
  gRNA
aggaccaccagctactatcg

SEQ ID NO: 39709 - DNA, 20 bp, Artificial Sequence
  MKO10039709_A_Pcdh17
  gRNA
gctcgaattagtcccttgtc

SEQ ID NO: 39710 - DNA, 20 bp, Artificial Sequence
  MKO10039710_A_Pcdh17
  gRNA
ctcacggtcgatgcgctgtt

SEQ ID NO: 39711 - DNA, 20 bp, Artificial Sequence
  MKO10039711_A_Pcdh17
  gRNA
gagccttgcgcctcaacaaa

SEQ ID NO: 39712 - DNA, 20 bp, Artificial Sequence
  MKO10039712_A_Pcdh18
  gRNA
ttaatatcgaagtgcgaacc

SEQ ID NO: 39713 - DNA, 20 bp, Artificial Sequence
  MKO10039713_A_Pcdh18
  gRNA
ggcgcgattctccgatagac

SEQ ID NO: 39714 - DNA, 20 bp, Artificial Sequence
  MKO10039714_A_Pcdh18
  gRNA
gaaggactcccctagcgacg

SEQ ID NO: 39715 - DNA, 20 bp, Artificial Sequence
  MKO10039715_A_Pcdh19
  gRNA
cggtgcgctagactatgaag

SEQ ID NO: 39716 - DNA, 20 bp, Artificial Sequence
  MKO10039716_A_Pcdh19
  gRNA
caagctcgctattgaccgac

SEQ ID NO: 39717 - DNA, 20 bp, Artificial Sequence
  MKO10039717_A_Pcdh19
  gRNA
gccgtgcccatttaatcaaa

SEQ ID NO: 39718 - DNA, 20 bp, Artificial Sequence
  MKO10039718_A_Pcdh1
  gRNA
ctggggcgtgctaagccgaa

SEQ ID NO: 39719 - DNA, 20 bp, Artificial Sequence
  MKO10039719_A_Pcdh1
  gRNA
gttacaccgcctcgtggtga

SEQ ID NO: 39720 - DNA, 20 bp, Artificial Sequence
  MKO10039720_A_Pcdh1
  gRNA
gtaggtaggccgctcgaatt

SEQ ID NO: 39721 - DNA, 20 bp, Artificial Sequence
  MKO10039721_A_Pcdh20
  gRNA
tagcacggctgtaactcgcg

SEQ ID NO: 39722 - DNA, 20 bp, Artificial Sequence
  MKO10039722_A_Pcdh20
  gRNA
ttcacctgtaaatacccgat

SEQ ID NO: 39723 - DNA, 20 bp, Artificial Sequence
  MKO10039723_A_Pcdh20
  gRNA
cgcgcgcagcttgctggtcc

SEQ ID NO: 39724 - DNA, 20 bp, Artificial Sequence
  MKO10039724_A_Pcdh7
  gRNA
tcacttcctcgcggtcgatc

SEQ ID NO: 39725 - DNA, 20 bp, Artificial Sequence
  MKO10039725_A_Pcdh7
  gRNA
tcggtcgatgcgccgctcac

SEQ ID NO: 39726 - DNA, 20 bp, Artificial Sequence
  MKO10039726_A_Pcdh7
  gRNA
ttgccggtcagcgctacatc

SEQ ID NO: 39727 - DNA, 20 bp, Artificial Sequence
  MKO10039727_A_Pcdh8
  gRNA
gacgctgccgatcccgacga

SEQ ID NO: 39728 - DNA, 20 bp, Artificial Sequence
  MKO10039728_A_Pcdh8
  gRNA
gtccgcgaaaacaaccctcc

SEQ ID NO: 39729 - DNA, 20 bp, Artificial Sequence
  MKO10039729_A_Pcdh8
  gRNA
gcgcagggacaattactatc

SEQ ID NO: 39730 - DNA, 20 bp, Artificial Sequence
  MKO10039730_A_Pcdh9
  gRNA
atgaacggcatcatcgggtt

SEQ ID NO: 39731 - DNA, 20 bp, Artificial Sequence
  MKO10039731_A_Pcdh9
  gRNA
actgcttacggtcattgaat

SEQ ID NO: 39732 - DNA, 20 bp, Artificial Sequence
  MKO10039732_A_Pcdh9
  gRNA
cgtcattcaagagctcccgt

SEQ ID NO: 39733 - DNA, 20 bp, Artificial Sequence
  MKO10039733_A_Pcdha10
  gRNA
tgcgccgcgccaacgcctgt

SEQ ID NO: 39734 - DNA, 20 bp, Artificial Sequence
  MKO10039734_A_Pcdha10
  gRNA
gatcagtatcactcgcgctc

SEQ ID NO: 39735 - DNA, 20 bp, Artificial Sequence
  MKO10039735_A_Pcdha10
  gRNA
gaggctggcattctacgggc

SEQ ID NO: 39736 - DNA, 20 bp, Artificial Sequence
  MKO10039736_A_Pcdha11
  gRNA
gatcagcacgacgcgtgcct

SEQ ID NO: 39737 - DNA, 20 bp, Artificial Sequence
  MKO10039737_A_Pcdha11
  gRNA
tgcaccttcgtctagatccg

SEQ ID NO: 39738 - DNA, 20 bp, Artificial Sequence
  MKO10039738_A_Pcdha11
  gRNA
gaggctggcattctacgggc

SEQ ID NO: 39739 - DNA, 20 bp, Artificial Sequence
  MKO10039739_A_Pcdha12
  gRNA
gtccaaagcgaaataatcgc

SEQ ID NO: 39740 - DNA, 20 bp, Artificial Sequence
  MKO10039740_A_Pcdha12
  gRNA
ttccgccttgacctaccgat

SEQ ID NO: 39741 - DNA, 20 bp, Artificial Sequence
  MKO10039741_A_Pcdha12
  gRNA
gaggctggcattctacgggc

SEQ ID NO: 39742 - DNA, 20 bp, Artificial Sequence
  MKO10039742_A_Pcdha1
  gRNA
caacgccccactgtttgacc

SEQ ID NO: 39743 - DNA, 20 bp, Artificial Sequence
  MKO10039743_A_Pcdha1
  gRNA
tgcgcgcaacccgtttcgcg

SEQ ID NO: 39744 - DNA, 20 bp, Artificial Sequence
  MKO10039744_A_Pcdha1
  gRNA
gaggctggcattctacgggc

SEQ ID NO: 39745 - DNA, 20 bp, Artificial Sequence
  MKO10039745_A_Pcdha2
  gRNA
catgcgtagcctgttccgcg

SEQ ID NO: 39746 - DNA, 20 bp, Artificial Sequence
  MKO10039746_A_Pcdha2
  gRNA
gatttgaaacttagtccgtg

SEQ ID NO: 39747 - DNA, 20 bp, Artificial Sequence
  MKO10039747_A_Pcdha2
  gRNA
gaggctggcattctacgggc

SEQ ID NO: 39748 - DNA, 20 bp, Artificial Sequence
  MKO10039748_A_Pcdha3
  gRNA
tgccccgcgacagcgcctat

SEQ ID NO: 39749 - DNA, 20 bp, Artificial Sequence
  MKO10039749_A_Pcdha3
  gRNA
atgcgccctctagcgaaaac

SEQ ID NO: 39750 - DNA, 20 bp, Artificial Sequence
  MKO10039750_A_Pcdha3
  gRNA
ggctcctaaagctttgccgg

SEQ ID NO: 39751 - DNA, 20 bp, Artificial Sequence
  MKO10039751_A_Pcdha4-g
  gRNA
gattagtactacgcgcatac

SEQ ID NO: 39752 - DNA, 20 bp, Artificial Sequence
  MKO10039752_A_Pcdha4-g
  gRNA
tacacgttctggcggtagtc

SEQ ID NO: 39753 - DNA, 20 bp, Artificial Sequence
  MKO10039753_A_Pcdha4-g
  gRNA
cgcgcaccttagccaccaca

SEQ ID NO: 39754 - DNA, 20 bp, Artificial Sequence
  MKO10039754_A_Pcdha4
  gRNA
gattagtactacgcgcatac

SEQ ID NO: 39755 - DNA, 20 bp, Artificial Sequence
  MKO10039755_A_Pcdha4
  gRNA
cgcgcaccttagccaccaca

SEQ ID NO: 39756 - DNA, 20 bp, Artificial Sequence
  MKO10039756_A_Pcdha4
  gRNA
gaggctggcattctacgggc

SEQ ID NO: 39757 - DNA, 20 bp, Artificial Sequence
  MKO10039757_A_Pcdha5
  gRNA
catgccgcgtcaacgcttgt

SEQ ID NO: 39758 - DNA, 20 bp, Artificial Sequence
  MKO10039758_A_Pcdha5
  gRNA
cacgttgacatctatcagcg

SEQ ID NO: 39759 - DNA, 20 bp, Artificial Sequence
  MKO10039759_A_Pcdha5
  gRNA
ggctcctaaagctttgccgg

SEQ ID NO: 39760 - DNA, 20 bp, Artificial Sequence
  MKO10039760_A_Pcdha6
  gRNA
ggcaccttgcgctcgcgaag

SEQ ID NO: 39761 - DNA, 20 bp, Artificial Sequence
  MKO10039761_A_Pcdha6
  gRNA
aaagcctcttcgcgagcgca

SEQ ID NO: 39762 - DNA, 20 bp, Artificial Sequence
  MKO10039762_A_Pcdha6
  gRNA
ggctcctaaagctttgccgg

SEQ ID NO: 39763 - DNA, 20 bp, Artificial Sequence
  MKO10039763_A_Pcdha7
  gRNA
agcgtatttgaccgtgattc

SEQ ID NO: 39764 - DNA, 20 bp, Artificial Sequence
  MKO10039764_A_Pcdha7
  gRNA
ggctcctaaagctttgccgg

SEQ ID NO: 39765 - DNA, 20 bp, Artificial Sequence
  MKO10039765_A_Pcdha7
  gRNA
tcctttctcccccgccgcaa

SEQ ID NO: 39766 - DNA, 20 bp, Artificial Sequence
  MKO10039766_A_Pcdha8
  gRNA
gttcaagatcctgcgcgatg

SEQ ID NO: 39767 - DNA, 20 bp, Artificial Sequence
  MKO10039767_A_Pcdha8
  gRNA
cgtggatcctggtcacgtgg

SEQ ID NO: 39768 - DNA, 20 bp, Artificial Sequence
  MKO10039768_A_Pcdha8
  gRNA
ggctcctaaagctttgccgg

SEQ ID NO: 39769 - DNA, 20 bp, Artificial Sequence
  MKO10039769_A_Pcdha9
  gRNA
tttaccgcgccagcgcctat

SEQ ID NO: 39770 - DNA, 20 bp, Artificial Sequence
  MKO10039770_A_Pcdha9
  gRNA
caaacctgaatttacgggat

SEQ ID NO: 39771 - DNA, 20 bp, Artificial Sequence
  MKO10039771_A_Pcdha9
  gRNA
gaggctggcattctacgggc

SEQ ID NO: 39772 - DNA, 20 bp, Artificial Sequence
  MKO10039772_A_Pcdhac1
  gRNA
cgacccgcgatcccatgtcc

SEQ ID NO: 39773 - DNA, 20 bp, Artificial Sequence
  MKO10039773_A_Pcdhac1
  gRNA
gcactccgtatacagtacta

SEQ ID NO: 39774 - DNA, 20 bp, Artificial Sequence
  MKO10039774_A_Pcdhac1
  gRNA
gaggctggcattctacgggc

SEQ ID NO: 39775 - DNA, 20 bp, Artificial Sequence
  MKO10039775_A_Pcdhac2
  gRNA
gagcgctcttcgtcaacgag

SEQ ID NO: 39776 - DNA, 20 bp, Artificial Sequence
  MKO10039776_A_Pcdhac2
  gRNA
ccggcacggagtatcgtagc

SEQ ID NO: 39777 - DNA, 20 bp, Artificial Sequence
  MKO10039777_A_Pcdhac2
  gRNA
gaggctggcattctacgggc

SEQ ID NO: 39778 - DNA, 20 bp, Artificial Sequence
  MKO10039778_A_Pcdhb10
  gRNA
catgttcgcgccacagaccg

SEQ ID NO: 39779 - DNA, 20 bp, Artificial Sequence
  MKO10039779_A_Pcdhb10
  gRNA
tgctaagcgcgggtgaacca

SEQ ID NO: 39780 - DNA, 20 bp, Artificial Sequence
  MKO10039780_A_Pcdhb10
  gRNA
ggcgcgaacatgaaactcga

SEQ ID NO: 39781 - DNA, 20 bp, Artificial Sequence
  MKO10039781_A_Pcdhb11
  gRNA
gggggtgctccgcctcggtc

SEQ ID NO: 39782 - DNA, 20 bp, Artificial Sequence
  MKO10039782_A_Pcdhb11
  gRNA
acgctccagagttgatgatc

SEQ ID NO: 39783 - DNA, 20 bp, Artificial Sequence
  MKO10039783_A_Pcdhb11
  gRNA
agcgactgtgagtaatgacg

SEQ ID NO: 39784 - DNA, 20 bp, Artificial Sequence
  MKO10039784_A_Pcdhb12
  gRNA
tttgcacggaccctcacgag

SEQ ID NO: 39785 - DNA, 20 bp, Artificial Sequence
  MKO10039785_A_Pcdhb12
  gRNA
ctagcactaccacacgcacg

SEQ ID NO: 39786 - DNA, 20 bp, Artificial Sequence
  MKO10039786_A_Pcdhb12
  gRNA
gctgtacctagtcgttgcct

SEQ ID NO: 39787 - DNA, 20 bp, Artificial Sequence
  MKO10039787_A_Pcdhb13
  gRNA
agatgcgctcacgttatacc

SEQ ID NO: 39788 - DNA, 20 bp, Artificial Sequence
  MKO10039788_A_Pcdhb13
  gRNA
aattcgactgaaaagcacgt

SEQ ID NO: 39789 - DNA, 20 bp, Artificial Sequence
  MKO10039789_A_Pcdhb13
  gRNA
tatcattcacgtccaatact

SEQ ID NO: 39790 - DNA, 20 bp, Artificial Sequence
  MKO10039790_A_Pcdhb14
  gRNA
aaaatcgcgactatagtttc

SEQ ID NO: 39791 - DNA, 20 bp, Artificial Sequence
  MKO10039791_A_Pcdhb14
  gRNA
catcacgtattccgttctag

SEQ ID NO: 39792 - DNA, 20 bp, Artificial Sequence
  MKO10039792_A_Pcdhb14
  gRNA
ggaaattcagtcttaccgca

SEQ ID NO: 39793 - DNA, 20 bp, Artificial Sequence
  MKO10039793_A_Pcdhb15
  gRNA
ttactgctcagtccgcttac

SEQ ID NO: 39794 - DNA, 20 bp, Artificial Sequence
  MKO10039794_A_Pcdhb15
  gRNA
gtgaggcagccgcaacgagt

SEQ ID NO: 39795 - DNA, 20 bp, Artificial Sequence
  MKO10039795_A_Pcdhb15
  gRNA
tccaagagaagcgtcgcccc

SEQ ID NO: 39796 - DNA, 20 bp, Artificial Sequence
  MKO10039796_A_Pcdhb16
  gRNA
agttcccctgcagtcgttag

SEQ ID NO: 39797 - DNA, 20 bp, Artificial Sequence
  MKO10039797_A_Pcdhb16
  gRNA
gatacttgtcaataccgttt

SEQ ID NO: 39798 - DNA, 20 bp, Artificial Sequence
  MKO10039798_A_Pcdhb16
  gRNA
ggcacgtgatcctgatcatg

SEQ ID NO: 39799 - DNA, 20 bp, Artificial Sequence
  MKO10039799_A_Pcdhb17
  gRNA
tagagcgtcctcatcgtgcg

SEQ ID NO: 39800 - DNA, 20 bp, Artificial Sequence
  MKO10039800_A_Pcdhb17
  gRNA
ggagattcggctacgaaaag

SEQ ID NO: 39801 - DNA, 20 bp, Artificial Sequence
  MKO10039801_A_Pcdhb17
  gRNA
aatgatccgagccctgcgat

SEQ ID NO: 39802 - DNA, 20 bp, Artificial Sequence
  MKO10039802_A_Pcdhb18
  gRNA
gaaccgtacatctcgccgaa

SEQ ID NO: 39803 - DNA, 20 bp, Artificial Sequence
  MKO10039803_A_Pcdhb18
  gRNA
gggcctttcggcgagatgta

SEQ ID NO: 39804 - DNA, 20 bp, Artificial Sequence
  MKO10039804_A_Pcdhb18
  gRNA
atttgtggcgaacctagcaa

SEQ ID NO: 39805 - DNA, 20 bp, Artificial Sequence
  MKO10039805_A_Pcdhb19
  gRNA
agtgcgatcgatttagatgt

SEQ ID NO: 39806 - DNA, 20 bp, Artificial Sequence
  MKO10039806_A_Pcdhb19
  gRNA
gactgcattggtccgagtgg

SEQ ID NO: 39807 - DNA, 20 bp, Artificial Sequence
  MKO10039807_A_Pcdhb19
  gRNA
agctttaatgattatcgagt

SEQ ID NO: 39808 - DNA, 20 bp, Artificial Sequence
  MKO10039808_A_Pcdhb1
  gRNA
cgcggccacaatccgctatt

SEQ ID NO: 39809 - DNA, 20 bp, Artificial Sequence
  MKO10039809_A_Pcdhb1
  gRNA
tcagcgggccatgaccggat

SEQ ID NO: 39810 - DNA, 20 bp, Artificial Sequence
  MKO10039810_A_Pcdhb1
  gRNA
gaatcatgggagctgcgcgc

SEQ ID NO: 39811 - DNA, 20 bp, Artificial Sequence
  MKO10039811_A_Pcdhb20
  gRNA
accgacgacatgatcacttc

SEQ ID NO: 39812 - DNA, 20 bp, Artificial Sequence
  MKO10039812_A_Pcdhb20
  gRNA
cacgatccagtcgctcattc

SEQ ID NO: 39813 - DNA, 20 bp, Artificial Sequence
  MKO10039813_A_Pcdhb20
  gRNA
tggaaagatatacccggagc

SEQ ID NO: 39814 - DNA, 20 bp, Artificial Sequence
  MKO10039814_A_Pcdhb21
  gRNA
tccagttctaaccgcaaata

SEQ ID NO: 39815 - DNA, 20 bp, Artificial Sequence
  MKO10039815_A_Pcdhb21
  gRNA
caccgtcatgatctccgacc

SEQ ID NO: 39816 - DNA, 20 bp, Artificial Sequence
  MKO10039816_A_Pcdhb21
  gRNA
gtagagtcgtgcgcaacctc

SEQ ID NO: 39817 - DNA, 20 bp, Artificial Sequence
  MKO10039817_A_Pcdhb22
  gRNA
cggattcgagaccgagactc

SEQ ID NO: 39818 - DNA, 20 bp, Artificial Sequence
  MKO10039818_A_Pcdhb22
  gRNA
ggacaaggagctcgatcgcg

SEQ ID NO: 39819 - DNA, 20 bp, Artificial Sequence
  MKO10039819_A_Pcdhb22
  gRNA
catgtttccatccgcaaccg

SEQ ID NO: 39820 - DNA, 20 bp, Artificial Sequence
  MKO10039820_A_Pcdhb2
  gRNA
ccgcgccgccaacatctacc

SEQ ID NO: 39821 - DNA, 20 bp, Artificial Sequence
  MKO10039821_A_Pcdhb2
  gRNA
ggaccgcgagtcatttccaa

SEQ ID NO: 39822 - DNA, 20 bp, Artificial Sequence
  MKO10039822_A_Pcdhb2
  gRNA
aggcgtaagctatatttcca

SEQ ID NO: 39823 - DNA, 20 bp, Artificial Sequence
  MKO10039823_A_Pcdhb3
  gRNA
atgttcacacccgccgtcgc

SEQ ID NO: 39824 - DNA, 20 bp, Artificial Sequence
  MKO10039824_A_Pcdhb3
  gRNA
cgactccgtccaaaacgacg

SEQ ID NO: 39825 - DNA, 20 bp, Artificial Sequence
  MKO10039825_A_Pcdhb3
  gRNA
acggagtcgcgtgccacctc

SEQ ID NO: 39826 - DNA, 20 bp, Artificial Sequence
  MKO10039826_A_Pcdhb4
  gRNA
gcgatttccacattatagta

SEQ ID NO: 39827 - DNA, 20 bp, Artificial Sequence
  MKO10039827_A_Pcdhb4
  gRNA
tcgccccgcaaagcccctca

SEQ ID NO: 39828 - DNA, 20 bp, Artificial Sequence
  MKO10039828_A_Pcdhb4
  gRNA
agcgtagagaccgtcaactc

SEQ ID NO: 39829 - DNA, 20 bp, Artificial Sequence
  MKO10039829_A_Pcdhb5
  gRNA
cagaatctctatcccgtatt

SEQ ID NO: 39830 - DNA, 20 bp, Artificial Sequence
  MKO10039830_A_Pcdhb5
  gRNA
cgaatacgggatagagattc

SEQ ID NO: 39831 - DNA, 20 bp, Artificial Sequence
  MKO10039831_A_Pcdhb5
  gRNA
atgatagcgaccacagtttc

SEQ ID NO: 39832 - DNA, 20 bp, Artificial Sequence
  MKO10039832_A_Pcdhb6
  gRNA
gaagagtcgtgctgcacctc

SEQ ID NO: 39833 - DNA, 20 bp, Artificial Sequence
  MKO10039833_A_Pcdhb6
  gRNA
caccatcatagtctccgatt

SEQ ID NO: 39834 - DNA, 20 bp, Artificial Sequence
  MKO10039834_A_Pcdhb6
  gRNA
gagcctgggtgtgcccaaat

SEQ ID NO: 39835 - DNA, 20 bp, Artificial Sequence
  MKO10039835_A_Pcdhb7
  gRNA
tcccagcgtcttgaaccaac

SEQ ID NO: 39836 - DNA, 20 bp, Artificial Sequence
  MKO10039836_A_Pcdhb7
  gRNA
tcgtggggataaagttgtgc

SEQ ID NO: 39837 - DNA, 20 bp, Artificial Sequence
  MKO10039837_A_Pcdhb7
  gRNA
tgctgagcgcagatgagccg

SEQ ID NO: 39838 - DNA, 20 bp, Artificial Sequence
  MKO10039838_A_Pcdhb8
  gRNA
gcagcaacgagtagataata

SEQ ID NO: 39839 - DNA, 20 bp, Artificial Sequence
  MKO10039839_A_Pcdhb8
  gRNA
ctcgcccgcgctcagctcag

SEQ ID NO: 39840 - DNA, 20 bp, Artificial Sequence
  MKO10039840_A_Pcdhb8
  gRNA
cggttagctaagagtcctga

SEQ ID NO: 39841 - DNA, 20 bp, Artificial Sequence
  MKO10039841_A_Pcdhb9
  gRNA
aagatagagtatcgaattgt

SEQ ID NO: 39842 - DNA, 20 bp, Artificial Sequence
  MKO10039842_A_Pcdhb9
  gRNA
gcgggatcccgcgctacctc

SEQ ID NO: 39843 - DNA, 20 bp, Artificial Sequence
  MKO10039843_A_Pcdhb9
  gRNA
ctaccctatgcagaacgcct

SEQ ID NO: 39844 - DNA, 20 bp, Artificial Sequence
  MKO10039844_A_Pcdhga10
  gRNA
accggcgaatcttctgtcac

SEQ ID NO: 39845 - DNA, 20 bp, Artificial Sequence
  MKO10039845_A_Pcdhga10
  gRNA
ggaccccgcgttccgccagc

SEQ ID NO: 39846 - DNA, 20 bp, Artificial Sequence
  MKO10039846_A_Pcdhga10
  gRNA
tacacgttctggcggtagtc

SEQ ID NO: 39847 - DNA, 20 bp, Artificial Sequence
  MKO10039847_A_Pcdhga11
  gRNA
tacacgttctggcggtagtc

SEQ ID NO: 39848 - DNA, 20 bp, Artificial Sequence
  MKO10039848_A_Pcdhga11
  gRNA
tctcggtgaccgccattgat

SEQ ID NO: 39849 - DNA, 20 bp, Artificial Sequence
  MKO10039849_A_Pcdhga11
  gRNA
tccacgcccacaaagtgcga

SEQ ID NO: 39850 - DNA, 20 bp, Artificial Sequence
  MKO10039850_A_Pcdhga12
  gRNA
atgagcgaaaacgccgccgc

SEQ ID NO: 39851 - DNA, 20 bp, Artificial Sequence
  MKO10039851_A_Pcdhga12
  gRNA
tacacgttctggcggtagtc

SEQ ID NO: 39852 - DNA, 20 bp, Artificial Sequence
  MKO10039852_A_Pcdhga12
  gRNA
tactcggaccgagcaaacgc

SEQ ID NO: 39853 - DNA, 20 bp, Artificial Sequence
  MKO10039853_A_Pcdhga1
  gRNA
tacacgttctggcggtagtc

SEQ ID NO: 39854 - DNA, 20 bp, Artificial Sequence
  MKO10039854_A_Pcdhga1
  gRNA
ggcggcagcccaatacattc

SEQ ID NO: 39855 - DNA, 20 bp, Artificial Sequence
  MKO10039855_A_Pcdhga1
  gRNA
cgccagaacgtgtacatccc

SEQ ID NO: 39856 - DNA, 20 bp, Artificial Sequence
  MKO10039856_A_Pcdhga2
  gRNA
acgtgcgaactggagcggat

SEQ ID NO: 39857 - DNA, 20 bp, Artificial Sequence
  MKO10039857_A_Pcdhga2
  gRNA
gtatccctcatccgcgtcag

SEQ ID NO: 39858 - DNA, 20 bp, Artificial Sequence
  MKO10039858_A_Pcdhga2
  gRNA
tacacgttctggcggtagtc

SEQ ID NO: 39859 - DNA, 20 bp, Artificial Sequence
  MKO10039859_A_Pcdhga3
  gRNA
tacacgttctggcggtagtc

SEQ ID NO: 39860 - DNA, 20 bp, Artificial Sequence
  MKO10039860_A_Pcdhga3
  gRNA
agtaccaacgtcgaagccta

SEQ ID NO: 39861 - DNA, 20 bp, Artificial Sequence
  MKO10039861_A_Pcdhga3
  gRNA
cgccagaacgtgtacatccc

SEQ ID NO: 39862 - DNA, 20 bp, Artificial Sequence
  MKO10039862_A_Pcdhga4
  gRNA
agtaccggatctgttccgcg

SEQ ID NO: 39863 - DNA, 20 bp, Artificial Sequence
  MKO10039863_A_Pcdhga4
  gRNA
tacacgttctggcggtagtc

SEQ ID NO: 39864 - DNA, 20 bp, Artificial Sequence
  MKO10039864_A_Pcdhga4
  gRNA
aacgtgcacgacagcgactc

SEQ ID NO: 39865 - DNA, 20 bp, Artificial Sequence
  MKO10039865_A_Pcdhga5
  gRNA
tacgcctatgacgctgacag

SEQ ID NO: 39866 - DNA, 20 bp, Artificial Sequence
  MKO10039866_A_Pcdhga5
  gRNA
tacacgttctggcggtagtc

SEQ ID NO: 39867 - DNA, 20 bp, Artificial Sequence
  MKO10039867_A_Pcdhga5
  gRNA
gtgctccccttcgcgagaga

SEQ ID NO: 39868 - DNA, 20 bp, Artificial Sequence
  MKO10039868_A_Pcdhga6
  gRNA
tacacgttctggcggtagtc

SEQ ID NO: 39869 - DNA, 20 bp, Artificial Sequence
  MKO10039869_A_Pcdhga6
  gRNA
gaattcgcgccatgcctgtt

SEQ ID NO: 39870 - DNA, 20 bp, Artificial Sequence
  MKO10039870_A_Pcdhga6
  gRNA
tacagaactggatcgcgaac

SEQ ID NO: 39871 - DNA, 20 bp, Artificial Sequence
  MKO10039871_A_Pcdhga7
  gRNA
aggacgacaccggtaccccc

SEQ ID NO: 39872 - DNA, 20 bp, Artificial Sequence
  MKO10039872_A_Pcdhga7
  gRNA
tacacgttctggcggtagtc

SEQ ID NO: 39873 - DNA, 20 bp, Artificial Sequence
  MKO10039873_A_Pcdhga7
  gRNA
attgatcgctctaacttaaa

SEQ ID NO: 39874 - DNA, 20 bp, Artificial Sequence
  MKO10039874_A_Pcdhga8
  gRNA
tacacgttctggcggtagtc

SEQ ID NO: 39875 - DNA, 20 bp, Artificial Sequence
  MKO10039875_A_Pcdhga8
  gRNA
cgccagaacgtgtacatccc

SEQ ID NO: 39876 - DNA, 20 bp, Artificial Sequence
  MKO10039876_A_Pcdhga8
  gRNA
agtcacctacccgctcgtgc

SEQ ID NO: 39877 - DNA, 20 bp, Artificial Sequence
  MKO10039877_A_Pcdhga9
  gRNA
tacacgttctggcggtagtc

SEQ ID NO: 39878 - DNA, 20 bp, Artificial Sequence
  MKO10039878_A_Pcdhga9
  gRNA
cgcccatgaccctgacgacg

SEQ ID NO: 39879 - DNA, 20 bp, Artificial Sequence
  MKO10039879_A_Pcdhga9
  gRNA
cgccagaacgtgtacatccc

SEQ ID NO: 39880 - DNA, 20 bp, Artificial Sequence
  MKO10039880_A_Pcdhgb1
  gRNA
tacacgttctggcggtagtc

SEQ ID NO: 39881 - DNA, 20 bp, Artificial Sequence
  MKO10039881_A_Pcdhgb1
  gRNA
cgccagaacgtgtacatccc

SEQ ID NO: 39882 - DNA, 20 bp, Artificial Sequence
  MKO10039882_A_Pcdhgb1
  gRNA
tgcttcacattctacgacta

SEQ ID NO: 39883 - DNA, 20 bp, Artificial Sequence
  MKO10039883_A_Pcdhgb2
  gRNA
tacacgttctggcggtagtc

SEQ ID NO: 39884 - DNA, 20 bp, Artificial Sequence
  MKO10039884_A_Pcdhgb2
  gRNA
tgtattccggtatcgcctcc

SEQ ID NO: 39885 - DNA, 20 bp, Artificial Sequence
  MKO10039885_A_Pcdhgb2
  gRNA
cccaagagtcgtcgccgcag

SEQ ID NO: 39886 - DNA, 20 bp, Artificial Sequence
  MKO10039886_A_Pcdhgb4
  gRNA
tacacgttctggcggtagtc

SEQ ID NO: 39887 - DNA, 20 bp, Artificial Sequence
  MKO10039887_A_Pcdhgb4
  gRNA
cactccgctttgcgcgttta

SEQ ID NO: 39888 - DNA, 20 bp, Artificial Sequence
  MKO10039888_A_Pcdhgb4
  gRNA
gttcacatcgcctatatgca

SEQ ID NO: 39889 - DNA, 20 bp, Artificial Sequence
  MKO10039889_A_Pcdhgb5
  gRNA
tacacgttctggcggtagtc

SEQ ID NO: 39890 - DNA, 20 bp, Artificial Sequence
  MKO10039890_A_Pcdhgb5
  gRNA
gggaggatccccgccgtcta

SEQ ID NO: 39891 - DNA, 20 bp, Artificial Sequence
  MKO10039891_A_Pcdhgb5
  gRNA
cgccagaacgtgtacatccc

SEQ ID NO: 39892 - DNA, 20 bp, Artificial Sequence
  MKO10039892_A_Pcdhgb6
  gRNA
tacacgttctggcggtagtc

SEQ ID NO: 39893 - DNA, 20 bp, Artificial Sequence
  MKO10039893_A_Pcdhgb6
  gRNA
cgccagaacgtgtacatccc

SEQ ID NO: 39894 - DNA, 20 bp, Artificial Sequence
  MKO10039894_A_Pcdhgb6
  gRNA
agtcacctacccgctcgtgc

SEQ ID NO: 39895 - DNA, 20 bp, Artificial Sequence
  MKO10039895_A_Pcdhgb7
  gRNA
tactcagctccgaatccgag

SEQ ID NO: 39896 - DNA, 20 bp, Artificial Sequence
  MKO10039896_A_Pcdhgb7
  gRNA
tacacgttctggcggtagtc

SEQ ID NO: 39897 - DNA, 20 bp, Artificial Sequence
  MKO10039897_A_Pcdhgb7
  gRNA
aggggatgggatgatcgacg

SEQ ID NO: 39898 - DNA, 20 bp, Artificial Sequence
  MKO10039898_A_Pcdhgb8
  gRNA
cgctgacgtgaaaaacgttt

SEQ ID NO: 39899 - DNA, 20 bp, Artificial Sequence
  MKO10039899_A_Pcdhgb8
  gRNA
ttcgcgaattacttccaacc

SEQ ID NO: 39900 - DNA, 20 bp, Artificial Sequence
  MKO10039900_A_Pcdhgb8
  gRNA
tacacgttctggcggtagtc

SEQ ID NO: 39901 - DNA, 20 bp, Artificial Sequence
  MKO10039901_A_Pcdhgc3
  gRNA
gagcgcgcacgatcccgatg

SEQ ID NO: 39902 - DNA, 20 bp, Artificial Sequence
  MKO10039902_A_Pcdhgc3
  gRNA
tacacgttctggcggtagtc

SEQ ID NO: 39903 - DNA, 20 bp, Artificial Sequence
  MKO10039903_A_Pcdhgc3
  gRNA
gatgttcgtcaacgatcgac

SEQ ID NO: 39904 - DNA, 20 bp, Artificial Sequence
  MKO10039904_A_Pcdhgc4
  gRNA
atcacgccccccgatttccg

SEQ ID NO: 39905 - DNA, 20 bp, Artificial Sequence
  MKO10039905_A_Pcdhgc4
  gRNA
cgtgttggagagcgcgccag

SEQ ID NO: 39906 - DNA, 20 bp, Artificial Sequence
  MKO10039906_A_Pcdhgc4
  gRNA
tacacgttctggcggtagtc

SEQ ID NO: 39907 - DNA, 20 bp, Artificial Sequence
  MKO10039907_A_Pcdhgc5
  gRNA
tacacgttctggcggtagtc

SEQ ID NO: 39908 - DNA, 20 bp, Artificial Sequence
  MKO10039908_A_Pcdhgc5
  gRNA
cgggcattatccccctcgtc

SEQ ID NO: 39909 - DNA, 20 bp, Artificial Sequence
  MKO10039909_A_Pcdhgc5
  gRNA
gagatgcgcatctctcgatc

SEQ ID NO: 39910 - DNA, 20 bp, Artificial Sequence
  MKO10039910_A_Pced1a
  gRNA
caacgggacacagtaccgcg

SEQ ID NO: 39911 - DNA, 20 bp, Artificial Sequence
  MKO10039911_A_Pced1a
  gRNA
acctggcagccggtcatgtt

SEQ ID NO: 39912 - DNA, 20 bp, Artificial Sequence
  MKO10039912_A_Pced1a
  gRNA
ttcgtacaaagactcgttcc

SEQ ID NO: 39913 - DNA, 20 bp, Artificial Sequence
  MKO10039913_A_Pced1b
  gRNA
caaccgcacggactaccgcg

SEQ ID NO: 39914 - DNA, 20 bp, Artificial Sequence
  MKO10039914_A_Pced1b
  gRNA
aggcaccatggtccgcctgt

SEQ ID NO: 39915 - DNA, 20 bp, Artificial Sequence
  MKO10039915_A_Pced1b
  gRNA
tgccggattggagctcctct

SEQ ID NO: 39916 - DNA, 20 bp, Artificial Sequence
  MKO10039916_A_Pcf11
  gRNA
ataattggtgaccgagactt

SEQ ID NO: 39917 - DNA, 20 bp, Artificial Sequence
  MKO10039917_A_Pcf11
  gRNA
accgggatccccgtcttaac

SEQ ID NO: 39918 - DNA, 20 bp, Artificial Sequence
  MKO10039918_A_Pcf11
  gRNA
tatttaaattacgttccaca

SEQ ID NO: 39919 - DNA, 20 bp, Artificial Sequence
  MKO10039919_A_Pcgf1
  gRNA
atagtgtataagctagtgcc

SEQ ID NO: 39920 - DNA, 20 bp, Artificial Sequence
  MKO10039920_A_Pcgf1
  gRNA
caaggacataccttcaccac

SEQ ID NO: 39921 - DNA, 20 bp, Artificial Sequence
  MKO10039921_A_Pcgf1
  gRNA
gggagactctgtctaagcct

SEQ ID NO: 39922 - DNA, 20 bp, Artificial Sequence
  MKO10039922_A_Pcgf2
  gRNA
ctccaagtagcgtacgatgc

SEQ ID NO: 39923 - DNA, 20 bp, Artificial Sequence
  MKO10039923_A_Pcgf2
  gRNA
aacctgcatcgtacgctact

SEQ ID NO: 39924 - DNA, 20 bp, Artificial Sequence
  MKO10039924_A_Pcgf2
  gRNA
gacgccttcgtagaactcaa

SEQ ID NO: 39925 - DNA, 20 bp, Artificial Sequence
  MKO10039925_A_Pcgf3
  gRNA
ctgatggatcacgatcctgc

SEQ ID NO: 39926 - DNA, 20 bp, Artificial Sequence
  MKO10039926_A_Pcgf3
  gRNA
actcacccgatatactgtaa

SEQ ID NO: 39927 - DNA, 20 bp, Artificial Sequence
  MKO10039927_A_Pcgf3
  gRNA
atttgaattgtcgtctgctt

SEQ ID NO: 39928 - DNA, 20 bp, Artificial Sequence
  MKO10039928_A_Pcgf5
  gRNA
ctgcaggctggataacacgt

SEQ ID NO: 39929 - DNA, 20 bp, Artificial Sequence
  MKO10039929_A_Pcgf5
  gRNA
aactcacgttctcgtagtcc

SEQ ID NO: 39930 - DNA, 20 bp, Artificial Sequence
  MKO10039930_A_Pcgf5
  gRNA
cccgcaaattgctatctgtc

SEQ ID NO: 39931 - DNA, 20 bp, Artificial Sequence
  MKO10039931_A_Pcgf6
  gRNA
aacctttgcaaatcgaacac

SEQ ID NO: 39932 - DNA, 20 bp, Artificial Sequence
  MKO10039932_A_Pcgf6
  gRNA
tgtagggggtcagctcgaca

SEQ ID NO: 39933 - DNA, 20 bp, Artificial Sequence
  MKO10039933_A_Pcgf6
  gRNA
tggacaactatgttgcattt

SEQ ID NO: 39934 - DNA, 20 bp, Artificial Sequence
  MKO10039934_A_Pcid2
  gRNA
gatattggactatcaccgtc

SEQ ID NO: 39935 - DNA, 20 bp, Artificial Sequence
  MKO10039935_A_Pcid2
  gRNA
cgcaacatgagggtgcttaa

SEQ ID NO: 39936 - DNA, 20 bp, Artificial Sequence
  MKO10039936_A_Pcid2
  gRNA
accctcatgttgcgaaccca

SEQ ID NO: 39937 - DNA, 20 bp, Artificial Sequence
  MKO10039937_A_Pcif1
  gRNA
tgaagctccgccagcactac

SEQ ID NO: 39938 - DNA, 20 bp, Artificial Sequence
  MKO10039938_A_Pcif1
  gRNA
cacgtcgtgctgacccagca

SEQ ID NO: 39939 - DNA, 20 bp, Artificial Sequence
  MKO10039939_A_Pcif1
  gRNA
cctcctgtagtcggaccctc

SEQ ID NO: 39940 - DNA, 20 bp, Artificial Sequence
  MKO10039940_A_Pck1
  gRNA
gttgcggatcgccagccgtc

SEQ ID NO: 39941 - DNA, 20 bp, Artificial Sequence
  MKO10039941_A_Pck1
  gRNA
ctgggcataactaaccccga

SEQ ID NO: 39942 - DNA, 20 bp, Artificial Sequence
  MKO10039942_A_Pck1
  gRNA
ccgagtcatgatccgcatgc

SEQ ID NO: 39943 - DNA, 20 bp, Artificial Sequence
  MKO10039943_A_Pck2
  gRNA
tatgcgtattatgacccgcc

SEQ ID NO: 39944 - DNA, 20 bp, Artificial Sequence
  MKO10039944_A_Pck2
  gRNA
tctgataggcttagccggca

SEQ ID NO: 39945 - DNA, 20 bp, Artificial Sequence
  MKO10039945_A_Pck2
  gRNA
ccaggcgagaggcgatgcgc

SEQ ID NO: 39946 - DNA, 20 bp, Artificial Sequence
  MKO10039946_A_Pclo
  gRNA
ccgccgagccatgggcaacg

SEQ ID NO: 39947 - DNA, 20 bp, Artificial Sequence
  MKO10039947_A_Pclo
  gRNA
aggtccgcctccatgccggc

SEQ ID NO: 39948 - DNA, 20 bp, Artificial Sequence
  MKO10039948_A_Pclo
  gRNA
aacgtctgaggtgtggcgcc

SEQ ID NO: 39949 - DNA, 20 bp, Artificial Sequence
  MKO10039949_A_Pcm1
  gRNA
ggtaactaacgctatttctc

SEQ ID NO: 39950 - DNA, 20 bp, Artificial Sequence
  MKO10039950_A_Pcm1
  gRNA
atgagtaagacgctcaacat

SEQ ID NO: 39951 - DNA, 20 bp, Artificial Sequence
  MKO10039951_A_Pcm1
  gRNA
gcgagctctgcagggccgac

SEQ ID NO: 39952 - DNA, 20 bp, Artificial Sequence
  MKO10039952_A_Pcmt1
  gRNA
caccagccgcactcgccccg

SEQ ID NO: 39953 - DNA, 20 bp, Artificial Sequence
  MKO10039953_A_Pcmt1
  gRNA
tcttaccatccgtgcaaaac

SEQ ID NO: 39954 - DNA, 20 bp, Artificial Sequence
  MKO10039954_A_Pcmt1
  gRNA
gaggggcactgattgttgcc

SEQ ID NO: 39955 - DNA, 20 bp, Artificial Sequence
  MKO10039955_A_Pcmtd1
  gRNA
catcgaagccatgaagcgcg

SEQ ID NO: 39956 - DNA, 20 bp, Artificial Sequence
  MKO10039956_A_Pcmtd1
  gRNA
aggtggttcctcgcgcttca

SEQ ID NO: 39957 - DNA, 20 bp, Artificial Sequence
  MKO10039957_A_Pcmtd1
  gRNA
attctgtgaacccgcatttg

SEQ ID NO: 39958 - DNA, 20 bp, Artificial Sequence
  MKO10039958_A_Pcmtd2
  gRNA
ggcgcaataccctctgacga

SEQ ID NO: 39959 - DNA, 20 bp, Artificial Sequence
  MKO10039959_A_Pcmtd2
  gRNA
catcaagagggctatgcgac

SEQ ID NO: 39960 - DNA, 20 bp, Artificial Sequence
  MKO10039960_A_Pcmtd2
  gRNA
tgagtacgcgaagcagaaac

SEQ ID NO: 39961 - DNA, 20 bp, Artificial Sequence
  MKO10039961_A_Pcna
  gRNA
ctgtgtaataaagatgccgt

SEQ ID NO: 39962 - DNA, 20 bp, Artificial Sequence
  MKO10039962_A_Pcna
  gRNA
atacgtgcaaattcacccga

SEQ ID NO: 39963 - DNA, 20 bp, Artificial Sequence
  MKO10039963_A_Pcna
  gRNA
agagcaaacgttaggtgaac

SEQ ID NO: 39964 - DNA, 20 bp, Artificial Sequence
  MKO10039964_A_Pcnp
  gRNA
cacacttgctccgagtctaa

SEQ ID NO: 39965 - DNA, 20 bp, Artificial Sequence
  MKO10039965_A_Pcnp
  gRNA
cagggacacaccaacatcag

SEQ ID NO: 39966 - DNA, 20 bp, Artificial Sequence
  MKO10039966_A_Pcnp
  gRNA
gaccaaactcctttaataaa

SEQ ID NO: 39967 - DNA, 20 bp, Artificial Sequence
  MKO10039967_A_Pcnt
  gRNA
aaccacacacctcgatcgtc

SEQ ID NO: 39968 - DNA, 20 bp, Artificial Sequence
  MKO10039968_A_Pcnt
  gRNA
agagcagcacgcccgcgaga

SEQ ID NO: 39969 - DNA, 20 bp, Artificial Sequence
  MKO10039969_A_Pcnt
  gRNA
gaaaaacgcccagacgatcg

SEQ ID NO: 39970 - DNA, 20 bp, Artificial Sequence
  MKO10039970_A_Pcnxl2
  gRNA
atgtcgcctgatcgttgttc

SEQ ID NO: 39971 - DNA, 20 bp, Artificial Sequence
  MKO10039971_A_Pcnxl2
  gRNA
agtggtcgactcagacggcg

SEQ ID NO: 39972 - DNA, 20 bp, Artificial Sequence
  MKO10039972_A_Pcnxl2
  gRNA
cctgcacctcatgttcgaca

SEQ ID NO: 39973 - DNA, 20 bp, Artificial Sequence
  MKO10039973_A_Pcnxl3
  gRNA
gtttctccacaatctcgccc

SEQ ID NO: 39974 - DNA, 20 bp, Artificial Sequence
  MKO10039974_A_Pcnxl3
  gRNA
actgcagcgtacagggggcg

SEQ ID NO: 39975 - DNA, 20 bp, Artificial Sequence
  MKO10039975_A_Pcnxl3
  gRNA
gcgatagttcacagtcttga

SEQ ID NO: 39976 - DNA, 20 bp, Artificial Sequence
  MKO10039976_A_Pcnxl4
  gRNA
tcttccggtacggtgtgacc

SEQ ID NO: 39977 - DNA, 20 bp, Artificial Sequence
  MKO10039977_A_Pcnxl4
  gRNA
ccgaaaccctttctatccga

SEQ ID NO: 39978 - DNA, 20 bp, Artificial Sequence
  MKO10039978_A_Pcnxl4
  gRNA
gacaacttaccgtaggtgag

SEQ ID NO: 39979 - DNA, 20 bp, Artificial Sequence
  MKO10039979_A_Pcnx
  gRNA
ggatctggatcctctcgact

SEQ ID NO: 39980 - DNA, 20 bp, Artificial Sequence
  MKO10039980_A_Pcnx
  gRNA
cagcgagccaaagccgaaca

SEQ ID NO: 39981 - DNA, 20 bp, Artificial Sequence
  MKO10039981_A_Pcnx
  gRNA
cactgctactataatcatcg

SEQ ID NO: 39982 - DNA, 20 bp, Artificial Sequence
  MKO10039982_A_Pcolce2
  gRNA
ccacgaagtcatagcgacac

SEQ ID NO: 39983 - DNA, 20 bp, Artificial Sequence
  MKO10039983_A_Pcolce2
  gRNA
cagcgtatcgggcgcttctg

SEQ ID NO: 39984 - DNA, 20 bp, Artificial Sequence
  MKO10039984_A_Pcolce2
  gRNA
gccagaccgagattaccccg

SEQ ID NO: 39985 - DNA, 20 bp, Artificial Sequence
  MKO10039985_A_Pcolce
  gRNA
atactcaccagtgcccgaag

SEQ ID NO: 39986 - DNA, 20 bp, Artificial Sequence
  MKO10039986_A_Pcolce
  gRNA
cctgagtcggattacccacc

SEQ ID NO: 39987 - DNA, 20 bp, Artificial Sequence
  MKO10039987_A_Pcolce
  gRNA
cgcagaagcgtccaagtcgc

SEQ ID NO: 39988 - DNA, 20 bp, Artificial Sequence
  MKO10039988_A_Pcp2
  gRNA
tcacctaccttggggccgat

SEQ ID NO: 39989 - DNA, 20 bp, Artificial Sequence
  MKO10039989_A_Pcp2
  gRNA
gggaattaactgttacacgc

SEQ ID NO: 39990 - DNA, 20 bp, Artificial Sequence
  MKO10039990_A_Pcp2
  gRNA
ggagcagcgctgttccttgc

SEQ ID NO: 39991 - DNA, 20 bp, Artificial Sequence
  MKO10039991_A_Pcp4l1
  gRNA
aacacctccagcagccaacc

SEQ ID NO: 39992 - DNA, 20 bp, Artificial Sequence
  MKO10039992_A_Pcp4l1
  gRNA
ttgcaatccagggcaagttc

SEQ ID NO: 39993 - DNA, 20 bp, Artificial Sequence
  MKO10039993_A_Pcp4l1
  gRNA
ggaacttgccctggattgca

SEQ ID NO: 39994 - DNA, 20 bp, Artificial Sequence
  MKO10039994_A_Pcp4
  gRNA
aacggaaaagacaagacgtc

SEQ ID NO: 39995 - DNA, 20 bp, Artificial Sequence
  MKO10039995_A_Pcp4
  gRNA
acagctgcacgctctgtctc

SEQ ID NO: 39996 - DNA, 20 bp, Artificial Sequence
  MKO10039996_A_Pcp4
  gRNA
agaagaatttgatatcgaca

SEQ ID NO: 39997 - DNA, 20 bp, Artificial Sequence
  MKO10039997_A_Pcsk1n
  gRNA
ggccgggggcgtcggcattt

SEQ ID NO: 39998 - DNA, 20 bp, Artificial Sequence
  MKO10039998_A_Pcsk1n
  gRNA
acgcgcgcgttcctgtctct

SEQ ID NO: 39999 - DNA, 20 bp, Artificial Sequence
  MKO10039999_A_Pcsk1n
  gRNA
cggcgacgagactcctgacg

SEQ ID NO: 40000 - DNA, 20 bp, Artificial Sequence
  MKO10040000_A_Pcsk1
  gRNA
tgatatgaagagcgcttctt

SEQ ID NO: 40001 - DNA, 20 bp, Artificial Sequence
  MKO10040001_A_Pcsk1
  gRNA
gttattactgtactggatga

SEQ ID NO: 40002 - DNA, 20 bp, Artificial Sequence
  MKO10040002_A_Pcsk1
  gRNA
taccactgctgattccacat

SEQ ID NO: 40003 - DNA, 20 bp, Artificial Sequence
  MKO10040003_A_Pcsk2
  gRNA
tacttacgtagttgtaggcc

SEQ ID NO: 40004 - DNA, 20 bp, Artificial Sequence
  MKO10040004_A_Pcsk2
  gRNA
gacgcagcctacaccataag

SEQ ID NO: 40005 - DNA, 20 bp, Artificial Sequence
  MKO10040005_A_Pcsk2
  gRNA
aagatggcgctgcaacaaga

SEQ ID NO: 40006 - DNA, 20 bp, Artificial Sequence
  MKO10040006_A_Pcsk4
  gRNA
ccgggtgaaacgctccctgg

SEQ ID NO: 40007 - DNA, 20 bp, Artificial Sequence
  MKO10040007_A_Pcsk4
  gRNA
ccacaccccggtgccgcaga

SEQ ID NO: 40008 - DNA, 20 bp, Artificial Sequence
  MKO10040008_A_Pcsk4
  gRNA
ctttcttcagtcgtagacga

SEQ ID NO: 40009 - DNA, 20 bp, Artificial Sequence
  MKO10040009_A_Pcsk5
  gRNA
gttgatgaatccgtacttgc

SEQ ID NO: 40010 - DNA, 20 bp, Artificial Sequence
  MKO10040010_A_Pcsk5
  gRNA
tagacgcgcgtccggcatac

SEQ ID NO: 40011 - DNA, 20 bp, Artificial Sequence
  MKO10040011_A_Pcsk5
  gRNA
cccgcagatcggtgcactga

SEQ ID NO: 40012 - DNA, 20 bp, Artificial Sequence
  MKO10040012_A_Pcsk6
  gRNA
tcctttctatgccgtcatcg

SEQ ID NO: 40013 - DNA, 20 bp, Artificial Sequence
  MKO10040013_A_Pcsk6
  gRNA
gacatacttgttctcgttgc

SEQ ID NO: 40014 - DNA, 20 bp, Artificial Sequence
  MKO10040014_A_Pcsk6
  gRNA
agccacgcttccacgccgcc

SEQ ID NO: 40015 - DNA, 20 bp, Artificial Sequence
  MKO10040015_A_Pcsk7
  gRNA
gcctacgggagccgaatagc

SEQ ID NO: 40016 - DNA, 20 bp, Artificial Sequence
  MKO10040016_A_Pcsk7
  gRNA
acctgctattcggctcccgt

SEQ ID NO: 40017 - DNA, 20 bp, Artificial Sequence
  MKO10040017_A_Pcsk7
  gRNA
cggagtggaacacaccgtcc

SEQ ID NO: 40018 - DNA, 20 bp, Artificial Sequence
  MKO10040018_A_Pcsk9
  gRNA
tggagcgaattatcccagca

SEQ ID NO: 40019 - DNA, 20 bp, Artificial Sequence
  MKO10040019_A_Pcsk9
  gRNA
ccgccggggctatgtcatca

SEQ ID NO: 40020 - DNA, 20 bp, Artificial Sequence
  MKO10040020_A_Pcsk9
  gRNA
caccgacttcaacagcgtgc

SEQ ID NO: 40021 - DNA, 20 bp, Artificial Sequence
  MKO10040021_A_Pctp
  gRNA
tgccgtcactctcgatcgcc

SEQ ID NO: 40022 - DNA, 20 bp, Artificial Sequence
  MKO10040022_A_Pctp
  gRNA
tgcttcagaactctacgaga

SEQ ID NO: 40023 - DNA, 20 bp, Artificial Sequence
  MKO10040023_A_Pctp
  gRNA
agtccatgtaaacatctgcg

SEQ ID NO: 40024 - DNA, 20 bp, Artificial Sequence
  MKO10040024_A_Pcx
  gRNA
tatgcacgacccgcatgccg

SEQ ID NO: 40025 - DNA, 20 bp, Artificial Sequence
  MKO10040025_A_Pcx
  gRNA
cgggccattgccatcgctgc

SEQ ID NO: 40026 - DNA, 20 bp, Artificial Sequence
  MKO10040026_A_Pcx
  gRNA
attatcttcaaggccgccta

SEQ ID NO: 40027 - DNA, 20 bp, Artificial Sequence
  MKO10040027_A_Pcyox1l
  gRNA
tgatgccgtagtaccaccag

SEQ ID NO: 40028 - DNA, 20 bp, Artificial Sequence
  MKO10040028_A_Pcyox1l
  gRNA
cggcgaacatttcgtgctgg

SEQ ID NO: 40029 - DNA, 20 bp, Artificial Sequence
  MKO10040029_A_Pcyox1l
  gRNA
ggccaccgtgatccacgcca

SEQ ID NO: 40030 - DNA, 20 bp, Artificial Sequence
  MKO10040030_A_Pcyox1
  gRNA
cgtatagcaatagtcggtgc

SEQ ID NO: 40031 - DNA, 20 bp, Artificial Sequence
  MKO10040031_A_Pcyox1
  gRNA
catctcgttgagaaacgtct

SEQ ID NO: 40032 - DNA, 20 bp, Artificial Sequence
  MKO10040032_A_Pcyox1
  gRNA
caaggtcatgactacgaggc

SEQ ID NO: 40033 - DNA, 20 bp, Artificial Sequence
  MKO10040033_A_Pcyt1a
  gRNA
aggtggtgcggaacgccccc

SEQ ID NO: 40034 - DNA, 20 bp, Artificial Sequence
  MKO10040034_A_Pcyt1a
  gRNA
cgtgcagcactgccgctacg

SEQ ID NO: 40035 - DNA, 20 bp, Artificial Sequence
  MKO10040035_A_Pcyt1a
  gRNA
actttagtaagccctatgtc

SEQ ID NO: 40036 - DNA, 20 bp, Artificial Sequence
  MKO10040036_A_Pcyt1b
  gRNA
aagtcatcagagacgcgcca

SEQ ID NO: 40037 - DNA, 20 bp, Artificial Sequence
  MKO10040037_A_Pcyt1b
  gRNA
tctcagacactgtcgatacg

SEQ ID NO: 40038 - DNA, 20 bp, Artificial Sequence
  MKO10040038_A_Pcyt1b
  gRNA
tgaaaaactgaccgttgccc

SEQ ID NO: 40039 - DNA, 20 bp, Artificial Sequence
  MKO10040039_A_Pcyt2
  gRNA
tggcccgtgcctgccgtagc

SEQ ID NO: 40040 - DNA, 20 bp, Artificial Sequence
  MKO10040040_A_Pcyt2
  gRNA
ccgtatgcacacccacgatg

SEQ ID NO: 40041 - DNA, 20 bp, Artificial Sequence
  MKO10040041_A_Pcyt2
  gRNA
ccagcagcatgcgacccacg

SEQ ID NO: 40042 - DNA, 20 bp, Artificial Sequence
  MKO10040042_A_Pdap1
  gRNA
tcgcccggctggcaatcatc

SEQ ID NO: 40043 - DNA, 20 bp, Artificial Sequence
  MKO10040043_A_Pdap1
  gRNA
cattgagaaccccaaccgcg

SEQ ID NO: 40044 - DNA, 20 bp, Artificial Sequence
  MKO10040044_A_Pdap1
  gRNA
aactaagaaggtcacgcaac

SEQ ID NO: 40045 - DNA, 20 bp, Artificial Sequence
  MKO10040045_A_Pdcd10
  gRNA
agcaacttaccctgcggttc

SEQ ID NO: 40046 - DNA, 20 bp, Artificial Sequence
  MKO10040046_A_Pdcd10
  gRNA
gtacctcaccttaatgaaag

SEQ ID NO: 40047 - DNA, 20 bp, Artificial Sequence
  MKO10040047_A_Pdcd10
  gRNA
tatcagagtacatgattgag

SEQ ID NO: 40048 - DNA, 20 bp, Artificial Sequence
  MKO10040048_A_Pdcd11
  gRNA
cagcactttgttgacacgtt

SEQ ID NO: 40049 - DNA, 20 bp, Artificial Sequence
  MKO10040049_A_Pdcd11
  gRNA
caccaacgccaatgtccact

SEQ ID NO: 40050 - DNA, 20 bp, Artificial Sequence
  MKO10040050_A_Pdcd11
  gRNA
cggtcacttgcacaaaccct

SEQ ID NO: 40051 - DNA, 20 bp, Artificial Sequence
  MKO10040051_A_Pdcd1lg2
  gRNA
cacactgctgccgacgtcta

SEQ ID NO: 40052 - DNA, 20 bp, Artificial Sequence
  MKO10040052_A_Pdcd1lg2
  gRNA
gaagtgtacaccgtagacgt

SEQ ID NO: 40053 - DNA, 20 bp, Artificial Sequence
  MKO10040053_A_Pdcd1lg2
  gRNA
tgacctggtagaggccttcg

SEQ ID NO: 40054 - DNA, 20 bp, Artificial Sequence
  MKO10040054_A_Pdcd1
  gRNA
agcccctcgcccaaaccaga

SEQ ID NO: 40055 - DNA, 20 bp, Artificial Sequence
  MKO10040055_A_Pdcd1
  gRNA
cggaggatcttatgctgaac

SEQ ID NO: 40056 - DNA, 20 bp, Artificial Sequence
  MKO10040056_A_Pdcd1
  gRNA
gtgcctcggccatgggacgt

SEQ ID NO: 40057 - DNA, 20 bp, Artificial Sequence
  MKO10040057_A_Pdcd2l
  gRNA
gccgctcacgctcgtcgtgc

SEQ ID NO: 40058 - DNA, 20 bp, Artificial Sequence
  MKO10040058_A_Pdcd2l
  gRNA
acctgcacgacgagcgtgag

SEQ ID NO: 40059 - DNA, 20 bp, Artificial Sequence
  MKO10040059_A_Pdcd2l
  gRNA
tccaccacccgcctcagatt

SEQ ID NO: 40060 - DNA, 20 bp, Artificial Sequence
  MKO10040060_A_Pdcd2
  gRNA
gcccatctctgtcgggtttg

SEQ ID NO: 40061 - DNA, 20 bp, Artificial Sequence
  MKO10040061_A_Pdcd2
  gRNA
gagtagaatgcgttgttcct

SEQ ID NO: 40062 - DNA, 20 bp, Artificial Sequence
  MKO10040062_A_Pdcd2
  gRNA
catggcaaagcacgaatcca

SEQ ID NO: 40063 - DNA, 20 bp, Artificial Sequence
  MKO10040063_A_Pdcd4
  gRNA
tccaaactatgatgacgacc

SEQ ID NO: 40064 - DNA, 20 bp, Artificial Sequence
  MKO10040064_A_Pdcd4
  gRNA
acctggtcgtcatcatagtt

SEQ ID NO: 40065 - DNA, 20 bp, Artificial Sequence
  MKO10040065_A_Pdcd4
  gRNA
agagagtcgcttaaattgtc

SEQ ID NO: 40066 - DNA, 20 bp, Artificial Sequence
  MKO10040066_A_Pdcd5
  gRNA
aagatgcttacatctggccc

SEQ ID NO: 40067 - DNA, 20 bp, Artificial Sequence
  MKO10040067_A_Pdcd5
  gRNA
tggttataggtgtcagaaca

SEQ ID NO: 40068 - DNA, 20 bp, Artificial Sequence
  MKO10040068_A_Pdcd5
  gRNA
acctttgctttgcttcctgt

SEQ ID NO: 40069 - DNA, 20 bp, Artificial Sequence
  MKO10040069_A_Pdcd6ip
  gRNA
tcaccatggcgtcgttcatc

SEQ ID NO: 40070 - DNA, 20 bp, Artificial Sequence
  MKO10040070_A_Pdcd6ip
  gRNA
ctcggcgctcggtcgcccgc

SEQ ID NO: 40071 - DNA, 20 bp, Artificial Sequence
  MKO10040071_A_Pdcd6ip
  gRNA
aaccgctgctaagcagtacc

SEQ ID NO: 40072 - DNA, 20 bp, Artificial Sequence
  MKO10040072_A_Pdcd6
  gRNA
atgtcttccggacctacgac

SEQ ID NO: 40073 - DNA, 20 bp, Artificial Sequence
  MKO10040073_A_Pdcd6
  gRNA
tcctcatccgaaaatttgac

SEQ ID NO: 40074 - DNA, 20 bp, Artificial Sequence
  MKO10040074_A_Pdcd6
  gRNA
tgaagtcatcaaatgcgatc

SEQ ID NO: 40075 - DNA, 20 bp, Artificial Sequence
  MKO10040075_A_Pdcd7
  gRNA
cgttgcccagatgtcgttgc

SEQ ID NO: 40076 - DNA, 20 bp, Artificial Sequence
  MKO10040076_A_Pdcd7
  gRNA
aatactgccggaatggctgc

SEQ ID NO: 40077 - DNA, 20 bp, Artificial Sequence
  MKO10040077_A_Pdcd7
  gRNA
gccctccgagttatgctaga

SEQ ID NO: 40078 - DNA, 20 bp, Artificial Sequence
  MKO10040078_A_Pdcl2
  gRNA
acttagagaaaagcggttac

SEQ ID NO: 40079 - DNA, 20 bp, Artificial Sequence
  MKO10040079_A_Pdcl2
  gRNA
ttcaatgcagctattcacga

SEQ ID NO: 40080 - DNA, 20 bp, Artificial Sequence
  MKO10040080_A_Pdcl2
  gRNA
tggttaaccaccaagcacat

SEQ ID NO: 40081 - DNA, 20 bp, Artificial Sequence
  MKO10040081_A_Pdcl3
  gRNA
aacgagctatcgagatgtac

SEQ ID NO: 40082 - DNA, 20 bp, Artificial Sequence
  MKO10040082_A_Pdcl3
  gRNA
agccctcaccgtctatggtc

SEQ ID NO: 40083 - DNA, 20 bp, Artificial Sequence
  MKO10040083_A_Pdcl3
  gRNA
aatgacatcctacgtaaaaa

SEQ ID NO: 40084 - DNA, 20 bp, Artificial Sequence
  MKO10040084_A_Pdcl
  gRNA
gtactactacagcaccagcg

SEQ ID NO: 40085 - DNA, 20 bp, Artificial Sequence
  MKO10040085_A_Pdcl
  gRNA
attccgggtaaaacgactac

SEQ ID NO: 40086 - DNA, 20 bp, Artificial Sequence
  MKO10040086_A_Pdcl
  gRNA
accccgccgtcaaattctgt

SEQ ID NO: 40087 - DNA, 20 bp, Artificial Sequence
  MKO10040087_A_Pdc
  gRNA
ggaaaagcggtcccccgctc

SEQ ID NO: 40088 - DNA, 20 bp, Artificial Sequence
  MKO10040088_A_Pdc
  gRNA
agacgtactccctacgttgc

SEQ ID NO: 40089 - DNA, 20 bp, Artificial Sequence
  MKO10040089_A_Pdc
  gRNA
acattagttacctgtgtgcg

SEQ ID NO: 40090 - DNA, 20 bp, Artificial Sequence
  MKO10040090_A_Pddc1
  gRNA
agtgctgcagtattcgagcc

SEQ ID NO: 40091 - DNA, 20 bp, Artificial Sequence
  MKO10040091_A_Pddc1
  gRNA
ttagaacccatctgcgccat

SEQ ID NO: 40092 - DNA, 20 bp, Artificial Sequence
  MKO10040092_A_Pddc1
  gRNA
ggcggaagtcttgtacccat

SEQ ID NO: 40093 - DNA, 20 bp, Artificial Sequence
  MKO10040093_A_Pde10a
  gRNA
ggttgtccccgcccgtgtcc

SEQ ID NO: 40094 - DNA, 20 bp, Artificial Sequence
  MKO10040094_A_Pde10a
  gRNA
ctccctgcatattcgtatcc

SEQ ID NO: 40095 - DNA, 20 bp, Artificial Sequence
  MKO10040095_A_Pde10a
  gRNA
tgcaggtttgacggatgaaa

SEQ ID NO: 40096 - DNA, 20 bp, Artificial Sequence
  MKO10040096_A_Pde11a
  gRNA
cagggaccttatttatcgcc

SEQ ID NO: 40097 - DNA, 20 bp, Artificial Sequence
  MKO10040097_A_Pde11a
  gRNA
tgtggcccaggcgataaata

SEQ ID NO: 40098 - DNA, 20 bp, Artificial Sequence
  MKO10040098_A_Pde11a
  gRNA
tcagcatcagcgctgcactt

SEQ ID NO: 40099 - DNA, 20 bp, Artificial Sequence
  MKO10040099_A_Pde12
  gRNA
tcgcaggtcgcaaccggctc

SEQ ID NO: 40100 - DNA, 20 bp, Artificial Sequence
  MKO10040100_A_Pde12
  gRNA
ccacgaagcgcgctgcggcc

SEQ ID NO: 40101 - DNA, 20 bp, Artificial Sequence
  MKO10040101_A_Pde12
  gRNA
gccaccgacataatttgtgt

SEQ ID NO: 40102 - DNA, 20 bp, Artificial Sequence
  MKO10040102_A_Pde1a
  gRNA
gcggttgataagatcatatc

SEQ ID NO: 40103 - DNA, 20 bp, Artificial Sequence
  MKO10040103_A_Pde1a
  gRNA
tggacaatgctgcgaaactt

SEQ ID NO: 40104 - DNA, 20 bp, Artificial Sequence
  MKO10040104_A_Pde1a
  gRNA
aagttgaagccaaccaatcc

SEQ ID NO: 40105 - DNA, 20 bp, Artificial Sequence
  MKO10040105_A_Pde1b
  gRNA
gagcgtggtcatcggctgcc

SEQ ID NO: 40106 - DNA, 20 bp, Artificial Sequence
  MKO10040106_A_Pde1b
  gRNA
tagcctcatcagccgcttta

SEQ ID NO: 40107 - DNA, 20 bp, Artificial Sequence
  MKO10040107_A_Pde1b
  gRNA
ccggagaacgtatacctctg

SEQ ID NO: 40108 - DNA, 20 bp, Artificial Sequence
  MKO10040108_A_Pde1c
  gRNA
ctcccgtaggttacggtctt

SEQ ID NO: 40109 - DNA, 20 bp, Artificial Sequence
  MKO10040109_A_Pde1c
  gRNA
ttcaatgcatcgattacagc

SEQ ID NO: 40110 - DNA, 20 bp, Artificial Sequence
  MKO10040110_A_Pde1c
  gRNA
tgaccttaaaacggctgatc

SEQ ID NO: 40111 - DNA, 20 bp, Artificial Sequence
  MKO10040111_A_Pde2a
  gRNA
caatgtcgataacggcgcct

SEQ ID NO: 40112 - DNA, 20 bp, Artificial Sequence
  MKO10040112_A_Pde2a
  gRNA
ggctcagccggtcgcgctgc

SEQ ID NO: 40113 - DNA, 20 bp, Artificial Sequence
  MKO10040113_A_Pde2a
  gRNA
cgacattgctggcctgcgac

SEQ ID NO: 40114 - DNA, 20 bp, Artificial Sequence
  MKO10040114_A_Pde3a
  gRNA
cgcacgaagccccttcaccc

SEQ ID NO: 40115 - DNA, 20 bp, Artificial Sequence
  MKO10040115_A_Pde3a
  gRNA
tgagaagagtctcgtcaact

SEQ ID NO: 40116 - DNA, 20 bp, Artificial Sequence
  MKO10040116_A_Pde3a
  gRNA
ttggtgagagtcgtcaaccc

SEQ ID NO: 40117 - DNA, 20 bp, Artificial Sequence
  MKO10040117_A_Pde3b
  gRNA
gctaaatgaagctcgcaata

SEQ ID NO: 40118 - DNA, 20 bp, Artificial Sequence
  MKO10040118_A_Pde3b
  gRNA
gggatcgcagcagtggtaag

SEQ ID NO: 40119 - DNA, 20 bp, Artificial Sequence
  MKO10040119_A_Pde3b
  gRNA
gtgtcactgacgcaccatgc

SEQ ID NO: 40120 - DNA, 20 bp, Artificial Sequence
  MKO10040120_A_Pde4a
  gRNA
ggaccactaccacgctgacg

SEQ ID NO: 40121 - DNA, 20 bp, Artificial Sequence
  MKO10040121_A_Pde4a
  gRNA
cacacctgtcggaaatgagc

SEQ ID NO: 40122 - DNA, 20 bp, Artificial Sequence
  MKO10040122_A_Pde4a
  gRNA
gtagcacatcggctgcgtgc

SEQ ID NO: 40123 - DNA, 20 bp, Artificial Sequence
  MKO10040123_A_Pde4b
  gRNA
acttgttcggcgctccatga

SEQ ID NO: 40124 - DNA, 20 bp, Artificial Sequence
  MKO10040124_A_Pde4b
  gRNA
tccctacgtacctgggcaaa

SEQ ID NO: 40125 - DNA, 20 bp, Artificial Sequence
  MKO10040125_A_Pde4b
  gRNA
taccagtcccgacgaagagc

SEQ ID NO: 40126 - DNA, 20 bp, Artificial Sequence
  MKO10040126_A_Pde4c
  gRNA
ggtcgctgtccgaacggtac

SEQ ID NO: 40127 - DNA, 20 bp, Artificial Sequence
  MKO10040127_A_Pde4c
  gRNA
ggaacacccacctgggcgaa

SEQ ID NO: 40128 - DNA, 20 bp, Artificial Sequence
  MKO10040128_A_Pde4c
  gRNA
actcgcgccgctggacatga

SEQ ID NO: 40129 - DNA, 20 bp, Artificial Sequence
  MKO10040129_A_Pde4dip
  gRNA
atcgcttgccatccgccagc

SEQ ID NO: 40130 - DNA, 20 bp, Artificial Sequence
  MKO10040130_A_Pde4dip
  gRNA
tgttgcgtgggtaacccttt

SEQ ID NO: 40131 - DNA, 20 bp, Artificial Sequence
  MKO10040131_A_Pde4dip
  gRNA
tgcagaatagagcgctctga

SEQ ID NO: 40132 - DNA, 20 bp, Artificial Sequence
  MKO10040132_A_Pde4d
  gRNA
agaaagtcgccgtacgagat

SEQ ID NO: 40133 - DNA, 20 bp, Artificial Sequence
  MKO10040133_A_Pde4d
  gRNA
aggactcccggcgttgactg

SEQ ID NO: 40134 - DNA, 20 bp, Artificial Sequence
  MKO10040134_A_Pde4d
  gRNA
gaatggagccctatctcgta

SEQ ID NO: 40135 - DNA, 20 bp, Artificial Sequence
  MKO10040135_A_Pde5a
  gRNA
tcaacttctgcattgaaccg

SEQ ID NO: 40136 - DNA, 20 bp, Artificial Sequence
  MKO10040136_A_Pde5a
  gRNA
gctctatgaaacgtcattgc

SEQ ID NO: 40137 - DNA, 20 bp, Artificial Sequence
  MKO10040137_A_Pde5a
  gRNA
ataactgtatccgtttagag

SEQ ID NO: 40138 - DNA, 20 bp, Artificial Sequence
  MKO10040138_A_Pde6a
  gRNA
cacaactgtgagactcgtcg

SEQ ID NO: 40139 - DNA, 20 bp, Artificial Sequence
  MKO10040139_A_Pde6a
  gRNA
ggtggaataccttcatgatc

SEQ ID NO: 40140 - DNA, 20 bp, Artificial Sequence
  MKO10040140_A_Pde6a
  gRNA
ggtcatgtctaagagtccta

SEQ ID NO: 40141 - DNA, 20 bp, Artificial Sequence
  MKO10040141_A_Pde6b
  gRNA
gggcctatctaaactgcgaa

SEQ ID NO: 40142 - DNA, 20 bp, Artificial Sequence
  MKO10040142_A_Pde6b
  gRNA
ataccgttcgcagtttagat

SEQ ID NO: 40143 - DNA, 20 bp, Artificial Sequence
  MKO10040143_A_Pde6b
  gRNA
gcctgacttacccggccatc

SEQ ID NO: 40144 - DNA, 20 bp, Artificial Sequence
  MKO10040144_A_Pde6c
  gRNA
aactgcgatcgctactccat

SEQ ID NO: 40145 - DNA, 20 bp, Artificial Sequence
  MKO10040145_A_Pde6c
  gRNA
tctgctagcagtcccgatcg

SEQ ID NO: 40146 - DNA, 20 bp, Artificial Sequence
  MKO10040146_A_Pde6c
  gRNA
agccatctgctccgcgcttc

SEQ ID NO: 40147 - DNA, 20 bp, Artificial Sequence
  MKO10040147_A_Pde6d
  gRNA
tcagagtggttcttcgagtt

SEQ ID NO: 40148 - DNA, 20 bp, Artificial Sequence
  MKO10040148_A_Pde6d
  gRNA
cctcactcacgttaggacgc

SEQ ID NO: 40149 - DNA, 20 bp, Artificial Sequence
  MKO10040149_A_Pde6d
  gRNA
ttgtcagcacatccaaagtg

SEQ ID NO: 40150 - DNA, 20 bp, Artificial Sequence
  MKO10040150_A_Pde6g
  gRNA
tcacctagagctgcacgagc

SEQ ID NO: 40151 - DNA, 20 bp, Artificial Sequence
  MKO10040151_A_Pde6g
  gRNA
gaccacctaagtttaagcag

SEQ ID NO: 40152 - DNA, 20 bp, Artificial Sequence
  MKO10040152_A_Pde6g
  gRNA
gtgagattcggtcagccacc

SEQ ID NO: 40153 - DNA, 20 bp, Artificial Sequence
  MKO10040153_A_Pde6h
  gRNA
gccctactaccccacgcaaa

SEQ ID NO: 40154 - DNA, 20 bp, Artificial Sequence
  MKO10040154_A_Pde6h
  gRNA
ggccctttgcgtggggtagt

SEQ ID NO: 40155 - DNA, 20 bp, Artificial Sequence
  MKO10040155_A_Pde6h
  gRNA
atatcacggtcatctgtccc

SEQ ID NO: 40156 - DNA, 20 bp, Artificial Sequence
  MKO10040156_A_Pde7a
  gRNA
gtgaggatctgagatatcgc

SEQ ID NO: 40157 - DNA, 20 bp, Artificial Sequence
  MKO10040157_A_Pde7a
  gRNA
gcgttatatattcgtatgct

SEQ ID NO: 40158 - DNA, 20 bp, Artificial Sequence
  MKO10040158_A_Pde7a
  gRNA
gtccaggagatgtccgcgtg

SEQ ID NO: 40159 - DNA, 20 bp, Artificial Sequence
  MKO10040159_A_Pde7b
  gRNA
tctccgggggattataccgc

SEQ ID NO: 40160 - DNA, 20 bp, Artificial Sequence
  MKO10040160_A_Pde7b
  gRNA
ggggttcctgccgaacgccg

SEQ ID NO: 40161 - DNA, 20 bp, Artificial Sequence
  MKO10040161_A_Pde7b
  gRNA
ttctaggagatgtacgacta

SEQ ID NO: 40162 - DNA, 20 bp, Artificial Sequence
  MKO10040162_A_Pde8a
  gRNA
ccacagatatccccgacaga

SEQ ID NO: 40163 - DNA, 20 bp, Artificial Sequence
  MKO10040163_A_Pde8a
  gRNA
atttcatcaagaccaacttc

SEQ ID NO: 40164 - DNA, 20 bp, Artificial Sequence
  MKO10040164_A_Pde8a
  gRNA
tggtcttgatgaaatctcat

SEQ ID NO: 40165 - DNA, 20 bp, Artificial Sequence
  MKO10040165_A_Pde8b
  gRNA
ggttctgctaatcttcgcaa

SEQ ID NO: 40166 - DNA, 20 bp, Artificial Sequence
  MKO10040166_A_Pde8b
  gRNA
acgcttgtgaaacgacagcc

SEQ ID NO: 40167 - DNA, 20 bp, Artificial Sequence
  MKO10040167_A_Pde8b
  gRNA
aaattattgtgatcgatcac

SEQ ID NO: 40168 - DNA, 20 bp, Artificial Sequence
  MKO10040168_A_Pde9a
  gRNA
gtatcgccaccggcctgcct

SEQ ID NO: 40169 - DNA, 20 bp, Artificial Sequence
  MKO10040169_A_Pde9a
  gRNA
tttaaccacagacgacgcca

SEQ ID NO: 40170 - DNA, 20 bp, Artificial Sequence
  MKO10040170_A_Pde9a
  gRNA
tggaaaattgttccgccacc

SEQ ID NO: 40171 - DNA, 20 bp, Artificial Sequence
  MKO10040171_A_Pdf
  gRNA
gccatacgcgcacgtgtgcc

SEQ ID NO: 40172 - DNA, 20 bp, Artificial Sequence
  MKO10040172_A_Pdf
  gRNA
ggacccggtgctgcgcgtcg

SEQ ID NO: 40173 - DNA, 20 bp, Artificial Sequence
  MKO10040173_A_Pdf
  gRNA
ccagtggtgtggtcggcaag

SEQ ID NO: 40174 - DNA, 20 bp, Artificial Sequence
  MKO10040174_A_Pdgfa
  gRNA
tatctcgtaaatgaccgtcc

SEQ ID NO: 40175 - DNA, 20 bp, Artificial Sequence
  MKO10040175_A_Pdgfa
  gRNA
ccagccgctcgatcaactcc

SEQ ID NO: 40176 - DNA, 20 bp, Artificial Sequence
  MKO10040176_A_Pdgfa
  gRNA
cggtcatttacgagatacct

SEQ ID NO: 40177 - DNA, 20 bp, Artificial Sequence
  MKO10040177_A_Pdgfb
  gRNA
cgagtgcaagacgcgcacag

SEQ ID NO: 40178 - DNA, 20 bp, Artificial Sequence
  MKO10040178_A_Pdgfb
  gRNA
ctctgtgcgcgtcttgcact

SEQ ID NO: 40179 - DNA, 20 bp, Artificial Sequence
  MKO10040179_A_Pdgfb
  gRNA
tgagctttccaactcgactc

SEQ ID NO: 40180 - DNA, 20 bp, Artificial Sequence
  MKO10040180_A_Pdgfc
  gRNA
aagtccacctgccatcgatc

SEQ ID NO: 40181 - DNA, 20 bp, Artificial Sequence
  MKO10040181_A_Pdgfc
  gRNA
cacttgcatatatcgtcttc

SEQ ID NO: 40182 - DNA, 20 bp, Artificial Sequence
  MKO10040182_A_Pdgfc
  gRNA
ggtacctagagccagatcga

SEQ ID NO: 40183 - DNA, 20 bp, Artificial Sequence
  MKO10040183_A_Pdgfd
  gRNA
tgtcgcagaattcgataccg

SEQ ID NO: 40184 - DNA, 20 bp, Artificial Sequence
  MKO10040184_A_Pdgfd
  gRNA
gacatggtggctccgttccc

SEQ ID NO: 40185 - DNA, 20 bp, Artificial Sequence
  MKO10040185_A_Pdgfd
  gRNA
gggtagctgttcgggaagcg

SEQ ID NO: 40186 - DNA, 20 bp, Artificial Sequence
  MKO10040186_A_Pdgfra
  gRNA
cgcacgccagactgtgtata

SEQ ID NO: 40187 - DNA, 20 bp, Artificial Sequence
  MKO10040187_A_Pdgfra
  gRNA
gaccgattccttagtcatcg

SEQ ID NO: 40188 - DNA, 20 bp, Artificial Sequence
  MKO10040188_A_Pdgfra
  gRNA
gtatgaatgtgctgcccgtc

SEQ ID NO: 40189 - DNA, 20 bp, Artificial Sequence
  MKO10040189_A_Pdgfrb
  gRNA
atggacgtacccccgcatga

SEQ ID NO: 40190 - DNA, 20 bp, Artificial Sequence
  MKO10040190_A_Pdgfrb
  gRNA
aagtaccagtgaaacctcgc

SEQ ID NO: 40191 - DNA, 20 bp, Artificial Sequence
  MKO10040191_A_Pdgfrb
  gRNA
gctgtagacgtagtaagtat

SEQ ID NO: 40192 - DNA, 20 bp, Artificial Sequence
  MKO10040192_A_Pdgfrl
  gRNA
cgtgaggcgggagtccttga

SEQ ID NO: 40193 - DNA, 20 bp, Artificial Sequence
  MKO10040193_A_Pdgfrl
  gRNA
atggagttaccccgcctact

SEQ ID NO: 40194 - DNA, 20 bp, Artificial Sequence
  MKO10040194_A_Pdgfrl
  gRNA
cagcttgtctgtccgggttc

SEQ ID NO: 40195 - DNA, 20 bp, Artificial Sequence
  MKO10040195_A_Pdha1
  gRNA
caacggcatcgttggagctc

SEQ ID NO: 40196 - DNA, 20 bp, Artificial Sequence
  MKO10040196_A_Pdha1
  gRNA
ggatgatgcagactgtgcgc

SEQ ID NO: 40197 - DNA, 20 bp, Artificial Sequence
  MKO10040197_A_Pdha1
  gRNA
tctgcaagaattgctcgcac

SEQ ID NO: 40198 - DNA, 20 bp, Artificial Sequence
  MKO10040198_A_Pdha2
  gRNA
atcacgtcatcacgtcctac

SEQ ID NO: 40199 - DNA, 20 bp, Artificial Sequence
  MKO10040199_A_Pdha2
  gRNA
catgcgccgaattacctgca

SEQ ID NO: 40200 - DNA, 20 bp, Artificial Sequence
  MKO10040200_A_Pdha2
  gRNA
ctgcagacctaccgttatca

SEQ ID NO: 40201 - DNA, 20 bp, Artificial Sequence
  MKO10040201_A_Pdhb
  gRNA
accggttacctgcaccgctg

SEQ ID NO: 40202 - DNA, 20 bp, Artificial Sequence
  MKO10040202_A_Pdhb
  gRNA
aattgctgttggtgcagcta

SEQ ID NO: 40203 - DNA, 20 bp, Artificial Sequence
  MKO10040203_A_Pdhb
  gRNA
gttcgtgaagctattaatca

SEQ ID NO: 40204 - DNA, 20 bp, Artificial Sequence
  MKO10040204_A_Pdhx
  gRNA
aatttcagcggatcctatta

SEQ ID NO: 40205 - DNA, 20 bp, Artificial Sequence
  MKO10040205_A_Pdhx
  gRNA
tctttagtgaagatcccgcg

SEQ ID NO: 40206 - DNA, 20 bp, Artificial Sequence
  MKO10040206_A_Pdhx
  gRNA
accttagatgcaaacgatga

SEQ ID NO: 40207 - DNA, 20 bp, Artificial Sequence
  MKO10040207_A_Pdia2
  gRNA
ctcgtacctgcgtactcttc

SEQ ID NO: 40208 - DNA, 20 bp, Artificial Sequence
  MKO10040208_A_Pdia2
  gRNA
actagctcccgagtacagca

SEQ ID NO: 40209 - DNA, 20 bp, Artificial Sequence
  MKO10040209_A_Pdia2
  gRNA
cgtcatacatagcatgcacc

SEQ ID NO: 40210 - DNA, 20 bp, Artificial Sequence
  MKO10040210_A_Pdia3
  gRNA
actgaccccatacttattac

SEQ ID NO: 40211 - DNA, 20 bp, Artificial Sequence
  MKO10040211_A_Pdia3
  gRNA
cttcaccagagactcaatgt

SEQ ID NO: 40212 - DNA, 20 bp, Artificial Sequence
  MKO10040212_A_Pdia3
  gRNA
gaagaagcgggtgcttatga

SEQ ID NO: 40213 - DNA, 20 bp, Artificial Sequence
  MKO10040213_A_Pdia4
  gRNA
ctgttcggtggcgtccactt

SEQ ID NO: 40214 - DNA, 20 bp, Artificial Sequence
  MKO10040214_A_Pdia4
  gRNA
gccataccatatttctctcg

SEQ ID NO: 40215 - DNA, 20 bp, Artificial Sequence
  MKO10040215_A_Pdia4
  gRNA
atcgatcttcgctacagcaa

SEQ ID NO: 40216 - DNA, 20 bp, Artificial Sequence
  MKO10040216_A_Pdia5
  gRNA
caggacccgcaataacgtgc

SEQ ID NO: 40217 - DNA, 20 bp, Artificial Sequence
  MKO10040217_A_Pdia5
  gRNA
tgaccgagctgtgacgttga

SEQ ID NO: 40218 - DNA, 20 bp, Artificial Sequence
  MKO10040218_A_Pdia5
  gRNA
aaagcaccagcacgttattg

SEQ ID NO: 40219 - DNA, 20 bp, Artificial Sequence
  MKO10040219_A_Pdia6
  gRNA
atccttgacgagctggcgca

SEQ ID NO: 40220 - DNA, 20 bp, Artificial Sequence
  MKO10040220_A_Pdia6
  gRNA
tgccttgcgccagctcgtca

SEQ ID NO: 40221 - DNA, 20 bp, Artificial Sequence
  MKO10040221_A_Pdia6
  gRNA
tccttaccctgataatcttc

SEQ ID NO: 40222 - DNA, 20 bp, Artificial Sequence
  MKO10040222_A_Pdik1l
  gRNA
agccaaagtacgatctaata

SEQ ID NO: 40223 - DNA, 20 bp, Artificial Sequence
  MKO10040223_A_Pdik1l
  gRNA
tcccgtattagatcgtactt

SEQ ID NO: 40224 - DNA, 20 bp, Artificial Sequence
  MKO10040224_A_Pdik1l
  gRNA
atgcgggacggacttctaca

SEQ ID NO: 40225 - DNA, 20 bp, Artificial Sequence
  MKO10040225_A_Pdilt
  gRNA
atcgctccaaacgttagttc

SEQ ID NO: 40226 - DNA, 20 bp, Artificial Sequence
  MKO10040226_A_Pdilt
  gRNA
gttcaacaacagcgatgaag

SEQ ID NO: 40227 - DNA, 20 bp, Artificial Sequence
  MKO10040227_A_Pdilt
  gRNA
gcccttcccgaagatctctg

SEQ ID NO: 40228 - DNA, 20 bp, Artificial Sequence
  MKO10040228_A_Pdk1
  gRNA
cataaatccaaactgcgacg

SEQ ID NO: 40229 - DNA, 20 bp, Artificial Sequence
  MKO10040229_A_Pdk1
  gRNA
acctccaccacgtcgcagtt

SEQ ID NO: 40230 - DNA, 20 bp, Artificial Sequence
  MKO10040230_A_Pdk1
  gRNA
ccgtacagctggtgcaaagt

SEQ ID NO: 40231 - DNA, 20 bp, Artificial Sequence
  MKO10040231_A_Pdk2
  gRNA
ccggaaccggcacaatgacg

SEQ ID NO: 40232 - DNA, 20 bp, Artificial Sequence
  MKO10040232_A_Pdk2
  gRNA
agtgaatgacgtcttctcgc

SEQ ID NO: 40233 - DNA, 20 bp, Artificial Sequence
  MKO10040233_A_Pdk2
  gRNA
ggtcctcggggtctttgtcc

SEQ ID NO: 40234 - DNA, 20 bp, Artificial Sequence
  MKO10040234_A_Pdk3
  gRNA
cttgttgaaccgcccttccg

SEQ ID NO: 40235 - DNA, 20 bp, Artificial Sequence
  MKO10040235_A_Pdk3
  gRNA
gggcggttcaacaagttatc

SEQ ID NO: 40236 - DNA, 20 bp, Artificial Sequence
  MKO10040236_A_Pdk3
  gRNA
cccagaagacccacgagttt

SEQ ID NO: 40237 - DNA, 20 bp, Artificial Sequence
  MKO10040237_A_Pdk4
  gRNA
tgttcactaagcggtcaggc

SEQ ID NO: 40238 - DNA, 20 bp, Artificial Sequence
  MKO10040238_A_Pdk4
  gRNA
gcttaggtttgtagacacgc

SEQ ID NO: 40239 - DNA, 20 bp, Artificial Sequence
  MKO10040239_A_Pdk4
  gRNA
ccgcttagtgaacactcctt

SEQ ID NO: 40240 - DNA, 20 bp, Artificial Sequence
  MKO10040240_A_Pdlim1
  gRNA
tctcctctagtgaccgagga

SEQ ID NO: 40241 - DNA, 20 bp, Artificial Sequence
  MKO10040241_A_Pdlim1
  gRNA
gctgttcgcctcctccccac

SEQ ID NO: 40242 - DNA, 20 bp, Artificial Sequence
  MKO10040242_A_Pdlim1
  gRNA
aaccagtacaacagcccaac

SEQ ID NO: 40243 - DNA, 20 bp, Artificial Sequence
  MKO10040243_A_Pdlim2
  gRNA
gctcaccacttgacctaccc

SEQ ID NO: 40244 - DNA, 20 bp, Artificial Sequence
  MKO10040244_A_Pdlim2
  gRNA
ccacaatgatgtcgccaggc

SEQ ID NO: 40245 - DNA, 20 bp, Artificial Sequence
  MKO10040245_A_Pdlim2
  gRNA
cgctctgtcggatcttgctt

SEQ ID NO: 40246 - DNA, 20 bp, Artificial Sequence
  MKO10040246_A_Pdlim3
  gRNA
cccgactggcgaggagcggc

SEQ ID NO: 40247 - DNA, 20 bp, Artificial Sequence
  MKO10040247_A_Pdlim3
  gRNA
tgagaccccgtagctgtccg

SEQ ID NO: 40248 - DNA, 20 bp, Artificial Sequence
  MKO10040248_A_Pdlim3
  gRNA
aatatccaagacgcgctcca

SEQ ID NO: 40249 - DNA, 20 bp, Artificial Sequence
  MKO10040249_A_Pdlim4
  gRNA
ccgagagcgtaagatgatcg

SEQ ID NO: 40250 - DNA, 20 bp, Artificial Sequence
  MKO10040250_A_Pdlim4
  gRNA
accctgcagtcccggttccg

SEQ ID NO: 40251 - DNA, 20 bp, Artificial Sequence
  MKO10040251_A_Pdlim4
  gRNA
tccctcggaaccgggactgc

SEQ ID NO: 40252 - DNA, 20 bp, Artificial Sequence
  MKO10040252_A_Pdlim5
  gRNA
gagactgagtcgttccagtc

SEQ ID NO: 40253 - DNA, 20 bp, Artificial Sequence
  MKO10040253_A_Pdlim5
  gRNA
tacaagccttaatcttgttc

SEQ ID NO: 40254 - DNA, 20 bp, Artificial Sequence
  MKO10040254_A_Pdlim5
  gRNA
ctcaatcagccgtttcttgc

SEQ ID NO: 40255 - DNA, 20 bp, Artificial Sequence
  MKO10040255_A_Pdlim7
  gRNA
cagaacaagatccgcgcctg

SEQ ID NO: 40256 - DNA, 20 bp, Artificial Sequence
  MKO10040256_A_Pdlim7
  gRNA
gactggcctgtccccggccg

SEQ ID NO: 40257 - DNA, 20 bp, Artificial Sequence
  MKO10040257_A_Pdlim7
  gRNA
tctctacagctcacgcccgg

SEQ ID NO: 40258 - DNA, 20 bp, Artificial Sequence
  MKO10040258_A_Pdp1
  gRNA
tgaatacctaccaattcgtc

SEQ ID NO: 40259 - DNA, 20 bp, Artificial Sequence
  MKO10040259_A_Pdp1
  gRNA
ccccaatgattacttcagta

SEQ ID NO: 40260 - DNA, 20 bp, Artificial Sequence
  MKO10040260_A_Pdp1
  gRNA
aaaatgctacccgaagcacc

SEQ ID NO: 40261 - DNA, 20 bp, Artificial Sequence
  MKO10040261_A_Pdp2
  gRNA
cccgtactcgttgctcccga

SEQ ID NO: 40262 - DNA, 20 bp, Artificial Sequence
  MKO10040262_A_Pdp2
  gRNA
catctgatcagacacgccat

SEQ ID NO: 40263 - DNA, 20 bp, Artificial Sequence
  MKO10040263_A_Pdp2
  gRNA
ccgggctatcctcggtgtcc

SEQ ID NO: 40264 - DNA, 20 bp, Artificial Sequence
  MKO10040264_A_Pdpk1
  gRNA
gagagatgtgatgtcacgcc

SEQ ID NO: 40265 - DNA, 20 bp, Artificial Sequence
  MKO10040265_A_Pdpk1
  gRNA
ggttgttctggcccgagaac

SEQ ID NO: 40266 - DNA, 20 bp, Artificial Sequence
  MKO10040266_A_Pdpk1
  gRNA
tcctagtggtgttagcaggc

SEQ ID NO: 40267 - DNA, 20 bp, Artificial Sequence
  MKO10040267_A_Pdpn
  gRNA
gtcccacgctctctctgcgt

SEQ ID NO: 40268 - DNA, 20 bp, Artificial Sequence
  MKO10040268_A_Pdpn
  gRNA
ggagacggcatggtgccccc

SEQ ID NO: 40269 - DNA, 20 bp, Artificial Sequence
  MKO10040269_A_Pdpn
  gRNA
accatgccgtctcctgtacc

SEQ ID NO: 40270 - DNA, 20 bp, Artificial Sequence
  MKO10040270_A_Pdpr
  gRNA
cggggccatgtacgttcctg

SEQ ID NO: 40271 - DNA, 20 bp, Artificial Sequence
  MKO10040271_A_Pdpr
  gRNA
tacgcttcagagagatcaac

SEQ ID NO: 40272 - DNA, 20 bp, Artificial Sequence
  MKO10040272_A_Pdpr
  gRNA
cgaccagatcatgcacattg

SEQ ID NO: 40273 - DNA, 20 bp, Artificial Sequence
  MKO10040273_A_Pdrg1
  gRNA
gtagggccctcaggccctct

SEQ ID NO: 40274 - DNA, 20 bp, Artificial Sequence
  MKO10040274_A_Pdrg1
  gRNA
ctttaacctcatccgggctg

SEQ ID NO: 40275 - DNA, 20 bp, Artificial Sequence
  MKO10040275_A_Pdrg1
  gRNA
aaccgcctctttgaagccca

SEQ ID NO: 40276 - DNA, 20 bp, Artificial Sequence
  MKO10040276_A_Pds5a
  gRNA
gcatttgtactttcgtattg

SEQ ID NO: 40277 - DNA, 20 bp, Artificial Sequence
  MKO10040277_A_Pds5a
  gRNA
gaattcagatgcgagatgca

SEQ ID NO: 40278 - DNA, 20 bp, Artificial Sequence
  MKO10040278_A_Pds5a
  gRNA
ccaaacaacatgctacgaga

SEQ ID NO: 40279 - DNA, 20 bp, Artificial Sequence
  MKO10040279_A_Pds5b
  gRNA
atttcacataccttatgggc

SEQ ID NO: 40280 - DNA, 20 bp, Artificial Sequence
  MKO10040280_A_Pds5b
  gRNA
cacgtctcccgataaactaa

SEQ ID NO: 40281 - DNA, 20 bp, Artificial Sequence
  MKO10040281_A_Pds5b
  gRNA
tgataaagatgttcgtttac

SEQ ID NO: 40282 - DNA, 20 bp, Artificial Sequence
  MKO10040282_A_Pdss1
  gRNA
atgtccgaatactacttcga

SEQ ID NO: 40283 - DNA, 20 bp, Artificial Sequence
  MKO10040283_A_Pdss1
  gRNA
agcctttagaccgattattg

SEQ ID NO: 40284 - DNA, 20 bp, Artificial Sequence
  MKO10040284_A_Pdss1
  gRNA
tgacgacaactgcacattgc

SEQ ID NO: 40285 - DNA, 20 bp, Artificial Sequence
  MKO10040285_A_Pdss2
  gRNA
tatgccggctgtcgtgcacg

SEQ ID NO: 40286 - DNA, 20 bp, Artificial Sequence
  MKO10040286_A_Pdss2
  gRNA
gggccctcgtgcacgacagc

SEQ ID NO: 40287 - DNA, 20 bp, Artificial Sequence
  MKO10040287_A_Pdss2
  gRNA
cctggaggagcgcccgcgcc

SEQ ID NO: 40288 - DNA, 20 bp, Artificial Sequence
  MKO10040288_A_Pdx1
  gRNA
catcgcgccactgcgaccgc

SEQ ID NO: 40289 - DNA, 20 bp, Artificial Sequence
  MKO10040289_A_Pdx1
  gRNA
ggcgacacgctaaggcccga

SEQ ID NO: 40290 - DNA, 20 bp, Artificial Sequence
  MKO10040290_A_Pdx1
  gRNA
cccgctcgcctccgacgacc

SEQ ID NO: 40291 - DNA, 20 bp, Artificial Sequence
  MKO10040291_A_Pdxdc1
  gRNA
tccttcattaccgggtgctc

SEQ ID NO: 40292 - DNA, 20 bp, Artificial Sequence
  MKO10040292_A_Pdxdc1
  gRNA
tactttcagacactacctta

SEQ ID NO: 40293 - DNA, 20 bp, Artificial Sequence
  MKO10040293_A_Pdxdc1
  gRNA
cggtgcctatatttcaactc

SEQ ID NO: 40294 - DNA, 20 bp, Artificial Sequence
  MKO10040294_A_Pdxk
  gRNA
tgagctgtacgagggtctca

SEQ ID NO: 40295 - DNA, 20 bp, Artificial Sequence
  MKO10040295_A_Pdxk
  gRNA
ccgcacaatgtccaccacca

SEQ ID NO: 40296 - DNA, 20 bp, Artificial Sequence
  MKO10040296_A_Pdxk
  gRNA
cagaactctcgccttgtgta

SEQ ID NO: 40297 - DNA, 20 bp, Artificial Sequence
  MKO10040297_A_Pdxp
  gRNA
gtgccaagggtcgcgatcgg

SEQ ID NO: 40298 - DNA, 20 bp, Artificial Sequence
  MKO10040298_A_Pdxp
  gRNA
ggagtcctgttcgactgcga

SEQ ID NO: 40299 - DNA, 20 bp, Artificial Sequence
  MKO10040299_A_Pdxp
  gRNA
gaccaccgtgctcacgctca

SEQ ID NO: 40300 - DNA, 20 bp, Artificial Sequence
  MKO10040300_A_Pdyn
  gRNA
caaaaagccgccatagcgtt

SEQ ID NO: 40301 - DNA, 20 bp, Artificial Sequence
  MKO10040301_A_Pdyn
  gRNA
gcagtccgccataacattag

SEQ ID NO: 40302 - DNA, 20 bp, Artificial Sequence
  MKO10040302_A_Pdyn
  gRNA
agcccccatagcgtttgtac

SEQ ID NO: 40303 - DNA, 20 bp, Artificial Sequence
  MKO10040303_A_Pdzd11
  gRNA
gctcgatgtgcatccgagtc

SEQ ID NO: 40304 - DNA, 20 bp, Artificial Sequence
  MKO10040304_A_Pdzd11
  gRNA
cagttgggatttaacatccg

SEQ ID NO: 40305 - DNA, 20 bp, Artificial Sequence
  MKO10040305_A_Pdzd11
  gRNA
gcttcttcagtgtaacaatt

SEQ ID NO: 40306 - DNA, 20 bp, Artificial Sequence
  MKO10040306_A_Pdzd2
  gRNA
aacggtaccgactccgaact

SEQ ID NO: 40307 - DNA, 20 bp, Artificial Sequence
  MKO10040307_A_Pdzd2
  gRNA
accgttctccaactccgagc

SEQ ID NO: 40308 - DNA, 20 bp, Artificial Sequence
  MKO10040308_A_Pdzd2
  gRNA
actggtcgggctctcccatg

SEQ ID NO: 40309 - DNA, 20 bp, Artificial Sequence
  MKO10040309_A_Pdzd3
  gRNA
tgatgtggcgcgtgttctgc

SEQ ID NO: 40310 - DNA, 20 bp, Artificial Sequence
  MKO10040310_A_Pdzd3
  gRNA
tcccgcagatcttcgggaca

SEQ ID NO: 40311 - DNA, 20 bp, Artificial Sequence
  MKO10040311_A_Pdzd3
  gRNA
tataggtagtgcgctacatc

SEQ ID NO: 40312 - DNA, 20 bp, Artificial Sequence
  MKO10040312_A_Pdzd4
  gRNA
tgagacgcagcccccgtctg

SEQ ID NO: 40313 - DNA, 20 bp, Artificial Sequence
  MKO10040313_A_Pdzd4
  gRNA
ccgccctccatgaactccgc

SEQ ID NO: 40314 - DNA, 20 bp, Artificial Sequence
  MKO10040314_A_Pdzd4
  gRNA
gaggacctaggcatctacgt

SEQ ID NO: 40315 - DNA, 20 bp, Artificial Sequence
  MKO10040315_A_Pdzd7
  gRNA
catcatccacgccgttcgcg

SEQ ID NO: 40316 - DNA, 20 bp, Artificial Sequence
  MKO10040316_A_Pdzd7
  gRNA
cggcgcatgggccgagtgcc

SEQ ID NO: 40317 - DNA, 20 bp, Artificial Sequence
  MKO10040317_A_Pdzd7
  gRNA
tcttctccacgcgaacggcg

SEQ ID NO: 40318 - DNA, 20 bp, Artificial Sequence
  MKO10040318_A_Pdzd8
  gRNA
cagatcttcaacggggagat

SEQ ID NO: 40319 - DNA, 20 bp, Artificial Sequence
  MKO10040319_A_Pdzd8
  gRNA
acctgtgccaccgcgaccac

SEQ ID NO: 40320 - DNA, 20 bp, Artificial Sequence
  MKO10040320_A_Pdzd8
  gRNA
gccttcattgtctgacgtat

SEQ ID NO: 40321 - DNA, 20 bp, Artificial Sequence
  MKO10040321_A_Pdzd9
  gRNA
cagtctggaatcaccccgta

SEQ ID NO: 40322 - DNA, 20 bp, Artificial Sequence
  MKO10040322_A_Pdzd9
  gRNA
aaggagcgcactattagtgt

SEQ ID NO: 40323 - DNA, 20 bp, Artificial Sequence
  MKO10040323_A_Pdzd9
  gRNA
caagctgcttacagacgcct

SEQ ID NO: 40324 - DNA, 20 bp, Artificial Sequence
  MKO10040324_A_Pdzk1ip1
  gRNA
tcttcgccgtcaaccacttc

SEQ ID NO: 40325 - DNA, 20 bp, Artificial Sequence
  MKO10040325_A_Pdzk1ip1
  gRNA
cggcgaagacgattgcaaca

SEQ ID NO: 40326 - DNA, 20 bp, Artificial Sequence
  MKO10040326_A_Pdzk1ip1
  gRNA
ggccttcagtctgctcgtgc

SEQ ID NO: 40327 - DNA, 20 bp, Artificial Sequence
  MKO10040327_A_Pdzk1
  gRNA
tccaccgctccgttcatccc

SEQ ID NO: 40328 - DNA, 20 bp, Artificial Sequence
  MKO10040328_A_Pdzk1
  gRNA
ccctgggatgaacggagcgg

SEQ ID NO: 40329 - DNA, 20 bp, Artificial Sequence
  MKO10040329_A_Pdzk1
  gRNA
agctcttgatcatgacggtg

SEQ ID NO: 40330 - DNA, 20 bp, Artificial Sequence
  MKO10040330_A_Pdzrn3
  gRNA
ggcgtgaacatcttggttcg

SEQ ID NO: 40331 - DNA, 20 bp, Artificial Sequence
  MKO10040331_A_Pdzrn3
  gRNA
cccgatgcaggacaagagtc

SEQ ID NO: 40332 - DNA, 20 bp, Artificial Sequence
  MKO10040332_A_Pdzrn3
  gRNA
gcctgcctcagagtcgcagc

SEQ ID NO: 40333 - DNA, 20 bp, Artificial Sequence
  MKO10040333_A_Pdzrn4
  gRNA
cccctcagccggccaacata

SEQ ID NO: 40334 - DNA, 20 bp, Artificial Sequence
  MKO10040334_A_Pdzrn4
  gRNA
tacgatccccttctcgaatc

SEQ ID NO: 40335 - DNA, 20 bp, Artificial Sequence
  MKO10040335_A_Pdzrn4
  gRNA
tgagtggccgaagcttcgcc

SEQ ID NO: 40336 - DNA, 20 bp, Artificial Sequence
  MKO10040336_A_Pea15a
  gRNA
actgggaatacgggttagct

SEQ ID NO: 40337 - DNA, 20 bp, Artificial Sequence
  MKO10040337_A_Pea15a
  gRNA
tgtagtcaaccaccatagtg

SEQ ID NO: 40338 - DNA, 20 bp, Artificial Sequence
  MKO10040338_A_Pea15a
  gRNA
tgttgttggtcaggtcctga

SEQ ID NO: 40339 - DNA, 20 bp, Artificial Sequence
  MKO10040339_A_Peak1
  gRNA
gcgctcgtcactaatttgga

SEQ ID NO: 40340 - DNA, 20 bp, Artificial Sequence
  MKO10040340_A_Peak1
  gRNA
tgattgctacaaacgatcgt

SEQ ID NO: 40341 - DNA, 20 bp, Artificial Sequence
  MKO10040341_A_Peak1
  gRNA
gaagatcgcagtgcgtgacg

SEQ ID NO: 40342 - DNA, 20 bp, Artificial Sequence
  MKO10040342_A_Pear1
  gRNA
gctgcggcagggttgtctac

SEQ ID NO: 40343 - DNA, 20 bp, Artificial Sequence
  MKO10040343_A_Pear1
  gRNA
tcggagccacacagcgacca

SEQ ID NO: 40344 - DNA, 20 bp, Artificial Sequence
  MKO10040344_A_Pear1
  gRNA
cggggtggcgactgctccag

SEQ ID NO: 40345 - DNA, 20 bp, Artificial Sequence
  MKO10040345_A_Pebp1
  gRNA
ccttcctacaggttatgaac

SEQ ID NO: 40346 - DNA, 20 bp, Artificial Sequence
  MKO10040346_A_Pebp1
  gRNA
cctttacttacctgtgccac

SEQ ID NO: 40347 - DNA, 20 bp, Artificial Sequence
  MKO10040347_A_Pebp1
  gRNA
aagggtaatgacattagcag

SEQ ID NO: 40348 - DNA, 20 bp, Artificial Sequence
  MKO10040348_A_Pebp4
  gRNA
atccgtggcaatgtactatc

SEQ ID NO: 40349 - DNA, 20 bp, Artificial Sequence
  MKO10040349_A_Pebp4
  gRNA
cttgactatcggcgcctgcc

SEQ ID NO: 40350 - DNA, 20 bp, Artificial Sequence
  MKO10040350_A_Pebp4
  gRNA
gccgatagtcaagttccaca

SEQ ID NO: 40351 - DNA, 20 bp, Artificial Sequence
  MKO10040351_A_Pecam1
  gRNA
cttcacctcgtactcaatcg

SEQ ID NO: 40352 - DNA, 20 bp, Artificial Sequence
  MKO10040352_A_Pecam1
  gRNA
aaaaaccacgattgagtacg

SEQ ID NO: 40353 - DNA, 20 bp, Artificial Sequence
  MKO10040353_A_Pecam1
  gRNA
gagtgaatacgtcaccgtgc

SEQ ID NO: 40354 - DNA, 20 bp, Artificial Sequence
  MKO10040354_A_Pecr
  gRNA
gatcttaccatacttagcta

SEQ ID NO: 40355 - DNA, 20 bp, Artificial Sequence
  MKO10040355_A_Pecr
  gRNA
tttcctcttagggtgtaacg

SEQ ID NO: 40356 - DNA, 20 bp, Artificial Sequence
  MKO10040356_A_Pecr
  gRNA
ccgccatacagtgcaacatc

SEQ ID NO: 40357 - DNA, 20 bp, Artificial Sequence
  MKO10040357_A_Pef1
  gRNA
ccatatggcggtatacctcc

SEQ ID NO: 40358 - DNA, 20 bp, Artificial Sequence
  MKO10040358_A_Pef1
  gRNA
tgggtaccgtagggaccccc

SEQ ID NO: 40359 - DNA, 20 bp, Artificial Sequence
  MKO10040359_A_Pef1
  gRNA
ggaaaaggataccgctgtac

SEQ ID NO: 40360 - DNA, 20 bp, Artificial Sequence
  MKO10040360_A_Peg10
  gRNA
gtttcccggcggcgaattct

SEQ ID NO: 40361 - DNA, 20 bp, Artificial Sequence
  MKO10040361_A_Peg10
  gRNA
agcctccaagaattcgccgc

SEQ ID NO: 40362 - DNA, 20 bp, Artificial Sequence
  MKO10040362_A_Peg10
  gRNA
cagacgtctgatcttgcgtt

SEQ ID NO: 40363 - DNA, 20 bp, Artificial Sequence
  MKO10040363_A_Peg12
  gRNA
tcggagacccgcacgagtga

SEQ ID NO: 40364 - DNA, 20 bp, Artificial Sequence
  MKO10040364_A_Peg12
  gRNA
ccaaccccgccggcaccggc

SEQ ID NO: 40365 - DNA, 20 bp, Artificial Sequence
  MKO10040365_A_Peg12
  gRNA
ggggctctgccgacgtggac

SEQ ID NO: 40366 - DNA, 20 bp, Artificial Sequence
  MKO10040366_A_Peg3
  gRNA
ctgcctaggtgagcgagacc

SEQ ID NO: 40367 - DNA, 20 bp, Artificial Sequence
  MKO10040367_A_Peg3
  gRNA
gacgacgacatgagccgaag

SEQ ID NO: 40368 - DNA, 20 bp, Artificial Sequence
  MKO10040368_A_Peg3
  gRNA
ggatcgagactcataatcca

SEQ ID NO: 40369 - DNA, 20 bp, Artificial Sequence
  MKO10040369_A_Peli1
  gRNA
gtagtaactgacaccgttcc

SEQ ID NO: 40370 - DNA, 20 bp, Artificial Sequence
  MKO10040370_A_Peli1
  gRNA
tatattcaaccaccaccgtc

SEQ ID NO: 40371 - DNA, 20 bp, Artificial Sequence
  MKO10040371_A_Peli1
  gRNA
cttgtgatgcatccacgtaa

SEQ ID NO: 40372 - DNA, 20 bp, Artificial Sequence
  MKO10040372_A_Peli2
  gRNA
tggcgtaggtccgcttatag

SEQ ID NO: 40373 - DNA, 20 bp, Artificial Sequence
  MKO10040373_A_Peli2
  gRNA
tatacaccttgcgagagacc

SEQ ID NO: 40374 - DNA, 20 bp, Artificial Sequence
  MKO10040374_A_Peli2
  gRNA
gcatatcgtacacgttgtca

SEQ ID NO: 40375 - DNA, 20 bp, Artificial Sequence
  MKO10040375_A_Peli3
  gRNA
actgcccgaatctacgctgc

SEQ ID NO: 40376 - DNA, 20 bp, Artificial Sequence
  MKO10040376_A_Peli3
  gRNA
agccgccggccacatgccaa

SEQ ID NO: 40377 - DNA, 20 bp, Artificial Sequence
  MKO10040377_A_Peli3
  gRNA
catagcgggagatggtactt

SEQ ID NO: 40378 - DNA, 20 bp, Artificial Sequence
  MKO10040378_A_Pelo
  gRNA
aactgctctcgcacgaatcc

SEQ ID NO: 40379 - DNA, 20 bp, Artificial Sequence
  MKO10040379_A_Pelo
  gRNA
ggcttaccacaccatcgaac

SEQ ID NO: 40380 - DNA, 20 bp, Artificial Sequence
  MKO10040380_A_Pelo
  gRNA
tcgctacagtagggtcgcag

SEQ ID NO: 40381 - DNA, 20 bp, Artificial Sequence
  MKO10040381_A_Pelp1
  gRNA
ggggctctcccctatcaaca

SEQ ID NO: 40382 - DNA, 20 bp, Artificial Sequence
  MKO10040382_A_Pelp1
  gRNA
tcaggactcaccgtccacca

SEQ ID NO: 40383 - DNA, 20 bp, Artificial Sequence
  MKO10040383_A_Pelp1
  gRNA
tggtggagatgtcccgaaac

SEQ ID NO: 40384 - DNA, 20 bp, Artificial Sequence
  MKO10040384_A_Pemt
  gRNA
gctgtccagcttctatgcac

SEQ ID NO: 40385 - DNA, 20 bp, Artificial Sequence
  MKO10040385_A_Pemt
  gRNA
ccttcatgcaggtagcgaga

SEQ ID NO: 40386 - DNA, 20 bp, Artificial Sequence
  MKO10040386_A_Pemt
  gRNA
tgaacatcctccgctcccac

SEQ ID NO: 40387 - DNA, 20 bp, Artificial Sequence
  MKO10040387_A_Penk
  gRNA
accaggaaattgatgtcgcc

SEQ ID NO: 40388 - DNA, 20 bp, Artificial Sequence
  MKO10040388_A_Penk
  gRNA
cgctaaatgcagctaccgcc

SEQ ID NO: 40389 - DNA, 20 bp, Artificial Sequence
  MKO10040389_A_Penk
  gRNA
ggcttcatgaaacggtacgg

SEQ ID NO: 40390 - DNA, 20 bp, Artificial Sequence
  MKO10040390_A_Peo1
  gRNA
cactttggctgagccgaaaa

SEQ ID NO: 40391 - DNA, 20 bp, Artificial Sequence
  MKO10040391_A_Peo1
  gRNA
gtctccatcaaagcgattct

SEQ ID NO: 40392 - DNA, 20 bp, Artificial Sequence
  MKO10040392_A_Peo1
  gRNA
tcggaaagaagacgacgaca

SEQ ID NO: 40393 - DNA, 20 bp, Artificial Sequence
  MKO10040393_A_Pepd
  gRNA
gccttcggtgtcgtcgagtc

SEQ ID NO: 40394 - DNA, 20 bp, Artificial Sequence
  MKO10040394_A_Pepd
  gRNA
gcctgactcgacgacaccga

SEQ ID NO: 40395 - DNA, 20 bp, Artificial Sequence
  MKO10040395_A_Pepd
  gRNA
tacgtacctcatccgtgtac

SEQ ID NO: 40396 - DNA, 20 bp, Artificial Sequence
  MKO10040396_A_Per1
  gRNA
gtctatatttcggagcaggc

SEQ ID NO: 40397 - DNA, 20 bp, Artificial Sequence
  MKO10040397_A_Per1
  gRNA
agcgtactgcagtgtggcca

SEQ ID NO: 40398 - DNA, 20 bp, Artificial Sequence
  MKO10040398_A_Per1
  gRNA
cggcccttgccccgacgctc

SEQ ID NO: 40399 - DNA, 20 bp, Artificial Sequence
  MKO10040399_A_Per2
  gRNA
cgcgttcttcacgatatact

SEQ ID NO: 40400 - DNA, 20 bp, Artificial Sequence
  MKO10040400_A_Per2
  gRNA
gagcacaacccctccacgag

SEQ ID NO: 40401 - DNA, 20 bp, Artificial Sequence
  MKO10040401_A_Per2
  gRNA
ccccttacaagcttccgccc

SEQ ID NO: 40402 - DNA, 20 bp, Artificial Sequence
  MKO10040402_A_Per3
  gRNA
tagaacgccctcacgtcttg

SEQ ID NO: 40403 - DNA, 20 bp, Artificial Sequence
  MKO10040403_A_Per3
  gRNA
cgacaaagtgcacgctcttg

SEQ ID NO: 40404 - DNA, 20 bp, Artificial Sequence
  MKO10040404_A_Per3
  gRNA
ctccgcgtggaccgagactc

SEQ ID NO: 40405 - DNA, 20 bp, Artificial Sequence
  MKO10040405_A_Perp
  gRNA
cgccttcgacatcatcgcgc

SEQ ID NO: 40406 - DNA, 20 bp, Artificial Sequence
  MKO10040406_A_Perp
  gRNA
acatccagacatcgtcgctt

SEQ ID NO: 40407 - DNA, 20 bp, Artificial Sequence
  MKO10040407_A_Perp
  gRNA
caaaaggtcatcctcgtagt

SEQ ID NO: 40408 - DNA, 20 bp, Artificial Sequence
  MKO10040408_A_Pes1
  gRNA
agaccattcagttgtgccgt

SEQ ID NO: 40409 - DNA, 20 bp, Artificial Sequence
  MKO10040409_A_Pes1
  gRNA
agctcaccttgcgcagggct

SEQ ID NO: 40410 - DNA, 20 bp, Artificial Sequence
  MKO10040410_A_Pes1
  gRNA
ctcaccgctccttgacaatg

SEQ ID NO: 40411 - DNA, 20 bp, Artificial Sequence
  MKO10040411_A_Pet100
  gRNA
ggactatgttgtccagcgta

SEQ ID NO: 40412 - DNA, 20 bp, Artificial Sequence
  MKO10040412_A_Pet100
  gRNA
agatccagaacataaccacg

SEQ ID NO: 40413 - DNA, 20 bp, Artificial Sequence
  MKO10040413_A_Pet100
  gRNA
gcttaaattcttctagctcc

SEQ ID NO: 40414 - DNA, 20 bp, Artificial Sequence
  MKO10040414_A_Pet112
  gRNA
gtggaagccgcggtgatgac

SEQ ID NO: 40415 - DNA, 20 bp, Artificial Sequence
  MKO10040415_A_Pet112
  gRNA
caccttaccggtaatgttcc

SEQ ID NO: 40416 - DNA, 20 bp, Artificial Sequence
  MKO10040416_A_Pet112
  gRNA
aaagcctccatgacgacctg

SEQ ID NO: 40417 - DNA, 20 bp, Artificial Sequence
  MKO10040417_A_Pet117
  gRNA
agcctggcccgttgcggctg

SEQ ID NO: 40418 - DNA, 20 bp, Artificial Sequence
  MKO10040418_A_Pet117
  gRNA
ctcctcgacattcccgctcc

SEQ ID NO: 40419 - DNA, 20 bp, Artificial Sequence
  MKO10040419_A_Pet117
  gRNA
aaaagaaaacattcgtcttc

SEQ ID NO: 40420 - DNA, 20 bp, Artificial Sequence
  MKO10040420_A_Pet2
  gRNA
cctctaagaactgaacgatc

SEQ ID NO: 40421 - DNA, 20 bp, Artificial Sequence
  MKO10040421_A_Pet2
  gRNA
cacccacatgactaagcgtt

SEQ ID NO: 40422 - DNA, 20 bp, Artificial Sequence
  MKO10040422_A_Pet2
  gRNA
gcctatcacgaagagcacta

SEQ ID NO: 40423 - DNA, 20 bp, Artificial Sequence
  MKO10040423_A_Pex10
  gRNA
cgtagctagtgcgagccttc

SEQ ID NO: 40424 - DNA, 20 bp, Artificial Sequence
  MKO10040424_A_Pex10
  gRNA
gtacgttgggatcatccaag

SEQ ID NO: 40425 - DNA, 20 bp, Artificial Sequence
  MKO10040425_A_Pex10
  gRNA
accgcaatctatcccaccgc

SEQ ID NO: 40426 - DNA, 20 bp, Artificial Sequence
  MKO10040426_A_Pex11a
  gRNA
ctacaagtccaatctcggcg

SEQ ID NO: 40427 - DNA, 20 bp, Artificial Sequence
  MKO10040427_A_Pex11a
  gRNA
attagccaacctcaaccgcg

SEQ ID NO: 40428 - DNA, 20 bp, Artificial Sequence
  MKO10040428_A_Pex11a
  gRNA
tttacggccagtgctcacac

SEQ ID NO: 40429 - DNA, 20 bp, Artificial Sequence
  MKO10040429_A_Pex11b
  gRNA
ctactggctcgtgtccttcg

SEQ ID NO: 40430 - DNA, 20 bp, Artificial Sequence
  MKO10040430_A_Pex11b
  gRNA
tttacttacactttcgtccg

SEQ ID NO: 40431 - DNA, 20 bp, Artificial Sequence
  MKO10040431_A_Pex11b
  gRNA
atctctacaagtgctacgcc

SEQ ID NO: 40432 - DNA, 20 bp, Artificial Sequence
  MKO10040432_A_Pex11g
  gRNA
cgaagtgggaaggcgcttgc

SEQ ID NO: 40433 - DNA, 20 bp, Artificial Sequence
  MKO10040433_A_Pex11g
  gRNA
cagtcctgcaatgattgaac

SEQ ID NO: 40434 - DNA, 20 bp, Artificial Sequence
  MKO10040434_A_Pex11g
  gRNA
gctcacaaggatagtacagt

SEQ ID NO: 40435 - DNA, 20 bp, Artificial Sequence
  MKO10040435_A_Pex12
  gRNA
gttgccttatccctctcgac

SEQ ID NO: 40436 - DNA, 20 bp, Artificial Sequence
  MKO10040436_A_Pex12
  gRNA
tttcatcaaaccaccgccag

SEQ ID NO: 40437 - DNA, 20 bp, Artificial Sequence
  MKO10040437_A_Pex12
  gRNA
gaatcaaatcctgcgcacta

SEQ ID NO: 40438 - DNA, 20 bp, Artificial Sequence
  MKO10040438_A_Pex13
  gRNA
tctcgcagaattcccggggc

SEQ ID NO: 40439 - DNA, 20 bp, Artificial Sequence
  MKO10040439_A_Pex13
  gRNA
gaagaaatttctttccgtgc

SEQ ID NO: 40440 - DNA, 20 bp, Artificial Sequence
  MKO10040440_A_Pex13
  gRNA
cagaagccaaccacgcactt

SEQ ID NO: 40441 - DNA, 20 bp, Artificial Sequence
  MKO10040441_A_Pex14
  gRNA
gccggacccgagaattctgt

SEQ ID NO: 40442 - DNA, 20 bp, Artificial Sequence
  MKO10040442_A_Pex14
  gRNA
ggcagagcccacttgcgacc

SEQ ID NO: 40443 - DNA, 20 bp, Artificial Sequence
  MKO10040443_A_Pex14
  gRNA
tgccgacgagccttcacccc

SEQ ID NO: 40444 - DNA, 20 bp, Artificial Sequence
  MKO10040444_A_Pex16
  gRNA
tgtggggcgaagtaggccgt

SEQ ID NO: 40445 - DNA, 20 bp, Artificial Sequence
  MKO10040445_A_Pex16
  gRNA
gtactctgcctcgaacctgc

SEQ ID NO: 40446 - DNA, 20 bp, Artificial Sequence
  MKO10040446_A_Pex16
  gRNA
gcttcgaaaaaagttgcctg

SEQ ID NO: 40447 - DNA, 20 bp, Artificial Sequence
  MKO10040447_A_Pex19
  gRNA
gtgttggggtcgaagacgac

SEQ ID NO: 40448 - DNA, 20 bp, Artificial Sequence
  MKO10040448_A_Pex19
  gRNA
cgagacgcccacagacagcg

SEQ ID NO: 40449 - DNA, 20 bp, Artificial Sequence
  MKO10040449_A_Pex19
  gRNA
tactcagagggctcgctttg

SEQ ID NO: 40450 - DNA, 20 bp, Artificial Sequence
  MKO10040450_A_Pex1
  gRNA
gatcagctccaaccgcagtg

SEQ ID NO: 40451 - DNA, 20 bp, Artificial Sequence
  MKO10040451_A_Pex1
  gRNA
gcaccgcccacgtatttcct

SEQ ID NO: 40452 - DNA, 20 bp, Artificial Sequence
  MKO10040452_A_Pex1
  gRNA
accgatctggataaatatgt

SEQ ID NO: 40453 - DNA, 20 bp, Artificial Sequence
  MKO10040453_A_Pex26
  gRNA
ggtcaaaccgtagaatcaag

SEQ ID NO: 40454 - DNA, 20 bp, Artificial Sequence
  MKO10040454_A_Pex26
  gRNA
tacccgctgctcctcgctga

SEQ ID NO: 40455 - DNA, 20 bp, Artificial Sequence
  MKO10040455_A_Pex26
  gRNA
gtaggaccactcagtcccgg

SEQ ID NO: 40456 - DNA, 20 bp, Artificial Sequence
  MKO10040456_A_Pex2
  gRNA
agccaacttcgcgcatgttc

SEQ ID NO: 40457 - DNA, 20 bp, Artificial Sequence
  MKO10040457_A_Pex2
  gRNA
tactttacgtgcccgaagtg

SEQ ID NO: 40458 - DNA, 20 bp, Artificial Sequence
  MKO10040458_A_Pex2
  gRNA
ccccagaacatgcgcgaagt

SEQ ID NO: 40459 - DNA, 20 bp, Artificial Sequence
  MKO10040459_A_Pex3
  gRNA
aatggtactgtcgccgagct

SEQ ID NO: 40460 - DNA, 20 bp, Artificial Sequence
  MKO10040460_A_Pex3
  gRNA
cagaatacattgcccaagct

SEQ ID NO: 40461 - DNA, 20 bp, Artificial Sequence
  MKO10040461_A_Pex3
  gRNA
cacctccgaggactgtgccc

SEQ ID NO: 40462 - DNA, 20 bp, Artificial Sequence
  MKO10040462_A_Pex5l
  gRNA
atttagacatccgccgtgtg

SEQ ID NO: 40463 - DNA, 20 bp, Artificial Sequence
  MKO10040463_A_Pex5l
  gRNA
cagctattgtcgccctccag

SEQ ID NO: 40464 - DNA, 20 bp, Artificial Sequence
  MKO10040464_A_Pex5l
  gRNA
gtgaggacaacctgtcaact

SEQ ID NO: 40465 - DNA, 20 bp, Artificial Sequence
  MKO10040465_A_Pex5
  gRNA
gaattcatcgccgaagttac

SEQ ID NO: 40466 - DNA, 20 bp, Artificial Sequence
  MKO10040466_A_Pex5
  gRNA
aagattataatgagaccgac

SEQ ID NO: 40467 - DNA, 20 bp, Artificial Sequence
  MKO10040467_A_Pex5
  gRNA
gcctcagtccctcctgccga

SEQ ID NO: 40468 - DNA, 20 bp, Artificial Sequence
  MKO10040468_A_Pex6
  gRNA
atgtgtaactctcgagcaaa

SEQ ID NO: 40469 - DNA, 20 bp, Artificial Sequence
  MKO10040469_A_Pex6
  gRNA
cggccttaccaggtataaag

SEQ ID NO: 40470 - DNA, 20 bp, Artificial Sequence
  MKO10040470_A_Pex6
  gRNA
gcctcactcacccgggctgc

SEQ ID NO: 40471 - DNA, 20 bp, Artificial Sequence
  MKO10040471_A_Pex7
  gRNA
gatgccgtagtgctgcgccg

SEQ ID NO: 40472 - DNA, 20 bp, Artificial Sequence
  MKO10040472_A_Pex7
  gRNA
agaactcggccgcatagccg

SEQ ID NO: 40473 - DNA, 20 bp, Artificial Sequence
  MKO10040473_A_Pex7
  gRNA
gaggctgaagcgaaacaacc

SEQ ID NO: 40474 - DNA, 20 bp, Artificial Sequence
  MKO10040474_A_Pf4
  gRNA
tcttgacatgagcgtcgctg

SEQ ID NO: 40475 - DNA, 20 bp, Artificial Sequence
  MKO10040475_A_Pf4
  gRNA
cagctgatacctaactctcc

SEQ ID NO: 40476 - DNA, 20 bp, Artificial Sequence
  MKO10040476_A_Pf4
  gRNA
gctggtcccgaagaaagcga

SEQ ID NO: 40477 - DNA, 20 bp, Artificial Sequence
  MKO10040477_A_Pfas
  gRNA
cacccgacgttaccgacttt

SEQ ID NO: 40478 - DNA, 20 bp, Artificial Sequence
  MKO10040478_A_Pfas
  gRNA
ttaccgaaagtcggtaacgt

SEQ ID NO: 40479 - DNA, 20 bp, Artificial Sequence
  MKO10040479_A_Pfas
  gRNA
ctctgtcatccggtcgtgca

SEQ ID NO: 40480 - DNA, 20 bp, Artificial Sequence
  MKO10040480_A_Pfdn1
  gRNA
tcatgatctccgtgtccgta

SEQ ID NO: 40481 - DNA, 20 bp, Artificial Sequence
  MKO10040481_A_Pfdn1
  gRNA
ctccaatatggccgcctccg

SEQ ID NO: 40482 - DNA, 20 bp, Artificial Sequence
  MKO10040482_A_Pfdn1
  gRNA
gatgagactaacatgtacga

SEQ ID NO: 40483 - DNA, 20 bp, Artificial Sequence
  MKO10040483_A_Pfdn2
  gRNA
ccttcagtgtatcgatcacc

SEQ ID NO: 40484 - DNA, 20 bp, Artificial Sequence
  MKO10040484_A_Pfdn2
  gRNA
aaagcacaacattcgtctca

SEQ ID NO: 40485 - DNA, 20 bp, Artificial Sequence
  MKO10040485_A_Pfdn2
  gRNA
ttgctggctttaatcgcctt

SEQ ID NO: 40486 - DNA, 20 bp, Artificial Sequence
  MKO10040486_A_Pfdn4
  gRNA
tcgcgtatagctgcaccttc

SEQ ID NO: 40487 - DNA, 20 bp, Artificial Sequence
  MKO10040487_A_Pfdn4
  gRNA
gcgggtgttagccgacctga

SEQ ID NO: 40488 - DNA, 20 bp, Artificial Sequence
  MKO10040488_A_Pfdn4
  gRNA
cgcactcaccgccttcttca

SEQ ID NO: 40489 - DNA, 20 bp, Artificial Sequence
  MKO10040489_A_Pfdn5
  gRNA
aaccggctactacgtggaga

SEQ ID NO: 40490 - DNA, 20 bp, Artificial Sequence
  MKO10040490_A_Pfdn5
  gRNA
aaggatacagaactcgtcag

SEQ ID NO: 40491 - DNA, 20 bp, Artificial Sequence
  MKO10040491_A_Pfdn5
  gRNA
caccttctccacgtagtagc

SEQ ID NO: 40492 - DNA, 20 bp, Artificial Sequence
  MKO10040492_A_Pfkfb1
  gRNA
aatcaatgatcgtcgttctc

SEQ ID NO: 40493 - DNA, 20 bp, Artificial Sequence
  MKO10040493_A_Pfkfb1
  gRNA
atggtgggtttaccagctcg

SEQ ID NO: 40494 - DNA, 20 bp, Artificial Sequence
  MKO10040494_A_Pfkfb1
  gRNA
agctcacacgctatctcaac

SEQ ID NO: 40495 - DNA, 20 bp, Artificial Sequence
  MKO10040495_A_Pfkfb2
  gRNA
cccacgcctcaaatctgcga

SEQ ID NO: 40496 - DNA, 20 bp, Artificial Sequence
  MKO10040496_A_Pfkfb2
  gRNA
ccctgcccttcgcagatttg

SEQ ID NO: 40497 - DNA, 20 bp, Artificial Sequence
  MKO10040497_A_Pfkfb2
  gRNA
tgggtactccaatccagttg

SEQ ID NO: 40498 - DNA, 20 bp, Artificial Sequence
  MKO10040498_A_Pfkfb3
  gRNA
gttggtcagcttcggcccac

SEQ ID NO: 40499 - DNA, 20 bp, Artificial Sequence
  MKO10040499_A_Pfkfb3
  gRNA
ggcttactttcggactctca

SEQ ID NO: 40500 - DNA, 20 bp, Artificial Sequence
  MKO10040500_A_Pfkfb3
  gRNA
gcactcacatctgggcaacg

SEQ ID NO: 40501 - DNA, 20 bp, Artificial Sequence
  MKO10040501_A_Pfkfb4
  gRNA
caaccaatacgacccgagag

SEQ ID NO: 40502 - DNA, 20 bp, Artificial Sequence
  MKO10040502_A_Pfkfb4
  gRNA
actggattggcgtgcctact

SEQ ID NO: 40503 - DNA, 20 bp, Artificial Sequence
  MKO10040503_A_Pfkfb4
  gRNA
tcccccccagaattcaacgt

SEQ ID NO: 40504 - DNA, 20 bp, Artificial Sequence
  MKO10040504_A_Pfkl
  gRNA
cgtcgccaccgatgacacac

SEQ ID NO: 40505 - DNA, 20 bp, Artificial Sequence
  MKO10040505_A_Pfkl
  gRNA
gcggccttccctcgtagtga

SEQ ID NO: 40506 - DNA, 20 bp, Artificial Sequence
  MKO10040506_A_Pfkl
  gRNA
gccacagaagtcgttatcga

SEQ ID NO: 40507 - DNA, 20 bp, Artificial Sequence
  MKO10040507_A_Pfkm
  gRNA
gtccagctacctgaacatcg

SEQ ID NO: 40508 - DNA, 20 bp, Artificial Sequence
  MKO10040508_A_Pfkm
  gRNA
cgcccgtgaagataccaact

SEQ ID NO: 40509 - DNA, 20 bp, Artificial Sequence
  MKO10040509_A_Pfkm
  gRNA
tggacggtggcgagcacatc

SEQ ID NO: 40510 - DNA, 20 bp, Artificial Sequence
  MKO10040510_A_Pfkp
  gRNA
gcccaagcgcgccaagttac

SEQ ID NO: 40511 - DNA, 20 bp, Artificial Sequence
  MKO10040511_A_Pfkp
  gRNA
cccgccgatcacgcacagat

SEQ ID NO: 40512 - DNA, 20 bp, Artificial Sequence
  MKO10040512_A_Pfkp
  gRNA
gaatgctgctgtccgcgctg

SEQ ID NO: 40513 - DNA, 20 bp, Artificial Sequence
  MKO10040513_A_Pfn1
  gRNA
gacaggtcccgtccgccata

SEQ ID NO: 40514 - DNA, 20 bp, Artificial Sequence
  MKO10040514_A_Pfn1
  gRNA
cgcctacatcgacagcctta

SEQ ID NO: 40515 - DNA, 20 bp, Artificial Sequence
  MKO10040515_A_Pfn1
  gRNA
cttcgtaccaagagcaccgg

SEQ ID NO: 40516 - DNA, 20 bp, Artificial Sequence
  MKO10040516_A_Pfn2
  gRNA
actgcgacgccaaatacgtc

SEQ ID NO: 40517 - DNA, 20 bp, Artificial Sequence
  MKO10040517_A_Pfn2
  gRNA
gtcgcagtagccgacaatgg

SEQ ID NO: 40518 - DNA, 20 bp, Artificial Sequence
  MKO10040518_A_Pfn2
  gRNA
ccaacagcaacgttgtatgt

SEQ ID NO: 40519 - DNA, 20 bp, Artificial Sequence
  MKO10040519_A_Pfn3
  gRNA
cgtactggatgcgcgcacca

SEQ ID NO: 40520 - DNA, 20 bp, Artificial Sequence
  MKO10040520_A_Pfn3
  gRNA
gatcgatgacgtggctatcg

SEQ ID NO: 40521 - DNA, 20 bp, Artificial Sequence
  MKO10040521_A_Pfn3
  gRNA
atccagtacgccgtcaccct

SEQ ID NO: 40522 - DNA, 20 bp, Artificial Sequence
  MKO10040522_A_Pfn4
  gRNA
catgtatcctagcgtctgcg

SEQ ID NO: 40523 - DNA, 20 bp, Artificial Sequence
  MKO10040523_A_Pfn4
  gRNA
ccttcccttcgcgttaataa

SEQ ID NO: 40524 - DNA, 20 bp, Artificial Sequence
  MKO10040524_A_Pfn4
  gRNA
aaaacccattattaacgcga

SEQ ID NO: 40525 - DNA, 20 bp, Artificial Sequence
  MKO10040525_A_Pfpl
  gRNA
caatgatcgcagcgagctgt

SEQ ID NO: 40526 - DNA, 20 bp, Artificial Sequence
  MKO10040526_A_Pfpl
  gRNA
aaactggtcaacgctccctt

SEQ ID NO: 40527 - DNA, 20 bp, Artificial Sequence
  MKO10040527_A_Pfpl
  gRNA
gattatcgtcccagagtcaa

SEQ ID NO: 40528 - DNA, 20 bp, Artificial Sequence
  MKO10040528_A_Pga5
  gRNA
acgtctaggtagttcctcat

SEQ ID NO: 40529 - DNA, 20 bp, Artificial Sequence
  MKO10040529_A_Pga5
  gRNA
acaaagccttcaacccgctt

SEQ ID NO: 40530 - DNA, 20 bp, Artificial Sequence
  MKO10040530_A_Pga5
  gRNA
acgtgcttcttgagcagcgc

SEQ ID NO: 40531 - DNA, 20 bp, Artificial Sequence
  MKO10040531_A_Pgam1
  gRNA
cgccgcgcttcgcctcctcg

SEQ ID NO: 40532 - DNA, 20 bp, Artificial Sequence
  MKO10040532_A_Pgam1
  gRNA
cgccatggctgcctacaagc

SEQ ID NO: 40533 - DNA, 20 bp, Artificial Sequence
  MKO10040533_A_Pgam1
  gRNA
cttgctgatgttgctgtaga

SEQ ID NO: 40534 - DNA, 20 bp, Artificial Sequence
  MKO10040534_A_Pgam2
  gRNA
gatagcggtggccccccgct

SEQ ID NO: 40535 - DNA, 20 bp, Artificial Sequence
  MKO10040535_A_Pgam2
  gRNA
gaccacccaccgcctagtaa

SEQ ID NO: 40536 - DNA, 20 bp, Artificial Sequence
  MKO10040536_A_Pgam2
  gRNA
ggagatcgcacctaagatta

SEQ ID NO: 40537 - DNA, 20 bp, Artificial Sequence
  MKO10040537_A_Pgam5
  gRNA
cacgcgcgcgaccgagccgc

SEQ ID NO: 40538 - DNA, 20 bp, Artificial Sequence
  MKO10040538_A_Pgam5
  gRNA
gcggcgtctgggacaccaac

SEQ ID NO: 40539 - DNA, 20 bp, Artificial Sequence
  MKO10040539_A_Pgam5
  gRNA
tttgcttccaggtcgggaac

SEQ ID NO: 40540 - DNA, 20 bp, Artificial Sequence
  MKO10040540_A_Pgap1
  gRNA
cgggattaccaagttcgttc

SEQ ID NO: 40541 - DNA, 20 bp, Artificial Sequence
  MKO10040541_A_Pgap1
  gRNA
ccattagatcgtttcattac

SEQ ID NO: 40542 - DNA, 20 bp, Artificial Sequence
  MKO10040542_A_Pgap1
  gRNA
tactctgcagttcgatctat

SEQ ID NO: 40543 - DNA, 20 bp, Artificial Sequence
  MKO10040543_A_Pgap2
  gRNA
ccggcacaacatgtattgtg

SEQ ID NO: 40544 - DNA, 20 bp, Artificial Sequence
  MKO10040544_A_Pgap2
  gRNA
agaagcggggtgccgagtgc

SEQ ID NO: 40545 - DNA, 20 bp, Artificial Sequence
  MKO10040545_A_Pgap2
  gRNA
cctcacaatacatgttgtgc

SEQ ID NO: 40546 - DNA, 20 bp, Artificial Sequence
  MKO10040546_A_Pgap3
  gRNA
atacttgcagtcgtcccgac

SEQ ID NO: 40547 - DNA, 20 bp, Artificial Sequence
  MKO10040547_A_Pgap3
  gRNA
gatagcggcagagcatcacc

SEQ ID NO: 40548 - DNA, 20 bp, Artificial Sequence
  MKO10040548_A_Pgap3
  gRNA
ggtccacagtcttccatacc

SEQ ID NO: 40549 - DNA, 20 bp, Artificial Sequence
  MKO10040549_A_Pgbd1
  gRNA
aacagaagtgccgaaatcgc

SEQ ID NO: 40550 - DNA, 20 bp, Artificial Sequence
  MKO10040550_A_Pgbd1
  gRNA
aactttaccgcctgcgattt

SEQ ID NO: 40551 - DNA, 20 bp, Artificial Sequence
  MKO10040551_A_Pgbd1
  gRNA
gtggtacaactaactacgca

SEQ ID NO: 40552 - DNA, 20 bp, Artificial Sequence
  MKO10040552_A_Pgbd5
  gRNA
gtccgccagtgctcttcaac

SEQ ID NO: 40553 - DNA, 20 bp, Artificial Sequence
  MKO10040553_A_Pgbd5
  gRNA
aagagcactggcggacccac

SEQ ID NO: 40554 - DNA, 20 bp, Artificial Sequence
  MKO10040554_A_Pgbd5
  gRNA
caagatctacgtccacctaa

SEQ ID NO: 40555 - DNA, 20 bp, Artificial Sequence
  MKO10040555_A_Pgc
  gRNA
gcgtagacaaaattggtgcc

SEQ ID NO: 40556 - DNA, 20 bp, Artificial Sequence
  MKO10040556_A_Pgc
  gRNA
ttctgtctactgccagagcg

SEQ ID NO: 40557 - DNA, 20 bp, Artificial Sequence
  MKO10040557_A_Pgc
  gRNA
ggctgccggtgccgtactgc

SEQ ID NO: 40558 - DNA, 20 bp, Artificial Sequence
  MKO10040558_A_Pgd
  gRNA
acgggtgacatcatcatcga

SEQ ID NO: 40559 - DNA, 20 bp, Artificial Sequence
  MKO10040559_A_Pgd
  gRNA
ccaaactaaagaagccccgc

SEQ ID NO: 40560 - DNA, 20 bp, Artificial Sequence
  MKO10040560_A_Pgd
  gRNA
caacgaggcgaagggcacca

SEQ ID NO: 40561 - DNA, 20 bp, Artificial Sequence
  MKO10040561_A_Pgf
  gRNA
cgaccccacacttcgttgaa

SEQ ID NO: 40562 - DNA, 20 bp, Artificial Sequence
  MKO10040562_A_Pgf
  gRNA
tcgcagctactgtcggccca

SEQ ID NO: 40563 - DNA, 20 bp, Artificial Sequence
  MKO10040563_A_Pgf
  gRNA
acctattctggagacgacaa

SEQ ID NO: 40564 - DNA, 20 bp, Artificial Sequence
  MKO10040564_A_Pggt1b
  gRNA
cttaggccgtgtggataaag

SEQ ID NO: 40565 - DNA, 20 bp, Artificial Sequence
  MKO10040565_A_Pggt1b
  gRNA
gctatgtgtccactgtcgta

SEQ ID NO: 40566 - DNA, 20 bp, Artificial Sequence
  MKO10040566_A_Pggt1b
  gRNA
gggtcaaatctgagtcgctg

SEQ ID NO: 40567 - DNA, 20 bp, Artificial Sequence
  MKO10040567_A_Pgk1
  gRNA
tctgcaggttaaagctgagc

SEQ ID NO: 40568 - DNA, 20 bp, Artificial Sequence
  MKO10040568_A_Pgk1
  gRNA
cagggatgttctgttcttga

SEQ ID NO: 40569 - DNA, 20 bp, Artificial Sequence
  MKO10040569_A_Pgk1
  gRNA
acctttggttgtttgttatc

SEQ ID NO: 40570 - DNA, 20 bp, Artificial Sequence
  MKO10040570_A_Pgk2
  gRNA
agtatctccgcctcctataa

SEQ ID NO: 40571 - DNA, 20 bp, Artificial Sequence
  MKO10040571_A_Pgk2
  gRNA
catgatctctttaacaatcg

SEQ ID NO: 40572 - DNA, 20 bp, Artificial Sequence
  MKO10040572_A_Pgk2
  gRNA
gtctatgtcaacgatgcatt

SEQ ID NO: 40573 - DNA, 20 bp, Artificial Sequence
  MKO10040573_A_Pgls
  gRNA
ggccgtcagggcccactccc

SEQ ID NO: 40574 - DNA, 20 bp, Artificial Sequence
  MKO10040574_A_Pgls
  gRNA
caatgtggaatgcttctcga

SEQ ID NO: 40575 - DNA, 20 bp, Artificial Sequence
  MKO10040575_A_Pgls
  gRNA
agcgttagggtcaccctctg

SEQ ID NO: 40576 - DNA, 20 bp, Artificial Sequence
  MKO10040576_A_Pglyrp1
  gRNA
cagaccgggtacccgcaaag

SEQ ID NO: 40577 - DNA, 20 bp, Artificial Sequence
  MKO10040577_A_Pglyrp1
  gRNA
gagatcaccacgtagcgaac

SEQ ID NO: 40578 - DNA, 20 bp, Artificial Sequence
  MKO10040578_A_Pglyrp1
  gRNA
tcatcgtgccccgcagtgag

SEQ ID NO: 40579 - DNA, 20 bp, Artificial Sequence
  MKO10040579_A_Pglyrp2
  gRNA
cccttccgcagtttcgtggt

SEQ ID NO: 40580 - DNA, 20 bp, Artificial Sequence
  MKO10040580_A_Pglyrp2
  gRNA
gagccgctccccaacggcag

SEQ ID NO: 40581 - DNA, 20 bp, Artificial Sequence
  MKO10040581_A_Pglyrp2
  gRNA
acgctgcatggagcgcatat

SEQ ID NO: 40582 - DNA, 20 bp, Artificial Sequence
  MKO10040582_A_Pglyrp3
  gRNA
atgcaatgtcgcagaaatct

SEQ ID NO: 40583 - DNA, 20 bp, Artificial Sequence
  MKO10040583_A_Pglyrp3
  gRNA
agcagaccgtggtgtgatat

SEQ ID NO: 40584 - DNA, 20 bp, Artificial Sequence
  MKO10040584_A_Pglyrp3
  gRNA
tcatcatagagcaagttacc

SEQ ID NO: 40585 - DNA, 20 bp, Artificial Sequence
  MKO10040585_A_Pglyrp4
  gRNA
tgtccaaggctctcacgacc

SEQ ID NO: 40586 - DNA, 20 bp, Artificial Sequence
  MKO10040586_A_Pglyrp4
  gRNA
ttgttgtggcactctagtcc

SEQ ID NO: 40587 - DNA, 20 bp, Artificial Sequence
  MKO10040587_A_Pglyrp4
  gRNA
tctgacacctgatcagtttg

SEQ ID NO: 40588 - DNA, 20 bp, Artificial Sequence
  MKO10040588_A_Pgm1
  gRNA
tcgcacctgaaactctgcgc

SEQ ID NO: 40589 - DNA, 20 bp, Artificial Sequence
  MKO10040589_A_Pgm1
  gRNA
cttcgagcgcctatgggagc

SEQ ID NO: 40590 - DNA, 20 bp, Artificial Sequence
  MKO10040590_A_Pgm1
  gRNA
gcgagagctcaccccgccag

SEQ ID NO: 40591 - DNA, 20 bp, Artificial Sequence
  MKO10040591_A_Pgm2l1
  gRNA
tgcgtgatcgtctttgttgc

SEQ ID NO: 40592 - DNA, 20 bp, Artificial Sequence
  MKO10040592_A_Pgm2l1
  gRNA
tgcatctcataaccgcaaag

SEQ ID NO: 40593 - DNA, 20 bp, Artificial Sequence
  MKO10040593_A_Pgm2l1
  gRNA
atacttactacgaaaggtgt

SEQ ID NO: 40594 - DNA, 20 bp, Artificial Sequence
  MKO10040594_A_Pgm2
  gRNA
ccagcgcgtacctccgtgca

SEQ ID NO: 40595 - DNA, 20 bp, Artificial Sequence
  MKO10040595_A_Pgm2
  gRNA
cctatcctagattggtcgcc

SEQ ID NO: 40596 - DNA, 20 bp, Artificial Sequence
  MKO10040596_A_Pgm2
  gRNA
cttcgatttcaacgcactga

SEQ ID NO: 40597 - DNA, 20 bp, Artificial Sequence
  MKO10040597_A_Pgm3
  gRNA
tttcgtagaccttacgaatc

SEQ ID NO: 40598 - DNA, 20 bp, Artificial Sequence
  MKO10040598_A_Pgm3
  gRNA
cgatcatatcatgtttcgaa

SEQ ID NO: 40599 - DNA, 20 bp, Artificial Sequence
  MKO10040599_A_Pgm3
  gRNA
tacggcctcacataaccctg

SEQ ID NO: 40600 - DNA, 20 bp, Artificial Sequence
  MKO10040600_A_Pgm5
  gRNA
tcgaattgacctatctcgac

SEQ ID NO: 40601 - DNA, 20 bp, Artificial Sequence
  MKO10040601_A_Pgm5
  gRNA
gacacagtttattgcggagt

SEQ ID NO: 40602 - DNA, 20 bp, Artificial Sequence
  MKO10040602_A_Pgm5
  gRNA
tgccctccgaagtcttctag

SEQ ID NO: 40603 - DNA, 20 bp, Artificial Sequence
  MKO10040603_A_Pgpep1l
  gRNA
gccgagagccagtgcgacag

SEQ ID NO: 40604 - DNA, 20 bp, Artificial Sequence
  MKO10040604_A_Pgpep1l
  gRNA
tgaagtacctgcccgcatct

SEQ ID NO: 40605 - DNA, 20 bp, Artificial Sequence
  MKO10040605_A_Pgpep1l
  gRNA
catctgaatcccgatagcct

SEQ ID NO: 40606 - DNA, 20 bp, Artificial Sequence
  MKO10040606_A_Pgpep1
  gRNA
cgatgatagctcgtagcgcc

SEQ ID NO: 40607 - DNA, 20 bp, Artificial Sequence
  MKO10040607_A_Pgpep1
  gRNA
ggcgctacgagctatcatcg

SEQ ID NO: 40608 - DNA, 20 bp, Artificial Sequence
  MKO10040608_A_Pgpep1
  gRNA
cacggcgtccatgtcgatga

SEQ ID NO: 40609 - DNA, 20 bp, Artificial Sequence
  MKO10040609_A_Pgp
  gRNA
gctcgaacccgacgtgcgcg

SEQ ID NO: 40610 - DNA, 20 bp, Artificial Sequence
  MKO10040610_A_Pgp
  gRNA
gcagcgggcttcgtcgccac

SEQ ID NO: 40611 - DNA, 20 bp, Artificial Sequence
  MKO10040611_A_Pgp
  gRNA
cccaccatgacggtgcgctc

SEQ ID NO: 40612 - DNA, 20 bp, Artificial Sequence
  MKO10040612_A_Pgr15l
  gRNA
cagttgctatggaccggcac

SEQ ID NO: 40613 - DNA, 20 bp, Artificial Sequence
  MKO10040613_A_Pgr15l
  gRNA
ggggggcaatccccacatca

SEQ ID NO: 40614 - DNA, 20 bp, Artificial Sequence
  MKO10040614_A_Pgr15l
  gRNA
actgggcaaaccgactgaca

SEQ ID NO: 40615 - DNA, 20 bp, Artificial Sequence
  MKO10040615_A_Pgrmc1
  gRNA
cgcgaacgatcttgtagagc

SEQ ID NO: 40616 - DNA, 20 bp, Artificial Sequence
  MKO10040616_A_Pgrmc1
  gRNA
ctgctctacaagatcgttcg

SEQ ID NO: 40617 - DNA, 20 bp, Artificial Sequence
  MKO10040617_A_Pgrmc1
  gRNA
ttccgagctgtctcgtcttt

SEQ ID NO: 40618 - DNA, 20 bp, Artificial Sequence
  MKO10040618_A_Pgrmc2
  gRNA
gcgtgcgcgccccgtcgtac

SEQ ID NO: 40619 - DNA, 20 bp, Artificial Sequence
  MKO10040619_A_Pgrmc2
  gRNA
aagtcccgcttcttcatgcg

SEQ ID NO: 40620 - DNA, 20 bp, Artificial Sequence
  MKO10040620_A_Pgrmc2
  gRNA
tctctttcagcgggtccata

SEQ ID NO: 40621 - DNA, 20 bp, Artificial Sequence
  MKO10040621_A_Pgr
  gRNA
gcagttgtctctcgcctagt

SEQ ID NO: 40622 - DNA, 20 bp, Artificial Sequence
  MKO10040622_A_Pgr
  gRNA
cgttaggaaggcccaccgac

SEQ ID NO: 40623 - DNA, 20 bp, Artificial Sequence
  MKO10040623_A_Pgr
  gRNA
gcttgtacgacctccacccc

SEQ ID NO: 40624 - DNA, 20 bp, Artificial Sequence
  MKO10040624_A_Pgs1
  gRNA
agggagacgcgcacgcgctc

SEQ ID NO: 40625 - DNA, 20 bp, Artificial Sequence
  MKO10040625_A_Pgs1
  gRNA
gctgtccccaaccgttcctc

SEQ ID NO: 40626 - DNA, 20 bp, Artificial Sequence
  MKO10040626_A_Pgs1
  gRNA
gagcgcttcaatgagaccat

SEQ ID NO: 40627 - DNA, 20 bp, Artificial Sequence
  MKO10040627_A_Phactr1
  gRNA
agccatgcgttccgactcgc

SEQ ID NO: 40628 - DNA, 20 bp, Artificial Sequence
  MKO10040628_A_Phactr1
  gRNA
cgacacgccatatctcgcag

SEQ ID NO: 40629 - DNA, 20 bp, Artificial Sequence
  MKO10040629_A_Phactr1
  gRNA
gtacgcacaccccgcccatc

SEQ ID NO: 40630 - DNA, 20 bp, Artificial Sequence
  MKO10040630_A_Phactr2
  gRNA
tcgatggttcttcagtccaa

SEQ ID NO: 40631 - DNA, 20 bp, Artificial Sequence
  MKO10040631_A_Phactr2
  gRNA
gcacatgatacacatcggag

SEQ ID NO: 40632 - DNA, 20 bp, Artificial Sequence
  MKO10040632_A_Phactr2
  gRNA
ggacggtgaggctgacgctt

SEQ ID NO: 40633 - DNA, 20 bp, Artificial Sequence
  MKO10040633_A_Phactr3
  gRNA
gtgcagagtgagccgcccgc

SEQ ID NO: 40634 - DNA, 20 bp, Artificial Sequence
  MKO10040634_A_Phactr3
  gRNA
aaactgaagcagacgacgtc

SEQ ID NO: 40635 - DNA, 20 bp, Artificial Sequence
  MKO10040635_A_Phactr3
  gRNA
gagccctctcaagccttagc

SEQ ID NO: 40636 - DNA, 20 bp, Artificial Sequence
  MKO10040636_A_Phactr4
  gRNA
gtccgttctttaatgcagca

SEQ ID NO: 40637 - DNA, 20 bp, Artificial Sequence
  MKO10040637_A_Phactr4
  gRNA
agatcttcaagccgtggaaa

SEQ ID NO: 40638 - DNA, 20 bp, Artificial Sequence
  MKO10040638_A_Phactr4
  gRNA
ttccggctggcagtacagca

SEQ ID NO: 40639 - DNA, 20 bp, Artificial Sequence
  MKO10040639_A_Phax
  gRNA
tagccgatgagatcgccttc

SEQ ID NO: 40640 - DNA, 20 bp, Artificial Sequence
  MKO10040640_A_Phax
  gRNA
ccgatgacgattgctctctt

SEQ ID NO: 40641 - DNA, 20 bp, Artificial Sequence
  MKO10040641_A_Phax
  gRNA
acctgatagcccgagtagtg

SEQ ID NO: 40642 - DNA, 20 bp, Artificial Sequence
  MKO10040642_A_Phb2
  gRNA
catagtccagccctagacgc

SEQ ID NO: 40643 - DNA, 20 bp, Artificial Sequence
  MKO10040643_A_Phb2
  gRNA
cgaaaaatctcctcccccac

SEQ ID NO: 40644 - DNA, 20 bp, Artificial Sequence
  MKO10040644_A_Phb2
  gRNA
cgtgcagcaggacacgatcc

SEQ ID NO: 40645 - DNA, 20 bp, Artificial Sequence
  MKO10040645_A_Phb
  gRNA
ggccaggctcgattcgatgc

SEQ ID NO: 40646 - DNA, 20 bp, Artificial Sequence
  MKO10040646_A_Phb
  gRNA
tatcctggatgacgtgtccc

SEQ ID NO: 40647 - DNA, 20 bp, Artificial Sequence
  MKO10040647_A_Phb
  gRNA
cactcaccaccaccgacttg

SEQ ID NO: 40648 - DNA, 20 bp, Artificial Sequence
  MKO10040648_A_Phc1
  gRNA
cacgattgctgccagtcgac

SEQ ID NO: 40649 - DNA, 20 bp, Artificial Sequence
  MKO10040649_A_Phc1
  gRNA
ctgtcgactggcagcaatcg

SEQ ID NO: 40650 - DNA, 20 bp, Artificial Sequence
  MKO10040650_A_Phc1
  gRNA
cagaactctagttcgaccaa

SEQ ID NO: 40651 - DNA, 20 bp, Artificial Sequence
  MKO10040651_A_Phc2
  gRNA
ccgtcggcggttgtgggttg

SEQ ID NO: 40652 - DNA, 20 bp, Artificial Sequence
  MKO10040652_A_Phc2
  gRNA
acccttcgataacatgcgtc

SEQ ID NO: 40653 - DNA, 20 bp, Artificial Sequence
  MKO10040653_A_Phc2
  gRNA
atcctgacgcatgttatcga

SEQ ID NO: 40654 - DNA, 20 bp, Artificial Sequence
  MKO10040654_A_Phc3
  gRNA
tcccgagtagcatagtctgc

SEQ ID NO: 40655 - DNA, 20 bp, Artificial Sequence
  MKO10040655_A_Phc3
  gRNA
cttgcatcggccccccagct

SEQ ID NO: 40656 - DNA, 20 bp, Artificial Sequence
  MKO10040656_A_Phc3
  gRNA
atggatagtgagccgagctc

SEQ ID NO: 40657 - DNA, 20 bp, Artificial Sequence
  MKO10040657_A_Phex
  gRNA
cagaattgctgtattgaccg

SEQ ID NO: 40658 - DNA, 20 bp, Artificial Sequence
  MKO10040658_A_Phex
  gRNA
ttaccggcttctatgcattc

SEQ ID NO: 40659 - DNA, 20 bp, Artificial Sequence
  MKO10040659_A_Phex
  gRNA
gaaacttacccttcaacttg

SEQ ID NO: 40660 - DNA, 20 bp, Artificial Sequence
  MKO10040660_A_Phf10
  gRNA
acctggatatttccgcttga

SEQ ID NO: 40661 - DNA, 20 bp, Artificial Sequence
  MKO10040661_A_Phf10
  gRNA
gcgacgagatttatctcaca

SEQ ID NO: 40662 - DNA, 20 bp, Artificial Sequence
  MKO10040662_A_Phf10
  gRNA
gaatattcagcgtgtttagc

SEQ ID NO: 40663 - DNA, 20 bp, Artificial Sequence
  MKO10040663_A_Phf11a
  gRNA
tgagcaactatattcgctga

SEQ ID NO: 40664 - DNA, 20 bp, Artificial Sequence
  MKO10040664_A_Phf11a
  gRNA
ggactgtaaatcatatccca

SEQ ID NO: 40665 - DNA, 20 bp, Artificial Sequence
  MKO10040665_A_Phf11a
  gRNA
ctgtccaatcatagagaaga

SEQ ID NO: 40666 - DNA, 20 bp, Artificial Sequence
  MKO10040666_A_Phf11b
  gRNA
tcaaagtttctaattgtatt

SEQ ID NO: 40667 - DNA, 20 bp, Artificial Sequence
  MKO10040667_A_Phf11b
  gRNA
ctgtccaatcatagaaaaga

SEQ ID NO: 40668 - DNA, 20 bp, Artificial Sequence
  MKO10040668_A_Phf11b
  gRNA
tgagcaactatatttcctga

SEQ ID NO: 40669 - DNA, 20 bp, Artificial Sequence
  MKO10040669_A_Phf11c
  gRNA
gactacgcagttctacaagg

SEQ ID NO: 40670 - DNA, 20 bp, Artificial Sequence
  MKO10040670_A_Phf11c
  gRNA
tgtttcaccacaccttacga

SEQ ID NO: 40671 - DNA, 20 bp, Artificial Sequence
  MKO10040671_A_Phf11c
  gRNA
tgttgatgtgaaatcagtac

SEQ ID NO: 40672 - DNA, 20 bp, Artificial Sequence
  MKO10040672_A_Phf11d
  gRNA
ccactatgtctgtgccaaaa

SEQ ID NO: 40673 - DNA, 20 bp, Artificial Sequence
  MKO10040673_A_Phf11d
  gRNA
ccaccgtggggtgtgattta

SEQ ID NO: 40674 - DNA, 20 bp, Artificial Sequence
  MKO10040674_A_Phf11d
  gRNA
agtatatttgactccactcg

SEQ ID NO: 40675 - DNA, 20 bp, Artificial Sequence
  MKO10040675_A_Phf12
  gRNA
ccggtgtactgtccgccgaa

SEQ ID NO: 40676 - DNA, 20 bp, Artificial Sequence
  MKO10040676_A_Phf12
  gRNA
tgagcataatgacgtcgatg

SEQ ID NO: 40677 - DNA, 20 bp, Artificial Sequence
  MKO10040677_A_Phf12
  gRNA
cctttcggcggacagtacac

SEQ ID NO: 40678 - DNA, 20 bp, Artificial Sequence
  MKO10040678_A_Phf13
  gRNA
ttcgggaccggttggagcga

SEQ ID NO: 40679 - DNA, 20 bp, Artificial Sequence
  MKO10040679_A_Phf13
  gRNA
gcactcgttacactcgatca

SEQ ID NO: 40680 - DNA, 20 bp, Artificial Sequence
  MKO10040680_A_Phf13
  gRNA
tcccggcagtgctgttggcg

SEQ ID NO: 40681 - DNA, 20 bp, Artificial Sequence
  MKO10040681_A_Phf14
  gRNA
cagtggatcgcagctccaag

SEQ ID NO: 40682 - DNA, 20 bp, Artificial Sequence
  MKO10040682_A_Phf14
  gRNA
tcgtcggaaccgtcccctgt

SEQ ID NO: 40683 - DNA, 20 bp, Artificial Sequence
  MKO10040683_A_Phf14
  gRNA
ccgacgaagattccatttct

SEQ ID NO: 40684 - DNA, 20 bp, Artificial Sequence
  MKO10040684_A_Phf19
  gRNA
cgccatcgccaagacgctgc

SEQ ID NO: 40685 - DNA, 20 bp, Artificial Sequence
  MKO10040685_A_Phf19
  gRNA
ccagtgcgaaaatgcagcgt

SEQ ID NO: 40686 - DNA, 20 bp, Artificial Sequence
  MKO10040686_A_Phf19
  gRNA
gagtcccaatcgagttcctc

SEQ ID NO: 40687 - DNA, 20 bp, Artificial Sequence
  MKO10040687_A_Phf1
  gRNA
tgtctttgcaatcgccacta

SEQ ID NO: 40688 - DNA, 20 bp, Artificial Sequence
  MKO10040688_A_Phf1
  gRNA
tgtgtgtcgctctgagaccg

SEQ ID NO: 40689 - DNA, 20 bp, Artificial Sequence
  MKO10040689_A_Phf1
  gRNA
ccctgggaacgtgacagtcc

SEQ ID NO: 40690 - DNA, 20 bp, Artificial Sequence
  MKO10040690_A_Phf20l1
  gRNA
cacgatccagctgggtcgat

SEQ ID NO: 40691 - DNA, 20 bp, Artificial Sequence
  MKO10040691_A_Phf20l1
  gRNA
gatatgatgagtggatttac

SEQ ID NO: 40692 - DNA, 20 bp, Artificial Sequence
  MKO10040692_A_Phf20l1
  gRNA
tgttgtcctatcgacccagc

SEQ ID NO: 40693 - DNA, 20 bp, Artificial Sequence
  MKO10040693_A_Phf20
  gRNA
ggagtactcccgctcgttct

SEQ ID NO: 40694 - DNA, 20 bp, Artificial Sequence
  MKO10040694_A_Phf20
  gRNA
ttctctaaagggcgcagata

SEQ ID NO: 40695 - DNA, 20 bp, Artificial Sequence
  MKO10040695_A_Phf20
  gRNA
agactcacccgtaggagtta

SEQ ID NO: 40696 - DNA, 20 bp, Artificial Sequence
  MKO10040696_A_Phf21a
  gRNA
gcctagtctaactgcatcac

SEQ ID NO: 40697 - DNA, 20 bp, Artificial Sequence
  MKO10040697_A_Phf21a
  gRNA
gatggagttgcagactctac

SEQ ID NO: 40698 - DNA, 20 bp, Artificial Sequence
  MKO10040698_A_Phf21a
  gRNA
actggttgcccaaatgaagc

SEQ ID NO: 40699 - DNA, 20 bp, Artificial Sequence
  MKO10040699_A_Phf21b
  gRNA
tcgctgagcgctgcgatccg

SEQ ID NO: 40700 - DNA, 20 bp, Artificial Sequence
  MKO10040700_A_Phf21b
  gRNA
cggtccctgcccggggtgac

SEQ ID NO: 40701 - DNA, 20 bp, Artificial Sequence
  MKO10040701_A_Phf21b
  gRNA
ctgcactttgatgccgtcgc

SEQ ID NO: 40702 - DNA, 20 bp, Artificial Sequence
  MKO10040702_A_Phf23
  gRNA
aatcatgggccgccccgcaa

SEQ ID NO: 40703 - DNA, 20 bp, Artificial Sequence
  MKO10040703_A_Phf23
  gRNA
aacttcggccagaggcccgg

SEQ ID NO: 40704 - DNA, 20 bp, Artificial Sequence
  MKO10040704_A_Phf23
  gRNA
ccttcagagtgcactgtaac

SEQ ID NO: 40705 - DNA, 20 bp, Artificial Sequence
  MKO10040705_A_Phf2
  gRNA
tcacgttgagaacacgcttg

SEQ ID NO: 40706 - DNA, 20 bp, Artificial Sequence
  MKO10040706_A_Phf2
  gRNA
ttcacgtccggtgttggccc

SEQ ID NO: 40707 - DNA, 20 bp, Artificial Sequence
  MKO10040707_A_Phf2
  gRNA
gccaggtagccagctcaccg

SEQ ID NO: 40708 - DNA, 20 bp, Artificial Sequence
  MKO10040708_A_Phf3
  gRNA
ggccgtctggtcaccttcgc

SEQ ID NO: 40709 - DNA, 20 bp, Artificial Sequence
  MKO10040709_A_Phf3
  gRNA
ggttggctcaacttgcgaag

SEQ ID NO: 40710 - DNA, 20 bp, Artificial Sequence
  MKO10040710_A_Phf3
  gRNA
ttctcctttggcgaggctgc

SEQ ID NO: 40711 - DNA, 20 bp, Artificial Sequence
  MKO10040711_A_Phf5a
  gRNA
ggccgccacagattacacac

SEQ ID NO: 40712 - DNA, 20 bp, Artificial Sequence
  MKO10040712_A_Phf5a
  gRNA
cagggccggtgtgtaatctg

SEQ ID NO: 40713 - DNA, 20 bp, Artificial Sequence
  MKO10040713_A_Phf5a
  gRNA
ttctatgaacgcaaaaaata

SEQ ID NO: 40714 - DNA, 20 bp, Artificial Sequence
  MKO10040714_A_Phf6
  gRNA
tacatgtaaatcccttgcga

SEQ ID NO: 40715 - DNA, 20 bp, Artificial Sequence
  MKO10040715_A_Phf6
  gRNA
atccgagagaaaccttcgca

SEQ ID NO: 40716 - DNA, 20 bp, Artificial Sequence
  MKO10040716_A_Phf6
  gRNA
ccgagaaaaactaaccttaa

SEQ ID NO: 40717 - DNA, 20 bp, Artificial Sequence
  MKO10040717_A_Phf7
  gRNA
ggcagtacgggcttctaaga

SEQ ID NO: 40718 - DNA, 20 bp, Artificial Sequence
  MKO10040718_A_Phf7
  gRNA
cttctatgccttcaagaacc

SEQ ID NO: 40719 - DNA, 20 bp, Artificial Sequence
  MKO10040719_A_Phf7
  gRNA
caggttcttgaaggcataga

SEQ ID NO: 40720 - DNA, 20 bp, Artificial Sequence
  MKO10040720_A_Phf8
  gRNA
ggtttagtgaaaaaacgtcg

SEQ ID NO: 40721 - DNA, 20 bp, Artificial Sequence
  MKO10040721_A_Phf8
  gRNA
gatcgagtgtgacatgtgcc

SEQ ID NO: 40722 - DNA, 20 bp, Artificial Sequence
  MKO10040722_A_Phf8
  gRNA
catcataaggcagtcgacag

SEQ ID NO: 40723 - DNA, 20 bp, Artificial Sequence
  MKO10040723_A_Phgdh
  gRNA
tgggtctttagcacccccaa

SEQ ID NO: 40724 - DNA, 20 bp, Artificial Sequence
  MKO10040724_A_Phgdh
  gRNA
ttcttacaggcagattcccc

SEQ ID NO: 40725 - DNA, 20 bp, Artificial Sequence
  MKO10040725_A_Phgdh
  gRNA
ccagaacttacttcatgact

SEQ ID NO: 40726 - DNA, 20 bp, Artificial Sequence
  MKO10040726_A_Phgr1
  gRNA
tggccagggtgtggaccacc

SEQ ID NO: 40727 - DNA, 20 bp, Artificial Sequence
  MKO10040727_A_Phgr1
  gRNA
gctttccacaggggcattgt

SEQ ID NO: 40728 - DNA, 20 bp, Artificial Sequence
  MKO10040728_A_Phgr1
  gRNA
catgagggacatcaccctcc

SEQ ID NO: 40729 - DNA, 20 bp, Artificial Sequence
  MKO10040729_A_Phip
  gRNA
gcaggtgctgatccgcgaag

SEQ ID NO: 40730 - DNA, 20 bp, Artificial Sequence
  MKO10040730_A_Phip
  gRNA
gtgctccttcccggtccagt

SEQ ID NO: 40731 - DNA, 20 bp, Artificial Sequence
  MKO10040731_A_Phip
  gRNA
cttccaggaaccgggcgatg

SEQ ID NO: 40732 - DNA, 20 bp, Artificial Sequence
  MKO10040732_A_Phka1
  gRNA
tccgcctggacggctatgct

SEQ ID NO: 40733 - DNA, 20 bp, Artificial Sequence
  MKO10040733_A_Phka1
  gRNA
catgaggagccgcagtaact

SEQ ID NO: 40734 - DNA, 20 bp, Artificial Sequence
  MKO10040734_A_Phka1
  gRNA
caaggcaaaggcctatgaac

SEQ ID NO: 40735 - DNA, 20 bp, Artificial Sequence
  MKO10040735_A_Phka2
  gRNA
ccagcctcgcgtacccgtcc

SEQ ID NO: 40736 - DNA, 20 bp, Artificial Sequence
  MKO10040736_A_Phka2
  gRNA
aacgtagtgaagctgatgcg

SEQ ID NO: 40737 - DNA, 20 bp, Artificial Sequence
  MKO10040737_A_Phka2
  gRNA
atagatattgtcccgtaccc

SEQ ID NO: 40738 - DNA, 20 bp, Artificial Sequence
  MKO10040738_A_Phkb
  gRNA
gggccttggcgctagcatac

SEQ ID NO: 40739 - DNA, 20 bp, Artificial Sequence
  MKO10040739_A_Phkb
  gRNA
gtacagactctcgtgcactt

SEQ ID NO: 40740 - DNA, 20 bp, Artificial Sequence
  MKO10040740_A_Phkb
  gRNA
caggcgcattgatgatgaca

SEQ ID NO: 40741 - DNA, 20 bp, Artificial Sequence
  MKO10040741_A_Phkg1
  gRNA
ggtgtcccgagaccttctgc

SEQ ID NO: 40742 - DNA, 20 bp, Artificial Sequence
  MKO10040742_A_Phkg1
  gRNA
ttccgtttcagtacagctga

SEQ ID NO: 40743 - DNA, 20 bp, Artificial Sequence
  MKO10040743_A_Phkg1
  gRNA
ccttaaccgagaaggaaacc

SEQ ID NO: 40744 - DNA, 20 bp, Artificial Sequence
  MKO10040744_A_Phkg2
  gRNA
aatgtgcatctctcgccgtg

SEQ ID NO: 40745 - DNA, 20 bp, Artificial Sequence
  MKO10040745_A_Phkg2
  gRNA
tagctcgatggacacagcgg

SEQ ID NO: 40746 - DNA, 20 bp, Artificial Sequence
  MKO10040746_A_Phkg2
  gRNA
gtctcgatgtacaatgttgt

SEQ ID NO: 40747 - DNA, 20 bp, Artificial Sequence
  MKO10040747_A_Phlda1
  gRNA
gcccattgaaaagcgccgcg

SEQ ID NO: 40748 - DNA, 20 bp, Artificial Sequence
  MKO10040748_A_Phlda1
  gRNA
caagttaatgaggcgtacgc

SEQ ID NO: 40749 - DNA, 20 bp, Artificial Sequence
  MKO10040749_A_Phlda1
  gRNA
ccgggatcttgtggcgagtc

SEQ ID NO: 40750 - DNA, 20 bp, Artificial Sequence
  MKO10040750_A_Phlda2
  gRNA
gatcgacttccgctgcacgg

SEQ ID NO: 40751 - DNA, 20 bp, Artificial Sequence
  MKO10040751_A_Phlda2
  gRNA
gaaagtcttgcagcgcccga

SEQ ID NO: 40752 - DNA, 20 bp, Artificial Sequence
  MKO10040752_A_Phlda2
  gRNA
tctccagctcgccctcgcaa

SEQ ID NO: 40753 - DNA, 20 bp, Artificial Sequence
  MKO10040753_A_Phlda3
  gRNA
cgctgcgtgctcaccgagcg

SEQ ID NO: 40754 - DNA, 20 bp, Artificial Sequence
  MKO10040754_A_Phlda3
  gRNA
ggtgctctctacgcactcca

SEQ ID NO: 40755 - DNA, 20 bp, Artificial Sequence
  MKO10040755_A_Phlda3
  gRNA
cgctgccccctcgaagaccc

SEQ ID NO: 40756 - DNA, 20 bp, Artificial Sequence
  MKO10040756_A_Phldb1
  gRNA
tagcgcccgccgttagccat

SEQ ID NO: 40757 - DNA, 20 bp, Artificial Sequence
  MKO10040757_A_Phldb1
  gRNA
cagtcctgccgctaccgtct

SEQ ID NO: 40758 - DNA, 20 bp, Artificial Sequence
  MKO10040758_A_Phldb1
  gRNA
cggctggatggttaaagcgc

SEQ ID NO: 40759 - DNA, 20 bp, Artificial Sequence
  MKO10040759_A_Phldb2
  gRNA
caggtcgtcgcgtcccgaga

SEQ ID NO: 40760 - DNA, 20 bp, Artificial Sequence
  MKO10040760_A_Phldb2
  gRNA
aggatttgtggtacgttccc

SEQ ID NO: 40761 - DNA, 20 bp, Artificial Sequence
  MKO10040761_A_Phldb2
  gRNA
atgatgggggcgtcctagtg

SEQ ID NO: 40762 - DNA, 20 bp, Artificial Sequence
  MKO10040762_A_Phldb3
  gRNA
gggaacgagtggccgctcgc

SEQ ID NO: 40763 - DNA, 20 bp, Artificial Sequence
  MKO10040763_A_Phldb3
  gRNA
tgcagcccaacgcacctatg

SEQ ID NO: 40764 - DNA, 20 bp, Artificial Sequence
  MKO10040764_A_Phldb3
  gRNA
ctgcgcggcaggcgtagcct

SEQ ID NO: 40765 - DNA, 20 bp, Artificial Sequence
  MKO10040765_A_Phlpp1
  gRNA
agctgaacgctaaacagtgc

SEQ ID NO: 40766 - DNA, 20 bp, Artificial Sequence
  MKO10040766_A_Phlpp1
  gRNA
tccgtgaaagacagcgtgag

SEQ ID NO: 40767 - DNA, 20 bp, Artificial Sequence
  MKO10040767_A_Phlpp1
  gRNA
tctgagcggattcagctctc

SEQ ID NO: 40768 - DNA, 20 bp, Artificial Sequence
  MKO10040768_A_Phlpp2
  gRNA
tgaagatcccgtgcgcatac

SEQ ID NO: 40769 - DNA, 20 bp, Artificial Sequence
  MKO10040769_A_Phlpp2
  gRNA
ttcgatccagatgatccatc

SEQ ID NO: 40770 - DNA, 20 bp, Artificial Sequence
  MKO10040770_A_Phlpp2
  gRNA
ccagcacatatttctgacgc

SEQ ID NO: 40771 - DNA, 20 bp, Artificial Sequence
  MKO10040771_A_Phospho1
  gRNA
cgtcagcagtccccgcgcgt

SEQ ID NO: 40772 - DNA, 20 bp, Artificial Sequence
  MKO10040772_A_Phospho1
  gRNA
tggtctcgtagacagcgcgc

SEQ ID NO: 40773 - DNA, 20 bp, Artificial Sequence
  MKO10040773_A_Phospho1
  gRNA
aggcatcgtagtccaacagc

SEQ ID NO: 40774 - DNA, 20 bp, Artificial Sequence
  MKO10040774_A_Phospho2
  gRNA
tatacacggattgtttatat

SEQ ID NO: 40775 - DNA, 20 bp, Artificial Sequence
  MKO10040775_A_Phospho2
  gRNA
gagacgaccactgctatcaa

SEQ ID NO: 40776 - DNA, 20 bp, Artificial Sequence
  MKO10040776_A_Phospho2
  gRNA
tgtaaagtatatccttcccg

SEQ ID NO: 40777 - DNA, 20 bp, Artificial Sequence
  MKO10040777_A_Phox2a
  gRNA
caattcgtacgattcgtgcg

SEQ ID NO: 40778 - DNA, 20 bp, Artificial Sequence
  MKO10040778_A_Phox2a
  gRNA
cgcacgaatcgtacgaattg

SEQ ID NO: 40779 - DNA, 20 bp, Artificial Sequence
  MKO10040779_A_Phox2a
  gRNA
gggcgaggcgcgttgctcgt

SEQ ID NO: 40780 - DNA, 20 bp, Artificial Sequence
  MKO10040780_A_Phox2b
  gRNA
cagagcagtccgtacgccgc

SEQ ID NO: 40781 - DNA, 20 bp, Artificial Sequence
  MKO10040781_A_Phox2b
  gRNA
cgaacccggcaagggcggtg

SEQ ID NO: 40782 - DNA, 20 bp, Artificial Sequence
  MKO10040782_A_Phox2b
  gRNA
cggtccttacctgcggcgta

SEQ ID NO: 40783 - DNA, 20 bp, Artificial Sequence
  MKO10040783_A_Phpt1
  gRNA
acacgtgtatggctactcta

SEQ ID NO: 40784 - DNA, 20 bp, Artificial Sequence
  MKO10040784_A_Phpt1
  gRNA
gggaacatggcggcggacct

SEQ ID NO: 40785 - DNA, 20 bp, Artificial Sequence
  MKO10040785_A_Phpt1
  gRNA
ggatccggcgaaggagtgca

SEQ ID NO: 40786 - DNA, 20 bp, Artificial Sequence
  MKO10040786_A_Phrf1
  gRNA
tgtattcgtgcccagtttaa

SEQ ID NO: 40787 - DNA, 20 bp, Artificial Sequence
  MKO10040787_A_Phrf1
  gRNA
ctgtgtgacggctgcgatgc

SEQ ID NO: 40788 - DNA, 20 bp, Artificial Sequence
  MKO10040788_A_Phrf1
  gRNA
ttaaatactgttcgatcaac

SEQ ID NO: 40789 - DNA, 20 bp, Artificial Sequence
  MKO10040789_A_Phtf1
  gRNA
cagttcccatgagtagcata

SEQ ID NO: 40790 - DNA, 20 bp, Artificial Sequence
  MKO10040790_A_Phtf1
  gRNA
aatcgaacagactcagatta

SEQ ID NO: 40791 - DNA, 20 bp, Artificial Sequence
  MKO10040791_A_Phtf1
  gRNA
gagtcgacacaatctgacag

SEQ ID NO: 40792 - DNA, 20 bp, Artificial Sequence
  MKO10040792_A_Phtf2
  gRNA
atcgatgttgatcttgtgag

SEQ ID NO: 40793 - DNA, 20 bp, Artificial Sequence
  MKO10040793_A_Phtf2
  gRNA
tcacaagatcaacatcgatg

SEQ ID NO: 40794 - DNA, 20 bp, Artificial Sequence
  MKO10040794_A_Phtf2
  gRNA
gtgttcttgttgaaacaatc

SEQ ID NO: 40795 - DNA, 20 bp, Artificial Sequence
  MKO10040795_A_Phyhd1
  gRNA
ccctaccttcttgagttgtg

SEQ ID NO: 40796 - DNA, 20 bp, Artificial Sequence
  MKO10040796_A_Phyhd1
  gRNA
acagactacttcttgagcag

SEQ ID NO: 40797 - DNA, 20 bp, Artificial Sequence
  MKO10040797_A_Phyhd1
  gRNA
ctcaccgatcctctgctgca

SEQ ID NO: 40798 - DNA, 20 bp, Artificial Sequence
  MKO10040798_A_Phyhipl
  gRNA
gcgtccgacactgatgttac

SEQ ID NO: 40799 - DNA, 20 bp, Artificial Sequence
  MKO10040799_A_Phyhipl
  gRNA
cccaatactaacttatactt

SEQ ID NO: 40800 - DNA, 20 bp, Artificial Sequence
  MKO10040800_A_Phyhipl
  gRNA
cctttgccaatgactgttcg

SEQ ID NO: 40801 - DNA, 20 bp, Artificial Sequence
  MKO10040801_A_Phyhip
  gRNA
gctgatcttccgccacgctc

SEQ ID NO: 40802 - DNA, 20 bp, Artificial Sequence
  MKO10040802_A_Phyhip
  gRNA
gggaccgcttctgtcgtgac

SEQ ID NO: 40803 - DNA, 20 bp, Artificial Sequence
  MKO10040803_A_Phyhip
  gRNA
gtgactctttccgtatctcc

SEQ ID NO: 40804 - DNA, 20 bp, Artificial Sequence
  MKO10040804_A_Phyh
  gRNA
ggataataatgtcctcaccc

SEQ ID NO: 40805 - DNA, 20 bp, Artificial Sequence
  MKO10040805_A_Phyh
  gRNA
tttcactggacccaatatta

SEQ ID NO: 40806 - DNA, 20 bp, Artificial Sequence
  MKO10040806_A_Phyh
  gRNA
taggtagcccagcctgtatc

SEQ ID NO: 40807 - DNA, 20 bp, Artificial Sequence
  MKO10040807_A_Phykpl
  gRNA
ctacctgcatgacaacatcg

SEQ ID NO: 40808 - DNA, 20 bp, Artificial Sequence
  MKO10040808_A_Phykpl
  gRNA
ccacgttgttgatacagtcc

SEQ ID NO: 40809 - DNA, 20 bp, Artificial Sequence
  MKO10040809_A_Phykpl
  gRNA
gttaagattatccgaggcca

SEQ ID NO: 40810 - DNA, 20 bp, Artificial Sequence
  MKO10040810_A_Pi15
  gRNA
cggtgtcccatgcgatgctt

SEQ ID NO: 40811 - DNA, 20 bp, Artificial Sequence
  MKO10040811_A_Pi15
  gRNA
aagcatcgcatgggacaccg

SEQ ID NO: 40812 - DNA, 20 bp, Artificial Sequence
  MKO10040812_A_Pi15
  gRNA
tgggccacttctaatcgaat

SEQ ID NO: 40813 - DNA, 20 bp, Artificial Sequence
  MKO10040813_A_Pi16
  gRNA
gccacaacaaagaacgcggg

SEQ ID NO: 40814 - DNA, 20 bp, Artificial Sequence
  MKO10040814_A_Pi16
  gRNA
ccacttctgcgagacgctcc

SEQ ID NO: 40815 - DNA, 20 bp, Artificial Sequence
  MKO10040815_A_Pi16
  gRNA
gccgcccgcgttctttgttg

SEQ ID NO: 40816 - DNA, 20 bp, Artificial Sequence
  MKO10040816_A_Pi4k2a
  gRNA
ccgaatcggcctgccaccaa

SEQ ID NO: 40817 - DNA, 20 bp, Artificial Sequence
  MKO10040817_A_Pi4k2a
  gRNA
ttaaaccgctgcccaacttt

SEQ ID NO: 40818 - DNA, 20 bp, Artificial Sequence
  MKO10040818_A_Pi4k2a
  gRNA
gactacatcatccgcaacac

SEQ ID NO: 40819 - DNA, 20 bp, Artificial Sequence
  MKO10040819_A_Pi4k2b
  gRNA
gcccgctaccgacgagccgc

SEQ ID NO: 40820 - DNA, 20 bp, Artificial Sequence
  MKO10040820_A_Pi4k2b
  gRNA
gtggaccaagtacgtccata

SEQ ID NO: 40821 - DNA, 20 bp, Artificial Sequence
  MKO10040821_A_Pi4k2b
  gRNA
attgaccgtgcaaaatcaag

SEQ ID NO: 40822 - DNA, 20 bp, Artificial Sequence
  MKO10040822_A_Pi4ka
  gRNA
atgggatcgcatacttgcaa

SEQ ID NO: 40823 - DNA, 20 bp, Artificial Sequence
  MKO10040823_A_Pi4ka
  gRNA
tatgcgatcccatgcctgat

SEQ ID NO: 40824 - DNA, 20 bp, Artificial Sequence
  MKO10040824_A_Pi4ka
  gRNA
gcttacctcatccctaagtg

SEQ ID NO: 40825 - DNA, 20 bp, Artificial Sequence
  MKO10040825_A_Pi4kb
  gRNA
cagaccgtgtactccgaatt

SEQ ID NO: 40826 - DNA, 20 bp, Artificial Sequence
  MKO10040826_A_Pi4kb
  gRNA
ggctccctacctgatctacg

SEQ ID NO: 40827 - DNA, 20 bp, Artificial Sequence
  MKO10040827_A_Pi4kb
  gRNA
ataagctccctgcccgagtc

SEQ ID NO: 40828 - DNA, 20 bp, Artificial Sequence
  MKO10040828_A_Pianp
  gRNA
acaacctgccgacgtgatct

SEQ ID NO: 40829 - DNA, 20 bp, Artificial Sequence
  MKO10040829_A_Pianp
  gRNA
atcgccctcaccggttcaac

SEQ ID NO: 40830 - DNA, 20 bp, Artificial Sequence
  MKO10040830_A_Pianp
  gRNA
aaatccaggattgaccgagt

SEQ ID NO: 40831 - DNA, 20 bp, Artificial Sequence
  MKO10040831_A_Pias1
  gRNA
ttggggatagacaagtccgc

SEQ ID NO: 40832 - DNA, 20 bp, Artificial Sequence
  MKO10040832_A_Pias1
  gRNA
cagcgtagcccaacagtact

SEQ ID NO: 40833 - DNA, 20 bp, Artificial Sequence
  MKO10040833_A_Pias1
  gRNA
cagacaacagccagcgcttt

SEQ ID NO: 40834 - DNA, 20 bp, Artificial Sequence
  MKO10040834_A_Pias2
  gRNA
tgaggtgtaattgaagtcga

SEQ ID NO: 40835 - DNA, 20 bp, Artificial Sequence
  MKO10040835_A_Pias2
  gRNA
tatatagacgccgataccca

SEQ ID NO: 40836 - DNA, 20 bp, Artificial Sequence
  MKO10040836_A_Pias2
  gRNA
gttatcttcttgagggcaac

SEQ ID NO: 40837 - DNA, 20 bp, Artificial Sequence
  MKO10040837_A_Pias3
  gRNA
tgggcggaaacacgagctgc

SEQ ID NO: 40838 - DNA, 20 bp, Artificial Sequence
  MKO10040838_A_Pias3
  gRNA
tgcagcagattctcacgtcc

SEQ ID NO: 40839 - DNA, 20 bp, Artificial Sequence
  MKO10040839_A_Pias3
  gRNA
agatcaaagaactttatcgc

SEQ ID NO: 40840 - DNA, 20 bp, Artificial Sequence
  MKO10040840_A_Pias4
  gRNA
gcatcttcgcgctaacacct

SEQ ID NO: 40841 - DNA, 20 bp, Artificial Sequence
  MKO10040841_A_Pias4
  gRNA
agcttaaccaggcgtacctc

SEQ ID NO: 40842 - DNA, 20 bp, Artificial Sequence
  MKO10040842_A_Pias4
  gRNA
ggtgttagcgcgaagatgca

SEQ ID NO: 40843 - DNA, 20 bp, Artificial Sequence
  MKO10040843_A_Pibf1
  gRNA
ttgcttctgtcgcaataaaa

SEQ ID NO: 40844 - DNA, 20 bp, Artificial Sequence
  MKO10040844_A_Pibf1
  gRNA
acaaaacagttagttcagca

SEQ ID NO: 40845 - DNA, 20 bp, Artificial Sequence
  MKO10040845_A_Pibf1
  gRNA
gctcgtgaacccattaagaa

SEQ ID NO: 40846 - DNA, 20 bp, Artificial Sequence
  MKO10040846_A_Picalm
  gRNA
aacaaactgtccgccaactg

SEQ ID NO: 40847 - DNA, 20 bp, Artificial Sequence
  MKO10040847_A_Picalm
  gRNA
ccagcgtttcattcagtatt

SEQ ID NO: 40848 - DNA, 20 bp, Artificial Sequence
  MKO10040848_A_Picalm
  gRNA
cattacaactcatcatttga

SEQ ID NO: 40849 - DNA, 20 bp, Artificial Sequence
  MKO10040849_A_Pick1
  gRNA
ctccgatgctgatcccaatc

SEQ ID NO: 40850 - DNA, 20 bp, Artificial Sequence
  MKO10040850_A_Pick1
  gRNA
agccgcgccatcctgtgtaa

SEQ ID NO: 40851 - DNA, 20 bp, Artificial Sequence
  MKO10040851_A_Pick1
  gRNA
ggacttaccgttacacagga

SEQ ID NO: 40852 - DNA, 20 bp, Artificial Sequence
  MKO10040852_A_Pid1
  gRNA
ccggatctctaggagggcgt

SEQ ID NO: 40853 - DNA, 20 bp, Artificial Sequence
  MKO10040853_A_Pid1
  gRNA
tgagccccaacatcttcgcc

SEQ ID NO: 40854 - DNA, 20 bp, Artificial Sequence
  MKO10040854_A_Pid1
  gRNA
tatgagtccttgccttcatc

SEQ ID NO: 40855 - DNA, 20 bp, Artificial Sequence
  MKO10040855_A_Piezo1
  gRNA
agagagcattgaagcgtaac

SEQ ID NO: 40856 - DNA, 20 bp, Artificial Sequence
  MKO10040856_A_Piezo1
  gRNA
acgcttcaatgctctctcgc

SEQ ID NO: 40857 - DNA, 20 bp, Artificial Sequence
  MKO10040857_A_Piezo1
  gRNA
tcctcgtgaggcgtccacag

SEQ ID NO: 40858 - DNA, 20 bp, Artificial Sequence
  MKO10040858_A_Piezo2
  gRNA
gcaatgaacatcccgatatc

SEQ ID NO: 40859 - DNA, 20 bp, Artificial Sequence
  MKO10040859_A_Piezo2
  gRNA
caatcacagcatgtgcgttc

SEQ ID NO: 40860 - DNA, 20 bp, Artificial Sequence
  MKO10040860_A_Piezo2
  gRNA
gaaaagaccttccggcagat

SEQ ID NO: 40861 - DNA, 20 bp, Artificial Sequence
  MKO10040861_A_Pif1
  gRNA
tctcgtcaatgaccaaacgt

SEQ ID NO: 40862 - DNA, 20 bp, Artificial Sequence
  MKO10040862_A_Pif1
  gRNA
tcactcataggcatcggctc

SEQ ID NO: 40863 - DNA, 20 bp, Artificial Sequence
  MKO10040863_A_Pif1
  gRNA
accacccttcatgcctttgc

SEQ ID NO: 40864 - DNA, 20 bp, Artificial Sequence
  MKO10040864_A_Pifo
  gRNA
cctcgcttgacgtgttccaa

SEQ ID NO: 40865 - DNA, 20 bp, Artificial Sequence
  MKO10040865_A_Pifo
  gRNA
aatagcatagcctttcgtac

SEQ ID NO: 40866 - DNA, 20 bp, Artificial Sequence
  MKO10040866_A_Pifo
  gRNA
tttgctgcactcctaaatcg

SEQ ID NO: 40867 - DNA, 20 bp, Artificial Sequence
  MKO10040867_A_Piga
  gRNA
ggtgtatgagcgagtgtcga

SEQ ID NO: 40868 - DNA, 20 bp, Artificial Sequence
  MKO10040868_A_Piga
  gRNA
gcaaacatgtagcccgtcac

SEQ ID NO: 40869 - DNA, 20 bp, Artificial Sequence
  MKO10040869_A_Piga
  gRNA
tcttaaggtcgtcagcacaa

SEQ ID NO: 40870 - DNA, 20 bp, Artificial Sequence
  MKO10040870_A_Pigb
  gRNA
aaggctcgaggtccgtgaac

SEQ ID NO: 40871 - DNA, 20 bp, Artificial Sequence
  MKO10040871_A_Pigb
  gRNA
cctcgaagttgcacaccgca

SEQ ID NO: 40872 - DNA, 20 bp, Artificial Sequence
  MKO10040872_A_Pigb
  gRNA
gttaagtattcgcagagcga

SEQ ID NO: 40873 - DNA, 20 bp, Artificial Sequence
  MKO10040873_A_Pigc
  gRNA
tacagacactatctacgcca

SEQ ID NO: 40874 - DNA, 20 bp, Artificial Sequence
  MKO10040874_A_Pigc
  gRNA
tacaccccgcgaagctatgt

SEQ ID NO: 40875 - DNA, 20 bp, Artificial Sequence
  MKO10040875_A_Pigc
  gRNA
gtcactccacgccttcatta

SEQ ID NO: 40876 - DNA, 20 bp, Artificial Sequence
  MKO10040876_A_Pigf
  gRNA
gcgacctttggctacgtggc

SEQ ID NO: 40877 - DNA, 20 bp, Artificial Sequence
  MKO10040877_A_Pigf
  gRNA
cacggtctttcccaatccag

SEQ ID NO: 40878 - DNA, 20 bp, Artificial Sequence
  MKO10040878_A_Pigf
  gRNA
cttgcagagttacatctatt

SEQ ID NO: 40879 - DNA, 20 bp, Artificial Sequence
  MKO10040879_A_Pigg
  gRNA
tatgccctacacaacgtatc

SEQ ID NO: 40880 - DNA, 20 bp, Artificial Sequence
  MKO10040880_A_Pigg
  gRNA
ttctaccagatacgttgtgt

SEQ ID NO: 40881 - DNA, 20 bp, Artificial Sequence
  MKO10040881_A_Pigg
  gRNA
gactctcttacccagtttgc

SEQ ID NO: 40882 - DNA, 20 bp, Artificial Sequence
  MKO10040882_A_Pigh
  gRNA
tcaccgtactgccgcgagtt

SEQ ID NO: 40883 - DNA, 20 bp, Artificial Sequence
  MKO10040883_A_Pigh
  gRNA
taggcggccgccgcagatat

SEQ ID NO: 40884 - DNA, 20 bp, Artificial Sequence
  MKO10040884_A_Pigh
  gRNA
ctactaatcatcgactcact

SEQ ID NO: 40885 - DNA, 20 bp, Artificial Sequence
  MKO10040885_A_Pigk
  gRNA
aggtgtgcacatcccgattc

SEQ ID NO: 40886 - DNA, 20 bp, Artificial Sequence
  MKO10040886_A_Pigk
  gRNA
gcctacctcgatgtgtccag

SEQ ID NO: 40887 - DNA, 20 bp, Artificial Sequence
  MKO10040887_A_Pigk
  gRNA
ctctgccgctggacacatcg

SEQ ID NO: 40888 - DNA, 20 bp, Artificial Sequence
  MKO10040888_A_Pigl
  gRNA
tccgtgtcccactgcacttc

SEQ ID NO: 40889 - DNA, 20 bp, Artificial Sequence
  MKO10040889_A_Pigl
  gRNA
gtgtaatgattattgacaag

SEQ ID NO: 40890 - DNA, 20 bp, Artificial Sequence
  MKO10040890_A_Pigl
  gRNA
tcttgtcaataatcattaca

SEQ ID NO: 40891 - DNA, 20 bp, Artificial Sequence
  MKO10040891_A_Pigm
  gRNA
gcgtgcgccgcggtgttcta

SEQ ID NO: 40892 - DNA, 20 bp, Artificial Sequence
  MKO10040892_A_Pigm
  gRNA
acgctcgtcatcgtcgcgct

SEQ ID NO: 40893 - DNA, 20 bp, Artificial Sequence
  MKO10040893_A_Pigm
  gRNA
gcgacgatgacgagcgtctc

SEQ ID NO: 40894 - DNA, 20 bp, Artificial Sequence
  MKO10040894_A_Pign
  gRNA
atgctcatcgaccatcgtca

SEQ ID NO: 40895 - DNA, 20 bp, Artificial Sequence
  MKO10040895_A_Pign
  gRNA
tgcccacgatgccacaaaac

SEQ ID NO: 40896 - DNA, 20 bp, Artificial Sequence
  MKO10040896_A_Pign
  gRNA
tggccaggccgagattctgt

SEQ ID NO: 40897 - DNA, 20 bp, Artificial Sequence
  MKO10040897_A_Pigo
  gRNA
ccacagtggacggcggttcg

SEQ ID NO: 40898 - DNA, 20 bp, Artificial Sequence
  MKO10040898_A_Pigo
  gRNA
cgagacttgggctagcgcag

SEQ ID NO: 40899 - DNA, 20 bp, Artificial Sequence
  MKO10040899_A_Pigo
  gRNA
cttactcacgggtaggatag

SEQ ID NO: 40900 - DNA, 20 bp, Artificial Sequence
  MKO10040900_A_Pigp
  gRNA
tcctcgcctcagagggtccg

SEQ ID NO: 40901 - DNA, 20 bp, Artificial Sequence
  MKO10040901_A_Pigp
  gRNA
gactccattcatacgatcac

SEQ ID NO: 40902 - DNA, 20 bp, Artificial Sequence
  MKO10040902_A_Pigp
  gRNA
cgtacctgtgatcgtatgaa

SEQ ID NO: 40903 - DNA, 20 bp, Artificial Sequence
  MKO10040903_A_Pigq
  gRNA
ctccacagcaataaccgaat

SEQ ID NO: 40904 - DNA, 20 bp, Artificial Sequence
  MKO10040904_A_Pigq
  gRNA
cgattcatcttgagcccagc

SEQ ID NO: 40905 - DNA, 20 bp, Artificial Sequence
  MKO10040905_A_Pigq
  gRNA
ggcgatgatatccgaaaaga

SEQ ID NO: 40906 - DNA, 20 bp, Artificial Sequence
  MKO10040906_A_Pigr
  gRNA
cttcacaacagagcgacgat

SEQ ID NO: 40907 - DNA, 20 bp, Artificial Sequence
  MKO10040907_A_Pigr
  gRNA
gaccctgaacccggtcagta

SEQ ID NO: 40908 - DNA, 20 bp, Artificial Sequence
  MKO10040908_A_Pigr
  gRNA
agtagaatttgcacggatag

SEQ ID NO: 40909 - DNA, 20 bp, Artificial Sequence
  MKO10040909_A_Pigs
  gRNA
aaagcgcggaacgcttgccc

SEQ ID NO: 40910 - DNA, 20 bp, Artificial Sequence
  MKO10040910_A_Pigs
  gRNA
ggaagacgacggagacttac

SEQ ID NO: 40911 - DNA, 20 bp, Artificial Sequence
  MKO10040911_A_Pigs
  gRNA
gatctctcgctcatgcacaa

SEQ ID NO: 40912 - DNA, 20 bp, Artificial Sequence
  MKO10040912_A_Pigt
  gRNA
aaaagccttgcgtgaacgac

SEQ ID NO: 40913 - DNA, 20 bp, Artificial Sequence
  MKO10040913_A_Pigt
  gRNA
ctccacctgtcgttcacgca

SEQ ID NO: 40914 - DNA, 20 bp, Artificial Sequence
  MKO10040914_A_Pigt
  gRNA
tcaccattggccagtcccag

SEQ ID NO: 40915 - DNA, 20 bp, Artificial Sequence
  MKO10040915_A_Pigu
  gRNA
cctaattgactatgcagaat

SEQ ID NO: 40916 - DNA, 20 bp, Artificial Sequence
  MKO10040916_A_Pigu
  gRNA
ggttgaaggccttgcactgt

SEQ ID NO: 40917 - DNA, 20 bp, Artificial Sequence
  MKO10040917_A_Pigu
  gRNA
ctgggagtgtctccatattc

SEQ ID NO: 40918 - DNA, 20 bp, Artificial Sequence
  MKO10040918_A_Pigv
  gRNA
agccgtgctcagcgataaac

SEQ ID NO: 40919 - DNA, 20 bp, Artificial Sequence
  MKO10040919_A_Pigv
  gRNA
gccccatggcgctgaacgtc

SEQ ID NO: 40920 - DNA, 20 bp, Artificial Sequence
  MKO10040920_A_Pigv
  gRNA
tcatgaaactcttctacgat

SEQ ID NO: 40921 - DNA, 20 bp, Artificial Sequence
  MKO10040921_A_Pigw
  gRNA
tactaatcgcacaactatga

SEQ ID NO: 40922 - DNA, 20 bp, Artificial Sequence
  MKO10040922_A_Pigw
  gRNA
cttcttaaatgctaaccgag

SEQ ID NO: 40923 - DNA, 20 bp, Artificial Sequence
  MKO10040923_A_Pigw
  gRNA
gttccagtgaatgccgtact

SEQ ID NO: 40924 - DNA, 20 bp, Artificial Sequence
  MKO10040924_A_Pigx
  gRNA
agcgacgcccctttcagcgc

SEQ ID NO: 40925 - DNA, 20 bp, Artificial Sequence
  MKO10040925_A_Pigx
  gRNA
cggtgatagcgatagtgcac

SEQ ID NO: 40926 - DNA, 20 bp, Artificial Sequence
  MKO10040926_A_Pigx
  gRNA
ggcgagcctgccgaccagcc

SEQ ID NO: 40927 - DNA, 20 bp, Artificial Sequence
  MKO10040927_A_Pigyl
  gRNA
agatggaagaacacgtacac

SEQ ID NO: 40928 - DNA, 20 bp, Artificial Sequence
  MKO10040928_A_Pigyl
  gRNA
gaagccttcctccacggagg

SEQ ID NO: 40929 - DNA, 20 bp, Artificial Sequence
  MKO10040929_A_Pigyl
  gRNA
catgaccgtcctcatcccac

SEQ ID NO: 40930 - DNA, 20 bp, Artificial Sequence
  MKO10040930_A_Pigz
  gRNA
cggtggcacagatatcttct

SEQ ID NO: 40931 - DNA, 20 bp, Artificial Sequence
  MKO10040931_A_Pigz
  gRNA
ccgtgcgtgtgtgccgtgcc

SEQ ID NO: 40932 - DNA, 20 bp, Artificial Sequence
  MKO10040932_A_Pigz
  gRNA
gacaccataagacacgaagc

SEQ ID NO: 40933 - DNA, 20 bp, Artificial Sequence
  MKO10040933_A_Pih1d1
  gRNA
cttgcatccagctccgcgtg

SEQ ID NO: 40934 - DNA, 20 bp, Artificial Sequence
  MKO10040934_A_Pih1d1
  gRNA
gctattgacagcgacgtcat

SEQ ID NO: 40935 - DNA, 20 bp, Artificial Sequence
  MKO10040935_A_Pih1d1
  gRNA
aacctttccttccgatgagt

SEQ ID NO: 40936 - DNA, 20 bp, Artificial Sequence
  MKO10040936_A_Pih1d2
  gRNA
acaacctttaattcgtacgc

SEQ ID NO: 40937 - DNA, 20 bp, Artificial Sequence
  MKO10040937_A_Pih1d2
  gRNA
gagctgaaagtcgagttacc

SEQ ID NO: 40938 - DNA, 20 bp, Artificial Sequence
  MKO10040938_A_Pih1d2
  gRNA
ctaaaagcgatgacgagaac

SEQ ID NO: 40939 - DNA, 20 bp, Artificial Sequence
  MKO10040939_A_Pih1d3
  gRNA
tctcctcaatcccgaagaag

SEQ ID NO: 40940 - DNA, 20 bp, Artificial Sequence
  MKO10040940_A_Pih1d3
  gRNA
ctcatttactattggagcca

SEQ ID NO: 40941 - DNA, 20 bp, Artificial Sequence
  MKO10040941_A_Pih1d3
  gRNA
ggagactggatagtgcttga

SEQ ID NO: 40942 - DNA, 20 bp, Artificial Sequence
  MKO10040942_A_Pik3ap1
  gRNA
cagccggaccgcattcgctg

SEQ ID NO: 40943 - DNA, 20 bp, Artificial Sequence
  MKO10040943_A_Pik3ap1
  gRNA
cagggatgcgcgatgcgtgc

SEQ ID NO: 40944 - DNA, 20 bp, Artificial Sequence
  MKO10040944_A_Pik3ap1
  gRNA
cgtcagctattataccgaca

SEQ ID NO: 40945 - DNA, 20 bp, Artificial Sequence
  MKO10040945_A_Pik3c2a
  gRNA
ttactgttcgagccagattc

SEQ ID NO: 40946 - DNA, 20 bp, Artificial Sequence
  MKO10040946_A_Pik3c2a
  gRNA
ccatcacatgtaaaagtaac

SEQ ID NO: 40947 - DNA, 20 bp, Artificial Sequence
  MKO10040947_A_Pik3c2a
  gRNA
atattcaaaattgtcgaaaa

SEQ ID NO: 40948 - DNA, 20 bp, Artificial Sequence
  MKO10040948_A_Pik3c2b
  gRNA
ggatatcagagcccgttcga

SEQ ID NO: 40949 - DNA, 20 bp, Artificial Sequence
  MKO10040949_A_Pik3c2b
  gRNA
tatcaaacttgcggcaatat

SEQ ID NO: 40950 - DNA, 20 bp, Artificial Sequence
  MKO10040950_A_Pik3c2b
  gRNA
cgacacgtaccgtccgggcc

SEQ ID NO: 40951 - DNA, 20 bp, Artificial Sequence
  MKO10040951_A_Pik3c2g
  gRNA
atcctgccgaagatcatctc

SEQ ID NO: 40952 - DNA, 20 bp, Artificial Sequence
  MKO10040952_A_Pik3c2g
  gRNA
tacaggccggagatgatctt

SEQ ID NO: 40953 - DNA, 20 bp, Artificial Sequence
  MKO10040953_A_Pik3c2g
  gRNA
aggctgctacgggatgccca

SEQ ID NO: 40954 - DNA, 20 bp, Artificial Sequence
  MKO10040954_A_Pik3c3
  gRNA
tctcgtagcatgtttcgcca

SEQ ID NO: 40955 - DNA, 20 bp, Artificial Sequence
  MKO10040955_A_Pik3c3
  gRNA
ggaacaaccgtgtcgctctt

SEQ ID NO: 40956 - DNA, 20 bp, Artificial Sequence
  MKO10040956_A_Pik3c3
  gRNA
tcttgtactaaacgccttgt

SEQ ID NO: 40957 - DNA, 20 bp, Artificial Sequence
  MKO10040957_A_Pik3ca
  gRNA
gcgcactatttatgacccag

SEQ ID NO: 40958 - DNA, 20 bp, Artificial Sequence
  MKO10040958_A_Pik3ca
  gRNA
tcaccatgccgtcatactcc

SEQ ID NO: 40959 - DNA, 20 bp, Artificial Sequence
  MKO10040959_A_Pik3ca
  gRNA
cagaagtccaagactttcga

SEQ ID NO: 40960 - DNA, 20 bp, Artificial Sequence
  MKO10040960_A_Pik3cb
  gRNA
acggacggctcgtgctcagg

SEQ ID NO: 40961 - DNA, 20 bp, Artificial Sequence
  MKO10040961_A_Pik3cb
  gRNA
tgagcacgagccgtccgtcc

SEQ ID NO: 40962 - DNA, 20 bp, Artificial Sequence
  MKO10040962_A_Pik3cb
  gRNA
cagaaacgcctcactattcg

SEQ ID NO: 40963 - DNA, 20 bp, Artificial Sequence
  MKO10040963_A_Pik3cd
  gRNA
gtgcggaagtcgtttacttc

SEQ ID NO: 40964 - DNA, 20 bp, Artificial Sequence
  MKO10040964_A_Pik3cd
  gRNA
tcgggccacgaggcgcagca

SEQ ID NO: 40965 - DNA, 20 bp, Artificial Sequence
  MKO10040965_A_Pik3cd
  gRNA
agttaatgagcttcttcacg

SEQ ID NO: 40966 - DNA, 20 bp, Artificial Sequence
  MKO10040966_A_Pik3cg
  gRNA
accgtaccacgacagtgcgc

SEQ ID NO: 40967 - DNA, 20 bp, Artificial Sequence
  MKO10040967_A_Pik3cg
  gRNA
atcctggaggcgtacctgcg

SEQ ID NO: 40968 - DNA, 20 bp, Artificial Sequence
  MKO10040968_A_Pik3cg
  gRNA
atctggccagcgcactgtcg

SEQ ID NO: 40969 - DNA, 20 bp, Artificial Sequence
  MKO10040969_A_Pik3ip1
  gRNA
cttgcgcggccaaccagttg

SEQ ID NO: 40970 - DNA, 20 bp, Artificial Sequence
  MKO10040970_A_Pik3ip1
  gRNA
tgggctcggtgagcgactcg

SEQ ID NO: 40971 - DNA, 20 bp, Artificial Sequence
  MKO10040971_A_Pik3ip1
  gRNA
tgggcaactcacgtcctcgc

SEQ ID NO: 40972 - DNA, 20 bp, Artificial Sequence
  MKO10040972_A_Pik3r1
  gRNA
agatgcgtctcgtaccaaaa

SEQ ID NO: 40973 - DNA, 20 bp, Artificial Sequence
  MKO10040973_A_Pik3r1
  gRNA
ggagtacacccgtacttccc

SEQ ID NO: 40974 - DNA, 20 bp, Artificial Sequence
  MKO10040974_A_Pik3r1
  gRNA
gtgaattacctgctggtatt

SEQ ID NO: 40975 - DNA, 20 bp, Artificial Sequence
  MKO10040975_A_Pik3r2
  gRNA
ctgctgcgcatacctccgtc

SEQ ID NO: 40976 - DNA, 20 bp, Artificial Sequence
  MKO10040976_A_Pik3r2
  gRNA
ctctgcgggccacacgaccc

SEQ ID NO: 40977 - DNA, 20 bp, Artificial Sequence
  MKO10040977_A_Pik3r2
  gRNA
tccctaacctgtccgtgttg

SEQ ID NO: 40978 - DNA, 20 bp, Artificial Sequence
  MKO10040978_A_Pik3r3
  gRNA
cgtcagcttcacgtcgagtt

SEQ ID NO: 40979 - DNA, 20 bp, Artificial Sequence
  MKO10040979_A_Pik3r3
  gRNA
tggtcgtacctgttggaatc

SEQ ID NO: 40980 - DNA, 20 bp, Artificial Sequence
  MKO10040980_A_Pik3r3
  gRNA
tgatgcctcaacgaaaatgc

SEQ ID NO: 40981 - DNA, 20 bp, Artificial Sequence
  MKO10040981_A_Pik3r4
  gRNA
tagatattgacatcgttgcg

SEQ ID NO: 40982 - DNA, 20 bp, Artificial Sequence
  MKO10040982_A_Pik3r4
  gRNA
tatcgtgaaacagacgctga

SEQ ID NO: 40983 - DNA, 20 bp, Artificial Sequence
  MKO10040983_A_Pik3r4
  gRNA
tgacgctaccatcgtcagac

SEQ ID NO: 40984 - DNA, 20 bp, Artificial Sequence
  MKO10040984_A_Pik3r5
  gRNA
ctatgacctcctcgccccgc

SEQ ID NO: 40985 - DNA, 20 bp, Artificial Sequence
  MKO10040985_A_Pik3r5
  gRNA
ctgagcagggcctgcccgtc

SEQ ID NO: 40986 - DNA, 20 bp, Artificial Sequence
  MKO10040986_A_Pik3r5
  gRNA
gctcagccctcaccagccgc

SEQ ID NO: 40987 - DNA, 20 bp, Artificial Sequence
  MKO10040987_A_Pik3r6
  gRNA
tctaatgtccgtgctcacta

SEQ ID NO: 40988 - DNA, 20 bp, Artificial Sequence
  MKO10040988_A_Pik3r6
  gRNA
gcacagcctgtacactcctc

SEQ ID NO: 40989 - DNA, 20 bp, Artificial Sequence
  MKO10040989_A_Pik3r6
  gRNA
ccgaattctgctcagagagc

SEQ ID NO: 40990 - DNA, 20 bp, Artificial Sequence
  MKO10040990_A_Pikfyve
  gRNA
cgaagctgaacagctgtacg

SEQ ID NO: 40991 - DNA, 20 bp, Artificial Sequence
  MKO10040991_A_Pikfyve
  gRNA
caccggcgctcttcagtgtt

SEQ ID NO: 40992 - DNA, 20 bp, Artificial Sequence
  MKO10040992_A_Pikfyve
  gRNA
tacctaacactgaagagcgc

SEQ ID NO: 40993 - DNA, 20 bp, Artificial Sequence
  MKO10040993_A_Pilra
  gRNA
tctgaccagacccggtactt

SEQ ID NO: 40994 - DNA, 20 bp, Artificial Sequence
  MKO10040994_A_Pilra
  gRNA
caccattggtcacattgagt

SEQ ID NO: 40995 - DNA, 20 bp, Artificial Sequence
  MKO10040995_A_Pilra
  gRNA
agccgttgccaacccaactg

SEQ ID NO: 40996 - DNA, 20 bp, Artificial Sequence
  MKO10040996_A_Pilrb1
  gRNA
gattaactcgactaaagtac

SEQ ID NO: 40997 - DNA, 20 bp, Artificial Sequence
  MKO10040997_A_Pilrb1
  gRNA
caccttgggtcacgttgagt

SEQ ID NO: 40998 - DNA, 20 bp, Artificial Sequence
  MKO10040998_A_Pilrb1
  gRNA
tcatcagtgaaggattcctc

SEQ ID NO: 40999 - DNA, 20 bp, Artificial Sequence
  MKO10040999_A_Pilrb2
  gRNA
gtagtcataatcctagtcta

SEQ ID NO: 41000 - DNA, 20 bp, Artificial Sequence
  MKO10041000_A_Pilrb2
  gRNA
ttatgactacaactttagcc

SEQ ID NO: 41001 - DNA, 20 bp, Artificial Sequence
  MKO10041001_A_Pilrb2
  gRNA
ggtcagactccttaaagttc

SEQ ID NO: 41002 - DNA, 20 bp, Artificial Sequence
  MKO10041002_A_Pim1
  gRNA
ccgcgtcgccgacaacttgc

SEQ ID NO: 41003 - DNA, 20 bp, Artificial Sequence
  MKO10041003_A_Pim1
  gRNA
cgatgagtttgatttcgccg

SEQ ID NO: 41004 - DNA, 20 bp, Artificial Sequence
  MKO10041004_A_Pim1
  gRNA
cccactcaccggcaagttgt

SEQ ID NO: 41005 - DNA, 20 bp, Artificial Sequence
  MKO10041005_A_Pim2
  gRNA
cctgacgtctatccgtgacg

SEQ ID NO: 41006 - DNA, 20 bp, Artificial Sequence
  MKO10041006_A_Pim2
  gRNA
ttcgaggccgaataccgact

SEQ ID NO: 41007 - DNA, 20 bp, Artificial Sequence
  MKO10041007_A_Pim2
  gRNA
gtccagcactgccacgcccg

SEQ ID NO: 41008 - DNA, 20 bp, Artificial Sequence
  MKO10041008_A_Pim3
  gRNA
acgactcaccgggagtccgt

SEQ ID NO: 41009 - DNA, 20 bp, Artificial Sequence
  MKO10041009_A_Pim3
  gRNA
gcgaagaagcgacgcgccag

SEQ ID NO: 41010 - DNA, 20 bp, Artificial Sequence
  MKO10041010_A_Pim3
  gRNA
ggcgcgtcgcttcttcgcgc

SEQ ID NO: 41011 - DNA, 20 bp, Artificial Sequence
  MKO10041011_A_Pin1rt1
  gRNA
aggttactcctgagcgaaga

SEQ ID NO: 41012 - DNA, 20 bp, Artificial Sequence
  MKO10041012_A_Pin1rt1
  gRNA
ctcgtctgccatcttcgctc

SEQ ID NO: 41013 - DNA, 20 bp, Artificial Sequence
  MKO10041013_A_Pin1rt1
  gRNA
atctagtcagtgtattaagc

SEQ ID NO: 41014 - DNA, 20 bp, Artificial Sequence
  MKO10041014_A_Pin1
  gRNA
tccaacagtgctgccgccgc

SEQ ID NO: 41015 - DNA, 20 bp, Artificial Sequence
  MKO10041015_A_Pin1
  gRNA
aagcgtatgagtcgcagctc

SEQ ID NO: 41016 - DNA, 20 bp, Artificial Sequence
  MKO10041016_A_Pin1
  gRNA
cccagcggcggcagcactgt

SEQ ID NO: 41017 - DNA, 20 bp, Artificial Sequence
  MKO10041017_A_Pin4
  gRNA
tctaaaggaggtgcagcctc

SEQ ID NO: 41018 - DNA, 20 bp, Artificial Sequence
  MKO10041018_A_Pin4
  gRNA
agcttaagagatgccgccga

SEQ ID NO: 41019 - DNA, 20 bp, Artificial Sequence
  MKO10041019_A_Pin4
  gRNA
aaaagtggttctggaaaagg

SEQ ID NO: 41020 - DNA, 20 bp, Artificial Sequence
  MKO10041020_A_Pink1
  gRNA
gctggtcccggcaagccgcg

SEQ ID NO: 41021 - DNA, 20 bp, Artificial Sequence
  MKO10041021_A_Pink1
  gRNA
caagcgcgtgtctgacccac

SEQ ID NO: 41022 - DNA, 20 bp, Artificial Sequence
  MKO10041022_A_Pink1
  gRNA
tgtcggacttgagatcccga

SEQ ID NO: 41023 - DNA, 20 bp, Artificial Sequence
  MKO10041023_A_Pinlyp
  gRNA
tccacacgaaatttgccacg

SEQ ID NO: 41024 - DNA, 20 bp, Artificial Sequence
  MKO10041024_A_Pinlyp
  gRNA
aacccaggcagctcgctgcg

SEQ ID NO: 41025 - DNA, 20 bp, Artificial Sequence
  MKO10041025_A_Pinlyp
  gRNA
ttgtgctggactcgctcact

SEQ ID NO: 41026 - DNA, 20 bp, Artificial Sequence
  MKO10041026_A_Pinx1
  gRNA
ggaatcatcgttactccacg

SEQ ID NO: 41027 - DNA, 20 bp, Artificial Sequence
  MKO10041027_A_Pinx1
  gRNA
tggatcccagaaacaccgcg

SEQ ID NO: 41028 - DNA, 20 bp, Artificial Sequence
  MKO10041028_A_Pinx1
  gRNA
ggacaactggattgctcacc

SEQ ID NO: 41029 - DNA, 20 bp, Artificial Sequence
  MKO10041029_A_Pip4k2a
  gRNA
atgtaccggcttaatgtcga

SEQ ID NO: 41030 - DNA, 20 bp, Artificial Sequence
  MKO10041030_A_Pip4k2a
  gRNA
aatcgacgaccaagatttcc

SEQ ID NO: 41031 - DNA, 20 bp, Artificial Sequence
  MKO10041031_A_Pip4k2a
  gRNA
caaacctctcccgcagattc

SEQ ID NO: 41032 - DNA, 20 bp, Artificial Sequence
  MKO10041032_A_Pip4k2b
  gRNA
gcatcgcaaatacgacctga

SEQ ID NO: 41033 - DNA, 20 bp, Artificial Sequence
  MKO10041033_A_Pip4k2b
  gRNA
cagtcttgatgacgaaacgc

SEQ ID NO: 41034 - DNA, 20 bp, Artificial Sequence
  MKO10041034_A_Pip4k2b
  gRNA
gaggttcggcatcgatgacc

SEQ ID NO: 41035 - DNA, 20 bp, Artificial Sequence
  MKO10041035_A_Pip4k2c
  gRNA
catcgatgatcacgattact

SEQ ID NO: 41036 - DNA, 20 bp, Artificial Sequence
  MKO10041036_A_Pip4k2c
  gRNA
tatctcctatgaccgcactc

SEQ ID NO: 41037 - DNA, 20 bp, Artificial Sequence
  MKO10041037_A_Pip4k2c
  gRNA
caagtaatcgtgatcatcga

SEQ ID NO: 41038 - DNA, 20 bp, Artificial Sequence
  MKO10041038_A_Pip5k1a
  gRNA
catccggcctgatgattact

SEQ ID NO: 41039 - DNA, 20 bp, Artificial Sequence
  MKO10041039_A_Pip5k1a
  gRNA
cagtgtgagtgatgcctaac

SEQ ID NO: 41040 - DNA, 20 bp, Artificial Sequence
  MKO10041040_A_Pip5k1a
  gRNA
tgaatcgaaagtcattgtaa

SEQ ID NO: 41041 - DNA, 20 bp, Artificial Sequence
  MKO10041041_A_Pip5k1b
  gRNA
catcaaaaccgttcagcata

SEQ ID NO: 41042 - DNA, 20 bp, Artificial Sequence
  MKO10041042_A_Pip5k1b
  gRNA
tatcaagcccgatgattact

SEQ ID NO: 41043 - DNA, 20 bp, Artificial Sequence
  MKO10041043_A_Pip5k1b
  gRNA
ccccttaccatgtaatagcc

SEQ ID NO: 41044 - DNA, 20 bp, Artificial Sequence
  MKO10041044_A_Pip5k1c
  gRNA
gcgttcggccatggagctag

SEQ ID NO: 41045 - DNA, 20 bp, Artificial Sequence
  MKO10041045_A_Pip5k1c
  gRNA
cgaggcggagagcgccgaag

SEQ ID NO: 41046 - DNA, 20 bp, Artificial Sequence
  MKO10041046_A_Pip5k1c
  gRNA
ccaccgaggcgtggatgcgt

SEQ ID NO: 41047 - DNA, 20 bp, Artificial Sequence
  MKO10041047_A_Pip5kl1
  gRNA
tcccctacagggcttcgagc

SEQ ID NO: 41048 - DNA, 20 bp, Artificial Sequence
  MKO10041048_A_Pip5kl1
  gRNA
catgacccaagttcacgaag

SEQ ID NO: 41049 - DNA, 20 bp, Artificial Sequence
  MKO10041049_A_Pip5kl1
  gRNA
tgcccacctgccccgctatg

SEQ ID NO: 41050 - DNA, 20 bp, Artificial Sequence
  MKO10041050_A_Pipox
  gRNA
aagccggaacccagttacac

SEQ ID NO: 41051 - DNA, 20 bp, Artificial Sequence
  MKO10041051_A_Pipox
  gRNA
ccatgagtatctttcgtcag

SEQ ID NO: 41052 - DNA, 20 bp, Artificial Sequence
  MKO10041052_A_Pipox
  gRNA
acagagccgcataatcagaa

SEQ ID NO: 41053 - DNA, 20 bp, Artificial Sequence
  MKO10041053_A_Pip
  gRNA
gaatatctgtcctaatgata

SEQ ID NO: 41054 - DNA, 20 bp, Artificial Sequence
  MKO10041054_A_Pip
  gRNA
tagttgaaggcaccttccat

SEQ ID NO: 41055 - DNA, 20 bp, Artificial Sequence
  MKO10041055_A_Pip
  gRNA
cagtattataagtatagtac

SEQ ID NO: 41056 - DNA, 20 bp, Artificial Sequence
  MKO10041056_A_Pira11
  gRNA
gaacctgtgattgttgtgcc

SEQ ID NO: 41057 - DNA, 20 bp, Artificial Sequence
  MKO10041057_A_Pira11
  gRNA
tgcatccatgagagcttctg

SEQ ID NO: 41058 - DNA, 20 bp, Artificial Sequence
  MKO10041058_A_Pira11
  gRNA
cagagtacagccacactctg

SEQ ID NO: 41059 - DNA, 20 bp, Artificial Sequence
  MKO10041059_A_Pira1
  gRNA
gaacctgtgattgttgtgcc

SEQ ID NO: 41060 - DNA, 20 bp, Artificial Sequence
  MKO10041060_A_Pira1
  gRNA
tgcatccatgagagcttctg

SEQ ID NO: 41061 - DNA, 20 bp, Artificial Sequence
  MKO10041061_A_Pira1
  gRNA
cagagtacagccacactctg

SEQ ID NO: 41062 - DNA, 20 bp, Artificial Sequence
  MKO10041062_A_Pira2
  gRNA
ctacagtgaccccctgaagc

SEQ ID NO: 41063 - DNA, 20 bp, Artificial Sequence
  MKO10041063_A_Pira2
  gRNA
cacctgtcaccaccagcttc

SEQ ID NO: 41064 - DNA, 20 bp, Artificial Sequence
  MKO10041064_A_Pira2
  gRNA
caggactgactctgagcctc

SEQ ID NO: 41065 - DNA, 20 bp, Artificial Sequence
  MKO10041065_A_Pira4
  gRNA
gaacctgtgattgttgtgcc

SEQ ID NO: 41066 - DNA, 20 bp, Artificial Sequence
  MKO10041066_A_Pira4
  gRNA
tgcatccatgagagcttctg

SEQ ID NO: 41067 - DNA, 20 bp, Artificial Sequence
  MKO10041067_A_Pira4
  gRNA
cagagtacagccacactctg

SEQ ID NO: 41068 - DNA, 20 bp, Artificial Sequence
  MKO10041068_A_Pira6
  gRNA
tcagagcagcttcttcctgc

SEQ ID NO: 41069 - DNA, 20 bp, Artificial Sequence
  MKO10041069_A_Pira6
  gRNA
cataagttcccatctcctgc

SEQ ID NO: 41070 - DNA, 20 bp, Artificial Sequence
  MKO10041070_A_Pira6
  gRNA
attactgtccctccacatac

SEQ ID NO: 41071 - DNA, 20 bp, Artificial Sequence
  MKO10041071_A_Pira7
  gRNA
gaacctgtgattgttgtgcc

SEQ ID NO: 41072 - DNA, 20 bp, Artificial Sequence
  MKO10041072_A_Pira7
  gRNA
tgcatccatgagagcttctg

SEQ ID NO: 41073 - DNA, 20 bp, Artificial Sequence
  MKO10041073_A_Pira7
  gRNA
cagagtacagccacactctg

SEQ ID NO: 41074 - DNA, 20 bp, Artificial Sequence
  MKO10041074_A_Pirb
  gRNA
tgtgtccacgagagcttctg

SEQ ID NO: 41075 - DNA, 20 bp, Artificial Sequence
  MKO10041075_A_Pirb
  gRNA
gctggcttgggctaaaaggc

SEQ ID NO: 41076 - DNA, 20 bp, Artificial Sequence
  MKO10041076_A_Pirb
  gRNA
tctgtgacactacaacatgc

SEQ ID NO: 41077 - DNA, 20 bp, Artificial Sequence
  MKO10041077_A_Pirt
  gRNA
caaccagtcatcagcggttc

SEQ ID NO: 41078 - DNA, 20 bp, Artificial Sequence
  MKO10041078_A_Pirt
  gRNA
tgccattctgctctttggcg

SEQ ID NO: 41079 - DNA, 20 bp, Artificial Sequence
  MKO10041079_A_Pirt
  gRNA
aacaatggaggtgctcccca

SEQ ID NO: 41080 - DNA, 20 bp, Artificial Sequence
  MKO10041080_A_Pir
  gRNA
tttcctgatcatccacaccg

SEQ ID NO: 41081 - DNA, 20 bp, Artificial Sequence
  MKO10041081_A_Pir
  gRNA
atcccgaaacccaccaaaga

SEQ ID NO: 41082 - DNA, 20 bp, Artificial Sequence
  MKO10041082_A_Pir
  gRNA
ggatgatcaggaaatcctcc

SEQ ID NO: 41083 - DNA, 20 bp, Artificial Sequence
  MKO10041083_A_Pisd
  gRNA
cgcccaaacttgctagtcac

SEQ ID NO: 41084 - DNA, 20 bp, Artificial Sequence
  MKO10041084_A_Pisd
  gRNA
gggccctcgagccaatacag

SEQ ID NO: 41085 - DNA, 20 bp, Artificial Sequence
  MKO10041085_A_Pisd
  gRNA
ctcccagtgactagcaagtt

SEQ ID NO: 41086 - DNA, 20 bp, Artificial Sequence
  MKO10041086_A_Pithd1
  gRNA
ggatgatgactcgcacccct

SEQ ID NO: 41087 - DNA, 20 bp, Artificial Sequence
  MKO10041087_A_Pithd1
  gRNA
atacttacggaatattaaac

SEQ ID NO: 41088 - DNA, 20 bp, Artificial Sequence
  MKO10041088_A_Pithd1
  gRNA
acgggcaatgtcaagctgaa

SEQ ID NO: 41089 - DNA, 20 bp, Artificial Sequence
  MKO10041089_A_Pitpna
  gRNA
gagccctacgagaaggacga

SEQ ID NO: 41090 - DNA, 20 bp, Artificial Sequence
  MKO10041090_A_Pitpna
  gRNA
ctcgccatcgtccttctcgt

SEQ ID NO: 41091 - DNA, 20 bp, Artificial Sequence
  MKO10041091_A_Pitpna
  gRNA
acccacctttgttcgaatgc

SEQ ID NO: 41092 - DNA, 20 bp, Artificial Sequence
  MKO10041092_A_Pitpnb
  gRNA
tttgccgtgttctgttcaag

SEQ ID NO: 41093 - DNA, 20 bp, Artificial Sequence
  MKO10041093_A_Pitpnb
  gRNA
cagcttacttgttctgcagt

SEQ ID NO: 41094 - DNA, 20 bp, Artificial Sequence
  MKO10041094_A_Pitpnb
  gRNA
aatgaaccttatgaaaacga

SEQ ID NO: 41095 - DNA, 20 bp, Artificial Sequence
  MKO10041095_A_Pitpnc1
  gRNA
agaagcgagtgtatctcaac

SEQ ID NO: 41096 - DNA, 20 bp, Artificial Sequence
  MKO10041096_A_Pitpnc1
  gRNA
tattacccatacaccatcac

SEQ ID NO: 41097 - DNA, 20 bp, Artificial Sequence
  MKO10041097_A_Pitpnc1
  gRNA
gtaataattccacgccttct

SEQ ID NO: 41098 - DNA, 20 bp, Artificial Sequence
  MKO10041098_A_Pitpnm1
  gRNA
tgcatcccgcacgatgtcga

SEQ ID NO: 41099 - DNA, 20 bp, Artificial Sequence
  MKO10041099_A_Pitpnm1
  gRNA
gatgcttcgcgcccatcgcc

SEQ ID NO: 41100 - DNA, 20 bp, Artificial Sequence
  MKO10041100_A_Pitpnm1
  gRNA
cagataccatcgacatcgtg

SEQ ID NO: 41101 - DNA, 20 bp, Artificial Sequence
  MKO10041101_A_Pitpnm2
  gRNA
gacgcaccttgttcgggtat

SEQ ID NO: 41102 - DNA, 20 bp, Artificial Sequence
  MKO10041102_A_Pitpnm2
  gRNA
gtgtattgcccggagccgcc

SEQ ID NO: 41103 - DNA, 20 bp, Artificial Sequence
  MKO10041103_A_Pitpnm2
  gRNA
gctcatgctgtcccgcaaaa

SEQ ID NO: 41104 - DNA, 20 bp, Artificial Sequence
  MKO10041104_A_Pitpnm3
  gRNA
tgccagggggcaccgccacc

SEQ ID NO: 41105 - DNA, 20 bp, Artificial Sequence
  MKO10041105_A_Pitpnm3
  gRNA
acgctcatccagcttcccta

SEQ ID NO: 41106 - DNA, 20 bp, Artificial Sequence
  MKO10041106_A_Pitpnm3
  gRNA
gcggtgccccctggcacctt

SEQ ID NO: 41107 - DNA, 20 bp, Artificial Sequence
  MKO10041107_A_Pitrm1
  gRNA
cggatatatcgtgtaatcgc

SEQ ID NO: 41108 - DNA, 20 bp, Artificial Sequence
  MKO10041108_A_Pitrm1
  gRNA
accgtatgctcgagaacatg

SEQ ID NO: 41109 - DNA, 20 bp, Artificial Sequence
  MKO10041109_A_Pitrm1
  gRNA
gcagttccgcacaaccccaa

SEQ ID NO: 41110 - DNA, 20 bp, Artificial Sequence
  MKO10041110_A_Pitx1
  gRNA
tcgtccgacgctgatctgcc

SEQ ID NO: 41111 - DNA, 20 bp, Artificial Sequence
  MKO10041111_A_Pitx1
  gRNA
ggcagcgtacacgtcctcgt

SEQ ID NO: 41112 - DNA, 20 bp, Artificial Sequence
  MKO10041112_A_Pitx1
  gRNA
caagcgttgagccccgacgc

SEQ ID NO: 41113 - DNA, 20 bp, Artificial Sequence
  MKO10041113_A_Pitx2
  gRNA
agtcggcggcgcgtaaggac

SEQ ID NO: 41114 - DNA, 20 bp, Artificial Sequence
  MKO10041114_A_Pitx2
  gRNA
cgactcctccgtacgtttat

SEQ ID NO: 41115 - DNA, 20 bp, Artificial Sequence
  MKO10041115_A_Pitx2
  gRNA
accttacggaagcccgagtc

SEQ ID NO: 41116 - DNA, 20 bp, Artificial Sequence
  MKO10041116_A_Pitx3
  gRNA
ctgcggcggccgaggcgtaa

SEQ ID NO: 41117 - DNA, 20 bp, Artificial Sequence
  MKO10041117_A_Pitx3
  gRNA
gtgtacccgggctactcgta

SEQ ID NO: 41118 - DNA, 20 bp, Artificial Sequence
  MKO10041118_A_Pitx3
  gRNA
gagcacccgcgaagagatcg

SEQ ID NO: 41119 - DNA, 20 bp, Artificial Sequence
  MKO10041119_A_Piwil1
  gRNA
cgaggtgggcggcagctcgt

SEQ ID NO: 41120 - DNA, 20 bp, Artificial Sequence
  MKO10041120_A_Piwil1
  gRNA
cccgcacttaccttgtgact

SEQ ID NO: 41121 - DNA, 20 bp, Artificial Sequence
  MKO10041121_A_Piwil1
  gRNA
ccatccccctctgtcgtcct

SEQ ID NO: 41122 - DNA, 20 bp, Artificial Sequence
  MKO10041122_A_Piwil2
  gRNA
aaactgcttcgttatgacac

SEQ ID NO: 41123 - DNA, 20 bp, Artificial Sequence
  MKO10041123_A_Piwil2
  gRNA
tcgaggcttgtctgctaaca

SEQ ID NO: 41124 - DNA, 20 bp, Artificial Sequence
  MKO10041124_A_Piwil2
  gRNA
cattcctctgcctatactac

SEQ ID NO: 41125 - DNA, 20 bp, Artificial Sequence
  MKO10041125_A_Piwil4
  gRNA
ttgggaagagcttgctcgtt

SEQ ID NO: 41126 - DNA, 20 bp, Artificial Sequence
  MKO10041126_A_Piwil4
  gRNA
agatttgtaaccagccgcac

SEQ ID NO: 41127 - DNA, 20 bp, Artificial Sequence
  MKO10041127_A_Piwil4
  gRNA
tgatggtggacgtaccttca

SEQ ID NO: 41128 - DNA, 20 bp, Artificial Sequence
  MKO10041128_A_Pja1
  gRNA
gccatggttcgccgccgtct

SEQ ID NO: 41129 - DNA, 20 bp, Artificial Sequence
  MKO10041129_A_Pja1
  gRNA
cgattactaccgatactacg

SEQ ID NO: 41130 - DNA, 20 bp, Artificial Sequence
  MKO10041130_A_Pja1
  gRNA
atcccagcgacgacgtgtgc

SEQ ID NO: 41131 - DNA, 20 bp, Artificial Sequence
  MKO10041131_A_Pja2
  gRNA
tcacgctcgagtcgtcctca

SEQ ID NO: 41132 - DNA, 20 bp, Artificial Sequence
  MKO10041132_A_Pja2
  gRNA
gcgacaagacgatactgatc

SEQ ID NO: 41133 - DNA, 20 bp, Artificial Sequence
  MKO10041133_A_Pja2
  gRNA
ctcgagcgtgagtgaagact

SEQ ID NO: 41134 - DNA, 20 bp, Artificial Sequence
  MKO10041134_A_Pkd1l2
  gRNA
agctgcggctacatcgggag

SEQ ID NO: 41135 - DNA, 20 bp, Artificial Sequence
  MKO10041135_A_Pkd1l2
  gRNA
ggtgcccgtagaaagcatcc

SEQ ID NO: 41136 - DNA, 20 bp, Artificial Sequence
  MKO10041136_A_Pkd1l2
  gRNA
tgcaggggttggtcgcagcc

SEQ ID NO: 41137 - DNA, 20 bp, Artificial Sequence
  MKO10041137_A_Pkd1l3
  gRNA
caggaggtgatgacgtctta

SEQ ID NO: 41138 - DNA, 20 bp, Artificial Sequence
  MKO10041138_A_Pkd1l3
  gRNA
gcctggcgagtgcccttccg

SEQ ID NO: 41139 - DNA, 20 bp, Artificial Sequence
  MKO10041139_A_Pkd1l3
  gRNA
tgtgggctaggcgtcctctc

SEQ ID NO: 41140 - DNA, 20 bp, Artificial Sequence
  MKO10041140_A_Pkd1
  gRNA
tctggcgtggctgccacgct

SEQ ID NO: 41141 - DNA, 20 bp, Artificial Sequence
  MKO10041141_A_Pkd1
  gRNA
tggaatgggccccctgcacg

SEQ ID NO: 41142 - DNA, 20 bp, Artificial Sequence
  MKO10041142_A_Pkd1
  gRNA
gctaccctggtggggcccca

SEQ ID NO: 41143 - DNA, 20 bp, Artificial Sequence
  MKO10041143_A_Pkd2l1
  gRNA
actcacgctgtgccgttctg

SEQ ID NO: 41144 - DNA, 20 bp, Artificial Sequence
  MKO10041144_A_Pkd2l1
  gRNA
ctacacaccccatccgactc

SEQ ID NO: 41145 - DNA, 20 bp, Artificial Sequence
  MKO10041145_A_Pkd2l1
  gRNA
ctgttatgatgtgtactcgc

SEQ ID NO: 41146 - DNA, 20 bp, Artificial Sequence
  MKO10041146_A_Pkd2l2
  gRNA
actcgcagttgccgcactct

SEQ ID NO: 41147 - DNA, 20 bp, Artificial Sequence
  MKO10041147_A_Pkd2l2
  gRNA
cccagtacaagccgtcgatg

SEQ ID NO: 41148 - DNA, 20 bp, Artificial Sequence
  MKO10041148_A_Pkd2l2
  gRNA
tttgttggcgtataccgaga

SEQ ID NO: 41149 - DNA, 20 bp, Artificial Sequence
  MKO10041149_A_Pkd2
  gRNA
gggatcattgcgtcgtacag

SEQ ID NO: 41150 - DNA, 20 bp, Artificial Sequence
  MKO10041150_A_Pkd2
  gRNA
taaaagctgcccgcgtgccc

SEQ ID NO: 41151 - DNA, 20 bp, Artificial Sequence
  MKO10041151_A_Pkd2
  gRNA
acgcacgcagttccattccg

SEQ ID NO: 41152 - DNA, 20 bp, Artificial Sequence
  MKO10041152_A_Pkdcc
  gRNA
gcgctacacttgttccgaag

SEQ ID NO: 41153 - DNA, 20 bp, Artificial Sequence
  MKO10041153_A_Pkdcc
  gRNA
tggcattgacgatgctatcc

SEQ ID NO: 41154 - DNA, 20 bp, Artificial Sequence
  MKO10041154_A_Pkdcc
  gRNA
tactcggaatcgatcctccc

SEQ ID NO: 41155 - DNA, 20 bp, Artificial Sequence
  MKO10041155_A_Pkdrej
  gRNA
gcatgatacagggggccgtc

SEQ ID NO: 41156 - DNA, 20 bp, Artificial Sequence
  MKO10041156_A_Pkdrej
  gRNA
tcatctgtcaccgtaccgac

SEQ ID NO: 41157 - DNA, 20 bp, Artificial Sequence
  MKO10041157_A_Pkdrej
  gRNA
accgtaaggttaaaactcga

SEQ ID NO: 41158 - DNA, 20 bp, Artificial Sequence
  MKO10041158_A_Pkhd1l1
  gRNA
ccacatcacaagtaatcgac

SEQ ID NO: 41159 - DNA, 20 bp, Artificial Sequence
  MKO10041159_A_Pkhd1l1
  gRNA
ccagtcgattacttgtgatg

SEQ ID NO: 41160 - DNA, 20 bp, Artificial Sequence
  MKO10041160_A_Pkhd1l1
  gRNA
ccgtttatgctgccatattt

SEQ ID NO: 41161 - DNA, 20 bp, Artificial Sequence
  MKO10041161_A_Pkhd1
  gRNA
tgacgtctctccggccttcg

SEQ ID NO: 41162 - DNA, 20 bp, Artificial Sequence
  MKO10041162_A_Pkhd1
  gRNA
taccttctgcgggttcaaac

SEQ ID NO: 41163 - DNA, 20 bp, Artificial Sequence
  MKO10041163_A_Pkhd1
  gRNA
gtacagctatctagtgatcc

SEQ ID NO: 41164 - DNA, 20 bp, Artificial Sequence
  MKO10041164_A_Pkia
  gRNA
agaagctccaccgaacaaag

SEQ ID NO: 41165 - DNA, 20 bp, Artificial Sequence
  MKO10041165_A_Pkia
  gRNA
cacctgtcttgttgatatca

SEQ ID NO: 41166 - DNA, 20 bp, Artificial Sequence
  MKO10041166_A_Pkia
  gRNA
ctgggcttctccactttgtt

SEQ ID NO: 41167 - DNA, 20 bp, Artificial Sequence
  MKO10041167_A_Pkib
  gRNA
tgtcgggtaaggcattgcgg

SEQ ID NO: 41168 - DNA, 20 bp, Artificial Sequence
  MKO10041168_A_Pkib
  gRNA
gataagcacgctgatgcccc

SEQ ID NO: 41169 - DNA, 20 bp, Artificial Sequence
  MKO10041169_A_Pkib
  gRNA
ggcatcagcgtgcttatcca

SEQ ID NO: 41170 - DNA, 20 bp, Artificial Sequence
  MKO10041170_A_Pkig
  gRNA
agcgagcttccgcacactca

SEQ ID NO: 41171 - DNA, 20 bp, Artificial Sequence
  MKO10041171_A_Pkig
  gRNA
actcggaggccgtgagtgtg

SEQ ID NO: 41172 - DNA, 20 bp, Artificial Sequence
  MKO10041172_A_Pkig
  gRNA
ccctgcagaaggacaggcag

SEQ ID NO: 41173 - DNA, 20 bp, Artificial Sequence
  MKO10041173_A_Pklr
  gRNA
ggccgcatctacattgacga

SEQ ID NO: 41174 - DNA, 20 bp, Artificial Sequence
  MKO10041174_A_Pklr
  gRNA
gcccgtcgtcaatgtagatg

SEQ ID NO: 41175 - DNA, 20 bp, Artificial Sequence
  MKO10041175_A_Pklr
  gRNA
aagggtcccgagatacgcac

SEQ ID NO: 41176 - DNA, 20 bp, Artificial Sequence
  MKO10041176_A_Pkmyt1
  gRNA
caaagaccgaactcgtaaac

SEQ ID NO: 41177 - DNA, 20 bp, Artificial Sequence
  MKO10041177_A_Pkmyt1
  gRNA
gcatccacactgcgtgagac

SEQ ID NO: 41178 - DNA, 20 bp, Artificial Sequence
  MKO10041178_A_Pkmyt1
  gRNA
acagggcccagcctcgactt

SEQ ID NO: 41179 - DNA, 20 bp, Artificial Sequence
  MKO10041179_A_Pkm
  gRNA
tccatagagcggcaccgctg

SEQ ID NO: 41180 - DNA, 20 bp, Artificial Sequence
  MKO10041180_A_Pkm
  gRNA
cattgactctgcccccatca

SEQ ID NO: 41181 - DNA, 20 bp, Artificial Sequence
  MKO10041181_A_Pkm
  gRNA
cgcccttgatgagtccagtc

SEQ ID NO: 41182 - DNA, 20 bp, Artificial Sequence
  MKO10041182_A_Pkn1
  gRNA
cagtaagtctaggcgtcgag

SEQ ID NO: 41183 - DNA, 20 bp, Artificial Sequence
  MKO10041183_A_Pkn1
  gRNA
agccgtagagctacgcattg

SEQ ID NO: 41184 - DNA, 20 bp, Artificial Sequence
  MKO10041184_A_Pkn1
  gRNA
gcagcttcgaagagcgctcc

SEQ ID NO: 41185 - DNA, 20 bp, Artificial Sequence
  MKO10041185_A_Pkn2
  gRNA
tacagcgcagcaactgctac

SEQ ID NO: 41186 - DNA, 20 bp, Artificial Sequence
  MKO10041186_A_Pkn2
  gRNA
ggccgtccagaccaatgagc

SEQ ID NO: 41187 - DNA, 20 bp, Artificial Sequence
  MKO10041187_A_Pkn2
  gRNA
gaactacgagagtcactatt

SEQ ID NO: 41188 - DNA, 20 bp, Artificial Sequence
  MKO10041188_A_Pkn3
  gRNA
ggtccgccgagccatccaga

SEQ ID NO: 41189 - DNA, 20 bp, Artificial Sequence
  MKO10041189_A_Pkn3
  gRNA
ggccacagaccgacgccacc

SEQ ID NO: 41190 - DNA, 20 bp, Artificial Sequence
  MKO10041190_A_Pkn3
  gRNA
ggaccgaaaggcactggccg

SEQ ID NO: 41191 - DNA, 20 bp, Artificial Sequence
  MKO10041191_A_Pknox1
  gRNA
ccgacaagcaggccatttat

SEQ ID NO: 41192 - DNA, 20 bp, Artificial Sequence
  MKO10041192_A_Pknox1
  gRNA
gacgtctgccagcttcgatg

SEQ ID NO: 41193 - DNA, 20 bp, Artificial Sequence
  MKO10041193_A_Pknox1
  gRNA
cctataaatggcctgcttgt

SEQ ID NO: 41194 - DNA, 20 bp, Artificial Sequence
  MKO10041194_A_Pknox2
  gRNA
tcatggcgatgttgccctgc

SEQ ID NO: 41195 - DNA, 20 bp, Artificial Sequence
  MKO10041195_A_Pknox2
  gRNA
aggtgatgcactcggagccc

SEQ ID NO: 41196 - DNA, 20 bp, Artificial Sequence
  MKO10041196_A_Pknox2
  gRNA
tgacacgacttgagaattga

SEQ ID NO: 41197 - DNA, 20 bp, Artificial Sequence
  MKO10041197_A_Pkp1
  gRNA
tgttgtcgggctcccgcttg

SEQ ID NO: 41198 - DNA, 20 bp, Artificial Sequence
  MKO10041198_A_Pkp1
  gRNA
tggagccggcactatccccg

SEQ ID NO: 41199 - DNA, 20 bp, Artificial Sequence
  MKO10041199_A_Pkp1
  gRNA
gaatggctcgtggggatatc

SEQ ID NO: 41200 - DNA, 20 bp, Artificial Sequence
  MKO10041200_A_Pkp2
  gRNA
ccctaggtcaatcaacttcg

SEQ ID NO: 41201 - DNA, 20 bp, Artificial Sequence
  MKO10041201_A_Pkp2
  gRNA
tcgctgaatgacccgcaccc

SEQ ID NO: 41202 - DNA, 20 bp, Artificial Sequence
  MKO10041202_A_Pkp2
  gRNA
agcgatgctgtcttcgacaa

SEQ ID NO: 41203 - DNA, 20 bp, Artificial Sequence
  MKO10041203_A_Pkp3
  gRNA
gccagcagtcgcggcacaat

SEQ ID NO: 41204 - DNA, 20 bp, Artificial Sequence
  MKO10041204_A_Pkp3
  gRNA
ctgtccagcccgcgtacatc

SEQ ID NO: 41205 - DNA, 20 bp, Artificial Sequence
  MKO10041205_A_Pkp3
  gRNA
cttccggcccatcgccaagc

SEQ ID NO: 41206 - DNA, 20 bp, Artificial Sequence
  MKO10041206_A_Pkp4
  gRNA
cgccaagcatcgccagcacc

SEQ ID NO: 41207 - DNA, 20 bp, Artificial Sequence
  MKO10041207_A_Pkp4
  gRNA
tcaacgactcacccgagaac

SEQ ID NO: 41208 - DNA, 20 bp, Artificial Sequence
  MKO10041208_A_Pkp4
  gRNA
aggaatgcccgcccctgaac

SEQ ID NO: 41209 - DNA, 20 bp, Artificial Sequence
  MKO10041209_A_Pla1a
  gRNA
ataaacttgtcgatccaaga

SEQ ID NO: 41210 - DNA, 20 bp, Artificial Sequence
  MKO10041210_A_Pla1a
  gRNA
cattagcatccgcagcccgc

SEQ ID NO: 41211 - DNA, 20 bp, Artificial Sequence
  MKO10041211_A_Pla1a
  gRNA
actctgaaagtccgtgcact

SEQ ID NO: 41212 - DNA, 20 bp, Artificial Sequence
  MKO10041212_A_Pla2g10
  gRNA
cctggacccggattcagcga

SEQ ID NO: 41213 - DNA, 20 bp, Artificial Sequence
  MKO10041213_A_Pla2g10
  gRNA
ctaagttagaccgctaccca

SEQ ID NO: 41214 - DNA, 20 bp, Artificial Sequence
  MKO10041214_A_Pla2g10
  gRNA
tcacttaccttcgctgaatc

SEQ ID NO: 41215 - DNA, 20 bp, Artificial Sequence
  MKO10041215_A_Pla2g12a
  gRNA
tctcgtagcatctgtcgtgc

SEQ ID NO: 41216 - DNA, 20 bp, Artificial Sequence
  MKO10041216_A_Pla2g12a
  gRNA
tcgaagcctgttccacgcta

SEQ ID NO: 41217 - DNA, 20 bp, Artificial Sequence
  MKO10041217_A_Pla2g12a
  gRNA
ggtatggcttgcagcctaaa

SEQ ID NO: 41218 - DNA, 20 bp, Artificial Sequence
  MKO10041218_A_Pla2g12b
  gRNA
tgcgtcacagcggtatttgt

SEQ ID NO: 41219 - DNA, 20 bp, Artificial Sequence
  MKO10041219_A_Pla2g12b
  gRNA
gctgtgacgcaaaattccga

SEQ ID NO: 41220 - DNA, 20 bp, Artificial Sequence
  MKO10041220_A_Pla2g12b
  gRNA
aaggcgccgatgcccagacc

SEQ ID NO: 41221 - DNA, 20 bp, Artificial Sequence
  MKO10041221_A_Pla2g15
  gRNA
tctcctcgatcatctctcgc

SEQ ID NO: 41222 - DNA, 20 bp, Artificial Sequence
  MKO10041222_A_Pla2g15
  gRNA
ccacggggcccccatacatc

SEQ ID NO: 41223 - DNA, 20 bp, Artificial Sequence
  MKO10041223_A_Pla2g15
  gRNA
cacccagtttcccgatggtg

SEQ ID NO: 41224 - DNA, 20 bp, Artificial Sequence
  MKO10041224_A_Pla2g16
  gRNA
tttgtgaatgaactacgcta

SEQ ID NO: 41225 - DNA, 20 bp, Artificial Sequence
  MKO10041225_A_Pla2g16
  gRNA
ggcggtaggcatcgctggag

SEQ ID NO: 41226 - DNA, 20 bp, Artificial Sequence
  MKO10041226_A_Pla2g16
  gRNA
cgtcatgtttgttattgacc

SEQ ID NO: 41227 - DNA, 20 bp, Artificial Sequence
  MKO10041227_A_Pla2g1b
  gRNA
cacctgtctaagtcgtccac

SEQ ID NO: 41228 - DNA, 20 bp, Artificial Sequence
  MKO10041228_A_Pla2g1b
  gRNA
ctccaaggtcccgtacaaca

SEQ ID NO: 41229 - DNA, 20 bp, Artificial Sequence
  MKO10041229_A_Pla2g1b
  gRNA
gctgcaggtgatctcgctcc

SEQ ID NO: 41230 - DNA, 20 bp, Artificial Sequence
  MKO10041230_A_Pla2g2a
  gRNA
caagggaacattgcgcagtt

SEQ ID NO: 41231 - DNA, 20 bp, Artificial Sequence
  MKO10041231_A_Pla2g2a
  gRNA
gctgctagcagcctcgatca

SEQ ID NO: 41232 - DNA, 20 bp, Artificial Sequence
  MKO10041232_A_Pla2g2a
  gRNA
gggggaatcctttgccaccc

SEQ ID NO: 41233 - DNA, 20 bp, Artificial Sequence
  MKO10041233_A_Pla2g2c
  gRNA
tcaagcagctcttcccgacc

SEQ ID NO: 41234 - DNA, 20 bp, Artificial Sequence
  MKO10041234_A_Pla2g2c
  gRNA
aggatggtcaaacacgtcac

SEQ ID NO: 41235 - DNA, 20 bp, Artificial Sequence
  MKO10041235_A_Pla2g2c
  gRNA
gtagcagccatatccgtaat

SEQ ID NO: 41236 - DNA, 20 bp, Artificial Sequence
  MKO10041236_A_Pla2g2d
  gRNA
ataagcgcctgcgttactac

SEQ ID NO: 41237 - DNA, 20 bp, Artificial Sequence
  MKO10041237_A_Pla2g2d
  gRNA
ggggccgccagtagtaacgc

SEQ ID NO: 41238 - DNA, 20 bp, Artificial Sequence
  MKO10041238_A_Pla2g2d
  gRNA
tcttgcatccatcgatcttc

SEQ ID NO: 41239 - DNA, 20 bp, Artificial Sequence
  MKO10041239_A_Pla2g2e
  gRNA
caccaatccgtctcgtccac

SEQ ID NO: 41240 - DNA, 20 bp, Artificial Sequence
  MKO10041240_A_Pla2g2e
  gRNA
ggctctcttgtcacactcgc

SEQ ID NO: 41241 - DNA, 20 bp, Artificial Sequence
  MKO10041241_A_Pla2g2e
  gRNA
acttgcggttgtaagtgttc

SEQ ID NO: 41242 - DNA, 20 bp, Artificial Sequence
  MKO10041242_A_Pla2g2f
  gRNA
ctacggctgctactgcgggc

SEQ ID NO: 41243 - DNA, 20 bp, Artificial Sequence
  MKO10041243_A_Pla2g2f
  gRNA
acgtggaccactatgaccac

SEQ ID NO: 41244 - DNA, 20 bp, Artificial Sequence
  MKO10041244_A_Pla2g2f
  gRNA
ccatacaggaacaagtaccg

SEQ ID NO: 41245 - DNA, 20 bp, Artificial Sequence
  MKO10041245_A_Pla2g3
  gRNA
accggcgggtgcaatcgcag

SEQ ID NO: 41246 - DNA, 20 bp, Artificial Sequence
  MKO10041246_A_Pla2g3
  gRNA
tcgcccttgcagtataacta

SEQ ID NO: 41247 - DNA, 20 bp, Artificial Sequence
  MKO10041247_A_Pla2g3
  gRNA
cgtggccttcttcaacgtgc

SEQ ID NO: 41248 - DNA, 20 bp, Artificial Sequence
  MKO10041248_A_Pla2g4a
  gRNA
gtactcacgcatatcgccaa

SEQ ID NO: 41249 - DNA, 20 bp, Artificial Sequence
  MKO10041249_A_Pla2g4a
  gRNA
ggtttcatccatgacgtagt

SEQ ID NO: 41250 - DNA, 20 bp, Artificial Sequence
  MKO10041250_A_Pla2g4a
  gRNA
ggacactccagatccttatg

SEQ ID NO: 41251 - DNA, 20 bp, Artificial Sequence
  MKO10041251_A_Pla2g4b
  gRNA
tgctcactgtacgcgtcctc

SEQ ID NO: 41252 - DNA, 20 bp, Artificial Sequence
  MKO10041252_A_Pla2g4b
  gRNA
ggcgctgagtcccaatttgc

SEQ ID NO: 41253 - DNA, 20 bp, Artificial Sequence
  MKO10041253_A_Pla2g4b
  gRNA
aaggcaagccactggcccgg

SEQ ID NO: 41254 - DNA, 20 bp, Artificial Sequence
  MKO10041254_A_Pla2g4c
  gRNA
gatgctgtcacatacctcgc

SEQ ID NO: 41255 - DNA, 20 bp, Artificial Sequence
  MKO10041255_A_Pla2g4c
  gRNA
gcacaccaagacaagcgatg

SEQ ID NO: 41256 - DNA, 20 bp, Artificial Sequence
  MKO10041256_A_Pla2g4c
  gRNA
tcgtagagcctccaaaacct

SEQ ID NO: 41257 - DNA, 20 bp, Artificial Sequence
  MKO10041257_A_Pla2g4d
  gRNA
catttaccttgacctgactc

SEQ ID NO: 41258 - DNA, 20 bp, Artificial Sequence
  MKO10041258_A_Pla2g4d
  gRNA
ctaactccagtcatcctgtg

SEQ ID NO: 41259 - DNA, 20 bp, Artificial Sequence
  MKO10041259_A_Pla2g4d
  gRNA
agctccacatctaactcttc

SEQ ID NO: 41260 - DNA, 20 bp, Artificial Sequence
  MKO10041260_A_Pla2g4e
  gRNA
acttacgtatatcagcctgc

SEQ ID NO: 41261 - DNA, 20 bp, Artificial Sequence
  MKO10041261_A_Pla2g4e
  gRNA
tcattggcatgaaaaacgtc

SEQ ID NO: 41262 - DNA, 20 bp, Artificial Sequence
  MKO10041262_A_Pla2g4e
  gRNA
gtgaagctttcgtcccactc

SEQ ID NO: 41263 - DNA, 20 bp, Artificial Sequence
  MKO10041263_A_Pla2g4f
  gRNA
cccacaccttcacagcgccg

SEQ ID NO: 41264 - DNA, 20 bp, Artificial Sequence
  MKO10041264_A_Pla2g4f
  gRNA
atactacgaccttcaagtga

SEQ ID NO: 41265 - DNA, 20 bp, Artificial Sequence
  MKO10041265_A_Pla2g4f
  gRNA
ccgactgctatgttcgactg

SEQ ID NO: 41266 - DNA, 20 bp, Artificial Sequence
  MKO10041266_A_Pla2g5
  gRNA
cagatgcacgaccgttgtta

SEQ ID NO: 41267 - DNA, 20 bp, Artificial Sequence
  MKO10041267_A_Pla2g5
  gRNA
ggtcgcgggacacccaagga

SEQ ID NO: 41268 - DNA, 20 bp, Artificial Sequence
  MKO10041268_A_Pla2g5
  gRNA
actgcctgcggagaaacctc

SEQ ID NO: 41269 - DNA, 20 bp, Artificial Sequence
  MKO10041269_A_Pla2g6
  gRNA
ggttccggatgaggtcggtc

SEQ ID NO: 41270 - DNA, 20 bp, Artificial Sequence
  MKO10041270_A_Pla2g6
  gRNA
agaatgtctccaatcgcacc

SEQ ID NO: 41271 - DNA, 20 bp, Artificial Sequence
  MKO10041271_A_Pla2g6
  gRNA
acgtctcaagtgaacgtgtc

SEQ ID NO: 41272 - DNA, 20 bp, Artificial Sequence
  MKO10041272_A_Pla2g7
  gRNA
catcagatctgtacaaccga

SEQ ID NO: 41273 - DNA, 20 bp, Artificial Sequence
  MKO10041273_A_Pla2g7
  gRNA
cggcagcagacatcaccgat

SEQ ID NO: 41274 - DNA, 20 bp, Artificial Sequence
  MKO10041274_A_Pla2g7
  gRNA
ggcatctaatgggtttatag

SEQ ID NO: 41275 - DNA, 20 bp, Artificial Sequence
  MKO10041275_A_Pla2r1
  gRNA
acgtgtaggcgatccaccta

SEQ ID NO: 41276 - DNA, 20 bp, Artificial Sequence
  MKO10041276_A_Pla2r1
  gRNA
atcgcctacacgtccagtgg

SEQ ID NO: 41277 - DNA, 20 bp, Artificial Sequence
  MKO10041277_A_Pla2r1
  gRNA
tctgtgatgctacgtggcaa

SEQ ID NO: 41278 - DNA, 20 bp, Artificial Sequence
  MKO10041278_A_Plaa
  gRNA
gggacaccactgctaaagtc

SEQ ID NO: 41279 - DNA, 20 bp, Artificial Sequence
  MKO10041279_A_Plaa
  gRNA
caaacgatgctagtattaga

SEQ ID NO: 41280 - DNA, 20 bp, Artificial Sequence
  MKO10041280_A_Plaa
  gRNA
aatactagcatcgtttgcac

SEQ ID NO: 41281 - DNA, 20 bp, Artificial Sequence
  MKO10041281_A_Plac1
  gRNA
cactaccgcgttaccgaatg

SEQ ID NO: 41282 - DNA, 20 bp, Artificial Sequence
  MKO10041282_A_Plac1
  gRNA
gagctatagatgacgacatc

SEQ ID NO: 41283 - DNA, 20 bp, Artificial Sequence
  MKO10041283_A_Plac1
  gRNA
atgtgctgtgctcgacagat

SEQ ID NO: 41284 - DNA, 20 bp, Artificial Sequence
  MKO10041284_A_Plac8l1
  gRNA
aagacactctccgtaatgcc

SEQ ID NO: 41285 - DNA, 20 bp, Artificial Sequence
  MKO10041285_A_Plac8l1
  gRNA
ccatgtgccagctcgtgtcg

SEQ ID NO: 41286 - DNA, 20 bp, Artificial Sequence
  MKO10041286_A_Plac8l1
  gRNA
cagccgatccgtggagccat

SEQ ID NO: 41287 - DNA, 20 bp, Artificial Sequence
  MKO10041287_A_Plac8
  gRNA
actctctaccgaacccgata

SEQ ID NO: 41288 - DNA, 20 bp, Artificial Sequence
  MKO10041288_A_Plac8
  gRNA
acagttatcgtgactcaacc

SEQ ID NO: 41289 - DNA, 20 bp, Artificial Sequence
  MKO10041289_A_Plac8
  gRNA
gactcacaggaatgccgtat

SEQ ID NO: 41290 - DNA, 20 bp, Artificial Sequence
  MKO10041290_A_Plac9a
  gRNA
gcgctgctctgcgcgctagc

SEQ ID NO: 41291 - DNA, 20 bp, Artificial Sequence
  MKO10041291_A_Plac9a
  gRNA
ctcattcttacctcgccgtc

SEQ ID NO: 41292 - DNA, 20 bp, Artificial Sequence
  MKO10041292_A_Plac9a
  gRNA
gccgagtcccccagttcccc

SEQ ID NO: 41293 - DNA, 20 bp, Artificial Sequence
  MKO10041293_A_Plac9b
  gRNA
gcgctgctctgcgcgctagc

SEQ ID NO: 41294 - DNA, 20 bp, Artificial Sequence
  MKO10041294_A_Plac9b
  gRNA
ctcattcttacctcgccgtc

SEQ ID NO: 41295 - DNA, 20 bp, Artificial Sequence
  MKO10041295_A_Plac9b
  gRNA
gccgagtcccccagttcccc

SEQ ID NO: 41296 - DNA, 20 bp, Artificial Sequence
  MKO10041296_A_Plag1
  gRNA
aatgtgagcactgcgaacgc

SEQ ID NO: 41297 - DNA, 20 bp, Artificial Sequence
  MKO10041297_A_Plag1
  gRNA
acttgcccgcgtgagatttc

SEQ ID NO: 41298 - DNA, 20 bp, Artificial Sequence
  MKO10041298_A_Plag1
  gRNA
gcgatggccactgtcattcc

SEQ ID NO: 41299 - DNA, 20 bp, Artificial Sequence
  MKO10041299_A_Plagl1
  gRNA
gcgcccattcaagtgctcga

SEQ ID NO: 41300 - DNA, 20 bp, Artificial Sequence
  MKO10041300_A_Plagl1
  gRNA
gctcccgagaacgggcttga

SEQ ID NO: 41301 - DNA, 20 bp, Artificial Sequence
  MKO10041301_A_Plagl1
  gRNA
gccgcaatcgtcacacgcgt

SEQ ID NO: 41302 - DNA, 20 bp, Artificial Sequence
  MKO10041302_A_Plagl2
  gRNA
tctgcaagtggttccgcaga

SEQ ID NO: 41303 - DNA, 20 bp, Artificial Sequence
  MKO10041303_A_Plagl2
  gRNA
ctacccccatgtaacccacc

SEQ ID NO: 41304 - DNA, 20 bp, Artificial Sequence
  MKO10041304_A_Plagl2
  gRNA
agggacgctggtgaaaaatg

SEQ ID NO: 41305 - DNA, 20 bp, Artificial Sequence
  MKO10041305_A_Plat
  gRNA
gaatattgccggtgcaacag

SEQ ID NO: 41306 - DNA, 20 bp, Artificial Sequence
  MKO10041306_A_Plat
  gRNA
gtaccaggccgctgttgcac

SEQ ID NO: 41307 - DNA, 20 bp, Artificial Sequence
  MKO10041307_A_Plat
  gRNA
gtggggctgagtgcatcaac

SEQ ID NO: 41308 - DNA, 20 bp, Artificial Sequence
  MKO10041308_A_Plaur
  gRNA
aggacgcacactcgaggtaa

SEQ ID NO: 41309 - DNA, 20 bp, Artificial Sequence
  MKO10041309_A_Plaur
  gRNA
accttgccattcccgaagca

SEQ ID NO: 41310 - DNA, 20 bp, Artificial Sequence
  MKO10041310_A_Plaur
  gRNA
gtgtgcgtcctgcacctctt

SEQ ID NO: 41311 - DNA, 20 bp, Artificial Sequence
  MKO10041311_A_Plau
  gRNA
ggccaggcagggccgacctt

SEQ ID NO: 41312 - DNA, 20 bp, Artificial Sequence
  MKO10041312_A_Plau
  gRNA
gccaatctgcacatagcacc

SEQ ID NO: 41313 - DNA, 20 bp, Artificial Sequence
  MKO10041313_A_Plau
  gRNA
ttcgccgatgcagctgccca

SEQ ID NO: 41314 - DNA, 20 bp, Artificial Sequence
  MKO10041314_A_Plb1
  gRNA
atgttgatcgtgccagaccc

SEQ ID NO: 41315 - DNA, 20 bp, Artificial Sequence
  MKO10041315_A_Plb1
  gRNA
tacaatttctgggttgccga

SEQ ID NO: 41316 - DNA, 20 bp, Artificial Sequence
  MKO10041316_A_Plb1
  gRNA
tgccacgagtttaatgtctg

SEQ ID NO: 41317 - DNA, 20 bp, Artificial Sequence
  MKO10041317_A_Plbd1
  gRNA
caagatacagcccgtcgagc

SEQ ID NO: 41318 - DNA, 20 bp, Artificial Sequence
  MKO10041318_A_Plbd1
  gRNA
attcagttcctgaacgccgt

SEQ ID NO: 41319 - DNA, 20 bp, Artificial Sequence
  MKO10041319_A_Plbd1
  gRNA
cggcgttcaggaactgaatt

SEQ ID NO: 41320 - DNA, 20 bp, Artificial Sequence
  MKO10041320_A_Plbd2
  gRNA
gtagccgacttcgtattcga

SEQ ID NO: 41321 - DNA, 20 bp, Artificial Sequence
  MKO10041321_A_Plbd2
  gRNA
ttaacccggactctccgtac

SEQ ID NO: 41322 - DNA, 20 bp, Artificial Sequence
  MKO10041322_A_Plbd2
  gRNA
tccacgtgttgtgcgccacc

SEQ ID NO: 41323 - DNA, 20 bp, Artificial Sequence
  MKO10041323_A_Plcb1
  gRNA
atccagaagttcacgcaact

SEQ ID NO: 41324 - DNA, 20 bp, Artificial Sequence
  MKO10041324_A_Plcb1
  gRNA
ccccaagttgcgtgaacttc

SEQ ID NO: 41325 - DNA, 20 bp, Artificial Sequence
  MKO10041325_A_Plcb1
  gRNA
cgtgtccgacagcctcaaga

SEQ ID NO: 41326 - DNA, 20 bp, Artificial Sequence
  MKO10041326_A_Plcb2
  gRNA
agtatccgagatactcgctt

SEQ ID NO: 41327 - DNA, 20 bp, Artificial Sequence
  MKO10041327_A_Plcb2
  gRNA
ccagtataagtaatagccct

SEQ ID NO: 41328 - DNA, 20 bp, Artificial Sequence
  MKO10041328_A_Plcb2
  gRNA
ccaagggctattacttatac

SEQ ID NO: 41329 - DNA, 20 bp, Artificial Sequence
  MKO10041329_A_Plcb3
  gRNA
cgcaggctcacgctttccgc

SEQ ID NO: 41330 - DNA, 20 bp, Artificial Sequence
  MKO10041330_A_Plcb3
  gRNA
accctgcgtgtggaccctaa

SEQ ID NO: 41331 - DNA, 20 bp, Artificial Sequence
  MKO10041331_A_Plcb3
  gRNA
tcgttatgcccgcctgccca

SEQ ID NO: 41332 - DNA, 20 bp, Artificial Sequence
  MKO10041332_A_Plcb4
  gRNA
agttgtgaatgatcgatctc

SEQ ID NO: 41333 - DNA, 20 bp, Artificial Sequence
  MKO10041333_A_Plcb4
  gRNA
gatcgatcattcacaacttc

SEQ ID NO: 41334 - DNA, 20 bp, Artificial Sequence
  MKO10041334_A_Plcb4
  gRNA
tgccttcactcttccacgtc

SEQ ID NO: 41335 - DNA, 20 bp, Artificial Sequence
  MKO10041335_A_Plcd1
  gRNA
gcgcaagatcatcgaccgct

SEQ ID NO: 41336 - DNA, 20 bp, Artificial Sequence
  MKO10041336_A_Plcd1
  gRNA
gcgttctctacgccacgagc

SEQ ID NO: 41337 - DNA, 20 bp, Artificial Sequence
  MKO10041337_A_Plcd1
  gRNA
agcggtcgatgatcttgcgc

SEQ ID NO: 41338 - DNA, 20 bp, Artificial Sequence
  MKO10041338_A_Plcd3
  gRNA
gagatcttccgccggtactc

SEQ ID NO: 41339 - DNA, 20 bp, Artificial Sequence
  MKO10041339_A_Plcd3
  gRNA
tcaagatccgctcacgcacg

SEQ ID NO: 41340 - DNA, 20 bp, Artificial Sequence
  MKO10041340_A_Plcd3
  gRNA
cccctctagacgctcgttgt

SEQ ID NO: 41341 - DNA, 20 bp, Artificial Sequence
  MKO10041341_A_Plcd4
  gRNA
tcatgggcgccgccccaacc

SEQ ID NO: 41342 - DNA, 20 bp, Artificial Sequence
  MKO10041342_A_Plcd4
  gRNA
ttctgagttgttgcgctatc

SEQ ID NO: 41343 - DNA, 20 bp, Artificial Sequence
  MKO10041343_A_Plcd4
  gRNA
gcttctgatgaacgtggaaa

SEQ ID NO: 41344 - DNA, 20 bp, Artificial Sequence
  MKO10041344_A_Plce1
  gRNA
actggacgaataatgctgaa

SEQ ID NO: 41345 - DNA, 20 bp, Artificial Sequence
  MKO10041345_A_Plce1
  gRNA
gggcaactacaacgctgtca

SEQ ID NO: 41346 - DNA, 20 bp, Artificial Sequence
  MKO10041346_A_Plce1
  gRNA
tttcagcattattcgtccag

SEQ ID NO: 41347 - DNA, 20 bp, Artificial Sequence
  MKO10041347_A_Plcg1
  gRNA
atatgcgcttcctccgagag

SEQ ID NO: 41348 - DNA, 20 bp, Artificial Sequence
  MKO10041348_A_Plcg1
  gRNA
agcggaattccattccatag

SEQ ID NO: 41349 - DNA, 20 bp, Artificial Sequence
  MKO10041349_A_Plcg1
  gRNA
ccattaccgtcagccgctct

SEQ ID NO: 41350 - DNA, 20 bp, Artificial Sequence
  MKO10041350_A_Plcg2
  gRNA
agataaaggaaatccgtccg

SEQ ID NO: 41351 - DNA, 20 bp, Artificial Sequence
  MKO10041351_A_Plcg2
  gRNA
ccacccccacaatgattgag

SEQ ID NO: 41352 - DNA, 20 bp, Artificial Sequence
  MKO10041352_A_Plcg2
  gRNA
tggatgcactcatcgcttcc

SEQ ID NO: 41353 - DNA, 20 bp, Artificial Sequence
  MKO10041353_A_Plch1
  gRNA
gtcgccatcggaggcgggtc

SEQ ID NO: 41354 - DNA, 20 bp, Artificial Sequence
  MKO10041354_A_Plch1
  gRNA
agcaccggacccgcctccga

SEQ ID NO: 41355 - DNA, 20 bp, Artificial Sequence
  MKO10041355_A_Plch1
  gRNA
atccaggtgcgtgcctcctc

SEQ ID NO: 41356 - DNA, 20 bp, Artificial Sequence
  MKO10041356_A_Plch2
  gRNA
tagcccgtcgccagcgtacc

SEQ ID NO: 41357 - DNA, 20 bp, Artificial Sequence
  MKO10041357_A_Plch2
  gRNA
ccgtagtcccccaagccaaa

SEQ ID NO: 41358 - DNA, 20 bp, Artificial Sequence
  MKO10041358_A_Plch2
  gRNA
gatattggtccctggtacgc

SEQ ID NO: 41359 - DNA, 20 bp, Artificial Sequence
  MKO10041359_A_Plcl1
  gRNA
caagggaacgtgccggtacc

SEQ ID NO: 41360 - DNA, 20 bp, Artificial Sequence
  MKO10041360_A_Plcl1
  gRNA
tgacatcctccgcgacatct

SEQ ID NO: 41361 - DNA, 20 bp, Artificial Sequence
  MKO10041361_A_Plcl1
  gRNA
gagcttcgcttggaatatta

SEQ ID NO: 41362 - DNA, 20 bp, Artificial Sequence
  MKO10041362_A_Plcl2
  gRNA
cgtccagcagaaaataccga

SEQ ID NO: 41363 - DNA, 20 bp, Artificial Sequence
  MKO10041363_A_Plcl2
  gRNA
acaaacggggcctttccgtg

SEQ ID NO: 41364 - DNA, 20 bp, Artificial Sequence
  MKO10041364_A_Plcl2
  gRNA
aaagatcgtgcactgtcaga

SEQ ID NO: 41365 - DNA, 20 bp, Artificial Sequence
  MKO10041365_A_Plcxd1
  gRNA
cgggtcgtgccattcatcac

SEQ ID NO: 41366 - DNA, 20 bp, Artificial Sequence
  MKO10041366_A_Plcxd1
  gRNA
tgagttgcacgactatctcg

SEQ ID NO: 41367 - DNA, 20 bp, Artificial Sequence
  MKO10041367_A_Plcxd1
  gRNA
cggtgatgaatggcacgacc

SEQ ID NO: 41368 - DNA, 20 bp, Artificial Sequence
  MKO10041368_A_Plcxd2
  gRNA
cggaggtctgcaatgccgac

SEQ ID NO: 41369 - DNA, 20 bp, Artificial Sequence
  MKO10041369_A_Plcxd2
  gRNA
cacgtggagctcgctcactc

SEQ ID NO: 41370 - DNA, 20 bp, Artificial Sequence
  MKO10041370_A_Plcxd2
  gRNA
gtcggcattgcagacctccg

SEQ ID NO: 41371 - DNA, 20 bp, Artificial Sequence
  MKO10041371_A_Plcxd3
  gRNA
ggtacggatccactgcatca

SEQ ID NO: 41372 - DNA, 20 bp, Artificial Sequence
  MKO10041372_A_Plcxd3
  gRNA
acgagctgaaattcgccgac

SEQ ID NO: 41373 - DNA, 20 bp, Artificial Sequence
  MKO10041373_A_Plcxd3
  gRNA
tgggcttggtggaaattcga

SEQ ID NO: 41374 - DNA, 20 bp, Artificial Sequence
  MKO10041374_A_Plcz1
  gRNA
tcaacacgtatactgaaaat

SEQ ID NO: 41375 - DNA, 20 bp, Artificial Sequence
  MKO10041375_A_Plcz1
  gRNA
tttgatatccgatcaaatat

SEQ ID NO: 41376 - DNA, 20 bp, Artificial Sequence
  MKO10041376_A_Plcz1
  gRNA
gagcgacagatgtcaattga

SEQ ID NO: 41377 - DNA, 20 bp, Artificial Sequence
  MKO10041377_A_Pld1
  gRNA
gcgttaactcgatcgtgtac

SEQ ID NO: 41378 - DNA, 20 bp, Artificial Sequence
  MKO10041378_A_Pld1
  gRNA
tacacgatcgagttaacgca

SEQ ID NO: 41379 - DNA, 20 bp, Artificial Sequence
  MKO10041379_A_Pld1
  gRNA
agcgcttcacatcgacctca

SEQ ID NO: 41380 - DNA, 20 bp, Artificial Sequence
  MKO10041380_A_Pld2
  gRNA
ctatcgcaattaccacgcca

SEQ ID NO: 41381 - DNA, 20 bp, Artificial Sequence
  MKO10041381_A_Pld2
  gRNA
tgatcgaatgcatccctatc

SEQ ID NO: 41382 - DNA, 20 bp, Artificial Sequence
  MKO10041382_A_Pld2
  gRNA
tagggagggtatatcctcgg

SEQ ID NO: 41383 - DNA, 20 bp, Artificial Sequence
  MKO10041383_A_Pld3
  gRNA
atgcgaacctttacacctcg

SEQ ID NO: 41384 - DNA, 20 bp, Artificial Sequence
  MKO10041384_A_Pld3
  gRNA
actggcacctcgaggtgtaa

SEQ ID NO: 41385 - DNA, 20 bp, Artificial Sequence
  MKO10041385_A_Pld3
  gRNA
caccgaagcccactaccgcc

SEQ ID NO: 41386 - DNA, 20 bp, Artificial Sequence
  MKO10041386_A_Pld4
  gRNA
tccacattgcctcgtactac

SEQ ID NO: 41387 - DNA, 20 bp, Artificial Sequence
  MKO10041387_A_Pld4
  gRNA
accagtagtacgaggcaatg

SEQ ID NO: 41388 - DNA, 20 bp, Artificial Sequence
  MKO10041388_A_Pld4
  gRNA
accatgccaagtccgctatg

SEQ ID NO: 41389 - DNA, 20 bp, Artificial Sequence
  MKO10041389_A_Pld5
  gRNA
cgacgtgaccgcagattcaa

SEQ ID NO: 41390 - DNA, 20 bp, Artificial Sequence
  MKO10041390_A_Pld5
  gRNA
ggcttagactggcgatcgct

SEQ ID NO: 41391 - DNA, 20 bp, Artificial Sequence
  MKO10041391_A_Pld5
  gRNA
gtgcatcgtgatcttcgctc

SEQ ID NO: 41392 - DNA, 20 bp, Artificial Sequence
  MKO10041392_A_Pld6
  gRNA
cggccatggggcgctcgagt

SEQ ID NO: 41393 - DNA, 20 bp, Artificial Sequence
  MKO10041393_A_Pld6
  gRNA
cagacacgtcaggagccgca

SEQ ID NO: 41394 - DNA, 20 bp, Artificial Sequence
  MKO10041394_A_Pld6
  gRNA
cgctggtgggcactacccat

SEQ ID NO: 41395 - DNA, 20 bp, Artificial Sequence
  MKO10041395_A_Plec
  gRNA
tcctcctagccccgcgagaa

SEQ ID NO: 41396 - DNA, 20 bp, Artificial Sequence
  MKO10041396_A_Plec
  gRNA
catcacggaggtcttcgtac

SEQ ID NO: 41397 - DNA, 20 bp, Artificial Sequence
  MKO10041397_A_Plec
  gRNA
agcgcatcctccctttctcg

SEQ ID NO: 41398 - DNA, 20 bp, Artificial Sequence
  MKO10041398_A_Plek2
  gRNA
ccggcgagtaaccccgccca

SEQ ID NO: 41399 - DNA, 20 bp, Artificial Sequence
  MKO10041399_A_Plek2
  gRNA
ccttgggcggggttactcgc

SEQ ID NO: 41400 - DNA, 20 bp, Artificial Sequence
  MKO10041400_A_Plek2
  gRNA
agcatgggagctattcgctc

SEQ ID NO: 41401 - DNA, 20 bp, Artificial Sequence
  MKO10041401_A_Plekha1
  gRNA
gcccatcatcacgccgacgc

SEQ ID NO: 41402 - DNA, 20 bp, Artificial Sequence
  MKO10041402_A_Plekha1
  gRNA
ccaacccgtgacgatcctga

SEQ ID NO: 41403 - DNA, 20 bp, Artificial Sequence
  MKO10041403_A_Plekha1
  gRNA
tacctgcgtcggcgtgatga

SEQ ID NO: 41404 - DNA, 20 bp, Artificial Sequence
  MKO10041404_A_Plekha2
  gRNA
ggtacaaacgcctatcagcc

SEQ ID NO: 41405 - DNA, 20 bp, Artificial Sequence
  MKO10041405_A_Plekha2
  gRNA
cctaaaacgccattctgctt

SEQ ID NO: 41406 - DNA, 20 bp, Artificial Sequence
  MKO10041406_A_Plekha2
  gRNA
caacattaccttcgagatgt

SEQ ID NO: 41407 - DNA, 20 bp, Artificial Sequence
  MKO10041407_A_Plekha3
  gRNA
gaaagcggtacctccacact

SEQ ID NO: 41408 - DNA, 20 bp, Artificial Sequence
  MKO10041408_A_Plekha3
  gRNA
aattcgtccaccgtgatgag

SEQ ID NO: 41409 - DNA, 20 bp, Artificial Sequence
  MKO10041409_A_Plekha3
  gRNA
taaatgccgccgagagacag

SEQ ID NO: 41410 - DNA, 20 bp, Artificial Sequence
  MKO10041410_A_Plekha4
  gRNA
gatgggcccggagcccctcg

SEQ ID NO: 41411 - DNA, 20 bp, Artificial Sequence
  MKO10041411_A_Plekha4
  gRNA
cgccgttggttcgtcctttc

SEQ ID NO: 41412 - DNA, 20 bp, Artificial Sequence
  MKO10041412_A_Plekha4
  gRNA
ggagggcctctcgtgcggag

SEQ ID NO: 41413 - DNA, 20 bp, Artificial Sequence
  MKO10041413_A_Plekha5
  gRNA
gaagaagcatatacgttcga

SEQ ID NO: 41414 - DNA, 20 bp, Artificial Sequence
  MKO10041414_A_Plekha5
  gRNA
cccggtgaccacggcctcgc

SEQ ID NO: 41415 - DNA, 20 bp, Artificial Sequence
  MKO10041415_A_Plekha5
  gRNA
acctgcaagcatccggttac

SEQ ID NO: 41416 - DNA, 20 bp, Artificial Sequence
  MKO10041416_A_Plekha6
  gRNA
gctgggcttacccggatgtt

SEQ ID NO: 41417 - DNA, 20 bp, Artificial Sequence
  MKO10041417_A_Plekha6
  gRNA
tgcgcgtttaccaaaggcaa

SEQ ID NO: 41418 - DNA, 20 bp, Artificial Sequence
  MKO10041418_A_Plekha6
  gRNA
tgcattggggttccgcttca

SEQ ID NO: 41419 - DNA, 20 bp, Artificial Sequence
  MKO10041419_A_Plekha7
  gRNA
ccggcgttccatgccctcca

SEQ ID NO: 41420 - DNA, 20 bp, Artificial Sequence
  MKO10041420_A_Plekha7
  gRNA
tcgagagactgtcctcgtcg

SEQ ID NO: 41421 - DNA, 20 bp, Artificial Sequence
  MKO10041421_A_Plekha7
  gRNA
ggaacgccggtccacgtgag

SEQ ID NO: 41422 - DNA, 20 bp, Artificial Sequence
  MKO10041422_A_Plekha8
  gRNA
gacttaagcaccgctagttg

SEQ ID NO: 41423 - DNA, 20 bp, Artificial Sequence
  MKO10041423_A_Plekha8
  gRNA
cagtcttagctccgacattt

SEQ ID NO: 41424 - DNA, 20 bp, Artificial Sequence
  MKO10041424_A_Plekha8
  gRNA
agcggtgcttaagtccagca

SEQ ID NO: 41425 - DNA, 20 bp, Artificial Sequence
  MKO10041425_A_Plekhb1
  gRNA
agcggaattggttcgctctg

SEQ ID NO: 41426 - DNA, 20 bp, Artificial Sequence
  MKO10041426_A_Plekhb1
  gRNA
cgaaccaattccgcttccag

SEQ ID NO: 41427 - DNA, 20 bp, Artificial Sequence
  MKO10041427_A_Plekhb1
  gRNA
cccgcaggttcactgtcagc

SEQ ID NO: 41428 - DNA, 20 bp, Artificial Sequence
  MKO10041428_A_Plekhb2
  gRNA
gtagcataggctgcgtaggg

SEQ ID NO: 41429 - DNA, 20 bp, Artificial Sequence
  MKO10041429_A_Plekhb2
  gRNA
ctgcagatcgtttgccgaga

SEQ ID NO: 41430 - DNA, 20 bp, Artificial Sequence
  MKO10041430_A_Plekhb2
  gRNA
tgatgcagtccacgggcatg

SEQ ID NO: 41431 - DNA, 20 bp, Artificial Sequence
  MKO10041431_A_Plekhd1
  gRNA
tgatcatagcttcccctagc

SEQ ID NO: 41432 - DNA, 20 bp, Artificial Sequence
  MKO10041432_A_Plekhd1
  gRNA
tgccatgaagatctcacacc

SEQ ID NO: 41433 - DNA, 20 bp, Artificial Sequence
  MKO10041433_A_Plekhd1
  gRNA
gtacttcaatattcatccta

SEQ ID NO: 41434 - DNA, 20 bp, Artificial Sequence
  MKO10041434_A_Plekhf1
  gRNA
agaccacaaacccgcatttg

SEQ ID NO: 41435 - DNA, 20 bp, Artificial Sequence
  MKO10041435_A_Plekhf1
  gRNA
gcagcgcatgcaaatgtccg

SEQ ID NO: 41436 - DNA, 20 bp, Artificial Sequence
  MKO10041436_A_Plekhf1
  gRNA
cgtcaccactgccgcaaatg

SEQ ID NO: 41437 - DNA, 20 bp, Artificial Sequence
  MKO10041437_A_Plekhf2
  gRNA
caatggtgccgccgattgac

SEQ ID NO: 41438 - DNA, 20 bp, Artificial Sequence
  MKO10041438_A_Plekhf2
  gRNA
acacgcggccatgtcccccg

SEQ ID NO: 41439 - DNA, 20 bp, Artificial Sequence
  MKO10041439_A_Plekhf2
  gRNA
tactagacgcataagtattg

SEQ ID NO: 41440 - DNA, 20 bp, Artificial Sequence
  MKO10041440_A_Plekhg1
  gRNA
gatgatatttgagaatccgc

SEQ ID NO: 41441 - DNA, 20 bp, Artificial Sequence
  MKO10041441_A_Plekhg1
  gRNA
ttcccctggtgaccgaagac

SEQ ID NO: 41442 - DNA, 20 bp, Artificial Sequence
  MKO10041442_A_Plekhg1
  gRNA
ccgtgctaactgagtgcatg

SEQ ID NO: 41443 - DNA, 20 bp, Artificial Sequence
  MKO10041443_A_Plekhg2
  gRNA
tcgcgaccttcgcagcatcg

SEQ ID NO: 41444 - DNA, 20 bp, Artificial Sequence
  MKO10041444_A_Plekhg2
  gRNA
agggttcggtgaaaccctcc

SEQ ID NO: 41445 - DNA, 20 bp, Artificial Sequence
  MKO10041445_A_Plekhg2
  gRNA
gcagtgagtgacactccaac

SEQ ID NO: 41446 - DNA, 20 bp, Artificial Sequence
  MKO10041446_A_Plekhg3
  gRNA
tacttcaggacgcgctggac

SEQ ID NO: 41447 - DNA, 20 bp, Artificial Sequence
  MKO10041447_A_Plekhg3
  gRNA
gagcaagtcagcgccctctt

SEQ ID NO: 41448 - DNA, 20 bp, Artificial Sequence
  MKO10041448_A_Plekhg3
  gRNA
gagtgtcaatgatcttcaag

SEQ ID NO: 41449 - DNA, 20 bp, Artificial Sequence
  MKO10041449_A_Plekhg4
  gRNA
gactcgggcatcgactagta

SEQ ID NO: 41450 - DNA, 20 bp, Artificial Sequence
  MKO10041450_A_Plekhg4
  gRNA
acagggacacgggatgtcga

SEQ ID NO: 41451 - DNA, 20 bp, Artificial Sequence
  MKO10041451_A_Plekhg4
  gRNA
cccaggcgaggtctcgagct

SEQ ID NO: 41452 - DNA, 20 bp, Artificial Sequence
  MKO10041452_A_Plekhg5
  gRNA
cgatttgacctgcccccgca

SEQ ID NO: 41453 - DNA, 20 bp, Artificial Sequence
  MKO10041453_A_Plekhg5
  gRNA
tacagggaccggaagagcgc

SEQ ID NO: 41454 - DNA, 20 bp, Artificial Sequence
  MKO10041454_A_Plekhg5
  gRNA
cttgaaattcgacctgaacg

SEQ ID NO: 41455 - DNA, 20 bp, Artificial Sequence
  MKO10041455_A_Plekhg6
  gRNA
tctggttcccgaagcaccag

SEQ ID NO: 41456 - DNA, 20 bp, Artificial Sequence
  MKO10041456_A_Plekhg6
  gRNA
gacccgaggcatgtctcctc

SEQ ID NO: 41457 - DNA, 20 bp, Artificial Sequence
  MKO10041457_A_Plekhg6
  gRNA
aggcgatagtgccctgacca

SEQ ID NO: 41458 - DNA, 20 bp, Artificial Sequence
  MKO10041458_A_Plekhh1
  gRNA
gaattgctgagagccgttca

SEQ ID NO: 41459 - DNA, 20 bp, Artificial Sequence
  MKO10041459_A_Plekhh1
  gRNA
gagctcgtccttgccttgaa

SEQ ID NO: 41460 - DNA, 20 bp, Artificial Sequence
  MKO10041460_A_Plekhh1
  gRNA
gacttgtaaccagcagctag

SEQ ID NO: 41461 - DNA, 20 bp, Artificial Sequence
  MKO10041461_A_Plekhh2
  gRNA
gagccgtgtctccgactcac

SEQ ID NO: 41462 - DNA, 20 bp, Artificial Sequence
  MKO10041462_A_Plekhh2
  gRNA
acggctctataagaagtgtc

SEQ ID NO: 41463 - DNA, 20 bp, Artificial Sequence
  MKO10041463_A_Plekhh2
  gRNA
aataatcataccttgcaact

SEQ ID NO: 41464 - DNA, 20 bp, Artificial Sequence
  MKO10041464_A_Plekhh3
  gRNA
gctgagtcagagtaacgtcc

SEQ ID NO: 41465 - DNA, 20 bp, Artificial Sequence
  MKO10041465_A_Plekhh3
  gRNA
ggttactcccacgcagagcc

SEQ ID NO: 41466 - DNA, 20 bp, Artificial Sequence
  MKO10041466_A_Plekhh3
  gRNA
tcttccggaagtcccttgtc

SEQ ID NO: 41467 - DNA, 20 bp, Artificial Sequence
  MKO10041467_A_Plekhj1
  gRNA
cagcttcaccagtcgccgct

SEQ ID NO: 41468 - DNA, 20 bp, Artificial Sequence
  MKO10041468_A_Plekhj1
  gRNA
tacagtggccaagcggcgac

SEQ ID NO: 41469 - DNA, 20 bp, Artificial Sequence
  MKO10041469_A_Plekhj1
  gRNA
gcttcgtcgaagacctcagc

SEQ ID NO: 41470 - DNA, 20 bp, Artificial Sequence
  MKO10041470_A_Plekhm1
  gRNA
tgccaagcacatccgcgccg

SEQ ID NO: 41471 - DNA, 20 bp, Artificial Sequence
  MKO10041471_A_Plekhm1
  gRNA
caaacaccgatgaccccgac

SEQ ID NO: 41472 - DNA, 20 bp, Artificial Sequence
  MKO10041472_A_Plekhm1
  gRNA
tagtactcgcacaaccgtgc

SEQ ID NO: 41473 - DNA, 20 bp, Artificial Sequence
  MKO10041473_A_Plekhm2
  gRNA
gcaggaccttgtcgtggttc

SEQ ID NO: 41474 - DNA, 20 bp, Artificial Sequence
  MKO10041474_A_Plekhm2
  gRNA
tgccatccggaaccacgaca

SEQ ID NO: 41475 - DNA, 20 bp, Artificial Sequence
  MKO10041475_A_Plekhm2
  gRNA
ggttctcctggaacagacgc

SEQ ID NO: 41476 - DNA, 20 bp, Artificial Sequence
  MKO10041476_A_Plekhm3
  gRNA
ccgttgtacggcttcgacag

SEQ ID NO: 41477 - DNA, 20 bp, Artificial Sequence
  MKO10041477_A_Plekhm3
  gRNA
acagggtgccagcgatctat

SEQ ID NO: 41478 - DNA, 20 bp, Artificial Sequence
  MKO10041478_A_Plekhm3
  gRNA
tggcggaggatctgcgccgc

SEQ ID NO: 41479 - DNA, 20 bp, Artificial Sequence
  MKO10041479_A_Plekhn1
  gRNA
ttgaacatctgcccgactga

SEQ ID NO: 41480 - DNA, 20 bp, Artificial Sequence
  MKO10041480_A_Plekhn1
  gRNA
ttagccgcggtgtccccatc

SEQ ID NO: 41481 - DNA, 20 bp, Artificial Sequence
  MKO10041481_A_Plekhn1
  gRNA
cagatgttcaattccgtcag

SEQ ID NO: 41482 - DNA, 20 bp, Artificial Sequence
  MKO10041482_A_Plekho1
  gRNA
tcagtctgcggcgcccgaga

SEQ ID NO: 41483 - DNA, 20 bp, Artificial Sequence
  MKO10041483_A_Plekho1
  gRNA
ggcgagcctaccgtggtgcc

SEQ ID NO: 41484 - DNA, 20 bp, Artificial Sequence
  MKO10041484_A_Plekho1
  gRNA
atctcttcaggtcaccgttg

SEQ ID NO: 41485 - DNA, 20 bp, Artificial Sequence
  MKO10041485_A_Plekho2
  gRNA
ctcaacgaagggatcaaccg

SEQ ID NO: 41486 - DNA, 20 bp, Artificial Sequence
  MKO10041486_A_Plekho2
  gRNA
agcggtgatgtttccgcttg

SEQ ID NO: 41487 - DNA, 20 bp, Artificial Sequence
  MKO10041487_A_Plekho2
  gRNA
tctgcagtccgtgctccacg

SEQ ID NO: 41488 - DNA, 20 bp, Artificial Sequence
  MKO10041488_A_Plekhs1
  gRNA
tacacacccgtcaatttcga

SEQ ID NO: 41489 - DNA, 20 bp, Artificial Sequence
  MKO10041489_A_Plekhs1
  gRNA
taatgaagtaatcccgttta

SEQ ID NO: 41490 - DNA, 20 bp, Artificial Sequence
  MKO10041490_A_Plekhs1
  gRNA
cttacctgtcatggccaata

SEQ ID NO: 41491 - DNA, 20 bp, Artificial Sequence
  MKO10041491_A_Plek
  gRNA
caggcgaatggaccgtcttg

SEQ ID NO: 41492 - DNA, 20 bp, Artificial Sequence
  MKO10041492_A_Plek
  gRNA
tggtttctaacaagctagtt

SEQ ID NO: 41493 - DNA, 20 bp, Artificial Sequence
  MKO10041493_A_Plek
  gRNA
cgtttgccaaagtcttgaca

SEQ ID NO: 41494 - DNA, 20 bp, Artificial Sequence
  MKO10041494_A_Plet1
  gRNA
ctgtgcgattgacgacgatg

SEQ ID NO: 41495 - DNA, 20 bp, Artificial Sequence
  MKO10041495_A_Plet1
  gRNA
agcactatggctaacgtctc

SEQ ID NO: 41496 - DNA, 20 bp, Artificial Sequence
  MKO10041496_A_Plet1
  gRNA
gatgttatcaaggaccacgc

SEQ ID NO: 41497 - DNA, 20 bp, Artificial Sequence
  MKO10041497_A_Plgrkt
  gRNA
aaatggctatgcagatcgcc

SEQ ID NO: 41498 - DNA, 20 bp, Artificial Sequence
  MKO10041498_A_Plgrkt
  gRNA
agttcatggttacgcatgct

SEQ ID NO: 41499 - DNA, 20 bp, Artificial Sequence
  MKO10041499_A_Plgrkt
  gRNA
gcgtaaccatgaactcctgt

SEQ ID NO: 41500 - DNA, 20 bp, Artificial Sequence
  MKO10041500_A_Plg
  gRNA
gcagagcttacttgggtacg

SEQ ID NO: 41501 - DNA, 20 bp, Artificial Sequence
  MKO10041501_A_Plg
  gRNA
ttggtgctacactacagatc

SEQ ID NO: 41502 - DNA, 20 bp, Artificial Sequence
  MKO10041502_A_Plg
  gRNA
tctgtagccgttgccgatgc

SEQ ID NO: 41503 - DNA, 20 bp, Artificial Sequence
  MKO10041503_A_Plin1
  gRNA
ctacccgccttcgaagcgcc

SEQ ID NO: 41504 - DNA, 20 bp, Artificial Sequence
  MKO10041504_A_Plin1
  gRNA
cagtcggccaacccgggtgt

SEQ ID NO: 41505 - DNA, 20 bp, Artificial Sequence
  MKO10041505_A_Plin1
  gRNA
gtcctctgccgtccggaaga

SEQ ID NO: 41506 - DNA, 20 bp, Artificial Sequence
  MKO10041506_A_Plin2
  gRNA
tctgaaccagccaacgtccg

SEQ ID NO: 41507 - DNA, 20 bp, Artificial Sequence
  MKO10041507_A_Plin2
  gRNA
ctccgcttatgtcagtacaa

SEQ ID NO: 41508 - DNA, 20 bp, Artificial Sequence
  MKO10041508_A_Plin2
  gRNA
cccaagctcacctcggacgt

SEQ ID NO: 41509 - DNA, 20 bp, Artificial Sequence
  MKO10041509_A_Plin3
  gRNA
gcagaactactttgtccggt

SEQ ID NO: 41510 - DNA, 20 bp, Artificial Sequence
  MKO10041510_A_Plin3
  gRNA
ggcgctcaccatcccatacg

SEQ ID NO: 41511 - DNA, 20 bp, Artificial Sequence
  MKO10041511_A_Plin3
  gRNA
ggcaacacgatccaccacgc

SEQ ID NO: 41512 - DNA, 20 bp, Artificial Sequence
  MKO10041512_A_Plin4
  gRNA
gaatgtcctcaccaatacga

SEQ ID NO: 41513 - DNA, 20 bp, Artificial Sequence
  MKO10041513_A_Plin4
  gRNA
ctgcctccttagttccgaca

SEQ ID NO: 41514 - DNA, 20 bp, Artificial Sequence
  MKO10041514_A_Plin4
  gRNA
agggtcccccccaaatccaa

SEQ ID NO: 41515 - DNA, 20 bp, Artificial Sequence
  MKO10041515_A_Plin5
  gRNA
gtccggtgatcagacagctc

SEQ ID NO: 41516 - DNA, 20 bp, Artificial Sequence
  MKO10041516_A_Plin5
  gRNA
gcagaatgtggtgaatcgag

SEQ ID NO: 41517 - DNA, 20 bp, Artificial Sequence
  MKO10041517_A_Plin5
  gRNA
caatttgtctagtcccctgc

SEQ ID NO: 41518 - DNA, 20 bp, Artificial Sequence
  MKO10041518_A_Plk1s1
  gRNA
cggcccataaagattgttgc

SEQ ID NO: 41519 - DNA, 20 bp, Artificial Sequence
  MKO10041519_A_Plk1s1
  gRNA
cgtcttcgtcactcattccc

SEQ ID NO: 41520 - DNA, 20 bp, Artificial Sequence
  MKO10041520_A_Plk1s1
  gRNA
cggcccgctggtccccatga

SEQ ID NO: 41521 - DNA, 20 bp, Artificial Sequence
  MKO10041521_A_Plk1
  gRNA
agcccaggactatctgtcgc

SEQ ID NO: 41522 - DNA, 20 bp, Artificial Sequence
  MKO10041522_A_Plk1
  gRNA
gtcattgagcaactcgtgaa

SEQ ID NO: 41523 - DNA, 20 bp, Artificial Sequence
  MKO10041523_A_Plk1
  gRNA
ctacctgcgacagatagtcc

SEQ ID NO: 41524 - DNA, 20 bp, Artificial Sequence
  MKO10041524_A_Plk2
  gRNA
cagaagtccgatactacctc

SEQ ID NO: 41525 - DNA, 20 bp, Artificial Sequence
  MKO10041525_A_Plk2
  gRNA
aaaactgcacgacatgctta

SEQ ID NO: 41526 - DNA, 20 bp, Artificial Sequence
  MKO10041526_A_Plk2
  gRNA
acgaacaagaaatcttgcac

SEQ ID NO: 41527 - DNA, 20 bp, Artificial Sequence
  MKO10041527_A_Plk3
  gRNA
gatgtgaaaagcgaacgata

SEQ ID NO: 41528 - DNA, 20 bp, Artificial Sequence
  MKO10041528_A_Plk3
  gRNA
caagccgcatcagcgcgaga

SEQ ID NO: 41529 - DNA, 20 bp, Artificial Sequence
  MKO10041529_A_Plk3
  gRNA
cccaccttctcgcgctgatg

SEQ ID NO: 41530 - DNA, 20 bp, Artificial Sequence
  MKO10041530_A_Plk4
  gRNA
gggaacatggcggcgtgcat

SEQ ID NO: 41531 - DNA, 20 bp, Artificial Sequence
  MKO10041531_A_Plk4
  gRNA
gttgaaacacccctctgtct

SEQ ID NO: 41532 - DNA, 20 bp, Artificial Sequence
  MKO10041532_A_Plk4
  gRNA
ctcggtaaaggatcatttgc

SEQ ID NO: 41533 - DNA, 20 bp, Artificial Sequence
  MKO10041533_A_Plk5
  gRNA
cgaaggtaatagcgcacttc

SEQ ID NO: 41534 - DNA, 20 bp, Artificial Sequence
  MKO10041534_A_Plk5
  gRNA
tgaccgcgatcacgtgtaca

SEQ ID NO: 41535 - DNA, 20 bp, Artificial Sequence
  MKO10041535_A_Plk5
  gRNA
cctgcgccaccgcaacatcg

SEQ ID NO: 41536 - DNA, 20 bp, Artificial Sequence
  MKO10041536_A_Pllp
  gRNA
tcccgtcgaaagtgagcacg

SEQ ID NO: 41537 - DNA, 20 bp, Artificial Sequence
  MKO10041537_A_Pllp
  gRNA
ggcttcgtgcgctccgctct

SEQ ID NO: 41538 - DNA, 20 bp, Artificial Sequence
  MKO10041538_A_Pllp
  gRNA
gcgaggagtgggtagcaacg

SEQ ID NO: 41539 - DNA, 20 bp, Artificial Sequence
  MKO10041539_A_Pln
  gRNA
tcctgatagccgagcgagtg

SEQ ID NO: 41540 - DNA, 20 bp, Artificial Sequence
  MKO10041540_A_Pln
  gRNA
agtgcaatacctcactcgct

SEQ ID NO: 41541 - DNA, 20 bp, Artificial Sequence
  MKO10041541_A_Pln
  gRNA
agaaattgataaataggttc

SEQ ID NO: 41542 - DNA, 20 bp, Artificial Sequence
  MKO10041542_A_Plod1
  gRNA
agcatatctacccggaccgg

SEQ ID NO: 41543 - DNA, 20 bp, Artificial Sequence
  MKO10041543_A_Plod1
  gRNA
ccgcttgccgtcggggactg

SEQ ID NO: 41544 - DNA, 20 bp, Artificial Sequence
  MKO10041544_A_Plod1
  gRNA
actgagctgaacgcttgaag

SEQ ID NO: 41545 - DNA, 20 bp, Artificial Sequence
  MKO10041545_A_Plod2
  gRNA
acgcccgggcgcatccctgc

SEQ ID NO: 41546 - DNA, 20 bp, Artificial Sequence
  MKO10041546_A_Plod2
  gRNA
ttgtctgccagccgcttatc

SEQ ID NO: 41547 - DNA, 20 bp, Artificial Sequence
  MKO10041547_A_Plod2
  gRNA
aaacgctacctgaattctgg

SEQ ID NO: 41548 - DNA, 20 bp, Artificial Sequence
  MKO10041548_A_Plod3
  gRNA
gcccagctacgacgtgattc

SEQ ID NO: 41549 - DNA, 20 bp, Artificial Sequence
  MKO10041549_A_Plod3
  gRNA
tccatcagattgtccgccag

SEQ ID NO: 41550 - DNA, 20 bp, Artificial Sequence
  MKO10041550_A_Plod3
  gRNA
cgtcgtctttgtagttccac

SEQ ID NO: 41551 - DNA, 20 bp, Artificial Sequence
  MKO10041551_A_Plp1
  gRNA
cccctgttaccgttgcgctc

SEQ ID NO: 41552 - DNA, 20 bp, Artificial Sequence
  MKO10041552_A_Plp1
  gRNA
ggcctgagcgcaacggtaac

SEQ ID NO: 41553 - DNA, 20 bp, Artificial Sequence
  MKO10041553_A_Plp1
  gRNA
tgcgctgatgccagaatgta

SEQ ID NO: 41554 - DNA, 20 bp, Artificial Sequence
  MKO10041554_A_Plp2
  gRNA
ccttaccccagcgacaactc

SEQ ID NO: 41555 - DNA, 20 bp, Artificial Sequence
  MKO10041555_A_Plp2
  gRNA
cccctctcagatactgtgcc

SEQ ID NO: 41556 - DNA, 20 bp, Artificial Sequence
  MKO10041556_A_Plp2
  gRNA
agacatacagcagctcccac

SEQ ID NO: 41557 - DNA, 20 bp, Artificial Sequence
  MKO10041557_A_Plrg1
  gRNA
acatagtcacaagcggaaaa

SEQ ID NO: 41558 - DNA, 20 bp, Artificial Sequence
  MKO10041558_A_Plrg1
  gRNA
atcaagcttcgcaatgagta

SEQ ID NO: 41559 - DNA, 20 bp, Artificial Sequence
  MKO10041559_A_Plrg1
  gRNA
agctgcacagtccctcgctg

SEQ ID NO: 41560 - DNA, 20 bp, Artificial Sequence
  MKO10041560_A_Pls1
  gRNA
gtacaaggtgcgcgagattg

SEQ ID NO: 41561 - DNA, 20 bp, Artificial Sequence
  MKO10041561_A_Pls1
  gRNA
ctgccgtcgttggggttcat

SEQ ID NO: 41562 - DNA, 20 bp, Artificial Sequence
  MKO10041562_A_Pls1
  gRNA
gatggatgacgtccccccga

SEQ ID NO: 41563 - DNA, 20 bp, Artificial Sequence
  MKO10041563_A_Pls3
  gRNA
accgcgcacctgaatgatga

SEQ ID NO: 41564 - DNA, 20 bp, Artificial Sequence
  MKO10041564_A_Pls3
  gRNA
tatcgctaaaaccttccgaa

SEQ ID NO: 41565 - DNA, 20 bp, Artificial Sequence
  MKO10041565_A_Pls3
  gRNA
gctctctcgtcaattgtatc

SEQ ID NO: 41566 - DNA, 20 bp, Artificial Sequence
  MKO10041566_A_Plscr1
  gRNA
gtaacagattgatcagcttc

SEQ ID NO: 41567 - DNA, 20 bp, Artificial Sequence
  MKO10041567_A_Plscr1
  gRNA
ccacctggatgattatatgc

SEQ ID NO: 41568 - DNA, 20 bp, Artificial Sequence
  MKO10041568_A_Plscr1
  gRNA
ccgggaacatatatgccagc

SEQ ID NO: 41569 - DNA, 20 bp, Artificial Sequence
  MKO10041569_A_Plscr2
  gRNA
tcactcttcagaacgacaag

SEQ ID NO: 41570 - DNA, 20 bp, Artificial Sequence
  MKO10041570_A_Plscr2
  gRNA
gtggggcgtccagtatgctc

SEQ ID NO: 41571 - DNA, 20 bp, Artificial Sequence
  MKO10041571_A_Plscr2
  gRNA
tgatttaagtattctagccc

SEQ ID NO: 41572 - DNA, 20 bp, Artificial Sequence
  MKO10041572_A_Plscr3
  gRNA
tccgctaggcggattcgaaa

SEQ ID NO: 41573 - DNA, 20 bp, Artificial Sequence
  MKO10041573_A_Plscr3
  gRNA
accatttcgaatccgcctag

SEQ ID NO: 41574 - DNA, 20 bp, Artificial Sequence
  MKO10041574_A_Plscr3
  gRNA
actggagcttgtcccggtcc

SEQ ID NO: 41575 - DNA, 20 bp, Artificial Sequence
  MKO10041575_A_Plscr4
  gRNA
cagttacgatatagaccatc

SEQ ID NO: 41576 - DNA, 20 bp, Artificial Sequence
  MKO10041576_A_Plscr4
  gRNA
taggttccgataggcattcc

SEQ ID NO: 41577 - DNA, 20 bp, Artificial Sequence
  MKO10041577_A_Plscr4
  gRNA
atggtacaaggggatggcac

SEQ ID NO: 41578 - DNA, 20 bp, Artificial Sequence
  MKO10041578_A_Plscr5
  gRNA
cacagacaactcgggtcgag

SEQ ID NO: 41579 - DNA, 20 bp, Artificial Sequence
  MKO10041579_A_Plscr5
  gRNA
acaaagaatttactttgcgg

SEQ ID NO: 41580 - DNA, 20 bp, Artificial Sequence
  MKO10041580_A_Plscr5
  gRNA
cctgataatcatccatcagc

SEQ ID NO: 41581 - DNA, 20 bp, Artificial Sequence
  MKO10041581_A_Pltp
  gRNA
gaacatctccaacgcatcct

SEQ ID NO: 41582 - DNA, 20 bp, Artificial Sequence
  MKO10041582_A_Pltp
  gRNA
ctacatcaatgcctcggcgg

SEQ ID NO: 41583 - DNA, 20 bp, Artificial Sequence
  MKO10041583_A_Pltp
  gRNA
gcggttcctcctcaaccagc

SEQ ID NO: 41584 - DNA, 20 bp, Artificial Sequence
  MKO10041584_A_Plvap
  gRNA
gcgcgcactccgcccgtagc

SEQ ID NO: 41585 - DNA, 20 bp, Artificial Sequence
  MKO10041585_A_Plvap
  gRNA
caacctagagcgcgaactgg

SEQ ID NO: 41586 - DNA, 20 bp, Artificial Sequence
  MKO10041586_A_Plvap
  gRNA
gccgtcccgccgagagtctc

SEQ ID NO: 41587 - DNA, 20 bp, Artificial Sequence
  MKO10041587_A_Plxdc1
  gRNA
cacgggacacgtagtagtta

SEQ ID NO: 41588 - DNA, 20 bp, Artificial Sequence
  MKO10041588_A_Plxdc1
  gRNA
tactacgtgtcccgtgtcta

SEQ ID NO: 41589 - DNA, 20 bp, Artificial Sequence
  MKO10041589_A_Plxdc1
  gRNA
accccgagagagccccgcgc

SEQ ID NO: 41590 - DNA, 20 bp, Artificial Sequence
  MKO10041590_A_Plxdc2
  gRNA
tgcagcttgccgatgagtgt

SEQ ID NO: 41591 - DNA, 20 bp, Artificial Sequence
  MKO10041591_A_Plxdc2
  gRNA
gtccagcggattctgccagc

SEQ ID NO: 41592 - DNA, 20 bp, Artificial Sequence
  MKO10041592_A_Plxdc2
  gRNA
ggacaataacacccagatag

SEQ ID NO: 41593 - DNA, 20 bp, Artificial Sequence
  MKO10041593_A_Plxna1
  gRNA
tgactgacacattgcgcggc

SEQ ID NO: 41594 - DNA, 20 bp, Artificial Sequence
  MKO10041594_A_Plxna1
  gRNA
caaccctatcctgcgtgacc

SEQ ID NO: 41595 - DNA, 20 bp, Artificial Sequence
  MKO10041595_A_Plxna1
  gRNA
caggcctgaccttgcggatg

SEQ ID NO: 41596 - DNA, 20 bp, Artificial Sequence
  MKO10041596_A_Plxna2
  gRNA
ccgcagaagttatcatcgat

SEQ ID NO: 41597 - DNA, 20 bp, Artificial Sequence
  MKO10041597_A_Plxna2
  gRNA
ccaatcgatgataacttctg

SEQ ID NO: 41598 - DNA, 20 bp, Artificial Sequence
  MKO10041598_A_Plxna2
  gRNA
tctttgcagattcgagctga

SEQ ID NO: 41599 - DNA, 20 bp, Artificial Sequence
  MKO10041599_A_Plxna3
  gRNA
agcacgattggattcggcgc

SEQ ID NO: 41600 - DNA, 20 bp, Artificial Sequence
  MKO10041600_A_Plxna3
  gRNA
gtagcccctcaatcacgtgt

SEQ ID NO: 41601 - DNA, 20 bp, Artificial Sequence
  MKO10041601_A_Plxna3
  gRNA
caacgttaagaagtacacga

SEQ ID NO: 41602 - DNA, 20 bp, Artificial Sequence
  MKO10041602_A_Plxna4
  gRNA
agcgttcacaccgttccttc

SEQ ID NO: 41603 - DNA, 20 bp, Artificial Sequence
  MKO10041603_A_Plxna4
  gRNA
tgtctctcagtacaacgtgc

SEQ ID NO: 41604 - DNA, 20 bp, Artificial Sequence
  MKO10041604_A_Plxna4
  gRNA
acatgatgtagagttgctcg

SEQ ID NO: 41605 - DNA, 20 bp, Artificial Sequence
  MKO10041605_A_Plxnb1
  gRNA
actgggctgtcttcgagtgg

SEQ ID NO: 41606 - DNA, 20 bp, Artificial Sequence
  MKO10041606_A_Plxnb1
  gRNA
agcacacaccatccgcaata

SEQ ID NO: 41607 - DNA, 20 bp, Artificial Sequence
  MKO10041607_A_Plxnb1
  gRNA
tcttaggtctacttaggccc

SEQ ID NO: 41608 - DNA, 20 bp, Artificial Sequence
  MKO10041608_A_Plxnb2
  gRNA
ctcagatggccggatcctta

SEQ ID NO: 41609 - DNA, 20 bp, Artificial Sequence
  MKO10041609_A_Plxnb2
  gRNA
tactctgcagaagtgccgtc

SEQ ID NO: 41610 - DNA, 20 bp, Artificial Sequence
  MKO10041610_A_Plxnb2
  gRNA
ggagtcacgacactgagcgc

SEQ ID NO: 41611 - DNA, 20 bp, Artificial Sequence
  MKO10041611_A_Plxnb3
  gRNA
cttcgcaggtgtactcggag

SEQ ID NO: 41612 - DNA, 20 bp, Artificial Sequence
  MKO10041612_A_Plxnb3
  gRNA
ccaggtagaccggatacttg

SEQ ID NO: 41613 - DNA, 20 bp, Artificial Sequence
  MKO10041613_A_Plxnb3
  gRNA
ggtataccattcccagcaag

SEQ ID NO: 41614 - DNA, 20 bp, Artificial Sequence
  MKO10041614_A_Plxnc1
  gRNA
gctggtgcctcccgttacaa

SEQ ID NO: 41615 - DNA, 20 bp, Artificial Sequence
  MKO10041615_A_Plxnc1
  gRNA
atcagtgtagacgatgcaat

SEQ ID NO: 41616 - DNA, 20 bp, Artificial Sequence
  MKO10041616_A_Plxnc1
  gRNA
cgctgctaagcactctgaac

SEQ ID NO: 41617 - DNA, 20 bp, Artificial Sequence
  MKO10041617_A_Plxnd1
  gRNA
aactgcatgacgtgatgcac

SEQ ID NO: 41618 - DNA, 20 bp, Artificial Sequence
  MKO10041618_A_Plxnd1
  gRNA
gctccgcaatccagttgctc

SEQ ID NO: 41619 - DNA, 20 bp, Artificial Sequence
  MKO10041619_A_Plxnd1
  gRNA
tcgcccgtgttccgtgctcc

SEQ ID NO: 41620 - DNA, 20 bp, Artificial Sequence
  MKO10041620_A_Pm20d1
  gRNA
ccttgtccaacatgaagtcg

SEQ ID NO: 41621 - DNA, 20 bp, Artificial Sequence
  MKO10041621_A_Pm20d1
  gRNA
tgggaggtgcccccgttctc

SEQ ID NO: 41622 - DNA, 20 bp, Artificial Sequence
  MKO10041622_A_Pm20d1
  gRNA
tctacaggtgtccggggaaa

SEQ ID NO: 41623 - DNA, 20 bp, Artificial Sequence
  MKO10041623_A_Pm20d2
  gRNA
tctccgtatacgcactgcac

SEQ ID NO: 41624 - DNA, 20 bp, Artificial Sequence
  MKO10041624_A_Pm20d2
  gRNA
ggagaacgctgcctatctcc

SEQ ID NO: 41625 - DNA, 20 bp, Artificial Sequence
  MKO10041625_A_Pm20d2
  gRNA
gaccctgtgcagtgcgtata

SEQ ID NO: 41626 - DNA, 20 bp, Artificial Sequence
  MKO10041626_A_Pmaip1
  gRNA
gttccgacgcgcctttctcc

SEQ ID NO: 41627 - DNA, 20 bp, Artificial Sequence
  MKO10041627_A_Pmaip1
  gRNA
acgcgccagtgaacccaacg

SEQ ID NO: 41628 - DNA, 20 bp, Artificial Sequence
  MKO10041628_A_Pmaip1
  gRNA
ctgagttgagctgcgaactc

SEQ ID NO: 41629 - DNA, 20 bp, Artificial Sequence
  MKO10041629_A_Pmch
  gRNA
ctacggatcctttcagagcg

SEQ ID NO: 41630 - DNA, 20 bp, Artificial Sequence
  MKO10041630_A_Pmch
  gRNA
atccgttgtcgccccttctc

SEQ ID NO: 41631 - DNA, 20 bp, Artificial Sequence
  MKO10041631_A_Pmch
  gRNA
gaagagtctaccgaccatgt

SEQ ID NO: 41632 - DNA, 20 bp, Artificial Sequence
  MKO10041632_A_Pmel
  gRNA
gagcaaggggcacgtagctc

SEQ ID NO: 41633 - DNA, 20 bp, Artificial Sequence
  MKO10041633_A_Pmel
  gRNA
agtcaaaaggtactaccgga

SEQ ID NO: 41634 - DNA, 20 bp, Artificial Sequence
  MKO10041634_A_Pmel
  gRNA
tccaccgtcagggaagacac

SEQ ID NO: 41635 - DNA, 20 bp, Artificial Sequence
  MKO10041635_A_Pmepa1
  gRNA
gctggagttcgtgcaaatcg

SEQ ID NO: 41636 - DNA, 20 bp, Artificial Sequence
  MKO10041636_A_Pmepa1
  gRNA
gaccgcttgatgggggtcaa

SEQ ID NO: 41637 - DNA, 20 bp, Artificial Sequence
  MKO10041637_A_Pmepa1
  gRNA
ctgtgcgcgcaccccctaac

SEQ ID NO: 41638 - DNA, 20 bp, Artificial Sequence
  MKO10041638_A_Pmf1
  gRNA
tagatcctctgcgtcacctc

SEQ ID NO: 41639 - DNA, 20 bp, Artificial Sequence
  MKO10041639_A_Pmf1
  gRNA
ctgccccccaggcgacccag

SEQ ID NO: 41640 - DNA, 20 bp, Artificial Sequence
  MKO10041640_A_Pmf1
  gRNA
acgctgtcctggccgggcgc

SEQ ID NO: 41641 - DNA, 20 bp, Artificial Sequence
  MKO10041641_A_Pmfbp1
  gRNA
tgatgctcttgaatcacgca

SEQ ID NO: 41642 - DNA, 20 bp, Artificial Sequence
  MKO10041642_A_Pmfbp1
  gRNA
tgtccgtgaatactaacgtc

SEQ ID NO: 41643 - DNA, 20 bp, Artificial Sequence
  MKO10041643_A_Pmfbp1
  gRNA
caagctgctcttgcgccaga

SEQ ID NO: 41644 - DNA, 20 bp, Artificial Sequence
  MKO10041644_A_Pml
  gRNA
tctcaatgtctgcgcgtgcg

SEQ ID NO: 41645 - DNA, 20 bp, Artificial Sequence
  MKO10041645_A_Pml
  gRNA
ctgcagcgcatccgcactag

SEQ ID NO: 41646 - DNA, 20 bp, Artificial Sequence
  MKO10041646_A_Pml
  gRNA
gctgcgtgcacccgctgcaa

SEQ ID NO: 41647 - DNA, 20 bp, Artificial Sequence
  MKO10041647_A_Pmm1
  gRNA
atgctgaacgtctcgcccat

SEQ ID NO: 41648 - DNA, 20 bp, Artificial Sequence
  MKO10041648_A_Pmm1
  gRNA
agacgttcagcatgccattc

SEQ ID NO: 41649 - DNA, 20 bp, Artificial Sequence
  MKO10041649_A_Pmm1
  gRNA
ctctaagatcgccgagcagc

SEQ ID NO: 41650 - DNA, 20 bp, Artificial Sequence
  MKO10041650_A_Pmm2
  gRNA
atgttgaatgtgtccccaat

SEQ ID NO: 41651 - DNA, 20 bp, Artificial Sequence
  MKO10041651_A_Pmm2
  gRNA
agctcagacagtagttgatc

SEQ ID NO: 41652 - DNA, 20 bp, Artificial Sequence
  MKO10041652_A_Pmm2
  gRNA
tacgctaccaagccattctc

SEQ ID NO: 41653 - DNA, 20 bp, Artificial Sequence
  MKO10041653_A_Pmp22
  gRNA
cgcactcacgctgacgatgg

SEQ ID NO: 41654 - DNA, 20 bp, Artificial Sequence
  MKO10041654_A_Pmp22
  gRNA
acactagcaccgcgatgtgc

SEQ ID NO: 41655 - DNA, 20 bp, Artificial Sequence
  MKO10041655_A_Pmp22
  gRNA
atcctgcggaaacgcgaatg

SEQ ID NO: 41656 - DNA, 20 bp, Artificial Sequence
  MKO10041656_A_Pmp2
  gRNA
aaaggcactttccgttctaa

SEQ ID NO: 41657 - DNA, 20 bp, Artificial Sequence
  MKO10041657_A_Pmp2
  gRNA
ggattatatcaccattagaa

SEQ ID NO: 41658 - DNA, 20 bp, Artificial Sequence
  MKO10041658_A_Pmp2
  gRNA
atccagcagcgttctcctta

SEQ ID NO: 41659 - DNA, 20 bp, Artificial Sequence
  MKO10041659_A_Pmpca
  gRNA
agacgaaatcctgcttacgc

SEQ ID NO: 41660 - DNA, 20 bp, Artificial Sequence
  MKO10041660_A_Pmpca
  gRNA
gttctgcacccccgactgac

SEQ ID NO: 41661 - DNA, 20 bp, Artificial Sequence
  MKO10041661_A_Pmpca
  gRNA
tttgctgtcaaatcgagcag

SEQ ID NO: 41662 - DNA, 20 bp, Artificial Sequence
  MKO10041662_A_Pmpcb
  gRNA
tcccgtcagccgttgtactt

SEQ ID NO: 41663 - DNA, 20 bp, Artificial Sequence
  MKO10041663_A_Pmpcb
  gRNA
caaatctctcgagaatgctt

SEQ ID NO: 41664 - DNA, 20 bp, Artificial Sequence
  MKO10041664_A_Pmpcb
  gRNA
ggaccgactaagaagcacac

SEQ ID NO: 41665 - DNA, 20 bp, Artificial Sequence
  MKO10041665_A_Pms1
  gRNA
tctaggtggtagttacaaca

SEQ ID NO: 41666 - DNA, 20 bp, Artificial Sequence
  MKO10041666_A_Pms1
  gRNA
ggggtcaatatgtaatgttg

SEQ ID NO: 41667 - DNA, 20 bp, Artificial Sequence
  MKO10041667_A_Pms1
  gRNA
gcagcactgtgaacagtcgc

SEQ ID NO: 41668 - DNA, 20 bp, Artificial Sequence
  MKO10041668_A_Pms2
  gRNA
agagtttgccgacctcacgc

SEQ ID NO: 41669 - DNA, 20 bp, Artificial Sequence
  MKO10041669_A_Pms2
  gRNA
tgcaagcgttgggactcgac

SEQ ID NO: 41670 - DNA, 20 bp, Artificial Sequence
  MKO10041670_A_Pms2
  gRNA
tcccaacgcttgcagacccg

SEQ ID NO: 41671 - DNA, 20 bp, Artificial Sequence
  MKO10041671_A_Pmvk
  gRNA
acagatcatgtccctccgat

SEQ ID NO: 41672 - DNA, 20 bp, Artificial Sequence
  MKO10041672_A_Pmvk
  gRNA
atcggagggacatgatctgt

SEQ ID NO: 41673 - DNA, 20 bp, Artificial Sequence
  MKO10041673_A_Pmvk
  gRNA
cgagcatactcctccttgag

SEQ ID NO: 41674 - DNA, 20 bp, Artificial Sequence
  MKO10041674_A_Pnck
  gRNA
tgaactgtttgaccgcatca

SEQ ID NO: 41675 - DNA, 20 bp, Artificial Sequence
  MKO10041675_A_Pnck
  gRNA
cgccagccaccttgtagggc

SEQ ID NO: 41676 - DNA, 20 bp, Artificial Sequence
  MKO10041676_A_Pnck
  gRNA
cttgccccgaagtgctttct

SEQ ID NO: 41677 - DNA, 20 bp, Artificial Sequence
  MKO10041677_A_Pnkd
  gRNA
atagcctgtacacccgaacc

SEQ ID NO: 41678 - DNA, 20 bp, Artificial Sequence
  MKO10041678_A_Pnkd
  gRNA
gctcggaatcgctatcccaa

SEQ ID NO: 41679 - DNA, 20 bp, Artificial Sequence
  MKO10041679_A_Pnkd
  gRNA
cgattcggaagagcagccgc

SEQ ID NO: 41680 - DNA, 20 bp, Artificial Sequence
  MKO10041680_A_Pnkp
  gRNA
ggtgttaacccgtcaactgt

SEQ ID NO: 41681 - DNA, 20 bp, Artificial Sequence
  MKO10041681_A_Pnkp
  gRNA
tggtgatgagggtcccatct

SEQ ID NO: 41682 - DNA, 20 bp, Artificial Sequence
  MKO10041682_A_Pnkp
  gRNA
tccccactagccctagtgac

SEQ ID NO: 41683 - DNA, 20 bp, Artificial Sequence
  MKO10041683_A_Pnldc1
  gRNA
gtttgactctccttcgatgc

SEQ ID NO: 41684 - DNA, 20 bp, Artificial Sequence
  MKO10041684_A_Pnldc1
  gRNA
gaaactgcacactagatgcc

SEQ ID NO: 41685 - DNA, 20 bp, Artificial Sequence
  MKO10041685_A_Pnldc1
  gRNA
tgtctcggccccaacagatc

SEQ ID NO: 41686 - DNA, 20 bp, Artificial Sequence
  MKO10041686_A_Pnliprp1
  gRNA
acccactactcgcacattgt

SEQ ID NO: 41687 - DNA, 20 bp, Artificial Sequence
  MKO10041687_A_Pnliprp1
  gRNA
aagcgagtgttgatcttctc

SEQ ID NO: 41688 - DNA, 20 bp, Artificial Sequence
  MKO10041688_A_Pnliprp1
  gRNA
ctctcagactacctacacgc

SEQ ID NO: 41689 - DNA, 20 bp, Artificial Sequence
  MKO10041689_A_Pnliprp2
  gRNA
ccgatgaggtgcacgttctc

SEQ ID NO: 41690 - DNA, 20 bp, Artificial Sequence
  MKO10041690_A_Pnliprp2
  gRNA
ggccttcgaagatattccct

SEQ ID NO: 41691 - DNA, 20 bp, Artificial Sequence
  MKO10041691_A_Pnliprp2
  gRNA
aacgtgtcttgcggtccagt

SEQ ID NO: 41692 - DNA, 20 bp, Artificial Sequence
  MKO10041692_A_Pnlip
  gRNA
tacccagaacgtccgggtcg

SEQ ID NO: 41693 - DNA, 20 bp, Artificial Sequence
  MKO10041693_A_Pnlip
  gRNA
tagcctgggtatatgtcgtt

SEQ ID NO: 41694 - DNA, 20 bp, Artificial Sequence
  MKO10041694_A_Pnlip
  gRNA
gaagtttgcttcgacaaact

SEQ ID NO: 41695 - DNA, 20 bp, Artificial Sequence
  MKO10041695_A_Pnma1
  gRNA
ggacattcccgggcctggcg

SEQ ID NO: 41696 - DNA, 20 bp, Artificial Sequence
  MKO10041696_A_Pnma1
  gRNA
atcttcgtatgttatccgtc

SEQ ID NO: 41697 - DNA, 20 bp, Artificial Sequence
  MKO10041697_A_Pnma1
  gRNA
ggtcgttatggcggcgttgt

SEQ ID NO: 41698 - DNA, 20 bp, Artificial Sequence
  MKO10041698_A_Pnma2
  gRNA
ccaacctcggcaacgttctg

SEQ ID NO: 41699 - DNA, 20 bp, Artificial Sequence
  MKO10041699_A_Pnma2
  gRNA
tgcaccacagaacgttgccg

SEQ ID NO: 41700 - DNA, 20 bp, Artificial Sequence
  MKO10041700_A_Pnma2
  gRNA
cccccggaacattgctgacc

SEQ ID NO: 41701 - DNA, 20 bp, Artificial Sequence
  MKO10041701_A_Pnma3
  gRNA
gaagatacaggatcatcggc

SEQ ID NO: 41702 - DNA, 20 bp, Artificial Sequence
  MKO10041702_A_Pnma3
  gRNA
agatgctgaaacagcgtaga

SEQ ID NO: 41703 - DNA, 20 bp, Artificial Sequence
  MKO10041703_A_Pnma3
  gRNA
cagagccaaatacctgccgc

SEQ ID NO: 41704 - DNA, 20 bp, Artificial Sequence
  MKO10041704_A_Pnma5
  gRNA
tagcaatgactccctaaccg

SEQ ID NO: 41705 - DNA, 20 bp, Artificial Sequence
  MKO10041705_A_Pnma5
  gRNA
gaccgcagttgggatactag

SEQ ID NO: 41706 - DNA, 20 bp, Artificial Sequence
  MKO10041706_A_Pnma5
  gRNA
aatgaaacttactcgagacg

SEQ ID NO: 41707 - DNA, 20 bp, Artificial Sequence
  MKO10041707_A_Pnmal1
  gRNA
ggctggtttgaattcggtag

SEQ ID NO: 41708 - DNA, 20 bp, Artificial Sequence
  MKO10041708_A_Pnmal1
  gRNA
ctccaaaacctctagttcgc

SEQ ID NO: 41709 - DNA, 20 bp, Artificial Sequence
  MKO10041709_A_Pnmal1
  gRNA
ttccccaaatcatagcttcc

SEQ ID NO: 41710 - DNA, 20 bp, Artificial Sequence
  MKO10041710_A_Pnmal2
  gRNA
atcggcgcttgcctccccga

SEQ ID NO: 41711 - DNA, 20 bp, Artificial Sequence
  MKO10041711_A_Pnmal2
  gRNA
gccagtagcgcgactaaatc

SEQ ID NO: 41712 - DNA, 20 bp, Artificial Sequence
  MKO10041712_A_Pnmal2
  gRNA
cttgcccgcggtccttactc

SEQ ID NO: 41713 - DNA, 20 bp, Artificial Sequence
  MKO10041713_A_Pnmt
  gRNA
aacaactacgcgcctcctcg

SEQ ID NO: 41714 - DNA, 20 bp, Artificial Sequence
  MKO10041714_A_Pnmt
  gRNA
aagaacgccagcttcgagcg

SEQ ID NO: 41715 - DNA, 20 bp, Artificial Sequence
  MKO10041715_A_Pnmt
  gRNA
tgatgtgatgcaaagcccgc

SEQ ID NO: 41716 - DNA, 20 bp, Artificial Sequence
  MKO10041716_A_Pnn
  gRNA
cacgcgcagagaccttatcc

SEQ ID NO: 41717 - DNA, 20 bp, Artificial Sequence
  MKO10041717_A_Pnn
  gRNA
gcccatccaagccagattgc

SEQ ID NO: 41718 - DNA, 20 bp, Artificial Sequence
  MKO10041718_A_Pnn
  gRNA
acaacggaagattgcagtgc

SEQ ID NO: 41719 - DNA, 20 bp, Artificial Sequence
  MKO10041719_A_Pno1
  gRNA
agaggtcatctagtcggata

SEQ ID NO: 41720 - DNA, 20 bp, Artificial Sequence
  MKO10041720_A_Pno1
  gRNA
tgtccgtgttacgttctcta

SEQ ID NO: 41721 - DNA, 20 bp, Artificial Sequence
  MKO10041721_A_Pno1
  gRNA
tacgctttaacctgaaatca

SEQ ID NO: 41722 - DNA, 20 bp, Artificial Sequence
  MKO10041722_A_Pnoc
  gRNA
tgaagagaatgccgcgtgtc

SEQ ID NO: 41723 - DNA, 20 bp, Artificial Sequence
  MKO10041723_A_Pnoc
  gRNA
gcatgcagtcaagtcaacgc

SEQ ID NO: 41724 - DNA, 20 bp, Artificial Sequence
  MKO10041724_A_Pnoc
  gRNA
gcagcagaacgtcacaaaag

SEQ ID NO: 41725 - DNA, 20 bp, Artificial Sequence
  MKO10041725_A_Pnp2
  gRNA
ccggccttgcatcatcacac

SEQ ID NO: 41726 - DNA, 20 bp, Artificial Sequence
  MKO10041726_A_Pnp2
  gRNA
aggtcccaactttgagactg

SEQ ID NO: 41727 - DNA, 20 bp, Artificial Sequence
  MKO10041727_A_Pnp2
  gRNA
agatcctgtgtgatgatgca

SEQ ID NO: 41728 - DNA, 20 bp, Artificial Sequence
  MKO10041728_A_Pnpla1
  gRNA
ctcacctctccccgatacgt

SEQ ID NO: 41729 - DNA, 20 bp, Artificial Sequence
  MKO10041729_A_Pnpla1
  gRNA
cttcatccccccaacgtatc

SEQ ID NO: 41730 - DNA, 20 bp, Artificial Sequence
  MKO10041730_A_Pnpla1
  gRNA
ggtttccgagtaccgatcca

SEQ ID NO: 41731 - DNA, 20 bp, Artificial Sequence
  MKO10041731_A_Pnpla2
  gRNA
gattgccatgagcgcgccaa

SEQ ID NO: 41732 - DNA, 20 bp, Artificial Sequence
  MKO10041732_A_Pnpla2
  gRNA
tgttggtgacgcgaagctcg

SEQ ID NO: 41733 - DNA, 20 bp, Artificial Sequence
  MKO10041733_A_Pnpla2
  gRNA
atcgagtcacgatgttcccg

SEQ ID NO: 41734 - DNA, 20 bp, Artificial Sequence
  MKO10041734_A_Pnpla3
  gRNA
gagcgacaacgtccctgtgc

SEQ ID NO: 41735 - DNA, 20 bp, Artificial Sequence
  MKO10041735_A_Pnpla3
  gRNA
ggtgccgatgttgcggctcc

SEQ ID NO: 41736 - DNA, 20 bp, Artificial Sequence
  MKO10041736_A_Pnpla3
  gRNA
tacatccacgacttcgtctt

SEQ ID NO: 41737 - DNA, 20 bp, Artificial Sequence
  MKO10041737_A_Pnpla5
  gRNA
acggacccgctgaacacatc

SEQ ID NO: 41738 - DNA, 20 bp, Artificial Sequence
  MKO10041738_A_Pnpla5
  gRNA
gtagctgaccattgccgaca

SEQ ID NO: 41739 - DNA, 20 bp, Artificial Sequence
  MKO10041739_A_Pnpla5
  gRNA
gggcgtccaggtaaccttgt

SEQ ID NO: 41740 - DNA, 20 bp, Artificial Sequence
  MKO10041740_A_Pnpla6
  gRNA
agggtccccggtatcggttc

SEQ ID NO: 41741 - DNA, 20 bp, Artificial Sequence
  MKO10041741_A_Pnpla6
  gRNA
caggatcttacgtatccaaa

SEQ ID NO: 41742 - DNA, 20 bp, Artificial Sequence
  MKO10041742_A_Pnpla6
  gRNA
aaccgataccggggaccctc

SEQ ID NO: 41743 - DNA, 20 bp, Artificial Sequence
  MKO10041743_A_Pnpla7
  gRNA
ctccttaccctagccttcgt

SEQ ID NO: 41744 - DNA, 20 bp, Artificial Sequence
  MKO10041744_A_Pnpla7
  gRNA
tcctcaggctggctactgtt

SEQ ID NO: 41745 - DNA, 20 bp, Artificial Sequence
  MKO10041745_A_Pnpla7
  gRNA
taccaacgaaggctagggta

SEQ ID NO: 41746 - DNA, 20 bp, Artificial Sequence
  MKO10041746_A_Pnpla8
  gRNA
tgtctcagccgtaataaata

SEQ ID NO: 41747 - DNA, 20 bp, Artificial Sequence
  MKO10041747_A_Pnpla8
  gRNA
atccgaatcctcaccattga

SEQ ID NO: 41748 - DNA, 20 bp, Artificial Sequence
  MKO10041748_A_Pnpla8
  gRNA
ggccatattagcatttatgc

SEQ ID NO: 41749 - DNA, 20 bp, Artificial Sequence
  MKO10041749_A_Pnpo
  gRNA
tcttcactaactacgagagc

SEQ ID NO: 41750 - DNA, 20 bp, Artificial Sequence
  MKO10041750_A_Pnpo
  gRNA
gaccactcacctgacggttc

SEQ ID NO: 41751 - DNA, 20 bp, Artificial Sequence
  MKO10041751_A_Pnpo
  gRNA
gtcctacttacctcccggtc

SEQ ID NO: 41752 - DNA, 20 bp, Artificial Sequence
  MKO10041752_A_Pnpt1
  gRNA
gccttcccaattcatgccgt

SEQ ID NO: 41753 - DNA, 20 bp, Artificial Sequence
  MKO10041753_A_Pnpt1
  gRNA
gtcaggcgatactgcagtaa

SEQ ID NO: 41754 - DNA, 20 bp, Artificial Sequence
  MKO10041754_A_Pnpt1
  gRNA
tcaggtggactaccgacaga

SEQ ID NO: 41755 - DNA, 20 bp, Artificial Sequence
  MKO10041755_A_Pnp
  gRNA
tgaaggatactcactgtcaa

SEQ ID NO: 41756 - DNA, 20 bp, Artificial Sequence
  MKO10041756_A_Pnp
  gRNA
aggccccaactttgagactg

SEQ ID NO: 41757 - DNA, 20 bp, Artificial Sequence
  MKO10041757_A_Pnp
  gRNA
agatgctgtgtgatgatgca

SEQ ID NO: 41758 - DNA, 20 bp, Artificial Sequence
  MKO10041758_A_Pnrc1
  gRNA
cgctcctcctgcgcgacgat

SEQ ID NO: 41759 - DNA, 20 bp, Artificial Sequence
  MKO10041759_A_Pnrc1
  gRNA
cagacagcccccactcgcga

SEQ ID NO: 41760 - DNA, 20 bp, Artificial Sequence
  MKO10041760_A_Pnrc1
  gRNA
ctccgatcgaatgcagaagc

SEQ ID NO: 41761 - DNA, 20 bp, Artificial Sequence
  MKO10041761_A_Pnrc2
  gRNA
tgatggtggttcactaaatt

SEQ ID NO: 41762 - DNA, 20 bp, Artificial Sequence
  MKO10041762_A_Pnrc2
  gRNA
tcttatgagcaatcttcgtc

SEQ ID NO: 41763 - DNA, 20 bp, Artificial Sequence
  MKO10041763_A_Pnrc2
  gRNA
gcctttctaacaactccaac

SEQ ID NO: 41764 - DNA, 20 bp, Artificial Sequence
  MKO10041764_A_Poc1a
  gRNA
gacacgatgagccgcccgtc

SEQ ID NO: 41765 - DNA, 20 bp, Artificial Sequence
  MKO10041765_A_Poc1a
  gRNA
gtcacgtgcctaccgcttca

SEQ ID NO: 41766 - DNA, 20 bp, Artificial Sequence
  MKO10041766_A_Poc1a
  gRNA
cgccgtgctcacagtatgag

SEQ ID NO: 41767 - DNA, 20 bp, Artificial Sequence
  MKO10041767_A_Poc1b
  gRNA
gacacgatcaaccttccgtc

SEQ ID NO: 41768 - DNA, 20 bp, Artificial Sequence
  MKO10041768_A_Poc1b
  gRNA
atcctaggaggatccgattc

SEQ ID NO: 41769 - DNA, 20 bp, Artificial Sequence
  MKO10041769_A_Poc1b
  gRNA
cgctagagcttacagatacg

SEQ ID NO: 41770 - DNA, 20 bp, Artificial Sequence
  MKO10041770_A_Poc5
  gRNA
gatagattccctacgctagc

SEQ ID NO: 41771 - DNA, 20 bp, Artificial Sequence
  MKO10041771_A_Poc5
  gRNA
ctttatcgactggcaccgaa

SEQ ID NO: 41772 - DNA, 20 bp, Artificial Sequence
  MKO10041772_A_Poc5
  gRNA
gacctcatcctttctcccga

SEQ ID NO: 41773 - DNA, 20 bp, Artificial Sequence
  MKO10041773_A_Podnl1
  gRNA
cagccagatcggcgacacgc

SEQ ID NO: 41774 - DNA, 20 bp, Artificial Sequence
  MKO10041774_A_Podnl1
  gRNA
ctccctgcgtgtcgccgatc

SEQ ID NO: 41775 - DNA, 20 bp, Artificial Sequence
  MKO10041775_A_Podnl1
  gRNA
ccagggtgcgcaagccgctg

SEQ ID NO: 41776 - DNA, 20 bp, Artificial Sequence
  MKO10041776_A_Podn
  gRNA
aacaaccgcctgacatcccg

SEQ ID NO: 41777 - DNA, 20 bp, Artificial Sequence
  MKO10041777_A_Podn
  gRNA
cggggtagatcttctccagc

SEQ ID NO: 41778 - DNA, 20 bp, Artificial Sequence
  MKO10041778_A_Podn
  gRNA
gccaaacgccctgatcagtg

SEQ ID NO: 41779 - DNA, 20 bp, Artificial Sequence
  MKO10041779_A_Podxl2
  gRNA
gtactgccacgccaccgcag

SEQ ID NO: 41780 - DNA, 20 bp, Artificial Sequence
  MKO10041780_A_Podxl2
  gRNA
tgatgtagctcttcccggcc

SEQ ID NO: 41781 - DNA, 20 bp, Artificial Sequence
  MKO10041781_A_Podxl2
  gRNA
cttacctgagtagagtccca

SEQ ID NO: 41782 - DNA, 20 bp, Artificial Sequence
  MKO10041782_A_Podxl
  gRNA
gccaccgctttgattgctcg

SEQ ID NO: 41783 - DNA, 20 bp, Artificial Sequence
  MKO10041783_A_Podxl
  gRNA
ggctgtttgtccactgctac

SEQ ID NO: 41784 - DNA, 20 bp, Artificial Sequence
  MKO10041784_A_Podxl
  gRNA
cgccatagactgttgcagtg

SEQ ID NO: 41785 - DNA, 20 bp, Artificial Sequence
  MKO10041785_A_Pof1b
  gRNA
gtcttacctgttcgtgtatt

SEQ ID NO: 41786 - DNA, 20 bp, Artificial Sequence
  MKO10041786_A_Pof1b
  gRNA
catatccacaaaccaccatt

SEQ ID NO: 41787 - DNA, 20 bp, Artificial Sequence
  MKO10041787_A_Pof1b
  gRNA
gccaagccaaatacacgaac

SEQ ID NO: 41788 - DNA, 20 bp, Artificial Sequence
  MKO10041788_A_Pofut1
  gRNA
tgatcagtgcccacctcgtc

SEQ ID NO: 41789 - DNA, 20 bp, Artificial Sequence
  MKO10041789_A_Pofut1
  gRNA
tgacaacccgatggtaggct

SEQ ID NO: 41790 - DNA, 20 bp, Artificial Sequence
  MKO10041790_A_Pofut1
  gRNA
gcgcagatgaatgcccacat

SEQ ID NO: 41791 - DNA, 20 bp, Artificial Sequence
  MKO10041791_A_Pofut2
  gRNA
cgtcctacaaggttacgccg

SEQ ID NO: 41792 - DNA, 20 bp, Artificial Sequence
  MKO10041792_A_Pofut2
  gRNA
cggcgggccctttatcgacc

SEQ ID NO: 41793 - DNA, 20 bp, Artificial Sequence
  MKO10041793_A_Pofut2
  gRNA
cgacgatggaagccgacccc

SEQ ID NO: 41794 - DNA, 20 bp, Artificial Sequence
  MKO10041794_A_Pogk
  gRNA
gcctcggaatgcccgccgca

SEQ ID NO: 41795 - DNA, 20 bp, Artificial Sequence
  MKO10041795_A_Pogk
  gRNA
tccaaccgattgatcatatc

SEQ ID NO: 41796 - DNA, 20 bp, Artificial Sequence
  MKO10041796_A_Pogk
  gRNA
gagatccgctgccaccgcta

SEQ ID NO: 41797 - DNA, 20 bp, Artificial Sequence
  MKO10041797_A_Poglut1
  gRNA
ccttcccaaaatgtccacgc

SEQ ID NO: 41798 - DNA, 20 bp, Artificial Sequence
  MKO10041798_A_Poglut1
  gRNA
ggctaacaggtgtagtggcg

SEQ ID NO: 41799 - DNA, 20 bp, Artificial Sequence
  MKO10041799_A_Poglut1
  gRNA
tcccaccgtccaagacctgt

SEQ ID NO: 41800 - DNA, 20 bp, Artificial Sequence
  MKO10041800_A_Pogz
  gRNA
ggcggacaccgacctgttta

SEQ ID NO: 41801 - DNA, 20 bp, Artificial Sequence
  MKO10041801_A_Pogz
  gRNA
acctggacaggtctcaatac

SEQ ID NO: 41802 - DNA, 20 bp, Artificial Sequence
  MKO10041802_A_Pogz
  gRNA
aggggagctagtcacatgat

SEQ ID NO: 41803 - DNA, 20 bp, Artificial Sequence
  MKO10041803_A_Pola1
  gRNA
tgaagagcagtattcgaaac

SEQ ID NO: 41804 - DNA, 20 bp, Artificial Sequence
  MKO10041804_A_Pola1
  gRNA
aggcccgtcaggatgatgac

SEQ ID NO: 41805 - DNA, 20 bp, Artificial Sequence
  MKO10041805_A_Pola1
  gRNA
caatgttcattgctagtgcc

SEQ ID NO: 41806 - DNA, 20 bp, Artificial Sequence
  MKO10041806_A_Pola2
  gRNA
ggaactacagatcttcggcc

SEQ ID NO: 41807 - DNA, 20 bp, Artificial Sequence
  MKO10041807_A_Pola2
  gRNA
aaggcatgtcttccccgcac

SEQ ID NO: 41808 - DNA, 20 bp, Artificial Sequence
  MKO10041808_A_Pola2
  gRNA
tgttctataccgacagactg

SEQ ID NO: 41809 - DNA, 20 bp, Artificial Sequence
  MKO10041809_A_Polb
  gRNA
tccacaagtacaatgcgtac

SEQ ID NO: 41810 - DNA, 20 bp, Artificial Sequence
  MKO10041810_A_Polb
  gRNA
caatgccagtaactcgagtc

SEQ ID NO: 41811 - DNA, 20 bp, Artificial Sequence
  MKO10041811_A_Polb
  gRNA
acctgtacgcattgtacttg

SEQ ID NO: 41812 - DNA, 20 bp, Artificial Sequence
  MKO10041812_A_Pold1
  gRNA
cgcaccctacgaagccaacg

SEQ ID NO: 41813 - DNA, 20 bp, Artificial Sequence
  MKO10041813_A_Pold1
  gRNA
cttcgtagggtgcgaagctc

SEQ ID NO: 41814 - DNA, 20 bp, Artificial Sequence
  MKO10041814_A_Pold1
  gRNA
gcggcccaccctacgtgccc

SEQ ID NO: 41815 - DNA, 20 bp, Artificial Sequence
  MKO10041815_A_Pold2
  gRNA
tatccacccggatgacgagc

SEQ ID NO: 41816 - DNA, 20 bp, Artificial Sequence
  MKO10041816_A_Pold2
  gRNA
tctaagaccagctcgtcatc

SEQ ID NO: 41817 - DNA, 20 bp, Artificial Sequence
  MKO10041817_A_Pold2
  gRNA
gtctctcgagtcatcctcgc

SEQ ID NO: 41818 - DNA, 20 bp, Artificial Sequence
  MKO10041818_A_Pold3
  gRNA
tgtttcaggtgacttacaag

SEQ ID NO: 41819 - DNA, 20 bp, Artificial Sequence
  MKO10041819_A_Pold3
  gRNA
tgtcctttagcatagctttc

SEQ ID NO: 41820 - DNA, 20 bp, Artificial Sequence
  MKO10041820_A_Pold3
  gRNA
tctggcagtcttatacagaa

SEQ ID NO: 41821 - DNA, 20 bp, Artificial Sequence
  MKO10041821_A_Pold4
  gRNA
gatgaaccgcttccgaccca

SEQ ID NO: 41822 - DNA, 20 bp, Artificial Sequence
  MKO10041822_A_Pold4
  gRNA
tgtacaaggcccatactgcc

SEQ ID NO: 41823 - DNA, 20 bp, Artificial Sequence
  MKO10041823_A_Pold4
  gRNA
tggccgccatgggtcggaag

SEQ ID NO: 41824 - DNA, 20 bp, Artificial Sequence
  MKO10041824_A_Poldip2
  gRNA
cgggcgctctatgctatccc

SEQ ID NO: 41825 - DNA, 20 bp, Artificial Sequence
  MKO10041825_A_Poldip2
  gRNA
ctgggatagcatagagcgcc

SEQ ID NO: 41826 - DNA, 20 bp, Artificial Sequence
  MKO10041826_A_Poldip2
  gRNA
cccactcaggaaccgtgcag

SEQ ID NO: 41827 - DNA, 20 bp, Artificial Sequence
  MKO10041827_A_Poldip3
  gRNA
gcgggcttgtgaacgcagca

SEQ ID NO: 41828 - DNA, 20 bp, Artificial Sequence
  MKO10041828_A_Poldip3
  gRNA
ggaggtgtccggtctcgagt

SEQ ID NO: 41829 - DNA, 20 bp, Artificial Sequence
  MKO10041829_A_Poldip3
  gRNA
caaggctttggttcgaacag

SEQ ID NO: 41830 - DNA, 20 bp, Artificial Sequence
  MKO10041830_A_Pole2
  gRNA
catgatcgaacgatctgtcg

SEQ ID NO: 41831 - DNA, 20 bp, Artificial Sequence
  MKO10041831_A_Pole2
  gRNA
agatcgttcgatcatgttcg

SEQ ID NO: 41832 - DNA, 20 bp, Artificial Sequence
  MKO10041832_A_Pole2
  gRNA
catgctgcaccaaccttatt

SEQ ID NO: 41833 - DNA, 20 bp, Artificial Sequence
  MKO10041833_A_Pole3
  gRNA
ttggagatgttgacaccgtc

SEQ ID NO: 41834 - DNA, 20 bp, Artificial Sequence
  MKO10041834_A_Pole3
  gRNA
cggcgcgggagatggcgctt

SEQ ID NO: 41835 - DNA, 20 bp, Artificial Sequence
  MKO10041835_A_Pole3
  gRNA
tgcccaacgccgtcatcacc

SEQ ID NO: 41836 - DNA, 20 bp, Artificial Sequence
  MKO10041836_A_Pole4
  gRNA
tgtcccgccagcgttacgtc

SEQ ID NO: 41837 - DNA, 20 bp, Artificial Sequence
  MKO10041837_A_Pole4
  gRNA
gtcgcaccgcggcacgcgcc

SEQ ID NO: 41838 - DNA, 20 bp, Artificial Sequence
  MKO10041838_A_Pole4
  gRNA
tttgttgcaggaactgttcg

SEQ ID NO: 41839 - DNA, 20 bp, Artificial Sequence
  MKO10041839_A_Pole
  gRNA
acttacggtttggtttcgaa

SEQ ID NO: 41840 - DNA, 20 bp, Artificial Sequence
  MKO10041840_A_Pole
  gRNA
agacaaacgcttagtcagcg

SEQ ID NO: 41841 - DNA, 20 bp, Artificial Sequence
  MKO10041841_A_Pole
  gRNA
ctcgctgcaatgtagaaata

SEQ ID NO: 41842 - DNA, 20 bp, Artificial Sequence
  MKO10041842_A_Polg2
  gRNA
cttctatgaagggtcgagat

SEQ ID NO: 41843 - DNA, 20 bp, Artificial Sequence
  MKO10041843_A_Polg2
  gRNA
gtctgattgctgttcgaaac

SEQ ID NO: 41844 - DNA, 20 bp, Artificial Sequence
  MKO10041844_A_Polg2
  gRNA
ggacgtagacctgggcacgc

SEQ ID NO: 41845 - DNA, 20 bp, Artificial Sequence
  MKO10041845_A_Polg
  gRNA
ttaggtcagccggcgatagc

SEQ ID NO: 41846 - DNA, 20 bp, Artificial Sequence
  MKO10041846_A_Polg
  gRNA
gccggctgacctaatccctt

SEQ ID NO: 41847 - DNA, 20 bp, Artificial Sequence
  MKO10041847_A_Polg
  gRNA
agggaggtccccccacataa

SEQ ID NO: 41848 - DNA, 20 bp, Artificial Sequence
  MKO10041848_A_Polh
  gRNA
tatataagcctcatcgatgc

SEQ ID NO: 41849 - DNA, 20 bp, Artificial Sequence
  MKO10041849_A_Polh
  gRNA
agctatgaagcccgagcatt

SEQ ID NO: 41850 - DNA, 20 bp, Artificial Sequence
  MKO10041850_A_Polh
  gRNA
gcactgacccatgtgagacc

SEQ ID NO: 41851 - DNA, 20 bp, Artificial Sequence
  MKO10041851_A_Poli
  gRNA
gagcccgagctgattataca

SEQ ID NO: 41852 - DNA, 20 bp, Artificial Sequence
  MKO10041852_A_Poli
  gRNA
cctcagctggtcctcgtgaa

SEQ ID NO: 41853 - DNA, 20 bp, Artificial Sequence
  MKO10041853_A_Poli
  gRNA
tatgaatgtgagagatgcga

SEQ ID NO: 41854 - DNA, 20 bp, Artificial Sequence
  MKO10041854_A_Polk
  gRNA
aaattaccagccagcaacta

SEQ ID NO: 41855 - DNA, 20 bp, Artificial Sequence
  MKO10041855_A_Polk
  gRNA
agcctcttagcaataaatcc

SEQ ID NO: 41856 - DNA, 20 bp, Artificial Sequence
  MKO10041856_A_Polk
  gRNA
ggtgtccgtgcagccatgcc

SEQ ID NO: 41857 - DNA, 20 bp, Artificial Sequence
  MKO10041857_A_Poll
  gRNA
gccatccgcttgccaattcc

SEQ ID NO: 41858 - DNA, 20 bp, Artificial Sequence
  MKO10041858_A_Poll
  gRNA
agagcccacattatgcccgc

SEQ ID NO: 41859 - DNA, 20 bp, Artificial Sequence
  MKO10041859_A_Poll
  gRNA
tggtcctgggtaaatcccgc

SEQ ID NO: 41860 - DNA, 20 bp, Artificial Sequence
  MKO10041860_A_Polm
  gRNA
cttgagcaccgaggccgctc

SEQ ID NO: 41861 - DNA, 20 bp, Artificial Sequence
  MKO10041861_A_Polm
  gRNA
agcgggcttcgaagccaacg

SEQ ID NO: 41862 - DNA, 20 bp, Artificial Sequence
  MKO10041862_A_Polm
  gRNA
gctggcatcgacgctgagac

SEQ ID NO: 41863 - DNA, 20 bp, Artificial Sequence
  MKO10041863_A_Poln
  gRNA
ttccacacagctgagcgcca

SEQ ID NO: 41864 - DNA, 20 bp, Artificial Sequence
  MKO10041864_A_Poln
  gRNA
gctgtgtgatgttagatatt

SEQ ID NO: 41865 - DNA, 20 bp, Artificial Sequence
  MKO10041865_A_Poln
  gRNA
ctcagtattagctgaacatg

SEQ ID NO: 41866 - DNA, 20 bp, Artificial Sequence
  MKO10041866_A_Polq
  gRNA
aaacggcggcgttcatcgtc

SEQ ID NO: 41867 - DNA, 20 bp, Artificial Sequence
  MKO10041867_A_Polq
  gRNA
aacgccgccgtttcctactc

SEQ ID NO: 41868 - DNA, 20 bp, Artificial Sequence
  MKO10041868_A_Polq
  gRNA
gctggtcaatcgcctcattg

SEQ ID NO: 41869 - DNA, 20 bp, Artificial Sequence
  MKO10041869_A_Polr1a
  gRNA
cattacaaatcctcgatacg

SEQ ID NO: 41870 - DNA, 20 bp, Artificial Sequence
  MKO10041870_A_Polr1a
  gRNA
cccaggtagtccacgtatcg

SEQ ID NO: 41871 - DNA, 20 bp, Artificial Sequence
  MKO10041871_A_Polr1a
  gRNA
aacaggtaaattgcagcccg

SEQ ID NO: 41872 - DNA, 20 bp, Artificial Sequence
  MKO10041872_A_Polr1b
  gRNA
gcgcatatctcttaccattg

SEQ ID NO: 41873 - DNA, 20 bp, Artificial Sequence
  MKO10041873_A_Polr1b
  gRNA
tgctcaatgaggactcgagg

SEQ ID NO: 41874 - DNA, 20 bp, Artificial Sequence
  MKO10041874_A_Polr1b
  gRNA
gaacatgaacctgcactatg

SEQ ID NO: 41875 - DNA, 20 bp, Artificial Sequence
  MKO10041875_A_Polr1c
  gRNA
gtagttaccgggaaagtccg

SEQ ID NO: 41876 - DNA, 20 bp, Artificial Sequence
  MKO10041876_A_Polr1c
  gRNA
tctccggaaagcattggcga

SEQ ID NO: 41877 - DNA, 20 bp, Artificial Sequence
  MKO10041877_A_Polr1c
  gRNA
ctgccatcgccaatgctttc

SEQ ID NO: 41878 - DNA, 20 bp, Artificial Sequence
  MKO10041878_A_Polr1d
  gRNA
tgtgacatttgtcctgcacg

SEQ ID NO: 41879 - DNA, 20 bp, Artificial Sequence
  MKO10041879_A_Polr1d
  gRNA
tgcacgagggactagaatgt

SEQ ID NO: 41880 - DNA, 20 bp, Artificial Sequence
  MKO10041880_A_Polr1d
  gRNA
tcccaacaggaaagccatag

SEQ ID NO: 41881 - DNA, 20 bp, Artificial Sequence
  MKO10041881_A_Polr1e
  gRNA
cccaaaattgtttccgacat

SEQ ID NO: 41882 - DNA, 20 bp, Artificial Sequence
  MKO10041882_A_Polr1e
  gRNA
cggcatcatagacttccatc

SEQ ID NO: 41883 - DNA, 20 bp, Artificial Sequence
  MKO10041883_A_Polr1e
  gRNA
taagtcggtgctgttgtaca

SEQ ID NO: 41884 - DNA, 20 bp, Artificial Sequence
  MKO10041884_A_Polr2a
  gRNA
caaccccgaatccggcgctc

SEQ ID NO: 41885 - DNA, 20 bp, Artificial Sequence
  MKO10041885_A_Polr2a
  gRNA
gcatggagcctcgctatgcc

SEQ ID NO: 41886 - DNA, 20 bp, Artificial Sequence
  MKO10041886_A_Polr2a
  gRNA
acatgcgtaagccgtttctt

SEQ ID NO: 41887 - DNA, 20 bp, Artificial Sequence
  MKO10041887_A_Polr2b
  gRNA
cgtgctgagcttcggcctgt

SEQ ID NO: 41888 - DNA, 20 bp, Artificial Sequence
  MKO10041888_A_Polr2b
  gRNA
taggtggagcgcagcataat

SEQ ID NO: 41889 - DNA, 20 bp, Artificial Sequence
  MKO10041889_A_Polr2b
  gRNA
tttgttatgtcaacgtaaag

SEQ ID NO: 41890 - DNA, 20 bp, Artificial Sequence
  MKO10041890_A_Polr2c
  gRNA
atcgcagaggtgcccataat

SEQ ID NO: 41891 - DNA, 20 bp, Artificial Sequence
  MKO10041891_A_Polr2c
  gRNA
agacactaaccggaataacc

SEQ ID NO: 41892 - DNA, 20 bp, Artificial Sequence
  MKO10041892_A_Polr2c
  gRNA
gtagggtggccaattccatt

SEQ ID NO: 41893 - DNA, 20 bp, Artificial Sequence
  MKO10041893_A_Polr2d
  gRNA
tagtactcacctgcgcacac

SEQ ID NO: 41894 - DNA, 20 bp, Artificial Sequence
  MKO10041894_A_Polr2d
  gRNA
cctaaagtaatggcggcggg

SEQ ID NO: 41895 - DNA, 20 bp, Artificial Sequence
  MKO10041895_A_Polr2d
  gRNA
tgaagcgggccgtgtagttg

SEQ ID NO: 41896 - DNA, 20 bp, Artificial Sequence
  MKO10041896_A_Polr2e
  gRNA
catcacacgggcgctgattg

SEQ ID NO: 41897 - DNA, 20 bp, Artificial Sequence
  MKO10041897_A_Polr2e
  gRNA
gcgccttggccgtccttcgc

SEQ ID NO: 41898 - DNA, 20 bp, Artificial Sequence
  MKO10041898_A_Polr2e
  gRNA
atcccaaagtaccgtgccac

SEQ ID NO: 41899 - DNA, 20 bp, Artificial Sequence
  MKO10041899_A_Polr2f
  gRNA
cttacgcgatctgaagagcc

SEQ ID NO: 41900 - DNA, 20 bp, Artificial Sequence
  MKO10041900_A_Polr2f
  gRNA
ggacgaaggacttgacgact

SEQ ID NO: 41901 - DNA, 20 bp, Artificial Sequence
  MKO10041901_A_Polr2f
  gRNA
caggtaccggcgaatgatga

SEQ ID NO: 41902 - DNA, 20 bp, Artificial Sequence
  MKO10041902_A_Polr2g
  gRNA
gtcaccaccatcgacaatat

SEQ ID NO: 41903 - DNA, 20 bp, Artificial Sequence
  MKO10041903_A_Polr2g
  gRNA
cgaagtatcgtgggtgcagg

SEQ ID NO: 41904 - DNA, 20 bp, Artificial Sequence
  MKO10041904_A_Polr2g
  gRNA
ccccccttgctataagacca

SEQ ID NO: 41905 - DNA, 20 bp, Artificial Sequence
  MKO10041905_A_Polr2h
  gRNA
agctctgcgtacgtgtccta

SEQ ID NO: 41906 - DNA, 20 bp, Artificial Sequence
  MKO10041906_A_Polr2h
  gRNA
caatacttacctaagtccac

SEQ ID NO: 41907 - DNA, 20 bp, Artificial Sequence
  MKO10041907_A_Polr2h
  gRNA
aagtactagctataaccaac

SEQ ID NO: 41908 - DNA, 20 bp, Artificial Sequence
  MKO10041908_A_Polr2i
  gRNA
gtcctccgtccggggcaacg

SEQ ID NO: 41909 - DNA, 20 bp, Artificial Sequence
  MKO10041909_A_Polr2i
  gRNA
ccggaattgcgattaccagc

SEQ ID NO: 41910 - DNA, 20 bp, Artificial Sequence
  MKO10041910_A_Polr2i
  gRNA
ccccacgttgccccggacgg

SEQ ID NO: 41911 - DNA, 20 bp, Artificial Sequence
  MKO10041911_A_Polr2j
  gRNA
cgctaggatgaacgctcctc

SEQ ID NO: 41912 - DNA, 20 bp, Artificial Sequence
  MKO10041912_A_Polr2j
  gRNA
cgagtcgttcttgctcttcg

SEQ ID NO: 41913 - DNA, 20 bp, Artificial Sequence
  MKO10041913_A_Polr2j
  gRNA
cccggaatcgctcctccaga

SEQ ID NO: 41914 - DNA, 20 bp, Artificial Sequence
  MKO10041914_A_Polr2k
  gRNA
tctgcttccaagcgctcaaa

SEQ ID NO: 41915 - DNA, 20 bp, Artificial Sequence
  MKO10041915_A_Polr2k
  gRNA
acttggctttaaaatctttg

SEQ ID NO: 41916 - DNA, 20 bp, Artificial Sequence
  MKO10041916_A_Polr2k
  gRNA
cctccacaaatatatatcat

SEQ ID NO: 41917 - DNA, 20 bp, Artificial Sequence
  MKO10041917_A_Polr2l
  gRNA
gtctcacccctccgtgtact

SEQ ID NO: 41918 - DNA, 20 bp, Artificial Sequence
  MKO10041918_A_Polr2l
  gRNA
cagggatgccctggacgctc

SEQ ID NO: 41919 - DNA, 20 bp, Artificial Sequence
  MKO10041919_A_Polr2l
  gRNA
agacgccgccatgatcatcc

SEQ ID NO: 41920 - DNA, 20 bp, Artificial Sequence
  MKO10041920_A_Polr2m
  gRNA
cgttgcgcaaaagtctctcc

SEQ ID NO: 41921 - DNA, 20 bp, Artificial Sequence
  MKO10041921_A_Polr2m
  gRNA
gctttccatagaagagtcgc

SEQ ID NO: 41922 - DNA, 20 bp, Artificial Sequence
  MKO10041922_A_Polr2m
  gRNA
atgctccttaacttcggatg

SEQ ID NO: 41923 - DNA, 20 bp, Artificial Sequence
  MKO10041923_A_Polr3a
  gRNA
aaccacgcccccttgttgta

SEQ ID NO: 41924 - DNA, 20 bp, Artificial Sequence
  MKO10041924_A_Polr3a
  gRNA
ctcgcttctgcaggtaggtt

SEQ ID NO: 41925 - DNA, 20 bp, Artificial Sequence
  MKO10041925_A_Polr3a
  gRNA
ctaacctacctgcagaagcg

SEQ ID NO: 41926 - DNA, 20 bp, Artificial Sequence
  MKO10041926_A_Polr3b
  gRNA
caagtgatgctgaccccatg

SEQ ID NO: 41927 - DNA, 20 bp, Artificial Sequence
  MKO10041927_A_Polr3b
  gRNA
ttgaagctttcttcaacatc

SEQ ID NO: 41928 - DNA, 20 bp, Artificial Sequence
  MKO10041928_A_Polr3b
  gRNA
agtctatgtgctgtttcacc

SEQ ID NO: 41929 - DNA, 20 bp, Artificial Sequence
  MKO10041929_A_Polr3c
  gRNA
ccactgcgctcacgattgct

SEQ ID NO: 41930 - DNA, 20 bp, Artificial Sequence
  MKO10041930_A_Polr3c
  gRNA
ccaagcaatcgtgagcgcag

SEQ ID NO: 41931 - DNA, 20 bp, Artificial Sequence
  MKO10041931_A_Polr3c
  gRNA
atcaaatgcatttgtgcgac

SEQ ID NO: 41932 - DNA, 20 bp, Artificial Sequence
  MKO10041932_A_Polr3d
  gRNA
gtggacgtgcctgccgtcaa

SEQ ID NO: 41933 - DNA, 20 bp, Artificial Sequence
  MKO10041933_A_Polr3d
  gRNA
ttggcagttcatcgatgacc

SEQ ID NO: 41934 - DNA, 20 bp, Artificial Sequence
  MKO10041934_A_Polr3d
  gRNA
gtcccattctatcttcgagc

SEQ ID NO: 41935 - DNA, 20 bp, Artificial Sequence
  MKO10041935_A_Polr3e
  gRNA
ggagcagatcgcactgaacg

SEQ ID NO: 41936 - DNA, 20 bp, Artificial Sequence
  MKO10041936_A_Polr3e
  gRNA
gttatgccgctgcactctac

SEQ ID NO: 41937 - DNA, 20 bp, Artificial Sequence
  MKO10041937_A_Polr3e
  gRNA
tgtgctagtctcgtcagcac

SEQ ID NO: 41938 - DNA, 20 bp, Artificial Sequence
  MKO10041938_A_Polr3f
  gRNA
gtccgataaccaggaaaaac

SEQ ID NO: 41939 - DNA, 20 bp, Artificial Sequence
  MKO10041939_A_Polr3f
  gRNA
catggataacagtctattga

SEQ ID NO: 41940 - DNA, 20 bp, Artificial Sequence
  MKO10041940_A_Polr3f
  gRNA
catcaatagactgttatcca

SEQ ID NO: 41941 - DNA, 20 bp, Artificial Sequence
  MKO10041941_A_Polr3gl
  gRNA
ctattgacaacgccatcgat

SEQ ID NO: 41942 - DNA, 20 bp, Artificial Sequence
  MKO10041942_A_Polr3gl
  gRNA
cttaccagggttccaatcga

SEQ ID NO: 41943 - DNA, 20 bp, Artificial Sequence
  MKO10041943_A_Polr3gl
  gRNA
gtgagctcaagattcgagtg

SEQ ID NO: 41944 - DNA, 20 bp, Artificial Sequence
  MKO10041944_A_Polr3g
  gRNA
agatgtgttgaaaacgattg

SEQ ID NO: 41945 - DNA, 20 bp, Artificial Sequence
  MKO10041945_A_Polr3g
  gRNA
ataggatacagactacaagc

SEQ ID NO: 41946 - DNA, 20 bp, Artificial Sequence
  MKO10041946_A_Polr3g
  gRNA
gaaccacccgaagaaaaaca

SEQ ID NO: 41947 - DNA, 20 bp, Artificial Sequence
  MKO10041947_A_Polr3h
  gRNA
tgcacaggtcgtatacaacg

SEQ ID NO: 41948 - DNA, 20 bp, Artificial Sequence
  MKO10041948_A_Polr3h
  gRNA
cgaggctgcctcttcaagcg

SEQ ID NO: 41949 - DNA, 20 bp, Artificial Sequence
  MKO10041949_A_Polr3h
  gRNA
tctagtccatttccgctacg

SEQ ID NO: 41950 - DNA, 20 bp, Artificial Sequence
  MKO10041950_A_Polr3k
  gRNA
cgtccataatatcacccgta

SEQ ID NO: 41951 - DNA, 20 bp, Artificial Sequence
  MKO10041951_A_Polr3k
  gRNA
ctgcgggaacggactcattg

SEQ ID NO: 41952 - DNA, 20 bp, Artificial Sequence
  MKO10041952_A_Polr3k
  gRNA
gagaatgtggactctactgc

SEQ ID NO: 41953 - DNA, 20 bp, Artificial Sequence
  MKO10041953_A_Polrmt
  gRNA
atgtacaacaccgtgatgct

SEQ ID NO: 41954 - DNA, 20 bp, Artificial Sequence
  MKO10041954_A_Polrmt
  gRNA
atatatgtccttgagcagcg

SEQ ID NO: 41955 - DNA, 20 bp, Artificial Sequence
  MKO10041955_A_Polrmt
  gRNA
aggatgttcgcaccatccag

SEQ ID NO: 41956 - DNA, 20 bp, Artificial Sequence
  MKO10041956_A_Pom121l12
  gRNA
cttgggcccagggggtcgac

SEQ ID NO: 41957 - DNA, 20 bp, Artificial Sequence
  MKO10041957_A_Pom121l12
  gRNA
gacgatttgatggacctctg

SEQ ID NO: 41958 - DNA, 20 bp, Artificial Sequence
  MKO10041958_A_Pom121l12
  gRNA
tgtgacccctgtcgaccccc

SEQ ID NO: 41959 - DNA, 20 bp, Artificial Sequence
  MKO10041959_A_Pom121l2
  gRNA
ctgcgagccgccgacccgct

SEQ ID NO: 41960 - DNA, 20 bp, Artificial Sequence
  MKO10041960_A_Pom121l2
  gRNA
cctcactgacgaaagcggta

SEQ ID NO: 41961 - DNA, 12 bp, Artificial Sequence
  MKO10041961_A_Pom121l2
  gRNA
aaagtgtctgtc

SEQ ID NO: 41962 - DNA, 20 bp, Artificial Sequence
  MKO10041962_A_Pom121
  gRNA
gctgaatgggatatcgtctt

SEQ ID NO: 41963 - DNA, 20 bp, Artificial Sequence
  MKO10041963_A_Pom121
  gRNA
tgcgagaccgtttgttcaag

SEQ ID NO: 41964 - DNA, 20 bp, Artificial Sequence
  MKO10041964_A_Pom121
  gRNA
ttcagcattcgagccccttg

SEQ ID NO: 41965 - DNA, 20 bp, Artificial Sequence
  MKO10041965_A_Pomc
  gRNA
acgtcatgggtcacttccgc

SEQ ID NO: 41966 - DNA, 20 bp, Artificial Sequence
  MKO10041966_A_Pomc
  gRNA
ttgcaaactcgacctctcgc

SEQ ID NO: 41967 - DNA, 20 bp, Artificial Sequence
  MKO10041967_A_Pomc
  gRNA
gagcgactgtagcagaatct

SEQ ID NO: 41968 - DNA, 20 bp, Artificial Sequence
  MKO10041968_A_Pomgnt1
  gRNA
cttccacatccagcacccgt

SEQ ID NO: 41969 - DNA, 20 bp, Artificial Sequence
  MKO10041969_A_Pomgnt1
  gRNA
ggactgctgcctctgcgccg

SEQ ID NO: 41970 - DNA, 20 bp, Artificial Sequence
  MKO10041970_A_Pomgnt1
  gRNA
tgattgctctccgagtgtcc

SEQ ID NO: 41971 - DNA, 20 bp, Artificial Sequence
  MKO10041971_A_Pomgnt2
  gRNA
ctacaccccctataagacgc

SEQ ID NO: 41972 - DNA, 20 bp, Artificial Sequence
  MKO10041972_A_Pomgnt2
  gRNA
actgaagatcgactacccga

SEQ ID NO: 41973 - DNA, 20 bp, Artificial Sequence
  MKO10041973_A_Pomgnt2
  gRNA
gttcaaccacggtagccccg

SEQ ID NO: 41974 - DNA, 20 bp, Artificial Sequence
  MKO10041974_A_Pomk
  gRNA
cgccccattctgaagtagcc

SEQ ID NO: 41975 - DNA, 20 bp, Artificial Sequence
  MKO10041975_A_Pomk
  gRNA
ctcaccgaatatcacccctt

SEQ ID NO: 41976 - DNA, 20 bp, Artificial Sequence
  MKO10041976_A_Pomk
  gRNA
aggacagcgcctagagtccg

SEQ ID NO: 41977 - DNA, 20 bp, Artificial Sequence
  MKO10041977_A_Pomp
  gRNA
agaagatcgtgactctcgaa

SEQ ID NO: 41978 - DNA, 20 bp, Artificial Sequence
  MKO10041978_A_Pomp
  gRNA
ctggctgagagctccgcgac

SEQ ID NO: 41979 - DNA, 20 bp, Artificial Sequence
  MKO10041979_A_Pomp
  gRNA
tcatcttgtcctggttgagc

SEQ ID NO: 41980 - DNA, 20 bp, Artificial Sequence
  MKO10041980_A_Pomt1
  gRNA
tgggactacttacccgacta

SEQ ID NO: 41981 - DNA, 20 bp, Artificial Sequence
  MKO10041981_A_Pomt1
  gRNA
gccgccctgctgatgctcat

SEQ ID NO: 41982 - DNA, 20 bp, Artificial Sequence
  MKO10041982_A_Pomt1
  gRNA
aagcgctggcagcaggcgta

SEQ ID NO: 41983 - DNA, 20 bp, Artificial Sequence
  MKO10041983_A_Pomt2
  gRNA
aggtaccatcatacccgctc

SEQ ID NO: 41984 - DNA, 20 bp, Artificial Sequence
  MKO10041984_A_Pomt2
  gRNA
ctttgcctacctcaccgtac

SEQ ID NO: 41985 - DNA, 20 bp, Artificial Sequence
  MKO10041985_A_Pomt2
  gRNA
agtacaactcctgtgctaac

SEQ ID NO: 41986 - DNA, 20 bp, Artificial Sequence
  MKO10041986_A_Pon1
  gRNA
agtttcgatcccagtaagcc

SEQ ID NO: 41987 - DNA, 20 bp, Artificial Sequence
  MKO10041987_A_Pon1
  gRNA
gttctactggcgttacttca

SEQ ID NO: 41988 - DNA, 20 bp, Artificial Sequence
  MKO10041988_A_Pon1
  gRNA
ttcaaggggctaaagtatcc

SEQ ID NO: 41989 - DNA, 20 bp, Artificial Sequence
  MKO10041989_A_Pon2
  gRNA
agctttgcaccggataagcc

SEQ ID NO: 41990 - DNA, 20 bp, Artificial Sequence
  MKO10041990_A_Pon2
  gRNA
atctcaaagacgagagaccg

SEQ ID NO: 41991 - DNA, 20 bp, Artificial Sequence
  MKO10041991_A_Pon2
  gRNA
acataccgattcctttaatg

SEQ ID NO: 41992 - DNA, 20 bp, Artificial Sequence
  MKO10041992_A_Pon3
  gRNA
gcgtttgcaccggacaaacc

SEQ ID NO: 41993 - DNA, 20 bp, Artificial Sequence
  MKO10041993_A_Pon3
  gRNA
acttaccgaggccctcaatc

SEQ ID NO: 41994 - DNA, 20 bp, Artificial Sequence
  MKO10041994_A_Pon3
  gRNA
atttccagtgcttgcgcctc

SEQ ID NO: 41995 - DNA, 20 bp, Artificial Sequence
  MKO10041995_A_Pop1
  gRNA
ctcacatctggcacgccaaa

SEQ ID NO: 41996 - DNA, 20 bp, Artificial Sequence
  MKO10041996_A_Pop1
  gRNA
gccatctcctgcaaccgtct

SEQ ID NO: 41997 - DNA, 20 bp, Artificial Sequence
  MKO10041997_A_Pop1
  gRNA
acagagtcacgttactgggc

SEQ ID NO: 41998 - DNA, 20 bp, Artificial Sequence
  MKO10041998_A_Pop4
  gRNA
ccggcttgagcccattgcac

SEQ ID NO: 41999 - DNA, 20 bp, Artificial Sequence
  MKO10041999_A_Pop4
  gRNA
gcacaaaggcctcagcccgc

SEQ ID NO: 42000 - DNA, 20 bp, Artificial Sequence
  MKO10042000_A_Pop4
  gRNA
atttcactcgcctaaagcca

SEQ ID NO: 42001 - DNA, 20 bp, Artificial Sequence
  MKO10042001_A_Pop5
  gRNA
caaacggcagcgcgcgtcct

SEQ ID NO: 42002 - DNA, 20 bp, Artificial Sequence
  MKO10042002_A_Pop5
  gRNA
cgtgctactgcgatgccgga

SEQ ID NO: 42003 - DNA, 20 bp, Artificial Sequence
  MKO10042003_A_Pop5
  gRNA
cgccgaaggccccgtgcacc

SEQ ID NO: 42004 - DNA, 20 bp, Artificial Sequence
  MKO10042004_A_Pop7
  gRNA
ggccgccaatacctccaccg

SEQ ID NO: 42005 - DNA, 20 bp, Artificial Sequence
  MKO10042005_A_Pop7
  gRNA
agaaccccgctgtgccatcg

SEQ ID NO: 42006 - DNA, 20 bp, Artificial Sequence
  MKO10042006_A_Pop7
  gRNA
ggtggggaagtcgcttccga

SEQ ID NO: 42007 - DNA, 20 bp, Artificial Sequence
  MKO10042007_A_Popdc2
  gRNA
cctccgggagggtattcacc

SEQ ID NO: 42008 - DNA, 20 bp, Artificial Sequence
  MKO10042008_A_Popdc2
  gRNA
gttgctggaggcgcggaaca

SEQ ID NO: 42009 - DNA, 20 bp, Artificial Sequence
  MKO10042009_A_Popdc2
  gRNA
gtcgaagcgtaacccaaact

SEQ ID NO: 42010 - DNA, 20 bp, Artificial Sequence
  MKO10042010_A_Popdc3
  gRNA
ggattcgctaagacccacag

SEQ ID NO: 42011 - DNA, 20 bp, Artificial Sequence
  MKO10042011_A_Popdc3
  gRNA
atctactctttgcgcagcat

SEQ ID NO: 42012 - DNA, 20 bp, Artificial Sequence
  MKO10042012_A_Popdc3
  gRNA
ggagcactgctacgccatgc

SEQ ID NO: 42013 - DNA, 20 bp, Artificial Sequence
  MKO10042013_A_Porcn
  gRNA
cgacccaaaccatgtgcagc

SEQ ID NO: 42014 - DNA, 20 bp, Artificial Sequence
  MKO10042014_A_Porcn
  gRNA
gcttcgcctgccgcctcctt

SEQ ID NO: 42015 - DNA, 20 bp, Artificial Sequence
  MKO10042015_A_Porcn
  gRNA
gcaccatcgtctttgggccc

SEQ ID NO: 42016 - DNA, 20 bp, Artificial Sequence
  MKO10042016_A_Por
  gRNA
ctcccagacgggaaccgcgg

SEQ ID NO: 42017 - DNA, 20 bp, Artificial Sequence
  MKO10042017_A_Por
  gRNA
ggggtcgccttctccgtatg

SEQ ID NO: 42018 - DNA, 20 bp, Artificial Sequence
  MKO10042018_A_Por
  gRNA
cgaccccaccgacaacgcgc

SEQ ID NO: 42019 - DNA, 20 bp, Artificial Sequence
  MKO10042019_A_Postn
  gRNA
gtacttcgcgccgagtaacg

SEQ ID NO: 42020 - DNA, 20 bp, Artificial Sequence
  MKO10042020_A_Postn
  gRNA
cctgatcccgacccctgatg

SEQ ID NO: 42021 - DNA, 20 bp, Artificial Sequence
  MKO10042021_A_Postn
  gRNA
ttctcccaagcctcgttact

SEQ ID NO: 42022 - DNA, 20 bp, Artificial Sequence
  MKO10042022_A_Pot1a
  gRNA
ctacgataaccacgttcaag

SEQ ID NO: 42023 - DNA, 20 bp, Artificial Sequence
  MKO10042023_A_Pot1a
  gRNA
aagcctccgtatgttagcaa

SEQ ID NO: 42024 - DNA, 20 bp, Artificial Sequence
  MKO10042024_A_Pot1a
  gRNA
catcgaacggctacagagtc

SEQ ID NO: 42025 - DNA, 20 bp, Artificial Sequence
  MKO10042025_A_Pot1b
  gRNA
tgtggatgcccacgttcgca

SEQ ID NO: 42026 - DNA, 20 bp, Artificial Sequence
  MKO10042026_A_Pot1b
  gRNA
aagcctccgtacttaagcaa

SEQ ID NO: 42027 - DNA, 20 bp, Artificial Sequence
  MKO10042027_A_Pot1b
  gRNA
tggtagaagccttgcgaacg

SEQ ID NO: 42028 - DNA, 20 bp, Artificial Sequence
  MKO10042028_A_Poteg
  gRNA
gaaatgtgcgaccgtgctgc

SEQ ID NO: 42029 - DNA, 20 bp, Artificial Sequence
  MKO10042029_A_Poteg
  gRNA
gttgtacacagcgtagtgca

SEQ ID NO: 42030 - DNA, 20 bp, Artificial Sequence
  MKO10042030_A_Poteg
  gRNA
gcattacgctacgctattga

SEQ ID NO: 42031 - DNA, 20 bp, Artificial Sequence
  MKO10042031_A_Pou1f1
  gRNA
gcgcttcgcccacgtttgtc

SEQ ID NO: 42032 - DNA, 20 bp, Artificial Sequence
  MKO10042032_A_Pou1f1
  gRNA
cgcggcctctgagtttaagc

SEQ ID NO: 42033 - DNA, 20 bp, Artificial Sequence
  MKO10042033_A_Pou1f1
  gRNA
ctccccagaaatccgagaac

SEQ ID NO: 42034 - DNA, 20 bp, Artificial Sequence
  MKO10042034_A_Pou2af1
  gRNA
tagctcctcaccgcggtcgg

SEQ ID NO: 42035 - DNA, 20 bp, Artificial Sequence
  MKO10042035_A_Pou2af1
  gRNA
ataccagggtgttcgagtca

SEQ ID NO: 42036 - DNA, 20 bp, Artificial Sequence
  MKO10042036_A_Pou2af1
  gRNA
cgcccctcacttatttcccg

SEQ ID NO: 42037 - DNA, 20 bp, Artificial Sequence
  MKO10042037_A_Pou2f1
  gRNA
cgaatctcccgactcttcac

SEQ ID NO: 42038 - DNA, 20 bp, Artificial Sequence
  MKO10042038_A_Pou2f1
  gRNA
cagaaacagcccgtgcccgt

SEQ ID NO: 42039 - DNA, 20 bp, Artificial Sequence
  MKO10042039_A_Pou2f1
  gRNA
ctacctggtgaagatgtccg

SEQ ID NO: 42040 - DNA, 20 bp, Artificial Sequence
  MKO10042040_A_Pou2f2
  gRNA
cgggtgcttaccttggtgct

SEQ ID NO: 42041 - DNA, 20 bp, Artificial Sequence
  MKO10042041_A_Pou2f2
  gRNA
gactccccgtcagagcacac

SEQ ID NO: 42042 - DNA, 20 bp, Artificial Sequence
  MKO10042042_A_Pou2f2
  gRNA
cctgacctgatggttaatgt

SEQ ID NO: 42043 - DNA, 20 bp, Artificial Sequence
  MKO10042043_A_Pou2f3
  gRNA
acggacacccgcagcacttt

SEQ ID NO: 42044 - DNA, 20 bp, Artificial Sequence
  MKO10042044_A_Pou2f3
  gRNA
ctacttgcagattaagacgg

SEQ ID NO: 42045 - DNA, 20 bp, Artificial Sequence
  MKO10042045_A_Pou2f3
  gRNA
tggcacctaccccagacatt

SEQ ID NO: 42046 - DNA, 20 bp, Artificial Sequence
  MKO10042046_A_Pou3f1
  gRNA
ccaccgcgcagtatctgccg

SEQ ID NO: 42047 - DNA, 20 bp, Artificial Sequence
  MKO10042047_A_Pou3f1
  gRNA
gccccgcggcagatactgcg

SEQ ID NO: 42048 - DNA, 20 bp, Artificial Sequence
  MKO10042048_A_Pou3f1
  gRNA
aggcgcataaacgtcgtcca

SEQ ID NO: 42049 - DNA, 20 bp, Artificial Sequence
  MKO10042049_A_Pou3f2
  gRNA
atgccgttcaccgtgaagct

SEQ ID NO: 42050 - DNA, 20 bp, Artificial Sequence
  MKO10042050_A_Pou3f2
  gRNA
cgaatagagcaaaccgccgt

SEQ ID NO: 42051 - DNA, 20 bp, Artificial Sequence
  MKO10042051_A_Pou3f2
  gRNA
cgccgtagtcgccctgcacc

SEQ ID NO: 42052 - DNA, 20 bp, Artificial Sequence
  MKO10042052_A_Pou3f3
  gRNA
acctgcgagtagacatcgtc

SEQ ID NO: 42053 - DNA, 20 bp, Artificial Sequence
  MKO10042053_A_Pou3f3
  gRNA
ctaccggggggacccgtcct

SEQ ID NO: 42054 - DNA, 20 bp, Artificial Sequence
  MKO10042054_A_Pou3f3
  gRNA
cggcatgctgagcgcgcccc

SEQ ID NO: 42055 - DNA, 20 bp, Artificial Sequence
  MKO10042055_A_Pou3f4
  gRNA
gcttcacgcaagccgacgtg

SEQ ID NO: 42056 - DNA, 20 bp, Artificial Sequence
  MKO10042056_A_Pou3f4
  gRNA
gtgtgcgaataaacctcgtg

SEQ ID NO: 42057 - DNA, 20 bp, Artificial Sequence
  MKO10042057_A_Pou3f4
  gRNA
ggttagtgtgcggcgagtgg

SEQ ID NO: 42058 - DNA, 20 bp, Artificial Sequence
  MKO10042058_A_Pou4f1
  gRNA
cgagcgacggcgacgagatg

SEQ ID NO: 42059 - DNA, 20 bp, Artificial Sequence
  MKO10042059_A_Pou4f1
  gRNA
gcggccatgaacatgccgtc

SEQ ID NO: 42060 - DNA, 20 bp, Artificial Sequence
  MKO10042060_A_Pou4f1
  gRNA
agcgacgggtacttgtgctc

SEQ ID NO: 42061 - DNA, 20 bp, Artificial Sequence
  MKO10042061_A_Pou4f2
  gRNA
cttagtgagcttctcgcggt

SEQ ID NO: 42062 - DNA, 20 bp, Artificial Sequence
  MKO10042062_A_Pou4f2
  gRNA
catctcgcacccgtccgctc

SEQ ID NO: 42063 - DNA, 20 bp, Artificial Sequence
  MKO10042063_A_Pou4f2
  gRNA
gacatacgcaccggtggggt

SEQ ID NO: 42064 - DNA, 20 bp, Artificial Sequence
  MKO10042064_A_Pou4f3
  gRNA
gctcaagtaagtcgccctcg

SEQ ID NO: 42065 - DNA, 20 bp, Artificial Sequence
  MKO10042065_A_Pou4f3
  gRNA
ccctgatgtaccgcgtgatg

SEQ ID NO: 42066 - DNA, 20 bp, Artificial Sequence
  MKO10042066_A_Pou4f3
  gRNA
tcggcgcatggcctcagagc

SEQ ID NO: 42067 - DNA, 20 bp, Artificial Sequence
  MKO10042067_A_Pou5f1
  gRNA
catcctaggtggttcgagta

SEQ ID NO: 42068 - DNA, 20 bp, Artificial Sequence
  MKO10042068_A_Pou5f1
  gRNA
ctagcattgagaaccgtgtg

SEQ ID NO: 42069 - DNA, 20 bp, Artificial Sequence
  MKO10042069_A_Pou5f1
  gRNA
caaggcctcgaagcgacaga

SEQ ID NO: 42070 - DNA, 20 bp, Artificial Sequence
  MKO10042070_A_Pou5f2
  gRNA
gacgtttgaagacctccgcc

SEQ ID NO: 42071 - DNA, 20 bp, Artificial Sequence
  MKO10042071_A_Pou5f2
  gRNA
atgtatctcaaggcgatgta

SEQ ID NO: 42072 - DNA, 20 bp, Artificial Sequence
  MKO10042072_A_Pou5f2
  gRNA
tggttggccaactgcccatc

SEQ ID NO: 42073 - DNA, 20 bp, Artificial Sequence
  MKO10042073_A_Pou6f1
  gRNA
agtgcgccgcttgcgtttct

SEQ ID NO: 42074 - DNA, 20 bp, Artificial Sequence
  MKO10042074_A_Pou6f1
  gRNA
gaacgtctttcagatcccgt

SEQ ID NO: 42075 - DNA, 20 bp, Artificial Sequence
  MKO10042075_A_Pou6f1
  gRNA
gcagctgacggcttgagcgc

SEQ ID NO: 42076 - DNA, 20 bp, Artificial Sequence
  MKO10042076_A_Pou6f2
  gRNA
tagctgtcccgccatgttga

SEQ ID NO: 42077 - DNA, 20 bp, Artificial Sequence
  MKO10042077_A_Pou6f2
  gRNA
atgtttgtgagattcgcggt

SEQ ID NO: 42078 - DNA, 20 bp, Artificial Sequence
  MKO10042078_A_Pou6f2
  gRNA
cggtgacggaaggctatgtc

SEQ ID NO: 42079 - DNA, 20 bp, Artificial Sequence
  MKO10042079_A_Pp2d1
  gRNA
tccaggtcgatggagcgctt

SEQ ID NO: 42080 - DNA, 20 bp, Artificial Sequence
  MKO10042080_A_Pp2d1
  gRNA
ctgctgctgcataaccgtaa

SEQ ID NO: 42081 - DNA, 20 bp, Artificial Sequence
  MKO10042081_A_Pp2d1
  gRNA
aacttgccaaagtccattag

SEQ ID NO: 42082 - DNA, 20 bp, Artificial Sequence
  MKO10042082_A_Ppa1
  gRNA
ccgatttcacaaacatcgat

SEQ ID NO: 42083 - DNA, 20 bp, Artificial Sequence
  MKO10042083_A_Ppa1
  gRNA
acgctggtccaacgccaaaa

SEQ ID NO: 42084 - DNA, 20 bp, Artificial Sequence
  MKO10042084_A_Ppa1
  gRNA
cttaccttgtctgcataaat

SEQ ID NO: 42085 - DNA, 20 bp, Artificial Sequence
  MKO10042085_A_Ppa2
  gRNA
gaattacggggccctccctc

SEQ ID NO: 42086 - DNA, 20 bp, Artificial Sequence
  MKO10042086_A_Ppa2
  gRNA
atcttggcatttgtccaccg

SEQ ID NO: 42087 - DNA, 20 bp, Artificial Sequence
  MKO10042087_A_Ppa2
  gRNA
ggcacgaaatgatgaatatg

SEQ ID NO: 42088 - DNA, 20 bp, Artificial Sequence
  MKO10042088_A_Ppan
  gRNA
cgcgtgaacacgaacgagtg

SEQ ID NO: 42089 - DNA, 20 bp, Artificial Sequence
  MKO10042089_A_Ppan
  gRNA
cgcgattgcgcttctgatgt

SEQ ID NO: 42090 - DNA, 20 bp, Artificial Sequence
  MKO10042090_A_Ppan
  gRNA
gctcaacagcttcggccccc

SEQ ID NO: 42091 - DNA, 20 bp, Artificial Sequence
  MKO10042091_A_Ppap2a
  gRNA
gcaacacgcaaatcacatcg

SEQ ID NO: 42092 - DNA, 20 bp, Artificial Sequence
  MKO10042092_A_Ppap2a
  gRNA
tgaccatgttcgacaagacg

SEQ ID NO: 42093 - DNA, 20 bp, Artificial Sequence
  MKO10042093_A_Ppap2a
  gRNA
tccgacggctttgtaaatgg

SEQ ID NO: 42094 - DNA, 20 bp, Artificial Sequence
  MKO10042094_A_Ppap2b
  gRNA
ggggatcgtcatcgccatcc

SEQ ID NO: 42095 - DNA, 20 bp, Artificial Sequence
  MKO10042095_A_Ppap2b
  gRNA
accattaagccttaccgtcg

SEQ ID NO: 42096 - DNA, 20 bp, Artificial Sequence
  MKO10042096_A_Ppap2b
  gRNA
ctaccggatctattacctca

SEQ ID NO: 42097 - DNA, 20 bp, Artificial Sequence
  MKO10042097_A_Ppap2c
  gRNA
gtgatcgtgtctggacggta

SEQ ID NO: 42098 - DNA, 20 bp, Artificial Sequence
  MKO10042098_A_Ppap2c
  gRNA
cagtagaacccccgcttata

SEQ ID NO: 42099 - DNA, 20 bp, Artificial Sequence
  MKO10042099_A_Ppap2c
  gRNA
ctcattgggagaagcctacc

SEQ ID NO: 42100 - DNA, 20 bp, Artificial Sequence
  MKO10042100_A_Ppapdc1a
  gRNA
aattcggagatgcgctgcac

SEQ ID NO: 42101 - DNA, 20 bp, Artificial Sequence
  MKO10042101_A_Ppapdc1a
  gRNA
tccgaattcatcaccccatc

SEQ ID NO: 42102 - DNA, 20 bp, Artificial Sequence
  MKO10042102_A_Ppapdc1a
  gRNA
tttgcgtggtgaaaattatc

SEQ ID NO: 42103 - DNA, 20 bp, Artificial Sequence
  MKO10042103_A_Ppapdc1b
  gRNA
aagtattccgcctccacgta

SEQ ID NO: 42104 - DNA, 20 bp, Artificial Sequence
  MKO10042104_A_Ppapdc1b
  gRNA
ctacaggaacccgtacgtgg

SEQ ID NO: 42105 - DNA, 20 bp, Artificial Sequence
  MKO10042105_A_Ppapdc1b
  gRNA
ccattctgatctgacgtgca

SEQ ID NO: 42106 - DNA, 20 bp, Artificial Sequence
  MKO10042106_A_Ppapdc2
  gRNA
ccgacccgcgcacaatcaaa

SEQ ID NO: 42107 - DNA, 20 bp, Artificial Sequence
  MKO10042107_A_Ppapdc2
  gRNA
atcgctgctgaactgccgcg

SEQ ID NO: 42108 - DNA, 20 bp, Artificial Sequence
  MKO10042108_A_Ppapdc2
  gRNA
aagttcatgcgggcgtcctc

SEQ ID NO: 42109 - DNA, 20 bp, Artificial Sequence
  MKO10042109_A_Ppapdc3
  gRNA
acgctcccgtgccccgtcgc

SEQ ID NO: 42110 - DNA, 20 bp, Artificial Sequence
  MKO10042110_A_Ppapdc3
  gRNA
cagaagctcatcaagcgccg

SEQ ID NO: 42111 - DNA, 20 bp, Artificial Sequence
  MKO10042111_A_Ppapdc3
  gRNA
aggatggtgcccccgatcca

SEQ ID NO: 42112 - DNA, 20 bp, Artificial Sequence
  MKO10042112_A_Ppara
  gRNA
gccgggggactcgtccgtgc

SEQ ID NO: 42113 - DNA, 20 bp, Artificial Sequence
  MKO10042113_A_Ppara
  gRNA
caaggcccgggtcatactcg

SEQ ID NO: 42114 - DNA, 20 bp, Artificial Sequence
  MKO10042114_A_Ppara
  gRNA
atattcgacactcgatgttc

SEQ ID NO: 42115 - DNA, 20 bp, Artificial Sequence
  MKO10042115_A_Ppard
  gRNA
tcgagtatgagaagtgcgat

SEQ ID NO: 42116 - DNA, 20 bp, Artificial Sequence
  MKO10042116_A_Ppard
  gRNA
cctccggcatccgtccaaag

SEQ ID NO: 42117 - DNA, 20 bp, Artificial Sequence
  MKO10042117_A_Ppard
  gRNA
cctcgtgcacgccatacttg

SEQ ID NO: 42118 - DNA, 20 bp, Artificial Sequence
  MKO10042118_A_Ppargc1a
  gRNA
gcaatccgtcttcatccacg

SEQ ID NO: 42119 - DNA, 20 bp, Artificial Sequence
  MKO10042119_A_Ppargc1a
  gRNA
cttacctcaaatatgttcgc

SEQ ID NO: 42120 - DNA, 20 bp, Artificial Sequence
  MKO10042120_A_Ppargc1a
  gRNA
ggttggatatgatttccgat

SEQ ID NO: 42121 - DNA, 20 bp, Artificial Sequence
  MKO10042121_A_Ppargc1b
  gRNA
tgttagcaagccctaccgcc

SEQ ID NO: 42122 - DNA, 20 bp, Artificial Sequence
  MKO10042122_A_Ppargc1b
  gRNA
agctcgtccacgtcagacgc

SEQ ID NO: 42123 - DNA, 20 bp, Artificial Sequence
  MKO10042123_A_Ppargc1b
  gRNA
gacagggcagcaccgaagtg

SEQ ID NO: 42124 - DNA, 20 bp, Artificial Sequence
  MKO10042124_A_Pparg
  gRNA
tgtcaagatcgccctcgcct

SEQ ID NO: 42125 - DNA, 20 bp, Artificial Sequence
  MKO10042125_A_Pparg
  gRNA
tggcatccgcccaaacctga

SEQ ID NO: 42126 - DNA, 20 bp, Artificial Sequence
  MKO10042126_A_Pparg
  gRNA
cacagagctgattccgaagt

SEQ ID NO: 42127 - DNA, 20 bp, Artificial Sequence
  MKO10042127_A_Ppat
  gRNA
cgttcaccagttccccgtta

SEQ ID NO: 42128 - DNA, 20 bp, Artificial Sequence
  MKO10042128_A_Ppat
  gRNA
tggtgaacgccgctcggttg

SEQ ID NO: 42129 - DNA, 20 bp, Artificial Sequence
  MKO10042129_A_Ppat
  gRNA
ataagacgcccgatgcagag

SEQ ID NO: 42130 - DNA, 20 bp, Artificial Sequence
  MKO10042130_A_Ppbp
  gRNA
atgacgattctcttgacgcc

SEQ ID NO: 42131 - DNA, 20 bp, Artificial Sequence
  MKO10042131_A_Ppbp
  gRNA
ctgcagcgcagttcgatata

SEQ ID NO: 42132 - DNA, 20 bp, Artificial Sequence
  MKO10042132_A_Ppbp
  gRNA
gagccagcgcaacaaggatc

SEQ ID NO: 42133 - DNA, 20 bp, Artificial Sequence
  MKO10042133_A_Ppcdc
  gRNA
gtggaagcgccgttctgacc

SEQ ID NO: 42134 - DNA, 20 bp, Artificial Sequence
  MKO10042134_A_Ppcdc
  gRNA
ttctccacattgacctgcgg

SEQ ID NO: 42135 - DNA, 20 bp, Artificial Sequence
  MKO10042135_A_Ppcdc
  gRNA
gctcaaggcctttggctacg

SEQ ID NO: 42136 - DNA, 20 bp, Artificial Sequence
  MKO10042136_A_Ppcs
  gRNA
agcgcgagccgtgcgctttc

SEQ ID NO: 42137 - DNA, 20 bp, Artificial Sequence
  MKO10042137_A_Ppcs
  gRNA
gttcttgtaccgagcgcgct

SEQ ID NO: 42138 - DNA, 20 bp, Artificial Sequence
  MKO10042138_A_Ppcs
  gRNA
gccaaagatgctttcccctc

SEQ ID NO: 42139 - DNA, 20 bp, Artificial Sequence
  MKO10042139_A_Ppdpf
  gRNA
acttacgccgatagtagtca

SEQ ID NO: 42140 - DNA, 20 bp, Artificial Sequence
  MKO10042140_A_Ppdpf
  gRNA
cagctcggcagaatcccccc

SEQ ID NO: 42141 - DNA, 20 bp, Artificial Sequence
  MKO10042141_A_Ppdpf
  gRNA
cttacccggggactggagca

SEQ ID NO: 42142 - DNA, 20 bp, Artificial Sequence
  MKO10042142_A_Ppef1
  gRNA
tcagtcgagctctgtaccgc

SEQ ID NO: 42143 - DNA, 20 bp, Artificial Sequence
  MKO10042143_A_Ppef1
  gRNA
ccgcgttagtcatccaaaat

SEQ ID NO: 42144 - DNA, 20 bp, Artificial Sequence
  MKO10042144_A_Ppef1
  gRNA
tcatgctcactacgtcttag

SEQ ID NO: 42145 - DNA, 20 bp, Artificial Sequence
  MKO10042145_A_Ppef2
  gRNA
gattcaagacgtatcgagca

SEQ ID NO: 42146 - DNA, 20 bp, Artificial Sequence
  MKO10042146_A_Ppef2
  gRNA
caccgaagagagattcgccc

SEQ ID NO: 42147 - DNA, 20 bp, Artificial Sequence
  MKO10042147_A_Ppef2
  gRNA
tgtagcgccggtaccatctc

SEQ ID NO: 42148 - DNA, 20 bp, Artificial Sequence
  MKO10042148_A_Ppfia1
  gRNA
ggtacgagagcgactacgag

SEQ ID NO: 42149 - DNA, 20 bp, Artificial Sequence
  MKO10042149_A_Ppfia1
  gRNA
gcgctctctccggatgacag

SEQ ID NO: 42150 - DNA, 20 bp, Artificial Sequence
  MKO10042150_A_Ppfia1
  gRNA
ggagtttgctgcgctcacga

SEQ ID NO: 42151 - DNA, 20 bp, Artificial Sequence
  MKO10042151_A_Ppfia2
  gRNA
gccttgtgtcccgacatgaa

SEQ ID NO: 42152 - DNA, 20 bp, Artificial Sequence
  MKO10042152_A_Ppfia2
  gRNA
caggacatcgaatccctaac

SEQ ID NO: 42153 - DNA, 20 bp, Artificial Sequence
  MKO10042153_A_Ppfia2
  gRNA
ttcttagtgaccgttcatgt

SEQ ID NO: 42154 - DNA, 20 bp, Artificial Sequence
  MKO10042154_A_Ppfia3
  gRNA
acgttccctgcgaatgactg

SEQ ID NO: 42155 - DNA, 20 bp, Artificial Sequence
  MKO10042155_A_Ppfia3
  gRNA
aacgttcgtgcctggacacc

SEQ ID NO: 42156 - DNA, 20 bp, Artificial Sequence
  MKO10042156_A_Ppfia3
  gRNA
tgcaggtccgggaaagattg

SEQ ID NO: 42157 - DNA, 20 bp, Artificial Sequence
  MKO10042157_A_Ppfia4
  gRNA
tcatccgcaatgaccgctca

SEQ ID NO: 42158 - DNA, 20 bp, Artificial Sequence
  MKO10042158_A_Ppfia4
  gRNA
tctagagcgcgttactacct

SEQ ID NO: 42159 - DNA, 20 bp, Artificial Sequence
  MKO10042159_A_Ppfia4
  gRNA
gcctcgtgtcccgccatgag

SEQ ID NO: 42160 - DNA, 20 bp, Artificial Sequence
  MKO10042160_A_Ppfibp1
  gRNA
gcgcgcaagcttcccataaa

SEQ ID NO: 42161 - DNA, 20 bp, Artificial Sequence
  MKO10042161_A_Ppfibp1
  gRNA
tcatctccaacaatccacgc

SEQ ID NO: 42162 - DNA, 20 bp, Artificial Sequence
  MKO10042162_A_Ppfibp1
  gRNA
ggcacgtctagaaaacgaca

SEQ ID NO: 42163 - DNA, 20 bp, Artificial Sequence
  MKO10042163_A_Ppfibp2
  gRNA
ttctgacgctagtcatatgc

SEQ ID NO: 42164 - DNA, 20 bp, Artificial Sequence
  MKO10042164_A_Ppfibp2
  gRNA
taaagagtccctcatactac

SEQ ID NO: 42165 - DNA, 20 bp, Artificial Sequence
  MKO10042165_A_Ppfibp2
  gRNA
gagaactcacctgtagtatg

SEQ ID NO: 42166 - DNA, 20 bp, Artificial Sequence
  MKO10042166_A_Pphln1
  gRNA
tgagggtgacgcatctctcg

SEQ ID NO: 42167 - DNA, 20 bp, Artificial Sequence
  MKO10042167_A_Pphln1
  gRNA
gcacgcgttctctcggaagt

SEQ ID NO: 42168 - DNA, 20 bp, Artificial Sequence
  MKO10042168_A_Pphln1
  gRNA
cttcacattattcgagagat

SEQ ID NO: 42169 - DNA, 20 bp, Artificial Sequence
  MKO10042169_A_Ppia
  gRNA
tgaaaccaacctgctgtctt

SEQ ID NO: 42170 - DNA, 20 bp, Artificial Sequence
  MKO10042170_A_Ppia
  gRNA
tgtttcttaccattcagtct

SEQ ID NO: 42171 - DNA, 20 bp, Artificial Sequence
  MKO10042171_A_Ppia
  gRNA
aatacctggcacatgaatcc

SEQ ID NO: 42172 - DNA, 20 bp, Artificial Sequence
  MKO10042172_A_Ppib
  gRNA
gatgtcatcattgtcgactc

SEQ ID NO: 42173 - DNA, 20 bp, Artificial Sequence
  MKO10042173_A_Ppib
  gRNA
tctgtaggacgagtcgtctt

SEQ ID NO: 42174 - DNA, 20 bp, Artificial Sequence
  MKO10042174_A_Ppib
  gRNA
acttacctctcctgtagcta

SEQ ID NO: 42175 - DNA, 20 bp, Artificial Sequence
  MKO10042175_A_Ppic
  gRNA
agtcggtgagtgggcggtca

SEQ ID NO: 42176 - DNA, 20 bp, Artificial Sequence
  MKO10042176_A_Ppic
  gRNA
tggaaacgttgtacccaaga

SEQ ID NO: 42177 - DNA, 20 bp, Artificial Sequence
  MKO10042177_A_Ppic
  gRNA
aacttcgtggctctggcaac

SEQ ID NO: 42178 - DNA, 20 bp, Artificial Sequence
  MKO10042178_A_Ppid
  gRNA
gtatacgtacttcggtggaa

SEQ ID NO: 42179 - DNA, 20 bp, Artificial Sequence
  MKO10042179_A_Ppid
  gRNA
atctctgcagcatgatcggg

SEQ ID NO: 42180 - DNA, 20 bp, Artificial Sequence
  MKO10042180_A_Ppid
  gRNA
gaactgagagccattcgtat

SEQ ID NO: 42181 - DNA, 20 bp, Artificial Sequence
  MKO10042181_A_Ppie
  gRNA
acggacgattcgtgtcaatt

SEQ ID NO: 42182 - DNA, 20 bp, Artificial Sequence
  MKO10042182_A_Ppie
  gRNA
ggcagcagctatcgacaaca

SEQ ID NO: 42183 - DNA, 20 bp, Artificial Sequence
  MKO10042183_A_Ppie
  gRNA
catgctgcatttatcccctt

SEQ ID NO: 42184 - DNA, 20 bp, Artificial Sequence
  MKO10042184_A_Ppif
  gRNA
gttggggcctgcgttcgcca

SEQ ID NO: 42185 - DNA, 20 bp, Artificial Sequence
  MKO10042185_A_Ppif
  gRNA
gatgtcgtgccaaagactgc

SEQ ID NO: 42186 - DNA, 20 bp, Artificial Sequence
  MKO10042186_A_Ppif
  gRNA
agcccttctcaccagtgcat

SEQ ID NO: 42187 - DNA, 20 bp, Artificial Sequence
  MKO10042187_A_Ppig
  gRNA
gcgaaagttctcacacgttt

SEQ ID NO: 42188 - DNA, 20 bp, Artificial Sequence
  MKO10042188_A_Ppig
  gRNA
tctccaggtgaaaaagggac

SEQ ID NO: 42189 - DNA, 20 bp, Artificial Sequence
  MKO10042189_A_Ppig
  gRNA
atttatggaggattctttga

SEQ ID NO: 42190 - DNA, 20 bp, Artificial Sequence
  MKO10042190_A_Ppih
  gRNA
tgagactgacctgaactctc

SEQ ID NO: 42191 - DNA, 20 bp, Artificial Sequence
  MKO10042191_A_Ppih
  gRNA
ccctttaggcaattctgcac

SEQ ID NO: 42192 - DNA, 20 bp, Artificial Sequence
  MKO10042192_A_Ppih
  gRNA
ttcaagtccagtcaatccag

SEQ ID NO: 42193 - DNA, 20 bp, Artificial Sequence
  MKO10042193_A_Ppil1
  gRNA
cttgccgtccagccattgcg

SEQ ID NO: 42194 - DNA, 20 bp, Artificial Sequence
  MKO10042194_A_Ppil1
  gRNA
cgaggtggcgcatctattta

SEQ ID NO: 42195 - DNA, 20 bp, Artificial Sequence
  MKO10042195_A_Ppil1
  gRNA
agaatcttcacgtcgtccac

SEQ ID NO: 42196 - DNA, 20 bp, Artificial Sequence
  MKO10042196_A_Ppil2
  gRNA
aagtcaaagacgacaccttc

SEQ ID NO: 42197 - DNA, 20 bp, Artificial Sequence
  MKO10042197_A_Ppil2
  gRNA
ccatcaggaacattgttccc

SEQ ID NO: 42198 - DNA, 20 bp, Artificial Sequence
  MKO10042198_A_Ppil2
  gRNA
tacccagtctgcaccccaga

SEQ ID NO: 42199 - DNA, 20 bp, Artificial Sequence
  MKO10042199_A_Ppil3
  gRNA
acagccgttgtagtaattac

SEQ ID NO: 42200 - DNA, 20 bp, Artificial Sequence
  MKO10042200_A_Ppil3
  gRNA
tgttatacaggtactggaag

SEQ ID NO: 42201 - DNA, 20 bp, Artificial Sequence
  MKO10042201_A_Ppil3
  gRNA
tgtgccagtaattactacaa

SEQ ID NO: 42202 - DNA, 20 bp, Artificial Sequence
  MKO10042202_A_Ppil4
  gRNA
acactgtatgaacaccgtca

SEQ ID NO: 42203 - DNA, 20 bp, Artificial Sequence
  MKO10042203_A_Ppil4
  gRNA
gatcccacggggactggccg

SEQ ID NO: 42204 - DNA, 20 bp, Artificial Sequence
  MKO10042204_A_Ppil4
  gRNA
gaaaacttagattaccttga

SEQ ID NO: 42205 - DNA, 20 bp, Artificial Sequence
  MKO10042205_A_Ppil6
  gRNA
tgtgggatgtgatcgatgtc

SEQ ID NO: 42206 - DNA, 20 bp, Artificial Sequence
  MKO10042206_A_Ppil6
  gRNA
cccgtacagatttgaagatc

SEQ ID NO: 42207 - DNA, 20 bp, Artificial Sequence
  MKO10042207_A_Ppil6
  gRNA
accggatcttcaaatctgta

SEQ ID NO: 42208 - DNA, 20 bp, Artificial Sequence
  MKO10042208_A_Ppip5k1
  gRNA
taagccacagctttgtcgag

SEQ ID NO: 42209 - DNA, 20 bp, Artificial Sequence
  MKO10042209_A_Ppip5k1
  gRNA
atcttcccaccttacggaag

SEQ ID NO: 42210 - DNA, 20 bp, Artificial Sequence
  MKO10042210_A_Ppip5k1
  gRNA
aagccagcgcctcttccgta

SEQ ID NO: 42211 - DNA, 20 bp, Artificial Sequence
  MKO10042211_A_Ppip5k2
  gRNA
cggttcaggattgcataccg

SEQ ID NO: 42212 - DNA, 20 bp, Artificial Sequence
  MKO10042212_A_Ppip5k2
  gRNA
gtcagcacatttcatgcgat

SEQ ID NO: 42213 - DNA, 20 bp, Artificial Sequence
  MKO10042213_A_Ppip5k2
  gRNA
ttcgggcccaacaaagaatc

SEQ ID NO: 42214 - DNA, 20 bp, Artificial Sequence
  MKO10042214_A_Ppl
  gRNA
aggccgacccgagagtcaac

SEQ ID NO: 42215 - DNA, 20 bp, Artificial Sequence
  MKO10042215_A_Ppl
  gRNA
tggtcacgcgctctttcagc

SEQ ID NO: 42216 - DNA, 20 bp, Artificial Sequence
  MKO10042216_A_Ppl
  gRNA
tcggcgatcatgtccccctg

SEQ ID NO: 42217 - DNA, 20 bp, Artificial Sequence
  MKO10042217_A_Ppm1a
  gRNA
ctgcgtcaaccgatgatatg

SEQ ID NO: 42218 - DNA, 20 bp, Artificial Sequence
  MKO10042218_A_Ppm1a
  gRNA
gcggctttaccacatatcat

SEQ ID NO: 42219 - DNA, 20 bp, Artificial Sequence
  MKO10042219_A_Ppm1a
  gRNA
caccgcctctgccgagactt

SEQ ID NO: 42220 - DNA, 20 bp, Artificial Sequence
  MKO10042220_A_Ppm1b
  gRNA
cacttggaatcacgggttga

SEQ ID NO: 42221 - DNA, 20 bp, Artificial Sequence
  MKO10042221_A_Ppm1b
  gRNA
gaccagttgtccaagccgtg

SEQ ID NO: 42222 - DNA, 20 bp, Artificial Sequence
  MKO10042222_A_Ppm1b
  gRNA
aatatcccgaatttacctcc

SEQ ID NO: 42223 - DNA, 20 bp, Artificial Sequence
  MKO10042223_A_Ppm1d
  gRNA
aagatgtatgtagcgcatgt

SEQ ID NO: 42224 - DNA, 20 bp, Artificial Sequence
  MKO10042224_A_Ppm1d
  gRNA
tgaaccgagtagtttggaaa

SEQ ID NO: 42225 - DNA, 20 bp, Artificial Sequence
  MKO10042225_A_Ppm1d
  gRNA
gccccgtattataaccacac

SEQ ID NO: 42226 - DNA, 20 bp, Artificial Sequence
  MKO10042226_A_Ppm1e
  gRNA
acacgttaacttagtgcgcc

SEQ ID NO: 42227 - DNA, 20 bp, Artificial Sequence
  MKO10042227_A_Ppm1e
  gRNA
gacgtctcataataaatctg

SEQ ID NO: 42228 - DNA, 20 bp, Artificial Sequence
  MKO10042228_A_Ppm1e
  gRNA
aatcgcccacccatgccacg

SEQ ID NO: 42229 - DNA, 20 bp, Artificial Sequence
  MKO10042229_A_Ppm1f
  gRNA
ccatcttgcgtcgtgtgttc

SEQ ID NO: 42230 - DNA, 20 bp, Artificial Sequence
  MKO10042230_A_Ppm1f
  gRNA
gccgcacaaaccggagcgac

SEQ ID NO: 42231 - DNA, 20 bp, Artificial Sequence
  MKO10042231_A_Ppm1f
  gRNA
cgctcccccatcgtttgctg

SEQ ID NO: 42232 - DNA, 20 bp, Artificial Sequence
  MKO10042232_A_Ppm1g
  gRNA
gaagagctgctgacgcgata

SEQ ID NO: 42233 - DNA, 20 bp, Artificial Sequence
  MKO10042233_A_Ppm1g
  gRNA
cagtaccgggctcactaatt

SEQ ID NO: 42234 - DNA, 20 bp, Artificial Sequence
  MKO10042234_A_Ppm1g
  gRNA
tcacaactgtattcctgagc

SEQ ID NO: 42235 - DNA, 20 bp, Artificial Sequence
  MKO10042235_A_Ppm1h
  gRNA
accttcaaatcgaacgcgag

SEQ ID NO: 42236 - DNA, 20 bp, Artificial Sequence
  MKO10042236_A_Ppm1h
  gRNA
cactcgagtgaaatctgccg

SEQ ID NO: 42237 - DNA, 20 bp, Artificial Sequence
  MKO10042237_A_Ppm1h
  gRNA
gccgcccgtacgggaagcgc

SEQ ID NO: 42238 - DNA, 20 bp, Artificial Sequence
  MKO10042238_A_Ppm1j
  gRNA
caccagcgtgcccatcaaac

SEQ ID NO: 42239 - DNA, 20 bp, Artificial Sequence
  MKO10042239_A_Ppm1j
  gRNA
ggagatcattccgatgtccc

SEQ ID NO: 42240 - DNA, 20 bp, Artificial Sequence
  MKO10042240_A_Ppm1j
  gRNA
tctggtagggtcatcaatgc

SEQ ID NO: 42241 - DNA, 20 bp, Artificial Sequence
  MKO10042241_A_Ppm1k
  gRNA
ccatgctgacgacagtttcc

SEQ ID NO: 42242 - DNA, 20 bp, Artificial Sequence
  MKO10042242_A_Ppm1k
  gRNA
gttcaacaccatctctcaac

SEQ ID NO: 42243 - DNA, 20 bp, Artificial Sequence
  MKO10042243_A_Ppm1k
  gRNA
gtttgtagcttggaatagtt

SEQ ID NO: 42244 - DNA, 20 bp, Artificial Sequence
  MKO10042244_A_Ppm1l
  gRNA
ctttgatgggcacggcggcg

SEQ ID NO: 42245 - DNA, 20 bp, Artificial Sequence
  MKO10042245_A_Ppm1l
  gRNA
tcgattcatcaaggagcgct

SEQ ID NO: 42246 - DNA, 20 bp, Artificial Sequence
  MKO10042246_A_Ppm1l
  gRNA
attatgcagaacgatcgtct

SEQ ID NO: 42247 - DNA, 20 bp, Artificial Sequence
  MKO10042247_A_Ppm1m
  gRNA
gtgcccagtagtgacccgtc

SEQ ID NO: 42248 - DNA, 20 bp, Artificial Sequence
  MKO10042248_A_Ppm1m
  gRNA
cttgcgggaagctatgcatc

SEQ ID NO: 42249 - DNA, 20 bp, Artificial Sequence
  MKO10042249_A_Ppm1m
  gRNA
ccccagtgacccccagttcg

SEQ ID NO: 42250 - DNA, 20 bp, Artificial Sequence
  MKO10042250_A_Ppm1n
  gRNA
gggtcctgaaaaccgtgttt

SEQ ID NO: 42251 - DNA, 20 bp, Artificial Sequence
  MKO10042251_A_Ppm1n
  gRNA
cttacctcttgacattcccc

SEQ ID NO: 42252 - DNA, 20 bp, Artificial Sequence
  MKO10042252_A_Ppm1n
  gRNA
ttgtgaggaggcaattagca

SEQ ID NO: 42253 - DNA, 20 bp, Artificial Sequence
  MKO10042253_A_Ppme1
  gRNA
gaggccattccgccctttcc

SEQ ID NO: 42254 - DNA, 20 bp, Artificial Sequence
  MKO10042254_A_Ppme1
  gRNA
gtaaagtcccgcttccgtcc

SEQ ID NO: 42255 - DNA, 20 bp, Artificial Sequence
  MKO10042255_A_Ppme1
  gRNA
gagtcagtactttgagtcaa

SEQ ID NO: 42256 - DNA, 20 bp, Artificial Sequence
  MKO10042256_A_Ppox
  gRNA
ctttgccgaggagtatttgc

SEQ ID NO: 42257 - DNA, 20 bp, Artificial Sequence
  MKO10042257_A_Ppox
  gRNA
ccagccggcctaatccctcg

SEQ ID NO: 42258 - DNA, 20 bp, Artificial Sequence
  MKO10042258_A_Ppox
  gRNA
accggtgggtttgttcagct

SEQ ID NO: 42259 - DNA, 20 bp, Artificial Sequence
  MKO10042259_A_Ppp1ca
  gRNA
ctgacagagaacgagatccg

SEQ ID NO: 42260 - DNA, 20 bp, Artificial Sequence
  MKO10042260_A_Ppp1ca
  gRNA
agcagattaggcgtattatg

SEQ ID NO: 42261 - DNA, 20 bp, Artificial Sequence
  MKO10042261_A_Ppp1ca
  gRNA
catactcaaacagccgtaga

SEQ ID NO: 42262 - DNA, 20 bp, Artificial Sequence
  MKO10042262_A_Ppp1cb
  gRNA
ccagtacgaggatgtcgtcc

SEQ ID NO: 42263 - DNA, 20 bp, Artificial Sequence
  MKO10042263_A_Ppp1cb
  gRNA
acctgtatcaggtacgtcag

SEQ ID NO: 42264 - DNA, 20 bp, Artificial Sequence
  MKO10042264_A_Ppp1cb
  gRNA
cccactgacgtacctgatac

SEQ ID NO: 42265 - DNA, 20 bp, Artificial Sequence
  MKO10042265_A_Ppp1cc
  gRNA
cactcaccacatatcttgag

SEQ ID NO: 42266 - DNA, 20 bp, Artificial Sequence
  MKO10042266_A_Ppp1cc
  gRNA
tcacccttaggtgacatcca

SEQ ID NO: 42267 - DNA, 20 bp, Artificial Sequence
  MKO10042267_A_Ppp1cc
  gRNA
acagtgagagggtccaagcc

SEQ ID NO: 42268 - DNA, 20 bp, Artificial Sequence
  MKO10042268_A_Ppp1r10
  gRNA
acttacttgacgagcacttc

SEQ ID NO: 42269 - DNA, 20 bp, Artificial Sequence
  MKO10042269_A_Ppp1r10
  gRNA
accttcagagctccggaaat

SEQ ID NO: 42270 - DNA, 20 bp, Artificial Sequence
  MKO10042270_A_Ppp1r10
  gRNA
gctacaagcttctgaacaac

SEQ ID NO: 42271 - DNA, 20 bp, Artificial Sequence
  MKO10042271_A_Ppp1r11
  gRNA
ttgtaggacgccgtcctttg

SEQ ID NO: 42272 - DNA, 20 bp, Artificial Sequence
  MKO10042272_A_Ppp1r11
  gRNA
agtaaccgttgtctcagtga

SEQ ID NO: 42273 - DNA, 20 bp, Artificial Sequence
  MKO10042273_A_Ppp1r11
  gRNA
gctttagccatggcggagac

SEQ ID NO: 42274 - DNA, 20 bp, Artificial Sequence
  MKO10042274_A_Ppp1r12a
  gRNA
catgccggacgtcactgatg

SEQ ID NO: 42275 - DNA, 20 bp, Artificial Sequence
  MKO10042275_A_Ppp1r12a
  gRNA
tgcaatatcgagatatccac

SEQ ID NO: 42276 - DNA, 20 bp, Artificial Sequence
  MKO10042276_A_Ppp1r12a
  gRNA
gggtaatgctaagagacgcg

SEQ ID NO: 42277 - DNA, 20 bp, Artificial Sequence
  MKO10042277_A_Ppp1r12b
  gRNA
gcgttgatctagagcagtca

SEQ ID NO: 42278 - DNA, 20 bp, Artificial Sequence
  MKO10042278_A_Ppp1r12b
  gRNA
tccagccctcgttgtcctgc

SEQ ID NO: 42279 - DNA, 20 bp, Artificial Sequence
  MKO10042279_A_Ppp1r12b
  gRNA
ttcttccgctgttgagccac

SEQ ID NO: 42280 - DNA, 20 bp, Artificial Sequence
  MKO10042280_A_Ppp1r12c
  gRNA
aaggcagagatcactcgccg

SEQ ID NO: 42281 - DNA, 20 bp, Artificial Sequence
  MKO10042281_A_Ppp1r12c
  gRNA
catggattcgctgacccacg

SEQ ID NO: 42282 - DNA, 20 bp, Artificial Sequence
  MKO10042282_A_Ppp1r12c
  gRNA
tccagccctcgttgtctgcc

SEQ ID NO: 42283 - DNA, 20 bp, Artificial Sequence
  MKO10042283_A_Ppp1r13b
  gRNA
gaattctacgacatctcgac

SEQ ID NO: 42284 - DNA, 20 bp, Artificial Sequence
  MKO10042284_A_Ppp1r13b
  gRNA
tggagagggcggttgccacc

SEQ ID NO: 42285 - DNA, 20 bp, Artificial Sequence
  MKO10042285_A_Ppp1r13b
  gRNA
tggcaaccaacatttgctgc

SEQ ID NO: 42286 - DNA, 20 bp, Artificial Sequence
  MKO10042286_A_Ppp1r13l
  gRNA
ctcgaccccctttgactatc

SEQ ID NO: 42287 - DNA, 20 bp, Artificial Sequence
  MKO10042287_A_Ppp1r13l
  gRNA
tgggcgatggcgcccgatct

SEQ ID NO: 42288 - DNA, 20 bp, Artificial Sequence
  MKO10042288_A_Ppp1r13l
  gRNA
cagatgactcgacgctgcgc

SEQ ID NO: 42289 - DNA, 20 bp, Artificial Sequence
  MKO10042289_A_Ppp1r14a
  gRNA
gaagcggcacgcgcgagtca

SEQ ID NO: 42290 - DNA, 20 bp, Artificial Sequence
  MKO10042290_A_Ppp1r14a
  gRNA
ggtcaacatcgatgagctat

SEQ ID NO: 42291 - DNA, 20 bp, Artificial Sequence
  MKO10042291_A_Ppp1r14a
  gRNA
gcaagctgcagtccccgtcg

SEQ ID NO: 42292 - DNA, 20 bp, Artificial Sequence
  MKO10042292_A_Ppp1r14b
  gRNA
accccaggaggaggagatcc

SEQ ID NO: 42293 - DNA, 20 bp, Artificial Sequence
  MKO10042293_A_Ppp1r14b
  gRNA
ttaccttgaccctagcagcc

SEQ ID NO: 42294 - DNA, 20 bp, Artificial Sequence
  MKO10042294_A_Ppp1r14b
  gRNA
gtcaggaccctcatttcttc

SEQ ID NO: 42295 - DNA, 20 bp, Artificial Sequence
  MKO10042295_A_Ppp1r14c
  gRNA
cggcgccgagtcctcccttg

SEQ ID NO: 42296 - DNA, 20 bp, Artificial Sequence
  MKO10042296_A_Ppp1r14c
  gRNA
ctcaagggaggactcggcgc

SEQ ID NO: 42297 - DNA, 20 bp, Artificial Sequence
  MKO10042297_A_Ppp1r14c
  gRNA
tcttcttgatgccaacagcg

SEQ ID NO: 42298 - DNA, 20 bp, Artificial Sequence
  MKO10042298_A_Ppp1r14d
  gRNA
ggctgacggtgaagtatgac

SEQ ID NO: 42299 - DNA, 20 bp, Artificial Sequence
  MKO10042299_A_Ppp1r14d
  gRNA
tccctccaggattatttcga

SEQ ID NO: 42300 - DNA, 20 bp, Artificial Sequence
  MKO10042300_A_Ppp1r14d
  gRNA
atacttcaccgtcagccggc

SEQ ID NO: 42301 - DNA, 20 bp, Artificial Sequence
  MKO10042301_A_Ppp1r15a
  gRNA
ccagcccaagctgcccgtcg

SEQ ID NO: 42302 - DNA, 20 bp, Artificial Sequence
  MKO10042302_A_Ppp1r15a
  gRNA
ctttgctcgacgcattgccc

SEQ ID NO: 42303 - DNA, 20 bp, Artificial Sequence
  MKO10042303_A_Ppp1r15a
  gRNA
tgagccgcctctgcagtcga

SEQ ID NO: 42304 - DNA, 20 bp, Artificial Sequence
  MKO10042304_A_Ppp1r15b
  gRNA
gccgacatctctgcccgcaa

SEQ ID NO: 42305 - DNA, 20 bp, Artificial Sequence
  MKO10042305_A_Ppp1r15b
  gRNA
ccagtacctggtccgacgct

SEQ ID NO: 42306 - DNA, 20 bp, Artificial Sequence
  MKO10042306_A_Ppp1r15b
  gRNA
ctgtttcttgaattcgtttc

SEQ ID NO: 42307 - DNA, 20 bp, Artificial Sequence
  MKO10042307_A_Ppp1r16a
  gRNA
gtaggtcctaccgtgaaata

SEQ ID NO: 42308 - DNA, 20 bp, Artificial Sequence
  MKO10042308_A_Ppp1r16a
  gRNA
caggttggggctaaccccac

SEQ ID NO: 42309 - DNA, 20 bp, Artificial Sequence
  MKO10042309_A_Ppp1r16a
  gRNA
ctccttgcagtcaattccga

SEQ ID NO: 42310 - DNA, 20 bp, Artificial Sequence
  MKO10042310_A_Ppp1r16b
  gRNA
tgggcacgtactactgaacg

SEQ ID NO: 42311 - DNA, 20 bp, Artificial Sequence
  MKO10042311_A_Ppp1r16b
  gRNA
caggatctcgactggatcga

SEQ ID NO: 42312 - DNA, 20 bp, Artificial Sequence
  MKO10042312_A_Ppp1r16b
  gRNA
catcgatccagtcgagatcc

SEQ ID NO: 42313 - DNA, 20 bp, Artificial Sequence
  MKO10042313_A_Ppp1r17
  gRNA
caccgagccagtgccgcctc

SEQ ID NO: 42314 - DNA, 20 bp, Artificial Sequence
  MKO10042314_A_Ppp1r17
  gRNA
atatcagagttatgaagagc

SEQ ID NO: 42315 - DNA, 20 bp, Artificial Sequence
  MKO10042315_A_Ppp1r17
  gRNA
atgtcgtctgaaagctccag

SEQ ID NO: 42316 - DNA, 20 bp, Artificial Sequence
  MKO10042316_A_Ppp1r18
  gRNA
atgaatcgattctgatgtac

SEQ ID NO: 42317 - DNA, 20 bp, Artificial Sequence
  MKO10042317_A_Ppp1r18
  gRNA
cagggggcgcacacctccgt

SEQ ID NO: 42318 - DNA, 20 bp, Artificial Sequence
  MKO10042318_A_Ppp1r18
  gRNA
ggaagatggtcaccgccggc

SEQ ID NO: 42319 - DNA, 20 bp, Artificial Sequence
  MKO10042319_A_Ppp1r1a
  gRNA
gtcatcttcttccgttgccg

SEQ ID NO: 42320 - DNA, 20 bp, Artificial Sequence
  MKO10042320_A_Ppp1r1a
  gRNA
cttgacgccgagcctgtgtc

SEQ ID NO: 42321 - DNA, 20 bp, Artificial Sequence
  MKO10042321_A_Ppp1r1a
  gRNA
cagacacaggctcggcgtca

SEQ ID NO: 42322 - DNA, 20 bp, Artificial Sequence
  MKO10042322_A_Ppp1r1b
  gRNA
tatacgcccccatcactgaa

SEQ ID NO: 42323 - DNA, 20 bp, Artificial Sequence
  MKO10042323_A_Ppp1r1b
  gRNA
catctctctagatccggcgc

SEQ ID NO: 42324 - DNA, 20 bp, Artificial Sequence
  MKO10042324_A_Ppp1r1b
  gRNA
ggattagtacctttcagtga

SEQ ID NO: 42325 - DNA, 20 bp, Artificial Sequence
  MKO10042325_A_Ppp1r1c
  gRNA
agaatgcatcgcctaagcaa

SEQ ID NO: 42326 - DNA, 20 bp, Artificial Sequence
  MKO10042326_A_Ppp1r1c
  gRNA
ctagcagtacctttcatggc

SEQ ID NO: 42327 - DNA, 20 bp, Artificial Sequence
  MKO10042327_A_Ppp1r1c
  gRNA
ctcaatgaacataattcccc

SEQ ID NO: 42328 - DNA, 20 bp, Artificial Sequence
  MKO10042328_A_Ppp1r21
  gRNA
gaacgaacggctgcacatac

SEQ ID NO: 42329 - DNA, 20 bp, Artificial Sequence
  MKO10042329_A_Ppp1r21
  gRNA
ctagcactaagtgaacctcg

SEQ ID NO: 42330 - DNA, 20 bp, Artificial Sequence
  MKO10042330_A_Ppp1r21
  gRNA
tcaggccgtcgatcacagct

SEQ ID NO: 42331 - DNA, 20 bp, Artificial Sequence
  MKO10042331_A_Ppp1r26
  gRNA
caaccctgtgccgatatctc

SEQ ID NO: 42332 - DNA, 20 bp, Artificial Sequence
  MKO10042332_A_Ppp1r26
  gRNA
ggcgctccagtccagatggg

SEQ ID NO: 42333 - DNA, 20 bp, Artificial Sequence
  MKO10042333_A_Ppp1r26
  gRNA
cccacgggcttcctgtaaga

SEQ ID NO: 42334 - DNA, 20 bp, Artificial Sequence
  MKO10042334_A_Ppp1r27
  gRNA
agcgagcatagcggaccgtt

SEQ ID NO: 42335 - DNA, 20 bp, Artificial Sequence
  MKO10042335_A_Ppp1r27
  gRNA
ccacattcgacaaggcgacc

SEQ ID NO: 42336 - DNA, 20 bp, Artificial Sequence
  MKO10042336_A_Ppp1r27
  gRNA
gccctccgaccttattgacc

SEQ ID NO: 42337 - DNA, 20 bp, Artificial Sequence
  MKO10042337_A_Ppp1r2
  gRNA
aatgacctacctcgctcctc

SEQ ID NO: 42338 - DNA, 20 bp, Artificial Sequence
  MKO10042338_A_Ppp1r2
  gRNA
cgtcacgttacttgtgatat

SEQ ID NO: 42339 - DNA, 20 bp, Artificial Sequence
  MKO10042339_A_Ppp1r2
  gRNA
cgtagattagctgctgctga

SEQ ID NO: 42340 - DNA, 20 bp, Artificial Sequence
  MKO10042340_A_Ppp1r32
  gRNA
gtgcgagttctcccactccg

SEQ ID NO: 42341 - DNA, 20 bp, Artificial Sequence
  MKO10042341_A_Ppp1r32
  gRNA
tctcccctagaagtgcccga

SEQ ID NO: 42342 - DNA, 20 bp, Artificial Sequence
  MKO10042342_A_Ppp1r32
  gRNA
gaaggtccacttcgacaccc

SEQ ID NO: 42343 - DNA, 20 bp, Artificial Sequence
  MKO10042343_A_Ppp1r35
  gRNA
cccgctgcccgaaagtccga

SEQ ID NO: 42344 - DNA, 20 bp, Artificial Sequence
  MKO10042344_A_Ppp1r35
  gRNA
tccagctcatgatcgtcgcc

SEQ ID NO: 42345 - DNA, 20 bp, Artificial Sequence
  MKO10042345_A_Ppp1r35
  gRNA
cttccgcgccttcggacttt

SEQ ID NO: 42346 - DNA, 20 bp, Artificial Sequence
  MKO10042346_A_Ppp1r36
  gRNA
cagcaatgtggattacgact

SEQ ID NO: 42347 - DNA, 20 bp, Artificial Sequence
  MKO10042347_A_Ppp1r36
  gRNA
agccgccttctcatcccttg

SEQ ID NO: 42348 - DNA, 20 bp, Artificial Sequence
  MKO10042348_A_Ppp1r36
  gRNA
cagcttgtacctcaaaaacg

SEQ ID NO: 42349 - DNA, 20 bp, Artificial Sequence
  MKO10042349_A_Ppp1r37
  gRNA
catgattgagtactacgagt

SEQ ID NO: 42350 - DNA, 20 bp, Artificial Sequence
  MKO10042350_A_Ppp1r37
  gRNA
tgagcaacgcatcaactgcc

SEQ ID NO: 42351 - DNA, 20 bp, Artificial Sequence
  MKO10042351_A_Ppp1r37
  gRNA
tacccaccttgcgcatcatg

SEQ ID NO: 42352 - DNA, 20 bp, Artificial Sequence
  MKO10042352_A_Ppp1r3a
  gRNA
gtctcaccgtcgcacgagtt

SEQ ID NO: 42353 - DNA, 20 bp, Artificial Sequence
  MKO10042353_A_Ppp1r3a
  gRNA
cctctagcagacgcgctttc

SEQ ID NO: 42354 - DNA, 20 bp, Artificial Sequence
  MKO10042354_A_Ppp1r3a
  gRNA
tatgttcctaactcgtgcga

SEQ ID NO: 42355 - DNA, 20 bp, Artificial Sequence
  MKO10042355_A_Ppp1r3b
  gRNA
ggccatcgcgggcaccgtga

SEQ ID NO: 42356 - DNA, 20 bp, Artificial Sequence
  MKO10042356_A_Ppp1r3b
  gRNA
gaccttcacggtgcccgcga

SEQ ID NO: 42357 - DNA, 20 bp, Artificial Sequence
  MKO10042357_A_Ppp1r3b
  gRNA
gccgtgtgctacgagtgtaa

SEQ ID NO: 42358 - DNA, 20 bp, Artificial Sequence
  MKO10042358_A_Ppp1r3c
  gRNA
gaaacttaagtagtcggttg

SEQ ID NO: 42359 - DNA, 20 bp, Artificial Sequence
  MKO10042359_A_Ppp1r3c
  gRNA
cgcaaacacgacccgcttct

SEQ ID NO: 42360 - DNA, 20 bp, Artificial Sequence
  MKO10042360_A_Ppp1r3c
  gRNA
tcggtccaatgagctgcacc

SEQ ID NO: 42361 - DNA, 20 bp, Artificial Sequence
  MKO10042361_A_Ppp1r3d
  gRNA
gcagcgagcgcgagcgtcgt

SEQ ID NO: 42362 - DNA, 20 bp, Artificial Sequence
  MKO10042362_A_Ppp1r3d
  gRNA
gtcgtcgatccatgtccgag

SEQ ID NO: 42363 - DNA, 20 bp, Artificial Sequence
  MKO10042363_A_Ppp1r3d
  gRNA
aggcgcgacaacacgtgcag

SEQ ID NO: 42364 - DNA, 20 bp, Artificial Sequence
  MKO10042364_A_Ppp1r3e
  gRNA
ttgcggggtatatccgtgcg

SEQ ID NO: 42365 - DNA, 20 bp, Artificial Sequence
  MKO10042365_A_Ppp1r3e
  gRNA
aagagcagcgttccgccgac

SEQ ID NO: 42366 - DNA, 20 bp, Artificial Sequence
  MKO10042366_A_Ppp1r3e
  gRNA
aggaggcgggcgattcccgc

SEQ ID NO: 42367 - DNA, 20 bp, Artificial Sequence
  MKO10042367_A_Ppp1r3f
  gRNA
catagcgcaccacgaagtcg

SEQ ID NO: 42368 - DNA, 20 bp, Artificial Sequence
  MKO10042368_A_Ppp1r3f
  gRNA
gcggacgataataccctagc

SEQ ID NO: 42369 - DNA, 20 bp, Artificial Sequence
  MKO10042369_A_Ppp1r3f
  gRNA
cacgctgcactatgcgcgcc

SEQ ID NO: 42370 - DNA, 20 bp, Artificial Sequence
  MKO10042370_A_Ppp1r3g
  gRNA
cgtctgctaccgctgcgaac

SEQ ID NO: 42371 - DNA, 20 bp, Artificial Sequence
  MKO10042371_A_Ppp1r3g
  gRNA
agacgggaaagtacggccgg

SEQ ID NO: 42372 - DNA, 20 bp, Artificial Sequence
  MKO10042372_A_Ppp1r3g
  gRNA
ttccggagaccctcaatccg

SEQ ID NO: 42373 - DNA, 20 bp, Artificial Sequence
  MKO10042373_A_Ppp1r42
  gRNA
gatactgacgtccaagtcac

SEQ ID NO: 42374 - DNA, 20 bp, Artificial Sequence
  MKO10042374_A_Ppp1r42
  gRNA
ttaccttcacgtgcatcagc

SEQ ID NO: 42375 - DNA, 20 bp, Artificial Sequence
  MKO10042375_A_Ppp1r42
  gRNA
caaccagctgatgcacgtga

SEQ ID NO: 42376 - DNA, 20 bp, Artificial Sequence
  MKO10042376_A_Ppp1r7
  gRNA
gatctgactcactatcgaat

SEQ ID NO: 42377 - DNA, 20 bp, Artificial Sequence
  MKO10042377_A_Ppp1r7
  gRNA
actgcagagtcttcgagaac

SEQ ID NO: 42378 - DNA, 20 bp, Artificial Sequence
  MKO10042378_A_Ppp1r7
  gRNA
cccgatctactccatccttc

SEQ ID NO: 42379 - DNA, 20 bp, Artificial Sequence
  MKO10042379_A_Ppp1r8
  gRNA
tctcatttggcgcgtccacg

SEQ ID NO: 42380 - DNA, 20 bp, Artificial Sequence
  MKO10042380_A_Ppp1r8
  gRNA
tgtggtacaccagcgctgcg

SEQ ID NO: 42381 - DNA, 20 bp, Artificial Sequence
  MKO10042381_A_Ppp1r8
  gRNA
cttgttgggacttcccgaag

SEQ ID NO: 42382 - DNA, 20 bp, Artificial Sequence
  MKO10042382_A_Ppp1r9a
  gRNA
tcccatagacgaggacgggc

SEQ ID NO: 42383 - DNA, 20 bp, Artificial Sequence
  MKO10042383_A_Ppp1r9a
  gRNA
ccttcccgcagattcgttat

SEQ ID NO: 42384 - DNA, 20 bp, Artificial Sequence
  MKO10042384_A_Ppp1r9a
  gRNA
gctgtcgccgctcttgttcc

SEQ ID NO: 42385 - DNA, 20 bp, Artificial Sequence
  MKO10042385_A_Ppp1r9b
  gRNA
gatccacatcctcattgcgt

SEQ ID NO: 42386 - DNA, 20 bp, Artificial Sequence
  MKO10042386_A_Ppp1r9b
  gRNA
gatccaagtgaacgacctgc

SEQ ID NO: 42387 - DNA, 20 bp, Artificial Sequence
  MKO10042387_A_Ppp1r9b
  gRNA
gagatacgcccagtatggag

SEQ ID NO: 42388 - DNA, 20 bp, Artificial Sequence
  MKO10042388_A_Ppp2ca
  gRNA
ccgagcactcgatcgcctac

SEQ ID NO: 42389 - DNA, 20 bp, Artificial Sequence
  MKO10042389_A_Ppp2ca
  gRNA
acatcgaacctcttgaacgt

SEQ ID NO: 42390 - DNA, 20 bp, Artificial Sequence
  MKO10042390_A_Ppp2ca
  gRNA
gggatatctcctcggggagc

SEQ ID NO: 42391 - DNA, 20 bp, Artificial Sequence
  MKO10042391_A_Ppp2cb
  gRNA
gagcgcatcacaatattgcg

SEQ ID NO: 42392 - DNA, 20 bp, Artificial Sequence
  MKO10042392_A_Ppp2cb
  gRNA
cgcaatattgtgatgcgctc

SEQ ID NO: 42393 - DNA, 20 bp, Artificial Sequence
  MKO10042393_A_Ppp2cb
  gRNA
gaacttcttgcaagcgatcc

SEQ ID NO: 42394 - DNA, 20 bp, Artificial Sequence
  MKO10042394_A_Ppp2r1a
  gRNA
gcactcaccttccgatctag

SEQ ID NO: 42395 - DNA, 20 bp, Artificial Sequence
  MKO10042395_A_Ppp2r1a
  gRNA
cccgccagccgctttaccag

SEQ ID NO: 42396 - DNA, 20 bp, Artificial Sequence
  MKO10042396_A_Ppp2r1a
  gRNA
ctgacttacctgctcgtcag

SEQ ID NO: 42397 - DNA, 20 bp, Artificial Sequence
  MKO10042397_A_Ppp2r1b
  gRNA
tcgtcgattaaaaccgcgat

SEQ ID NO: 42398 - DNA, 20 bp, Artificial Sequence
  MKO10042398_A_Ppp2r1b
  gRNA
acgtcgcgcacgtctgcatg

SEQ ID NO: 42399 - DNA, 20 bp, Artificial Sequence
  MKO10042399_A_Ppp2r1b
  gRNA
cgattcgctctacccgatcg

SEQ ID NO: 42400 - DNA, 20 bp, Artificial Sequence
  MKO10042400_A_Ppp2r2a
  gRNA
gtagatgatgacgtagcaga

SEQ ID NO: 42401 - DNA, 20 bp, Artificial Sequence
  MKO10042401_A_Ppp2r2a
  gRNA
cgttggtagacaataaaaac

SEQ ID NO: 42402 - DNA, 20 bp, Artificial Sequence
  MKO10042402_A_Ppp2r2a
  gRNA
cttcttccaggagctggagg

SEQ ID NO: 42403 - DNA, 20 bp, Artificial Sequence
  MKO10042403_A_Ppp2r2b
  gRNA
tcgctagtaactctcccgtg

SEQ ID NO: 42404 - DNA, 20 bp, Artificial Sequence
  MKO10042404_A_Ppp2r2b
  gRNA
cgaactcgggttcatggctc

SEQ ID NO: 42405 - DNA, 20 bp, Artificial Sequence
  MKO10042405_A_Ppp2r2b
  gRNA
cgtaatatttcagcgagaac

SEQ ID NO: 42406 - DNA, 20 bp, Artificial Sequence
  MKO10042406_A_Ppp2r2c
  gRNA
acgacctacgcatcaacctc

SEQ ID NO: 42407 - DNA, 20 bp, Artificial Sequence
  MKO10042407_A_Ppp2r2c
  gRNA
agtgtggttgaactcgacag

SEQ ID NO: 42408 - DNA, 20 bp, Artificial Sequence
  MKO10042408_A_Ppp2r2c
  gRNA
cgtctcacagtcgctgttga

SEQ ID NO: 42409 - DNA, 20 bp, Artificial Sequence
  MKO10042409_A_Ppp2r2d
  gRNA
cgggcggcaacgacttccag

SEQ ID NO: 42410 - DNA, 20 bp, Artificial Sequence
  MKO10042410_A_Ppp2r2d
  gRNA
cgtagtgccgtaattctaaa

SEQ ID NO: 42411 - DNA, 20 bp, Artificial Sequence
  MKO10042411_A_Ppp2r2d
  gRNA
ggtgaagggcgctgtcgacg

SEQ ID NO: 42412 - DNA, 20 bp, Artificial Sequence
  MKO10042412_A_Ppp2r3a
  gRNA
atcctaccgtggtgatgtag

SEQ ID NO: 42413 - DNA, 20 bp, Artificial Sequence
  MKO10042413_A_Ppp2r3a
  gRNA
gatgtggtagatacccaccc

SEQ ID NO: 42414 - DNA, 20 bp, Artificial Sequence
  MKO10042414_A_Ppp2r3a
  gRNA
gaggccggctggggactact

SEQ ID NO: 42415 - DNA, 20 bp, Artificial Sequence
  MKO10042415_A_Ppp2r3c
  gRNA
caccagataccacctatgat

SEQ ID NO: 42416 - DNA, 20 bp, Artificial Sequence
  MKO10042416_A_Ppp2r3c
  gRNA
tttaactacgtcatgcgaaa

SEQ ID NO: 42417 - DNA, 20 bp, Artificial Sequence
  MKO10042417_A_Ppp2r3c
  gRNA
cttagataacgaagagttgc

SEQ ID NO: 42418 - DNA, 20 bp, Artificial Sequence
  MKO10042418_A_Ppp2r3d
  gRNA
cgtcgcagtcctcgtcagca

SEQ ID NO: 42419 - DNA, 20 bp, Artificial Sequence
  MKO10042419_A_Ppp2r3d
  gRNA
cgctggaccgagttgtcaaa

SEQ ID NO: 42420 - DNA, 20 bp, Artificial Sequence
  MKO10042420_A_Ppp2r3d
  gRNA
ctaagtgtcgaccattcttc

SEQ ID NO: 42421 - DNA, 20 bp, Artificial Sequence
  MKO10042421_A_Ppp2r4
  gRNA
cacttcttgatacgctggat

SEQ ID NO: 42422 - DNA, 20 bp, Artificial Sequence
  MKO10042422_A_Ppp2r4
  gRNA
tgtgccatagtcaattcgtg

SEQ ID NO: 42423 - DNA, 20 bp, Artificial Sequence
  MKO10042423_A_Ppp2r4
  gRNA
ctcagagactttgtagtcga

SEQ ID NO: 42424 - DNA, 20 bp, Artificial Sequence
  MKO10042424_A_Ppp2r5a
  gRNA
acttgccgtaaatccgatgc

SEQ ID NO: 42425 - DNA, 20 bp, Artificial Sequence
  MKO10042425_A_Ppp2r5a
  gRNA
tgatcagaagtttgtccaac

SEQ ID NO: 42426 - DNA, 20 bp, Artificial Sequence
  MKO10042426_A_Ppp2r5a
  gRNA
atagctcatacctgtatgtg

SEQ ID NO: 42427 - DNA, 20 bp, Artificial Sequence
  MKO10042427_A_Ppp2r5b
  gRNA
cgggctcgatgagcacaccc

SEQ ID NO: 42428 - DNA, 20 bp, Artificial Sequence
  MKO10042428_A_Ppp2r5b
  gRNA
gccgtacacccgatgcaaga

SEQ ID NO: 42429 - DNA, 20 bp, Artificial Sequence
  MKO10042429_A_Ppp2r5b
  gRNA
cttaccatgcggatgatgtc

SEQ ID NO: 42430 - DNA, 20 bp, Artificial Sequence
  MKO10042430_A_Ppp2r5c
  gRNA
tgggctccgtgatcacgttc

SEQ ID NO: 42431 - DNA, 20 bp, Artificial Sequence
  MKO10042431_A_Ppp2r5c
  gRNA
caacgggcctttccagcccg

SEQ ID NO: 42432 - DNA, 20 bp, Artificial Sequence
  MKO10042432_A_Ppp2r5c
  gRNA
aaaagcttctcttgatccgc

SEQ ID NO: 42433 - DNA, 20 bp, Artificial Sequence
  MKO10042433_A_Ppp2r5d
  gRNA
actgttgctgggtcgcttgt

SEQ ID NO: 42434 - DNA, 20 bp, Artificial Sequence
  MKO10042434_A_Ppp2r5d
  gRNA
taaacagctcctcacgttcc

SEQ ID NO: 42435 - DNA, 20 bp, Artificial Sequence
  MKO10042435_A_Ppp2r5d
  gRNA
tggaggggagaacaccgatg

SEQ ID NO: 42436 - DNA, 20 bp, Artificial Sequence
  MKO10042436_A_Ppp2r5e
  gRNA
tttaaatagtcccgttctcg

SEQ ID NO: 42437 - DNA, 20 bp, Artificial Sequence
  MKO10042437_A_Ppp2r5e
  gRNA
gcgctccactcttaatgaac

SEQ ID NO: 42438 - DNA, 20 bp, Artificial Sequence
  MKO10042438_A_Ppp2r5e
  gRNA
acagtgaagaccctcgagaa

SEQ ID NO: 42439 - DNA, 20 bp, Artificial Sequence
  MKO10042439_A_Ppp3ca
  gRNA
gctggttcattagcgcagcc

SEQ ID NO: 42440 - DNA, 20 bp, Artificial Sequence
  MKO10042440_A_Ppp3ca
  gRNA
gcagtcgaaggcatccatac

SEQ ID NO: 42441 - DNA, 20 bp, Artificial Sequence
  MKO10042441_A_Ppp3ca
  gRNA
ccgacaggaaaaaaacttgc

SEQ ID NO: 42442 - DNA, 20 bp, Artificial Sequence
  MKO10042442_A_Ppp3cb
  gRNA
tcagatgtcagccgatgagt

SEQ ID NO: 42443 - DNA, 20 bp, Artificial Sequence
  MKO10042443_A_Ppp3cb
  gRNA
gaagtagaagctccaattac

SEQ ID NO: 42444 - DNA, 20 bp, Artificial Sequence
  MKO10042444_A_Ppp3cb
  gRNA
aagagtctatgaagcttgta

SEQ ID NO: 42445 - DNA, 20 bp, Artificial Sequence
  MKO10042445_A_Ppp3cc
  gRNA
cttccttcaaagttagccgt

SEQ ID NO: 42446 - DNA, 20 bp, Artificial Sequence
  MKO10042446_A_Ppp3cc
  gRNA
taatactcgctacctcttcc

SEQ ID NO: 42447 - DNA, 20 bp, Artificial Sequence
  MKO10042447_A_Ppp3cc
  gRNA
cggagcctccacctctatca

SEQ ID NO: 42448 - DNA, 20 bp, Artificial Sequence
  MKO10042448_A_Ppp3r1
  gRNA
tctattacccgctgtactaa

SEQ ID NO: 42449 - DNA, 20 bp, Artificial Sequence
  MKO10042449_A_Ppp3r1
  gRNA
aaatgaggcgagttaccctt

SEQ ID NO: 42450 - DNA, 20 bp, Artificial Sequence
  MKO10042450_A_Ppp3r1
  gRNA
agcagaaccctttagtacag

SEQ ID NO: 42451 - DNA, 20 bp, Artificial Sequence
  MKO10042451_A_Ppp3r2
  gRNA
tgtcgaagatgtcgatcact

SEQ ID NO: 42452 - DNA, 20 bp, Artificial Sequence
  MKO10042452_A_Ppp3r2
  gRNA
cgccttcagaatctacgaca

SEQ ID NO: 42453 - DNA, 20 bp, Artificial Sequence
  MKO10042453_A_Ppp3r2
  gRNA
gctgtgcaaccacttcgacc

SEQ ID NO: 42454 - DNA, 20 bp, Artificial Sequence
  MKO10042454_A_Ppp4c
  gRNA
tgagagtcgccagattaccc

SEQ ID NO: 42455 - DNA, 20 bp, Artificial Sequence
  MKO10042455_A_Ppp4c
  gRNA
ggcgactctcatgattgccc

SEQ ID NO: 42456 - DNA, 20 bp, Artificial Sequence
  MKO10042456_A_Ppp4c
  gRNA
tcctcaccttaagagccagc

SEQ ID NO: 42457 - DNA, 20 bp, Artificial Sequence
  MKO10042457_A_Ppp4r1
  gRNA
tcacgtccgtccgcgtcctc

SEQ ID NO: 42458 - DNA, 20 bp, Artificial Sequence
  MKO10042458_A_Ppp4r1
  gRNA
agccgattagctgatgactc

SEQ ID NO: 42459 - DNA, 20 bp, Artificial Sequence
  MKO10042459_A_Ppp4r1
  gRNA
gacctgccggaggacgcgga

SEQ ID NO: 42460 - DNA, 20 bp, Artificial Sequence
  MKO10042460_A_Ppp4r2
  gRNA
gatccgagaagaaactatac

SEQ ID NO: 42461 - DNA, 20 bp, Artificial Sequence
  MKO10042461_A_Ppp4r2
  gRNA
gttcctgtatagtttcttct

SEQ ID NO: 42462 - DNA, 20 bp, Artificial Sequence
  MKO10042462_A_Ppp4r2
  gRNA
cagagaaactgatccagtac

SEQ ID NO: 42463 - DNA, 20 bp, Artificial Sequence
  MKO10042463_A_Ppp4r4
  gRNA
agtcctgcatgtcgcaagcg

SEQ ID NO: 42464 - DNA, 20 bp, Artificial Sequence
  MKO10042464_A_Ppp4r4
  gRNA
tctccacgcttgcgacatgc

SEQ ID NO: 42465 - DNA, 20 bp, Artificial Sequence
  MKO10042465_A_Ppp4r4
  gRNA
cattaggtgtcagcaatgca

SEQ ID NO: 42466 - DNA, 20 bp, Artificial Sequence
  MKO10042466_A_Ppp5c
  gRNA
gatcgcgttctcgtagtcct

SEQ ID NO: 42467 - DNA, 20 bp, Artificial Sequence
  MKO10042467_A_Ppp5c
  gRNA
tcaccgtctcgtagtcacgc

SEQ ID NO: 42468 - DNA, 20 bp, Artificial Sequence
  MKO10042468_A_Ppp5c
  gRNA
tctgtgctcgtcacccgcaa

SEQ ID NO: 42469 - DNA, 20 bp, Artificial Sequence
  MKO10042469_A_Ppp6c
  gRNA
tcaacgccagtaacagtgtg

SEQ ID NO: 42470 - DNA, 20 bp, Artificial Sequence
  MKO10042470_A_Ppp6c
  gRNA
gatgagtgccaaaccaaata

SEQ ID NO: 42471 - DNA, 20 bp, Artificial Sequence
  MKO10042471_A_Ppp6c
  gRNA
atgtcaccacacactgttac

SEQ ID NO: 42472 - DNA, 20 bp, Artificial Sequence
  MKO10042472_A_Ppp6r1
  gRNA
agccgcgagcagatgatcca

SEQ ID NO: 42473 - DNA, 20 bp, Artificial Sequence
  MKO10042473_A_Ppp6r1
  gRNA
cacccagggcatcgttgatc

SEQ ID NO: 42474 - DNA, 20 bp, Artificial Sequence
  MKO10042474_A_Ppp6r1
  gRNA
tatcaatcgcaagacagacc

SEQ ID NO: 42475 - DNA, 20 bp, Artificial Sequence
  MKO10042475_A_Ppp6r2
  gRNA
ctcacgactccaatgttatg

SEQ ID NO: 42476 - DNA, 20 bp, Artificial Sequence
  MKO10042476_A_Ppp6r2
  gRNA
agaccccctcctcataacat

SEQ ID NO: 42477 - DNA, 20 bp, Artificial Sequence
  MKO10042477_A_Ppp6r2
  gRNA
ccacagatcagcgacagact

SEQ ID NO: 42478 - DNA, 20 bp, Artificial Sequence
  MKO10042478_A_Ppp6r3
  gRNA
cttacatcttcttcttgcga

SEQ ID NO: 42479 - DNA, 20 bp, Artificial Sequence
  MKO10042479_A_Ppp6r3
  gRNA
gtattgagcctccacaaccc

SEQ ID NO: 42480 - DNA, 20 bp, Artificial Sequence
  MKO10042480_A_Ppp6r3
  gRNA
gctatacaatttcattagca

SEQ ID NO: 42481 - DNA, 20 bp, Artificial Sequence
  MKO10042481_A_Pprc1
  gRNA
gcaccacgactgggatctcg

SEQ ID NO: 42482 - DNA, 20 bp, Artificial Sequence
  MKO10042482_A_Pprc1
  gRNA
tggacactttgtgtttcggc

SEQ ID NO: 42483 - DNA, 20 bp, Artificial Sequence
  MKO10042483_A_Pprc1
  gRNA
cacccgactacttcctgtgc

SEQ ID NO: 42484 - DNA, 20 bp, Artificial Sequence
  MKO10042484_A_Ppt1
  gRNA
tttggactcccccgatgccc

SEQ ID NO: 42485 - DNA, 20 bp, Artificial Sequence
  MKO10042485_A_Ppt1
  gRNA
tcaccgttcttgcacaagtt

SEQ ID NO: 42486 - DNA, 20 bp, Artificial Sequence
  MKO10042486_A_Ppt1
  gRNA
tacgtcctgtctctagagat

SEQ ID NO: 42487 - DNA, 20 bp, Artificial Sequence
  MKO10042487_A_Ppt2
  gRNA
ccatgcggtctaacctctat

SEQ ID NO: 42488 - DNA, 20 bp, Artificial Sequence
  MKO10042488_A_Ppt2
  gRNA
gactatagcagacccgatag

SEQ ID NO: 42489 - DNA, 20 bp, Artificial Sequence
  MKO10042489_A_Ppt2
  gRNA
ggcggtcttaccagtggcat

SEQ ID NO: 42490 - DNA, 20 bp, Artificial Sequence
  MKO10042490_A_Pptc7
  gRNA
gatgtgctatcagcagcgtc

SEQ ID NO: 42491 - DNA, 20 bp, Artificial Sequence
  MKO10042491_A_Pptc7
  gRNA
ccgcttgcacacagcgaacc

SEQ ID NO: 42492 - DNA, 20 bp, Artificial Sequence
  MKO10042492_A_Pptc7
  gRNA
gcctgattacatgatcctcc

SEQ ID NO: 42493 - DNA, 20 bp, Artificial Sequence
  MKO10042493_A_Ppwd1
  gRNA
aatccgggatgattgagtac

SEQ ID NO: 42494 - DNA, 20 bp, Artificial Sequence
  MKO10042494_A_Ppwd1
  gRNA
cggtgatgataaagcgatga

SEQ ID NO: 42495 - DNA, 20 bp, Artificial Sequence
  MKO10042495_A_Ppwd1
  gRNA
agtccagtactcaatcatcc

SEQ ID NO: 42496 - DNA, 20 bp, Artificial Sequence
  MKO10042496_A_Ppy
  gRNA
ccctgtttctcgtatccact

SEQ ID NO: 42497 - DNA, 20 bp, Artificial Sequence
  MKO10042497_A_Ppy
  gRNA
gcatagtcgcctgggtacat

SEQ ID NO: 42498 - DNA, 20 bp, Artificial Sequence
  MKO10042498_A_Ppy
  gRNA
ccctgcaccagccccccagt

SEQ ID NO: 42499 - DNA, 20 bp, Artificial Sequence
  MKO10042499_A_Pqbp1
  gRNA
agagcgcaactacgacaaag

SEQ ID NO: 42500 - DNA, 20 bp, Artificial Sequence
  MKO10042500_A_Pqbp1
  gRNA
gatttggtaacgacaaagtt

SEQ ID NO: 42501 - DNA, 20 bp, Artificial Sequence
  MKO10042501_A_Pqbp1
  gRNA
tggcagaccctctatccggg

SEQ ID NO: 42502 - DNA, 20 bp, Artificial Sequence
  MKO10042502_A_Pqlc1
  gRNA
cacaaacagagccgagtcga

SEQ ID NO: 42503 - DNA, 20 bp, Artificial Sequence
  MKO10042503_A_Pqlc1
  gRNA
cagtagtttcggtacagctg

SEQ ID NO: 42504 - DNA, 20 bp, Artificial Sequence
  MKO10042504_A_Pqlc1
  gRNA
tgcgccgttgagcaagaagt

SEQ ID NO: 42505 - DNA, 20 bp, Artificial Sequence
  MKO10042505_A_Pqlc2
  gRNA
gacataatacacagccgtgt

SEQ ID NO: 42506 - DNA, 20 bp, Artificial Sequence
  MKO10042506_A_Pqlc2
  gRNA
cacggctgtgtattatgtcc

SEQ ID NO: 42507 - DNA, 20 bp, Artificial Sequence
  MKO10042507_A_Pqlc2
  gRNA
ctcacattggtgcgaatctg

SEQ ID NO: 42508 - DNA, 20 bp, Artificial Sequence
  MKO10042508_A_Pqlc3
  gRNA
catagtaatgctgataacga

SEQ ID NO: 42509 - DNA, 20 bp, Artificial Sequence
  MKO10042509_A_Pqlc3
  gRNA
gttaccttgtgcgatgagaa

SEQ ID NO: 42510 - DNA, 20 bp, Artificial Sequence
  MKO10042510_A_Pqlc3
  gRNA
agtcgatgatccatttctgc

SEQ ID NO: 42511 - DNA, 20 bp, Artificial Sequence
  MKO10042511_A_Pradc1
  gRNA
aagatgtatcgaatatcccc

SEQ ID NO: 42512 - DNA, 20 bp, Artificial Sequence
  MKO10042512_A_Pradc1
  gRNA
ctacatgatccgccgttctc

SEQ ID NO: 42513 - DNA, 20 bp, Artificial Sequence
  MKO10042513_A_Pradc1
  gRNA
cccacgtgcgtcgcggccca

SEQ ID NO: 42514 - DNA, 20 bp, Artificial Sequence
  MKO10042514_A_Praf2
  gRNA
cgcctggatcaggagccgcc

SEQ ID NO: 42515 - DNA, 20 bp, Artificial Sequence
  MKO10042515_A_Praf2
  gRNA
cgcctggcggctcctgatcc

SEQ ID NO: 42516 - DNA, 20 bp, Artificial Sequence
  MKO10042516_A_Praf2
  gRNA
gcacaccctcctgagtgcac

SEQ ID NO: 42517 - DNA, 20 bp, Artificial Sequence
  MKO10042517_A_Pram1
  gRNA
ccgagttcaactcgctcccg

SEQ ID NO: 42518 - DNA, 20 bp, Artificial Sequence
  MKO10042518_A_Pram1
  gRNA
gattgttaggctcgggcttc

SEQ ID NO: 42519 - DNA, 20 bp, Artificial Sequence
  MKO10042519_A_Pram1
  gRNA
tacagttcgtagatctcatc

SEQ ID NO: 42520 - DNA, 20 bp, Artificial Sequence
  MKO10042520_A_Pramef12
  gRNA
acgacaacatcttgcgctcc

SEQ ID NO: 42521 - DNA, 20 bp, Artificial Sequence
  MKO10042521_A_Pramef12
  gRNA
tgtttgagctgtcggatgcc

SEQ ID NO: 42522 - DNA, 20 bp, Artificial Sequence
  MKO10042522_A_Pramef12
  gRNA
atcttgcaaaccgtactgga

SEQ ID NO: 42523 - DNA, 20 bp, Artificial Sequence
  MKO10042523_A_Pramef17
  gRNA
tgcgatacacattgtatcta

SEQ ID NO: 42524 - DNA, 20 bp, Artificial Sequence
  MKO10042524_A_Pramef17
  gRNA
atgtgtatcgcagtcataac

SEQ ID NO: 42525 - DNA, 20 bp, Artificial Sequence
  MKO10042525_A_Pramef17
  gRNA
tggagcattaggagtgtcca

SEQ ID NO: 42526 - DNA, 20 bp, Artificial Sequence
  MKO10042526_A_Pramef25
  gRNA
atcttcctgacagtgtgaat

SEQ ID NO: 42527 - DNA, 20 bp, Artificial Sequence
  MKO10042527_A_Pramef25
  gRNA
gcttgcaatattgacatgtc

SEQ ID NO: 42528 - DNA, 20 bp, Artificial Sequence
  MKO10042528_A_Pramef25
  gRNA
gtatttcaagatgcttcaac

SEQ ID NO: 42529 - DNA, 20 bp, Artificial Sequence
  MKO10042529_A_Pramef6
  gRNA
cgccaggggctagtgatgca

SEQ ID NO: 42530 - DNA, 20 bp, Artificial Sequence
  MKO10042530_A_Pramef6
  gRNA
gtgtgtttatcgccaattcc

SEQ ID NO: 42531 - DNA, 20 bp, Artificial Sequence
  MKO10042531_A_Pramef6
  gRNA
gtgtgcagtgagtaatagca

SEQ ID NO: 42532 - DNA, 20 bp, Artificial Sequence
  MKO10042532_A_Pramef8
  gRNA
taggtacctgaagaccccgt

SEQ ID NO: 42533 - DNA, 20 bp, Artificial Sequence
  MKO10042533_A_Pramef8
  gRNA
tcttgtgaatccgtgttaaa

SEQ ID NO: 42534 - DNA, 20 bp, Artificial Sequence
  MKO10042534_A_Pramef8
  gRNA
cttcacacagcatagccgta

SEQ ID NO: 42535 - DNA, 20 bp, Artificial Sequence
  MKO10042535_A_Pramel1
  gRNA
gaccttctcgatgaccccgg

SEQ ID NO: 42536 - DNA, 20 bp, Artificial Sequence
  MKO10042536_A_Pramel1
  gRNA
tgttatccacccactgaacg

SEQ ID NO: 42537 - DNA, 20 bp, Artificial Sequence
  MKO10042537_A_Pramel1
  gRNA
gcaaggcatcaagcccatac

SEQ ID NO: 42538 - DNA, 20 bp, Artificial Sequence
  MKO10042538_A_Pramel3
  gRNA
cagagtactatctactgatt

SEQ ID NO: 42539 - DNA, 20 bp, Artificial Sequence
  MKO10042539_A_Pramel3
  gRNA
gagtcatatgaaccacctga

SEQ ID NO: 42540 - DNA, 20 bp, Artificial Sequence
  MKO10042540_A_Pramel3
  gRNA
tgacagcaattgtgaaagct

SEQ ID NO: 42541 - DNA, 20 bp, Artificial Sequence
  MKO10042541_A_Pramel4
  gRNA
ctctcaaaatagacctgctt

SEQ ID NO: 42542 - DNA, 20 bp, Artificial Sequence
  MKO10042542_A_Pramel4
  gRNA
tttgtgacatcagcaaatca

SEQ ID NO: 42543 - DNA, 20 bp, Artificial Sequence
  MKO10042543_A_Pramel4
  gRNA
gaaagctacaatgagcttca

SEQ ID NO: 42544 - DNA, 20 bp, Artificial Sequence
  MKO10042544_A_Pramel5
  gRNA
tagaatgtcggcagtacttg

SEQ ID NO: 42545 - DNA, 20 bp, Artificial Sequence
  MKO10042545_A_Pramel5
  gRNA
gccctcactgtcccgaactg

SEQ ID NO: 42546 - DNA, 20 bp, Artificial Sequence
  MKO10042546_A_Pramel5
  gRNA
aattcataattacgtaaaca

SEQ ID NO: 42547 - DNA, 20 bp, Artificial Sequence
  MKO10042547_A_Pramel6
  gRNA
tgctttgccactcgtcttcc

SEQ ID NO: 42548 - DNA, 20 bp, Artificial Sequence
  MKO10042548_A_Pramel6
  gRNA
tcttcacacactcatgttag

SEQ ID NO: 42549 - DNA, 20 bp, Artificial Sequence
  MKO10042549_A_Pramel6
  gRNA
ttaagtatgttcagcagttc

SEQ ID NO: 42550 - DNA, 20 bp, Artificial Sequence
  MKO10042550_A_Pramel7
  gRNA
gtactagcatgagtttctga

SEQ ID NO: 42551 - DNA, 20 bp, Artificial Sequence
  MKO10042551_A_Pramel7
  gRNA
cccactccaataacagtgtt

SEQ ID NO: 42552 - DNA, 20 bp, Artificial Sequence
  MKO10042552_A_Pramel7
  gRNA
tatctctactataacatagt

SEQ ID NO: 42553 - DNA, 20 bp, Artificial Sequence
  MKO10042553_A_Prame
  gRNA
tcatccgcccaagatagttg

SEQ ID NO: 42554 - DNA, 20 bp, Artificial Sequence
  MKO10042554_A_Prame
  gRNA
aagagacccatcctcgcttt

SEQ ID NO: 42555 - DNA, 20 bp, Artificial Sequence
  MKO10042555_A_Prame
  gRNA
cgagtgttcctcaactatct

SEQ ID NO: 42556 - DNA, 20 bp, Artificial Sequence
  MKO10042556_A_Prap1
  gRNA
cctgcagcacctgacgatac

SEQ ID NO: 42557 - DNA, 20 bp, Artificial Sequence
  MKO10042557_A_Prap1
  gRNA
tcccatgtctgacgatgtcc

SEQ ID NO: 42558 - DNA, 20 bp, Artificial Sequence
  MKO10042558_A_Prap1
  gRNA
cagcagtgcagccaccaaac

SEQ ID NO: 42559 - DNA, 20 bp, Artificial Sequence
  MKO10042559_A_Prb1
  gRNA
ctctgaggacctccatgtag

SEQ ID NO: 42560 - DNA, 20 bp, Artificial Sequence
  MKO10042560_A_Prb1
  gRNA
cccacaaggcccgtccccac

SEQ ID NO: 42561 - DNA, 20 bp, Artificial Sequence
  MKO10042561_A_Prb1
  gRNA
cctgctcacagcagctttgc

SEQ ID NO: 42562 - DNA, 20 bp, Artificial Sequence
  MKO10042562_A_Prc1
  gRNA
gctacaagtgaagccatttc

SEQ ID NO: 42563 - DNA, 20 bp, Artificial Sequence
  MKO10042563_A_Prc1
  gRNA
gaagctattccgacagcgtg

SEQ ID NO: 42564 - DNA, 20 bp, Artificial Sequence
  MKO10042564_A_Prc1
  gRNA
tctctttcaaagcttgtatc

SEQ ID NO: 42565 - DNA, 20 bp, Artificial Sequence
  MKO10042565_A_Prcc
  gRNA
ggctcactagggatccggcg

SEQ ID NO: 42566 - DNA, 20 bp, Artificial Sequence
  MKO10042566_A_Prcc
  gRNA
ggtcttagaagccaatctag

SEQ ID NO: 42567 - DNA, 20 bp, Artificial Sequence
  MKO10042567_A_Prcc
  gRNA
ctactatcctgcaccggacc

SEQ ID NO: 42568 - DNA, 20 bp, Artificial Sequence
  MKO10042568_A_Prcp
  gRNA
gccaccataagagcccccga

SEQ ID NO: 42569 - DNA, 20 bp, Artificial Sequence
  MKO10042569_A_Prcp
  gRNA
ttcgctgagcatcgatacta

SEQ ID NO: 42570 - DNA, 20 bp, Artificial Sequence
  MKO10042570_A_Prcp
  gRNA
tcaacctgtcatcgccatcg

SEQ ID NO: 42571 - DNA, 20 bp, Artificial Sequence
  MKO10042571_A_Prdm10
  gRNA
gcgcttgggaatccgtcttt

SEQ ID NO: 42572 - DNA, 20 bp, Artificial Sequence
  MKO10042572_A_Prdm10
  gRNA
cagtggaggggccgctggtc

SEQ ID NO: 42573 - DNA, 20 bp, Artificial Sequence
  MKO10042573_A_Prdm10
  gRNA
ggccatattggtaagctacc

SEQ ID NO: 42574 - DNA, 20 bp, Artificial Sequence
  MKO10042574_A_Prdm11
  gRNA
cgacgtgcggtgtataaacg

SEQ ID NO: 42575 - DNA, 20 bp, Artificial Sequence
  MKO10042575_A_Prdm11
  gRNA
ggtctcatccgacccatcta

SEQ ID NO: 42576 - DNA, 20 bp, Artificial Sequence
  MKO10042576_A_Prdm11
  gRNA
gcatgccgagacatccggcc

SEQ ID NO: 42577 - DNA, 20 bp, Artificial Sequence
  MKO10042577_A_Prdm12
  gRNA
gccggtggcgcgcgctcttc

SEQ ID NO: 42578 - DNA, 20 bp, Artificial Sequence
  MKO10042578_A_Prdm12
  gRNA
ccagagcgcctactcgcagc

SEQ ID NO: 42579 - DNA, 20 bp, Artificial Sequence
  MKO10042579_A_Prdm12
  gRNA
ggtgcagaagctatctagcc

SEQ ID NO: 42580 - DNA, 20 bp, Artificial Sequence
  MKO10042580_A_Prdm13
  gRNA
cgacgtgcgtcttctgtccg

SEQ ID NO: 42581 - DNA, 20 bp, Artificial Sequence
  MKO10042581_A_Prdm13
  gRNA
gcacatccgactccacgccg

SEQ ID NO: 42582 - DNA, 20 bp, Artificial Sequence
  MKO10042582_A_Prdm13
  gRNA
cccgtcgccgccactacggc

SEQ ID NO: 42583 - DNA, 20 bp, Artificial Sequence
  MKO10042583_A_Prdm14
  gRNA
ttgaaaagcgcgaccgcctc

SEQ ID NO: 42584 - DNA, 20 bp, Artificial Sequence
  MKO10042584_A_Prdm14
  gRNA
cctgaagtacacgccctgtg

SEQ ID NO: 42585 - DNA, 20 bp, Artificial Sequence
  MKO10042585_A_Prdm14
  gRNA
ggtcaatgccagcgaagtga

SEQ ID NO: 42586 - DNA, 20 bp, Artificial Sequence
  MKO10042586_A_Prdm15
  gRNA
gtgcttcgacacttccaatg

SEQ ID NO: 42587 - DNA, 20 bp, Artificial Sequence
  MKO10042587_A_Prdm15
  gRNA
agatcaggcgcctggatgac

SEQ ID NO: 42588 - DNA, 20 bp, Artificial Sequence
  MKO10042588_A_Prdm15
  gRNA
cgccttcagccccgtcatcc

SEQ ID NO: 42589 - DNA, 20 bp, Artificial Sequence
  MKO10042589_A_Prdm16
  gRNA
ctacgagagtcctccatacc

SEQ ID NO: 42590 - DNA, 20 bp, Artificial Sequence
  MKO10042590_A_Prdm16
  gRNA
cccgatttccatcttccgct

SEQ ID NO: 42591 - DNA, 20 bp, Artificial Sequence
  MKO10042591_A_Prdm16
  gRNA
agccgacaccatgcgatcca

SEQ ID NO: 42592 - DNA, 20 bp, Artificial Sequence
  MKO10042592_A_Prdm1
  gRNA
tcccgccgttggagatccgc

SEQ ID NO: 42593 - DNA, 20 bp, Artificial Sequence
  MKO10042593_A_Prdm1
  gRNA
agaagtacccccgtcagcgc

SEQ ID NO: 42594 - DNA, 20 bp, Artificial Sequence
  MKO10042594_A_Prdm1
  gRNA
acacgctttggacccctcat

SEQ ID NO: 42595 - DNA, 20 bp, Artificial Sequence
  MKO10042595_A_Prdm2
  gRNA
cgagtcttgtcgaccgcaga

SEQ ID NO: 42596 - DNA, 20 bp, Artificial Sequence
  MKO10042596_A_Prdm2
  gRNA
ctttggtagccaatcgcgcc

SEQ ID NO: 42597 - DNA, 20 bp, Artificial Sequence
  MKO10042597_A_Prdm2
  gRNA
agtcctcgaagcacgtgttc

SEQ ID NO: 42598 - DNA, 20 bp, Artificial Sequence
  MKO10042598_A_Prdm4
  gRNA
tgttctccgccagtccatcg

SEQ ID NO: 42599 - DNA, 20 bp, Artificial Sequence
  MKO10042599_A_Prdm4
  gRNA
gcagtccatacacctatcaa

SEQ ID NO: 42600 - DNA, 20 bp, Artificial Sequence
  MKO10042600_A_Prdm4
  gRNA
accaacatctgttcccacga

SEQ ID NO: 42601 - DNA, 20 bp, Artificial Sequence
  MKO10042601_A_Prdm5
  gRNA
gctcgattcacactgtggac

SEQ ID NO: 42602 - DNA, 20 bp, Artificial Sequence
  MKO10042602_A_Prdm5
  gRNA
tgttcacgaggcaccatctc

SEQ ID NO: 42603 - DNA, 20 bp, Artificial Sequence
  MKO10042603_A_Prdm5
  gRNA
cattcgcttctccccagcga

SEQ ID NO: 42604 - DNA, 20 bp, Artificial Sequence
  MKO10042604_A_Prdm6
  gRNA
tgaggtatatccgatgtgca

SEQ ID NO: 42605 - DNA, 20 bp, Artificial Sequence
  MKO10042605_A_Prdm6
  gRNA
ctcatccagctcgacttact

SEQ ID NO: 42606 - DNA, 20 bp, Artificial Sequence
  MKO10042606_A_Prdm6
  gRNA
cggcacagatgccatacgcc

SEQ ID NO: 42607 - DNA, 20 bp, Artificial Sequence
  MKO10042607_A_Prdm8
  gRNA
gctcttccgctcgtccgatg

SEQ ID NO: 42608 - DNA, 20 bp, Artificial Sequence
  MKO10042608_A_Prdm8
  gRNA
ccacaacttggctcgggaac

SEQ ID NO: 42609 - DNA, 20 bp, Artificial Sequence
  MKO10042609_A_Prdm8
  gRNA
ggcgttctctgggatgtcgc

SEQ ID NO: 42610 - DNA, 20 bp, Artificial Sequence
  MKO10042610_A_Prdm9
  gRNA
acattagattcaccactaaa

SEQ ID NO: 42611 - DNA, 20 bp, Artificial Sequence
  MKO10042611_A_Prdm9
  gRNA
tcatctagaatgccatttag

SEQ ID NO: 42612 - DNA, 20 bp, Artificial Sequence
  MKO10042612_A_Prdm9
  gRNA
cagctttcatgtgttaccaa

SEQ ID NO: 42613 - DNA, 20 bp, Artificial Sequence
  MKO10042613_A_Prdx1
  gRNA
ctcttggcagtgtgtccagc

SEQ ID NO: 42614 - DNA, 20 bp, Artificial Sequence
  MKO10042614_A_Prdx1
  gRNA
ccacagaagcgccaatcact

SEQ ID NO: 42615 - DNA, 20 bp, Artificial Sequence
  MKO10042615_A_Prdx1
  gRNA
cgtttattgttatctgtcga

SEQ ID NO: 42616 - DNA, 20 bp, Artificial Sequence
  MKO10042616_A_Prdx2
  gRNA
ctcttccctagggaagtacg

SEQ ID NO: 42617 - DNA, 20 bp, Artificial Sequence
  MKO10042617_A_Prdx2
  gRNA
cagccccttaccacgccagg

SEQ ID NO: 42618 - DNA, 20 bp, Artificial Sequence
  MKO10042618_A_Prdx2
  gRNA
ccttcaggatcaatacccca

SEQ ID NO: 42619 - DNA, 20 bp, Artificial Sequence
  MKO10042619_A_Prdx3
  gRNA
ccaacagcactccgtagtct

SEQ ID NO: 42620 - DNA, 20 bp, Artificial Sequence
  MKO10042620_A_Prdx3
  gRNA
gctgagtctcgacgacttta

SEQ ID NO: 42621 - DNA, 20 bp, Artificial Sequence
  MKO10042621_A_Prdx3
  gRNA
gtaacacttactggtgctaa

SEQ ID NO: 42622 - DNA, 20 bp, Artificial Sequence
  MKO10042622_A_Prdx4
  gRNA
ccaactgaaatcatcgcttt

SEQ ID NO: 42623 - DNA, 20 bp, Artificial Sequence
  MKO10042623_A_Prdx4
  gRNA
tcgtccactgatcttccgac

SEQ ID NO: 42624 - DNA, 20 bp, Artificial Sequence
  MKO10042624_A_Prdx4
  gRNA
agtggacgagacactgcgtt

SEQ ID NO: 42625 - DNA, 20 bp, Artificial Sequence
  MKO10042625_A_Prdx5
  gRNA
gacgtcattaacgctcagac

SEQ ID NO: 42626 - DNA, 20 bp, Artificial Sequence
  MKO10042626_A_Prdx5
  gRNA
ctaggcgacagacttattat

SEQ ID NO: 42627 - DNA, 20 bp, Artificial Sequence
  MKO10042627_A_Prdx5
  gRNA
acgtctttgtgattgaagag

SEQ ID NO: 42628 - DNA, 20 bp, Artificial Sequence
  MKO10042628_A_Prdx6b
  gRNA
gccaaaaatgaacacccccc

SEQ ID NO: 42629 - DNA, 20 bp, Artificial Sequence
  MKO10042629_A_Prdx6b
  gRNA
ggaagaagcccccgactttg

SEQ ID NO: 42630 - DNA, 20 bp, Artificial Sequence
  MKO10042630_A_Prdx6b
  gRNA
gcatgccccatgaatttccc

SEQ ID NO: 42631 - DNA, 20 bp, Artificial Sequence
  MKO10042631_A_Prdx6
  gRNA
ttgttagcgtccttctcgac

SEQ ID NO: 42632 - DNA, 20 bp, Artificial Sequence
  MKO10042632_A_Prdx6
  gRNA
ctcaccacacgggccgtcac

SEQ ID NO: 42633 - DNA, 20 bp, Artificial Sequence
  MKO10042633_A_Prdx6
  gRNA
agttcccaccctctccgaag

SEQ ID NO: 42634 - DNA, 20 bp, Artificial Sequence
  MKO10042634_A_Preb
  gRNA
taatacaccataccgctacc

SEQ ID NO: 42635 - DNA, 20 bp, Artificial Sequence
  MKO10042635_A_Preb
  gRNA
gagcacaagttcaccccgaa

SEQ ID NO: 42636 - DNA, 20 bp, Artificial Sequence
  MKO10042636_A_Preb
  gRNA
ttggctgtaggtacctagcc

SEQ ID NO: 42637 - DNA, 20 bp, Artificial Sequence
  MKO10042637_A_Prelid1
  gRNA
gtctcaccatcagccgggca

SEQ ID NO: 42638 - DNA, 20 bp, Artificial Sequence
  MKO10042638_A_Prelid1
  gRNA
gcctcttacctggacagctc

SEQ ID NO: 42639 - DNA, 20 bp, Artificial Sequence
  MKO10042639_A_Prelid1
  gRNA
taaccgaagacatagtgcac

SEQ ID NO: 42640 - DNA, 20 bp, Artificial Sequence
  MKO10042640_A_Prelid2
  gRNA
cagcccccgtgattgaaatt

SEQ ID NO: 42641 - DNA, 20 bp, Artificial Sequence
  MKO10042641_A_Prelid2
  gRNA
cgaatttcaatcacgggggc

SEQ ID NO: 42642 - DNA, 20 bp, Artificial Sequence
  MKO10042642_A_Prelid2
  gRNA
gattgctatctgtcagaatg

SEQ ID NO: 42643 - DNA, 20 bp, Artificial Sequence
  MKO10042643_A_Prelp
  gRNA
gaagtccttgaagtacccgt

SEQ ID NO: 42644 - DNA, 20 bp, Artificial Sequence
  MKO10042644_A_Prelp
  gRNA
ggacaacaaccgaattcgca

SEQ ID NO: 42645 - DNA, 20 bp, Artificial Sequence
  MKO10042645_A_Prelp
  gRNA
gatttgccccaacaacctag

SEQ ID NO: 42646 - DNA, 20 bp, Artificial Sequence
  MKO10042646_A_Prepl
  gRNA
gatacacatcgtggcagcga

SEQ ID NO: 42647 - DNA, 20 bp, Artificial Sequence
  MKO10042647_A_Prepl
  gRNA
gatgtgtatcgagccacatt

SEQ ID NO: 42648 - DNA, 20 bp, Artificial Sequence
  MKO10042648_A_Prepl
  gRNA
ttaccgaaactggacacgtt

SEQ ID NO: 42649 - DNA, 20 bp, Artificial Sequence
  MKO10042649_A_Prep
  gRNA
aaatttgtgacccgtattct

SEQ ID NO: 42650 - DNA, 20 bp, Artificial Sequence
  MKO10042650_A_Prep
  gRNA
cttgcacatataacacgcgt

SEQ ID NO: 42651 - DNA, 20 bp, Artificial Sequence
  MKO10042651_A_Prep
  gRNA
ctataactcatacccgcagc

SEQ ID NO: 42652 - DNA, 20 bp, Artificial Sequence
  MKO10042652_A_Prex1
  gRNA
ttccgtaggccttcctacag

SEQ ID NO: 42653 - DNA, 20 bp, Artificial Sequence
  MKO10042653_A_Prex1
  gRNA
cctcagtctcagcacgaact

SEQ ID NO: 42654 - DNA, 20 bp, Artificial Sequence
  MKO10042654_A_Prex1
  gRNA
cctgttggtggagctcaaca

SEQ ID NO: 42655 - DNA, 20 bp, Artificial Sequence
  MKO10042655_A_Prex2
  gRNA
gaagaatacagacgttcccc

SEQ ID NO: 42656 - DNA, 20 bp, Artificial Sequence
  MKO10042656_A_Prex2
  gRNA
atttagtgacaccaattcag

SEQ ID NO: 42657 - DNA, 20 bp, Artificial Sequence
  MKO10042657_A_Prex2
  gRNA
agaactccttatgaacgatg

SEQ ID NO: 42658 - DNA, 20 bp, Artificial Sequence
  MKO10042658_A_Prf1
  gRNA
gagcgtcacgtcgaagtact

SEQ ID NO: 42659 - DNA, 20 bp, Artificial Sequence
  MKO10042659_A_Prf1
  gRNA
cgtgataaagtgcgtgccat

SEQ ID NO: 42660 - DNA, 20 bp, Artificial Sequence
  MKO10042660_A_Prf1
  gRNA
gtgactaccctccgccgctc

SEQ ID NO: 42661 - DNA, 20 bp, Artificial Sequence
  MKO10042661_A_Prg2
  gRNA
gccgatgcaaacgctttcga

SEQ ID NO: 42662 - DNA, 20 bp, Artificial Sequence
  MKO10042662_A_Prg2
  gRNA
cgctgtcaggggaatcaacc

SEQ ID NO: 42663 - DNA, 20 bp, Artificial Sequence
  MKO10042663_A_Prg2
  gRNA
tgattcccctgacagcggac

SEQ ID NO: 42664 - DNA, 20 bp, Artificial Sequence
  MKO10042664_A_Prg3
  gRNA
agatcaatcagtccatcgtc

SEQ ID NO: 42665 - DNA, 20 bp, Artificial Sequence
  MKO10042665_A_Prg3
  gRNA
tagttgcagctcttgcaccc

SEQ ID NO: 42666 - DNA, 20 bp, Artificial Sequence
  MKO10042666_A_Prg3
  gRNA
gactcccgagacatttgata

SEQ ID NO: 42667 - DNA, 20 bp, Artificial Sequence
  MKO10042667_A_Prg4
  gRNA
acactccctccctcgagcga

SEQ ID NO: 42668 - DNA, 20 bp, Artificial Sequence
  MKO10042668_A_Prg4
  gRNA
ttagatttatcaagctgtgc

SEQ ID NO: 42669 - DNA, 20 bp, Artificial Sequence
  MKO10042669_A_Prg4
  gRNA
tgcttcgagtccttcgctcg

SEQ ID NO: 42670 - DNA, 20 bp, Artificial Sequence
  MKO10042670_A_Prh1
  gRNA
ggtctcggctgtggtactcc

SEQ ID NO: 42671 - DNA, 20 bp, Artificial Sequence
  MKO10042671_A_Prh1
  gRNA
ccacaaccaagacctactca

SEQ ID NO: 42672 - DNA, 20 bp, Artificial Sequence
  MKO10042672_A_Prh1
  gRNA
ggggttcctgagcagagctc

SEQ ID NO: 42673 - DNA, 20 bp, Artificial Sequence
  MKO10042673_A_Prickle1
  gRNA
gttgcctccacacgataacg

SEQ ID NO: 42674 - DNA, 20 bp, Artificial Sequence
  MKO10042674_A_Prickle1
  gRNA
gccgtgttcgcctcccgtgc

SEQ ID NO: 42675 - DNA, 20 bp, Artificial Sequence
  MKO10042675_A_Prickle1
  gRNA
tactatacctcgttatcgtg

SEQ ID NO: 42676 - DNA, 20 bp, Artificial Sequence
  MKO10042676_A_Prickle2
  gRNA
catggtaacagtgatgccgc

SEQ ID NO: 42677 - DNA, 20 bp, Artificial Sequence
  MKO10042677_A_Prickle2
  gRNA
tcaacctcagatgacgactc

SEQ ID NO: 42678 - DNA, 20 bp, Artificial Sequence
  MKO10042678_A_Prickle2
  gRNA
gctgtgtttgcatcacgtgc

SEQ ID NO: 42679 - DNA, 20 bp, Artificial Sequence
  MKO10042679_A_Prickle3
  gRNA
cgccatgcggaatactgtga

SEQ ID NO: 42680 - DNA, 20 bp, Artificial Sequence
  MKO10042680_A_Prickle3
  gRNA
ttcgagtgtgaagcttcgtt

SEQ ID NO: 42681 - DNA, 20 bp, Artificial Sequence
  MKO10042681_A_Prickle3
  gRNA
gcagtctttgccagccgcgc

SEQ ID NO: 42682 - DNA, 20 bp, Artificial Sequence
  MKO10042682_A_Prim1
  gRNA
tgacagactacgatgacgta

SEQ ID NO: 42683 - DNA, 20 bp, Artificial Sequence
  MKO10042683_A_Prim1
  gRNA
actcaagtactccacgatcc

SEQ ID NO: 42684 - DNA, 20 bp, Artificial Sequence
  MKO10042684_A_Prim1
  gRNA
gcgcctatatcaatcttata

SEQ ID NO: 42685 - DNA, 20 bp, Artificial Sequence
  MKO10042685_A_Prim2
  gRNA
ctcacgactggcagtacgcg

SEQ ID NO: 42686 - DNA, 20 bp, Artificial Sequence
  MKO10042686_A_Prim2
  gRNA
atgagtatgagccacggcga

SEQ ID NO: 42687 - DNA, 20 bp, Artificial Sequence
  MKO10042687_A_Prim2
  gRNA
ccatgatatcctgttcccga

SEQ ID NO: 42688 - DNA, 20 bp, Artificial Sequence
  MKO10042688_A_Prima1
  gRNA
catggggtactcagcgacac

SEQ ID NO: 42689 - DNA, 20 bp, Artificial Sequence
  MKO10042689_A_Prima1
  gRNA
cgcaggccgagatgctactc

SEQ ID NO: 42690 - DNA, 20 bp, Artificial Sequence
  MKO10042690_A_Prima1
  gRNA
tctggtgatcattgtcgctg

SEQ ID NO: 42691 - DNA, 20 bp, Artificial Sequence
  MKO10042691_A_Primpol
  gRNA
tgctcttcacttgattgccg

SEQ ID NO: 42692 - DNA, 20 bp, Artificial Sequence
  MKO10042692_A_Primpol
  gRNA
taacgtcctatgcccaactt

SEQ ID NO: 42693 - DNA, 20 bp, Artificial Sequence
  MKO10042693_A_Primpol
  gRNA
cagaaaaaccggaggcgtcc

SEQ ID NO: 42694 - DNA, 20 bp, Artificial Sequence
  MKO10042694_A_Prkaa1
  gRNA
gtgggcaagcacgagttgac

SEQ ID NO: 42695 - DNA, 20 bp, Artificial Sequence
  MKO10042695_A_Prkaa1
  gRNA
gaagattcggagccttgacg

SEQ ID NO: 42696 - DNA, 20 bp, Artificial Sequence
  MKO10042696_A_Prkaa1
  gRNA
gccgcaccagaagtcatttc

SEQ ID NO: 42697 - DNA, 20 bp, Artificial Sequence
  MKO10042697_A_Prkaa2
  gRNA
cagctatcttagcgttcatc

SEQ ID NO: 42698 - DNA, 20 bp, Artificial Sequence
  MKO10042698_A_Prkaa2
  gRNA
gaatttctacgaactagctg

SEQ ID NO: 42699 - DNA, 20 bp, Artificial Sequence
  MKO10042699_A_Prkaa2
  gRNA
ttcgactacatctgcaaaca

SEQ ID NO: 42700 - DNA, 20 bp, Artificial Sequence
  MKO10042700_A_Prkab1
  gRNA
gcaagcttcccctcacgaga

SEQ ID NO: 42701 - DNA, 20 bp, Artificial Sequence
  MKO10042701_A_Prkab1
  gRNA
gagatccttaccttctcgtg

SEQ ID NO: 42702 - DNA, 20 bp, Artificial Sequence
  MKO10042702_A_Prkab1
  gRNA
tgttgttaactgtgccaagc

SEQ ID NO: 42703 - DNA, 20 bp, Artificial Sequence
  MKO10042703_A_Prkab2
  gRNA
cccggcccaccgttatccgc

SEQ ID NO: 42704 - DNA, 20 bp, Artificial Sequence
  MKO10042704_A_Prkab2
  gRNA
agctcggagacgtcatgtcg

SEQ ID NO: 42705 - DNA, 20 bp, Artificial Sequence
  MKO10042705_A_Prkab2
  gRNA
acatacatttcttgaccgta

SEQ ID NO: 42706 - DNA, 20 bp, Artificial Sequence
  MKO10042706_A_Prkaca
  gRNA
tgaaccttccaatccgccgt

SEQ ID NO: 42707 - DNA, 20 bp, Artificial Sequence
  MKO10042707_A_Prkaca
  gRNA
ctcctttgggcgagtgatgc

SEQ ID NO: 42708 - DNA, 20 bp, Artificial Sequence
  MKO10042708_A_Prkaca
  gRNA
aaaatgggagaccccttctc

SEQ ID NO: 42709 - DNA, 20 bp, Artificial Sequence
  MKO10042709_A_Prkacb
  gRNA
acgggaactccacggcctgc

SEQ ID NO: 42710 - DNA, 20 bp, Artificial Sequence
  MKO10042710_A_Prkacb
  gRNA
aagagtactccagccgcaca

SEQ ID NO: 42711 - DNA, 20 bp, Artificial Sequence
  MKO10042711_A_Prkacb
  gRNA
ttcctttggaagagtcatgt

SEQ ID NO: 42712 - DNA, 20 bp, Artificial Sequence
  MKO10042712_A_Prkag1
  gRNA
gtgttcgtgccgcccctttg

SEQ ID NO: 42713 - DNA, 20 bp, Artificial Sequence
  MKO10042713_A_Prkag1
  gRNA
cacgaacaccattggtcacc

SEQ ID NO: 42714 - DNA, 20 bp, Artificial Sequence
  MKO10042714_A_Prkag1
  gRNA
ggtatttgacacttcgctac

SEQ ID NO: 42715 - DNA, 20 bp, Artificial Sequence
  MKO10042715_A_Prkag2
  gRNA
gagtccgtgcagcgccgctg

SEQ ID NO: 42716 - DNA, 20 bp, Artificial Sequence
  MKO10042716_A_Prkag2
  gRNA
acggactccgttggctacca

SEQ ID NO: 42717 - DNA, 20 bp, Artificial Sequence
  MKO10042717_A_Prkag2
  gRNA
gaagacaacaagctttgaac

SEQ ID NO: 42718 - DNA, 20 bp, Artificial Sequence
  MKO10042718_A_Prkag3
  gRNA
cttgactccccgtatggcac

SEQ ID NO: 42719 - DNA, 20 bp, Artificial Sequence
  MKO10042719_A_Prkag3
  gRNA
ggtcatctttgacaccacgt

SEQ ID NO: 42720 - DNA, 20 bp, Artificial Sequence
  MKO10042720_A_Prkag3
  gRNA
ggcctcctgtctcgtccatc

SEQ ID NO: 42721 - DNA, 20 bp, Artificial Sequence
  MKO10042721_A_Prkar1a
  gRNA
ccacgctacctttctaacgt

SEQ ID NO: 42722 - DNA, 20 bp, Artificial Sequence
  MKO10042722_A_Prkar1a
  gRNA
tgctgcctcctacgttagaa

SEQ ID NO: 42723 - DNA, 20 bp, Artificial Sequence
  MKO10042723_A_Prkar1a
  gRNA
accttgatgataacgagaga

SEQ ID NO: 42724 - DNA, 20 bp, Artificial Sequence
  MKO10042724_A_Prkar1b
  gRNA
ctataagaccatgaccgcgc

SEQ ID NO: 42725 - DNA, 20 bp, Artificial Sequence
  MKO10042725_A_Prkar1b
  gRNA
cgcgccttgaccacggggtt

SEQ ID NO: 42726 - DNA, 20 bp, Artificial Sequence
  MKO10042726_A_Prkar1b
  gRNA
ttggggagatctcctcatcg

SEQ ID NO: 42727 - DNA, 20 bp, Artificial Sequence
  MKO10042727_A_Prkar2a
  gRNA
agttgtccccgtcgtcgcct

SEQ ID NO: 42728 - DNA, 20 bp, Artificial Sequence
  MKO10042728_A_Prkar2a
  gRNA
aaatttactagacgagtatc

SEQ ID NO: 42729 - DNA, 20 bp, Artificial Sequence
  MKO10042729_A_Prkar2a
  gRNA
actcgtctagtaaatttgct

SEQ ID NO: 42730 - DNA, 20 bp, Artificial Sequence
  MKO10042730_A_Prkar2b
  gRNA
ggggaacacgtaattgacca

SEQ ID NO: 42731 - DNA, 20 bp, Artificial Sequence
  MKO10042731_A_Prkar2b
  gRNA
ccgaggcacgccttgtgaac

SEQ ID NO: 42732 - DNA, 20 bp, Artificial Sequence
  MKO10042732_A_Prkar2b
  gRNA
agttgtcaccgtcatcacct

SEQ ID NO: 42733 - DNA, 20 bp, Artificial Sequence
  MKO10042733_A_Prkca
  gRNA
gttcgttacgttctcttgtc

SEQ ID NO: 42734 - DNA, 20 bp, Artificial Sequence
  MKO10042734_A_Prkca
  gRNA
cttgtgaacattcatgtcgc

SEQ ID NO: 42735 - DNA, 20 bp, Artificial Sequence
  MKO10042735_A_Prkca
  gRNA
tgatgaaaagctccacgtca

SEQ ID NO: 42736 - DNA, 20 bp, Artificial Sequence
  MKO10042736_A_Prkcb
  gRNA
actgaccacacggaacgccg

SEQ ID NO: 42737 - DNA, 20 bp, Artificial Sequence
  MKO10042737_A_Prkcb
  gRNA
cctggatatagatgcggccg

SEQ ID NO: 42738 - DNA, 20 bp, Artificial Sequence
  MKO10042738_A_Prkcb
  gRNA
gctgtatggacttattcacc

SEQ ID NO: 42739 - DNA, 20 bp, Artificial Sequence
  MKO10042739_A_Prkcdbp
  gRNA
tccggtgcacgcagtcaccg

SEQ ID NO: 42740 - DNA, 20 bp, Artificial Sequence
  MKO10042740_A_Prkcdbp
  gRNA
ctccggacaggccctacgcg

SEQ ID NO: 42741 - DNA, 20 bp, Artificial Sequence
  MKO10042741_A_Prkcdbp
  gRNA
tgcgacgcacggagcccgcc

SEQ ID NO: 42742 - DNA, 20 bp, Artificial Sequence
  MKO10042742_A_Prkcd
  gRNA
ttcgacgcccacatctatga

SEQ ID NO: 42743 - DNA, 20 bp, Artificial Sequence
  MKO10042743_A_Prkcd
  gRNA
caaacagtctatgcgtagtg

SEQ ID NO: 42744 - DNA, 20 bp, Artificial Sequence
  MKO10042744_A_Prkcd
  gRNA
cacggtgggcgtgtcagtac

SEQ ID NO: 42745 - DNA, 20 bp, Artificial Sequence
  MKO10042745_A_Prkce
  gRNA
gtacgtgatcatcgatctct

SEQ ID NO: 42746 - DNA, 20 bp, Artificial Sequence
  MKO10042746_A_Prkce
  gRNA
ctcattattacaaagtgcgc

SEQ ID NO: 42747 - DNA, 20 bp, Artificial Sequence
  MKO10042747_A_Prkce
  gRNA
tgagctcatgacatcgcttg

SEQ ID NO: 42748 - DNA, 20 bp, Artificial Sequence
  MKO10042748_A_Prkcg
  gRNA
atatggatctcatccgacgt

SEQ ID NO: 42749 - DNA, 20 bp, Artificial Sequence
  MKO10042749_A_Prkcg
  gRNA
tgggcactcacgtccgtctg

SEQ ID NO: 42750 - DNA, 20 bp, Artificial Sequence
  MKO10042750_A_Prkcg
  gRNA
tccagcgcctggacactcga

SEQ ID NO: 42751 - DNA, 20 bp, Artificial Sequence
  MKO10042751_A_Prkch
  gRNA
ctcgtcttcgcatagccctt

SEQ ID NO: 42752 - DNA, 20 bp, Artificial Sequence
  MKO10042752_A_Prkch
  gRNA
gtcttgaacaggggagtatt

SEQ ID NO: 42753 - DNA, 20 bp, Artificial Sequence
  MKO10042753_A_Prkch
  gRNA
agacgagtccatcaagtgaa

SEQ ID NO: 42754 - DNA, 20 bp, Artificial Sequence
  MKO10042754_A_Prkci
  gRNA
gtttaccctattgaaacgtt

SEQ ID NO: 42755 - DNA, 20 bp, Artificial Sequence
  MKO10042755_A_Prkci
  gRNA
ttcaagccaaacgtttcaat

SEQ ID NO: 42756 - DNA, 20 bp, Artificial Sequence
  MKO10042756_A_Prkci
  gRNA
ccatgtgtaccagagcgtcc

SEQ ID NO: 42757 - DNA, 20 bp, Artificial Sequence
  MKO10042757_A_Prkcq
  gRNA
ctttgacgcccacattaaca

SEQ ID NO: 42758 - DNA, 20 bp, Artificial Sequence
  MKO10042758_A_Prkcq
  gRNA
gcgtcaaaggtgctgtccca

SEQ ID NO: 42759 - DNA, 20 bp, Artificial Sequence
  MKO10042759_A_Prkcq
  gRNA
tttgcactgcatcagcgccg

SEQ ID NO: 42760 - DNA, 20 bp, Artificial Sequence
  MKO10042760_A_Prkcsh
  gRNA
tcgtcgttcacctgatcgaa

SEQ ID NO: 42761 - DNA, 20 bp, Artificial Sequence
  MKO10042761_A_Prkcsh
  gRNA
cgacgactactgcgactgta

SEQ ID NO: 42762 - DNA, 20 bp, Artificial Sequence
  MKO10042762_A_Prkcsh
  gRNA
agacgagtacaacagcggca

SEQ ID NO: 42763 - DNA, 20 bp, Artificial Sequence
  MKO10042763_A_Prkcz
  gRNA
gcgtgcttacctcgtcgtcg

SEQ ID NO: 42764 - DNA, 20 bp, Artificial Sequence
  MKO10042764_A_Prkcz
  gRNA
ggagcttgtccacgacgacg

SEQ ID NO: 42765 - DNA, 20 bp, Artificial Sequence
  MKO10042765_A_Prkcz
  gRNA
cttccatcagtttcttctga

SEQ ID NO: 42766 - DNA, 20 bp, Artificial Sequence
  MKO10042766_A_Prkd1
  gRNA
caggatcgtgccgaaaaagc

SEQ ID NO: 42767 - DNA, 20 bp, Artificial Sequence
  MKO10042767_A_Prkd1
  gRNA
cggtactgtccgcacagcat

SEQ ID NO: 42768 - DNA, 20 bp, Artificial Sequence
  MKO10042768_A_Prkd1
  gRNA
ctccgacaacatccttcagc

SEQ ID NO: 42769 - DNA, 20 bp, Artificial Sequence
  MKO10042769_A_Prkd2
  gRNA
gctcttcggcctcgtgcgcc

SEQ ID NO: 42770 - DNA, 20 bp, Artificial Sequence
  MKO10042770_A_Prkd2
  gRNA
accctgcaccgccgaagagc

SEQ ID NO: 42771 - DNA, 20 bp, Artificial Sequence
  MKO10042771_A_Prkd2
  gRNA
tcggatctggaaatcctcga

SEQ ID NO: 42772 - DNA, 20 bp, Artificial Sequence
  MKO10042772_A_Prkd3
  gRNA
ccacgacgggattctcttac

SEQ ID NO: 42773 - DNA, 20 bp, Artificial Sequence
  MKO10042773_A_Prkd3
  gRNA
ccagtaagagaatcccgtcg

SEQ ID NO: 42774 - DNA, 20 bp, Artificial Sequence
  MKO10042774_A_Prkd3
  gRNA
ctctggggactggtacgtca

SEQ ID NO: 42775 - DNA, 20 bp, Artificial Sequence
  MKO10042775_A_Prkdc
  gRNA
ccggaagtcgcttagcattg

SEQ ID NO: 42776 - DNA, 20 bp, Artificial Sequence
  MKO10042776_A_Prkdc
  gRNA
cctcaatgctaagcgacttc

SEQ ID NO: 42777 - DNA, 20 bp, Artificial Sequence
  MKO10042777_A_Prkdc
  gRNA
cttaaattcatccatgagtc

SEQ ID NO: 42778 - DNA, 20 bp, Artificial Sequence
  MKO10042778_A_Prkg1
  gRNA
tactcttgacggtcgctgtc

SEQ ID NO: 42779 - DNA, 20 bp, Artificial Sequence
  MKO10042779_A_Prkg1
  gRNA
ttgaaaacattgtcgatcga

SEQ ID NO: 42780 - DNA, 20 bp, Artificial Sequence
  MKO10042780_A_Prkg1
  gRNA
taggtcgaaggatctcataa

SEQ ID NO: 42781 - DNA, 20 bp, Artificial Sequence
  MKO10042781_A_Prkg2
  gRNA
gtacgggagaaactatcaac

SEQ ID NO: 42782 - DNA, 20 bp, Artificial Sequence
  MKO10042782_A_Prkg2
  gRNA
gcagctacgtcattaagcag

SEQ ID NO: 42783 - DNA, 20 bp, Artificial Sequence
  MKO10042783_A_Prkg2
  gRNA
aatagccagttccccaaacg

SEQ ID NO: 42784 - DNA, 20 bp, Artificial Sequence
  MKO10042784_A_Prkra
  gRNA
tactcgtgcaatacctgaat

SEQ ID NO: 42785 - DNA, 20 bp, Artificial Sequence
  MKO10042785_A_Prkra
  gRNA
attcaggtattgcacgagta

SEQ ID NO: 42786 - DNA, 20 bp, Artificial Sequence
  MKO10042786_A_Prkra
  gRNA
aaggaggaccggctcataag

SEQ ID NO: 42787 - DNA, 20 bp, Artificial Sequence
  MKO10042787_A_Prkrip1
  gRNA
gccgtaggtgcctatacacg

SEQ ID NO: 42788 - DNA, 20 bp, Artificial Sequence
  MKO10042788_A_Prkrip1
  gRNA
ctgcaaagcgccggaaaaag

SEQ ID NO: 42789 - DNA, 20 bp, Artificial Sequence
  MKO10042789_A_Prkrip1
  gRNA
gtggagagttccacgtgtat

SEQ ID NO: 42790 - DNA, 20 bp, Artificial Sequence
  MKO10042790_A_Prkrir
  gRNA
gccacggacaccccgatcac

SEQ ID NO: 42791 - DNA, 20 bp, Artificial Sequence
  MKO10042791_A_Prkrir
  gRNA
tctcgaaggactgtccgata

SEQ ID NO: 42792 - DNA, 20 bp, Artificial Sequence
  MKO10042792_A_Prkrir
  gRNA
gaataatgtgttgaccgctg

SEQ ID NO: 42793 - DNA, 20 bp, Artificial Sequence
  MKO10042793_A_Prkx
  gRNA
ttcacctacctgcgtaatcg

SEQ ID NO: 42794 - DNA, 20 bp, Artificial Sequence
  MKO10042794_A_Prkx
  gRNA
agaatcggccacgattacgc

SEQ ID NO: 42795 - DNA, 20 bp, Artificial Sequence
  MKO10042795_A_Prkx
  gRNA
cttatattcgagatgctgtc

SEQ ID NO: 42796 - DNA, 20 bp, Artificial Sequence
  MKO10042796_A_Prl2a1
  gRNA
ttataacatgatccgctgtg

SEQ ID NO: 42797 - DNA, 20 bp, Artificial Sequence
  MKO10042797_A_Prl2a1
  gRNA
atggcaggttgttcactaga

SEQ ID NO: 42798 - DNA, 20 bp, Artificial Sequence
  MKO10042798_A_Prl2a1
  gRNA
caagcaaattattgagagcc

SEQ ID NO: 42799 - DNA, 20 bp, Artificial Sequence
  MKO10042799_A_Prl2b1
  gRNA
aaatttgatgaactcacgac

SEQ ID NO: 42800 - DNA, 20 bp, Artificial Sequence
  MKO10042800_A_Prl2b1
  gRNA
ggcatcatcacgcctgttcc

SEQ ID NO: 42801 - DNA, 20 bp, Artificial Sequence
  MKO10042801_A_Prl2b1
  gRNA
atattgcgacctactctgcc

SEQ ID NO: 42802 - DNA, 20 bp, Artificial Sequence
  MKO10042802_A_Prl2c1
  gRNA
tcattgtcagattgcaagag

SEQ ID NO: 42803 - DNA, 20 bp, Artificial Sequence
  MKO10042803_A_Prl2c1
  gRNA
aaagatcgacgcagtccaga

SEQ ID NO: 42804 - DNA, 20 bp, Artificial Sequence
  MKO10042804_A_Prl2c1
  gRNA
tgatgaccaacttgttattg

SEQ ID NO: 42805 - DNA, 20 bp, Artificial Sequence
  MKO10042805_A_Prl2c2
  gRNA
tattcagctcttctgaaatc

SEQ ID NO: 42806 - DNA, 20 bp, Artificial Sequence
  MKO10042806_A_Prl2c2
  gRNA
agggatactgctcctactac

SEQ ID NO: 42807 - DNA, 20 bp, Artificial Sequence
  MKO10042807_A_Prl2c2
  gRNA
gatattatgagacaaactgc

SEQ ID NO: 42808 - DNA, 20 bp, Artificial Sequence
  MKO10042808_A_Prl2c3
  gRNA
agggatactgctcctactac

SEQ ID NO: 42809 - DNA, 20 bp, Artificial Sequence
  MKO10042809_A_Prl2c3
  gRNA
gatattatgagacaaactgc

SEQ ID NO: 42810 - DNA, 20 bp, Artificial Sequence
  MKO10042810_A_Prl2c3
  gRNA
aaacattattctaacgtgtc

SEQ ID NO: 42811 - DNA, 20 bp, Artificial Sequence
  MKO10042811_A_Prl2c4
  gRNA
agggatactgctcctactac

SEQ ID NO: 42812 - DNA, 20 bp, Artificial Sequence
  MKO10042812_A_Prl2c4
  gRNA
gatattatgagacaaactgc

SEQ ID NO: 42813 - DNA, 20 bp, Artificial Sequence
  MKO10042813_A_Prl2c4
  gRNA
aaacattattctaacgtgtc

SEQ ID NO: 42814 - DNA, 20 bp, Artificial Sequence
  MKO10042814_A_Prl2c5
  gRNA
caaactcacgcgtatgtgcc

SEQ ID NO: 42815 - DNA, 20 bp, Artificial Sequence
  MKO10042815_A_Prl2c5
  gRNA
tcactcactagatagtccag

SEQ ID NO: 42816 - DNA, 20 bp, Artificial Sequence
  MKO10042816_A_Prl2c5
  gRNA
aaacattattctaacgtgcc

SEQ ID NO: 42817 - DNA, 20 bp, Artificial Sequence
  MKO10042817_A_Prl3a1
  gRNA
gaaacaacttgtgcgtgcat

SEQ ID NO: 42818 - DNA, 20 bp, Artificial Sequence
  MKO10042818_A_Prl3a1
  gRNA
gcacgcacaagttgtttcag

SEQ ID NO: 42819 - DNA, 20 bp, Artificial Sequence
  MKO10042819_A_Prl3a1
  gRNA
tgaagtggtgtggcagttgc

SEQ ID NO: 42820 - DNA, 20 bp, Artificial Sequence
  MKO10042820_A_Prl3b1
  gRNA
tcagtgggtaatcgataatt

SEQ ID NO: 42821 - DNA, 20 bp, Artificial Sequence
  MKO10042821_A_Prl3b1
  gRNA
cctgcgcacgcaccgccata

SEQ ID NO: 42822 - DNA, 20 bp, Artificial Sequence
  MKO10042822_A_Prl3b1
  gRNA
cctataccaacgtgtgattg

SEQ ID NO: 42823 - DNA, 20 bp, Artificial Sequence
  MKO10042823_A_Prl3c1
  gRNA
tgactgccacacgatatgac

SEQ ID NO: 42824 - DNA, 20 bp, Artificial Sequence
  MKO10042824_A_Prl3c1
  gRNA
tctatggatgtgacgagaag

SEQ ID NO: 42825 - DNA, 20 bp, Artificial Sequence
  MKO10042825_A_Prl3c1
  gRNA
attcttctactgtctacgca

SEQ ID NO: 42826 - DNA, 20 bp, Artificial Sequence
  MKO10042826_A_Prl3d1
  gRNA
gaaaacctactttagtttcg

SEQ ID NO: 42827 - DNA, 20 bp, Artificial Sequence
  MKO10042827_A_Prl3d1
  gRNA
gcagcggcatagattataaa

SEQ ID NO: 42828 - DNA, 20 bp, Artificial Sequence
  MKO10042828_A_Prl3d1
  gRNA
acacctggtgtctgcactga

SEQ ID NO: 42829 - DNA, 20 bp, Artificial Sequence
  MKO10042829_A_Prl3d2
  gRNA
tgacgacctgtatacacgtt

SEQ ID NO: 42830 - DNA, 20 bp, Artificial Sequence
  MKO10042830_A_Prl3d2
  gRNA
gttcagccaaacgtgtatac

SEQ ID NO: 42831 - DNA, 20 bp, Artificial Sequence
  MKO10042831_A_Prl3d2
  gRNA
tcttcgagtccagtccaagc

SEQ ID NO: 42832 - DNA, 20 bp, Artificial Sequence
  MKO10042832_A_Prl3d3
  gRNA
gtctcatagtacatttatct

SEQ ID NO: 42833 - DNA, 20 bp, Artificial Sequence
  MKO10042833_A_Prl3d3
  gRNA
aaattccctatacacatctg

SEQ ID NO: 42834 - DNA, 20 bp, Artificial Sequence
  MKO10042834_A_Prl3d3
  gRNA
gaaaacctactttaatttca

SEQ ID NO: 42835 - DNA, 20 bp, Artificial Sequence
  MKO10042835_A_Prl4a1
  gRNA
gtccacgactacacaacctt

SEQ ID NO: 42836 - DNA, 20 bp, Artificial Sequence
  MKO10042836_A_Prl4a1
  gRNA
tgcttagctggaagtactgc

SEQ ID NO: 42837 - DNA, 20 bp, Artificial Sequence
  MKO10042837_A_Prl4a1
  gRNA
cacacagtctactgcaagcc

SEQ ID NO: 42838 - DNA, 20 bp, Artificial Sequence
  MKO10042838_A_Prl5a1
  gRNA
cattaagactatactcagcc

SEQ ID NO: 42839 - DNA, 20 bp, Artificial Sequence
  MKO10042839_A_Prl5a1
  gRNA
tgctgtcaaacttgctcatg

SEQ ID NO: 42840 - DNA, 20 bp, Artificial Sequence
  MKO10042840_A_Prl5a1
  gRNA
ctctgtgcccagatgtatca

SEQ ID NO: 42841 - DNA, 20 bp, Artificial Sequence
  MKO10042841_A_Prl6a1
  gRNA
gaggatgtgcgatataaacc

SEQ ID NO: 42842 - DNA, 20 bp, Artificial Sequence
  MKO10042842_A_Prl6a1
  gRNA
gtagactcaccggcatctgt

SEQ ID NO: 42843 - DNA, 20 bp, Artificial Sequence
  MKO10042843_A_Prl6a1
  gRNA
gtgaatccttgaccaagcac

SEQ ID NO: 42844 - DNA, 20 bp, Artificial Sequence
  MKO10042844_A_Prl7a1
  gRNA
tcctgcgcaactccatgttg

SEQ ID NO: 42845 - DNA, 20 bp, Artificial Sequence
  MKO10042845_A_Prl7a1
  gRNA
tgatgatccactatccatca

SEQ ID NO: 42846 - DNA, 20 bp, Artificial Sequence
  MKO10042846_A_Prl7a1
  gRNA
ggtacttacaaattgatcat

SEQ ID NO: 42847 - DNA, 20 bp, Artificial Sequence
  MKO10042847_A_Prl7a2
  gRNA
gaatctgttgagcttcgtcc

SEQ ID NO: 42848 - DNA, 20 bp, Artificial Sequence
  MKO10042848_A_Prl7a2
  gRNA
cacccagagtatactcaact

SEQ ID NO: 42849 - DNA, 20 bp, Artificial Sequence
  MKO10042849_A_Prl7a2
  gRNA
tcaccgagttgagtatactc

SEQ ID NO: 42850 - DNA, 20 bp, Artificial Sequence
  MKO10042850_A_Prl7b1
  gRNA
tactaagtatactacgagcc

SEQ ID NO: 42851 - DNA, 20 bp, Artificial Sequence
  MKO10042851_A_Prl7b1
  gRNA
gccttgctatagagacacgc

SEQ ID NO: 42852 - DNA, 20 bp, Artificial Sequence
  MKO10042852_A_Prl7b1
  gRNA
acctgatccactgccaattg

SEQ ID NO: 42853 - DNA, 20 bp, Artificial Sequence
  MKO10042853_A_Prl7c1
  gRNA
taataagagccaacgccatc

SEQ ID NO: 42854 - DNA, 20 bp, Artificial Sequence
  MKO10042854_A_Prl7c1
  gRNA
caccatagtcatcctcaatg

SEQ ID NO: 42855 - DNA, 20 bp, Artificial Sequence
  MKO10042855_A_Prl7c1
  gRNA
tgcttccattcaccacattg

SEQ ID NO: 42856 - DNA, 20 bp, Artificial Sequence
  MKO10042856_A_Prl7d1
  gRNA
aactgtttcaggaacgttga

SEQ ID NO: 42857 - DNA, 20 bp, Artificial Sequence
  MKO10042857_A_Prl7d1
  gRNA
ctttgccagaatgcccttat

SEQ ID NO: 42858 - DNA, 20 bp, Artificial Sequence
  MKO10042858_A_Prl7d1
  gRNA
caacgttcctgaaacagttg

SEQ ID NO: 42859 - DNA, 20 bp, Artificial Sequence
  MKO10042859_A_Prl8a1
  gRNA
agctcctgaatgaccttagg

SEQ ID NO: 42860 - DNA, 20 bp, Artificial Sequence
  MKO10042860_A_Prl8a1
  gRNA
aagggtttgtgatagtagag

SEQ ID NO: 42861 - DNA, 20 bp, Artificial Sequence
  MKO10042861_A_Prl8a1
  gRNA
gttgttctcttcaatctcat

SEQ ID NO: 42862 - DNA, 20 bp, Artificial Sequence
  MKO10042862_A_Prl8a2
  gRNA
aaatccatgatgaccttacg

SEQ ID NO: 42863 - DNA, 20 bp, Artificial Sequence
  MKO10042863_A_Prl8a2
  gRNA
acgcatgtatagacgtgatg

SEQ ID NO: 42864 - DNA, 20 bp, Artificial Sequence
  MKO10042864_A_Prl8a2
  gRNA
cactcctgtatactatctag

SEQ ID NO: 42865 - DNA, 20 bp, Artificial Sequence
  MKO10042865_A_Prl8a6
  gRNA
ctcacgaaccccccaaatac

SEQ ID NO: 42866 - DNA, 20 bp, Artificial Sequence
  MKO10042866_A_Prl8a6
  gRNA
gagttctcaaataattagac

SEQ ID NO: 42867 - DNA, 20 bp, Artificial Sequence
  MKO10042867_A_Prl8a6
  gRNA
gacaaatcctgagtgacctt

SEQ ID NO: 42868 - DNA, 20 bp, Artificial Sequence
  MKO10042868_A_Prl8a8
  gRNA
ctcatcccgccgaaccagtt

SEQ ID NO: 42869 - DNA, 20 bp, Artificial Sequence
  MKO10042869_A_Prl8a8
  gRNA
attgtttagaaactgtacga

SEQ ID NO: 42870 - DNA, 20 bp, Artificial Sequence
  MKO10042870_A_Prl8a8
  gRNA
gacaaattctgcgtgacctt

SEQ ID NO: 42871 - DNA, 20 bp, Artificial Sequence
  MKO10042871_A_Prl8a9
  gRNA
gcatgctcagttcccctatc

SEQ ID NO: 42872 - DNA, 20 bp, Artificial Sequence
  MKO10042872_A_Prl8a9
  gRNA
ctctctcaaacccccctgat

SEQ ID NO: 42873 - DNA, 20 bp, Artificial Sequence
  MKO10042873_A_Prl8a9
  gRNA
cggctgctggaaccctctcg

SEQ ID NO: 42874 - DNA, 20 bp, Artificial Sequence
  MKO10042874_A_Prlhr
  gRNA
agtgaaatgcgccgacgtag

SEQ ID NO: 42875 - DNA, 20 bp, Artificial Sequence
  MKO10042875_A_Prlhr
  gRNA
gccatcgacccctacgcctt

SEQ ID NO: 42876 - DNA, 20 bp, Artificial Sequence
  MKO10042876_A_Prlhr
  gRNA
ttctggtgcacccgctacgt

SEQ ID NO: 42877 - DNA, 20 bp, Artificial Sequence
  MKO10042877_A_Prlh
  gRNA
gatcccacgacccgtgtacc

SEQ ID NO: 42878 - DNA, 20 bp, Artificial Sequence
  MKO10042878_A_Prlh
  gRNA
aagccggaagcatggcaccg

SEQ ID NO: 42879 - DNA, 20 bp, Artificial Sequence
  MKO10042879_A_Prlh
  gRNA
caggtccggtgacatccctc

SEQ ID NO: 42880 - DNA, 20 bp, Artificial Sequence
  MKO10042880_A_Prlr
  gRNA
tacctcggatccactttatg

SEQ ID NO: 42881 - DNA, 20 bp, Artificial Sequence
  MKO10042881_A_Prlr
  gRNA
actgcttcccatttcgttcg

SEQ ID NO: 42882 - DNA, 20 bp, Artificial Sequence
  MKO10042882_A_Prlr
  gRNA
gaacgacatttgtggatttc

SEQ ID NO: 42883 - DNA, 20 bp, Artificial Sequence
  MKO10042883_A_Prl
  gRNA
acaccattcgctgcctgcgc

SEQ ID NO: 42884 - DNA, 20 bp, Artificial Sequence
  MKO10042884_A_Prl
  gRNA
ccgagagctgtttgaccgtg

SEQ ID NO: 42885 - DNA, 20 bp, Artificial Sequence
  MKO10042885_A_Prl
  gRNA
cctctgccaatctgttccgc

SEQ ID NO: 42886 - DNA, 20 bp, Artificial Sequence
  MKO10042886_A_Prm1
  gRNA
tgcgacatcttcgcctgcga

SEQ ID NO: 42887 - DNA, 20 bp, Artificial Sequence
  MKO10042887_A_Prm1
  gRNA
gcaggcgaagatgtcgcaga

SEQ ID NO: 42888 - DNA, 20 bp, Artificial Sequence
  MKO10042888_A_Prm1
  gRNA
gccgccgctcatacaccata

SEQ ID NO: 42889 - DNA, 20 bp, Artificial Sequence
  MKO10042889_A_Prm2
  gRNA
tgcatgaccgacgcctcttg

SEQ ID NO: 42890 - DNA, 20 bp, Artificial Sequence
  MKO10042890_A_Prm2
  gRNA
ccatagtcctctacgcgctc

SEQ ID NO: 42891 - DNA, 20 bp, Artificial Sequence
  MKO10042891_A_Prm2
  gRNA
caggctgcagaagatcccga

SEQ ID NO: 42892 - DNA, 20 bp, Artificial Sequence
  MKO10042892_A_Prm3
  gRNA
agaggagcaaatcccggtga

SEQ ID NO: 42893 - DNA, 20 bp, Artificial Sequence
  MKO10042893_A_Prm3
  gRNA
cgaaaagcaagagagcgccg

SEQ ID NO: 42894 - DNA, 20 bp, Artificial Sequence
  MKO10042894_A_Prm3
  gRNA
gtcctccatgaagaagctcg

SEQ ID NO: 42895 - DNA, 20 bp, Artificial Sequence
  MKO10042895_A_Prmt10
  gRNA
ccccgtgccgatatccagaa

SEQ ID NO: 42896 - DNA, 20 bp, Artificial Sequence
  MKO10042896_A_Prmt10
  gRNA
tagaatgggctttcgagatg

SEQ ID NO: 42897 - DNA, 20 bp, Artificial Sequence
  MKO10042897_A_Prmt10
  gRNA
agccgaatacaagacttact

SEQ ID NO: 42898 - DNA, 20 bp, Artificial Sequence
  MKO10042898_A_Prmt1
  gRNA
cgggggcccgcaaggttatt

SEQ ID NO: 42899 - DNA, 20 bp, Artificial Sequence
  MKO10042899_A_Prmt1
  gRNA
cacctccatgatgcagttcg

SEQ ID NO: 42900 - DNA, 20 bp, Artificial Sequence
  MKO10042900_A_Prmt1
  gRNA
ctcaccatggtctaacttgt

SEQ ID NO: 42901 - DNA, 20 bp, Artificial Sequence
  MKO10042901_A_Prmt2
  gRNA
gaggagtacttcgacagcta

SEQ ID NO: 42902 - DNA, 20 bp, Artificial Sequence
  MKO10042902_A_Prmt2
  gRNA
gcaactggaggaatacgacc

SEQ ID NO: 42903 - DNA, 20 bp, Artificial Sequence
  MKO10042903_A_Prmt2
  gRNA
cgtggccattgcagactata

SEQ ID NO: 42904 - DNA, 20 bp, Artificial Sequence
  MKO10042904_A_Prmt3
  gRNA
tgtgtgctgccggccgtgcg

SEQ ID NO: 42905 - DNA, 20 bp, Artificial Sequence
  MKO10042905_A_Prmt3
  gRNA
gcggacactgagcccgcgca

SEQ ID NO: 42906 - DNA, 20 bp, Artificial Sequence
  MKO10042906_A_Prmt3
  gRNA
gaattcatatattcaaccgt

SEQ ID NO: 42907 - DNA, 20 bp, Artificial Sequence
  MKO10042907_A_Prmt5
  gRNA
agactggaatacgctaattg

SEQ ID NO: 42908 - DNA, 20 bp, Artificial Sequence
  MKO10042908_A_Prmt5
  gRNA
cgatcagacctactgctgtc

SEQ ID NO: 42909 - DNA, 20 bp, Artificial Sequence
  MKO10042909_A_Prmt5
  gRNA
tcttccacccgcgtttcaag

SEQ ID NO: 42910 - DNA, 20 bp, Artificial Sequence
  MKO10042910_A_Prmt6
  gRNA
gcccatccactcgctgacga

SEQ ID NO: 42911 - DNA, 20 bp, Artificial Sequence
  MKO10042911_A_Prmt6
  gRNA
cgaggagatgatcgccgacc

SEQ ID NO: 42912 - DNA, 20 bp, Artificial Sequence
  MKO10042912_A_Prmt6
  gRNA
ccattcggagatcgtggtgc

SEQ ID NO: 42913 - DNA, 20 bp, Artificial Sequence
  MKO10042913_A_Prmt7
  gRNA
atcagaatgttagcacgaca

SEQ ID NO: 42914 - DNA, 20 bp, Artificial Sequence
  MKO10042914_A_Prmt7
  gRNA
tgacttctgctatgctatcg

SEQ ID NO: 42915 - DNA, 20 bp, Artificial Sequence
  MKO10042915_A_Prmt7
  gRNA
tcaatgatggcagttactgc

SEQ ID NO: 42916 - DNA, 20 bp, Artificial Sequence
  MKO10042916_A_Prmt8
  gRNA
tcaacaccgtgatctttgcc

SEQ ID NO: 42917 - DNA, 20 bp, Artificial Sequence
  MKO10042917_A_Prmt8
  gRNA
ccctgctttggcggcaaaca

SEQ ID NO: 42918 - DNA, 20 bp, Artificial Sequence
  MKO10042918_A_Prmt8
  gRNA
tccatgtttgccgccaaagc

SEQ ID NO: 42919 - DNA, 20 bp, Artificial Sequence
  MKO10042919_A_Prnd
  gRNA
cgccgtggaccaaccggcga

SEQ ID NO: 42920 - DNA, 20 bp, Artificial Sequence
  MKO10042920_A_Prnd
  gRNA
gaccatcgccggttggtcca

SEQ ID NO: 42921 - DNA, 20 bp, Artificial Sequence
  MKO10042921_A_Prnd
  gRNA
gttctcagctacccgagctt

SEQ ID NO: 42922 - DNA, 20 bp, Artificial Sequence
  MKO10042922_A_Prnp
  gRNA
agtcgtgcacgaagttgttc

SEQ ID NO: 42923 - DNA, 20 bp, Artificial Sequence
  MKO10042923_A_Prnp
  gRNA
ggatcttctcccgtcgtaat

SEQ ID NO: 42924 - DNA, 20 bp, Artificial Sequence
  MKO10042924_A_Prnp
  gRNA
tcagtcatcatggcgaacct

SEQ ID NO: 42925 - DNA, 20 bp, Artificial Sequence
  MKO10042925_A_Prn
  gRNA
cgccgtggaccaaccggcga

SEQ ID NO: 42926 - DNA, 20 bp, Artificial Sequence
  MKO10042926_A_Prn
  gRNA
gaccatcgccggttggtcca

SEQ ID NO: 42927 - DNA, 20 bp, Artificial Sequence
  MKO10042927_A_Prn
  gRNA
ggagtggaggtcgcttcgag

SEQ ID NO: 42928 - DNA, 20 bp, Artificial Sequence
  MKO10042928_A_Prob1
  gRNA
cgtctcctgagagttcgtcg

SEQ ID NO: 42929 - DNA, 20 bp, Artificial Sequence
  MKO10042929_A_Prob1
  gRNA
cgcgtccctgtcgactctaa

SEQ ID NO: 42930 - DNA, 20 bp, Artificial Sequence
  MKO10042930_A_Prob1
  gRNA
accatcttgcgcacgtctcg

SEQ ID NO: 42931 - DNA, 20 bp, Artificial Sequence
  MKO10042931_A_Proca1
  gRNA
gatctgagccaatccgtaag

SEQ ID NO: 42932 - DNA, 20 bp, Artificial Sequence
  MKO10042932_A_Proca1
  gRNA
tatcagtgcccatcactatc

SEQ ID NO: 42933 - DNA, 20 bp, Artificial Sequence
  MKO10042933_A_Proca1
  gRNA
gccaatgcgactgtgaatct

SEQ ID NO: 42934 - DNA, 20 bp, Artificial Sequence
  MKO10042934_A_Procr
  gRNA
gctggtatatcgcgagcgca

SEQ ID NO: 42935 - DNA, 20 bp, Artificial Sequence
  MKO10042935_A_Procr
  gRNA
cgattatgaaacagcccatc

SEQ ID NO: 42936 - DNA, 20 bp, Artificial Sequence
  MKO10042936_A_Procr
  gRNA
tgcgccctttgtaactccga

SEQ ID NO: 42937 - DNA, 20 bp, Artificial Sequence
  MKO10042937_A_Proc
  gRNA
ggcacttgcatcgacggcat

SEQ ID NO: 42938 - DNA, 20 bp, Artificial Sequence
  MKO10042938_A_Proc
  gRNA
cattgttcacccgacagtcc

SEQ ID NO: 42939 - DNA, 20 bp, Artificial Sequence
  MKO10042939_A_Proc
  gRNA
tctcgcagagttgcgcttcc

SEQ ID NO: 42940 - DNA, 20 bp, Artificial Sequence
  MKO10042940_A_Prodh2
  gRNA
cgagccctcgtggacgccca

SEQ ID NO: 42941 - DNA, 20 bp, Artificial Sequence
  MKO10042941_A_Prodh2
  gRNA
cctcagccgcttgcaccgag

SEQ ID NO: 42942 - DNA, 20 bp, Artificial Sequence
  MKO10042942_A_Prodh2
  gRNA
acttacacaaagccgagtgc

SEQ ID NO: 42943 - DNA, 20 bp, Artificial Sequence
  MKO10042943_A_Prodh
  gRNA
tatcaggtgcaccccgcctt

SEQ ID NO: 42944 - DNA, 20 bp, Artificial Sequence
  MKO10042944_A_Prodh
  gRNA
agtctatcaggcctctgatc

SEQ ID NO: 42945 - DNA, 20 bp, Artificial Sequence
  MKO10042945_A_Prodh
  gRNA
agccattaagctcactgcac

SEQ ID NO: 42946 - DNA, 20 bp, Artificial Sequence
  MKO10042946_A_Prok1
  gRNA
aagcagcggtacctgccgtc

SEQ ID NO: 42947 - DNA, 20 bp, Artificial Sequence
  MKO10042947_A_Prok1
  gRNA
ccacagactgatagcgcagc

SEQ ID NO: 42948 - DNA, 20 bp, Artificial Sequence
  MKO10042948_A_Prok1
  gRNA
tccgactgtgcggtcatcac

SEQ ID NO: 42949 - DNA, 20 bp, Artificial Sequence
  MKO10042949_A_Prok2
  gRNA
gcttaccccggtgatgaccg

SEQ ID NO: 42950 - DNA, 20 bp, Artificial Sequence
  MKO10042950_A_Prok2
  gRNA
agacactaactttccgagtc

SEQ ID NO: 42951 - DNA, 20 bp, Artificial Sequence
  MKO10042951_A_Prok2
  gRNA
ggatgccgcggtcatcaccg

SEQ ID NO: 42952 - DNA, 20 bp, Artificial Sequence
  MKO10042952_A_Prokr1
  gRNA
ctacagggcccacgaactcg

SEQ ID NO: 42953 - DNA, 20 bp, Artificial Sequence
  MKO10042953_A_Prokr1
  gRNA
tccggcggatctgctctgtc

SEQ ID NO: 42954 - DNA, 20 bp, Artificial Sequence
  MKO10042954_A_Prokr1
  gRNA
cgtctccactaacgccctac

SEQ ID NO: 42955 - DNA, 20 bp, Artificial Sequence
  MKO10042955_A_Prokr2
  gRNA
ctccgtcaactaccttcgta

SEQ ID NO: 42956 - DNA, 20 bp, Artificial Sequence
  MKO10042956_A_Prokr2
  gRNA
gcggtctgataattcatccg

SEQ ID NO: 42957 - DNA, 20 bp, Artificial Sequence
  MKO10042957_A_Prokr2
  gRNA
cttgattcttgacgataacg

SEQ ID NO: 42958 - DNA, 20 bp, Artificial Sequence
  MKO10042958_A_Prol1
  gRNA
gctgtagaggtgctaggctt

SEQ ID NO: 42959 - DNA, 20 bp, Artificial Sequence
  MKO10042959_A_Prol1
  gRNA
caaaacacttccgcaaatgt

SEQ ID NO: 42960 - DNA, 20 bp, Artificial Sequence
  MKO10042960_A_Prol1
  gRNA
ggctcttacttcatatttca

SEQ ID NO: 42961 - DNA, 20 bp, Artificial Sequence
  MKO10042961_A_Prom1
  gRNA
taaggactccgatctcatag

SEQ ID NO: 42962 - DNA, 20 bp, Artificial Sequence
  MKO10042962_A_Prom1
  gRNA
agtccttatctgcgccatcc

SEQ ID NO: 42963 - DNA, 20 bp, Artificial Sequence
  MKO10042963_A_Prom1
  gRNA
tcacctagagggaagtcatt

SEQ ID NO: 42964 - DNA, 20 bp, Artificial Sequence
  MKO10042964_A_Prom2
  gRNA
ggccccgacgcgcgaacaag

SEQ ID NO: 42965 - DNA, 20 bp, Artificial Sequence
  MKO10042965_A_Prom2
  gRNA
cccctcttgttcgcgcgtcg

SEQ ID NO: 42966 - DNA, 20 bp, Artificial Sequence
  MKO10042966_A_Prom2
  gRNA
tgcccaggtggttcgatatg

SEQ ID NO: 42967 - DNA, 20 bp, Artificial Sequence
  MKO10042967_A_Prop1
  gRNA
gccgatagcccatctatcta

SEQ ID NO: 42968 - DNA, 20 bp, Artificial Sequence
  MKO10042968_A_Prop1
  gRNA
gcttccgttgcttagccctg

SEQ ID NO: 42969 - DNA, 20 bp, Artificial Sequence
  MKO10042969_A_Prop1
  gRNA
ccctctcgagcccagatgtc

SEQ ID NO: 42970 - DNA, 20 bp, Artificial Sequence
  MKO10042970_A_Prorsd1
  gRNA
cggcgccctcgccattcgca

SEQ ID NO: 42971 - DNA, 20 bp, Artificial Sequence
  MKO10042971_A_Prorsd1
  gRNA
ctccacgacctccgtgcgaa

SEQ ID NO: 42972 - DNA, 20 bp, Artificial Sequence
  MKO10042972_A_Prorsd1
  gRNA
aagcgggagcgggccaaaag

SEQ ID NO: 42973 - DNA, 20 bp, Artificial Sequence
  MKO10042973_A_Pros1
  gRNA
ttggctcattccatgctgcg

SEQ ID NO: 42974 - DNA, 20 bp, Artificial Sequence
  MKO10042974_A_Pros1
  gRNA
cttcaatgcactctcgttca

SEQ ID NO: 42975 - DNA, 20 bp, Artificial Sequence
  MKO10042975_A_Pros1
  gRNA
agagcgtgcttcacaagtcc

SEQ ID NO: 42976 - DNA, 20 bp, Artificial Sequence
  MKO10042976_A_Prosc
  gRNA
agttctctccaaaagtgcgc

SEQ ID NO: 42977 - DNA, 20 bp, Artificial Sequence
  MKO10042977_A_Prosc
  gRNA
ggccacggccagcgcacttt

SEQ ID NO: 42978 - DNA, 20 bp, Artificial Sequence
  MKO10042978_A_Prosc
  gRNA
aatgaagtgccacttgatct

SEQ ID NO: 42979 - DNA, 20 bp, Artificial Sequence
  MKO10042979_A_Proser1
  gRNA
tgcaggtggttgatctgcta

SEQ ID NO: 42980 - DNA, 20 bp, Artificial Sequence
  MKO10042980_A_Proser1
  gRNA
cttcagctgtggctcggccc

SEQ ID NO: 42981 - DNA, 20 bp, Artificial Sequence
  MKO10042981_A_Proser1
  gRNA
gagctgtttcacctttagta

SEQ ID NO: 42982 - DNA, 20 bp, Artificial Sequence
  MKO10042982_A_Proser2
  gRNA
tgtgtcgcccgcagcgatga

SEQ ID NO: 42983 - DNA, 20 bp, Artificial Sequence
  MKO10042983_A_Proser2
  gRNA
gtcgatgccacacgccgaca

SEQ ID NO: 42984 - DNA, 20 bp, Artificial Sequence
  MKO10042984_A_Proser2
  gRNA
tacggctcacctgttacttg

SEQ ID NO: 42985 - DNA, 20 bp, Artificial Sequence
  MKO10042985_A_Prox1
  gRNA
aacatctttgcccgcgatga

SEQ ID NO: 42986 - DNA, 20 bp, Artificial Sequence
  MKO10042986_A_Prox1
  gRNA
ttccccgttgactgcgaatc

SEQ ID NO: 42987 - DNA, 20 bp, Artificial Sequence
  MKO10042987_A_Prox1
  gRNA
cccgaatgatattctcaacc

SEQ ID NO: 42988 - DNA, 20 bp, Artificial Sequence
  MKO10042988_A_Prox2
  gRNA
tatcacgaacgcccaagcac

SEQ ID NO: 42989 - DNA, 20 bp, Artificial Sequence
  MKO10042989_A_Prox2
  gRNA
agagtagagaccattgtccg

SEQ ID NO: 42990 - DNA, 20 bp, Artificial Sequence
  MKO10042990_A_Prox2
  gRNA
ctgcctgacaccgacgagct

SEQ ID NO: 42991 - DNA, 20 bp, Artificial Sequence
  MKO10042991_A_Proz
  gRNA
cctcgcatgtcccgttgttg

SEQ ID NO: 42992 - DNA, 20 bp, Artificial Sequence
  MKO10042992_A_Proz
  gRNA
gcggggtagttcgtacttcc

SEQ ID NO: 42993 - DNA, 20 bp, Artificial Sequence
  MKO10042993_A_Proz
  gRNA
tggagcctcacccattgcac

SEQ ID NO: 42994 - DNA, 20 bp, Artificial Sequence
  MKO10042994_A_Prp2
  gRNA
aaatccagatcccgaatcaa

SEQ ID NO: 42995 - DNA, 20 bp, Artificial Sequence
  MKO10042995_A_Prp2
  gRNA
ggtctcggctgtggacctgc

SEQ ID NO: 42996 - DNA, 20 bp, Artificial Sequence
  MKO10042996_A_Prp2
  gRNA
ggggttcctgagcagagctc

SEQ ID NO: 42997 - DNA, 20 bp, Artificial Sequence
  MKO10042997_A_Prpf18
  gRNA
agagccgattagactgtttg

SEQ ID NO: 42998 - DNA, 20 bp, Artificial Sequence
  MKO10042998_A_Prpf18
  gRNA
tctctatcttccttaaacgc

SEQ ID NO: 42999 - DNA, 20 bp, Artificial Sequence
  MKO10042999_A_Prpf18
  gRNA
aacatcgtcaaatccagtgc

SEQ ID NO: 43000 - DNA, 20 bp, Artificial Sequence
  MKO10043000_A_Prpf19
  gRNA
ctagggttggccgaattctc

SEQ ID NO: 43001 - DNA, 20 bp, Artificial Sequence
  MKO10043001_A_Prpf19
  gRNA
ctgcctgccgagtcattgcc

SEQ ID NO: 43002 - DNA, 20 bp, Artificial Sequence
  MKO10043002_A_Prpf19
  gRNA
ggaacacttaccacaacact

SEQ ID NO: 43003 - DNA, 20 bp, Artificial Sequence
  MKO10043003_A_Prpf31
  gRNA
ggattacatccgcacagtca

SEQ ID NO: 43004 - DNA, 20 bp, Artificial Sequence
  MKO10043004_A_Prpf31
  gRNA
tcctgagtaccgagtcattg

SEQ ID NO: 43005 - DNA, 20 bp, Artificial Sequence
  MKO10043005_A_Prpf31
  gRNA
ggaggcaccttccgacacgt

SEQ ID NO: 43006 - DNA, 20 bp, Artificial Sequence
  MKO10043006_A_Prpf38a
  gRNA
tggtaggtatgtccggatgc

SEQ ID NO: 43007 - DNA, 20 bp, Artificial Sequence
  MKO10043007_A_Prpf38a
  gRNA
cctgtagaaacggtatgtgc

SEQ ID NO: 43008 - DNA, 20 bp, Artificial Sequence
  MKO10043008_A_Prpf38a
  gRNA
tcatacctccatttcggttc

SEQ ID NO: 43009 - DNA, 20 bp, Artificial Sequence
  MKO10043009_A_Prpf38b
  gRNA
agcagattaaaactcgacct

SEQ ID NO: 43010 - DNA, 20 bp, Artificial Sequence
  MKO10043010_A_Prpf38b
  gRNA
aggtcacgcatgttgagcca

SEQ ID NO: 43011 - DNA, 20 bp, Artificial Sequence
  MKO10043011_A_Prpf38b
  gRNA
cccctccgcacatccccgtc

SEQ ID NO: 43012 - DNA, 20 bp, Artificial Sequence
  MKO10043012_A_Prpf39
  gRNA
gtacactacccgtattgcta

SEQ ID NO: 43013 - DNA, 20 bp, Artificial Sequence
  MKO10043013_A_Prpf39
  gRNA
gctgtatacgatcgtattct

SEQ ID NO: 43014 - DNA, 20 bp, Artificial Sequence
  MKO10043014_A_Prpf39
  gRNA
tttcttcttaggtttatcga

SEQ ID NO: 43015 - DNA, 20 bp, Artificial Sequence
  MKO10043015_A_Prpf3
  gRNA
cgagctgcaagcccgaatcc

SEQ ID NO: 43016 - DNA, 20 bp, Artificial Sequence
  MKO10043016_A_Prpf3
  gRNA
agcagcaacacgacaaatcg

SEQ ID NO: 43017 - DNA, 20 bp, Artificial Sequence
  MKO10043017_A_Prpf3
  gRNA
cgttcataaaggtagcggcc

SEQ ID NO: 43018 - DNA, 20 bp, Artificial Sequence
  MKO10043018_A_Prpf40a
  gRNA
gccacagatgatgcccccta

SEQ ID NO: 43019 - DNA, 20 bp, Artificial Sequence
  MKO10043019_A_Prpf40a
  gRNA
cccatagggggcatcatctg

SEQ ID NO: 43020 - DNA, 20 bp, Artificial Sequence
  MKO10043020_A_Prpf40a
  gRNA
atgatgtcttcagtaatgtc

SEQ ID NO: 43021 - DNA, 20 bp, Artificial Sequence
  MKO10043021_A_Prpf40b
  gRNA
tcggcagacggctccgggtg

SEQ ID NO: 43022 - DNA, 20 bp, Artificial Sequence
  MKO10043022_A_Prpf40b
  gRNA
ggcaccgccaccacttacac

SEQ ID NO: 43023 - DNA, 20 bp, Artificial Sequence
  MKO10043023_A_Prpf40b
  gRNA
cagctggcggtgtccgcacc

SEQ ID NO: 43024 - DNA, 20 bp, Artificial Sequence
  MKO10043024_A_Prpf4b
  gRNA
ctcgatcacggggtggtcat

SEQ ID NO: 43025 - DNA, 20 bp, Artificial Sequence
  MKO10043025_A_Prpf4b
  gRNA
gttccccattgagacgcagc

SEQ ID NO: 43026 - DNA, 20 bp, Artificial Sequence
  MKO10043026_A_Prpf4b
  gRNA
ttgaccgttcacatctacca

SEQ ID NO: 43027 - DNA, 20 bp, Artificial Sequence
  MKO10043027_A_Prpf4
  gRNA
acgggagcaactaaatcgtc

SEQ ID NO: 43028 - DNA, 20 bp, Artificial Sequence
  MKO10043028_A_Prpf4
  gRNA
ccctctccaaaaagcgtgat

SEQ ID NO: 43029 - DNA, 20 bp, Artificial Sequence
  MKO10043029_A_Prpf4
  gRNA
tgaagggccaaatagcctga

SEQ ID NO: 43030 - DNA, 20 bp, Artificial Sequence
  MKO10043030_A_Prpf6
  gRNA
gttccgttgacgtttgtttc

SEQ ID NO: 43031 - DNA, 20 bp, Artificial Sequence
  MKO10043031_A_Prpf6
  gRNA
caaaatcacctcatcgtagt

SEQ ID NO: 43032 - DNA, 20 bp, Artificial Sequence
  MKO10043032_A_Prpf6
  gRNA
gaatgataccaactacgatg

SEQ ID NO: 43033 - DNA, 20 bp, Artificial Sequence
  MKO10043033_A_Prpf8
  gRNA
ggcggttcctcgtcatcgaa

SEQ ID NO: 43034 - DNA, 20 bp, Artificial Sequence
  MKO10043034_A_Prpf8
  gRNA
tttcccccctttcgatgacg

SEQ ID NO: 43035 - DNA, 20 bp, Artificial Sequence
  MKO10043035_A_Prpf8
  gRNA
ccgcttctctgcatatcgct

SEQ ID NO: 43036 - DNA, 20 bp, Artificial Sequence
  MKO10043036_A_Prph2
  gRNA
cattcttgagtccgtaagcc

SEQ ID NO: 43037 - DNA, 20 bp, Artificial Sequence
  MKO10043037_A_Prph2
  gRNA
gctgtagtgcgccgagttgt

SEQ ID NO: 43038 - DNA, 20 bp, Artificial Sequence
  MKO10043038_A_Prph2
  gRNA
acccggccaagtacgccaag

SEQ ID NO: 43039 - DNA, 20 bp, Artificial Sequence
  MKO10043039_A_Prph
  gRNA
caaagctggtcggcgcgcgc

SEQ ID NO: 43040 - DNA, 20 bp, Artificial Sequence
  MKO10043040_A_Prph
  gRNA
ggagaaatcgaggcgctccg

SEQ ID NO: 43041 - DNA, 20 bp, Artificial Sequence
  MKO10043041_A_Prph
  gRNA
tcaccttacggaagagcacc

SEQ ID NO: 43042 - DNA, 20 bp, Artificial Sequence
  MKO10043042_A_Prpmp5
  gRNA
ggtggtccttcatggttccc

SEQ ID NO: 43043 - DNA, 20 bp, Artificial Sequence
  MKO10043043_A_Prpmp5
  gRNA
gaggcccacagagtcccctt

SEQ ID NO: 43044 - DNA, 20 bp, Artificial Sequence
  MKO10043044_A_Prpmp5
  gRNA
cctgctcacagcagctttgc

SEQ ID NO: 43045 - DNA, 20 bp, Artificial Sequence
  MKO10043045_A_Prps1l1
  gRNA
cacattcaaatggtccgcga

SEQ ID NO: 43046 - DNA, 20 bp, Artificial Sequence
  MKO10043046_A_Prps1l1
  gRNA
tgctacgagcttcgcagaga

SEQ ID NO: 43047 - DNA, 20 bp, Artificial Sequence
  MKO10043047_A_Prps1l1
  gRNA
acaagggtacgtgactgaac

SEQ ID NO: 43048 - DNA, 20 bp, Artificial Sequence
  MKO10043048_A_Prps1l3
  gRNA
tgcattgttgatgcgagaaa

SEQ ID NO: 43049 - DNA, 20 bp, Artificial Sequence
  MKO10043049_A_Prps1l3
  gRNA
gatgtcaatcacctgtattt

SEQ ID NO: 43050 - DNA, 20 bp, Artificial Sequence
  MKO10043050_A_Prps1l3
  gRNA
aggagatgtgaaggatcgtg

SEQ ID NO: 43051 - DNA, 20 bp, Artificial Sequence
  MKO10043051_A_Prps1
  gRNA
catccacaagtatagccaca

SEQ ID NO: 43052 - DNA, 20 bp, Artificial Sequence
  MKO10043052_A_Prps1
  gRNA
ctaccttatccttcttatct

SEQ ID NO: 43053 - DNA, 20 bp, Artificial Sequence
  MKO10043053_A_Prps1
  gRNA
atgggatgactgcagtaacc

SEQ ID NO: 43054 - DNA, 20 bp, Artificial Sequence
  MKO10043054_A_Prps2
  gRNA
tatcggccatgtcgtctacc

SEQ ID NO: 43055 - DNA, 20 bp, Artificial Sequence
  MKO10043055_A_Prps2
  gRNA
ctacgtacttatctgcagca

SEQ ID NO: 43056 - DNA, 20 bp, Artificial Sequence
  MKO10043056_A_Prps2
  gRNA
taccctgcttcccctacgcc

SEQ ID NO: 43057 - DNA, 20 bp, Artificial Sequence
  MKO10043057_A_Prpsap1
  gRNA
taggcgtcttggtgctgaat

SEQ ID NO: 43058 - DNA, 20 bp, Artificial Sequence
  MKO10043058_A_Prpsap1
  gRNA
cactgaagaccgcctgcgcc

SEQ ID NO: 43059 - DNA, 20 bp, Artificial Sequence
  MKO10043059_A_Prpsap1
  gRNA
gttgtatatcaggagaccaa

SEQ ID NO: 43060 - DNA, 20 bp, Artificial Sequence
  MKO10043060_A_Prpsap2
  gRNA
gctcacctctgttaggttcc

SEQ ID NO: 43061 - DNA, 20 bp, Artificial Sequence
  MKO10043061_A_Prpsap2
  gRNA
gcacttactttgagatggtt

SEQ ID NO: 43062 - DNA, 20 bp, Artificial Sequence
  MKO10043062_A_Prpsap2
  gRNA
gttacaatatattcaagaag

SEQ ID NO: 43063 - DNA, 20 bp, Artificial Sequence
  MKO10043063_A_Prr11
  gRNA
tgggattccccattcgtcgt

SEQ ID NO: 43064 - DNA, 20 bp, Artificial Sequence
  MKO10043064_A_Prr11
  gRNA
gcctgtgctccaacgacgaa

SEQ ID NO: 43065 - DNA, 20 bp, Artificial Sequence
  MKO10043065_A_Prr11
  gRNA
accgtatacctgggctacac

SEQ ID NO: 43066 - DNA, 20 bp, Artificial Sequence
  MKO10043066_A_Prr12
  gRNA
acggggtggcgaaactcccg

SEQ ID NO: 43067 - DNA, 20 bp, Artificial Sequence
  MKO10043067_A_Prr12
  gRNA
ccacggcgacgcgggccgtc

SEQ ID NO: 43068 - DNA, 20 bp, Artificial Sequence
  MKO10043068_A_Prr12
  gRNA
cgagatgaggttcatgacgg

SEQ ID NO: 43069 - DNA, 20 bp, Artificial Sequence
  MKO10043069_A_Prr13
  gRNA
acaggataagggggacgaca

SEQ ID NO: 43070 - DNA, 20 bp, Artificial Sequence
  MKO10043070_A_Prr13
  gRNA
ccttatcctgtaccacaacc

SEQ ID NO: 43071 - DNA, 20 bp, Artificial Sequence
  MKO10043071_A_Prr13
  gRNA
gacatgtggaatcctaatgc

SEQ ID NO: 43072 - DNA, 20 bp, Artificial Sequence
  MKO10043072_A_Prr14l
  gRNA
ttcagtagaagaattacgca

SEQ ID NO: 43073 - DNA, 20 bp, Artificial Sequence
  MKO10043073_A_Prr14l
  gRNA
acgttctcctaaccgagccc

SEQ ID NO: 43074 - DNA, 20 bp, Artificial Sequence
  MKO10043074_A_Prr14l
  gRNA
ctttgctggattgtctcggg

SEQ ID NO: 43075 - DNA, 20 bp, Artificial Sequence
  MKO10043075_A_Prr14
  gRNA
ggactggcgggctcgagtca

SEQ ID NO: 43076 - DNA, 20 bp, Artificial Sequence
  MKO10043076_A_Prr14
  gRNA
ccaggagcccgaaaagaccg

SEQ ID NO: 43077 - DNA, 20 bp, Artificial Sequence
  MKO10043077_A_Prr14
  gRNA
tcccatgatgctcgagatag

SEQ ID NO: 43078 - DNA, 20 bp, Artificial Sequence
  MKO10043078_A_Prr15l
  gRNA
cgggatttcgtagagcactt

SEQ ID NO: 43079 - DNA, 20 bp, Artificial Sequence
  MKO10043079_A_Prr15l
  gRNA
cagcgactttaacagccgtc

SEQ ID NO: 43080 - DNA, 20 bp, Artificial Sequence
  MKO10043080_A_Prr15l
  gRNA
ctgtgagggtctcctgcgtc

SEQ ID NO: 43081 - DNA, 20 bp, Artificial Sequence
  MKO10043081_A_Prr15
  gRNA
ctgctagtccgatctgagtg

SEQ ID NO: 43082 - DNA, 20 bp, Artificial Sequence
  MKO10043082_A_Prr15
  gRNA
aatttgaagatctcacgctc

SEQ ID NO: 43083 - DNA, 20 bp, Artificial Sequence
  MKO10043083_A_Prr15
  gRNA
ctatgggccatggcggacag

SEQ ID NO: 43084 - DNA, 20 bp, Artificial Sequence
  MKO10043084_A_Prr16
  gRNA
ttaaaccgaactcgttcccg

SEQ ID NO: 43085 - DNA, 20 bp, Artificial Sequence
  MKO10043085_A_Prr16
  gRNA
ccacgtccttcaggtcgccc

SEQ ID NO: 43086 - DNA, 20 bp, Artificial Sequence
  MKO10043086_A_Prr16
  gRNA
ggaggctgccggcggtccct

SEQ ID NO: 43087 - DNA, 20 bp, Artificial Sequence
  MKO10043087_A_Prr18
  gRNA
taccagtgggagccgcgggt

SEQ ID NO: 43088 - DNA, 20 bp, Artificial Sequence
  MKO10043088_A_Prr18
  gRNA
agcagcgacaccttaagcac

SEQ ID NO: 43089 - DNA, 20 bp, Artificial Sequence
  MKO10043089_A_Prr18
  gRNA
tcgtgcgcaagtgcaccgag

SEQ ID NO: 43090 - DNA, 20 bp, Artificial Sequence
  MKO10043090_A_Prr19
  gRNA
ttgcgacggcgaattcggcc

SEQ ID NO: 43091 - DNA, 20 bp, Artificial Sequence
  MKO10043091_A_Prr19
  gRNA
gaattcgccgtcgcaagacc

SEQ ID NO: 43092 - DNA, 20 bp, Artificial Sequence
  MKO10043092_A_Prr19
  gRNA
ctgaggtgggcggacatccc

SEQ ID NO: 43093 - DNA, 20 bp, Artificial Sequence
  MKO10043093_A_Prr22
  gRNA
ccaccgcatctaggatctcg

SEQ ID NO: 43094 - DNA, 20 bp, Artificial Sequence
  MKO10043094_A_Prr22
  gRNA
cccactcgatgcggtagatt

SEQ ID NO: 43095 - DNA, 20 bp, Artificial Sequence
  MKO10043095_A_Prr22
  gRNA
ccatcgtacctacggtggga

SEQ ID NO: 43096 - DNA, 20 bp, Artificial Sequence
  MKO10043096_A_Prr23a
  gRNA
ggaggtgagcgcgctgctag

SEQ ID NO: 43097 - DNA, 20 bp, Artificial Sequence
  MKO10043097_A_Prr23a
  gRNA
tagcagcgcgctcacctccg

SEQ ID NO: 43098 - DNA, 20 bp, Artificial Sequence
  MKO10043098_A_Prr23a
  gRNA
tcggcgggcgcttccagctc

SEQ ID NO: 43099 - DNA, 20 bp, Artificial Sequence
  MKO10043099_A_Prr24
  gRNA
tggctgcggtcgtggcccgc

SEQ ID NO: 43100 - DNA, 20 bp, Artificial Sequence
  MKO10043100_A_Prr24
  gRNA
ggccagactatccaggcgct

SEQ ID NO: 43101 - DNA, 20 bp, Artificial Sequence
  MKO10043101_A_Prr24
  gRNA
gcggtctcccgcgtcgctcc

SEQ ID NO: 43102 - DNA, 20 bp, Artificial Sequence
  MKO10043102_A_Prr3
  gRNA
ttctgtgaactactcccccg

SEQ ID NO: 43103 - DNA, 20 bp, Artificial Sequence
  MKO10043103_A_Prr3
  gRNA
gccctccccccatggctaac

SEQ ID NO: 43104 - DNA, 20 bp, Artificial Sequence
  MKO10043104_A_Prr3
  gRNA
tatgccgaaacgaaagaagc

SEQ ID NO: 43105 - DNA, 20 bp, Artificial Sequence
  MKO10043105_A_Prr5l
  gRNA
tgtaggtgacaatcggattg

SEQ ID NO: 43106 - DNA, 20 bp, Artificial Sequence
  MKO10043106_A_Prr5l
  gRNA
ccggataaaatattgcctgc

SEQ ID NO: 43107 - DNA, 20 bp, Artificial Sequence
  MKO10043107_A_Prr5l
  gRNA
atgcactgaacgaaagcatc

SEQ ID NO: 43108 - DNA, 20 bp, Artificial Sequence
  MKO10043108_A_Prr5
  gRNA
agaccgcgatcactccgtta

SEQ ID NO: 43109 - DNA, 20 bp, Artificial Sequence
  MKO10043109_A_Prr5
  gRNA
gacaagattcgcttctacga

SEQ ID NO: 43110 - DNA, 20 bp, Artificial Sequence
  MKO10043110_A_Prr5
  gRNA
gatcgcggtcttccagcgca

SEQ ID NO: 43111 - DNA, 20 bp, Artificial Sequence
  MKO10043111_A_Prr7
  gRNA
gcagcgccgaagtatagccc

SEQ ID NO: 43112 - DNA, 20 bp, Artificial Sequence
  MKO10043112_A_Prr7
  gRNA
agcaccgcctcctcgtagca

SEQ ID NO: 43113 - DNA, 20 bp, Artificial Sequence
  MKO10043113_A_Prr7
  gRNA
ccctggagctatccgcgcca

SEQ ID NO: 43114 - DNA, 20 bp, Artificial Sequence
  MKO10043114_A_Prr9
  gRNA
taaatgtccacaacaagctc

SEQ ID NO: 43115 - DNA, 20 bp, Artificial Sequence
  MKO10043115_A_Prr9
  gRNA
gcagctacttccccttgctc

SEQ ID NO: 43116 - DNA, 20 bp, Artificial Sequence
  MKO10043116_A_Prr9
  gRNA
ggagttcccacagaaggtac

SEQ ID NO: 43117 - DNA, 20 bp, Artificial Sequence
  MKO10043117_A_Prrc1
  gRNA
tacaacctacgacatcacga

SEQ ID NO: 43118 - DNA, 20 bp, Artificial Sequence
  MKO10043118_A_Prrc1
  gRNA
agactccattcccgacacgt

SEQ ID NO: 43119 - DNA, 20 bp, Artificial Sequence
  MKO10043119_A_Prrc1
  gRNA
aatccagctgcatacccgac

SEQ ID NO: 43120 - DNA, 20 bp, Artificial Sequence
  MKO10043120_A_Prrc2a
  gRNA
gagtctgccgaacagtcgtc

SEQ ID NO: 43121 - DNA, 20 bp, Artificial Sequence
  MKO10043121_A_Prrc2a
  gRNA
ctcgagagaatcgcgacagt

SEQ ID NO: 43122 - DNA, 20 bp, Artificial Sequence
  MKO10043122_A_Prrc2a
  gRNA
gggtggcatgcgccgggcaa

SEQ ID NO: 43123 - DNA, 20 bp, Artificial Sequence
  MKO10043123_A_Prrc2b
  gRNA
accgacacagtctatcagtc

SEQ ID NO: 43124 - DNA, 20 bp, Artificial Sequence
  MKO10043124_A_Prrc2b
  gRNA
ttaccaccttcgtgtccgac

SEQ ID NO: 43125 - DNA, 20 bp, Artificial Sequence
  MKO10043125_A_Prrc2b
  gRNA
aagccagtcggacacgaagg

SEQ ID NO: 43126 - DNA, 20 bp, Artificial Sequence
  MKO10043126_A_Prrc2c
  gRNA
cttacttggagggcgtaaac

SEQ ID NO: 43127 - DNA, 20 bp, Artificial Sequence
  MKO10043127_A_Prrc2c
  gRNA
gctgaaattgactattcact

SEQ ID NO: 43128 - DNA, 20 bp, Artificial Sequence
  MKO10043128_A_Prrc2c
  gRNA
ttatagccgtgctttcatcc

SEQ ID NO: 43129 - DNA, 20 bp, Artificial Sequence
  MKO10043129_A_Prrg1
  gRNA
gtgggggatcacagttggaa

SEQ ID NO: 43130 - DNA, 20 bp, Artificial Sequence
  MKO10043130_A_Prrg1
  gRNA
tgttgttgggcgttcagatt

SEQ ID NO: 43131 - DNA, 20 bp, Artificial Sequence
  MKO10043131_A_Prrg1
  gRNA
tatttcttcaaaaagcccat

SEQ ID NO: 43132 - DNA, 20 bp, Artificial Sequence
  MKO10043132_A_Prrg2
  gRNA
tctaaccctaggagcgcttc

SEQ ID NO: 43133 - DNA, 20 bp, Artificial Sequence
  MKO10043133_A_Prrg2
  gRNA
tagcacgaggaaaacgcctg

SEQ ID NO: 43134 - DNA, 20 bp, Artificial Sequence
  MKO10043134_A_Prrg2
  gRNA
cggaggtgcgtcgtgcaccc

SEQ ID NO: 43135 - DNA, 20 bp, Artificial Sequence
  MKO10043135_A_Prrg3
  gRNA
cgatacctagccagtcgtgc

SEQ ID NO: 43136 - DNA, 20 bp, Artificial Sequence
  MKO10043136_A_Prrg3
  gRNA
gcacaacctcccccgtgtca

SEQ ID NO: 43137 - DNA, 20 bp, Artificial Sequence
  MKO10043137_A_Prrg3
  gRNA
tggcacgaggaaaccgtttc

SEQ ID NO: 43138 - DNA, 20 bp, Artificial Sequence
  MKO10043138_A_Prrg4
  gRNA
accgccgcctcctgaacaat

SEQ ID NO: 43139 - DNA, 20 bp, Artificial Sequence
  MKO10043139_A_Prrg4
  gRNA
ctagatcaaacctattgttc

SEQ ID NO: 43140 - DNA, 20 bp, Artificial Sequence
  MKO10043140_A_Prrg4
  gRNA
aggactaccttcctatgaac

SEQ ID NO: 43141 - DNA, 20 bp, Artificial Sequence
  MKO10043141_A_Prrt1
  gRNA
cgtcttccgccacgctaccg

SEQ ID NO: 43142 - DNA, 20 bp, Artificial Sequence
  MKO10043142_A_Prrt1
  gRNA
agatcgcttcacgcgaagcc

SEQ ID NO: 43143 - DNA, 20 bp, Artificial Sequence
  MKO10043143_A_Prrt1
  gRNA
ggtagcgtggcggaagacga

SEQ ID NO: 43144 - DNA, 20 bp, Artificial Sequence
  MKO10043144_A_Prrt2
  gRNA
accgcctaagttgatgacgc

SEQ ID NO: 43145 - DNA, 20 bp, Artificial Sequence
  MKO10043145_A_Prrt2
  gRNA
tggctcttggcgtgcctcgc

SEQ ID NO: 43146 - DNA, 20 bp, Artificial Sequence
  MKO10043146_A_Prrt2
  gRNA
caccatgacggcataagcga

SEQ ID NO: 43147 - DNA, 20 bp, Artificial Sequence
  MKO10043147_A_Prrt3
  gRNA
cgctggacttgcaacgcgac

SEQ ID NO: 43148 - DNA, 20 bp, Artificial Sequence
  MKO10043148_A_Prrt3
  gRNA
ccagcaggcgtcgacggcac

SEQ ID NO: 43149 - DNA, 20 bp, Artificial Sequence
  MKO10043149_A_Prrt3
  gRNA
atctccccacaacgtgtgag

SEQ ID NO: 43150 - DNA, 20 bp, Artificial Sequence
  MKO10043150_A_Prrt4
  gRNA
atcggctgccgactctcgtc

SEQ ID NO: 43151 - DNA, 20 bp, Artificial Sequence
  MKO10043151_A_Prrt4
  gRNA
cacgcgcgatcgcgctaccc

SEQ ID NO: 43152 - DNA, 20 bp, Artificial Sequence
  MKO10043152_A_Prrt4
  gRNA
ggtcctgcttgccgtacctg

SEQ ID NO: 43153 - DNA, 20 bp, Artificial Sequence
  MKO10043153_A_Prrx1
  gRNA
ctccagaacgtgcccgtagc

SEQ ID NO: 43154 - DNA, 20 bp, Artificial Sequence
  MKO10043154_A_Prrx1
  gRNA
ttcgagaagatctcgcacgt

SEQ ID NO: 43155 - DNA, 20 bp, Artificial Sequence
  MKO10043155_A_Prrx1
  gRNA
agtcattcacctgtacggag

SEQ ID NO: 43156 - DNA, 20 bp, Artificial Sequence
  MKO10043156_A_Prrx2
  gRNA
gcccgtttcggggcccgccg

SEQ ID NO: 43157 - DNA, 20 bp, Artificial Sequence
  MKO10043157_A_Prrx2
  gRNA
tcgccgtgtcaacctcagtg

SEQ ID NO: 43158 - DNA, 20 bp, Artificial Sequence
  MKO10043158_A_Prrx2
  gRNA
gcgcaatcgccgggtgcggg

SEQ ID NO: 43159 - DNA, 20 bp, Artificial Sequence
  MKO10043159_A_Prrxl1
  gRNA
aacgaccttcactcttcagc

SEQ ID NO: 43160 - DNA, 20 bp, Artificial Sequence
  MKO10043160_A_Prrxl1
  gRNA
aggtgacaccaccgccagtg

SEQ ID NO: 43161 - DNA, 20 bp, Artificial Sequence
  MKO10043161_A_Prrxl1
  gRNA
cctgcaggcactgcgccttt

SEQ ID NO: 43162 - DNA, 20 bp, Artificial Sequence
  MKO10043162_A_Prss12
  gRNA
ttgcccgtcattcgccttgt

SEQ ID NO: 43163 - DNA, 20 bp, Artificial Sequence
  MKO10043163_A_Prss12
  gRNA
acctgctatcctgacagcga

SEQ ID NO: 43164 - DNA, 20 bp, Artificial Sequence
  MKO10043164_A_Prss12
  gRNA
ttggatgaagtacgctgcac

SEQ ID NO: 43165 - DNA, 20 bp, Artificial Sequence
  MKO10043165_A_Prss16
  gRNA
tgcttcggaggctcctacgc

SEQ ID NO: 43166 - DNA, 20 bp, Artificial Sequence
  MKO10043166_A_Prss16
  gRNA
tccgctcgccaggcgctctc

SEQ ID NO: 43167 - DNA, 20 bp, Artificial Sequence
  MKO10043167_A_Prss16
  gRNA
ccccactcacgcatggcggc

SEQ ID NO: 43168 - DNA, 20 bp, Artificial Sequence
  MKO10043168_A_Prss1
  gRNA
ggagcacaatatcaatgtcc

SEQ ID NO: 43169 - DNA, 20 bp, Artificial Sequence
  MKO10043169_A_Prss1
  gRNA
tcaacatgatgtcattgttc

SEQ ID NO: 43170 - DNA, 20 bp, Artificial Sequence
  MKO10043170_A_Prss1
  gRNA
gaagcctcacagtcagcctg

SEQ ID NO: 43171 - DNA, 20 bp, Artificial Sequence
  MKO10043171_A_Prss21
  gRNA
caaccttgctcaaccgccgc

SEQ ID NO: 43172 - DNA, 20 bp, Artificial Sequence
  MKO10043172_A_Prss21
  gRNA
gcaaggttgcgccacataag

SEQ ID NO: 43173 - DNA, 20 bp, Artificial Sequence
  MKO10043173_A_Prss21
  gRNA
cagacttccgcacgaacatc

SEQ ID NO: 43174 - DNA, 20 bp, Artificial Sequence
  MKO10043174_A_Prss22
  gRNA
atcacactcacctcggatgg

SEQ ID NO: 43175 - DNA, 20 bp, Artificial Sequence
  MKO10043175_A_Prss22
  gRNA
cagccgcgcactgctttaag

SEQ ID NO: 43176 - DNA, 20 bp, Artificial Sequence
  MKO10043176_A_Prss22
  gRNA
tcagcagctgaaccggattg

SEQ ID NO: 43177 - DNA, 20 bp, Artificial Sequence
  MKO10043177_A_Prss23
  gRNA
cttcgacgccaaagcgaaat

SEQ ID NO: 43178 - DNA, 20 bp, Artificial Sequence
  MKO10043178_A_Prss23
  gRNA
gaggcgataagccggccatg

SEQ ID NO: 43179 - DNA, 20 bp, Artificial Sequence
  MKO10043179_A_Prss23
  gRNA
tgagtccctacaccgttccg

SEQ ID NO: 43180 - DNA, 20 bp, Artificial Sequence
  MKO10043180_A_Prss27
  gRNA
gcccgactcaaagatgaccg

SEQ ID NO: 43181 - DNA, 20 bp, Artificial Sequence
  MKO10043181_A_Prss27
  gRNA
gcagtctcatcgcaccaaca

SEQ ID NO: 43182 - DNA, 20 bp, Artificial Sequence
  MKO10043182_A_Prss27
  gRNA
catggcctccagtgccgacg

SEQ ID NO: 43183 - DNA, 20 bp, Artificial Sequence
  MKO10043183_A_Prss28
  gRNA
acgccgacccagccgtatac

SEQ ID NO: 43184 - DNA, 20 bp, Artificial Sequence
  MKO10043184_A_Prss28
  gRNA
cctaagaatgtacagttacg

SEQ ID NO: 43185 - DNA, 20 bp, Artificial Sequence
  MKO10043185_A_Prss28
  gRNA
tggggcaaccttctccaacg

SEQ ID NO: 43186 - DNA, 20 bp, Artificial Sequence
  MKO10043186_A_Prss29
  gRNA
gaactcactcacgaatgcag

SEQ ID NO: 43187 - DNA, 20 bp, Artificial Sequence
  MKO10043187_A_Prss29
  gRNA
gcgttctgatgggcatcgtg

SEQ ID NO: 43188 - DNA, 20 bp, Artificial Sequence
  MKO10043188_A_Prss29
  gRNA
tgtacacgtgcatagacccc

SEQ ID NO: 43189 - DNA, 20 bp, Artificial Sequence
  MKO10043189_A_Prss2
  gRNA
caattataattcatggaccc

SEQ ID NO: 43190 - DNA, 20 bp, Artificial Sequence
  MKO10043190_A_Prss2
  gRNA
agcatttagggacacctgat

SEQ ID NO: 43191 - DNA, 20 bp, Artificial Sequence
  MKO10043191_A_Prss2
  gRNA
agagagttctgtcccctatc

SEQ ID NO: 43192 - DNA, 20 bp, Artificial Sequence
  MKO10043192_A_Prss30
  gRNA
actcaactttagtggccgtg

SEQ ID NO: 43193 - DNA, 20 bp, Artificial Sequence
  MKO10043193_A_Prss30
  gRNA
gctccctcatccacgaggtg

SEQ ID NO: 43194 - DNA, 20 bp, Artificial Sequence
  MKO10043194_A_Prss30
  gRNA
ctgcacagagcatgtccgac

SEQ ID NO: 43195 - DNA, 20 bp, Artificial Sequence
  MKO10043195_A_Prss32
  gRNA
acatcaggccgcatcgtgtc

SEQ ID NO: 43196 - DNA, 20 bp, Artificial Sequence
  MKO10043196_A_Prss32
  gRNA
gactggctccgtgccgggaa

SEQ ID NO: 43197 - DNA, 20 bp, Artificial Sequence
  MKO10043197_A_Prss32
  gRNA
catcttgtcctgacacgatg

SEQ ID NO: 43198 - DNA, 20 bp, Artificial Sequence
  MKO10043198_A_Prss33
  gRNA
tagcactatgcgttcaccct

SEQ ID NO: 43199 - DNA, 20 bp, Artificial Sequence
  MKO10043199_A_Prss33
  gRNA
caacgatccggctggacatg

SEQ ID NO: 43200 - DNA, 20 bp, Artificial Sequence
  MKO10043200_A_Prss33
  gRNA
ctgtgaccgcctctaccacg

SEQ ID NO: 43201 - DNA, 20 bp, Artificial Sequence
  MKO10043201_A_Prss34
  gRNA
gggtgatgagctacgtgtcc

SEQ ID NO: 43202 - DNA, 20 bp, Artificial Sequence
  MKO10043202_A_Prss34
  gRNA
ggaccgccacttccctcagg

SEQ ID NO: 43203 - DNA, 20 bp, Artificial Sequence
  MKO10043203_A_Prss34
  gRNA
cacgttcctagaacctttga

SEQ ID NO: 43204 - DNA, 20 bp, Artificial Sequence
  MKO10043204_A_Prss35
  gRNA
caagatcgtcgcggtctact

SEQ ID NO: 43205 - DNA, 20 bp, Artificial Sequence
  MKO10043205_A_Prss35
  gRNA
aacgagggtaccgctgcagc

SEQ ID NO: 43206 - DNA, 20 bp, Artificial Sequence
  MKO10043206_A_Prss35
  gRNA
tcgggtgccattctcgaaga

SEQ ID NO: 43207 - DNA, 20 bp, Artificial Sequence
  MKO10043207_A_Prss36
  gRNA
gcctcgcacctcttcgctca

SEQ ID NO: 43208 - DNA, 20 bp, Artificial Sequence
  MKO10043208_A_Prss36
  gRNA
cagaactgacaattcgtccg

SEQ ID NO: 43209 - DNA, 20 bp, Artificial Sequence
  MKO10043209_A_Prss36
  gRNA
cgtccgagccccccacaatg

SEQ ID NO: 43210 - DNA, 20 bp, Artificial Sequence
  MKO10043210_A_Prss37
  gRNA
ccatccagattatccgctac

SEQ ID NO: 43211 - DNA, 20 bp, Artificial Sequence
  MKO10043211_A_Prss37
  gRNA
ccatagccaccactaatgtc

SEQ ID NO: 43212 - DNA, 20 bp, Artificial Sequence
  MKO10043212_A_Prss37
  gRNA
tccaggttctgccgtaagtc

SEQ ID NO: 43213 - DNA, 20 bp, Artificial Sequence
  MKO10043213_A_Prss38
  gRNA
cgaaaccgggaacgagctat

SEQ ID NO: 43214 - DNA, 20 bp, Artificial Sequence
  MKO10043214_A_Prss38
  gRNA
tggcgagatcattccccatc

SEQ ID NO: 43215 - DNA, 20 bp, Artificial Sequence
  MKO10043215_A_Prss38
  gRNA
gtggagagtttgctcgtgat

SEQ ID NO: 43216 - DNA, 20 bp, Artificial Sequence
  MKO10043216_A_Prss39
  gRNA
ctatagcaagctcagccgtc

SEQ ID NO: 43217 - DNA, 20 bp, Artificial Sequence
  MKO10043217_A_Prss39
  gRNA
gaaaccttcgtggtgccgtc

SEQ ID NO: 43218 - DNA, 20 bp, Artificial Sequence
  MKO10043218_A_Prss39
  gRNA
tcctgagccaaatcgattgc

SEQ ID NO: 43219 - DNA, 20 bp, Artificial Sequence
  MKO10043219_A_Prss3
  gRNA
ggtctgcaatagagaactcc

SEQ ID NO: 43220 - DNA, 20 bp, Artificial Sequence
  MKO10043220_A_Prss3
  gRNA
ggggacagaattctcttggc

SEQ ID NO: 43221 - DNA, 20 bp, Artificial Sequence
  MKO10043221_A_Prss3
  gRNA
agttctctattgcagaccac

SEQ ID NO: 43222 - DNA, 20 bp, Artificial Sequence
  MKO10043222_A_Prss40
  gRNA
atctatggcggtcagattgc

SEQ ID NO: 43223 - DNA, 20 bp, Artificial Sequence
  MKO10043223_A_Prss40
  gRNA
cctgccatataagcgcagac

SEQ ID NO: 43224 - DNA, 20 bp, Artificial Sequence
  MKO10043224_A_Prss40
  gRNA
ccctgagaatgaaaatcccg

SEQ ID NO: 43225 - DNA, 20 bp, Artificial Sequence
  MKO10043225_A_Prss41
  gRNA
agtgtcattccggcggccac

SEQ ID NO: 43226 - DNA, 20 bp, Artificial Sequence
  MKO10043226_A_Prss41
  gRNA
tgacactcggtcccggatag

SEQ ID NO: 43227 - DNA, 20 bp, Artificial Sequence
  MKO10043227_A_Prss41
  gRNA
ttacatccaagccgtcttac

SEQ ID NO: 43228 - DNA, 20 bp, Artificial Sequence
  MKO10043228_A_Prss42
  gRNA
cgcccaccttgacgttgtac

SEQ ID NO: 43229 - DNA, 20 bp, Artificial Sequence
  MKO10043229_A_Prss42
  gRNA
ccgaatccagtacaacgtca

SEQ ID NO: 43230 - DNA, 20 bp, Artificial Sequence
  MKO10043230_A_Prss42
  gRNA
ctgccgcccattgtatttac

SEQ ID NO: 43231 - DNA, 20 bp, Artificial Sequence
  MKO10043231_A_Prss43
  gRNA
gaatgcgttgctgaacctcc

SEQ ID NO: 43232 - DNA, 20 bp, Artificial Sequence
  MKO10043232_A_Prss43
  gRNA
ccgcagtcaacacccatcgg

SEQ ID NO: 43233 - DNA, 20 bp, Artificial Sequence
  MKO10043233_A_Prss43
  gRNA
ctgaagggtgcgaaatactc

SEQ ID NO: 43234 - DNA, 20 bp, Artificial Sequence
  MKO10043234_A_Prss44
  gRNA
taggtcgtcgagaatactgc

SEQ ID NO: 43235 - DNA, 20 bp, Artificial Sequence
  MKO10043235_A_Prss44
  gRNA
cctcgtcttaagcgtgtgtc

SEQ ID NO: 43236 - DNA, 20 bp, Artificial Sequence
  MKO10043236_A_Prss44
  gRNA
tacaacctgggacgctatgc

SEQ ID NO: 43237 - DNA, 20 bp, Artificial Sequence
  MKO10043237_A_Prss45
  gRNA
gagccctcattgatcgaagc

SEQ ID NO: 43238 - DNA, 20 bp, Artificial Sequence
  MKO10043238_A_Prss45
  gRNA
ccacccagcttcgatcaatg

SEQ ID NO: 43239 - DNA, 20 bp, Artificial Sequence
  MKO10043239_A_Prss45
  gRNA
aatgagaactacaccgaacc

SEQ ID NO: 43240 - DNA, 20 bp, Artificial Sequence
  MKO10043240_A_Prss46
  gRNA
ccatgtgctgggtcgtcggg

SEQ ID NO: 43241 - DNA, 20 bp, Artificial Sequence
  MKO10043241_A_Prss46
  gRNA
ccacccgacgacccagcaca

SEQ ID NO: 43242 - DNA, 20 bp, Artificial Sequence
  MKO10043242_A_Prss46
  gRNA
tccagctcaccacgcccatc

SEQ ID NO: 43243 - DNA, 20 bp, Artificial Sequence
  MKO10043243_A_Prss48
  gRNA
gcttgagtactctctatcga

SEQ ID NO: 43244 - DNA, 20 bp, Artificial Sequence
  MKO10043244_A_Prss48
  gRNA
tttgtcggggatggcgattc

SEQ ID NO: 43245 - DNA, 20 bp, Artificial Sequence
  MKO10043245_A_Prss48
  gRNA
tgtggacgacctgtacacac

SEQ ID NO: 43246 - DNA, 20 bp, Artificial Sequence
  MKO10043246_A_Prss50
  gRNA
catggtttatgatgactcga

SEQ ID NO: 43247 - DNA, 20 bp, Artificial Sequence
  MKO10043247_A_Prss50
  gRNA
gttggccgggcccatgacat

SEQ ID NO: 43248 - DNA, 20 bp, Artificial Sequence
  MKO10043248_A_Prss50
  gRNA
ggagataactggcgagcccc

SEQ ID NO: 43249 - DNA, 20 bp, Artificial Sequence
  MKO10043249_A_Prss51
  gRNA
acgagcccttgccctctcaa

SEQ ID NO: 43250 - DNA, 20 bp, Artificial Sequence
  MKO10043250_A_Prss51
  gRNA
gggcaccaacggcaagtgcc

SEQ ID NO: 43251 - DNA, 20 bp, Artificial Sequence
  MKO10043251_A_Prss51
  gRNA
agaactcctgggaccggtgc

SEQ ID NO: 43252 - DNA, 20 bp, Artificial Sequence
  MKO10043252_A_Prss52
  gRNA
gcaaagctatgtcgttgtcc

SEQ ID NO: 43253 - DNA, 20 bp, Artificial Sequence
  MKO10043253_A_Prss52
  gRNA
catgtggggattatgaatca

SEQ ID NO: 43254 - DNA, 20 bp, Artificial Sequence
  MKO10043254_A_Prss52
  gRNA
caaacctgcttctgctatcg

SEQ ID NO: 43255 - DNA, 20 bp, Artificial Sequence
  MKO10043255_A_Prss53
  gRNA
gacggaggcgcagattccgt

SEQ ID NO: 43256 - DNA, 20 bp, Artificial Sequence
  MKO10043256_A_Prss53
  gRNA
tctacagcatgcgggcagcg

SEQ ID NO: 43257 - DNA, 20 bp, Artificial Sequence
  MKO10043257_A_Prss53
  gRNA
tacaccctgtcgcctcacac

SEQ ID NO: 43258 - DNA, 20 bp, Artificial Sequence
  MKO10043258_A_Prss54
  gRNA
cgccatgcatttcaacgacc

SEQ ID NO: 43259 - DNA, 20 bp, Artificial Sequence
  MKO10043259_A_Prss54
  gRNA
accgtagtagtcgtagtaca

SEQ ID NO: 43260 - DNA, 20 bp, Artificial Sequence
  MKO10043260_A_Prss54
  gRNA
ctcctttaacttgtccgcga

SEQ ID NO: 43261 - DNA, 20 bp, Artificial Sequence
  MKO10043261_A_Prss55
  gRNA
cgtcagctcattgaacgtca

SEQ ID NO: 43262 - DNA, 20 bp, Artificial Sequence
  MKO10043262_A_Prss55
  gRNA
ctcccactctatgatacgca

SEQ ID NO: 43263 - DNA, 20 bp, Artificial Sequence
  MKO10043263_A_Prss55
  gRNA
tgcccatgcgtatcatagag

SEQ ID NO: 43264 - DNA, 20 bp, Artificial Sequence
  MKO10043264_A_Prss56
  gRNA
ctccatcaacacgcgcttta

SEQ ID NO: 43265 - DNA, 20 bp, Artificial Sequence
  MKO10043265_A_Prss56
  gRNA
gccaacacgacccgggctca

SEQ ID NO: 43266 - DNA, 20 bp, Artificial Sequence
  MKO10043266_A_Prss56
  gRNA
ccgtgctgccaccgactatg

SEQ ID NO: 43267 - DNA, 20 bp, Artificial Sequence
  MKO10043267_A_Prss57
  gRNA
ggaagtcgaggtgcgcatac

SEQ ID NO: 43268 - DNA, 20 bp, Artificial Sequence
  MKO10043268_A_Prss57
  gRNA
cgcgttgccatgtatccggc

SEQ ID NO: 43269 - DNA, 20 bp, Artificial Sequence
  MKO10043269_A_Prss57
  gRNA
ccacccaatgggtatgaatc

SEQ ID NO: 43270 - DNA, 20 bp, Artificial Sequence
  MKO10043270_A_Prss58
  gRNA
agtaccccgttgcagactgc

SEQ ID NO: 43271 - DNA, 20 bp, Artificial Sequence
  MKO10043271_A_Prss58
  gRNA
acagaaaacatgatctgcgt

SEQ ID NO: 43272 - DNA, 20 bp, Artificial Sequence
  MKO10043272_A_Prss58
  gRNA
actgacgtcacatagattgt

SEQ ID NO: 43273 - DNA, 20 bp, Artificial Sequence
  MKO10043273_A_Prss8
  gRNA
cgagcgacccgccacaaaca

SEQ ID NO: 43274 - DNA, 20 bp, Artificial Sequence
  MKO10043274_A_Prss8
  gRNA
ggtcgctcgtgtcaaataaa

SEQ ID NO: 43275 - DNA, 20 bp, Artificial Sequence
  MKO10043275_A_Prss8
  gRNA
gcaccgcattaatgttgtac

SEQ ID NO: 43276 - DNA, 20 bp, Artificial Sequence
  MKO10043276_A_Prtg
  gRNA
cgccgcctgcagtcataaca

SEQ ID NO: 43277 - DNA, 20 bp, Artificial Sequence
  MKO10043277_A_Prtg
  gRNA
cgacttaccaagacggctcc

SEQ ID NO: 43278 - DNA, 20 bp, Artificial Sequence
  MKO10043278_A_Prtg
  gRNA
gcctggcaatctaaaacgac

SEQ ID NO: 43279 - DNA, 20 bp, Artificial Sequence
  MKO10043279_A_Prtn3
  gRNA
gcggctgtcagcacgaatct

SEQ ID NO: 43280 - DNA, 20 bp, Artificial Sequence
  MKO10043280_A_Prtn3
  gRNA
ccagaacaattacaaccccg

SEQ ID NO: 43281 - DNA, 20 bp, Artificial Sequence
  MKO10043281_A_Prtn3
  gRNA
acccacgccccgtgtgctgc

SEQ ID NO: 43282 - DNA, 20 bp, Artificial Sequence
  MKO10043282_A_Prune2
  gRNA
gaaactgtcgataacgctcg

SEQ ID NO: 43283 - DNA, 20 bp, Artificial Sequence
  MKO10043283_A_Prune2
  gRNA
ccatactcatccacgtgaac

SEQ ID NO: 43284 - DNA, 20 bp, Artificial Sequence
  MKO10043284_A_Prune2
  gRNA
gcaggatcgaagtaaacaat

SEQ ID NO: 43285 - DNA, 20 bp, Artificial Sequence
  MKO10043285_A_Prune
  gRNA
caggcctctacatgtcgtgc

SEQ ID NO: 43286 - DNA, 20 bp, Artificial Sequence
  MKO10043286_A_Prune
  gRNA
tttcccagcacgacatgtag

SEQ ID NO: 43287 - DNA, 20 bp, Artificial Sequence
  MKO10043287_A_Prune
  gRNA
catacctgagacgtcaaact

SEQ ID NO: 43288 - DNA, 20 bp, Artificial Sequence
  MKO10043288_A_Prx
  gRNA
cgtgccggatgtacgactcc

SEQ ID NO: 43289 - DNA, 20 bp, Artificial Sequence
  MKO10043289_A_Prx
  gRNA
aaagagaactcgacgtcaac

SEQ ID NO: 43290 - DNA, 20 bp, Artificial Sequence
  MKO10043290_A_Prx
  gRNA
gtagcaggcggcggcaaaga

SEQ ID NO: 43291 - DNA, 20 bp, Artificial Sequence
  MKO10043291_A_Psapl1
  gRNA
tcaagcacacgtcgcacgtc

SEQ ID NO: 43292 - DNA, 20 bp, Artificial Sequence
  MKO10043292_A_Psapl1
  gRNA
ctgcaaagtgtcgggccgtg

SEQ ID NO: 43293 - DNA, 20 bp, Artificial Sequence
  MKO10043293_A_Psapl1
  gRNA
cggttgcactgcatcacata

SEQ ID NO: 43294 - DNA, 20 bp, Artificial Sequence
  MKO10043294_A_Psap
  gRNA
gtcaaccacctccttgcacg

SEQ ID NO: 43295 - DNA, 20 bp, Artificial Sequence
  MKO10043295_A_Psap
  gRNA
caagacccgaagacatgctc

SEQ ID NO: 43296 - DNA, 20 bp, Artificial Sequence
  MKO10043296_A_Psap
  gRNA
tctcgcccttaatcatgtcc

SEQ ID NO: 43297 - DNA, 20 bp, Artificial Sequence
  MKO10043297_A_Psat1
  gRNA
tggaaggagtgctgactacg

SEQ ID NO: 43298 - DNA, 20 bp, Artificial Sequence
  MKO10043298_A_Psat1
  gRNA
gttcaccgttccaaacttct

SEQ ID NO: 43299 - DNA, 20 bp, Artificial Sequence
  MKO10043299_A_Psat1
  gRNA
tgtagtctagtagctgcttc

SEQ ID NO: 43300 - DNA, 20 bp, Artificial Sequence
  MKO10043300_A_Psca
  gRNA
gataactgtcacgagtccaa

SEQ ID NO: 43301 - DNA, 20 bp, Artificial Sequence
  MKO10043301_A_Psca
  gRNA
gggccccgttgacattgcac

SEQ ID NO: 43302 - DNA, 20 bp, Artificial Sequence
  MKO10043302_A_Psca
  gRNA
gcgatgtaaagcaactgtgc

SEQ ID NO: 43303 - DNA, 20 bp, Artificial Sequence
  MKO10043303_A_Psd2
  gRNA
gggtcagcgaagccgctcgc

SEQ ID NO: 43304 - DNA, 20 bp, Artificial Sequence
  MKO10043304_A_Psd2
  gRNA
tggcctgtcggactcggact

SEQ ID NO: 43305 - DNA, 20 bp, Artificial Sequence
  MKO10043305_A_Psd2
  gRNA
gctcgagatagccccgaggc

SEQ ID NO: 43306 - DNA, 20 bp, Artificial Sequence
  MKO10043306_A_Psd3
  gRNA
ccaatacgactgatagtctt

SEQ ID NO: 43307 - DNA, 20 bp, Artificial Sequence
  MKO10043307_A_Psd3
  gRNA
ccaaagactatcagtcgtat

SEQ ID NO: 43308 - DNA, 20 bp, Artificial Sequence
  MKO10043308_A_Psd3
  gRNA
gcaccacgctctggcgtcca

SEQ ID NO: 43309 - DNA, 20 bp, Artificial Sequence
  MKO10043309_A_Psd4
  gRNA
aagtcccttacttcttgcgt

SEQ ID NO: 43310 - DNA, 20 bp, Artificial Sequence
  MKO10043310_A_Psd4
  gRNA
ctgcgcctctatcaactgaa

SEQ ID NO: 43311 - DNA, 20 bp, Artificial Sequence
  MKO10043311_A_Psd4
  gRNA
cctgactcaacccatacttg

SEQ ID NO: 43312 - DNA, 20 bp, Artificial Sequence
  MKO10043312_A_Psd
  gRNA
tataccgactcgatggcttc

SEQ ID NO: 43313 - DNA, 20 bp, Artificial Sequence
  MKO10043313_A_Psd
  gRNA
ggccgatgtggcacggcatc

SEQ ID NO: 43314 - DNA, 20 bp, Artificial Sequence
  MKO10043314_A_Psd
  gRNA
ccgagagactgacatcgatg

SEQ ID NO: 43315 - DNA, 20 bp, Artificial Sequence
  MKO10043315_A_Psen1
  gRNA
ttacagtagcactcctaatc

SEQ ID NO: 43316 - DNA, 20 bp, Artificial Sequence
  MKO10043316_A_Psen1
  gRNA
ccacgacgacgaccatgcag

SEQ ID NO: 43317 - DNA, 20 bp, Artificial Sequence
  MKO10043317_A_Psen1
  gRNA
tgctactgtaacgtagtcca

SEQ ID NO: 43318 - DNA, 20 bp, Artificial Sequence
  MKO10043318_A_Psen2
  gRNA
acgatcatacacagcgtgac

SEQ ID NO: 43319 - DNA, 20 bp, Artificial Sequence
  MKO10043319_A_Psen2
  gRNA
ccggaccgctacgcatgcag

SEQ ID NO: 43320 - DNA, 20 bp, Artificial Sequence
  MKO10043320_A_Psen2
  gRNA
acacgccctcggtgggccag

SEQ ID NO: 43321 - DNA, 20 bp, Artificial Sequence
  MKO10043321_A_Psenen
  gRNA
agatgtttggcgctcagctg

SEQ ID NO: 43322 - DNA, 20 bp, Artificial Sequence
  MKO10043322_A_Psenen
  gRNA
agaactcacagcctttgatt

SEQ ID NO: 43323 - DNA, 20 bp, Artificial Sequence
  MKO10043323_A_Psenen
  gRNA
ccttaccaagatagtacttc

SEQ ID NO: 43324 - DNA, 20 bp, Artificial Sequence
  MKO10043324_A_Psg16
  gRNA
gatccacagggacccgttgc

SEQ ID NO: 43325 - DNA, 20 bp, Artificial Sequence
  MKO10043325_A_Psg16
  gRNA
ataagcttcgagggctttcc

SEQ ID NO: 43326 - DNA, 20 bp, Artificial Sequence
  MKO10043326_A_Psg16
  gRNA
aactacgtataaatcctgtc

SEQ ID NO: 43327 - DNA, 20 bp, Artificial Sequence
  MKO10043327_A_Psg17
  gRNA
cttcgaaccgtaagtcaacg

SEQ ID NO: 43328 - DNA, 20 bp, Artificial Sequence
  MKO10043328_A_Psg17
  gRNA
agacagcacagtacgagtac

SEQ ID NO: 43329 - DNA, 20 bp, Artificial Sequence
  MKO10043329_A_Psg17
  gRNA
ccgtgcatagcccatgatga

SEQ ID NO: 43330 - DNA, 20 bp, Artificial Sequence
  MKO10043330_A_Psg18
  gRNA
attcaatagtcggagatata

SEQ ID NO: 43331 - DNA, 20 bp, Artificial Sequence
  MKO10043331_A_Psg18
  gRNA
gctgtactactatagtgtaa

SEQ ID NO: 43332 - DNA, 20 bp, Artificial Sequence
  MKO10043332_A_Psg18
  gRNA
cctccctcagcagcgtgccg

SEQ ID NO: 43333 - DNA, 20 bp, Artificial Sequence
  MKO10043333_A_Psg19
  gRNA
caaaggcgtctatagcactc

SEQ ID NO: 43334 - DNA, 20 bp, Artificial Sequence
  MKO10043334_A_Psg19
  gRNA
gtacggattcgatggtgact

SEQ ID NO: 43335 - DNA, 20 bp, Artificial Sequence
  MKO10043335_A_Psg19
  gRNA
cgccaagaattcaattgaaa

SEQ ID NO: 43336 - DNA, 20 bp, Artificial Sequence
  MKO10043336_A_Psg20
  gRNA
gcctggatcgcttaaattct

SEQ ID NO: 43337 - DNA, 20 bp, Artificial Sequence
  MKO10043337_A_Psg20
  gRNA
cggtgaatggatagtgacct

SEQ ID NO: 43338 - DNA, 20 bp, Artificial Sequence
  MKO10043338_A_Psg20
  gRNA
acgagttgacaatctgccag

SEQ ID NO: 43339 - DNA, 20 bp, Artificial Sequence
  MKO10043339_A_Psg21
  gRNA
tctccttcaactacgtgttt

SEQ ID NO: 43340 - DNA, 20 bp, Artificial Sequence
  MKO10043340_A_Psg21
  gRNA
tcaccaaaacacgtagttga

SEQ ID NO: 43341 - DNA, 20 bp, Artificial Sequence
  MKO10043341_A_Psg21
  gRNA
gcgtcctccttcagcaactc

SEQ ID NO: 43342 - DNA, 20 bp, Artificial Sequence
  MKO10043342_A_Psg22
  gRNA
ataatcttcaatcgcttctc

SEQ ID NO: 43343 - DNA, 20 bp, Artificial Sequence
  MKO10043343_A_Psg22
  gRNA
agaagcgattgaagattatc

SEQ ID NO: 43344 - DNA, 20 bp, Artificial Sequence
  MKO10043344_A_Psg22
  gRNA
tgttcacattgacttgcaca

SEQ ID NO: 43345 - DNA, 20 bp, Artificial Sequence
  MKO10043345_A_Psg23
  gRNA
tctccttcaactacgtgttg

SEQ ID NO: 43346 - DNA, 20 bp, Artificial Sequence
  MKO10043346_A_Psg23
  gRNA
gtttccgagactctcatgac

SEQ ID NO: 43347 - DNA, 20 bp, Artificial Sequence
  MKO10043347_A_Psg23
  gRNA
tgggagactggtcttagagt

SEQ ID NO: 43348 - DNA, 20 bp, Artificial Sequence
  MKO10043348_A_Psg25
  gRNA
cccccttcgacagcataccg

SEQ ID NO: 43349 - DNA, 20 bp, Artificial Sequence
  MKO10043349_A_Psg25
  gRNA
ccattctttaccactccaag

SEQ ID NO: 43350 - DNA, 20 bp, Artificial Sequence
  MKO10043350_A_Psg25
  gRNA
ctaccactgtgagcatgacc

SEQ ID NO: 43351 - DNA, 20 bp, Artificial Sequence
  MKO10043351_A_Psg26
  gRNA
gtgggacctacaagtgtagt

SEQ ID NO: 43352 - DNA, 20 bp, Artificial Sequence
  MKO10043352_A_Psg26
  gRNA
ttcgctgtactatagtgtaa

SEQ ID NO: 43353 - DNA, 20 bp, Artificial Sequence
  MKO10043353_A_Psg26
  gRNA
gaatctggtccagcccacag

SEQ ID NO: 43354 - DNA, 20 bp, Artificial Sequence
  MKO10043354_A_Psg27
  gRNA
gacgttgatttgcacgtgca

SEQ ID NO: 43355 - DNA, 20 bp, Artificial Sequence
  MKO10043355_A_Psg27
  gRNA
tgcaattgcactacatttac

SEQ ID NO: 43356 - DNA, 20 bp, Artificial Sequence
  MKO10043356_A_Psg27
  gRNA
aggggtgattatgactaaca

SEQ ID NO: 43357 - DNA, 20 bp, Artificial Sequence
  MKO10043357_A_Psg28
  gRNA
gtactatagtttaacagcga

SEQ ID NO: 43358 - DNA, 20 bp, Artificial Sequence
  MKO10043358_A_Psg28
  gRNA
attcaatagtgggaccttca

SEQ ID NO: 43359 - DNA, 20 bp, Artificial Sequence
  MKO10043359_A_Psg28
  gRNA
caggtctataatctgccaga

SEQ ID NO: 43360 - DNA, 20 bp, Artificial Sequence
  MKO10043360_A_Psg29
  gRNA
tccccttcagcaacatatcg

SEQ ID NO: 43361 - DNA, 20 bp, Artificial Sequence
  MKO10043361_A_Psg29
  gRNA
tgtgtggtcgtcaaccgaaa

SEQ ID NO: 43362 - DNA, 20 bp, Artificial Sequence
  MKO10043362_A_Psg29
  gRNA
ggaatgattcaatacggggc

SEQ ID NO: 43363 - DNA, 20 bp, Artificial Sequence
  MKO10043363_A_Psip1
  gRNA
ttcaacatcagacgatgcat

SEQ ID NO: 43364 - DNA, 20 bp, Artificial Sequence
  MKO10043364_A_Psip1
  gRNA
taaccactccaaaagctgcc

SEQ ID NO: 43365 - DNA, 20 bp, Artificial Sequence
  MKO10043365_A_Psip1
  gRNA
aaaagagactaacgtttcaa

SEQ ID NO: 43366 - DNA, 20 bp, Artificial Sequence
  MKO10043366_A_Pskh1
  gRNA
gcagttcgcgctcccgaaca

SEQ ID NO: 43367 - DNA, 20 bp, Artificial Sequence
  MKO10043367_A_Pskh1
  gRNA
gtactcaggtgtgccgcacg

SEQ ID NO: 43368 - DNA, 20 bp, Artificial Sequence
  MKO10043368_A_Pskh1
  gRNA
ctggcctagtgtatctaatc

SEQ ID NO: 43369 - DNA, 20 bp, Artificial Sequence
  MKO10043369_A_Psma1
  gRNA
atcaaaaacgcacgcagtgc

SEQ ID NO: 43370 - DNA, 20 bp, Artificial Sequence
  MKO10043370_A_Psma1
  gRNA
cagtgacatcattgtcatac

SEQ ID NO: 43371 - DNA, 20 bp, Artificial Sequence
  MKO10043371_A_Psma1
  gRNA
ctgctgatgccagactgtta

SEQ ID NO: 43372 - DNA, 20 bp, Artificial Sequence
  MKO10043372_A_Psma2
  gRNA
gtggcatgggccccgattac

SEQ ID NO: 43373 - DNA, 20 bp, Artificial Sequence
  MKO10043373_A_Psma2
  gRNA
tatagtggtgttcgtccatt

SEQ ID NO: 43374 - DNA, 20 bp, Artificial Sequence
  MKO10043374_A_Psma2
  gRNA
gtacaccaaaccgatgtgct

SEQ ID NO: 43375 - DNA, 20 bp, Artificial Sequence
  MKO10043375_A_Psma3
  gRNA
tcttgtttcagtacagctat

SEQ ID NO: 43376 - DNA, 20 bp, Artificial Sequence
  MKO10043376_A_Psma3
  gRNA
atttcatacctgcagccaaa

SEQ ID NO: 43377 - DNA, 20 bp, Artificial Sequence
  MKO10043377_A_Psma3
  gRNA
ccaggcagttgcaggtttgc

SEQ ID NO: 43378 - DNA, 20 bp, Artificial Sequence
  MKO10043378_A_Psma4
  gRNA
acgttctgactaacgagcta

SEQ ID NO: 43379 - DNA, 20 bp, Artificial Sequence
  MKO10043379_A_Psma4
  gRNA
cttccatggcatactccact

SEQ ID NO: 43380 - DNA, 20 bp, Artificial Sequence
  MKO10043380_A_Psma4
  gRNA
taggtacttattacagtatc

SEQ ID NO: 43381 - DNA, 20 bp, Artificial Sequence
  MKO10043381_A_Psma5
  gRNA
ctataccttgatagcctcaa

SEQ ID NO: 43382 - DNA, 20 bp, Artificial Sequence
  MKO10043382_A_Psma5
  gRNA
agatgcagatccaggtgcta

SEQ ID NO: 43383 - DNA, 20 bp, Artificial Sequence
  MKO10043383_A_Psma5
  gRNA
attgcaggttgtgccatgag

SEQ ID NO: 43384 - DNA, 20 bp, Artificial Sequence
  MKO10043384_A_Psma6
  gRNA
gcatacttacaacaaccgag

SEQ ID NO: 43385 - DNA, 20 bp, Artificial Sequence
  MKO10043385_A_Psma6
  gRNA
ttgtttaactcctgccgccg

SEQ ID NO: 43386 - DNA, 20 bp, Artificial Sequence
  MKO10043386_A_Psma6
  gRNA
caacagatgtaagtccaccc

SEQ ID NO: 43387 - DNA, 20 bp, Artificial Sequence
  MKO10043387_A_Psma7
  gRNA
agtacgaaaaatctgcgcct

SEQ ID NO: 43388 - DNA, 20 bp, Artificial Sequence
  MKO10043388_A_Psma7
  gRNA
catacagacgttatcgtcca

SEQ ID NO: 43389 - DNA, 20 bp, Artificial Sequence
  MKO10043389_A_Psma7
  gRNA
caagtcagtgcgtgaatttc

SEQ ID NO: 43390 - DNA, 20 bp, Artificial Sequence
  MKO10043390_A_Psma8
  gRNA
cttcatagcgacgctaaagc

SEQ ID NO: 43391 - DNA, 20 bp, Artificial Sequence
  MKO10043391_A_Psma8
  gRNA
ccgaagtgctaaaactgtcc

SEQ ID NO: 43392 - DNA, 20 bp, Artificial Sequence
  MKO10043392_A_Psma8
  gRNA
tgttactcactttccaagcg

SEQ ID NO: 43393 - DNA, 20 bp, Artificial Sequence
  MKO10043393_A_Psmb10
  gRNA
cacgcgggccactaacgatt

SEQ ID NO: 43394 - DNA, 20 bp, Artificial Sequence
  MKO10043394_A_Psmb10
  gRNA
cgccacaaccgaatcgttag

SEQ ID NO: 43395 - DNA, 20 bp, Artificial Sequence
  MKO10043395_A_Psmb10
  gRNA
cgaccagtgatgcccccacg

SEQ ID NO: 43396 - DNA, 20 bp, Artificial Sequence
  MKO10043396_A_Psmb11
  gRNA
attattatcgcgcagtcttc

SEQ ID NO: 43397 - DNA, 20 bp, Artificial Sequence
  MKO10043397_A_Psmb11
  gRNA
tcgtcacggtgtcatcgctg

SEQ ID NO: 43398 - DNA, 20 bp, Artificial Sequence
  MKO10043398_A_Psmb11
  gRNA
cccatccgctctcccgaacg

SEQ ID NO: 43399 - DNA, 20 bp, Artificial Sequence
  MKO10043399_A_Psmb1
  gRNA
agcaatcgcccccgttgtca

SEQ ID NO: 43400 - DNA, 20 bp, Artificial Sequence
  MKO10043400_A_Psmb1
  gRNA
attacctggttgtcgagcag

SEQ ID NO: 43401 - DNA, 20 bp, Artificial Sequence
  MKO10043401_A_Psmb1
  gRNA
gcagcctctgctcgacaacc

SEQ ID NO: 43402 - DNA, 20 bp, Artificial Sequence
  MKO10043402_A_Psmb2
  gRNA
tttcagccatctcacgtgag

SEQ ID NO: 43403 - DNA, 20 bp, Artificial Sequence
  MKO10043403_A_Psmb2
  gRNA
ctggctatgacgagcatgaa

SEQ ID NO: 43404 - DNA, 20 bp, Artificial Sequence
  MKO10043404_A_Psmb2
  gRNA
cactgccctctcacgtgaga

SEQ ID NO: 43405 - DNA, 20 bp, Artificial Sequence
  MKO10043405_A_Psmb3
  gRNA
ttacactgtctggacgtcag

SEQ ID NO: 43406 - DNA, 20 bp, Artificial Sequence
  MKO10043406_A_Psmb3
  gRNA
ccactcaccgcttctcatac

SEQ ID NO: 43407 - DNA, 20 bp, Artificial Sequence
  MKO10043407_A_Psmb3
  gRNA
atcgctgcagacagacgttt

SEQ ID NO: 43408 - DNA, 20 bp, Artificial Sequence
  MKO10043408_A_Psmb4
  gRNA
ttctcacccggttatacgaa

SEQ ID NO: 43409 - DNA, 20 bp, Artificial Sequence
  MKO10043409_A_Psmb4
  gRNA
caccccgagtaccgatgtcc

SEQ ID NO: 43410 - DNA, 20 bp, Artificial Sequence
  MKO10043410_A_Psmb4
  gRNA
gagatgcccgttcgtataac

SEQ ID NO: 43411 - DNA, 20 bp, Artificial Sequence
  MKO10043411_A_Psmb5
  gRNA
agagatcaacccgtaccttc

SEQ ID NO: 43412 - DNA, 20 bp, Artificial Sequence
  MKO10043412_A_Psmb5
  gRNA
gtctgagcaccttgaaggcc

SEQ ID NO: 43413 - DNA, 20 bp, Artificial Sequence
  MKO10043413_A_Psmb5
  gRNA
ctattactttcttcaccgtc

SEQ ID NO: 43414 - DNA, 20 bp, Artificial Sequence
  MKO10043414_A_Psmb6
  gRNA
tccgggagctcgtacatcta

SEQ ID NO: 43415 - DNA, 20 bp, Artificial Sequence
  MKO10043415_A_Psmb6
  gRNA
gccatagatgtacgagctcc

SEQ ID NO: 43416 - DNA, 20 bp, Artificial Sequence
  MKO10043416_A_Psmb6
  gRNA
ttcttcccagaccacgatca

SEQ ID NO: 43417 - DNA, 20 bp, Artificial Sequence
  MKO10043417_A_Psmb7
  gRNA
cttatacaccacccccgcga

SEQ ID NO: 43418 - DNA, 20 bp, Artificial Sequence
  MKO10043418_A_Psmb7
  gRNA
aagcggatttcgcaaaaaag

SEQ ID NO: 43419 - DNA, 20 bp, Artificial Sequence
  MKO10043419_A_Psmb7
  gRNA
cactcacccatggtgacata

SEQ ID NO: 43420 - DNA, 20 bp, Artificial Sequence
  MKO10043420_A_Psmb8
  gRNA
ccaaggtcgtaggcctcttc

SEQ ID NO: 43421 - DNA, 20 bp, Artificial Sequence
  MKO10043421_A_Psmb8
  gRNA
cgtacaggttgtattatctt

SEQ ID NO: 43422 - DNA, 20 bp, Artificial Sequence
  MKO10043422_A_Psmb8
  gRNA
gtgcagccgactgccagtac

SEQ ID NO: 43423 - DNA, 20 bp, Artificial Sequence
  MKO10043423_A_Psmb9
  gRNA
tccggaaccgccgatggtaa

SEQ ID NO: 43424 - DNA, 20 bp, Artificial Sequence
  MKO10043424_A_Psmb9
  gRNA
ttagcgcatctcatagtagc

SEQ ID NO: 43425 - DNA, 20 bp, Artificial Sequence
  MKO10043425_A_Psmb9
  gRNA
gatgcgctaacaagtcctca

SEQ ID NO: 43426 - DNA, 20 bp, Artificial Sequence
  MKO10043426_A_Psmc1
  gRNA
gatccttgtctacaaacgac

SEQ ID NO: 43427 - DNA, 20 bp, Artificial Sequence
  MKO10043427_A_Psmc1
  gRNA
gttacccagtggcagtttgc

SEQ ID NO: 43428 - DNA, 20 bp, Artificial Sequence
  MKO10043428_A_Psmc1
  gRNA
ggctcaccttgtggttgagc

SEQ ID NO: 43429 - DNA, 20 bp, Artificial Sequence
  MKO10043429_A_Psmc2
  gRNA
actgagatccaccacgaact

SEQ ID NO: 43430 - DNA, 20 bp, Artificial Sequence
  MKO10043430_A_Psmc2
  gRNA
gttggcacctccggccctct

SEQ ID NO: 43431 - DNA, 20 bp, Artificial Sequence
  MKO10043431_A_Psmc2
  gRNA
gaagataatcaacgctgatt

SEQ ID NO: 43432 - DNA, 20 bp, Artificial Sequence
  MKO10043432_A_Psmc3ip
  gRNA
aaaccggccctacagcgccc

SEQ ID NO: 43433 - DNA, 20 bp, Artificial Sequence
  MKO10043433_A_Psmc3ip
  gRNA
cggcctggatgccagtatcg

SEQ ID NO: 43434 - DNA, 20 bp, Artificial Sequence
  MKO10043434_A_Psmc3ip
  gRNA
gggccacgatactggcatcc

SEQ ID NO: 43435 - DNA, 20 bp, Artificial Sequence
  MKO10043435_A_Psmc3
  gRNA
gatcaaaacttctacccgac

SEQ ID NO: 43436 - DNA, 20 bp, Artificial Sequence
  MKO10043436_A_Psmc3
  gRNA
tgtctaacagccgtgtgcgc

SEQ ID NO: 43437 - DNA, 20 bp, Artificial Sequence
  MKO10043437_A_Psmc3
  gRNA
gacacacacctcgatgacat

SEQ ID NO: 43438 - DNA, 20 bp, Artificial Sequence
  MKO10043438_A_Psmc4
  gRNA
acaccttgtagcggctgtac

SEQ ID NO: 43439 - DNA, 20 bp, Artificial Sequence
  MKO10043439_A_Psmc4
  gRNA
atatcggcatacatcacatc

SEQ ID NO: 43440 - DNA, 20 bp, Artificial Sequence
  MKO10043440_A_Psmc4
  gRNA
acacttcgagctgtacaagc

SEQ ID NO: 43441 - DNA, 20 bp, Artificial Sequence
  MKO10043441_A_Psmc5
  gRNA
acgatgtgacgcccaattgt

SEQ ID NO: 43442 - DNA, 20 bp, Artificial Sequence
  MKO10043442_A_Psmc5
  gRNA
tcttagagcgacccgacaat

SEQ ID NO: 43443 - DNA, 20 bp, Artificial Sequence
  MKO10043443_A_Psmc5
  gRNA
cctacgttggagaagtcgtg

SEQ ID NO: 43444 - DNA, 20 bp, Artificial Sequence
  MKO10043444_A_Psmc6
  gRNA
cgacaacctacaacgtatct

SEQ ID NO: 43445 - DNA, 20 bp, Artificial Sequence
  MKO10043445_A_Psmc6
  gRNA
cgttgtaggttgtcgtcgtc

SEQ ID NO: 43446 - DNA, 20 bp, Artificial Sequence
  MKO10043446_A_Psmc6
  gRNA
tgaccacactaaccatcatg

SEQ ID NO: 43447 - DNA, 20 bp, Artificial Sequence
  MKO10043447_A_Psmd10
  gRNA
tggggctaacccagatgcga

SEQ ID NO: 43448 - DNA, 20 bp, Artificial Sequence
  MKO10043448_A_Psmd10
  gRNA
gcattgctgtagcatcgtaa

SEQ ID NO: 43449 - DNA, 20 bp, Artificial Sequence
  MKO10043449_A_Psmd10
  gRNA
tacaatctcatcccggccag

SEQ ID NO: 43450 - DNA, 20 bp, Artificial Sequence
  MKO10043450_A_Psmd11
  gRNA
taaagctaaagcagctcgtc

SEQ ID NO: 43451 - DNA, 20 bp, Artificial Sequence
  MKO10043451_A_Psmd11
  gRNA
agctgctttagctttactga

SEQ ID NO: 43452 - DNA, 20 bp, Artificial Sequence
  MKO10043452_A_Psmd11
  gRNA
gcgaagactggacaagctgc

SEQ ID NO: 43453 - DNA, 20 bp, Artificial Sequence
  MKO10043453_A_Psmd12
  gRNA
atgttgaaattgagcgtgct

SEQ ID NO: 43454 - DNA, 20 bp, Artificial Sequence
  MKO10043454_A_Psmd12
  gRNA
tcagcagtgctgtacttacg

SEQ ID NO: 43455 - DNA, 20 bp, Artificial Sequence
  MKO10043455_A_Psmd12
  gRNA
tgcgattgattgatactctg

SEQ ID NO: 43456 - DNA, 20 bp, Artificial Sequence
  MKO10043456_A_Psmd13
  gRNA
ccttaatgagaccatctcct

SEQ ID NO: 43457 - DNA, 20 bp, Artificial Sequence
  MKO10043457_A_Psmd13
  gRNA
cggtcatctgtctaaccaca

SEQ ID NO: 43458 - DNA, 20 bp, Artificial Sequence
  MKO10043458_A_Psmd13
  gRNA
cagggtaaaccctctgtccc

SEQ ID NO: 43459 - DNA, 20 bp, Artificial Sequence
  MKO10043459_A_Psmd14
  gRNA
ttcaggcccgagatggttgt

SEQ ID NO: 43460 - DNA, 20 bp, Artificial Sequence
  MKO10043460_A_Psmd14
  gRNA
tgccacagctctctccgaca

SEQ ID NO: 43461 - DNA, 20 bp, Artificial Sequence
  MKO10043461_A_Psmd14
  gRNA
acctacagatgctcctgccg

SEQ ID NO: 43462 - DNA, 20 bp, Artificial Sequence
  MKO10043462_A_Psmd1
  gRNA
tgtgatcatcgagacatcgc

SEQ ID NO: 43463 - DNA, 20 bp, Artificial Sequence
  MKO10043463_A_Psmd1
  gRNA
tcacgatgccttccaatcgc

SEQ ID NO: 43464 - DNA, 20 bp, Artificial Sequence
  MKO10043464_A_Psmd1
  gRNA
agttatcattgacgttgaag

SEQ ID NO: 43465 - DNA, 20 bp, Artificial Sequence
  MKO10043465_A_Psmd2
  gRNA
agatgctcgtggagcgactc

SEQ ID NO: 43466 - DNA, 20 bp, Artificial Sequence
  MKO10043466_A_Psmd2
  gRNA
tgccttacctgacgtattca

SEQ ID NO: 43467 - DNA, 20 bp, Artificial Sequence
  MKO10043467_A_Psmd2
  gRNA
tgaattaccttattctcccc

SEQ ID NO: 43468 - DNA, 20 bp, Artificial Sequence
  MKO10043468_A_Psmd3
  gRNA
agcgccctcagcacgaaccg

SEQ ID NO: 43469 - DNA, 20 bp, Artificial Sequence
  MKO10043469_A_Psmd3
  gRNA
gtccgtcagcatcgtgccgc

SEQ ID NO: 43470 - DNA, 20 bp, Artificial Sequence
  MKO10043470_A_Psmd3
  gRNA
gaagtctcgagtggcgttat

SEQ ID NO: 43471 - DNA, 20 bp, Artificial Sequence
  MKO10043471_A_Psmd4
  gRNA
cttctgcactggcatccgcg

SEQ ID NO: 43472 - DNA, 20 bp, Artificial Sequence
  MKO10043472_A_Psmd4
  gRNA
cgtacttggccagtgtgatc

SEQ ID NO: 43473 - DNA, 20 bp, Artificial Sequence
  MKO10043473_A_Psmd4
  gRNA
atgcgcatcatcgcctttgt

SEQ ID NO: 43474 - DNA, 20 bp, Artificial Sequence
  MKO10043474_A_Psmd5
  gRNA
caaacgacgttgttcgatac

SEQ ID NO: 43475 - DNA, 20 bp, Artificial Sequence
  MKO10043475_A_Psmd5
  gRNA
aaaaaccctcactctgtcgc

SEQ ID NO: 43476 - DNA, 20 bp, Artificial Sequence
  MKO10043476_A_Psmd5
  gRNA
gggttagtgatattctcgac

SEQ ID NO: 43477 - DNA, 20 bp, Artificial Sequence
  MKO10043477_A_Psmd6
  gRNA
aacagatactgccgaactgc

SEQ ID NO: 43478 - DNA, 20 bp, Artificial Sequence
  MKO10043478_A_Psmd6
  gRNA
ccacgtccatctgccagtcg

SEQ ID NO: 43479 - DNA, 20 bp, Artificial Sequence
  MKO10043479_A_Psmd6
  gRNA
gtaccagggcttatattgtg

SEQ ID NO: 43480 - DNA, 20 bp, Artificial Sequence
  MKO10043480_A_Psmd7
  gRNA
gcacaccaactacccgcttc

SEQ ID NO: 43481 - DNA, 20 bp, Artificial Sequence
  MKO10043481_A_Psmd7
  gRNA
gcgggtagttggtgtgcttt

SEQ ID NO: 43482 - DNA, 20 bp, Artificial Sequence
  MKO10043482_A_Psmd7
  gRNA
cattatcgacgtgaagccaa

SEQ ID NO: 43483 - DNA, 20 bp, Artificial Sequence
  MKO10043483_A_Psmd8
  gRNA
tccctccttcgagcgctaca

SEQ ID NO: 43484 - DNA, 20 bp, Artificial Sequence
  MKO10043484_A_Psmd8
  gRNA
gccatgtagcgctcgaagga

SEQ ID NO: 43485 - DNA, 20 bp, Artificial Sequence
  MKO10043485_A_Psmd8
  gRNA
cttacttgctcgagggaaac

SEQ ID NO: 43486 - DNA, 20 bp, Artificial Sequence
  MKO10043486_A_Psmd9
  gRNA
tcagactgattccaacccgc

SEQ ID NO: 43487 - DNA, 20 bp, Artificial Sequence
  MKO10043487_A_Psmd9
  gRNA
aagattaccgcaatactggc

SEQ ID NO: 43488 - DNA, 20 bp, Artificial Sequence
  MKO10043488_A_Psmd9
  gRNA
ctttgtcccgagcgtgcagc

SEQ ID NO: 43489 - DNA, 20 bp, Artificial Sequence
  MKO10043489_A_Psme1
  gRNA
taggtcttaccttgctacac

SEQ ID NO: 43490 - DNA, 20 bp, Artificial Sequence
  MKO10043490_A_Psme1
  gRNA
aaaggggacgaagacgacaa

SEQ ID NO: 43491 - DNA, 20 bp, Artificial Sequence
  MKO10043491_A_Psme1
  gRNA
ccgtgaagacctgtgtagca

SEQ ID NO: 43492 - DNA, 20 bp, Artificial Sequence
  MKO10043492_A_Psme2b
  gRNA
ccctcgttctgagaagtact

SEQ ID NO: 43493 - DNA, 20 bp, Artificial Sequence
  MKO10043493_A_Psme2b
  gRNA
atacccatgtaatggattac

SEQ ID NO: 43494 - DNA, 20 bp, Artificial Sequence
  MKO10043494_A_Psme2b
  gRNA
tgtttccatctcgtcatcct

SEQ ID NO: 43495 - DNA, 20 bp, Artificial Sequence
  MKO10043495_A_Psme2
  gRNA
atgccttacctcgtcatcct

SEQ ID NO: 43496 - DNA, 20 bp, Artificial Sequence
  MKO10043496_A_Psme2
  gRNA
tcacctgcaagagctgactc

SEQ ID NO: 43497 - DNA, 20 bp, Artificial Sequence
  MKO10043497_A_Psme2
  gRNA
acaggaggattccctcaatg

SEQ ID NO: 43498 - DNA, 20 bp, Artificial Sequence
  MKO10043498_A_Psme3
  gRNA
caacctgcgcttcttgtaag

SEQ ID NO: 43499 - DNA, 20 bp, Artificial Sequence
  MKO10043499_A_Psme3
  gRNA
agcccacttacaagaagcgc

SEQ ID NO: 43500 - DNA, 20 bp, Artificial Sequence
  MKO10043500_A_Psme3
  gRNA
tcacaccatccagtccatcg

SEQ ID NO: 43501 - DNA, 20 bp, Artificial Sequence
  MKO10043501_A_Psme4
  gRNA
tgcagttatatccgacttta

SEQ ID NO: 43502 - DNA, 20 bp, Artificial Sequence
  MKO10043502_A_Psme4
  gRNA
cctccagaactgcatcataa

SEQ ID NO: 43503 - DNA, 20 bp, Artificial Sequence
  MKO10043503_A_Psme4
  gRNA
ctttctaccaagtcataaag

SEQ ID NO: 43504 - DNA, 20 bp, Artificial Sequence
  MKO10043504_A_Psmf1
  gRNA
ctcgtgcaaacagtcctccg

SEQ ID NO: 43505 - DNA, 20 bp, Artificial Sequence
  MKO10043505_A_Psmf1
  gRNA
cacaccgtcctcatactagc

SEQ ID NO: 43506 - DNA, 20 bp, Artificial Sequence
  MKO10043506_A_Psmf1
  gRNA
cggcatgatcatcaacgtgc

SEQ ID NO: 43507 - DNA, 20 bp, Artificial Sequence
  MKO10043507_A_Psmg1
  gRNA
atgttcggctgttccagcag

SEQ ID NO: 43508 - DNA, 20 bp, Artificial Sequence
  MKO10043508_A_Psmg1
  gRNA
gtcagcgtttgttatgaact

SEQ ID NO: 43509 - DNA, 20 bp, Artificial Sequence
  MKO10043509_A_Psmg1
  gRNA
agttcataacaaacgctgac

SEQ ID NO: 43510 - DNA, 20 bp, Artificial Sequence
  MKO10043510_A_Psmg2
  gRNA
catcgttgcggtgatacgaa

SEQ ID NO: 43511 - DNA, 20 bp, Artificial Sequence
  MKO10043511_A_Psmg2
  gRNA
ccaggacttacctgcgcagc

SEQ ID NO: 43512 - DNA, 20 bp, Artificial Sequence
  MKO10043512_A_Psmg2
  gRNA
cttaccgtcaaagaagctag

SEQ ID NO: 43513 - DNA, 20 bp, Artificial Sequence
  MKO10043513_A_Psmg3
  gRNA
gcgtacccatcttcccgaac

SEQ ID NO: 43514 - DNA, 20 bp, Artificial Sequence
  MKO10043514_A_Psmg3
  gRNA
aggactctcgtggtgagcac

SEQ ID NO: 43515 - DNA, 20 bp, Artificial Sequence
  MKO10043515_A_Psmg3
  gRNA
gcatttgtgtcgcaagaagc

SEQ ID NO: 43516 - DNA, 20 bp, Artificial Sequence
  MKO10043516_A_Psmg4
  gRNA
cgacacgtccgcgtccgcag

SEQ ID NO: 43517 - DNA, 20 bp, Artificial Sequence
  MKO10043517_A_Psmg4
  gRNA
gcatctacgcaacctcgcag

SEQ ID NO: 43518 - DNA, 20 bp, Artificial Sequence
  MKO10043518_A_Psmg4
  gRNA
acatacctaagcgctgagca

SEQ ID NO: 43519 - DNA, 20 bp, Artificial Sequence
  MKO10043519_A_Psors1c2
  gRNA
tttgatgaacctccgcctcc

SEQ ID NO: 43520 - DNA, 20 bp, Artificial Sequence
  MKO10043520_A_Psors1c2
  gRNA
tttagggggatcagtgcttg

SEQ ID NO: 43521 - DNA, 20 bp, Artificial Sequence
  MKO10043521_A_Psors1c2
  gRNA
acgactcacctcctgcacac

SEQ ID NO: 43522 - DNA, 20 bp, Artificial Sequence
  MKO10043522_A_Pspc1
  gRNA
cgaattcgctttgctacaca

SEQ ID NO: 43523 - DNA, 20 bp, Artificial Sequence
  MKO10043523_A_Pspc1
  gRNA
agcgaaacctcctgcacgaa

SEQ ID NO: 43524 - DNA, 20 bp, Artificial Sequence
  MKO10043524_A_Pspc1
  gRNA
aatttgaatatgcgtctcga

SEQ ID NO: 43525 - DNA, 20 bp, Artificial Sequence
  MKO10043525_A_Psph
  gRNA
agacgcgctcactcagcgcc

SEQ ID NO: 43526 - DNA, 20 bp, Artificial Sequence
  MKO10043526_A_Psph
  gRNA
tgagtgagcgcgtctttaaa

SEQ ID NO: 43527 - DNA, 20 bp, Artificial Sequence
  MKO10043527_A_Psph
  gRNA
atctcttcaggtgagtacgc

SEQ ID NO: 43528 - DNA, 20 bp, Artificial Sequence
  MKO10043528_A_Pspn
  gRNA
ctcgaccccgccctcgaagc

SEQ ID NO: 43529 - DNA, 20 bp, Artificial Sequence
  MKO10043529_A_Pspn
  gRNA
tactggcccggcttcgaggg

SEQ ID NO: 43530 - DNA, 20 bp, Artificial Sequence
  MKO10043530_A_Pspn
  gRNA
cttaccctgatggggcgtcc

SEQ ID NO: 43531 - DNA, 20 bp, Artificial Sequence
  MKO10043531_A_Psrc1
  gRNA
aggacgaaggtctcccgccg

SEQ ID NO: 43532 - DNA, 20 bp, Artificial Sequence
  MKO10043532_A_Psrc1
  gRNA
tgggcgaggccccgtcgaag

SEQ ID NO: 43533 - DNA, 20 bp, Artificial Sequence
  MKO10043533_A_Psrc1
  gRNA
gccacccgagtgccactcat

SEQ ID NO: 43534 - DNA, 20 bp, Artificial Sequence
  MKO10043534_A_Pstk
  gRNA
ccccactaatgaccgccacg

SEQ ID NO: 43535 - DNA, 20 bp, Artificial Sequence
  MKO10043535_A_Pstk
  gRNA
ttcctcgtggcggtcattag

SEQ ID NO: 43536 - DNA, 20 bp, Artificial Sequence
  MKO10043536_A_Pstk
  gRNA
tgacgagaccatccagctca

SEQ ID NO: 43537 - DNA, 20 bp, Artificial Sequence
  MKO10043537_A_Pstpip1
  gRNA
ttggaacttacgctgcttca

SEQ ID NO: 43538 - DNA, 20 bp, Artificial Sequence
  MKO10043538_A_Pstpip1
  gRNA
gtagcacctcataccctgtg

SEQ ID NO: 43539 - DNA, 20 bp, Artificial Sequence
  MKO10043539_A_Pstpip1
  gRNA
tccttacagggcccaggcgg

SEQ ID NO: 43540 - DNA, 20 bp, Artificial Sequence
  MKO10043540_A_Pstpip2
  gRNA
gataatgctgtcgtagccaa

SEQ ID NO: 43541 - DNA, 20 bp, Artificial Sequence
  MKO10043541_A_Pstpip2
  gRNA
tacgctgcttgaagacctca

SEQ ID NO: 43542 - DNA, 20 bp, Artificial Sequence
  MKO10043542_A_Pstpip2
  gRNA
attatccagcacctgaacaa

SEQ ID NO: 43543 - DNA, 20 bp, Artificial Sequence
  MKO10043543_A_Ptafr
  gRNA
gacccatagcacatagccgt

SEQ ID NO: 43544 - DNA, 20 bp, Artificial Sequence
  MKO10043544_A_Ptafr
  gRNA
cacgagtgacacgtgcaccg

SEQ ID NO: 43545 - DNA, 20 bp, Artificial Sequence
  MKO10043545_A_Ptafr
  gRNA
catcacttataaccgctacc

SEQ ID NO: 43546 - DNA, 20 bp, Artificial Sequence
  MKO10043546_A_Ptar1
  gRNA
ctccggttatatcttgcttc

SEQ ID NO: 43547 - DNA, 20 bp, Artificial Sequence
  MKO10043547_A_Ptar1
  gRNA
gctttctcgttctgtacaaa

SEQ ID NO: 43548 - DNA, 20 bp, Artificial Sequence
  MKO10043548_A_Ptar1
  gRNA
gaccaggcattgtagttgct

SEQ ID NO: 43549 - DNA, 20 bp, Artificial Sequence
  MKO10043549_A_Ptbp1
  gRNA
agcagacatactgcctggtt

SEQ ID NO: 43550 - DNA, 20 bp, Artificial Sequence
  MKO10043550_A_Ptbp1
  gRNA
taccaaccttctcatgctga

SEQ ID NO: 43551 - DNA, 20 bp, Artificial Sequence
  MKO10043551_A_Ptbp1
  gRNA
atgagcagctctgcctcagc

SEQ ID NO: 43552 - DNA, 20 bp, Artificial Sequence
  MKO10043552_A_Ptbp2
  gRNA
tcgaatgtgaagtacacgag

SEQ ID NO: 43553 - DNA, 20 bp, Artificial Sequence
  MKO10043553_A_Ptbp2
  gRNA
ggatctgacgagctactctc

SEQ ID NO: 43554 - DNA, 20 bp, Artificial Sequence
  MKO10043554_A_Ptbp2
  gRNA
tttcttactatcgttaccgt

SEQ ID NO: 43555 - DNA, 20 bp, Artificial Sequence
  MKO10043555_A_Ptbp3
  gRNA
gactgacaatctgcctaatc

SEQ ID NO: 43556 - DNA, 20 bp, Artificial Sequence
  MKO10043556_A_Ptbp3
  gRNA
atgaacagctcgacttctgc

SEQ ID NO: 43557 - DNA, 20 bp, Artificial Sequence
  MKO10043557_A_Ptbp3
  gRNA
atatcattaggtctaccatt

SEQ ID NO: 43558 - DNA, 20 bp, Artificial Sequence
  MKO10043558_A_Ptcd1
  gRNA
accgtgtagttgcactccag

SEQ ID NO: 43559 - DNA, 20 bp, Artificial Sequence
  MKO10043559_A_Ptcd1
  gRNA
atcaacgccagcctatcagc

SEQ ID NO: 43560 - DNA, 20 bp, Artificial Sequence
  MKO10043560_A_Ptcd1
  gRNA
aaccttctcagaaactcgag

SEQ ID NO: 43561 - DNA, 20 bp, Artificial Sequence
  MKO10043561_A_Ptcd2
  gRNA
gctattgcatataacctacc

SEQ ID NO: 43562 - DNA, 20 bp, Artificial Sequence
  MKO10043562_A_Ptcd2
  gRNA
tggcgaaagccgtcatttat

SEQ ID NO: 43563 - DNA, 20 bp, Artificial Sequence
  MKO10043563_A_Ptcd2
  gRNA
cttacgttcatatttgcctt

SEQ ID NO: 43564 - DNA, 20 bp, Artificial Sequence
  MKO10043564_A_Ptcd3
  gRNA
ggatcatcgtgaaatacata

SEQ ID NO: 43565 - DNA, 20 bp, Artificial Sequence
  MKO10043565_A_Ptcd3
  gRNA
ggataaagtggctgttcttc

SEQ ID NO: 43566 - DNA, 20 bp, Artificial Sequence
  MKO10043566_A_Ptcd3
  gRNA
atatctgatccttcaacctt

SEQ ID NO: 43567 - DNA, 20 bp, Artificial Sequence
  MKO10043567_A_Ptch1
  gRNA
agctaatctcgagaccaacg

SEQ ID NO: 43568 - DNA, 20 bp, Artificial Sequence
  MKO10043568_A_Ptch1
  gRNA
catgtagacgtgcacacgac

SEQ ID NO: 43569 - DNA, 20 bp, Artificial Sequence
  MKO10043569_A_Ptch1
  gRNA
aattatacccgtcagaagat

SEQ ID NO: 43570 - DNA, 20 bp, Artificial Sequence
  MKO10043570_A_Ptch2
  gRNA
gttgattcagactgcgcacc

SEQ ID NO: 43571 - DNA, 20 bp, Artificial Sequence
  MKO10043571_A_Ptch2
  gRNA
gcgcagtctgaatcaacatc

SEQ ID NO: 43572 - DNA, 20 bp, Artificial Sequence
  MKO10043572_A_Ptch2
  gRNA
tcaccccgcttgactgcttc

SEQ ID NO: 43573 - DNA, 20 bp, Artificial Sequence
  MKO10043573_A_Ptchd1
  gRNA
cagattcgctgatcaacgtc

SEQ ID NO: 43574 - DNA, 20 bp, Artificial Sequence
  MKO10043574_A_Ptchd1
  gRNA
agtcacagtaatagcgtttg

SEQ ID NO: 43575 - DNA, 20 bp, Artificial Sequence
  MKO10043575_A_Ptchd1
  gRNA
cgccagcttcagccgctacc

SEQ ID NO: 43576 - DNA, 20 bp, Artificial Sequence
  MKO10043576_A_Ptchd2
  gRNA
gaccaccgccgccgcttatg

SEQ ID NO: 43577 - DNA, 20 bp, Artificial Sequence
  MKO10043577_A_Ptchd2
  gRNA
ggcgtacctcatagtcgaag

SEQ ID NO: 43578 - DNA, 20 bp, Artificial Sequence
  MKO10043578_A_Ptchd2
  gRNA
gacagacctcttcgactatg

SEQ ID NO: 43579 - DNA, 20 bp, Artificial Sequence
  MKO10043579_A_Ptchd3
  gRNA
cgttggaagccccgcgacag

SEQ ID NO: 43580 - DNA, 20 bp, Artificial Sequence
  MKO10043580_A_Ptchd3
  gRNA
tggaaaaagtcaacgactcg

SEQ ID NO: 43581 - DNA, 20 bp, Artificial Sequence
  MKO10043581_A_Ptchd3
  gRNA
ttgcagttgtatcatgctcc

SEQ ID NO: 43582 - DNA, 20 bp, Artificial Sequence
  MKO10043582_A_Ptchd4
  gRNA
tgtgtaagtccgaatagagc

SEQ ID NO: 43583 - DNA, 20 bp, Artificial Sequence
  MKO10043583_A_Ptchd4
  gRNA
gtgcagaagcgtgcaacccc

SEQ ID NO: 43584 - DNA, 20 bp, Artificial Sequence
  MKO10043584_A_Ptchd4
  gRNA
attctacgtctatgaacccc

SEQ ID NO: 43585 - DNA, 20 bp, Artificial Sequence
  MKO10043585_A_Ptcra
  gRNA
gacttacccccgagaggctc

SEQ ID NO: 43586 - DNA, 20 bp, Artificial Sequence
  MKO10043586_A_Ptcra
  gRNA
ggccagggggtgccgcatcg

SEQ ID NO: 43587 - DNA, 20 bp, Artificial Sequence
  MKO10043587_A_Ptcra
  gRNA
gggtcatgcttctccacgag

SEQ ID NO: 43588 - DNA, 20 bp, Artificial Sequence
  MKO10043588_A_Ptdss1
  gRNA
tcgtgtagcatatcgaagat

SEQ ID NO: 43589 - DNA, 20 bp, Artificial Sequence
  MKO10043589_A_Ptdss1
  gRNA
tcgatatgctacacgagaag

SEQ ID NO: 43590 - DNA, 20 bp, Artificial Sequence
  MKO10043590_A_Ptdss1
  gRNA
accaaaaaccattcgccata

SEQ ID NO: 43591 - DNA, 20 bp, Artificial Sequence
  MKO10043591_A_Ptdss2
  gRNA
ttgtagcttactggcggttt

SEQ ID NO: 43592 - DNA, 20 bp, Artificial Sequence
  MKO10043592_A_Ptdss2
  gRNA
agtcacgtagcccagcgcac

SEQ ID NO: 43593 - DNA, 20 bp, Artificial Sequence
  MKO10043593_A_Ptdss2
  gRNA
ttgcccccgtagtccctctc

SEQ ID NO: 43594 - DNA, 20 bp, Artificial Sequence
  MKO10043594_A_Pten
  gRNA
accgccaaatttaactgcag

SEQ ID NO: 43595 - DNA, 20 bp, Artificial Sequence
  MKO10043595_A_Pten
  gRNA
gcagcaattcactgtaaagc

SEQ ID NO: 43596 - DNA, 20 bp, Artificial Sequence
  MKO10043596_A_Pten
  gRNA
tgtcatcttcacttagccat

SEQ ID NO: 43597 - DNA, 20 bp, Artificial Sequence
  MKO10043597_A_Pter
  gRNA
gacccgcttacctgtcaagg

SEQ ID NO: 43598 - DNA, 20 bp, Artificial Sequence
  MKO10043598_A_Pter
  gRNA
agttgtcgtattctccacca

SEQ ID NO: 43599 - DNA, 20 bp, Artificial Sequence
  MKO10043599_A_Pter
  gRNA
atccgtatactgcaagaagc

SEQ ID NO: 43600 - DNA, 20 bp, Artificial Sequence
  MKO10043600_A_Ptf1a
  gRNA
gtgcgaacgcagcccctcga

SEQ ID NO: 43601 - DNA, 20 bp, Artificial Sequence
  MKO10043601_A_Ptf1a
  gRNA
cacgaatactgctaccgcga

SEQ ID NO: 43602 - DNA, 20 bp, Artificial Sequence
  MKO10043602_A_Ptf1a
  gRNA
gagaccataatccgggtcac

SEQ ID NO: 43603 - DNA, 20 bp, Artificial Sequence
  MKO10043603_A_Ptgdr
  gRNA
aaggggctcctcggcgacga

SEQ ID NO: 43604 - DNA, 20 bp, Artificial Sequence
  MKO10043604_A_Ptgdr
  gRNA
cacagcgcccatcgtcgccg

SEQ ID NO: 43605 - DNA, 20 bp, Artificial Sequence
  MKO10043605_A_Ptgdr
  gRNA
ccattcccagcaaagtaacg

SEQ ID NO: 43606 - DNA, 20 bp, Artificial Sequence
  MKO10043606_A_Ptgds
  gRNA
cagagcgtactcgtcatagt

SEQ ID NO: 43607 - DNA, 20 bp, Artificial Sequence
  MKO10043607_A_Ptgds
  gRNA
ggtcgcagttcctggggcgc

SEQ ID NO: 43608 - DNA, 20 bp, Artificial Sequence
  MKO10043608_A_Ptgds
  gRNA
tacgctctgctattcagcag

SEQ ID NO: 43609 - DNA, 20 bp, Artificial Sequence
  MKO10043609_A_Ptger1
  gRNA
tcccgatgatcgccggcgct

SEQ ID NO: 43610 - DNA, 20 bp, Artificial Sequence
  MKO10043610_A_Ptger1
  gRNA
ccgagcggcgccgccgcatt

SEQ ID NO: 43611 - DNA, 20 bp, Artificial Sequence
  MKO10043611_A_Ptger1
  gRNA
tggctgtacgcctcgcatcg

SEQ ID NO: 43612 - DNA, 20 bp, Artificial Sequence
  MKO10043612_A_Ptger2
  gRNA
aggcgccacttatcgcgccg

SEQ ID NO: 43613 - DNA, 20 bp, Artificial Sequence
  MKO10043613_A_Ptger2
  gRNA
acgcgtgactttcgggagcc

SEQ ID NO: 43614 - DNA, 20 bp, Artificial Sequence
  MKO10043614_A_Ptger2
  gRNA
gagcgcattaacctcaggac

SEQ ID NO: 43615 - DNA, 20 bp, Artificial Sequence
  MKO10043615_A_Ptger3
  gRNA
gcccagcagtaccgcgcgcg

SEQ ID NO: 43616 - DNA, 20 bp, Artificial Sequence
  MKO10043616_A_Ptger3
  gRNA
gaagactcgcgccacgcgcg

SEQ ID NO: 43617 - DNA, 20 bp, Artificial Sequence
  MKO10043617_A_Ptger3
  gRNA
ctttctaattgcagttcgcc

SEQ ID NO: 43618 - DNA, 20 bp, Artificial Sequence
  MKO10043618_A_Ptger4
  gRNA
tgcggcggcgaaagtcgctg

SEQ ID NO: 43619 - DNA, 20 bp, Artificial Sequence
  MKO10043619_A_Ptger4
  gRNA
ccagccgcttgtccacgtag

SEQ ID NO: 43620 - DNA, 20 bp, Artificial Sequence
  MKO10043620_A_Ptger4
  gRNA
ctctgccggaaccgccaatg

SEQ ID NO: 43621 - DNA, 20 bp, Artificial Sequence
  MKO10043621_A_Ptges2
  gRNA
cgtgtaccgaacacccgctg

SEQ ID NO: 43622 - DNA, 20 bp, Artificial Sequence
  MKO10043622_A_Ptges2
  gRNA
cttcgactacattgtccgtg

SEQ ID NO: 43623 - DNA, 20 bp, Artificial Sequence
  MKO10043623_A_Ptges2
  gRNA
cacttattacccacccatga

SEQ ID NO: 43624 - DNA, 20 bp, Artificial Sequence
  MKO10043624_A_Ptges3l
  gRNA
actactacctgaacacgacg

SEQ ID NO: 43625 - DNA, 20 bp, Artificial Sequence
  MKO10043625_A_Ptges3l
  gRNA
agcgaccagaacgcttatcc

SEQ ID NO: 43626 - DNA, 20 bp, Artificial Sequence
  MKO10043626_A_Ptges3l
  gRNA
cgacgtcagtgtgctcattg

SEQ ID NO: 43627 - DNA, 20 bp, Artificial Sequence
  MKO10043627_A_Ptges3
  gRNA
ctagcttaattggctcagtg

SEQ ID NO: 43628 - DNA, 20 bp, Artificial Sequence
  MKO10043628_A_Ptges3
  gRNA
aaattacctgaaagtaagtt

SEQ ID NO: 43629 - DNA, 20 bp, Artificial Sequence
  MKO10043629_A_Ptges3
  gRNA
aaaaatccaaacttactttc

SEQ ID NO: 43630 - DNA, 20 bp, Artificial Sequence
  MKO10043630_A_Ptges
  gRNA
ggacataggccccggagcga

SEQ ID NO: 43631 - DNA, 20 bp, Artificial Sequence
  MKO10043631_A_Ptges
  gRNA
ctgaacccacgccttcgctc

SEQ ID NO: 43632 - DNA, 20 bp, Artificial Sequence
  MKO10043632_A_Ptges
  gRNA
gctagccgagatgccttccc

SEQ ID NO: 43633 - DNA, 20 bp, Artificial Sequence
  MKO10043633_A_Ptgfrn
  gRNA
cgcgatacatcgcagctcaa

SEQ ID NO: 43634 - DNA, 20 bp, Artificial Sequence
  MKO10043634_A_Ptgfrn
  gRNA
gcggcttgaccgtgattccc

SEQ ID NO: 43635 - DNA, 20 bp, Artificial Sequence
  MKO10043635_A_Ptgfrn
  gRNA
gacccgtcgcaatgacgacg

SEQ ID NO: 43636 - DNA, 20 bp, Artificial Sequence
  MKO10043636_A_Ptgfr
  gRNA
gactcctatacacctctcga

SEQ ID NO: 43637 - DNA, 20 bp, Artificial Sequence
  MKO10043637_A_Ptgfr
  gRNA
cagctatgcctccgttgata

SEQ ID NO: 43638 - DNA, 20 bp, Artificial Sequence
  MKO10043638_A_Ptgfr
  gRNA
ccgtagcagaatatagaccc

SEQ ID NO: 43639 - DNA, 20 bp, Artificial Sequence
  MKO10043639_A_Ptgir
  gRNA
agccacgaacatcagcgtgc

SEQ ID NO: 43640 - DNA, 20 bp, Artificial Sequence
  MKO10043640_A_Ptgir
  gRNA
cgcatgcgttccgcccagcc

SEQ ID NO: 43641 - DNA, 20 bp, Artificial Sequence
  MKO10043641_A_Ptgir
  gRNA
tcagatccgaggcttcactc

SEQ ID NO: 43642 - DNA, 20 bp, Artificial Sequence
  MKO10043642_A_Ptgis
  gRNA
gccggctacctgaccctata

SEQ ID NO: 43643 - DNA, 20 bp, Artificial Sequence
  MKO10043643_A_Ptgis
  gRNA
tatggaaaacatccgctgag

SEQ ID NO: 43644 - DNA, 20 bp, Artificial Sequence
  MKO10043644_A_Ptgis
  gRNA
cacccagcaggaccgtgcga

SEQ ID NO: 43645 - DNA, 20 bp, Artificial Sequence
  MKO10043645_A_Ptgr1
  gRNA
acgattgtagcggctttatt

SEQ ID NO: 43646 - DNA, 20 bp, Artificial Sequence
  MKO10043646_A_Ptgr1
  gRNA
gccgctacaatcgttccttt

SEQ ID NO: 43647 - DNA, 20 bp, Artificial Sequence
  MKO10043647_A_Ptgr1
  gRNA
gcttgacatctgtggcgtga

SEQ ID NO: 43648 - DNA, 20 bp, Artificial Sequence
  MKO10043648_A_Ptgr2
  gRNA
cagcaacgcggtgataagtc

SEQ ID NO: 43649 - DNA, 20 bp, Artificial Sequence
  MKO10043649_A_Ptgr2
  gRNA
aagtagacatccactccgcc

SEQ ID NO: 43650 - DNA, 20 bp, Artificial Sequence
  MKO10043650_A_Ptgr2
  gRNA
gtagacccacaacttgtaga

SEQ ID NO: 43651 - DNA, 20 bp, Artificial Sequence
  MKO10043651_A_Ptgs1
  gRNA
ccgagaagtactcatgcgcc

SEQ ID NO: 43652 - DNA, 20 bp, Artificial Sequence
  MKO10043652_A_Ptgs1
  gRNA
gcgagtatagtagctcacat

SEQ ID NO: 43653 - DNA, 20 bp, Artificial Sequence
  MKO10043653_A_Ptgs1
  gRNA
ttgctcacggatggtacagt

SEQ ID NO: 43654 - DNA, 20 bp, Artificial Sequence
  MKO10043654_A_Ptgs2
  gRNA
ttcaagacagatcataagcg

SEQ ID NO: 43655 - DNA, 20 bp, Artificial Sequence
  MKO10043655_A_Ptgs2
  gRNA
ccatagtgcacattgtaagt

SEQ ID NO: 43656 - DNA, 20 bp, Artificial Sequence
  MKO10043656_A_Ptgs2
  gRNA
acctgggttcacccgaggac

SEQ ID NO: 43657 - DNA, 20 bp, Artificial Sequence
  MKO10043657_A_Pth1r
  gRNA
tacagacgctgcgaccgcaa

SEQ ID NO: 43658 - DNA, 20 bp, Artificial Sequence
  MKO10043658_A_Pth1r
  gRNA
cttgaggcactcgctgtagt

SEQ ID NO: 43659 - DNA, 20 bp, Artificial Sequence
  MKO10043659_A_Pth1r
  gRNA
caaacgatgttgtcccactc

SEQ ID NO: 43660 - DNA, 20 bp, Artificial Sequence
  MKO10043660_A_Pth2r
  gRNA
aatagaatcccacgtcccat

SEQ ID NO: 43661 - DNA, 20 bp, Artificial Sequence
  MKO10043661_A_Pth2r
  gRNA
ctgcagcctgatatcaacat

SEQ ID NO: 43662 - DNA, 20 bp, Artificial Sequence
  MKO10043662_A_Pth2r
  gRNA
gggatcatttgttggcccag

SEQ ID NO: 43663 - DNA, 20 bp, Artificial Sequence
  MKO10043663_A_Pth2
  gRNA
ccgcgtcgtcagctagcgcc

SEQ ID NO: 43664 - DNA, 20 bp, Artificial Sequence
  MKO10043664_A_Pth2
  gRNA
cctggcgctagctgacgacg

SEQ ID NO: 43665 - DNA, 20 bp, Artificial Sequence
  MKO10043665_A_Pth2
  gRNA
cctacctgaacacaccagcg

SEQ ID NO: 43666 - DNA, 20 bp, Artificial Sequence
  MKO10043666_A_Pthlh
  gRNA
gcccctccaccgaacgcccg

SEQ ID NO: 43667 - DNA, 20 bp, Artificial Sequence
  MKO10043667_A_Pthlh
  gRNA
agaaacggcggcgcaagtct

SEQ ID NO: 43668 - DNA, 20 bp, Artificial Sequence
  MKO10043668_A_Pthlh
  gRNA
cgagcggcacgatgctgcgg

SEQ ID NO: 43669 - DNA, 20 bp, Artificial Sequence
  MKO10043669_A_Pth
  gRNA
tcacgggtttcccatccgtt

SEQ ID NO: 43670 - DNA, 20 bp, Artificial Sequence
  MKO10043670_A_Pth
  gRNA
gatggcaatccaaaaagtct

SEQ ID NO: 43671 - DNA, 20 bp, Artificial Sequence
  MKO10043671_A_Pth
  gRNA
gatgatgtctgcaaacaccg

SEQ ID NO: 43672 - DNA, 20 bp, Artificial Sequence
  MKO10043672_A_Ptk2b
  gRNA
catgcaacgctacgccagca

SEQ ID NO: 43673 - DNA, 20 bp, Artificial Sequence
  MKO10043673_A_Ptk2b
  gRNA
tgggccctattcgcccactc

SEQ ID NO: 43674 - DNA, 20 bp, Artificial Sequence
  MKO10043674_A_Ptk2b
  gRNA
gcccttgagccgtgtaaaag

SEQ ID NO: 43675 - DNA, 20 bp, Artificial Sequence
  MKO10043675_A_Ptk2
  gRNA
agtgcacctcctccgatcgc

SEQ ID NO: 43676 - DNA, 20 bp, Artificial Sequence
  MKO10043676_A_Ptk2
  gRNA
ttcgagtactaagactcacc

SEQ ID NO: 43677 - DNA, 20 bp, Artificial Sequence
  MKO10043677_A_Ptk2
  gRNA
tgcaatggaacgagtattaa

SEQ ID NO: 43678 - DNA, 20 bp, Artificial Sequence
  MKO10043678_A_Ptk6
  gRNA
agaaggataccgcctcattc

SEQ ID NO: 43679 - DNA, 20 bp, Artificial Sequence
  MKO10043679_A_Ptk6
  gRNA
ccgtgcgacattacaggatc

SEQ ID NO: 43680 - DNA, 20 bp, Artificial Sequence
  MKO10043680_A_Ptk6
  gRNA
aaactgagcccttgccccac

SEQ ID NO: 43681 - DNA, 20 bp, Artificial Sequence
  MKO10043681_A_Ptk7
  gRNA
caaaccgtcgctccgtgtcc

SEQ ID NO: 43682 - DNA, 20 bp, Artificial Sequence
  MKO10043682_A_Ptk7
  gRNA
gaggccactatgttcgggac

SEQ ID NO: 43683 - DNA, 20 bp, Artificial Sequence
  MKO10043683_A_Ptk7
  gRNA
ttaccggcttcggttagtga

SEQ ID NO: 43684 - DNA, 20 bp, Artificial Sequence
  MKO10043684_A_Ptma
  gRNA
ttctctacaggatgacgatg

SEQ ID NO: 43685 - DNA, 20 bp, Artificial Sequence
  MKO10043685_A_Ptma
  gRNA
gacactcacagcgttcccat

SEQ ID NO: 43686 - DNA, 20 bp, Artificial Sequence
  MKO10043686_A_Ptma
  gRNA
tgattctccaggtgaggagg

SEQ ID NO: 43687 - DNA, 20 bp, Artificial Sequence
  MKO10043687_A_Ptms
  gRNA
ttcagcagttctcttccgca

SEQ ID NO: 43688 - DNA, 20 bp, Artificial Sequence
  MKO10043688_A_Ptms
  gRNA
gaagacagaaaacggggcgt

SEQ ID NO: 43689 - DNA, 20 bp, Artificial Sequence
  MKO10043689_A_Ptms
  gRNA
aggatgaagcagaccccaag

SEQ ID NO: 43690 - DNA, 20 bp, Artificial Sequence
  MKO10043690_A_Ptn
  gRNA
gcccaatccacagtccccgc

SEQ ID NO: 43691 - DNA, 20 bp, Artificial Sequence
  MKO10043691_A_Ptn
  gRNA
cgccagtgcgagtgccctcc

SEQ ID NO: 43692 - DNA, 20 bp, Artificial Sequence
  MKO10043692_A_Ptn
  gRNA
cattgtgcagagctcgcttc

SEQ ID NO: 43693 - DNA, 20 bp, Artificial Sequence
  MKO10043693_A_Ptov1
  gRNA
gcctcgcagtgaacgagcac

SEQ ID NO: 43694 - DNA, 20 bp, Artificial Sequence
  MKO10043694_A_Ptov1
  gRNA
acactcacaggttctcgccc

SEQ ID NO: 43695 - DNA, 20 bp, Artificial Sequence
  MKO10043695_A_Ptov1
  gRNA
cctatcgggccctcttcacc

SEQ ID NO: 43696 - DNA, 20 bp, Artificial Sequence
  MKO10043696_A_Ptp4a1
  gRNA
cttccttccagaaagcggcg

SEQ ID NO: 43697 - DNA, 20 bp, Artificial Sequence
  MKO10043697_A_Ptp4a1
  gRNA
tcctaggaacttaagaagta

SEQ ID NO: 43698 - DNA, 20 bp, Artificial Sequence
  MKO10043698_A_Ptp4a1
  gRNA
ttcacatactcttactattg

SEQ ID NO: 43699 - DNA, 20 bp, Artificial Sequence
  MKO10043699_A_Ptp4a2
  gRNA
agaagtaccgacctaagatg

SEQ ID NO: 43700 - DNA, 20 bp, Artificial Sequence
  MKO10043700_A_Ptp4a2
  gRNA
ctgaagcgtaaccgcatctt

SEQ ID NO: 43701 - DNA, 20 bp, Artificial Sequence
  MKO10043701_A_Ptp4a2
  gRNA
aatgcaagcgcaactagcac

SEQ ID NO: 43702 - DNA, 20 bp, Artificial Sequence
  MKO10043702_A_Ptp4a3
  gRNA
acttcatcccgctctcgatg

SEQ ID NO: 43703 - DNA, 20 bp, Artificial Sequence
  MKO10043703_A_Ptp4a3
  gRNA
ctctcgccctcatcgagagc

SEQ ID NO: 43704 - DNA, 20 bp, Artificial Sequence
  MKO10043704_A_Ptp4a3
  gRNA
gacctatgacaagacccccc

SEQ ID NO: 43705 - DNA, 20 bp, Artificial Sequence
  MKO10043705_A_Ptpdc1
  gRNA
cgcatcatcgagcagttcct

SEQ ID NO: 43706 - DNA, 20 bp, Artificial Sequence
  MKO10043706_A_Ptpdc1
  gRNA
cgtttgcggcatgtcatccc

SEQ ID NO: 43707 - DNA, 20 bp, Artificial Sequence
  MKO10043707_A_Ptpdc1
  gRNA
ataatcaacctgcagcgccc

SEQ ID NO: 43708 - DNA, 20 bp, Artificial Sequence
  MKO10043708_A_Ptplad1
  gRNA
ccctgactttgatcgctggc

SEQ ID NO: 43709 - DNA, 20 bp, Artificial Sequence
  MKO10043709_A_Ptplad1
  gRNA
caatgggcgcttctcttgct

SEQ ID NO: 43710 - DNA, 20 bp, Artificial Sequence
  MKO10043710_A_Ptplad1
  gRNA
gacaatgtgctgcatttcaa

SEQ ID NO: 43711 - DNA, 20 bp, Artificial Sequence
  MKO10043711_A_Ptplad2
  gRNA
cccaatagcgtaaaacgtgt

SEQ ID NO: 43712 - DNA, 20 bp, Artificial Sequence
  MKO10043712_A_Ptplad2
  gRNA
aaacttacctgcaaaaaccg

SEQ ID NO: 43713 - DNA, 20 bp, Artificial Sequence
  MKO10043713_A_Ptplad2
  gRNA
ggtgatcaccagtcaagagg

SEQ ID NO: 43714 - DNA, 20 bp, Artificial Sequence
  MKO10043714_A_Ptpla
  gRNA
gcgcacgtacccggccgtca

SEQ ID NO: 43715 - DNA, 20 bp, Artificial Sequence
  MKO10043715_A_Ptpla
  gRNA
gcaactcaccgatcagacaa

SEQ ID NO: 43716 - DNA, 20 bp, Artificial Sequence
  MKO10043716_A_Ptpla
  gRNA
caggtagtccattgtctgat

SEQ ID NO: 43717 - DNA, 20 bp, Artificial Sequence
  MKO10043717_A_Ptplb
  gRNA
ctggcccatttgatgatata

SEQ ID NO: 43718 - DNA, 20 bp, Artificial Sequence
  MKO10043718_A_Ptplb
  gRNA
aggtggctggtgatagcagt

SEQ ID NO: 43719 - DNA, 20 bp, Artificial Sequence
  MKO10043719_A_Ptplb
  gRNA
atctgccttatatcatcaaa

SEQ ID NO: 43720 - DNA, 20 bp, Artificial Sequence
  MKO10043720_A_Ptpmt1
  gRNA
tagaagcgatcgccaaaatc

SEQ ID NO: 43721 - DNA, 20 bp, Artificial Sequence
  MKO10043721_A_Ptpmt1
  gRNA
cgcgaccagccaccgcgaga

SEQ ID NO: 43722 - DNA, 20 bp, Artificial Sequence
  MKO10043722_A_Ptpmt1
  gRNA
cgatgcggtggtaccagtcg

SEQ ID NO: 43723 - DNA, 20 bp, Artificial Sequence
  MKO10043723_A_Ptpn11
  gRNA
tttgtcgtcaccagtgcgca

SEQ ID NO: 43724 - DNA, 20 bp, Artificial Sequence
  MKO10043724_A_Ptpn11
  gRNA
ccacgtcatgatccgctgtc

SEQ ID NO: 43725 - DNA, 20 bp, Artificial Sequence
  MKO10043725_A_Ptpn11
  gRNA
aaaactgccatcgactcctc

SEQ ID NO: 43726 - DNA, 20 bp, Artificial Sequence
  MKO10043726_A_Ptpn12
  gRNA
tccttcttagatcatcgtga

SEQ ID NO: 43727 - DNA, 20 bp, Artificial Sequence
  MKO10043727_A_Ptpn12
  gRNA
tctatgactgtattcgccaa

SEQ ID NO: 43728 - DNA, 20 bp, Artificial Sequence
  MKO10043728_A_Ptpn12
  gRNA
tcccatctcaaattctcgac

SEQ ID NO: 43729 - DNA, 20 bp, Artificial Sequence
  MKO10043729_A_Ptpn13
  gRNA
ccggtgcggtgaatgctcta

SEQ ID NO: 43730 - DNA, 20 bp, Artificial Sequence
  MKO10043730_A_Ptpn13
  gRNA
ccttagagcattcaccgcac

SEQ ID NO: 43731 - DNA, 20 bp, Artificial Sequence
  MKO10043731_A_Ptpn13
  gRNA
gccattcgagaccgactgag

SEQ ID NO: 43732 - DNA, 20 bp, Artificial Sequence
  MKO10043732_A_Ptpn14
  gRNA
tttatctagacgcactactt

SEQ ID NO: 43733 - DNA, 20 bp, Artificial Sequence
  MKO10043733_A_Ptpn14
  gRNA
gctctacccatctcgcctgc

SEQ ID NO: 43734 - DNA, 20 bp, Artificial Sequence
  MKO10043734_A_Ptpn14
  gRNA
ggaactcttgggaatcaaac

SEQ ID NO: 43735 - DNA, 20 bp, Artificial Sequence
  MKO10043735_A_Ptpn18
  gRNA
gggtccttgcgtcgcaatgt

SEQ ID NO: 43736 - DNA, 20 bp, Artificial Sequence
  MKO10043736_A_Ptpn18
  gRNA
cgtgttcccaagccgactgc

SEQ ID NO: 43737 - DNA, 20 bp, Artificial Sequence
  MKO10043737_A_Ptpn18
  gRNA
ggacattaaggcccgctcag

SEQ ID NO: 43738 - DNA, 20 bp, Artificial Sequence
  MKO10043738_A_Ptpn1
  gRNA
ggtcatgctcaaccgcatca

SEQ ID NO: 43739 - DNA, 20 bp, Artificial Sequence
  MKO10043739_A_Ptpn1
  gRNA
atattacacagtacgacagt

SEQ ID NO: 43740 - DNA, 20 bp, Artificial Sequence
  MKO10043740_A_Ptpn1
  gRNA
gactttgcatgggaagtcgc

SEQ ID NO: 43741 - DNA, 20 bp, Artificial Sequence
  MKO10043741_A_Ptpn20
  gRNA
gaaaatgacgcctacgaagc

SEQ ID NO: 43742 - DNA, 20 bp, Artificial Sequence
  MKO10043742_A_Ptpn20
  gRNA
gtgaccggtctctcagaaac

SEQ ID NO: 43743 - DNA, 20 bp, Artificial Sequence
  MKO10043743_A_Ptpn20
  gRNA
agtatggattcagagactgc

SEQ ID NO: 43744 - DNA, 20 bp, Artificial Sequence
  MKO10043744_A_Ptpn21
  gRNA
aatggcgtgttctaatgtac

SEQ ID NO: 43745 - DNA, 20 bp, Artificial Sequence
  MKO10043745_A_Ptpn21
  gRNA
gaatagcacgccgaagtaga

SEQ ID NO: 43746 - DNA, 20 bp, Artificial Sequence
  MKO10043746_A_Ptpn21
  gRNA
ctggagcctaccgtctactt

SEQ ID NO: 43747 - DNA, 20 bp, Artificial Sequence
  MKO10043747_A_Ptpn22
  gRNA
gatttgggagtaccgcatct

SEQ ID NO: 43748 - DNA, 20 bp, Artificial Sequence
  MKO10043748_A_Ptpn22
  gRNA
gtctctgttaacttccgatg

SEQ ID NO: 43749 - DNA, 20 bp, Artificial Sequence
  MKO10043749_A_Ptpn22
  gRNA
caaaatctatcctacaactg

SEQ ID NO: 43750 - DNA, 20 bp, Artificial Sequence
  MKO10043750_A_Ptpn23
  gRNA
agaatgctattcgcgttgcc

SEQ ID NO: 43751 - DNA, 20 bp, Artificial Sequence
  MKO10043751_A_Ptpn23
  gRNA
accgaggttgtagagaatac

SEQ ID NO: 43752 - DNA, 20 bp, Artificial Sequence
  MKO10043752_A_Ptpn23
  gRNA
ccatgggcacccgactctgt

SEQ ID NO: 43753 - DNA, 20 bp, Artificial Sequence
  MKO10043753_A_Ptpn2
  gRNA
ccatgtcggcaaccatcgag

SEQ ID NO: 43754 - DNA, 20 bp, Artificial Sequence
  MKO10043754_A_Ptpn2
  gRNA
ccatgactatcctcatagag

SEQ ID NO: 43755 - DNA, 20 bp, Artificial Sequence
  MKO10043755_A_Ptpn2
  gRNA
ttcctcgaactcccgctcga

SEQ ID NO: 43756 - DNA, 20 bp, Artificial Sequence
  MKO10043756_A_Ptpn3
  gRNA
tcgcttctggatatggccta

SEQ ID NO: 43757 - DNA, 20 bp, Artificial Sequence
  MKO10043757_A_Ptpn3
  gRNA
ccacctgggtgtgacggaga

SEQ ID NO: 43758 - DNA, 20 bp, Artificial Sequence
  MKO10043758_A_Ptpn3
  gRNA
aatatcttactcgaaaatgc

SEQ ID NO: 43759 - DNA, 20 bp, Artificial Sequence
  MKO10043759_A_Ptpn4
  gRNA
ttgactgagcgagactattt

SEQ ID NO: 43760 - DNA, 20 bp, Artificial Sequence
  MKO10043760_A_Ptpn4
  gRNA
actctaaagttcaaattgta

SEQ ID NO: 43761 - DNA, 20 bp, Artificial Sequence
  MKO10043761_A_Ptpn4
  gRNA
taaacttactgggttatctg

SEQ ID NO: 43762 - DNA, 20 bp, Artificial Sequence
  MKO10043762_A_Ptpn5
  gRNA
acaggcgtcaatcagtgagc

SEQ ID NO: 43763 - DNA, 20 bp, Artificial Sequence
  MKO10043763_A_Ptpn5
  gRNA
gctcacagtgttgaaccatc

SEQ ID NO: 43764 - DNA, 20 bp, Artificial Sequence
  MKO10043764_A_Ptpn5
  gRNA
agagatggaagcaccggacg

SEQ ID NO: 43765 - DNA, 20 bp, Artificial Sequence
  MKO10043765_A_Ptpn6
  gRNA
caaacttctcccctccgtac

SEQ ID NO: 43766 - DNA, 20 bp, Artificial Sequence
  MKO10043766_A_Ptpn6
  gRNA
gacttctatgacctgtacgg

SEQ ID NO: 43767 - DNA, 20 bp, Artificial Sequence
  MKO10043767_A_Ptpn6
  gRNA
tcagggtggacgctatactg

SEQ ID NO: 43768 - DNA, 20 bp, Artificial Sequence
  MKO10043768_A_Ptpn7
  gRNA
gctgtagcgtccagcgtgta

SEQ ID NO: 43769 - DNA, 20 bp, Artificial Sequence
  MKO10043769_A_Ptpn7
  gRNA
accactcacccggatgtagt

SEQ ID NO: 43770 - DNA, 20 bp, Artificial Sequence
  MKO10043770_A_Ptpn7
  gRNA
caccctacacttcctgcgca

SEQ ID NO: 43771 - DNA, 20 bp, Artificial Sequence
  MKO10043771_A_Ptpn9
  gRNA
tagaatgttcgagacccaac

SEQ ID NO: 43772 - DNA, 20 bp, Artificial Sequence
  MKO10043772_A_Ptpn9
  gRNA
ttcttgaagagatcaacaag

SEQ ID NO: 43773 - DNA, 20 bp, Artificial Sequence
  MKO10043773_A_Ptpn9
  gRNA
gccaactttgagctagatct

SEQ ID NO: 43774 - DNA, 20 bp, Artificial Sequence
  MKO10043774_A_Ptpra
  gRNA
agtgcctccagattccgtgc

SEQ ID NO: 43775 - DNA, 20 bp, Artificial Sequence
  MKO10043775_A_Ptpra
  gRNA
ggcactaccatttccccgaa

SEQ ID NO: 43776 - DNA, 20 bp, Artificial Sequence
  MKO10043776_A_Ptpra
  gRNA
gccaccatcaccgcaataat

SEQ ID NO: 43777 - DNA, 20 bp, Artificial Sequence
  MKO10043777_A_Ptprb
  gRNA
cacgtttgtgtcttgaacga

SEQ ID NO: 43778 - DNA, 20 bp, Artificial Sequence
  MKO10043778_A_Ptprb
  gRNA
aaataattgcacctcatacc

SEQ ID NO: 43779 - DNA, 20 bp, Artificial Sequence
  MKO10043779_A_Ptprb
  gRNA
tacctacggatgtaacccca

SEQ ID NO: 43780 - DNA, 20 bp, Artificial Sequence
  MKO10043780_A_Ptprcap
  gRNA
gcttcgcgcccgcactgagc

SEQ ID NO: 43781 - DNA, 20 bp, Artificial Sequence
  MKO10043781_A_Ptprcap
  gRNA
tgggtggtagtacccccctg

SEQ ID NO: 43782 - DNA, 20 bp, Artificial Sequence
  MKO10043782_A_Ptprcap
  gRNA
gcgcgaagccagcggcctgc

SEQ ID NO: 43783 - DNA, 20 bp, Artificial Sequence
  MKO10043783_A_Ptprc
  gRNA
accacatgtttgcttcgttg

SEQ ID NO: 43784 - DNA, 20 bp, Artificial Sequence
  MKO10043784_A_Ptprc
  gRNA
ggcctttggatttgcccttc

SEQ ID NO: 43785 - DNA, 20 bp, Artificial Sequence
  MKO10043785_A_Ptprc
  gRNA
tataaatctatagttgtagc

SEQ ID NO: 43786 - DNA, 20 bp, Artificial Sequence
  MKO10043786_A_Ptprd
  gRNA
cgtattaagcagttacgatc

SEQ ID NO: 43787 - DNA, 20 bp, Artificial Sequence
  MKO10043787_A_Ptprd
  gRNA
ccccaggtttacacgaactc

SEQ ID NO: 43788 - DNA, 20 bp, Artificial Sequence
  MKO10043788_A_Ptprd
  gRNA
gatttctcccacattattcg

SEQ ID NO: 43789 - DNA, 20 bp, Artificial Sequence
  MKO10043789_A_Ptpre
  gRNA
tgactgcaagcgattccgag

SEQ ID NO: 43790 - DNA, 20 bp, Artificial Sequence
  MKO10043790_A_Ptpre
  gRNA
tgctcttctaagatcccgtt

SEQ ID NO: 43791 - DNA, 20 bp, Artificial Sequence
  MKO10043791_A_Ptpre
  gRNA
cactcacattgaactcctct

SEQ ID NO: 43792 - DNA, 20 bp, Artificial Sequence
  MKO10043792_A_Ptprf
  gRNA
aacccaagcctcgaattacg

SEQ ID NO: 43793 - DNA, 20 bp, Artificial Sequence
  MKO10043793_A_Ptprf
  gRNA
atacgaccgttgcttgcagc

SEQ ID NO: 43794 - DNA, 20 bp, Artificial Sequence
  MKO10043794_A_Ptprf
  gRNA
ttcttcatccacgtaattcg

SEQ ID NO: 43795 - DNA, 20 bp, Artificial Sequence
  MKO10043795_A_Ptprg
  gRNA
gacccatactgggcgtattc

SEQ ID NO: 43796 - DNA, 20 bp, Artificial Sequence
  MKO10043796_A_Ptprg
  gRNA
attcatcgccaacgcgagca

SEQ ID NO: 43797 - DNA, 20 bp, Artificial Sequence
  MKO10043797_A_Ptprg
  gRNA
ttagaccaccatgctcgcgt

SEQ ID NO: 43798 - DNA, 20 bp, Artificial Sequence
  MKO10043798_A_Ptprh
  gRNA
cagattcctgtaaccaccgc

SEQ ID NO: 43799 - DNA, 20 bp, Artificial Sequence
  MKO10043799_A_Ptprh
  gRNA
ctctcacctgcggtggttac

SEQ ID NO: 43800 - DNA, 20 bp, Artificial Sequence
  MKO10043800_A_Ptprh
  gRNA
gggtttgtatggttgttctg

SEQ ID NO: 43801 - DNA, 20 bp, Artificial Sequence
  MKO10043801_A_Ptprj
  gRNA
ccgttacaggtcctgtgcgc

SEQ ID NO: 43802 - DNA, 20 bp, Artificial Sequence
  MKO10043802_A_Ptprj
  gRNA
gcgaagctattattggtccc

SEQ ID NO: 43803 - DNA, 20 bp, Artificial Sequence
  MKO10043803_A_Ptprj
  gRNA
actcacccgcacctgcgcac

SEQ ID NO: 43804 - DNA, 20 bp, Artificial Sequence
  MKO10043804_A_Ptprk
  gRNA
acctaccgcaaggataactc

SEQ ID NO: 43805 - DNA, 20 bp, Artificial Sequence
  MKO10043805_A_Ptprk
  gRNA
gacctcttgctaatccaatt

SEQ ID NO: 43806 - DNA, 20 bp, Artificial Sequence
  MKO10043806_A_Ptprk
  gRNA
ggggattacctggtattcat

SEQ ID NO: 43807 - DNA, 20 bp, Artificial Sequence
  MKO10043807_A_Ptprm
  gRNA
ccggagaccccacccgcacg

SEQ ID NO: 43808 - DNA, 20 bp, Artificial Sequence
  MKO10043808_A_Ptprm
  gRNA
agtagtgaaagtcgatgcag

SEQ ID NO: 43809 - DNA, 20 bp, Artificial Sequence
  MKO10043809_A_Ptprm
  gRNA
accttccagtgcagcgccat

SEQ ID NO: 43810 - DNA, 20 bp, Artificial Sequence
  MKO10043810_A_Ptprn2
  gRNA
cagatagcgccgaagggtct

SEQ ID NO: 43811 - DNA, 20 bp, Artificial Sequence
  MKO10043811_A_Ptprn2
  gRNA
ttacagaagctctcccgtac

SEQ ID NO: 43812 - DNA, 20 bp, Artificial Sequence
  MKO10043812_A_Ptprn2
  gRNA
tcggcgctatctgccctacc

SEQ ID NO: 43813 - DNA, 20 bp, Artificial Sequence
  MKO10043813_A_Ptprn
  gRNA
ccgcagactttgttcgcatc

SEQ ID NO: 43814 - DNA, 20 bp, Artificial Sequence
  MKO10043814_A_Ptprn
  gRNA
tgagttagcaattcccctgc

SEQ ID NO: 43815 - DNA, 20 bp, Artificial Sequence
  MKO10043815_A_Ptprn
  gRNA
ggctctggggggcgaagcct

SEQ ID NO: 43816 - DNA, 20 bp, Artificial Sequence
  MKO10043816_A_Ptpro
  gRNA
accgagatcaccaccacgtt

SEQ ID NO: 43817 - DNA, 20 bp, Artificial Sequence
  MKO10043817_A_Ptpro
  gRNA
tacagaggtgaaccctaacg

SEQ ID NO: 43818 - DNA, 20 bp, Artificial Sequence
  MKO10043818_A_Ptpro
  gRNA
aagggaaactcccctacagt

SEQ ID NO: 43819 - DNA, 20 bp, Artificial Sequence
  MKO10043819_A_Ptprq
  gRNA
cttcactactataccgcttc

SEQ ID NO: 43820 - DNA, 20 bp, Artificial Sequence
  MKO10043820_A_Ptprq
  gRNA
gagagcgaagcccgacagtc

SEQ ID NO: 43821 - DNA, 20 bp, Artificial Sequence
  MKO10043821_A_Ptprq
  gRNA
ttaatctcgtatgttgttcc

SEQ ID NO: 43822 - DNA, 20 bp, Artificial Sequence
  MKO10043822_A_Ptprr
  gRNA
ccagcccgatcaggcgccaa

SEQ ID NO: 43823 - DNA, 20 bp, Artificial Sequence
  MKO10043823_A_Ptprr
  gRNA
ttgtgcttgctgccgtgcaa

SEQ ID NO: 43824 - DNA, 20 bp, Artificial Sequence
  MKO10043824_A_Ptprr
  gRNA
cttctcccggggggttgaga

SEQ ID NO: 43825 - DNA, 20 bp, Artificial Sequence
  MKO10043825_A_Ptprs
  gRNA
gcaaagctcaccgtccttcg

SEQ ID NO: 43826 - DNA, 20 bp, Artificial Sequence
  MKO10043826_A_Ptprs
  gRNA
gattggagtgtcgggaggcg

SEQ ID NO: 43827 - DNA, 20 bp, Artificial Sequence
  MKO10043827_A_Ptprs
  gRNA
ccgtggcttaggatcacccg

SEQ ID NO: 43828 - DNA, 20 bp, Artificial Sequence
  MKO10043828_A_Ptprt
  gRNA
cgggctggagcgatctcgac

SEQ ID NO: 43829 - DNA, 20 bp, Artificial Sequence
  MKO10043829_A_Ptprt
  gRNA
cgtatctggcgtcgtcactg

SEQ ID NO: 43830 - DNA, 20 bp, Artificial Sequence
  MKO10043830_A_Ptprt
  gRNA
cctgcgactccaaaacgttg

SEQ ID NO: 43831 - DNA, 20 bp, Artificial Sequence
  MKO10043831_A_Ptpru
  gRNA
cgggtcactcgcctcctcga

SEQ ID NO: 43832 - DNA, 20 bp, Artificial Sequence
  MKO10043832_A_Ptpru
  gRNA
ccggatcccacggccgtcag

SEQ ID NO: 43833 - DNA, 20 bp, Artificial Sequence
  MKO10043833_A_Ptpru
  gRNA
gcgcttacctgcgggagtct

SEQ ID NO: 43834 - DNA, 20 bp, Artificial Sequence
  MKO10043834_A_Ptprv
  gRNA
ttgggcatcccccacactaa

SEQ ID NO: 43835 - DNA, 20 bp, Artificial Sequence
  MKO10043835_A_Ptprv
  gRNA
agccccgctgtacccgctgc

SEQ ID NO: 43836 - DNA, 20 bp, Artificial Sequence
  MKO10043836_A_Ptprv
  gRNA
ctcctgtgccaactcagccg

SEQ ID NO: 43837 - DNA, 20 bp, Artificial Sequence
  MKO10043837_A_Ptprz1
  gRNA
aacacgttcattcacaacac

SEQ ID NO: 43838 - DNA, 20 bp, Artificial Sequence
  MKO10043838_A_Ptprz1
  gRNA
gcaagtctactgctttgatg

SEQ ID NO: 43839 - DNA, 20 bp, Artificial Sequence
  MKO10043839_A_Ptprz1
  gRNA
ttggttctagactgggctta

SEQ ID NO: 43840 - DNA, 20 bp, Artificial Sequence
  MKO10043840_A_Ptrf
  gRNA
tcacgctccatatcgttgag

SEQ ID NO: 43841 - DNA, 20 bp, Artificial Sequence
  MKO10043841_A_Ptrf
  gRNA
cgaggagtcggacgccgtcc

SEQ ID NO: 43842 - DNA, 20 bp, Artificial Sequence
  MKO10043842_A_Ptrf
  gRNA
tgaagtcgtccacgcgccgc

SEQ ID NO: 43843 - DNA, 20 bp, Artificial Sequence
  MKO10043843_A_Ptrh1
  gRNA
cggcgcctcatgaacgtcaa

SEQ ID NO: 43844 - DNA, 20 bp, Artificial Sequence
  MKO10043844_A_Ptrh1
  gRNA
tgcgcccgttgacgttcatg

SEQ ID NO: 43845 - DNA, 20 bp, Artificial Sequence
  MKO10043845_A_Ptrh1
  gRNA
gactgcggaggagatctatc

SEQ ID NO: 43846 - DNA, 20 bp, Artificial Sequence
  MKO10043846_A_Ptrh2
  gRNA
ttcgaactgaccttaaaatg

SEQ ID NO: 43847 - DNA, 20 bp, Artificial Sequence
  MKO10043847_A_Ptrh2
  gRNA
cccccagaactcaacaagtg

SEQ ID NO: 43848 - DNA, 20 bp, Artificial Sequence
  MKO10043848_A_Ptrh2
  gRNA
agttgcttgtggcatgtgcc

SEQ ID NO: 43849 - DNA, 20 bp, Artificial Sequence
  MKO10043849_A_Ptrhd1
  gRNA
caccggcgcactggtagcgc

SEQ ID NO: 43850 - DNA, 20 bp, Artificial Sequence
  MKO10043850_A_Ptrhd1
  gRNA
tcatcgagaccatccgcaca

SEQ ID NO: 43851 - DNA, 20 bp, Artificial Sequence
  MKO10043851_A_Ptrhd1
  gRNA
agaacattgaccacacgctg

SEQ ID NO: 43852 - DNA, 20 bp, Artificial Sequence
  MKO10043852_A_Pts
  gRNA
cacctttatagttgtgcccg

SEQ ID NO: 43853 - DNA, 20 bp, Artificial Sequence
  MKO10043853_A_Pts
  gRNA
tgcaacaatccgaatggcca

SEQ ID NO: 43854 - DNA, 20 bp, Artificial Sequence
  MKO10043854_A_Pts
  gRNA
cctggatgtgccgtactttg

SEQ ID NO: 43855 - DNA, 20 bp, Artificial Sequence
  MKO10043855_A_Pttg1ip
  gRNA
gtaaattgagttccgctcgc

SEQ ID NO: 43856 - DNA, 20 bp, Artificial Sequence
  MKO10043856_A_Pttg1ip
  gRNA
ccagcatacgccccagcgag

SEQ ID NO: 43857 - DNA, 20 bp, Artificial Sequence
  MKO10043857_A_Pttg1ip
  gRNA
gatcatcaccatgtcggtcc

SEQ ID NO: 43858 - DNA, 20 bp, Artificial Sequence
  MKO10043858_A_Pttg1
  gRNA
tgaagaacccggccgccgtt

SEQ ID NO: 43859 - DNA, 20 bp, Artificial Sequence
  MKO10043859_A_Pttg1
  gRNA
ccaaaacagccgaccttgac

SEQ ID NO: 43860 - DNA, 20 bp, Artificial Sequence
  MKO10043860_A_Pttg1
  gRNA
catgagaggcacgccattca

SEQ ID NO: 43861 - DNA, 20 bp, Artificial Sequence
  MKO10043861_A_Ptx3
  gRNA
aaaatcttcttcgaacgcat

SEQ ID NO: 43862 - DNA, 20 bp, Artificial Sequence
  MKO10043862_A_Ptx3
  gRNA
cacgccatgcgactgccgcc

SEQ ID NO: 43863 - DNA, 20 bp, Artificial Sequence
  MKO10043863_A_Ptx3
  gRNA
cccacccgacgacatttccc

SEQ ID NO: 43864 - DNA, 20 bp, Artificial Sequence
  MKO10043864_A_Ptx4
  gRNA
cgtagggagcatatctggct

SEQ ID NO: 43865 - DNA, 20 bp, Artificial Sequence
  MKO10043865_A_Ptx4
  gRNA
agcgtcagaatagcgcctgt

SEQ ID NO: 43866 - DNA, 20 bp, Artificial Sequence
  MKO10043866_A_Ptx4
  gRNA
ctacctgctcttctagtcga

SEQ ID NO: 43867 - DNA, 20 bp, Artificial Sequence
  MKO10043867_A_Puf60
  gRNA
tcccctgacgcccgagcagc

SEQ ID NO: 43868 - DNA, 20 bp, Artificial Sequence
  MKO10043868_A_Puf60
  gRNA
gcagagcatcaagagtgtgc

SEQ ID NO: 43869 - DNA, 20 bp, Artificial Sequence
  MKO10043869_A_Puf60
  gRNA
cagcaggtcaatggccaaca

SEQ ID NO: 43870 - DNA, 20 bp, Artificial Sequence
  MKO10043870_A_Pum1
  gRNA
tgaacactaggtacgctcta

SEQ ID NO: 43871 - DNA, 20 bp, Artificial Sequence
  MKO10043871_A_Pum1
  gRNA
agtccaccatagcgtcgtcc

SEQ ID NO: 43872 - DNA, 20 bp, Artificial Sequence
  MKO10043872_A_Pum1
  gRNA
gcatgaatgttatcccctgt

SEQ ID NO: 43873 - DNA, 20 bp, Artificial Sequence
  MKO10043873_A_Pum2
  gRNA
cgagaatccaatttatcagc

SEQ ID NO: 43874 - DNA, 20 bp, Artificial Sequence
  MKO10043874_A_Pum2
  gRNA
ttcaatgtcccagcctatta

SEQ ID NO: 43875 - DNA, 20 bp, Artificial Sequence
  MKO10043875_A_Pum2
  gRNA
cctgatgattcaacaaaaga

SEQ ID NO: 43876 - DNA, 20 bp, Artificial Sequence
  MKO10043876_A_Pura
  gRNA
cgtggagttccgcgactacc

SEQ ID NO: 43877 - DNA, 20 bp, Artificial Sequence
  MKO10043877_A_Pura
  gRNA
gctcatcgacgactatggag

SEQ ID NO: 43878 - DNA, 20 bp, Artificial Sequence
  MKO10043878_A_Pura
  gRNA
catcgagttccgtgacgctc

SEQ ID NO: 43879 - DNA, 20 bp, Artificial Sequence
  MKO10043879_A_Purb
  gRNA
cgccgagttccgcgactcgc

SEQ ID NO: 43880 - DNA, 20 bp, Artificial Sequence
  MKO10043880_A_Purb
  gRNA
ccaccgccatcgacagcgtg

SEQ ID NO: 43881 - DNA, 20 bp, Artificial Sequence
  MKO10043881_A_Purb
  gRNA
gcgcgtcgcggaactcgatg

SEQ ID NO: 43882 - DNA, 20 bp, Artificial Sequence
  MKO10043882_A_Purg
  gRNA
tttctggatgtccacacgtt

SEQ ID NO: 43883 - DNA, 20 bp, Artificial Sequence
  MKO10043883_A_Purg
  gRNA
cgacccacttgaactcccag

SEQ ID NO: 43884 - DNA, 20 bp, Artificial Sequence
  MKO10043884_A_Purg
  gRNA
ctgttgtcagaccaagcata

SEQ ID NO: 43885 - DNA, 20 bp, Artificial Sequence
  MKO10043885_A_Pus10
  gRNA
tgggtttgaattcaccagcg

SEQ ID NO: 43886 - DNA, 20 bp, Artificial Sequence
  MKO10043886_A_Pus10
  gRNA
gggcgttcccactgatggaa

SEQ ID NO: 43887 - DNA, 20 bp, Artificial Sequence
  MKO10043887_A_Pus10
  gRNA
acccagaggcttcaaccttt

SEQ ID NO: 43888 - DNA, 20 bp, Artificial Sequence
  MKO10043888_A_Pus1
  gRNA
tcggcaaagtattgagccac

SEQ ID NO: 43889 - DNA, 20 bp, Artificial Sequence
  MKO10043889_A_Pus1
  gRNA
cgaagagcccttcgtacgtg

SEQ ID NO: 43890 - DNA, 20 bp, Artificial Sequence
  MKO10043890_A_Pus1
  gRNA
tgtctgttcgagcacaccgc

SEQ ID NO: 43891 - DNA, 20 bp, Artificial Sequence
  MKO10043891_A_Pus3
  gRNA
gcaatatctaaatccgcacg

SEQ ID NO: 43892 - DNA, 20 bp, Artificial Sequence
  MKO10043892_A_Pus3
  gRNA
tcgaccacacctatgatagt

SEQ ID NO: 43893 - DNA, 20 bp, Artificial Sequence
  MKO10043893_A_Pus3
  gRNA
gtgtgcacaagtacaactag

SEQ ID NO: 43894 - DNA, 20 bp, Artificial Sequence
  MKO10043894_A_Pus7l
  gRNA
cccgcgtaactgaaatccga

SEQ ID NO: 43895 - DNA, 20 bp, Artificial Sequence
  MKO10043895_A_Pus7l
  gRNA
aagcaatactttctccgaac

SEQ ID NO: 43896 - DNA, 20 bp, Artificial Sequence
  MKO10043896_A_Pus7l
  gRNA
agcaatcacctatcaatcga

SEQ ID NO: 43897 - DNA, 20 bp, Artificial Sequence
  MKO10043897_A_Pus7
  gRNA
agacactaaccgcaggtact

SEQ ID NO: 43898 - DNA, 20 bp, Artificial Sequence
  MKO10043898_A_Pus7
  gRNA
aagacagtgagagcgtcttc

SEQ ID NO: 43899 - DNA, 20 bp, Artificial Sequence
  MKO10043899_A_Pus7
  gRNA
gcttacctcgatggcaacac

SEQ ID NO: 43900 - DNA, 20 bp, Artificial Sequence
  MKO10043900_A_Pusl1
  gRNA
tgaactctgtcgacccggtc

SEQ ID NO: 43901 - DNA, 20 bp, Artificial Sequence
  MKO10043901_A_Pusl1
  gRNA
catgcaccccggcatcggtg

SEQ ID NO: 43902 - DNA, 20 bp, Artificial Sequence
  MKO10043902_A_Pusl1
  gRNA
gcagtggggttgcggccgtg

SEQ ID NO: 43903 - DNA, 20 bp, Artificial Sequence
  MKO10043903_A_Pvalb
  gRNA
gacagacgtgctcagcgctg

SEQ ID NO: 43904 - DNA, 20 bp, Artificial Sequence
  MKO10043904_A_Pvalb
  gRNA
aaggcgataggagcctttgc

SEQ ID NO: 43905 - DNA, 20 bp, Artificial Sequence
  MKO10043905_A_Pvalb
  gRNA
aacaccttcttcacctcatc

SEQ ID NO: 43906 - DNA, 20 bp, Artificial Sequence
  MKO10043906_A_Pvrl1
  gRNA
ttcacggttgcccgtaggga

SEQ ID NO: 43907 - DNA, 20 bp, Artificial Sequence
  MKO10043907_A_Pvrl1
  gRNA
ggccatctacaacccgacta

SEQ ID NO: 43908 - DNA, 20 bp, Artificial Sequence
  MKO10043908_A_Pvrl1
  gRNA
agtcatcagccgttaccgtt

SEQ ID NO: 43909 - DNA, 20 bp, Artificial Sequence
  MKO10043909_A_Pvrl2
  gRNA
tacgagtgcttcccgaggtc

SEQ ID NO: 43910 - DNA, 20 bp, Artificial Sequence
  MKO10043910_A_Pvrl2
  gRNA
cacccccctgcgggtaccgt

SEQ ID NO: 43911 - DNA, 20 bp, Artificial Sequence
  MKO10043911_A_Pvrl2
  gRNA
gggccgagcggatggcgtca

SEQ ID NO: 43912 - DNA, 20 bp, Artificial Sequence
  MKO10043912_A_Pvrl3
  gRNA
acacaacggggccgggcccg

SEQ ID NO: 43913 - DNA, 20 bp, Artificial Sequence
  MKO10043913_A_Pvrl3
  gRNA
ctccacccttcaagtccgtg

SEQ ID NO: 43914 - DNA, 20 bp, Artificial Sequence
  MKO10043914_A_Pvrl3
  gRNA
agccagtcgcacagattgac

SEQ ID NO: 43915 - DNA, 20 bp, Artificial Sequence
  MKO10043915_A_Pvrl4
  gRNA
ccagctcacccgcggaatat

SEQ ID NO: 43916 - DNA, 20 bp, Artificial Sequence
  MKO10043916_A_Pvrl4
  gRNA
cagcttgcacagcgttgcgc

SEQ ID NO: 43917 - DNA, 20 bp, Artificial Sequence
  MKO10043917_A_Pvrl4
  gRNA
tgtgggtgattcttcggtcc

SEQ ID NO: 43918 - DNA, 20 bp, Artificial Sequence
  MKO10043918_A_Pvr
  gRNA
ctacaattcgacaggcgtct

SEQ ID NO: 43919 - DNA, 20 bp, Artificial Sequence
  MKO10043919_A_Pvr
  gRNA
caagacgcctgtcgaattgt

SEQ ID NO: 43920 - DNA, 20 bp, Artificial Sequence
  MKO10043920_A_Pvr
  gRNA
accctcctggacgaatctct

SEQ ID NO: 43921 - DNA, 20 bp, Artificial Sequence
  MKO10043921_A_Pwp1
  gRNA
cttgtggatccccatcctcc

SEQ ID NO: 43922 - DNA, 20 bp, Artificial Sequence
  MKO10043922_A_Pwp1
  gRNA
tccacaagatgaccgcacac

SEQ ID NO: 43923 - DNA, 20 bp, Artificial Sequence
  MKO10043923_A_Pwp1
  gRNA
actgacaacctcatcgtttg

SEQ ID NO: 43924 - DNA, 20 bp, Artificial Sequence
  MKO10043924_A_Pwp2
  gRNA
ctcgcaatcatcgttgatga

SEQ ID NO: 43925 - DNA, 20 bp, Artificial Sequence
  MKO10043925_A_Pwp2
  gRNA
atgagaccacatgcatcgac

SEQ ID NO: 43926 - DNA, 20 bp, Artificial Sequence
  MKO10043926_A_Pwp2
  gRNA
ctcatcatagggcccgaaat

SEQ ID NO: 43927 - DNA, 20 bp, Artificial Sequence
  MKO10043927_A_Pwwp2a
  gRNA
ctcgtcgtgtcgttccgcct

SEQ ID NO: 43928 - DNA, 20 bp, Artificial Sequence
  MKO10043928_A_Pwwp2a
  gRNA
gcggtgtcgcacctcatccc

SEQ ID NO: 43929 - DNA, 20 bp, Artificial Sequence
  MKO10043929_A_Pwwp2a
  gRNA
gtgcatcgagactgcggctt

SEQ ID NO: 43930 - DNA, 20 bp, Artificial Sequence
  MKO10043930_A_Pwwp2b
  gRNA
acaggtcgtcaacggcgcgc

SEQ ID NO: 43931 - DNA, 20 bp, Artificial Sequence
  MKO10043931_A_Pwwp2b
  gRNA
tgtggcgagcgcagcttcgc

SEQ ID NO: 43932 - DNA, 20 bp, Artificial Sequence
  MKO10043932_A_Pwwp2b
  gRNA
ggtttctggagagtcgccga

SEQ ID NO: 43933 - DNA, 20 bp, Artificial Sequence
  MKO10043933_A_Pxdc1
  gRNA
tctaggactgctcgccatca

SEQ ID NO: 43934 - DNA, 20 bp, Artificial Sequence
  MKO10043934_A_Pxdc1
  gRNA
ggtcatcagcatgccgtgta

SEQ ID NO: 43935 - DNA, 20 bp, Artificial Sequence
  MKO10043935_A_Pxdc1
  gRNA
tccaaaatgtccgtctcaaa

SEQ ID NO: 43936 - DNA, 20 bp, Artificial Sequence
  MKO10043936_A_Pxdn
  gRNA
ctttaatcagatagaaacgc

SEQ ID NO: 43937 - DNA, 20 bp, Artificial Sequence
  MKO10043937_A_Pxdn
  gRNA
atgagatccaatcaattgac

SEQ ID NO: 43938 - DNA, 20 bp, Artificial Sequence
  MKO10043938_A_Pxdn
  gRNA
cattggggatcttcttgatc

SEQ ID NO: 43939 - DNA, 20 bp, Artificial Sequence
  MKO10043939_A_Pxk
  gRNA
gatttgccatgatgacgtta

SEQ ID NO: 43940 - DNA, 20 bp, Artificial Sequence
  MKO10043940_A_Pxk
  gRNA
accgtgagttcatcgctgag

SEQ ID NO: 43941 - DNA, 20 bp, Artificial Sequence
  MKO10043941_A_Pxk
  gRNA
cgacacggtgccgctgacag

SEQ ID NO: 43942 - DNA, 20 bp, Artificial Sequence
  MKO10043942_A_Pxmp2
  gRNA
catcaactatgtgcccctgc

SEQ ID NO: 43943 - DNA, 20 bp, Artificial Sequence
  MKO10043943_A_Pxmp2
  gRNA
ggaccgagtattccatgaag

SEQ ID NO: 43944 - DNA, 20 bp, Artificial Sequence
  MKO10043944_A_Pxmp2
  gRNA
gcgtccaggttgtttgtcac

SEQ ID NO: 43945 - DNA, 20 bp, Artificial Sequence
  MKO10043945_A_Pxmp4
  gRNA
ggccgccccaccgcagctac

SEQ ID NO: 43946 - DNA, 20 bp, Artificial Sequence
  MKO10043946_A_Pxmp4
  gRNA
gcgccgctaccacgctgcgc

SEQ ID NO: 43947 - DNA, 20 bp, Artificial Sequence
  MKO10043947_A_Pxmp4
  gRNA
caaggcgtacaggacgcgtg

SEQ ID NO: 43948 - DNA, 20 bp, Artificial Sequence
  MKO10043948_A_Pxn
  gRNA
gcactcaccgaggtcgtcca

SEQ ID NO: 43949 - DNA, 20 bp, Artificial Sequence
  MKO10043949_A_Pxn
  gRNA
ggaccagccatggacgacct

SEQ ID NO: 43950 - DNA, 20 bp, Artificial Sequence
  MKO10043950_A_Pxn
  gRNA
gaggtggcaccgcaatctcc

SEQ ID NO: 43951 - DNA, 20 bp, Artificial Sequence
  MKO10043951_A_Pxt1
  gRNA
accatgcagcttagacacat

SEQ ID NO: 43952 - DNA, 20 bp, Artificial Sequence
  MKO10043952_A_Pxt1
  gRNA
cccaatgtgtctaagctgca

SEQ ID NO: 43953 - DNA, 20 bp, Artificial Sequence
  MKO10043953_A_Pxt1
  gRNA
gctggtgttcgtgagaggcc

SEQ ID NO: 43954 - DNA, 20 bp, Artificial Sequence
  MKO10043954_A_Pycard
  gRNA
gcgggcacgagatgccatcc

SEQ ID NO: 43955 - DNA, 20 bp, Artificial Sequence
  MKO10043955_A_Pycard
  gRNA
ctatgggcgcatcccacgcg

SEQ ID NO: 43956 - DNA, 20 bp, Artificial Sequence
  MKO10043956_A_Pycard
  gRNA
tccaccctcaggacactttg

SEQ ID NO: 43957 - DNA, 20 bp, Artificial Sequence
  MKO10043957_A_Pycr1
  gRNA
agtcatacatcggatgactt

SEQ ID NO: 43958 - DNA, 20 bp, Artificial Sequence
  MKO10043958_A_Pycr1
  gRNA
accccctcccgtaccacgac

SEQ ID NO: 43959 - DNA, 20 bp, Artificial Sequence
  MKO10043959_A_Pycr1
  gRNA
agacgcctggcagtccgcct

SEQ ID NO: 43960 - DNA, 20 bp, Artificial Sequence
  MKO10043960_A_Pycr2
  gRNA
tgagattggagccgacgtgc

SEQ ID NO: 43961 - DNA, 20 bp, Artificial Sequence
  MKO10043961_A_Pycr2
  gRNA
caggtccatatccggggagc

SEQ ID NO: 43962 - DNA, 20 bp, Artificial Sequence
  MKO10043962_A_Pycr2
  gRNA
cgggcgtgttggtcatgcag

SEQ ID NO: 43963 - DNA, 20 bp, Artificial Sequence
  MKO10043963_A_Pycrl
  gRNA
actcgcaatactcgtgtgtt

SEQ ID NO: 43964 - DNA, 20 bp, Artificial Sequence
  MKO10043964_A_Pycrl
  gRNA
ctatgggggccacttccgcc

SEQ ID NO: 43965 - DNA, 20 bp, Artificial Sequence
  MKO10043965_A_Pycrl
  gRNA
gtggatatctacgtaggact

SEQ ID NO: 43966 - DNA, 20 bp, Artificial Sequence
  MKO10043966_A_Pydc3
  gRNA
aagtgttgaggttgcctgac

SEQ ID NO: 43967 - DNA, 20 bp, Artificial Sequence
  MKO10043967_A_Pydc3
  gRNA
ctttgtgttcgggacaggcg

SEQ ID NO: 43968 - DNA, 20 bp, Artificial Sequence
  MKO10043968_A_Pydc3
  gRNA
ttgtagtcaccacacttctc

SEQ ID NO: 43969 - DNA, 20 bp, Artificial Sequence
  MKO10043969_A_Pydc4
  gRNA
aagcaaattgttcttctctc

SEQ ID NO: 43970 - DNA, 20 bp, Artificial Sequence
  MKO10043970_A_Pydc4
  gRNA
aattaacattgctgacttaa

SEQ ID NO: 43971 - DNA, 20 bp, Artificial Sequence
  MKO10043971_A_Pydc4
  gRNA
tccacttacctccagcctga

SEQ ID NO: 43972 - DNA, 20 bp, Artificial Sequence
  MKO10043972_A_Pygb
  gRNA
atgcgacgaagccacttatc

SEQ ID NO: 43973 - DNA, 20 bp, Artificial Sequence
  MKO10043973_A_Pygb
  gRNA
acggccggagtacatgctgc

SEQ ID NO: 43974 - DNA, 20 bp, Artificial Sequence
  MKO10043974_A_Pygb
  gRNA
ccgcacgctgcagaatacca

SEQ ID NO: 43975 - DNA, 20 bp, Artificial Sequence
  MKO10043975_A_Pygl
  gRNA
cgacccactttgtccccgtc

SEQ ID NO: 43976 - DNA, 20 bp, Artificial Sequence
  MKO10043976_A_Pygl
  gRNA
tacggcattcgttatgaata

SEQ ID NO: 43977 - DNA, 20 bp, Artificial Sequence
  MKO10043977_A_Pygl
  gRNA
ataacgaatgccgtagccat

SEQ ID NO: 43978 - DNA, 20 bp, Artificial Sequence
  MKO10043978_A_Pygm
  gRNA
tatgggatccgctatgagtt

SEQ ID NO: 43979 - DNA, 20 bp, Artificial Sequence
  MKO10043979_A_Pygm
  gRNA
gaggatctactacctgtctt

SEQ ID NO: 43980 - DNA, 20 bp, Artificial Sequence
  MKO10043980_A_Pygm
  gRNA
tgccaagtgggtggacacac

SEQ ID NO: 43981 - DNA, 20 bp, Artificial Sequence
  MKO10043981_A_Pygo1
  gRNA
tcgacgttactctgattgac

SEQ ID NO: 43982 - DNA, 20 bp, Artificial Sequence
  MKO10043982_A_Pygo1
  gRNA
tacttaggcatcgccgccca

SEQ ID NO: 43983 - DNA, 20 bp, Artificial Sequence
  MKO10043983_A_Pygo1
  gRNA
atcgcgctgaagagagttag

SEQ ID NO: 43984 - DNA, 20 bp, Artificial Sequence
  MKO10043984_A_Pygo2
  gRNA
atgggaccaaatccgcctac

SEQ ID NO: 43985 - DNA, 20 bp, Artificial Sequence
  MKO10043985_A_Pygo2
  gRNA
actcgcggtgaaaccacttc

SEQ ID NO: 43986 - DNA, 20 bp, Artificial Sequence
  MKO10043986_A_Pygo2
  gRNA
gcgaagaaagtccaatactc

SEQ ID NO: 43987 - DNA, 20 bp, Artificial Sequence
  MKO10043987_A_Pyhin1
  gRNA
aagaccgtccagcagtattc

SEQ ID NO: 43988 - DNA, 20 bp, Artificial Sequence
  MKO10043988_A_Pyhin1
  gRNA
accttggctattgttgctag

SEQ ID NO: 43989 - DNA, 20 bp, Artificial Sequence
  MKO10043989_A_Pyhin1
  gRNA
tctgtcacgtcatatgaaaa

SEQ ID NO: 43990 - DNA, 20 bp, Artificial Sequence
  MKO10043990_A_Pyroxd1
  gRNA
taagccaaagttaatctacg

SEQ ID NO: 43991 - DNA, 20 bp, Artificial Sequence
  MKO10043991_A_Pyroxd1
  gRNA
cgactttccagcatagtacc

SEQ ID NO: 43992 - DNA, 20 bp, Artificial Sequence
  MKO10043992_A_Pyroxd1
  gRNA
tttccctcgtagattaactt

SEQ ID NO: 43993 - DNA, 20 bp, Artificial Sequence
  MKO10043993_A_Pyroxd2
  gRNA
tgaacaccgcggtcttcgag

SEQ ID NO: 43994 - DNA, 20 bp, Artificial Sequence
  MKO10043994_A_Pyroxd2
  gRNA
cagctgcgcccccaatcaca

SEQ ID NO: 43995 - DNA, 20 bp, Artificial Sequence
  MKO10043995_A_Pyroxd2
  gRNA
cgttgcaggacacaatgggc

SEQ ID NO: 43996 - DNA, 20 bp, Artificial Sequence
  MKO10043996_A_Pyurf
  gRNA
cgcgcactgtctgcagtcgc

SEQ ID NO: 43997 - DNA, 20 bp, Artificial Sequence
  MKO10043997_A_Pyurf
  gRNA
cggcgactgcagacagtgcg

SEQ ID NO: 43998 - DNA, 20 bp, Artificial Sequence
  MKO10043998_A_Pyurf
  gRNA
tgaagcatcgacaaatgaat

SEQ ID NO: 43999 - DNA, 20 bp, Artificial Sequence
  MKO10043999_A_Pyy
  gRNA
tagcagcattgcgaccgtga

SEQ ID NO: 44000 - DNA, 20 bp, Artificial Sequence
  MKO10044000_A_Pyy
  gRNA
ggcgcagggaggcgtagtag

SEQ ID NO: 44001 - DNA, 20 bp, Artificial Sequence
  MKO10044001_A_Pyy
  gRNA
acagcgagaacctccccttc

SEQ ID NO: 44002 - DNA, 20 bp, Artificial Sequence
  MKO10044002_A_Pzp
  gRNA
ttctttatgaagcgctgcgt

SEQ ID NO: 44003 - DNA, 20 bp, Artificial Sequence
  MKO10044003_A_Pzp
  gRNA
ccgcagacaatatgtggtgc

SEQ ID NO: 44004 - DNA, 20 bp, Artificial Sequence
  MKO10044004_A_Pzp
  gRNA
cttacctcaatataaacgac

SEQ ID NO: 44005 - DNA, 20 bp, Artificial Sequence
  MKO10044005_A_Qars
  gRNA
ggtgagaactacaagacgcc

SEQ ID NO: 44006 - DNA, 20 bp, Artificial Sequence
  MKO10044006_A_Qars
  gRNA
ttcagcagatccatggtata

SEQ ID NO: 44007 - DNA, 20 bp, Artificial Sequence
  MKO10044007_A_Qars
  gRNA
tgctcaggtgcttcaccttt

SEQ ID NO: 44008 - DNA, 20 bp, Artificial Sequence
  MKO10044008_A_Qdpr
  gRNA
ttcccagggatgatcggcta

SEQ ID NO: 44009 - DNA, 20 bp, Artificial Sequence
  MKO10044009_A_Qdpr
  gRNA
gttctccaccacatcgatgc

SEQ ID NO: 44010 - DNA, 20 bp, Artificial Sequence
  MKO10044010_A_Qdpr
  gRNA
gagctgatggacggctccct

SEQ ID NO: 44011 - DNA, 20 bp, Artificial Sequence
  MKO10044011_A_Qk
  gRNA
caaccacctcgagcggctgc

SEQ ID NO: 44012 - DNA, 20 bp, Artificial Sequence
  MKO10044012_A_Qk
  gRNA
cttcgtccagcagccgctcg

SEQ ID NO: 44013 - DNA, 20 bp, Artificial Sequence
  MKO10044013_A_Qk
  gRNA
atgtacaatgacacgttaaa

SEQ ID NO: 44014 - DNA, 20 bp, Artificial Sequence
  MKO10044014_A_Qpctl
  gRNA
gcacaatcaataagggacgc

SEQ ID NO: 44015 - DNA, 20 bp, Artificial Sequence
  MKO10044015_A_Qpctl
  gRNA
taccaatgctcctcagtcgc

SEQ ID NO: 44016 - DNA, 20 bp, Artificial Sequence
  MKO10044016_A_Qpctl
  gRNA
ccaaccaaggtcccgctgat

SEQ ID NO: 44017 - DNA, 20 bp, Artificial Sequence
  MKO10044017_A_Qpct
  gRNA
agccatagggagtcctactc

SEQ ID NO: 44018 - DNA, 20 bp, Artificial Sequence
  MKO10044018_A_Qpct
  gRNA
atatttggagtcgtagtggc

SEQ ID NO: 44019 - DNA, 20 bp, Artificial Sequence
  MKO10044019_A_Qpct
  gRNA
ttgctgatagaacgatatcc

SEQ ID NO: 44020 - DNA, 20 bp, Artificial Sequence
  MKO10044020_A_Qprt
  gRNA
acacattgacgtcatctcgt

SEQ ID NO: 44021 - DNA, 20 bp, Artificial Sequence
  MKO10044021_A_Qprt
  gRNA
ctttagaaccggcgagcgtg

SEQ ID NO: 44022 - DNA, 20 bp, Artificial Sequence
  MKO10044022_A_Qprt
  gRNA
taccgggtcggcaccctcgc

SEQ ID NO: 44023 - DNA, 20 bp, Artificial Sequence
  MKO10044023_A_Qrfpr
  gRNA
tgacttgcatcgctgttgag

SEQ ID NO: 44024 - DNA, 20 bp, Artificial Sequence
  MKO10044024_A_Qrfpr
  gRNA
gaggcgttgtacgtgccaca

SEQ ID NO: 44025 - DNA, 20 bp, Artificial Sequence
  MKO10044025_A_Qrfpr
  gRNA
ccgaagggctttcacaatct

SEQ ID NO: 44026 - DNA, 20 bp, Artificial Sequence
  MKO10044026_A_Qrfp
  gRNA
tccgatgtcaccgatgtctg

SEQ ID NO: 44027 - DNA, 20 bp, Artificial Sequence
  MKO10044027_A_Qrfp
  gRNA
gccgctggccttctccgagt

SEQ ID NO: 44028 - DNA, 20 bp, Artificial Sequence
  MKO10044028_A_Qrfp
  gRNA
tgagggacatccccccaact

SEQ ID NO: 44029 - DNA, 20 bp, Artificial Sequence
  MKO10044029_A_Qrich1
  gRNA
gcgacagttgctacgatttc

SEQ ID NO: 44030 - DNA, 20 bp, Artificial Sequence
  MKO10044030_A_Qrich1
  gRNA
gtacagtctgagccgtattc

SEQ ID NO: 44031 - DNA, 20 bp, Artificial Sequence
  MKO10044031_A_Qrich1
  gRNA
actgacatgaaccgcattgt

SEQ ID NO: 44032 - DNA, 20 bp, Artificial Sequence
  MKO10044032_A_Qrich2
  gRNA
aggtggcctcggggtcgatc

SEQ ID NO: 44033 - DNA, 20 bp, Artificial Sequence
  MKO10044033_A_Qrich2
  gRNA
gaaagccgacaagagcgctc

SEQ ID NO: 44034 - DNA, 20 bp, Artificial Sequence
  MKO10044034_A_Qrich2
  gRNA
cctgtagctgctcgtagcgc

SEQ ID NO: 44035 - DNA, 20 bp, Artificial Sequence
  MKO10044035_A_Qrsl1
  gRNA
ttacgcaaagcaggtgaacg

SEQ ID NO: 44036 - DNA, 20 bp, Artificial Sequence
  MKO10044036_A_Qrsl1
  gRNA
ttgggccagttagaaacccc

SEQ ID NO: 44037 - DNA, 20 bp, Artificial Sequence
  MKO10044037_A_Qrsl1
  gRNA
atcagggtgccctactcatg

SEQ ID NO: 44038 - DNA, 20 bp, Artificial Sequence
  MKO10044038_A_Qser1
  gRNA
ctttgcccatctcgaatttc

SEQ ID NO: 44039 - DNA, 20 bp, Artificial Sequence
  MKO10044039_A_Qser1
  gRNA
aggaagactatcaagttcga

SEQ ID NO: 44040 - DNA, 20 bp, Artificial Sequence
  MKO10044040_A_Qser1
  gRNA
gaaaagagcccccagctatt

SEQ ID NO: 44041 - DNA, 20 bp, Artificial Sequence
  MKO10044041_A_Qsox1
  gRNA
tgtcgctccagaaccgttct

SEQ ID NO: 44042 - DNA, 20 bp, Artificial Sequence
  MKO10044042_A_Qsox1
  gRNA
tgcagagagttcaacatcgc

SEQ ID NO: 44043 - DNA, 20 bp, Artificial Sequence
  MKO10044043_A_Qsox1
  gRNA
tggagtcccaccgtgacaca

SEQ ID NO: 44044 - DNA, 20 bp, Artificial Sequence
  MKO10044044_A_Qsox2
  gRNA
ctactcactgaatagggtcc

SEQ ID NO: 44045 - DNA, 20 bp, Artificial Sequence
  MKO10044045_A_Qsox2
  gRNA
ttcttgtgtaggacctgaca

SEQ ID NO: 44046 - DNA, 20 bp, Artificial Sequence
  MKO10044046_A_Qsox2
  gRNA
gccactgtggctatccatga

SEQ ID NO: 44047 - DNA, 20 bp, Artificial Sequence
  MKO10044047_A_Qtrt1
  gRNA
cacttccgctcgccctacga

SEQ ID NO: 44048 - DNA, 20 bp, Artificial Sequence
  MKO10044048_A_Qtrt1
  gRNA
gacgccctcctccgtcacct

SEQ ID NO: 44049 - DNA, 20 bp, Artificial Sequence
  MKO10044049_A_Qtrt1
  gRNA
cgatgcatctgtccagccag

SEQ ID NO: 44050 - DNA, 20 bp, Artificial Sequence
  MKO10044050_A_Qtrtd1
  gRNA
atgcactctagcacttcgtc

SEQ ID NO: 44051 - DNA, 20 bp, Artificial Sequence
  MKO10044051_A_Qtrtd1
  gRNA
tcccatatcaagtgaccgag

SEQ ID NO: 44052 - DNA, 20 bp, Artificial Sequence
  MKO10044052_A_Qtrtd1
  gRNA
gagacagccaagcgacccgt

SEQ ID NO: 44053 - DNA, 20 bp, Artificial Sequence
  MKO10044053_A_R3hcc1l
  gRNA
tcctgcagctcgcgatgccc

SEQ ID NO: 44054 - DNA, 20 bp, Artificial Sequence
  MKO10044054_A_R3hcc1l
  gRNA
aactgcagaaaatccgcaaa

SEQ ID NO: 44055 - DNA, 20 bp, Artificial Sequence
  MKO10044055_A_R3hcc1l
  gRNA
accagcacacgctctagctt

SEQ ID NO: 44056 - DNA, 20 bp, Artificial Sequence
  MKO10044056_A_R3hcc1
  gRNA
agagttcctgcgactatcga

SEQ ID NO: 44057 - DNA, 20 bp, Artificial Sequence
  MKO10044057_A_R3hcc1
  gRNA
caagatccgcccgctcacac

SEQ ID NO: 44058 - DNA, 20 bp, Artificial Sequence
  MKO10044058_A_R3hcc1
  gRNA
ggagagggacttgacccacc

SEQ ID NO: 44059 - DNA, 20 bp, Artificial Sequence
  MKO10044059_A_R3hdm1
  gRNA
cagcggcccccgcagtcatt

SEQ ID NO: 44060 - DNA, 20 bp, Artificial Sequence
  MKO10044060_A_R3hdm1
  gRNA
gctcaaagttaaagctagtt

SEQ ID NO: 44061 - DNA, 20 bp, Artificial Sequence
  MKO10044061_A_R3hdm1
  gRNA
ccctgcagcagagatatcac

SEQ ID NO: 44062 - DNA, 20 bp, Artificial Sequence
  MKO10044062_A_R3hdm2
  gRNA
actgcgcaccaacttgagtt

SEQ ID NO: 44063 - DNA, 20 bp, Artificial Sequence
  MKO10044063_A_R3hdm2
  gRNA
ggacctacctgggtgtctag

SEQ ID NO: 44064 - DNA, 20 bp, Artificial Sequence
  MKO10044064_A_R3hdm2
  gRNA
ccaaggaagatgctatccag

SEQ ID NO: 44065 - DNA, 20 bp, Artificial Sequence
  MKO10044065_A_R3hdm4
  gRNA
tgcgcttgagcacggaccgc

SEQ ID NO: 44066 - DNA, 20 bp, Artificial Sequence
  MKO10044066_A_R3hdm4
  gRNA
caagcgcagccgcatcccaa

SEQ ID NO: 44067 - DNA, 20 bp, Artificial Sequence
  MKO10044067_A_R3hdm4
  gRNA
agagcgagtgctccgttact

SEQ ID NO: 44068 - DNA, 20 bp, Artificial Sequence
  MKO10044068_A_R3hdml
  gRNA
taatggcgtagttgcagacc

SEQ ID NO: 44069 - DNA, 20 bp, Artificial Sequence
  MKO10044069_A_R3hdml
  gRNA
ggttcactcaccggccggaa

SEQ ID NO: 44070 - DNA, 20 bp, Artificial Sequence
  MKO10044070_A_R3hdml
  gRNA
gaagcgccattactcattcc

SEQ ID NO: 44071 - DNA, 20 bp, Artificial Sequence
  MKO10044071_A_Rab10
  gRNA
tgatggtgtgaaatcgctcc

SEQ ID NO: 44072 - DNA, 20 bp, Artificial Sequence
  MKO10044072_A_Rab10
  gRNA
gacaagagagttgtaccgaa

SEQ ID NO: 44073 - DNA, 20 bp, Artificial Sequence
  MKO10044073_A_Rab10
  gRNA
agctgaagacatcctccgaa

SEQ ID NO: 44074 - DNA, 20 bp, Artificial Sequence
  MKO10044074_A_Rab11a
  gRNA
catttcgagtaaatcgagac

SEQ ID NO: 44075 - DNA, 20 bp, Artificial Sequence
  MKO10044075_A_Rab11a
  gRNA
ttctgttgcagatactatcg

SEQ ID NO: 44076 - DNA, 20 bp, Artificial Sequence
  MKO10044076_A_Rab11a
  gRNA
tactcgaaatgagtttaatc

SEQ ID NO: 44077 - DNA, 20 bp, Artificial Sequence
  MKO10044077_A_Rab11b
  gRNA
ttactctgcaggtactaccg

SEQ ID NO: 44078 - DNA, 20 bp, Artificial Sequence
  MKO10044078_A_Rab11b
  gRNA
tgcccgcaagtggtgcttat

SEQ ID NO: 44079 - DNA, 20 bp, Artificial Sequence
  MKO10044079_A_Rab11b
  gRNA
gatgaggcccgtgcctttgc

SEQ ID NO: 44080 - DNA, 20 bp, Artificial Sequence
  MKO10044080_A_Rab11fip1
  gRNA
tatcgagaccgagcaacgcg

SEQ ID NO: 44081 - DNA, 20 bp, Artificial Sequence
  MKO10044081_A_Rab11fip1
  gRNA
cggttccgacctggactccg

SEQ ID NO: 44082 - DNA, 20 bp, Artificial Sequence
  MKO10044082_A_Rab11fip1
  gRNA
cgctctaccgtctgtatcaa

SEQ ID NO: 44083 - DNA, 20 bp, Artificial Sequence
  MKO10044083_A_Rab11fip2
  gRNA
atggctcgtagggcactcgc

SEQ ID NO: 44084 - DNA, 20 bp, Artificial Sequence
  MKO10044084_A_Rab11fip2
  gRNA
ccggagtctgacctacgaag

SEQ ID NO: 44085 - DNA, 20 bp, Artificial Sequence
  MKO10044085_A_Rab11fip2
  gRNA
aagcttagtgttcgtctgtg

SEQ ID NO: 44086 - DNA, 20 bp, Artificial Sequence
  MKO10044086_A_Rab11fip3
  gRNA
gtataggtatctgcaccagt

SEQ ID NO: 44087 - DNA, 20 bp, Artificial Sequence
  MKO10044087_A_Rab11fip3
  gRNA
cctctgcgatggggacggcg

SEQ ID NO: 44088 - DNA, 20 bp, Artificial Sequence
  MKO10044088_A_Rab11fip3
  gRNA
caatgaggcagaactatccc

SEQ ID NO: 44089 - DNA, 20 bp, Artificial Sequence
  MKO10044089_A_Rab11fip4
  gRNA
cgcggagtattcgccatgaa

SEQ ID NO: 44090 - DNA, 20 bp, Artificial Sequence
  MKO10044090_A_Rab11fip4
  gRNA
ctttcatggcgaatactccg

SEQ ID NO: 44091 - DNA, 20 bp, Artificial Sequence
  MKO10044091_A_Rab11fip4
  gRNA
ctggtctcatcgtcggggca

SEQ ID NO: 44092 - DNA, 20 bp, Artificial Sequence
  MKO10044092_A_Rab11fip5
  gRNA
acttgcgtagcttgtttcgg

SEQ ID NO: 44093 - DNA, 20 bp, Artificial Sequence
  MKO10044093_A_Rab11fip5
  gRNA
gatcaaacatgctggcgctc

SEQ ID NO: 44094 - DNA, 20 bp, Artificial Sequence
  MKO10044094_A_Rab11fip5
  gRNA
ggagggggcccggttacccg

SEQ ID NO: 44095 - DNA, 20 bp, Artificial Sequence
  MKO10044095_A_Rab12
  gRNA
gtcatcgaacgtctccttct

SEQ ID NO: 44096 - DNA, 20 bp, Artificial Sequence
  MKO10044096_A_Rab12
  gRNA
cgttcgatgacttgccaaag

SEQ ID NO: 44097 - DNA, 20 bp, Artificial Sequence
  MKO10044097_A_Rab12
  gRNA
ggcttcgcagaagcgcatcc

SEQ ID NO: 44098 - DNA, 20 bp, Artificial Sequence
  MKO10044098_A_Rab13
  gRNA
tgatttcaagatccgaaccg

SEQ ID NO: 44099 - DNA, 20 bp, Artificial Sequence
  MKO10044099_A_Rab13
  gRNA
ataactaccgcctattaccg

SEQ ID NO: 44100 - DNA, 20 bp, Artificial Sequence
  MKO10044100_A_Rab13
  gRNA
ttattgtcttgaatcgttct

SEQ ID NO: 44101 - DNA, 20 bp, Artificial Sequence
  MKO10044101_A_Rab14
  gRNA
catataaccacttaagcagc

SEQ ID NO: 44102 - DNA, 20 bp, Artificial Sequence
  MKO10044102_A_Rab14
  gRNA
ctgtcaaccagctgcttaag

SEQ ID NO: 44103 - DNA, 20 bp, Artificial Sequence
  MKO10044103_A_Rab14
  gRNA
gctgattgtcctcacacaat

SEQ ID NO: 44104 - DNA, 20 bp, Artificial Sequence
  MKO10044104_A_Rab15
  gRNA
tgtccctagtacgctccaga

SEQ ID NO: 44105 - DNA, 20 bp, Artificial Sequence
  MKO10044105_A_Rab15
  gRNA
ccacttcatgatatgctgat

SEQ ID NO: 44106 - DNA, 20 bp, Artificial Sequence
  MKO10044106_A_Rab15
  gRNA
ctatcacaaagcagtactat

SEQ ID NO: 44107 - DNA, 20 bp, Artificial Sequence
  MKO10044107_A_Rab17
  gRNA
gatgctggtcggcaacaaaa

SEQ ID NO: 44108 - DNA, 20 bp, Artificial Sequence
  MKO10044108_A_Rab17
  gRNA
agacgctttggtacttctcc

SEQ ID NO: 44109 - DNA, 20 bp, Artificial Sequence
  MKO10044109_A_Rab17
  gRNA
gcggctatcgtgcacagcac

SEQ ID NO: 44110 - DNA, 20 bp, Artificial Sequence
  MKO10044110_A_Rab18
  gRNA
cctattgttgctgcaagttc

SEQ ID NO: 44111 - DNA, 20 bp, Artificial Sequence
  MKO10044111_A_Rab18
  gRNA
ctgtgcacctctataatagc

SEQ ID NO: 44112 - DNA, 20 bp, Artificial Sequence
  MKO10044112_A_Rab18
  gRNA
ccagaacttgcagcaacaat

SEQ ID NO: 44113 - DNA, 20 bp, Artificial Sequence
  MKO10044113_A_Rab19
  gRNA
cataagcgatgatagctgcg

SEQ ID NO: 44114 - DNA, 20 bp, Artificial Sequence
  MKO10044114_A_Rab19
  gRNA
gtgcgctccctcgagataga

SEQ ID NO: 44115 - DNA, 20 bp, Artificial Sequence
  MKO10044115_A_Rab19
  gRNA
ctttcttgccgtctatctcg

SEQ ID NO: 44116 - DNA, 20 bp, Artificial Sequence
  MKO10044116_A_Rab1b
  gRNA
cctacgccaacgtgaaacag

SEQ ID NO: 44117 - DNA, 20 bp, Artificial Sequence
  MKO10044117_A_Rab1b
  gRNA
atgagccccgcgatagtagc

SEQ ID NO: 44118 - DNA, 20 bp, Artificial Sequence
  MKO10044118_A_Rab1b
  gRNA
cgtggacaacaccacggcca

SEQ ID NO: 44119 - DNA, 20 bp, Artificial Sequence
  MKO10044119_A_Rab1
  gRNA
ccactgtttaacgttattga

SEQ ID NO: 44120 - DNA, 20 bp, Artificial Sequence
  MKO10044120_A_Rab1
  gRNA
ccctcaggatgatacgtata

SEQ ID NO: 44121 - DNA, 20 bp, Artificial Sequence
  MKO10044121_A_Rab1
  gRNA
ccttcaataacgttaaacag

SEQ ID NO: 44122 - DNA, 20 bp, Artificial Sequence
  MKO10044122_A_Rab20
  gRNA
tacctatgatcatgcggcag

SEQ ID NO: 44123 - DNA, 20 bp, Artificial Sequence
  MKO10044123_A_Rab20
  gRNA
ctccgcggctatgcggaagc

SEQ ID NO: 44124 - DNA, 20 bp, Artificial Sequence
  MKO10044124_A_Rab20
  gRNA
cccacggtgctgaccgtgtc

SEQ ID NO: 44125 - DNA, 20 bp, Artificial Sequence
  MKO10044125_A_Rab21
  gRNA
agtaaattgggcccagtgcg

SEQ ID NO: 44126 - DNA, 20 bp, Artificial Sequence
  MKO10044126_A_Rab21
  gRNA
atttactaccgagattcgaa

SEQ ID NO: 44127 - DNA, 20 bp, Artificial Sequence
  MKO10044127_A_Rab21
  gRNA
aaagagtaaaccttgccata

SEQ ID NO: 44128 - DNA, 20 bp, Artificial Sequence
  MKO10044128_A_Rab22a
  gRNA
agcattgtcgttgccatcgc

SEQ ID NO: 44129 - DNA, 20 bp, Artificial Sequence
  MKO10044129_A_Rab22a
  gRNA
tgtgatgtcgtaaacgatga

SEQ ID NO: 44130 - DNA, 20 bp, Artificial Sequence
  MKO10044130_A_Rab22a
  gRNA
ccgaatatcaatccaaccat

SEQ ID NO: 44131 - DNA, 20 bp, Artificial Sequence
  MKO10044131_A_Rab23
  gRNA
ctaccggacgtccgtgaagg

SEQ ID NO: 44132 - DNA, 20 bp, Artificial Sequence
  MKO10044132_A_Rab23
  gRNA
aaacatttcacctcgatagt

SEQ ID NO: 44133 - DNA, 20 bp, Artificial Sequence
  MKO10044133_A_Rab23
  gRNA
ggagtttgatgcaatcacga

SEQ ID NO: 44134 - DNA, 20 bp, Artificial Sequence
  MKO10044134_A_Rab24
  gRNA
gaccatcggggctgctttcg

SEQ ID NO: 44135 - DNA, 20 bp, Artificial Sequence
  MKO10044135_A_Rab24
  gRNA
gctcatggcttcgtagcgct

SEQ ID NO: 44136 - DNA, 20 bp, Artificial Sequence
  MKO10044136_A_Rab24
  gRNA
ggccacgaaagcagccccga

SEQ ID NO: 44137 - DNA, 20 bp, Artificial Sequence
  MKO10044137_A_Rab25
  gRNA
cgatggtggtgcgactgtcg

SEQ ID NO: 44138 - DNA, 20 bp, Artificial Sequence
  MKO10044138_A_Rab25
  gRNA
accccatacaggtactatcg

SEQ ID NO: 44139 - DNA, 20 bp, Artificial Sequence
  MKO10044139_A_Rab25
  gRNA
cacgagcatgacaacaatcg

SEQ ID NO: 44140 - DNA, 20 bp, Artificial Sequence
  MKO10044140_A_Rab26
  gRNA
actgacctgaatgttgtcga

SEQ ID NO: 44141 - DNA, 20 bp, Artificial Sequence
  MKO10044141_A_Rab26
  gRNA
catccttgaagcgcacaagc

SEQ ID NO: 44142 - DNA, 20 bp, Artificial Sequence
  MKO10044142_A_Rab26
  gRNA
ctgcctgcttgtgcgcttca

SEQ ID NO: 44143 - DNA, 20 bp, Artificial Sequence
  MKO10044143_A_Rab27a
  gRNA
ccaggagcatctcaatcgcg

SEQ ID NO: 44144 - DNA, 20 bp, Artificial Sequence
  MKO10044144_A_Rab27a
  gRNA
agtacgcgtgcatctgtagc

SEQ ID NO: 44145 - DNA, 20 bp, Artificial Sequence
  MKO10044145_A_Rab27a
  gRNA
ttggaccgtaccactccctc

SEQ ID NO: 44146 - DNA, 20 bp, Artificial Sequence
  MKO10044146_A_Rab27b
  gRNA
gctgcgcttgtttcgaagta

SEQ ID NO: 44147 - DNA, 20 bp, Artificial Sequence
  MKO10044147_A_Rab27b
  gRNA
ttcgaaacaagcgcagctac

SEQ ID NO: 44148 - DNA, 20 bp, Artificial Sequence
  MKO10044148_A_Rab27b
  gRNA
agcgtcaggaaaagcgttta

SEQ ID NO: 44149 - DNA, 20 bp, Artificial Sequence
  MKO10044149_A_Rab28
  gRNA
ttgagcaaaacacgtagcta

SEQ ID NO: 44150 - DNA, 20 bp, Artificial Sequence
  MKO10044150_A_Rab28
  gRNA
tattgcccactaaagcaacc

SEQ ID NO: 44151 - DNA, 20 bp, Artificial Sequence
  MKO10044151_A_Rab28
  gRNA
aagcagtacaagcagacgat

SEQ ID NO: 44152 - DNA, 20 bp, Artificial Sequence
  MKO10044152_A_Rab2a
  gRNA
gctcggatgataacgattga

SEQ ID NO: 44153 - DNA, 20 bp, Artificial Sequence
  MKO10044153_A_Rab2a
  gRNA
tgaccgtgtgatagaacgaa

SEQ ID NO: 44154 - DNA, 20 bp, Artificial Sequence
  MKO10044154_A_Rab2a
  gRNA
cacttactgtatcccagatc

SEQ ID NO: 44155 - DNA, 20 bp, Artificial Sequence
  MKO10044155_A_Rab2b
  gRNA
accgcttgtcggtaaactga

SEQ ID NO: 44156 - DNA, 20 bp, Artificial Sequence
  MKO10044156_A_Rab2b
  gRNA
gcgggcgtcctctaaccatg

SEQ ID NO: 44157 - DNA, 20 bp, Artificial Sequence
  MKO10044157_A_Rab2b
  gRNA
taatgctgatcgggaataag

SEQ ID NO: 44158 - DNA, 20 bp, Artificial Sequence
  MKO10044158_A_Rab30
  gRNA
cctagtccgaagattcactc

SEQ ID NO: 44159 - DNA, 20 bp, Artificial Sequence
  MKO10044159_A_Rab30
  gRNA
tcgatagtaactttgagtga

SEQ ID NO: 44160 - DNA, 20 bp, Artificial Sequence
  MKO10044160_A_Rab30
  gRNA
gcagcggaaggattcctcac

SEQ ID NO: 44161 - DNA, 20 bp, Artificial Sequence
  MKO10044161_A_Rab31
  gRNA
gctgtacttacccaatagtg

SEQ ID NO: 44162 - DNA, 20 bp, Artificial Sequence
  MKO10044162_A_Rab31
  gRNA
aacattgtgatggcgattgc

SEQ ID NO: 44163 - DNA, 20 bp, Artificial Sequence
  MKO10044163_A_Rab31
  gRNA
gcagatcctcggtagtacat

SEQ ID NO: 44164 - DNA, 20 bp, Artificial Sequence
  MKO10044164_A_Rab32
  gRNA
ggataatataaacatcgacg

SEQ ID NO: 44165 - DNA, 20 bp, Artificial Sequence
  MKO10044165_A_Rab32
  gRNA
ctctcgggtctccggcgccg

SEQ ID NO: 44166 - DNA, 20 bp, Artificial Sequence
  MKO10044166_A_Rab32
  gRNA
tcgccctcaaagttctcaac

SEQ ID NO: 44167 - DNA, 20 bp, Artificial Sequence
  MKO10044167_A_Rab33a
  gRNA
ctaccgcaacgtgcatgccg

SEQ ID NO: 44168 - DNA, 20 bp, Artificial Sequence
  MKO10044168_A_Rab33a
  gRNA
cctgaagtccacaccgatag

SEQ ID NO: 44169 - DNA, 20 bp, Artificial Sequence
  MKO10044169_A_Rab33a
  gRNA
gtgcctggcttgccgactta

SEQ ID NO: 44170 - DNA, 20 bp, Artificial Sequence
  MKO10044170_A_Rab33b
  gRNA
ccgcttccccgaccgcaccg

SEQ ID NO: 44171 - DNA, 20 bp, Artificial Sequence
  MKO10044171_A_Rab33b
  gRNA
cgggaggatgacttcggaga

SEQ ID NO: 44172 - DNA, 20 bp, Artificial Sequence
  MKO10044172_A_Rab33b
  gRNA
tgacttgagaagcgccattc

SEQ ID NO: 44173 - DNA, 20 bp, Artificial Sequence
  MKO10044173_A_Rab34
  gRNA
ccgcgtcacttgcgcctgcc

SEQ ID NO: 44174 - DNA, 20 bp, Artificial Sequence
  MKO10044174_A_Rab34
  gRNA
attgcttccacctactaccg

SEQ ID NO: 44175 - DNA, 20 bp, Artificial Sequence
  MKO10044175_A_Rab34
  gRNA
gtctttgcgcacgtgcaaag

SEQ ID NO: 44176 - DNA, 20 bp, Artificial Sequence
  MKO10044176_A_Rab35
  gRNA
ccatcgcttgacgttgacaa

SEQ ID NO: 44177 - DNA, 20 bp, Artificial Sequence
  MKO10044177_A_Rab35
  gRNA
gacgatgtgtgccgaatatt

SEQ ID NO: 44178 - DNA, 20 bp, Artificial Sequence
  MKO10044178_A_Rab35
  gRNA
cttgaaatccactccgattg

SEQ ID NO: 44179 - DNA, 20 bp, Artificial Sequence
  MKO10044179_A_Rab36
  gRNA
ggtcgttggcgatctctacg

SEQ ID NO: 44180 - DNA, 20 bp, Artificial Sequence
  MKO10044180_A_Rab36
  gRNA
ttcaaagtccacgccgatcg

SEQ ID NO: 44181 - DNA, 20 bp, Artificial Sequence
  MKO10044181_A_Rab36
  gRNA
atcgccaacgaccaccacct

SEQ ID NO: 44182 - DNA, 20 bp, Artificial Sequence
  MKO10044182_A_Rab37
  gRNA
tgcttattaccgagatgctc

SEQ ID NO: 44183 - DNA, 20 bp, Artificial Sequence
  MKO10044183_A_Rab37
  gRNA
gcataatcaccacgtctctc

SEQ ID NO: 44184 - DNA, 20 bp, Artificial Sequence
  MKO10044184_A_Rab37
  gRNA
tgagtatgcccagagagacg

SEQ ID NO: 44185 - DNA, 20 bp, Artificial Sequence
  MKO10044185_A_Rab38
  gRNA
aaaacttctcctcgcactac

SEQ ID NO: 44186 - DNA, 20 bp, Artificial Sequence
  MKO10044186_A_Rab38
  gRNA
tgcaagcgcaccaccgtctc

SEQ ID NO: 44187 - DNA, 20 bp, Artificial Sequence
  MKO10044187_A_Rab38
  gRNA
gccccatctcacatcgccca

SEQ ID NO: 44188 - DNA, 20 bp, Artificial Sequence
  MKO10044188_A_Rab39b
  gRNA
gaaaaaatctacccccacgg

SEQ ID NO: 44189 - DNA, 20 bp, Artificial Sequence
  MKO10044189_A_Rab39b
  gRNA
ccatcactcgcgcctactac

SEQ ID NO: 44190 - DNA, 20 bp, Artificial Sequence
  MKO10044190_A_Rab39b
  gRNA
cctcggtgaagcggcggatc

SEQ ID NO: 44191 - DNA, 20 bp, Artificial Sequence
  MKO10044191_A_Rab39
  gRNA
ttcaacgtttgtcgcgtcct

SEQ ID NO: 44192 - DNA, 20 bp, Artificial Sequence
  MKO10044192_A_Rab39
  gRNA
ggacttcttctcgcgcctgc

SEQ ID NO: 44193 - DNA, 20 bp, Artificial Sequence
  MKO10044193_A_Rab39
  gRNA
gaagaagtccacgccgactg

SEQ ID NO: 44194 - DNA, 20 bp, Artificial Sequence
  MKO10044194_A_Rab3a
  gRNA
ccatctaccgcaacgacaag

SEQ ID NO: 44195 - DNA, 20 bp, Artificial Sequence
  MKO10044195_A_Rab3a
  gRNA
tgcttggcaccggtgaccgc

SEQ ID NO: 44196 - DNA, 20 bp, Artificial Sequence
  MKO10044196_A_Rab3a
  gRNA
caagcagacgtttgaacgtc

SEQ ID NO: 44197 - DNA, 20 bp, Artificial Sequence
  MKO10044197_A_Rab3b
  gRNA
taggcgcctccaagacgacg

SEQ ID NO: 44198 - DNA, 20 bp, Artificial Sequence
  MKO10044198_A_Rab3b
  gRNA
gtctgagagccgcgtcgtct

SEQ ID NO: 44199 - DNA, 20 bp, Artificial Sequence
  MKO10044199_A_Rab3b
  gRNA
gcagcttcacacgcttctca

SEQ ID NO: 44200 - DNA, 20 bp, Artificial Sequence
  MKO10044200_A_Rab3c
  gRNA
aatcgtcggcataacggaac

SEQ ID NO: 44201 - DNA, 20 bp, Artificial Sequence
  MKO10044201_A_Rab3c
  gRNA
ccaatcttgtacagcgttga

SEQ ID NO: 44202 - DNA, 20 bp, Artificial Sequence
  MKO10044202_A_Rab3c
  gRNA
cgagctgttctcctaagcgc

SEQ ID NO: 44203 - DNA, 20 bp, Artificial Sequence
  MKO10044203_A_Rab3d
  gRNA
acccatagctccgcgatagt

SEQ ID NO: 44204 - DNA, 20 bp, Artificial Sequence
  MKO10044204_A_Rab3d
  gRNA
caatgcccaggtaatcctcg

SEQ ID NO: 44205 - DNA, 20 bp, Artificial Sequence
  MKO10044205_A_Rab3d
  gRNA
tgattgtccggtagcgctcc

SEQ ID NO: 44206 - DNA, 20 bp, Artificial Sequence
  MKO10044206_A_Rab3gap1
  gRNA
aggatacgtaccatcttacc

SEQ ID NO: 44207 - DNA, 20 bp, Artificial Sequence
  MKO10044207_A_Rab3gap1
  gRNA
aaactgattggaccctctct

SEQ ID NO: 44208 - DNA, 20 bp, Artificial Sequence
  MKO10044208_A_Rab3gap1
  gRNA
tactcacctctcccactccg

SEQ ID NO: 44209 - DNA, 20 bp, Artificial Sequence
  MKO10044209_A_Rab3gap2
  gRNA
gctcccgagctataaccata

SEQ ID NO: 44210 - DNA, 20 bp, Artificial Sequence
  MKO10044210_A_Rab3gap2
  gRNA
taaacactcacaggttctcg

SEQ ID NO: 44211 - DNA, 20 bp, Artificial Sequence
  MKO10044211_A_Rab3gap2
  gRNA
tacctcttctgactcgccag

SEQ ID NO: 44212 - DNA, 20 bp, Artificial Sequence
  MKO10044212_A_Rab3il1
  gRNA
gggacagatcgacatgctac

SEQ ID NO: 44213 - DNA, 20 bp, Artificial Sequence
  MKO10044213_A_Rab3il1
  gRNA
tttgacgtgagtggcccttt

SEQ ID NO: 44214 - DNA, 20 bp, Artificial Sequence
  MKO10044214_A_Rab3il1
  gRNA
acgcctgcgcagttcctcca

SEQ ID NO: 44215 - DNA, 20 bp, Artificial Sequence
  MKO10044215_A_Rab3ip
  gRNA
ttctccaacatcgcctacgc

SEQ ID NO: 44216 - DNA, 20 bp, Artificial Sequence
  MKO10044216_A_Rab3ip
  gRNA
gcagggcgccaccatcaccg

SEQ ID NO: 44217 - DNA, 20 bp, Artificial Sequence
  MKO10044217_A_Rab3ip
  gRNA
ttagagagaagggctacgaa

SEQ ID NO: 44218 - DNA, 20 bp, Artificial Sequence
  MKO10044218_A_Rab40b
  gRNA
aggatcgtgctgctgcggca

SEQ ID NO: 44219 - DNA, 20 bp, Artificial Sequence
  MKO10044219_A_Rab40b
  gRNA
tctatgacattgccaaccga

SEQ ID NO: 44220 - DNA, 20 bp, Artificial Sequence
  MKO10044220_A_Rab40b
  gRNA
atattccgctcatactccag

SEQ ID NO: 44221 - DNA, 20 bp, Artificial Sequence
  MKO10044221_A_Rab40c
  gRNA
catgccgcatgagcacgata

SEQ ID NO: 44222 - DNA, 20 bp, Artificial Sequence
  MKO10044222_A_Rab40c
  gRNA
gcttgacacgccgtccatcc

SEQ ID NO: 44223 - DNA, 20 bp, Artificial Sequence
  MKO10044223_A_Rab40c
  gRNA
aagatctggagacccaatcg

SEQ ID NO: 44224 - DNA, 20 bp, Artificial Sequence
  MKO10044224_A_Rab42
  gRNA
cgagcagcgcgatccgaaat

SEQ ID NO: 44225 - DNA, 20 bp, Artificial Sequence
  MKO10044225_A_Rab42
  gRNA
caatttcggatcgcgctgct

SEQ ID NO: 44226 - DNA, 20 bp, Artificial Sequence
  MKO10044226_A_Rab42
  gRNA
aagcaactgcaatgtcgacc

SEQ ID NO: 44227 - DNA, 20 bp, Artificial Sequence
  MKO10044227_A_Rab43
  gRNA
gttagtgggcgacgcgagcg

SEQ ID NO: 44228 - DNA, 20 bp, Artificial Sequence
  MKO10044228_A_Rab43
  gRNA
tcttgctgatgtcgtacgca

SEQ ID NO: 44229 - DNA, 20 bp, Artificial Sequence
  MKO10044229_A_Rab43
  gRNA
catggtgaagtcgacaccga

SEQ ID NO: 44230 - DNA, 20 bp, Artificial Sequence
  MKO10044230_A_Rab44
  gRNA
agtcgagccagtaacgcacg

SEQ ID NO: 44231 - DNA, 20 bp, Artificial Sequence
  MKO10044231_A_Rab44
  gRNA
gcttcacccacgtgcgttac

SEQ ID NO: 44232 - DNA, 20 bp, Artificial Sequence
  MKO10044232_A_Rab44
  gRNA
gagcctcttggacccgggtc

SEQ ID NO: 44233 - DNA, 20 bp, Artificial Sequence
  MKO10044233_A_Rab4a
  gRNA
gccattctcttgtgcgaacc

SEQ ID NO: 44234 - DNA, 20 bp, Artificial Sequence
  MKO10044234_A_Rab4a
  gRNA
cctacaatgcgcttactaat

SEQ ID NO: 44235 - DNA, 20 bp, Artificial Sequence
  MKO10044235_A_Rab4a
  gRNA
aaagctacctgaaccgctcc

SEQ ID NO: 44236 - DNA, 20 bp, Artificial Sequence
  MKO10044236_A_Rab4b
  gRNA
caaactccacgccgatagtg

SEQ ID NO: 44237 - DNA, 20 bp, Artificial Sequence
  MKO10044237_A_Rab4b
  gRNA
ctacctaccgaaaccgctcc

SEQ ID NO: 44238 - DNA, 20 bp, Artificial Sequence
  MKO10044238_A_Rab4b
  gRNA
ggcctcacaggtcggtgacg

SEQ ID NO: 44239 - DNA, 20 bp, Artificial Sequence
  MKO10044239_A_Rab5a
  gRNA
ttagcaccaatgtactaccg

SEQ ID NO: 44240 - DNA, 20 bp, Artificial Sequence
  MKO10044240_A_Rab5a
  gRNA
tgtgctcctcggtagtacat

SEQ ID NO: 44241 - DNA, 20 bp, Artificial Sequence
  MKO10044241_A_Rab5a
  gRNA
aatattgtgatagctttgtc

SEQ ID NO: 44242 - DNA, 20 bp, Artificial Sequence
  MKO10044242_A_Rab5b
  gRNA
tttcccaggaaacgtttgct

SEQ ID NO: 44243 - DNA, 20 bp, Artificial Sequence
  MKO10044243_A_Rab5b
  gRNA
gaagatccacaccccgactt

SEQ ID NO: 44244 - DNA, 20 bp, Artificial Sequence
  MKO10044244_A_Rab5b
  gRNA
aaagagcgaaccccagaatc

SEQ ID NO: 44245 - DNA, 20 bp, Artificial Sequence
  MKO10044245_A_Rab5c
  gRNA
cgctagtgcaatgacgatgt

SEQ ID NO: 44246 - DNA, 20 bp, Artificial Sequence
  MKO10044246_A_Rab5c
  gRNA
tgggccccccgatagtacat

SEQ ID NO: 44247 - DNA, 20 bp, Artificial Sequence
  MKO10044247_A_Rab5c
  gRNA
caacatcgtcattgcactag

SEQ ID NO: 44248 - DNA, 20 bp, Artificial Sequence
  MKO10044248_A_Rab6a
  gRNA
attcccgaagtctccgcccg

SEQ ID NO: 44249 - DNA, 20 bp, Artificial Sequence
  MKO10044249_A_Rab6a
  gRNA
ggctccatcatgtccgcggg

SEQ ID NO: 44250 - DNA, 20 bp, Artificial Sequence
  MKO10044250_A_Rab6a
  gRNA
caaaactgtcatacatgaat

SEQ ID NO: 44251 - DNA, 20 bp, Artificial Sequence
  MKO10044251_A_Rab6b
  gRNA
tgtaggttcgactgcagctc

SEQ ID NO: 44252 - DNA, 20 bp, Artificial Sequence
  MKO10044252_A_Rab6b
  gRNA
cagcttcgacaacacctacc

SEQ ID NO: 44253 - DNA, 20 bp, Artificial Sequence
  MKO10044253_A_Rab6b
  gRNA
ggaagacgtctctgatcacg

SEQ ID NO: 44254 - DNA, 20 bp, Artificial Sequence
  MKO10044254_A_Rab7l1
  gRNA
tctatagtagagtcgtgtca

SEQ ID NO: 44255 - DNA, 20 bp, Artificial Sequence
  MKO10044255_A_Rab7l1
  gRNA
acaccttgttggccaagagc

SEQ ID NO: 44256 - DNA, 20 bp, Artificial Sequence
  MKO10044256_A_Rab7l1
  gRNA
tggtcccggctcactgccca

SEQ ID NO: 44257 - DNA, 20 bp, Artificial Sequence
  MKO10044257_A_Rab7
  gRNA
tcccataggtggccacaaag

SEQ ID NO: 44258 - DNA, 20 bp, Artificial Sequence
  MKO10044258_A_Rab7
  gRNA
cgacagacttgttaccatgc

SEQ ID NO: 44259 - DNA, 20 bp, Artificial Sequence
  MKO10044259_A_Rab7
  gRNA
agactggaaccgttcttgac

SEQ ID NO: 44260 - DNA, 20 bp, Artificial Sequence
  MKO10044260_A_Rab8a
  gRNA
ccccaaccagggtatcatgc

SEQ ID NO: 44261 - DNA, 20 bp, Artificial Sequence
  MKO10044261_A_Rab8a
  gRNA
caatcacgacagcctactac

SEQ ID NO: 44262 - DNA, 20 bp, Artificial Sequence
  MKO10044262_A_Rab8a
  gRNA
tgattgttcgaaaccgctcc

SEQ ID NO: 44263 - DNA, 20 bp, Artificial Sequence
  MKO10044263_A_Rab8b
  gRNA
cctcccacagggaattatgc

SEQ ID NO: 44264 - DNA, 20 bp, Artificial Sequence
  MKO10044264_A_Rab8b
  gRNA
agacaagtgtcgaaagagag

SEQ ID NO: 44265 - DNA, 20 bp, Artificial Sequence
  MKO10044265_A_Rab8b
  gRNA
atcagaacgatagaactcga

SEQ ID NO: 44266 - DNA, 20 bp, Artificial Sequence
  MKO10044266_A_Rab9b
  gRNA
taggcaagtaacgactgagg

SEQ ID NO: 44267 - DNA, 20 bp, Artificial Sequence
  MKO10044267_A_Rab9b
  gRNA
cccctatcgtgtgaaaagcc

SEQ ID NO: 44268 - DNA, 20 bp, Artificial Sequence
  MKO10044268_A_Rab9b
  gRNA
agagttcttaaatcgagatc

SEQ ID NO: 44269 - DNA, 20 bp, Artificial Sequence
  MKO10044269_A_Rab9
  gRNA
tcaggcttcggaagcgttct

SEQ ID NO: 44270 - DNA, 20 bp, Artificial Sequence
  MKO10044270_A_Rab9
  gRNA
aagaacgcttccgaagcctg

SEQ ID NO: 44271 - DNA, 20 bp, Artificial Sequence
  MKO10044271_A_Rab9
  gRNA
agttcgaagaattctggcca

SEQ ID NO: 44272 - DNA, 20 bp, Artificial Sequence
  MKO10044272_A_Rabac1
  gRNA
ccagcgcctggtacgcaacg

SEQ ID NO: 44273 - DNA, 20 bp, Artificial Sequence
  MKO10044273_A_Rabac1
  gRNA
gccgggcgaccatccggccc

SEQ ID NO: 44274 - DNA, 20 bp, Artificial Sequence
  MKO10044274_A_Rabac1
  gRNA
tccccctacaggagccacgc

SEQ ID NO: 44275 - DNA, 20 bp, Artificial Sequence
  MKO10044275_A_Rabep1
  gRNA
tcgttctgtcgtgatgccca

SEQ ID NO: 44276 - DNA, 20 bp, Artificial Sequence
  MKO10044276_A_Rabep1
  gRNA
cctcccacagctgtgtccga

SEQ ID NO: 44277 - DNA, 20 bp, Artificial Sequence
  MKO10044277_A_Rabep1
  gRNA
gtcaccttcggacacagctg

SEQ ID NO: 44278 - DNA, 20 bp, Artificial Sequence
  MKO10044278_A_Rabep2
  gRNA
tgccgaactggccggtgccc

SEQ ID NO: 44279 - DNA, 20 bp, Artificial Sequence
  MKO10044279_A_Rabep2
  gRNA
aggcactgtcatcgcagttg

SEQ ID NO: 44280 - DNA, 20 bp, Artificial Sequence
  MKO10044280_A_Rabep2
  gRNA
gagcgagagcaccaaggcgg

SEQ ID NO: 44281 - DNA, 20 bp, Artificial Sequence
  MKO10044281_A_Rabepk
  gRNA
cgatagctgcggacgatgtg

SEQ ID NO: 44282 - DNA, 20 bp, Artificial Sequence
  MKO10044282_A_Rabepk
  gRNA
cacacatcgtccgcagctat

SEQ ID NO: 44283 - DNA, 20 bp, Artificial Sequence
  MKO10044283_A_Rabepk
  gRNA
aatgaagatcttcccgctct

SEQ ID NO: 44284 - DNA, 20 bp, Artificial Sequence
  MKO10044284_A_Rabgap1l
  gRNA
aaagcctccacttcactgcg

SEQ ID NO: 44285 - DNA, 20 bp, Artificial Sequence
  MKO10044285_A_Rabgap1l
  gRNA
tagaccgctttgtcctttct

SEQ ID NO: 44286 - DNA, 20 bp, Artificial Sequence
  MKO10044286_A_Rabgap1l
  gRNA
ttcttccccacgcagtgaag

SEQ ID NO: 44287 - DNA, 20 bp, Artificial Sequence
  MKO10044287_A_Rabgap1
  gRNA
tcagtgccgaatgtatctga

SEQ ID NO: 44288 - DNA, 20 bp, Artificial Sequence
  MKO10044288_A_Rabgap1
  gRNA
actacaacgcagagctcttc

SEQ ID NO: 44289 - DNA, 20 bp, Artificial Sequence
  MKO10044289_A_Rabgap1
  gRNA
ggaagccctaccagaggcac

SEQ ID NO: 44290 - DNA, 20 bp, Artificial Sequence
  MKO10044290_A_Rabgef1
  gRNA
tgagacggaccgagtgacta

SEQ ID NO: 44291 - DNA, 20 bp, Artificial Sequence
  MKO10044291_A_Rabgef1
  gRNA
ccgtctcaatgctggtttgc

SEQ ID NO: 44292 - DNA, 20 bp, Artificial Sequence
  MKO10044292_A_Rabgef1
  gRNA
attccaggatttaagcatcg

SEQ ID NO: 44293 - DNA, 20 bp, Artificial Sequence
  MKO10044293_A_Rabggta
  gRNA
acacgtacagttccgctcat

SEQ ID NO: 44294 - DNA, 20 bp, Artificial Sequence
  MKO10044294_A_Rabggta
  gRNA
tcggcgatttgtagctgcac

SEQ ID NO: 44295 - DNA, 20 bp, Artificial Sequence
  MKO10044295_A_Rabggta
  gRNA
gtcgcctgcctgagcccaac

SEQ ID NO: 44296 - DNA, 20 bp, Artificial Sequence
  MKO10044296_A_Rabggtb
  gRNA
aatagacgccgctcattctc

SEQ ID NO: 44297 - DNA, 20 bp, Artificial Sequence
  MKO10044297_A_Rabggtb
  gRNA
aagtcgtgccagcatgagtg

SEQ ID NO: 44298 - DNA, 20 bp, Artificial Sequence
  MKO10044298_A_Rabggtb
  gRNA
tcatgttatcaacgtagata

SEQ ID NO: 44299 - DNA, 20 bp, Artificial Sequence
  MKO10044299_A_Rabif
  gRNA
gaacgagctcgtgtcagccg

SEQ ID NO: 44300 - DNA, 20 bp, Artificial Sequence
  MKO10044300_A_Rabif
  gRNA
gcacccgagagccacaacgc

SEQ ID NO: 44301 - DNA, 20 bp, Artificial Sequence
  MKO10044301_A_Rabif
  gRNA
tcctgatggtgatctcctcc

SEQ ID NO: 44302 - DNA, 20 bp, Artificial Sequence
  MKO10044302_A_Rabl2
  gRNA
gatcgtcttgccgtctactg

SEQ ID NO: 44303 - DNA, 20 bp, Artificial Sequence
  MKO10044303_A_Rabl2
  gRNA
ctcccgaagttctgcatacc

SEQ ID NO: 44304 - DNA, 20 bp, Artificial Sequence
  MKO10044304_A_Rabl2
  gRNA
tacctggtatgcagaacttc

SEQ ID NO: 44305 - DNA, 20 bp, Artificial Sequence
  MKO10044305_A_Rabl3
  gRNA
ttagtccctattaccaacag

SEQ ID NO: 44306 - DNA, 20 bp, Artificial Sequence
  MKO10044306_A_Rabl3
  gRNA
catctcaaaacttatatcgc

SEQ ID NO: 44307 - DNA, 20 bp, Artificial Sequence
  MKO10044307_A_Rabl3
  gRNA
ctgtgccacaatcaagtgtt

SEQ ID NO: 44308 - DNA, 20 bp, Artificial Sequence
  MKO10044308_A_Rabl5
  gRNA
cgggctgcgaattcgagctc

SEQ ID NO: 44309 - DNA, 20 bp, Artificial Sequence
  MKO10044309_A_Rabl5
  gRNA
aatacttgatgaactccacc

SEQ ID NO: 44310 - DNA, 20 bp, Artificial Sequence
  MKO10044310_A_Rabl5
  gRNA
caccacaaaccgggctccgg

SEQ ID NO: 44311 - DNA, 20 bp, Artificial Sequence
  MKO10044311_A_Rabl6
  gRNA
tttctaggcagagtctgaat

SEQ ID NO: 44312 - DNA, 20 bp, Artificial Sequence
  MKO10044312_A_Rabl6
  gRNA
tgcccgtgttcctgtcaccc

SEQ ID NO: 44313 - DNA, 20 bp, Artificial Sequence
  MKO10044313_A_Rabl6
  gRNA
tgtttgacatcactaagcag

SEQ ID NO: 44314 - DNA, 20 bp, Artificial Sequence
  MKO10044314_A_Rac1
  gRNA
cataccgatctctttcgcca

SEQ ID NO: 44315 - DNA, 20 bp, Artificial Sequence
  MKO10044315_A_Rac1
  gRNA
gagtcttactgtctgcgggt

SEQ ID NO: 44316 - DNA, 20 bp, Artificial Sequence
  MKO10044316_A_Rac1
  gRNA
caatactcctatcatcctcg

SEQ ID NO: 44317 - DNA, 20 bp, Artificial Sequence
  MKO10044317_A_Rac2
  gRNA
ggcagtggtgccgtacctca

SEQ ID NO: 44318 - DNA, 20 bp, Artificial Sequence
  MKO10044318_A_Rac2
  gRNA
aagccccataccaatatcct

SEQ ID NO: 44319 - DNA, 20 bp, Artificial Sequence
  MKO10044319_A_Rac2
  gRNA
ggacagtaagccggtgaacc

SEQ ID NO: 44320 - DNA, 20 bp, Artificial Sequence
  MKO10044320_A_Rac3
  gRNA
gaagcctatcgtagtcttcc

SEQ ID NO: 44321 - DNA, 20 bp, Artificial Sequence
  MKO10044321_A_Rac3
  gRNA
acggctgcgggacaagaagc

SEQ ID NO: 44322 - DNA, 20 bp, Artificial Sequence
  MKO10044322_A_Rac3
  gRNA
gccgcctactgtttgaggat

SEQ ID NO: 44323 - DNA, 20 bp, Artificial Sequence
  MKO10044323_A_Racgap1
  gRNA
cctcgaagtccttcacaacc

SEQ ID NO: 44324 - DNA, 20 bp, Artificial Sequence
  MKO10044324_A_Racgap1
  gRNA
gtcctcagttgaattcatcc

SEQ ID NO: 44325 - DNA, 20 bp, Artificial Sequence
  MKO10044325_A_Racgap1
  gRNA
gctctcgctttcctcaaccg

SEQ ID NO: 44326 - DNA, 20 bp, Artificial Sequence
  MKO10044326_A_Rad17
  gRNA
gtctgtccgacaatgagccg

SEQ ID NO: 44327 - DNA, 20 bp, Artificial Sequence
  MKO10044327_A_Rad17
  gRNA
atccacccacggctcattgt

SEQ ID NO: 44328 - DNA, 20 bp, Artificial Sequence
  MKO10044328_A_Rad17
  gRNA
gattaacccattcttgtact

SEQ ID NO: 44329 - DNA, 20 bp, Artificial Sequence
  MKO10044329_A_Rad18
  gRNA
taatcgcctcttagatgaac

SEQ ID NO: 44330 - DNA, 20 bp, Artificial Sequence
  MKO10044330_A_Rad18
  gRNA
aaacttaccacgcaacaagt

SEQ ID NO: 44331 - DNA, 20 bp, Artificial Sequence
  MKO10044331_A_Rad18
  gRNA
ccgagccgcgatggcctccg

SEQ ID NO: 44332 - DNA, 20 bp, Artificial Sequence
  MKO10044332_A_Rad1
  gRNA
ctatcccaaagattccgact

SEQ ID NO: 44333 - DNA, 20 bp, Artificial Sequence
  MKO10044333_A_Rad1
  gRNA
ggaagcctcggttatctgtc

SEQ ID NO: 44334 - DNA, 20 bp, Artificial Sequence
  MKO10044334_A_Rad1
  gRNA
cagggactttgactgcgctt

SEQ ID NO: 44335 - DNA, 20 bp, Artificial Sequence
  MKO10044335_A_Rad21l
  gRNA
cttgtagtcgaacatagttc

SEQ ID NO: 44336 - DNA, 20 bp, Artificial Sequence
  MKO10044336_A_Rad21l
  gRNA
gggttgttcgaatctacaac

SEQ ID NO: 44337 - DNA, 20 bp, Artificial Sequence
  MKO10044337_A_Rad21l
  gRNA
atgttcgactacaagaccac

SEQ ID NO: 44338 - DNA, 20 bp, Artificial Sequence
  MKO10044338_A_Rad21
  gRNA
ggaaatgatggcggtatatt

SEQ ID NO: 44339 - DNA, 20 bp, Artificial Sequence
  MKO10044339_A_Rad21
  gRNA
aggtgttgtcgatctacctg

SEQ ID NO: 44340 - DNA, 20 bp, Artificial Sequence
  MKO10044340_A_Rad21
  gRNA
atgcttcattacagtctgcg

SEQ ID NO: 44341 - DNA, 20 bp, Artificial Sequence
  MKO10044341_A_Rad23a
  gRNA
ccgctcccgctcgtagccca

SEQ ID NO: 44342 - DNA, 20 bp, Artificial Sequence
  MKO10044342_A_Rad23a
  gRNA
ctacgagcgggagcgggttg

SEQ ID NO: 44343 - DNA, 20 bp, Artificial Sequence
  MKO10044343_A_Rad23a
  gRNA
ctgggggtgccgggataccc

SEQ ID NO: 44344 - DNA, 20 bp, Artificial Sequence
  MKO10044344_A_Rad23b
  gRNA
attaacttctgacctgctac

SEQ ID NO: 44345 - DNA, 20 bp, Artificial Sequence
  MKO10044345_A_Rad23b
  gRNA
aaagatgcctttccggtagc

SEQ ID NO: 44346 - DNA, 20 bp, Artificial Sequence
  MKO10044346_A_Rad23b
  gRNA
ccttacctgtcagctggtgc

SEQ ID NO: 44347 - DNA, 20 bp, Artificial Sequence
  MKO10044347_A_Rad50
  gRNA
ccgagatcagattacgagta

SEQ ID NO: 44348 - DNA, 20 bp, Artificial Sequence
  MKO10044348_A_Rad50
  gRNA
agcccagttagcgtcttcgc

SEQ ID NO: 44349 - DNA, 20 bp, Artificial Sequence
  MKO10044349_A_Rad50
  gRNA
cattcacatctcgaaactgc

SEQ ID NO: 44350 - DNA, 20 bp, Artificial Sequence
  MKO10044350_A_Rad51ap1
  gRNA
aagaggtctagaagttgccc

SEQ ID NO: 44351 - DNA, 20 bp, Artificial Sequence
  MKO10044351_A_Rad51ap1
  gRNA
caagtcaaaaactgtgccaa

SEQ ID NO: 44352 - DNA, 20 bp, Artificial Sequence
  MKO10044352_A_Rad51ap1
  gRNA
tagggtggctttagatgaca

SEQ ID NO: 44353 - DNA, 20 bp, Artificial Sequence
  MKO10044353_A_Rad51ap2
  gRNA
tgtctctgtcgcgccccgcg

SEQ ID NO: 44354 - DNA, 20 bp, Artificial Sequence
  MKO10044354_A_Rad51ap2
  gRNA
tctcagtgtcaatagcgtta

SEQ ID NO: 44355 - DNA, 20 bp, Artificial Sequence
  MKO10044355_A_Rad51ap2
  gRNA
agacatgcagtcgtccaatt

SEQ ID NO: 44356 - DNA, 20 bp, Artificial Sequence
  MKO10044356_A_Rad51b
  gRNA
acacgaaccgtttgcatctg

SEQ ID NO: 44357 - DNA, 20 bp, Artificial Sequence
  MKO10044357_A_Rad51b
  gRNA
gtctactaccctgtgcgcct

SEQ ID NO: 44358 - DNA, 20 bp, Artificial Sequence
  MKO10044358_A_Rad51b
  gRNA
accgtgcaatgcttcatcca

SEQ ID NO: 44359 - DNA, 20 bp, Artificial Sequence
  MKO10044359_A_Rad51c
  gRNA
cttcgtactcgattactaaa

SEQ ID NO: 44360 - DNA, 20 bp, Artificial Sequence
  MKO10044360_A_Rad51c
  gRNA
catttagtaatcgagtacga

SEQ ID NO: 44361 - DNA, 20 bp, Artificial Sequence
  MKO10044361_A_Rad51c
  gRNA
tctcgagcaagagcataccc

SEQ ID NO: 44362 - DNA, 20 bp, Artificial Sequence
  MKO10044362_A_Rad51d
  gRNA
gcatacaaaccttccgatgc

SEQ ID NO: 44363 - DNA, 20 bp, Artificial Sequence
  MKO10044363_A_Rad51d
  gRNA
cccaggtagcggcaaaaccc

SEQ ID NO: 44364 - DNA, 20 bp, Artificial Sequence
  MKO10044364_A_Rad51d
  gRNA
atagagatctgcgccattta

SEQ ID NO: 44365 - DNA, 20 bp, Artificial Sequence
  MKO10044365_A_Rad51
  gRNA
gctactgctagcagccgctc

SEQ ID NO: 44366 - DNA, 20 bp, Artificial Sequence
  MKO10044366_A_Rad51
  gRNA
ggccatgtacattgacaccg

SEQ ID NO: 44367 - DNA, 20 bp, Artificial Sequence
  MKO10044367_A_Rad51
  gRNA
gacacagatctgtcatacgt

SEQ ID NO: 44368 - DNA, 20 bp, Artificial Sequence
  MKO10044368_A_Rad52
  gRNA
ggtattcatccgctgtatac

SEQ ID NO: 44369 - DNA, 20 bp, Artificial Sequence
  MKO10044369_A_Rad52
  gRNA
attatagagccagtatacag

SEQ ID NO: 44370 - DNA, 20 bp, Artificial Sequence
  MKO10044370_A_Rad52
  gRNA
cgtagaacttgccattgttg

SEQ ID NO: 44371 - DNA, 20 bp, Artificial Sequence
  MKO10044371_A_Rad54b
  gRNA
gatgctattcttattgtaag

SEQ ID NO: 44372 - DNA, 20 bp, Artificial Sequence
  MKO10044372_A_Rad54b
  gRNA
ggatttgaactgcatacacc

SEQ ID NO: 44373 - DNA, 20 bp, Artificial Sequence
  MKO10044373_A_Rad54b
  gRNA
gtccttcacattgaaagatt

SEQ ID NO: 44374 - DNA, 20 bp, Artificial Sequence
  MKO10044374_A_Rad54l2
  gRNA
gatgaaaagagtagtcgaga

SEQ ID NO: 44375 - DNA, 20 bp, Artificial Sequence
  MKO10044375_A_Rad54l2
  gRNA
cggatgctaggatcttgcct

SEQ ID NO: 44376 - DNA, 20 bp, Artificial Sequence
  MKO10044376_A_Rad54l2
  gRNA
gtttcacagcccgtgccaac

SEQ ID NO: 44377 - DNA, 20 bp, Artificial Sequence
  MKO10044377_A_Rad54l
  gRNA
tcccctgggctctcgtgcat

SEQ ID NO: 44378 - DNA, 20 bp, Artificial Sequence
  MKO10044378_A_Rad54l
  gRNA
tcgtgcccttcatgaccctc

SEQ ID NO: 44379 - DNA, 20 bp, Artificial Sequence
  MKO10044379_A_Rad54l
  gRNA
taaacactcactactgtccc

SEQ ID NO: 44380 - DNA, 20 bp, Artificial Sequence
  MKO10044380_A_Rad9a
  gRNA
gtccattcgctatcccgaat

SEQ ID NO: 44381 - DNA, 20 bp, Artificial Sequence
  MKO10044381_A_Rad9a
  gRNA
gatagagctcgtccccgatt

SEQ ID NO: 44382 - DNA, 20 bp, Artificial Sequence
  MKO10044382_A_Rad9a
  gRNA
gctggggtgcgcaataagtg

SEQ ID NO: 44383 - DNA, 20 bp, Artificial Sequence
  MKO10044383_A_Rad9b
  gRNA
gactctgcatttatccgctc

SEQ ID NO: 44384 - DNA, 20 bp, Artificial Sequence
  MKO10044384_A_Rad9b
  gRNA
aattcttgtcattccacgta

SEQ ID NO: 44385 - DNA, 20 bp, Artificial Sequence
  MKO10044385_A_Rad9b
  gRNA
gtgcacagtagtcgccagag

SEQ ID NO: 44386 - DNA, 20 bp, Artificial Sequence
  MKO10044386_A_Radil
  gRNA
gtttgctagacggtgtgcgc

SEQ ID NO: 44387 - DNA, 20 bp, Artificial Sequence
  MKO10044387_A_Radil
  gRNA
ctggtacagcgagtaacgca

SEQ ID NO: 44388 - DNA, 20 bp, Artificial Sequence
  MKO10044388_A_Radil
  gRNA
tgccgccccaagacgggcga

SEQ ID NO: 44389 - DNA, 20 bp, Artificial Sequence
  MKO10044389_A_Rae1
  gRNA
tattcttacaggttcgctgc

SEQ ID NO: 44390 - DNA, 20 bp, Artificial Sequence
  MKO10044390_A_Rae1
  gRNA
ggccagtgcttgacgtctgc

SEQ ID NO: 44391 - DNA, 20 bp, Artificial Sequence
  MKO10044391_A_Rae1
  gRNA
tctcacctgtgctatctgaa

SEQ ID NO: 44392 - DNA, 20 bp, Artificial Sequence
  MKO10044392_A_Raet1a
  gRNA
gaactcaccatccagcccgt

SEQ ID NO: 44393 - DNA, 20 bp, Artificial Sequence
  MKO10044393_A_Raet1a
  gRNA
gtagttgcttatgtgccatt

SEQ ID NO: 44394 - DNA, 20 bp, Artificial Sequence
  MKO10044394_A_Raet1a
  gRNA
ttataggtgcagctcacagc

SEQ ID NO: 44395 - DNA, 20 bp, Artificial Sequence
  MKO10044395_A_Raet1b
  gRNA
agatgaagtgaagtgcttcg

SEQ ID NO: 44396 - DNA, 20 bp, Artificial Sequence
  MKO10044396_A_Raet1b
  gRNA
taaacattcccccacttcag

SEQ ID NO: 44397 - DNA, 20 bp, Artificial Sequence
  MKO10044397_A_Raet1b
  gRNA
gaactcaccatccagcccgt

SEQ ID NO: 44398 - DNA, 20 bp, Artificial Sequence
  MKO10044398_A_Raet1c
  gRNA
tgagcacttcacgtcacacc

SEQ ID NO: 44399 - DNA, 20 bp, Artificial Sequence
  MKO10044399_A_Raet1c
  gRNA
gaactcaccatccagcccgt

SEQ ID NO: 44400 - DNA, 20 bp, Artificial Sequence
  MKO10044400_A_Raet1c
  gRNA
acctctgaacgatttgtgcc

SEQ ID NO: 44401 - DNA, 20 bp, Artificial Sequence
  MKO10044401_A_Raet1d
  gRNA
agatgaagtgaagtgcttcg

SEQ ID NO: 44402 - DNA, 20 bp, Artificial Sequence
  MKO10044402_A_Raet1d
  gRNA
taaacattcccccacttcag

SEQ ID NO: 44403 - DNA, 20 bp, Artificial Sequence
  MKO10044403_A_Raet1d
  gRNA
gaactcaccatctagcccgt

SEQ ID NO: 44404 - DNA, 20 bp, Artificial Sequence
  MKO10044404_A_Raet1e
  gRNA
tgagcacttcacgtcacacc

SEQ ID NO: 44405 - DNA, 20 bp, Artificial Sequence
  MKO10044405_A_Raet1e
  gRNA
gaactcaccatccagcccgt

SEQ ID NO: 44406 - DNA, 20 bp, Artificial Sequence
  MKO10044406_A_Raet1e
  gRNA
acctctgaacgatttgtgcc

SEQ ID NO: 44407 - DNA, 20 bp, Artificial Sequence
  MKO10044407_A_Raf1
  gRNA
gattctcgcatccgacgcat

SEQ ID NO: 44408 - DNA, 20 bp, Artificial Sequence
  MKO10044408_A_Raf1
  gRNA
accgatgccgcctctctgat

SEQ ID NO: 44409 - DNA, 20 bp, Artificial Sequence
  MKO10044409_A_Raf1
  gRNA
gacatcgaaatccatttagc

SEQ ID NO: 44410 - DNA, 20 bp, Artificial Sequence
  MKO10044410_A_Rag1
  gRNA
taagccccctcattgccgag

SEQ ID NO: 44411 - DNA, 20 bp, Artificial Sequence
  MKO10044411_A_Rag1
  gRNA
ccggagatgtttgtccagcg

SEQ ID NO: 44412 - DNA, 20 bp, Artificial Sequence
  MKO10044412_A_Rag1
  gRNA
actctgtgacaccacccgtt

SEQ ID NO: 44413 - DNA, 20 bp, Artificial Sequence
  MKO10044413_A_Rag2
  gRNA
attgacgtggtgtatagtcg

SEQ ID NO: 44414 - DNA, 20 bp, Artificial Sequence
  MKO10044414_A_Rag2
  gRNA
tcgactatacaccacgtcaa

SEQ ID NO: 44415 - DNA, 20 bp, Artificial Sequence
  MKO10044415_A_Rag2
  gRNA
ttgagctccgttgaatagaa

SEQ ID NO: 44416 - DNA, 20 bp, Artificial Sequence
  MKO10044416_A_Rai14
  gRNA
gagttgtcaatgttctccgc

SEQ ID NO: 44417 - DNA, 20 bp, Artificial Sequence
  MKO10044417_A_Rai14
  gRNA
gacacataccggaagaatct

SEQ ID NO: 44418 - DNA, 20 bp, Artificial Sequence
  MKO10044418_A_Rai14
  gRNA
ttgccccacagacaaacgag

SEQ ID NO: 44419 - DNA, 20 bp, Artificial Sequence
  MKO10044419_A_Rai1
  gRNA
ttgaggccgcggccctttcg

SEQ ID NO: 44420 - DNA, 20 bp, Artificial Sequence
  MKO10044420_A_Rai1
  gRNA
tcctcgccagagtagcgccc

SEQ ID NO: 44421 - DNA, 20 bp, Artificial Sequence
  MKO10044421_A_Rai1
  gRNA
tgtaccagctgtcacgagcc

SEQ ID NO: 44422 - DNA, 20 bp, Artificial Sequence
  MKO10044422_A_Rai2
  gRNA
acctacgttatgacgacaca

SEQ ID NO: 44423 - DNA, 20 bp, Artificial Sequence
  MKO10044423_A_Rai2
  gRNA
agtcccgccagctaccctct

SEQ ID NO: 44424 - DNA, 20 bp, Artificial Sequence
  MKO10044424_A_Rai2
  gRNA
gccttgtgtcgtcataacgt

SEQ ID NO: 44425 - DNA, 20 bp, Artificial Sequence
  MKO10044425_A_Rala
  gRNA
tcgcagctaccgcggacttc

SEQ ID NO: 44426 - DNA, 20 bp, Artificial Sequence
  MKO10044426_A_Rala
  gRNA
aacgcgcgccaacgttgaca

SEQ ID NO: 44427 - DNA, 20 bp, Artificial Sequence
  MKO10044427_A_Rala
  gRNA
tctgcagttcatgtacgacg

SEQ ID NO: 44428 - DNA, 20 bp, Artificial Sequence
  MKO10044428_A_Ralbp1
  gRNA
cctggaccacgtcattgcga

SEQ ID NO: 44429 - DNA, 20 bp, Artificial Sequence
  MKO10044429_A_Ralbp1
  gRNA
cctctctactgcgtcaacca

SEQ ID NO: 44430 - DNA, 20 bp, Artificial Sequence
  MKO10044430_A_Ralbp1
  gRNA
ccatgatgtacgacggcgtc

SEQ ID NO: 44431 - DNA, 20 bp, Artificial Sequence
  MKO10044431_A_Ralb
  gRNA
tgcaaagacccgcgccaatg

SEQ ID NO: 44432 - DNA, 20 bp, Artificial Sequence
  MKO10044432_A_Ralb
  gRNA
ggatggccgcatagtcctcc

SEQ ID NO: 44433 - DNA, 20 bp, Artificial Sequence
  MKO10044433_A_Ralb
  gRNA
gtgcctgtggacgaggcccg

SEQ ID NO: 44434 - DNA, 20 bp, Artificial Sequence
  MKO10044434_A_Ralgapa1
  gRNA
catcgctgatgaattctttc

SEQ ID NO: 44435 - DNA, 20 bp, Artificial Sequence
  MKO10044435_A_Ralgapa1
  gRNA
aggtcacaagtctcaaagag

SEQ ID NO: 44436 - DNA, 20 bp, Artificial Sequence
  MKO10044436_A_Ralgapa1
  gRNA
cagaaagaattcatcagcga

SEQ ID NO: 44437 - DNA, 20 bp, Artificial Sequence
  MKO10044437_A_Ralgapa2
  gRNA
catcgaaagaaaattcgttc

SEQ ID NO: 44438 - DNA, 20 bp, Artificial Sequence
  MKO10044438_A_Ralgapa2
  gRNA
cagggaataataagtcacaa

SEQ ID NO: 44439 - DNA, 20 bp, Artificial Sequence
  MKO10044439_A_Ralgapb
  gRNA
ccatcatggctcgagaaacc

SEQ ID NO: 44440 - DNA, 20 bp, Artificial Sequence
  MKO10044440_A_Ralgapb
  gRNA
gcttcccaacacctccttat

SEQ ID NO: 44441 - DNA, 20 bp, Artificial Sequence
  MKO10044441_A_Ralgapb
  gRNA
agattgctccgctttacata

SEQ ID NO: 44442 - DNA, 20 bp, Artificial Sequence
  MKO10044442_A_Ralgds
  gRNA
cccgcagtgtgagaacgagt

SEQ ID NO: 44443 - DNA, 20 bp, Artificial Sequence
  MKO10044443_A_Ralgds
  gRNA
ctgcggtccgccgtcctcac

SEQ ID NO: 44444 - DNA, 20 bp, Artificial Sequence
  MKO10044444_A_Ralgds
  gRNA
cacttacccctagccagcgc

SEQ ID NO: 44445 - DNA, 20 bp, Artificial Sequence
  MKO10044445_A_Ralgps1
  gRNA
cagtcttgcccccaacgtcg

SEQ ID NO: 44446 - DNA, 20 bp, Artificial Sequence
  MKO10044446_A_Ralgps1
  gRNA
ctttacccggaggttcaacc

SEQ ID NO: 44447 - DNA, 20 bp, Artificial Sequence
  MKO10044447_A_Ralgps1
  gRNA
gtcacttacggcaaactcct

SEQ ID NO: 44448 - DNA, 20 bp, Artificial Sequence
  MKO10044448_A_Ralgps2
  gRNA
tatcgcagccactgtttccg

SEQ ID NO: 44449 - DNA, 20 bp, Artificial Sequence
  MKO10044449_A_Ralgps2
  gRNA
tgcttgcctgcccgttcatt

SEQ ID NO: 44450 - DNA, 20 bp, Artificial Sequence
  MKO10044450_A_Ralgps2
  gRNA
ccttagcagtcttaatatag

SEQ ID NO: 44451 - DNA, 20 bp, Artificial Sequence
  MKO10044451_A_Ralyl
  gRNA
cctgcgtttgctcctgtaca

SEQ ID NO: 44452 - DNA, 20 bp, Artificial Sequence
  MKO10044452_A_Ralyl
  gRNA
gacccctgtcagccctgtac

SEQ ID NO: 44453 - DNA, 20 bp, Artificial Sequence
  MKO10044453_A_Ralyl
  gRNA
tgtagacttacccaacagac

SEQ ID NO: 44454 - DNA, 20 bp, Artificial Sequence
  MKO10044454_A_Raly
  gRNA
gtccaacatcgatgccctgt

SEQ ID NO: 44455 - DNA, 20 bp, Artificial Sequence
  MKO10044455_A_Raly
  gRNA
tcgcttcaccggaactgccc

SEQ ID NO: 44456 - DNA, 20 bp, Artificial Sequence
  MKO10044456_A_Raly
  gRNA
tcgcttggaacagattgctg

SEQ ID NO: 44457 - DNA, 20 bp, Artificial Sequence
  MKO10044457_A_Ramp1
  gRNA
cgcaccgcgggaggccccgc

SEQ ID NO: 44458 - DNA, 20 bp, Artificial Sequence
  MKO10044458_A_Ramp1
  gRNA
tgcgcactcccgctctgttc

SEQ ID NO: 44459 - DNA, 20 bp, Artificial Sequence
  MKO10044459_A_Ramp1
  gRNA
gcctcccgcggtgcggcctc

SEQ ID NO: 44460 - DNA, 20 bp, Artificial Sequence
  MKO10044460_A_Ramp2
  gRNA
ggcacaacgctgtcggccgc

SEQ ID NO: 44461 - DNA, 20 bp, Artificial Sequence
  MKO10044461_A_Ramp2
  gRNA
agcagttcgcaaagtgtatc

SEQ ID NO: 44462 - DNA, 20 bp, Artificial Sequence
  MKO10044462_A_Ramp2
  gRNA
ggcgcgctctacccggagcg

SEQ ID NO: 44463 - DNA, 20 bp, Artificial Sequence
  MKO10044463_A_Ramp3
  gRNA
tctcgttgcagccgcatacc

SEQ ID NO: 44464 - DNA, 20 bp, Artificial Sequence
  MKO10044464_A_Ramp3
  gRNA
ctcacacgatgaactccgac

SEQ ID NO: 44465 - DNA, 20 bp, Artificial Sequence
  MKO10044465_A_Ramp3
  gRNA
agtactcatcccactgatcg

SEQ ID NO: 44466 - DNA, 20 bp, Artificial Sequence
  MKO10044466_A_Ranbp10
  gRNA
tatcgccttcacagatctcc

SEQ ID NO: 44467 - DNA, 20 bp, Artificial Sequence
  MKO10044467_A_Ranbp10
  gRNA
tgaatgtgggaccataaggc

SEQ ID NO: 44468 - DNA, 20 bp, Artificial Sequence
  MKO10044468_A_Ranbp10
  gRNA
ggggtgggtggcacgtacag

SEQ ID NO: 44469 - DNA, 20 bp, Artificial Sequence
  MKO10044469_A_Ranbp17
  gRNA
cgatgacttgaatcagagct

SEQ ID NO: 44470 - DNA, 20 bp, Artificial Sequence
  MKO10044470_A_Ranbp17
  gRNA
acggtggaacactgcataat

SEQ ID NO: 44471 - DNA, 20 bp, Artificial Sequence
  MKO10044471_A_Ranbp17
  gRNA
atgacaaagggcgccagctt

SEQ ID NO: 44472 - DNA, 20 bp, Artificial Sequence
  MKO10044472_A_Ranbp1
  gRNA
aggccacctactatagtggt

SEQ ID NO: 44473 - DNA, 20 bp, Artificial Sequence
  MKO10044473_A_Ranbp1
  gRNA
ggaccatccgccttcttatg

SEQ ID NO: 44474 - DNA, 20 bp, Artificial Sequence
  MKO10044474_A_Ranbp1
  gRNA
taccctagttacaccaatga

SEQ ID NO: 44475 - DNA, 20 bp, Artificial Sequence
  MKO10044475_A_Ranbp2
  gRNA
ctttacgttcaagtttagaa

SEQ ID NO: 44476 - DNA, 20 bp, Artificial Sequence
  MKO10044476_A_Ranbp2
  gRNA
ccgttcaaataaaagattga

SEQ ID NO: 44477 - DNA, 20 bp, Artificial Sequence
  MKO10044477_A_Ranbp2
  gRNA
tcctgccatttataagttaa

SEQ ID NO: 44478 - DNA, 20 bp, Artificial Sequence
  MKO10044478_A_Ranbp3l
  gRNA
ctttgtctcaaacgcgtctg

SEQ ID NO: 44479 - DNA, 20 bp, Artificial Sequence
  MKO10044479_A_Ranbp3l
  gRNA
cgggacatcagtgaatgacg

SEQ ID NO: 44480 - DNA, 20 bp, Artificial Sequence
  MKO10044480_A_Ranbp3l
  gRNA
gtttcttgagaaagcgtgta

SEQ ID NO: 44481 - DNA, 20 bp, Artificial Sequence
  MKO10044481_A_Ranbp3
  gRNA
atgtccgctcacgcttgaca

SEQ ID NO: 44482 - DNA, 20 bp, Artificial Sequence
  MKO10044482_A_Ranbp3
  gRNA
gcccccctgtcaagcgtgag

SEQ ID NO: 44483 - DNA, 20 bp, Artificial Sequence
  MKO10044483_A_Ranbp3
  gRNA
ttccttaccttctccggctt

SEQ ID NO: 44484 - DNA, 20 bp, Artificial Sequence
  MKO10044484_A_Ranbp6
  gRNA
atgtcgacacgccggattaa

SEQ ID NO: 44485 - DNA, 20 bp, Artificial Sequence
  MKO10044485_A_Ranbp6
  gRNA
caaaagccgtcgtagcagtg

SEQ ID NO: 44486 - DNA, 20 bp, Artificial Sequence
  MKO10044486_A_Ranbp6
  gRNA
tacagctttgttgcgaacca

SEQ ID NO: 44487 - DNA, 20 bp, Artificial Sequence
  MKO10044487_A_Ranbp9
  gRNA
tattgctttcaccgacttac

SEQ ID NO: 44488 - DNA, 20 bp, Artificial Sequence
  MKO10044488_A_Ranbp9
  gRNA
gtgaacatgaatagactacc

SEQ ID NO: 44489 - DNA, 20 bp, Artificial Sequence
  MKO10044489_A_Ranbp9
  gRNA
agccacgcatccaataccag

SEQ ID NO: 44490 - DNA, 20 bp, Artificial Sequence
  MKO10044490_A_Rangap1
  gRNA
gtccaaatgcgttgtcactg

SEQ ID NO: 44491 - DNA, 20 bp, Artificial Sequence
  MKO10044491_A_Rangap1
  gRNA
gacctcagtgacaacgcatt

SEQ ID NO: 44492 - DNA, 20 bp, Artificial Sequence
  MKO10044492_A_Rangap1
  gRNA
caacacggtgggcgtggaag

SEQ ID NO: 44493 - DNA, 20 bp, Artificial Sequence
  MKO10044493_A_Rangrf
  gRNA
tccttacgggggctgattga

SEQ ID NO: 44494 - DNA, 20 bp, Artificial Sequence
  MKO10044494_A_Rangrf
  gRNA
cctctccagtgacctccgac

SEQ ID NO: 44495 - DNA, 20 bp, Artificial Sequence
  MKO10044495_A_Rangrf
  gRNA
ttaccctaaggtgtcacagc

SEQ ID NO: 44496 - DNA, 20 bp, Artificial Sequence
  MKO10044496_A_Ran
  gRNA
cgcgatggctactacatcca

SEQ ID NO: 44497 - DNA, 20 bp, Artificial Sequence
  MKO10044497_A_Ran
  gRNA
ttgaatctagctcgtcctgg

SEQ ID NO: 44498 - DNA, 20 bp, Artificial Sequence
  MKO10044498_A_Ran
  gRNA
ccccgcagccaccctgggcg

SEQ ID NO: 44499 - DNA, 20 bp, Artificial Sequence
  MKO10044499_A_Rap1a
  gRNA
cctgcaggttccaatgattt

SEQ ID NO: 44500 - DNA, 20 bp, Artificial Sequence
  MKO10044500_A_Rap1a
  gRNA
ttacggttcctgcagtgtcc

SEQ ID NO: 44501 - DNA, 20 bp, Artificial Sequence
  MKO10044501_A_Rap1a
  gRNA
gtcaaagatcaacgttaatg

SEQ ID NO: 44502 - DNA, 20 bp, Artificial Sequence
  MKO10044502_A_Rap1b
  gRNA
cttgtccgttcttcatgtac

SEQ ID NO: 44503 - DNA, 20 bp, Artificial Sequence
  MKO10044503_A_Rap1b
  gRNA
ttcgcaggttccaatgattc

SEQ ID NO: 44504 - DNA, 20 bp, Artificial Sequence
  MKO10044504_A_Rap1b
  gRNA
ctataagaatcttctatcgt

SEQ ID NO: 44505 - DNA, 20 bp, Artificial Sequence
  MKO10044505_A_Rap1gap2
  gRNA
tgcggagttcttcgagatgc

SEQ ID NO: 44506 - DNA, 20 bp, Artificial Sequence
  MKO10044506_A_Rap1gap2
  gRNA
cccgtaccccagcattgatg

SEQ ID NO: 44507 - DNA, 20 bp, Artificial Sequence
  MKO10044507_A_Rap1gap2
  gRNA
gagggtcacatccgagctgt

SEQ ID NO: 44508 - DNA, 20 bp, Artificial Sequence
  MKO10044508_A_Rap1gap
  gRNA
gcgacgataccatgagcggc

SEQ ID NO: 44509 - DNA, 20 bp, Artificial Sequence
  MKO10044509_A_Rap1gap
  gRNA
gctgcgcttccggccgctca

SEQ ID NO: 44510 - DNA, 20 bp, Artificial Sequence
  MKO10044510_A_Rap1gap
  gRNA
ctcaccacacactctgtcga

SEQ ID NO: 44511 - DNA, 20 bp, Artificial Sequence
  MKO10044511_A_Rap1gds1
  gRNA
aagtgctgcttcaaacgggc

SEQ ID NO: 44512 - DNA, 20 bp, Artificial Sequence
  MKO10044512_A_Rap1gds1
  gRNA
tgcaaatctgttgacgccac

SEQ ID NO: 44513 - DNA, 20 bp, Artificial Sequence
  MKO10044513_A_Rap1gds1
  gRNA
ccgtttgaagcagcacttcc

SEQ ID NO: 44514 - DNA, 20 bp, Artificial Sequence
  MKO10044514_A_Rap2a
  gRNA
ccgcatggacgcgaactgct

SEQ ID NO: 44515 - DNA, 20 bp, Artificial Sequence
  MKO10044515_A_Rap2a
  gRNA
ccgagcagttcgcgtccatg

SEQ ID NO: 44516 - DNA, 20 bp, Artificial Sequence
  MKO10044516_A_Rap2a
  gRNA
cggatgctattgtatgttac

SEQ ID NO: 44517 - DNA, 20 bp, Artificial Sequence
  MKO10044517_A_Rap2b
  gRNA
ggcgcctcacaggatcacgc

SEQ ID NO: 44518 - DNA, 20 bp, Artificial Sequence
  MKO10044518_A_Rap2b
  gRNA
gcagcagccctcgtcgccgt

SEQ ID NO: 44519 - DNA, 20 bp, Artificial Sequence
  MKO10044519_A_Rap2b
  gRNA
cgggtcgtacttctcgatga

SEQ ID NO: 44520 - DNA, 20 bp, Artificial Sequence
  MKO10044520_A_Rap2c
  gRNA
ggcaaactgctcggttcctg

SEQ ID NO: 44521 - DNA, 20 bp, Artificial Sequence
  MKO10044521_A_Rap2c
  gRNA
gattaaccaaactatacacc

SEQ ID NO: 44522 - DNA, 20 bp, Artificial Sequence
  MKO10044522_A_Rap2c
  gRNA
gaaagtcccactcatcctag

SEQ ID NO: 44523 - DNA, 20 bp, Artificial Sequence
  MKO10044523_A_Rapgef1
  gRNA
cggcgcagcccggaaatgtc

SEQ ID NO: 44524 - DNA, 20 bp, Artificial Sequence
  MKO10044524_A_Rapgef1
  gRNA
accatcggataaggttggcg

SEQ ID NO: 44525 - DNA, 20 bp, Artificial Sequence
  MKO10044525_A_Rapgef1
  gRNA
ctggtatactcggctataac

SEQ ID NO: 44526 - DNA, 20 bp, Artificial Sequence
  MKO10044526_A_Rapgef2
  gRNA
tcagagtcaaccgccgtctc

SEQ ID NO: 44527 - DNA, 20 bp, Artificial Sequence
  MKO10044527_A_Rapgef2
  gRNA
tcttactgacatcgtcatat

SEQ ID NO: 44528 - DNA, 20 bp, Artificial Sequence
  MKO10044528_A_Rapgef2
  gRNA
tgtagcatcaccagcgactc

SEQ ID NO: 44529 - DNA, 20 bp, Artificial Sequence
  MKO10044529_A_Rapgef3
  gRNA
aggtctcccggacgtggttc

SEQ ID NO: 44530 - DNA, 20 bp, Artificial Sequence
  MKO10044530_A_Rapgef3
  gRNA
ctcaccgatatagtcgcaga

SEQ ID NO: 44531 - DNA, 20 bp, Artificial Sequence
  MKO10044531_A_Rapgef3
  gRNA
accagctagtgttcgagcac

SEQ ID NO: 44532 - DNA, 20 bp, Artificial Sequence
  MKO10044532_A_Rapgef4
  gRNA
ttgagtccgcgagtgaacac

SEQ ID NO: 44533 - DNA, 20 bp, Artificial Sequence
  MKO10044533_A_Rapgef4
  gRNA
gaagtccggccatatactgt

SEQ ID NO: 44534 - DNA, 20 bp, Artificial Sequence
  MKO10044534_A_Rapgef4
  gRNA
gcagaaataccgacagtata

SEQ ID NO: 44535 - DNA, 20 bp, Artificial Sequence
  MKO10044535_A_Rapgef5
  gRNA
gtactgcgaatttgaaagag

SEQ ID NO: 44536 - DNA, 20 bp, Artificial Sequence
  MKO10044536_A_Rapgef5
  gRNA
caatggccatagatctacac

SEQ ID NO: 44537 - DNA, 20 bp, Artificial Sequence
  MKO10044537_A_Rapgef5
  gRNA
tgcactcatccgaagaaaac

SEQ ID NO: 44538 - DNA, 20 bp, Artificial Sequence
  MKO10044538_A_Rapgef6
  gRNA
gcacgctatgagagatacag

SEQ ID NO: 44539 - DNA, 20 bp, Artificial Sequence
  MKO10044539_A_Rapgef6
  gRNA
tggaaatactatcaaacctc

SEQ ID NO: 44540 - DNA, 20 bp, Artificial Sequence
  MKO10044540_A_Rapgef6
  gRNA
aaacttacctgcaaggagga

SEQ ID NO: 44541 - DNA, 20 bp, Artificial Sequence
  MKO10044541_A_Rapgefl1
  gRNA
aggggccggccacattatca

SEQ ID NO: 44542 - DNA, 20 bp, Artificial Sequence
  MKO10044542_A_Rapgefl1
  gRNA
cgctcttccgacacttccgc

SEQ ID NO: 44543 - DNA, 20 bp, Artificial Sequence
  MKO10044543_A_Rapgefl1
  gRNA
tgcttccgacccagcccctc

SEQ ID NO: 44544 - DNA, 20 bp, Artificial Sequence
  MKO10044544_A_Raph1
  gRNA
aggtttagttgttctattag

SEQ ID NO: 44545 - DNA, 20 bp, Artificial Sequence
  MKO10044545_A_Raph1
  gRNA
gtggtcaaatcaagctcttg

SEQ ID NO: 44546 - DNA, 20 bp, Artificial Sequence
  MKO10044546_A_Raph1
  gRNA
aaaaagatctcctcttcgcc

SEQ ID NO: 44547 - DNA, 20 bp, Artificial Sequence
  MKO10044547_A_Rapsn
  gRNA
cgttgttgtgggcatagcgc

SEQ ID NO: 44548 - DNA, 20 bp, Artificial Sequence
  MKO10044548_A_Rapsn
  gRNA
gcttctcattgctgcgcgcc

SEQ ID NO: 44549 - DNA, 20 bp, Artificial Sequence
  MKO10044549_A_Rapsn
  gRNA
gcagagcttgtcaacgacta

SEQ ID NO: 44550 - DNA, 20 bp, Artificial Sequence
  MKO10044550_A_Rara
  gRNA
gaaggttcgcaaagcgcacc

SEQ ID NO: 44551 - DNA, 20 bp, Artificial Sequence
  MKO10044551_A_Rara
  gRNA
ctgcagaaatgtttcgacgt

SEQ ID NO: 44552 - DNA, 20 bp, Artificial Sequence
  MKO10044552_A_Rara
  gRNA
gagctacacgctgacgcctg

SEQ ID NO: 44553 - DNA, 20 bp, Artificial Sequence
  MKO10044553_A_Rarb
  gRNA
ggtagcccgatgacttgtcc

SEQ ID NO: 44554 - DNA, 20 bp, Artificial Sequence
  MKO10044554_A_Rarb
  gRNA
ccaagtccaatcggacccgg

SEQ ID NO: 44555 - DNA, 20 bp, Artificial Sequence
  MKO10044555_A_Rarb
  gRNA
tgacgcagttcttatctcga

SEQ ID NO: 44556 - DNA, 20 bp, Artificial Sequence
  MKO10044556_A_Rarg
  gRNA
ctacaaaagtgtttcgaagt

SEQ ID NO: 44557 - DNA, 20 bp, Artificial Sequence
  MKO10044557_A_Rarg
  gRNA
cgaccagatcacgctgctca

SEQ ID NO: 44558 - DNA, 20 bp, Artificial Sequence
  MKO10044558_A_Rarg
  gRNA
gggtaccatctcctccgagc

SEQ ID NO: 44559 - DNA, 20 bp, Artificial Sequence
  MKO10044559_A_Rarres1
  gRNA
ccgttaatgtaacgtgcgca

SEQ ID NO: 44560 - DNA, 20 bp, Artificial Sequence
  MKO10044560_A_Rarres1
  gRNA
ccgtgcgcacgttacattaa

SEQ ID NO: 44561 - DNA, 20 bp, Artificial Sequence
  MKO10044561_A_Rarres1
  gRNA
tcggcagctcatacgtgatg

SEQ ID NO: 44562 - DNA, 20 bp, Artificial Sequence
  MKO10044562_A_Rarres2
  gRNA
gcgctgggtctcgctgagtt

SEQ ID NO: 44563 - DNA, 20 bp, Artificial Sequence
  MKO10044563_A_Rarres2
  gRNA
ctctgtccacaccgatctct

SEQ ID NO: 44564 - DNA, 20 bp, Artificial Sequence
  MKO10044564_A_Rarres2
  gRNA
ccccacggctacttcctacc

SEQ ID NO: 44565 - DNA, 20 bp, Artificial Sequence
  MKO10044565_A_Rars2
  gRNA
gtgattgttgtcttctagta

SEQ ID NO: 44566 - DNA, 20 bp, Artificial Sequence
  MKO10044566_A_Rars2
  gRNA
tcagcttaagtgtgatacag

SEQ ID NO: 44567 - DNA, 20 bp, Artificial Sequence
  MKO10044567_A_Rars2
  gRNA
tctcagatcttcccaagaag

SEQ ID NO: 44568 - DNA, 20 bp, Artificial Sequence
  MKO10044568_A_Rars
  gRNA
gctgacttggtgtcacgatc

SEQ ID NO: 44569 - DNA, 20 bp, Artificial Sequence
  MKO10044569_A_Rars
  gRNA
ctctgactgctgagatcgac

SEQ ID NO: 44570 - DNA, 20 bp, Artificial Sequence
  MKO10044570_A_Rars
  gRNA
taacatcaacagccgcctgc

SEQ ID NO: 44571 - DNA, 20 bp, Artificial Sequence
  MKO10044571_A_Rasa1
  gRNA
acacgccttctatcttctac

SEQ ID NO: 44572 - DNA, 20 bp, Artificial Sequence
  MKO10044572_A_Rasa1
  gRNA
ctatagcagaagaacgcctc

SEQ ID NO: 44573 - DNA, 20 bp, Artificial Sequence
  MKO10044573_A_Rasa1
  gRNA
cgtgactgtaataacctatt

SEQ ID NO: 44574 - DNA, 20 bp, Artificial Sequence
  MKO10044574_A_Rasa2
  gRNA
ggaagaagtttatcgcaccc

SEQ ID NO: 44575 - DNA, 20 bp, Artificial Sequence
  MKO10044575_A_Rasa2
  gRNA
ttacaaagagatcttcgtat

SEQ ID NO: 44576 - DNA, 20 bp, Artificial Sequence
  MKO10044576_A_Rasa2
  gRNA
gctcattcagtcttaactca

SEQ ID NO: 44577 - DNA, 20 bp, Artificial Sequence
  MKO10044577_A_Rasa3
  gRNA
acaggtggcggaaactccga

SEQ ID NO: 44578 - DNA, 20 bp, Artificial Sequence
  MKO10044578_A_Rasa3
  gRNA
cttaccgtgcagcgagtttg

SEQ ID NO: 44579 - DNA, 20 bp, Artificial Sequence
  MKO10044579_A_Rasa3
  gRNA
gagtgacttctcgacaattt

SEQ ID NO: 44580 - DNA, 20 bp, Artificial Sequence
  MKO10044580_A_Rasa4
  gRNA
ccttcccgatcacatcgtcc

SEQ ID NO: 44581 - DNA, 20 bp, Artificial Sequence
  MKO10044581_A_Rasa4
  gRNA
ctgtccatccgaatcgtaga

SEQ ID NO: 44582 - DNA, 20 bp, Artificial Sequence
  MKO10044582_A_Rasa4
  gRNA
cgcgctagcctctcacccaa

SEQ ID NO: 44583 - DNA, 20 bp, Artificial Sequence
  MKO10044583_A_Rasal1
  gRNA
gtcctccagggatcgacagc

SEQ ID NO: 44584 - DNA, 20 bp, Artificial Sequence
  MKO10044584_A_Rasal1
  gRNA
gtacaccgttcaccttccat

SEQ ID NO: 44585 - DNA, 20 bp, Artificial Sequence
  MKO10044585_A_Rasal1
  gRNA
aagcagtgacccctattgtc

SEQ ID NO: 44586 - DNA, 20 bp, Artificial Sequence
  MKO10044586_A_Rasal2
  gRNA
ccccgcagacggagcatctc

SEQ ID NO: 44587 - DNA, 20 bp, Artificial Sequence
  MKO10044587_A_Rasal2
  gRNA
tgtttctgtcaagcttcgac

SEQ ID NO: 44588 - DNA, 20 bp, Artificial Sequence
  MKO10044588_A_Rasal2
  gRNA
tctcctcagacagcgccctt

SEQ ID NO: 44589 - DNA, 20 bp, Artificial Sequence
  MKO10044589_A_Rasal3
  gRNA
gggtcctcgccaaatccgag

SEQ ID NO: 44590 - DNA, 20 bp, Artificial Sequence
  MKO10044590_A_Rasal3
  gRNA
cttcccactcggatttggcg

SEQ ID NO: 44591 - DNA, 20 bp, Artificial Sequence
  MKO10044591_A_Rasal3
  gRNA
gagcctacacccctcgagat

SEQ ID NO: 44592 - DNA, 20 bp, Artificial Sequence
  MKO10044592_A_Rasd1
  gRNA
cgcggatcgagtaaaacttt

SEQ ID NO: 44593 - DNA, 20 bp, Artificial Sequence
  MKO10044593_A_Rasd1
  gRNA
caaccgcgactcattcgaag

SEQ ID NO: 44594 - DNA, 20 bp, Artificial Sequence
  MKO10044594_A_Rasd1
  gRNA
aagtcggggctcatctcgct

SEQ ID NO: 44595 - DNA, 20 bp, Artificial Sequence
  MKO10044595_A_Rasd2
  gRNA
gcgatgaaagtcctcgatag

SEQ ID NO: 44596 - DNA, 20 bp, Artificial Sequence
  MKO10044596_A_Rasd2
  gRNA
tgaaaactgcgcctacttcg

SEQ ID NO: 44597 - DNA, 20 bp, Artificial Sequence
  MKO10044597_A_Rasd2
  gRNA
cttagtgcgacgcatgcaga

SEQ ID NO: 44598 - DNA, 20 bp, Artificial Sequence
  MKO10044598_A_Rasef
  gRNA
aaccgtatgaacgtgtgata

SEQ ID NO: 44599 - DNA, 20 bp, Artificial Sequence
  MKO10044599_A_Rasef
  gRNA
ctgtttcatactgacgcctg

SEQ ID NO: 44600 - DNA, 20 bp, Artificial Sequence
  MKO10044600_A_Rasef
  gRNA
ttccttatcacacgttcata

SEQ ID NO: 44601 - DNA, 20 bp, Artificial Sequence
  MKO10044601_A_Rasgef1a
  gRNA
gaagctccggtcacccgttg

SEQ ID NO: 44602 - DNA, 20 bp, Artificial Sequence
  MKO10044602_A_Rasgef1a
  gRNA
tcaggataatagtccaccgt

SEQ ID NO: 44603 - DNA, 20 bp, Artificial Sequence
  MKO10044603_A_Rasgef1a
  gRNA
caagatggacgcctcacttc

SEQ ID NO: 44604 - DNA, 20 bp, Artificial Sequence
  MKO10044604_A_Rasgef1b
  gRNA
catgcatccgtacgagctca

SEQ ID NO: 44605 - DNA, 20 bp, Artificial Sequence
  MKO10044605_A_Rasgef1b
  gRNA
agcgcctcaccagctcgatg

SEQ ID NO: 44606 - DNA, 20 bp, Artificial Sequence
  MKO10044606_A_Rasgef1b
  gRNA
ggtcatgatgtcccgctgta

SEQ ID NO: 44607 - DNA, 20 bp, Artificial Sequence
  MKO10044607_A_Rasgef1c
  gRNA
tgcggcccaccacgtctgtc

SEQ ID NO: 44608 - DNA, 20 bp, Artificial Sequence
  MKO10044608_A_Rasgef1c
  gRNA
tccccatgcaggagcgacta

SEQ ID NO: 44609 - DNA, 20 bp, Artificial Sequence
  MKO10044609_A_Rasgef1c
  gRNA
tgctccagttgttagccgag

SEQ ID NO: 44610 - DNA, 20 bp, Artificial Sequence
  MKO10044610_A_Rasgrf1
  gRNA
cgacgtggccatcgttaagc

SEQ ID NO: 44611 - DNA, 20 bp, Artificial Sequence
  MKO10044611_A_Rasgrf1
  gRNA
tggctgcgatcgctcgcgcc

SEQ ID NO: 44612 - DNA, 20 bp, Artificial Sequence
  MKO10044612_A_Rasgrf1
  gRNA
gacaacgctgcgtgacagag

SEQ ID NO: 44613 - DNA, 20 bp, Artificial Sequence
  MKO10044613_A_Rasgrf2
  gRNA
ccacgctggcgtagcggatc

SEQ ID NO: 44614 - DNA, 20 bp, Artificial Sequence
  MKO10044614_A_Rasgrf2
  gRNA
gcgcctcttggagcggttga

SEQ ID NO: 44615 - DNA, 20 bp, Artificial Sequence
  MKO10044615_A_Rasgrf2
  gRNA
gtctgcaccagccgacaaag

SEQ ID NO: 44616 - DNA, 20 bp, Artificial Sequence
  MKO10044616_A_Rasgrp1
  gRNA
ggagatgatgatccggtgca

SEQ ID NO: 44617 - DNA, 20 bp, Artificial Sequence
  MKO10044617_A_Rasgrp1
  gRNA
aagtcatgctaaccatgcac

SEQ ID NO: 44618 - DNA, 20 bp, Artificial Sequence
  MKO10044618_A_Rasgrp1
  gRNA
agctgtcaataagatcatcc

SEQ ID NO: 44619 - DNA, 20 bp, Artificial Sequence
  MKO10044619_A_Rasgrp2
  gRNA
acacactctcgatgtcgatg

SEQ ID NO: 44620 - DNA, 20 bp, Artificial Sequence
  MKO10044620_A_Rasgrp2
  gRNA
tagaccaagaagggaaccgc

SEQ ID NO: 44621 - DNA, 20 bp, Artificial Sequence
  MKO10044621_A_Rasgrp2
  gRNA
ggtgacccagcggaaccctg

SEQ ID NO: 44622 - DNA, 20 bp, Artificial Sequence
  MKO10044622_A_Rasgrp3
  gRNA
cgggaagtagctagtcaact

SEQ ID NO: 44623 - DNA, 20 bp, Artificial Sequence
  MKO10044623_A_Rasgrp3
  gRNA
gtgcatcagtaacacgattc

SEQ ID NO: 44624 - DNA, 20 bp, Artificial Sequence
  MKO10044624_A_Rasgrp3
  gRNA
tcgtgttactgatgcaccga

SEQ ID NO: 44625 - DNA, 20 bp, Artificial Sequence
  MKO10044625_A_Rasgrp4
  gRNA
ctggagcgtccaccgagttt

SEQ ID NO: 44626 - DNA, 20 bp, Artificial Sequence
  MKO10044626_A_Rasgrp4
  gRNA
tcggctggcagcctgcgccg

SEQ ID NO: 44627 - DNA, 20 bp, Artificial Sequence
  MKO10044627_A_Rasgrp4
  gRNA
ctgcagcgaagatgagctat

SEQ ID NO: 44628 - DNA, 20 bp, Artificial Sequence
  MKO10044628_A_Rasip1
  gRNA
cgccaactacaagagcgtgc

SEQ ID NO: 44629 - DNA, 20 bp, Artificial Sequence
  MKO10044629_A_Rasip1
  gRNA
ctacgcgctttgcgacgctc

SEQ ID NO: 44630 - DNA, 20 bp, Artificial Sequence
  MKO10044630_A_Rasip1
  gRNA
gcgcgcaccgtgcaatgtcg

SEQ ID NO: 44631 - DNA, 20 bp, Artificial Sequence
  MKO10044631_A_Rasl10a
  gRNA
tacgacctgagtatccgcga

SEQ ID NO: 44632 - DNA, 20 bp, Artificial Sequence
  MKO10044632_A_Rasl10a
  gRNA
gtccagcgacgtcaccatcg

SEQ ID NO: 44633 - DNA, 20 bp, Artificial Sequence
  MKO10044633_A_Rasl10a
  gRNA
tcgattatgttaaagccctg

SEQ ID NO: 44634 - DNA, 20 bp, Artificial Sequence
  MKO10044634_A_Rasl10b
  gRNA
acgctggaacgtgtcgcact

SEQ ID NO: 44635 - DNA, 20 bp, Artificial Sequence
  MKO10044635_A_Rasl10b
  gRNA
aacaagcgcgacctgcaacg

SEQ ID NO: 44636 - DNA, 20 bp, Artificial Sequence
  MKO10044636_A_Rasl10b
  gRNA
cttatacaacgagttcagcg

SEQ ID NO: 44637 - DNA, 20 bp, Artificial Sequence
  MKO10044637_A_Rasl11a
  gRNA
gtattcgagactcgtctatg

SEQ ID NO: 44638 - DNA, 20 bp, Artificial Sequence
  MKO10044638_A_Rasl11a
  gRNA
gtagtcgccgatgaatctct

SEQ ID NO: 44639 - DNA, 20 bp, Artificial Sequence
  MKO10044639_A_Rasl11a
  gRNA
agcgaaagcgtcctccgccc

SEQ ID NO: 44640 - DNA, 20 bp, Artificial Sequence
  MKO10044640_A_Rasl11b
  gRNA
ccggctcgttaagatcgccg

SEQ ID NO: 44641 - DNA, 20 bp, Artificial Sequence
  MKO10044641_A_Rasl11b
  gRNA
ccccgatgaatcgtttagtg

SEQ ID NO: 44642 - DNA, 20 bp, Artificial Sequence
  MKO10044642_A_Rasl11b
  gRNA
agttgaatcgctgcattcgc

SEQ ID NO: 44643 - DNA, 20 bp, Artificial Sequence
  MKO10044643_A_Rasl12
  gRNA
cttgccgaacaccgacgaca

SEQ ID NO: 44644 - DNA, 20 bp, Artificial Sequence
  MKO10044644_A_Rasl12
  gRNA
cgatagtcgtgcgagtttcg

SEQ ID NO: 44645 - DNA, 20 bp, Artificial Sequence
  MKO10044645_A_Rasl12
  gRNA
ttcgccatgtcgtcggtgtt

SEQ ID NO: 44646 - DNA, 20 bp, Artificial Sequence
  MKO10044646_A_Rasl2-9
  gRNA
gatcgccgcgatggccgccc

SEQ ID NO: 44647 - DNA, 20 bp, Artificial Sequence
  MKO10044647_A_Rasl2-9
  gRNA
actagatctttatgccagct

SEQ ID NO: 44648 - DNA, 20 bp, Artificial Sequence
  MKO10044648_A_Rasl2-9
  gRNA
ccaccaggacgaccttgaac

SEQ ID NO: 44649 - DNA, 20 bp, Artificial Sequence
  MKO10044649_A_Rassf10
  gRNA
gagcgcgtcggtagaacgta

SEQ ID NO: 44650 - DNA, 20 bp, Artificial Sequence
  MKO10044650_A_Rassf10
  gRNA
cgtcgccccaagcagtccag

SEQ ID NO: 44651 - DNA, 20 bp, Artificial Sequence
  MKO10044651_A_Rassf10
  gRNA
cgcaagatccgcgtcttgtt

SEQ ID NO: 44652 - DNA, 20 bp, Artificial Sequence
  MKO10044652_A_Rassf1
  gRNA
acgcccggagaggtacgggg

SEQ ID NO: 44653 - DNA, 20 bp, Artificial Sequence
  MKO10044653_A_Rassf1
  gRNA
gctcgtcatccgacagcttc

SEQ ID NO: 44654 - DNA, 20 bp, Artificial Sequence
  MKO10044654_A_Rassf1
  gRNA
aaaagaggtgcggcgcttca

SEQ ID NO: 44655 - DNA, 20 bp, Artificial Sequence
  MKO10044655_A_Rassf2
  gRNA
tgcgtcgccgtggcaacgtg

SEQ ID NO: 44656 - DNA, 20 bp, Artificial Sequence
  MKO10044656_A_Rassf2
  gRNA
gatggcgtctgatccgtcgc

SEQ ID NO: 44657 - DNA, 20 bp, Artificial Sequence
  MKO10044657_A_Rassf2
  gRNA
aatgccttacctctcggtgt

SEQ ID NO: 44658 - DNA, 20 bp, Artificial Sequence
  MKO10044658_A_Rassf3
  gRNA
cgctttataagcgttgtcac

SEQ ID NO: 44659 - DNA, 20 bp, Artificial Sequence
  MKO10044659_A_Rassf3
  gRNA
gcacccgctgtacctacgtt

SEQ ID NO: 44660 - DNA, 20 bp, Artificial Sequence
  MKO10044660_A_Rassf3
  gRNA
acgcttataaagcgcaaact

SEQ ID NO: 44661 - DNA, 20 bp, Artificial Sequence
  MKO10044661_A_Rassf4
  gRNA
accggtgccgtcgtatcttc

SEQ ID NO: 44662 - DNA, 20 bp, Artificial Sequence
  MKO10044662_A_Rassf4
  gRNA
ttcgcttggtgcccgggatt

SEQ ID NO: 44663 - DNA, 20 bp, Artificial Sequence
  MKO10044663_A_Rassf4
  gRNA
gaagggactctgatcatcga

SEQ ID NO: 44664 - DNA, 20 bp, Artificial Sequence
  MKO10044664_A_Rassf5
  gRNA
acagcacccgcccacgatac

SEQ ID NO: 44665 - DNA, 20 bp, Artificial Sequence
  MKO10044665_A_Rassf5
  gRNA
tttctggagagcgtctatcc

SEQ ID NO: 44666 - DNA, 20 bp, Artificial Sequence
  MKO10044666_A_Rassf5
  gRNA
tgacggtgcccgctgggatc

SEQ ID NO: 44667 - DNA, 20 bp, Artificial Sequence
  MKO10044667_A_Rassf6
  gRNA
atagacgtgtccgttgatag

SEQ ID NO: 44668 - DNA, 20 bp, Artificial Sequence
  MKO10044668_A_Rassf6
  gRNA
tcctgtccagctcgctgata

SEQ ID NO: 44669 - DNA, 20 bp, Artificial Sequence
  MKO10044669_A_Rassf6
  gRNA
cggtgtgttcaacagatcaa

SEQ ID NO: 44670 - DNA, 20 bp, Artificial Sequence
  MKO10044670_A_Rassf7
  gRNA
tcacggcctggtatcgccga

SEQ ID NO: 44671 - DNA, 20 bp, Artificial Sequence
  MKO10044671_A_Rassf7
  gRNA
ggctaggccctgtccgcctc

SEQ ID NO: 44672 - DNA, 20 bp, Artificial Sequence
  MKO10044672_A_Rassf7
  gRNA
gaaacataccctcgggactc

SEQ ID NO: 44673 - DNA, 20 bp, Artificial Sequence
  MKO10044673_A_Rassf8
  gRNA
cacggagatcgaggcctcgc

SEQ ID NO: 44674 - DNA, 20 bp, Artificial Sequence
  MKO10044674_A_Rassf8
  gRNA
ttagaggcgccattccagtc

SEQ ID NO: 44675 - DNA, 20 bp, Artificial Sequence
  MKO10044675_A_Rassf8
  gRNA
acgtgcagctcatcttgcgt

SEQ ID NO: 44676 - DNA, 20 bp, Artificial Sequence
  MKO10044676_A_Rassf9
  gRNA
cgcagacaatcttctcgtcc

SEQ ID NO: 44677 - DNA, 20 bp, Artificial Sequence
  MKO10044677_A_Rassf9
  gRNA
tggggctaattacgttcacg

SEQ ID NO: 44678 - DNA, 20 bp, Artificial Sequence
  MKO10044678_A_Rassf9
  gRNA
tgaagacacgacataaaaac

SEQ ID NO: 44679 - DNA, 20 bp, Artificial Sequence
  MKO10044679_A_Raver1
  gRNA
acttgagttcgtagtcgctc

SEQ ID NO: 44680 - DNA, 20 bp, Artificial Sequence
  MKO10044680_A_Raver1
  gRNA
ctgacagctcccgctctcga

SEQ ID NO: 44681 - DNA, 20 bp, Artificial Sequence
  MKO10044681_A_Raver1
  gRNA
catcgagagtgcaacaatgc

SEQ ID NO: 44682 - DNA, 20 bp, Artificial Sequence
  MKO10044682_A_Raver2
  gRNA
cctcatagcagctcagcgcg

SEQ ID NO: 44683 - DNA, 20 bp, Artificial Sequence
  MKO10044683_A_Raver2
  gRNA
actgctagagtgcttcgccc

SEQ ID NO: 44684 - DNA, 20 bp, Artificial Sequence
  MKO10044684_A_Raver2
  gRNA
gaagaactcgtccgtgccta

SEQ ID NO: 44685 - DNA, 20 bp, Artificial Sequence
  MKO10044685_A_Rax
  gRNA
aaacgcgacgtgctcccgcc

SEQ ID NO: 44686 - DNA, 20 bp, Artificial Sequence
  MKO10044686_A_Rax
  gRNA
attcggggacaagttctcgc

SEQ ID NO: 44687 - DNA, 20 bp, Artificial Sequence
  MKO10044687_A_Rax
  gRNA
cgagaagctcccgtccgcca

SEQ ID NO: 44688 - DNA, 20 bp, Artificial Sequence
  MKO10044688_A_Rb1cc1
  gRNA
agagtgtgtacttacagcgc

SEQ ID NO: 44689 - DNA, 20 bp, Artificial Sequence
  MKO10044689_A_Rb1cc1
  gRNA
ctgaacgtggcaaagaactt

SEQ ID NO: 44690 - DNA, 20 bp, Artificial Sequence
  MKO10044690_A_Rb1cc1
  gRNA
tcaagatagacccaatgatg

SEQ ID NO: 44691 - DNA, 20 bp, Artificial Sequence
  MKO10044691_A_Rb1
  gRNA
agaaatcgataccagtacca

SEQ ID NO: 44692 - DNA, 20 bp, Artificial Sequence
  MKO10044692_A_Rb1
  gRNA
tgacatagcattatcaacct

SEQ ID NO: 44693 - DNA, 20 bp, Artificial Sequence
  MKO10044693_A_Rb1
  gRNA
ttgggagaaagtttcatccg

SEQ ID NO: 44694 - DNA, 20 bp, Artificial Sequence
  MKO10044694_A_Rbak
  gRNA
atgtactgaagtccgacatc

SEQ ID NO: 44695 - DNA, 20 bp, Artificial Sequence
  MKO10044695_A_Rbak
  gRNA
ccgtacgcttgtagtgtgtg

SEQ ID NO: 44696 - DNA, 20 bp, Artificial Sequence
  MKO10044696_A_Rbak
  gRNA
aaggtgaccgccatgctcag

SEQ ID NO: 44697 - DNA, 20 bp, Artificial Sequence
  MKO10044697_A_Rbbp4
  gRNA
aaccccgatttgcgtctccg

SEQ ID NO: 44698 - DNA, 20 bp, Artificial Sequence
  MKO10044698_A_Rbbp4
  gRNA
ttcttccactgcgtcgtcaa

SEQ ID NO: 44699 - DNA, 20 bp, Artificial Sequence
  MKO10044699_A_Rbbp4
  gRNA
tcgcgtcacctggtcacatc

SEQ ID NO: 44700 - DNA, 20 bp, Artificial Sequence
  MKO10044700_A_Rbbp5
  gRNA
tcccctagttggagccgaga

SEQ ID NO: 44701 - DNA, 20 bp, Artificial Sequence
  MKO10044701_A_Rbbp5
  gRNA
acgatggccggattgttatt

SEQ ID NO: 44702 - DNA, 20 bp, Artificial Sequence
  MKO10044702_A_Rbbp5
  gRNA
actgatctcgaggatgatat

SEQ ID NO: 44703 - DNA, 20 bp, Artificial Sequence
  MKO10044703_A_Rbbp6
  gRNA
accttctttcgtctgtgcgt

SEQ ID NO: 44704 - DNA, 20 bp, Artificial Sequence
  MKO10044704_A_Rbbp6
  gRNA
accaacgcacagacgaaaga

SEQ ID NO: 44705 - DNA, 20 bp, Artificial Sequence
  MKO10044705_A_Rbbp6
  gRNA
aagtcgaactgaaccagtga

SEQ ID NO: 44706 - DNA, 20 bp, Artificial Sequence
  MKO10044706_A_Rbbp7
  gRNA
tacaccgtttctgtatgacc

SEQ ID NO: 44707 - DNA, 20 bp, Artificial Sequence
  MKO10044707_A_Rbbp7
  gRNA
tgcccagcactagccaatga

SEQ ID NO: 44708 - DNA, 20 bp, Artificial Sequence
  MKO10044708_A_Rbbp7
  gRNA
tgcccttcattggctagtgc

SEQ ID NO: 44709 - DNA, 20 bp, Artificial Sequence
  MKO10044709_A_Rbbp8nl
  gRNA
agtgaagcggcttcggagtc

SEQ ID NO: 44710 - DNA, 20 bp, Artificial Sequence
  MKO10044710_A_Rbbp8nl
  gRNA
cgatcgatgcatggtcaccc

SEQ ID NO: 44711 - DNA, 20 bp, Artificial Sequence
  MKO10044711_A_Rbbp8nl
  gRNA
gaaggagaacctgcgagtgc

SEQ ID NO: 44712 - DNA, 20 bp, Artificial Sequence
  MKO10044712_A_Rbbp8
  gRNA
agaccagcagaaagtccttc

SEQ ID NO: 44713 - DNA, 20 bp, Artificial Sequence
  MKO10044713_A_Rbbp8
  gRNA
tcagctctgtaataagctta

SEQ ID NO: 44714 - DNA, 20 bp, Artificial Sequence
  MKO10044714_A_Rbbp8
  gRNA
gcatatgcacaaaaagcagc

SEQ ID NO: 44715 - DNA, 20 bp, Artificial Sequence
  MKO10044715_A_Rbbp9
  gRNA
ttgtacaaattcactgaccg

SEQ ID NO: 44716 - DNA, 20 bp, Artificial Sequence
  MKO10044716_A_Rbbp9
  gRNA
accatacctcatggctgcga

SEQ ID NO: 44717 - DNA, 20 bp, Artificial Sequence
  MKO10044717_A_Rbbp9
  gRNA
gacgagaagaccatcatcat

SEQ ID NO: 44718 - DNA, 20 bp, Artificial Sequence
  MKO10044718_A_Rbck1
  gRNA
agtacgcccggatatgacag

SEQ ID NO: 44719 - DNA, 20 bp, Artificial Sequence
  MKO10044719_A_Rbck1
  gRNA
acgtgttgcgggctgacagc

SEQ ID NO: 44720 - DNA, 20 bp, Artificial Sequence
  MKO10044720_A_Rbck1
  gRNA
cagcttaccggtggtgactc

SEQ ID NO: 44721 - DNA, 20 bp, Artificial Sequence
  MKO10044721_A_Rbfa
  gRNA
ctttcaggtagatcggttgc

SEQ ID NO: 44722 - DNA, 20 bp, Artificial Sequence
  MKO10044722_A_Rbfa
  gRNA
tccaagtcgtccctttcatc

SEQ ID NO: 44723 - DNA, 20 bp, Artificial Sequence
  MKO10044723_A_Rbfa
  gRNA
agaggagcgctgcctacatg

SEQ ID NO: 44724 - DNA, 20 bp, Artificial Sequence
  MKO10044724_A_Rbfox1
  gRNA
gatgatgcagccccgaccga

SEQ ID NO: 44725 - DNA, 20 bp, Artificial Sequence
  MKO10044725_A_Rbfox1
  gRNA
accagtgcgcagaccgtctc

SEQ ID NO: 44726 - DNA, 20 bp, Artificial Sequence
  MKO10044726_A_Rbfox1
  gRNA
catcccgcgccagagtacac

SEQ ID NO: 44727 - DNA, 20 bp, Artificial Sequence
  MKO10044727_A_Rbfox2
  gRNA
gcgtactcccgtagagggtc

SEQ ID NO: 44728 - DNA, 20 bp, Artificial Sequence
  MKO10044728_A_Rbfox2
  gRNA
ggtgccgtgcaatttctccc

SEQ ID NO: 44729 - DNA, 20 bp, Artificial Sequence
  MKO10044729_A_Rbfox2
  gRNA
aacaacaactcctgacgcaa

SEQ ID NO: 44730 - DNA, 20 bp, Artificial Sequence
  MKO10044730_A_Rbfox3
  gRNA
tcaccccgaacatttgccgc

SEQ ID NO: 44731 - DNA, 20 bp, Artificial Sequence
  MKO10044731_A_Rbfox3
  gRNA
ggtctcttaccggcaccgtc

SEQ ID NO: 44732 - DNA, 20 bp, Artificial Sequence
  MKO10044732_A_Rbfox3
  gRNA
gtagagggtcatgccgtgct

SEQ ID NO: 44733 - DNA, 20 bp, Artificial Sequence
  MKO10044733_A_Rbks
  gRNA
gtgtgtccaagctgcgcgac

SEQ ID NO: 44734 - DNA, 20 bp, Artificial Sequence
  MKO10044734_A_Rbks
  gRNA
ttgctcccagtcgcgcagct

SEQ ID NO: 44735 - DNA, 20 bp, Artificial Sequence
  MKO10044735_A_Rbks
  gRNA
ccagaatatcatcgtcatag

SEQ ID NO: 44736 - DNA, 20 bp, Artificial Sequence
  MKO10044736_A_Rbl1
  gRNA
atccgctcacgaaactcttg

SEQ ID NO: 44737 - DNA, 20 bp, Artificial Sequence
  MKO10044737_A_Rbl1
  gRNA
cttagctgagcgcagtattc

SEQ ID NO: 44738 - DNA, 20 bp, Artificial Sequence
  MKO10044738_A_Rbl1
  gRNA
tttaacaagtctcgtctatt

SEQ ID NO: 44739 - DNA, 20 bp, Artificial Sequence
  MKO10044739_A_Rbl2
  gRNA
ccccatgattagcgatgatc

SEQ ID NO: 44740 - DNA, 20 bp, Artificial Sequence
  MKO10044740_A_Rbl2
  gRNA
ctaatctttcagtacgttct

SEQ ID NO: 44741 - DNA, 20 bp, Artificial Sequence
  MKO10044741_A_Rbl2
  gRNA
acctctgctccgaacagcga

SEQ ID NO: 44742 - DNA, 20 bp, Artificial Sequence
  MKO10044742_A_Rbm10
  gRNA
ccttcttctagaggtggtcg

SEQ ID NO: 44743 - DNA, 20 bp, Artificial Sequence
  MKO10044743_A_Rbm10
  gRNA
acgatggatggaagccaatc

SEQ ID NO: 44744 - DNA, 20 bp, Artificial Sequence
  MKO10044744_A_Rbm10
  gRNA
gctgtctccaggtcagagcc

SEQ ID NO: 44745 - DNA, 20 bp, Artificial Sequence
  MKO10044745_A_Rbm11
  gRNA
tacaggtcagggtcgcttgg

SEQ ID NO: 44746 - DNA, 20 bp, Artificial Sequence
  MKO10044746_A_Rbm11
  gRNA
gaccaattaatgtgcagtat

SEQ ID NO: 44747 - DNA, 20 bp, Artificial Sequence
  MKO10044747_A_Rbm11
  gRNA
ctactgtcgctgtcgctgtc

SEQ ID NO: 44748 - DNA, 20 bp, Artificial Sequence
  MKO10044748_A_Rbm12b1
  gRNA
gaccatttccaatcctccag

SEQ ID NO: 44749 - DNA, 20 bp, Artificial Sequence
  MKO10044749_A_Rbm12b1
  gRNA
agccacccgaagaacatttc

SEQ ID NO: 44750 - DNA, 20 bp, Artificial Sequence
  MKO10044750_A_Rbm12b1
  gRNA
agtgtcatgagaaagatcgt

SEQ ID NO: 44751 - DNA, 20 bp, Artificial Sequence
  MKO10044751_A_Rbm12b2
  gRNA
gaaacgatagcttctcctaa

SEQ ID NO: 44752 - DNA, 20 bp, Artificial Sequence
  MKO10044752_A_Rbm12b2
  gRNA
cgtttcaatacagtataatg

SEQ ID NO: 44753 - DNA, 20 bp, Artificial Sequence
  MKO10044753_A_Rbm12b2
  gRNA
gtctagaatttcattagcat

SEQ ID NO: 44754 - DNA, 20 bp, Artificial Sequence
  MKO10044754_A_Rbm12
  gRNA
gctgatgattcaacgctatg

SEQ ID NO: 44755 - DNA, 20 bp, Artificial Sequence
  MKO10044755_A_Rbm12
  gRNA
cccccaatatggattgggcc

SEQ ID NO: 44756 - DNA, 20 bp, Artificial Sequence
  MKO10044756_A_Rbm12
  gRNA
acaaatgcactgcatcgact

SEQ ID NO: 44757 - DNA, 20 bp, Artificial Sequence
  MKO10044757_A_Rbm14
  gRNA
cgatggggcggatacgacac

SEQ ID NO: 44758 - DNA, 20 bp, Artificial Sequence
  MKO10044758_A_Rbm14
  gRNA
gcgtccaggtcgcgcgctcg

SEQ ID NO: 44759 - DNA, 20 bp, Artificial Sequence
  MKO10044759_A_Rbm14
  gRNA
ctgcggtcgcgaccaaagaa

SEQ ID NO: 44760 - DNA, 20 bp, Artificial Sequence
  MKO10044760_A_Rbm15b
  gRNA
gctctacgatcgcccgctca

SEQ ID NO: 44761 - DNA, 20 bp, Artificial Sequence
  MKO10044761_A_Rbm15b
  gRNA
tacgggctgtacgacgaccg

SEQ ID NO: 44762 - DNA, 20 bp, Artificial Sequence
  MKO10044762_A_Rbm15b
  gRNA
cggaccatcgatcacgtcaa

SEQ ID NO: 44763 - DNA, 20 bp, Artificial Sequence
  MKO10044763_A_Rbm15
  gRNA
ttacgccccgtcatccagcg

SEQ ID NO: 44764 - DNA, 20 bp, Artificial Sequence
  MKO10044764_A_Rbm15
  gRNA
gtcaagcccaagcgctcccg

SEQ ID NO: 44765 - DNA, 20 bp, Artificial Sequence
  MKO10044765_A_Rbm15
  gRNA
caagcaaaactggtgaacag

SEQ ID NO: 44766 - DNA, 20 bp, Artificial Sequence
  MKO10044766_A_Rbm17
  gRNA
cctcgctttaggtcgatgac

SEQ ID NO: 44767 - DNA, 20 bp, Artificial Sequence
  MKO10044767_A_Rbm17
  gRNA
tctttctctacaagagacgt

SEQ ID NO: 44768 - DNA, 20 bp, Artificial Sequence
  MKO10044768_A_Rbm17
  gRNA
tggtcgtcttgaaaacccac

SEQ ID NO: 44769 - DNA, 20 bp, Artificial Sequence
  MKO10044769_A_Rbm18
  gRNA
gacttcctcttccataagtc

SEQ ID NO: 44770 - DNA, 20 bp, Artificial Sequence
  MKO10044770_A_Rbm18
  gRNA
gacttaccttgacttgagcg

SEQ ID NO: 44771 - DNA, 20 bp, Artificial Sequence
  MKO10044771_A_Rbm18
  gRNA
ccatcatcttcgagacttcc

SEQ ID NO: 44772 - DNA, 20 bp, Artificial Sequence
  MKO10044772_A_Rbm19
  gRNA
ggagtcttgcgacggctgct

SEQ ID NO: 44773 - DNA, 20 bp, Artificial Sequence
  MKO10044773_A_Rbm19
  gRNA
acccatcgaagccccgagct

SEQ ID NO: 44774 - DNA, 20 bp, Artificial Sequence
  MKO10044774_A_Rbm19
  gRNA
cacgtgggcaaacgacgctt

SEQ ID NO: 44775 - DNA, 20 bp, Artificial Sequence
  MKO10044775_A_Rbm20
  gRNA
cgaaaaggcgattgcggttg

SEQ ID NO: 44776 - DNA, 20 bp, Artificial Sequence
  MKO10044776_A_Rbm20
  gRNA
gggcctacaccggctactac

SEQ ID NO: 44777 - DNA, 20 bp, Artificial Sequence
  MKO10044777_A_Rbm20
  gRNA
ctcctgaagcacgtatactc

SEQ ID NO: 44778 - DNA, 20 bp, Artificial Sequence
  MKO10044778_A_Rbm22
  gRNA
ataatcctgcatcacgaacc

SEQ ID NO: 44779 - DNA, 20 bp, Artificial Sequence
  MKO10044779_A_Rbm22
  gRNA
gcactcaccattcgtatata

SEQ ID NO: 44780 - DNA, 20 bp, Artificial Sequence
  MKO10044780_A_Rbm22
  gRNA
agaaaacccttatatacgaa

SEQ ID NO: 44781 - DNA, 20 bp, Artificial Sequence
  MKO10044781_A_Rbm24
  gRNA
cgcccactacgtctacccgc

SEQ ID NO: 44782 - DNA, 20 bp, Artificial Sequence
  MKO10044782_A_Rbm24
  gRNA
aacttacaaatccgtagccc

SEQ ID NO: 44783 - DNA, 20 bp, Artificial Sequence
  MKO10044783_A_Rbm24
  gRNA
agcggagtactgagcgtagg

SEQ ID NO: 44784 - DNA, 20 bp, Artificial Sequence
  MKO10044784_A_Rbm25
  gRNA
attatacttacagttggagc

SEQ ID NO: 44785 - DNA, 20 bp, Artificial Sequence
  MKO10044785_A_Rbm25
  gRNA
gccataatactcattggtac

SEQ ID NO: 44786 - DNA, 20 bp, Artificial Sequence
  MKO10044786_A_Rbm25
  gRNA
catgcaataatctgagagca

SEQ ID NO: 44787 - DNA, 20 bp, Artificial Sequence
  MKO10044787_A_Rbm26
  gRNA
ggagaagtcgcagttacagc

SEQ ID NO: 44788 - DNA, 20 bp, Artificial Sequence
  MKO10044788_A_Rbm26
  gRNA
tccctcgccttctgttatac

SEQ ID NO: 44789 - DNA, 20 bp, Artificial Sequence
  MKO10044789_A_Rbm26
  gRNA
cctccagagcagccatcgtc

SEQ ID NO: 44790 - DNA, 20 bp, Artificial Sequence
  MKO10044790_A_Rbm27
  gRNA
actatgagcggtactacgag

SEQ ID NO: 44791 - DNA, 20 bp, Artificial Sequence
  MKO10044791_A_Rbm27
  gRNA
tgtatcgggagaagtatgac

SEQ ID NO: 44792 - DNA, 20 bp, Artificial Sequence
  MKO10044792_A_Rbm27
  gRNA
agccaactatgttgtagcac

SEQ ID NO: 44793 - DNA, 20 bp, Artificial Sequence
  MKO10044793_A_Rbm28
  gRNA
tctcaaaggcgcgaatatga

SEQ ID NO: 44794 - DNA, 20 bp, Artificial Sequence
  MKO10044794_A_Rbm28
  gRNA
atcgatcttacaaccttcaa

SEQ ID NO: 44795 - DNA, 20 bp, Artificial Sequence
  MKO10044795_A_Rbm28
  gRNA
ctagggagtaaggcatgccg

SEQ ID NO: 44796 - DNA, 20 bp, Artificial Sequence
  MKO10044796_A_Rbm31y
  gRNA
aaaacgcggaataaattcgc

SEQ ID NO: 44797 - DNA, 20 bp, Artificial Sequence
  MKO10044797_A_Rbm31y
  gRNA
gaatactgccagcctcgctg

SEQ ID NO: 44798 - DNA, 20 bp, Artificial Sequence
  MKO10044798_A_Rbm31y
  gRNA
agcaaagcagtttgttctga

SEQ ID NO: 44799 - DNA, 20 bp, Artificial Sequence
  MKO10044799_A_Rbm33
  gRNA
gttacagagtgataacgaag

SEQ ID NO: 44800 - DNA, 20 bp, Artificial Sequence
  MKO10044800_A_Rbm33
  gRNA
cttcatctgacaaatccgac

SEQ ID NO: 44801 - DNA, 20 bp, Artificial Sequence
  MKO10044801_A_Rbm33
  gRNA
atcagtctgaataccacctc

SEQ ID NO: 44802 - DNA, 20 bp, Artificial Sequence
  MKO10044802_A_Rbm34
  gRNA
atccgtacgatttcgttctg

SEQ ID NO: 44803 - DNA, 20 bp, Artificial Sequence
  MKO10044803_A_Rbm34
  gRNA
gacaggtcgccgacagcttg

SEQ ID NO: 44804 - DNA, 20 bp, Artificial Sequence
  MKO10044804_A_Rbm34
  gRNA
ctgtcccaccaggtagtcgc

SEQ ID NO: 44805 - DNA, 20 bp, Artificial Sequence
  MKO10044805_A_Rbm38
  gRNA
gtactttctgagcgatgcgt

SEQ ID NO: 44806 - DNA, 20 bp, Artificial Sequence
  MKO10044806_A_Rbm38
  gRNA
cactcacgaagccgtagccg

SEQ ID NO: 44807 - DNA, 20 bp, Artificial Sequence
  MKO10044807_A_Rbm38
  gRNA
tgtatactcaaggtagggcg

SEQ ID NO: 44808 - DNA, 20 bp, Artificial Sequence
  MKO10044808_A_Rbm39
  gRNA
gacgaagccgctcacgcagt

SEQ ID NO: 44809 - DNA, 20 bp, Artificial Sequence
  MKO10044809_A_Rbm39
  gRNA
ttctatcccgactgcgtgag

SEQ ID NO: 44810 - DNA, 20 bp, Artificial Sequence
  MKO10044810_A_Rbm39
  gRNA
cccgaagcaaaagtccattt

SEQ ID NO: 44811 - DNA, 20 bp, Artificial Sequence
  MKO10044811_A_Rbm3
  gRNA
cccatacctagtccctggat

SEQ ID NO: 44812 - DNA, 20 bp, Artificial Sequence
  MKO10044812_A_Rbm3
  gRNA
catggctcaccctcagagat

SEQ ID NO: 44813 - DNA, 20 bp, Artificial Sequence
  MKO10044813_A_Rbm3
  gRNA
tcccccagtggttgttgtca

SEQ ID NO: 44814 - DNA, 20 bp, Artificial Sequence
  MKO10044814_A_Rbm41
  gRNA
gctgcatccgtgagtggtag

SEQ ID NO: 44815 - DNA, 20 bp, Artificial Sequence
  MKO10044815_A_Rbm41
  gRNA
tgatcgtcactccttcctta

SEQ ID NO: 44816 - DNA, 20 bp, Artificial Sequence
  MKO10044816_A_Rbm41
  gRNA
aagccatgtttccggtgaaa

SEQ ID NO: 44817 - DNA, 20 bp, Artificial Sequence
  MKO10044817_A_Rbm42
  gRNA
gcgataattgggcggatcac

SEQ ID NO: 44818 - DNA, 20 bp, Artificial Sequence
  MKO10044818_A_Rbm42
  gRNA
ggctttggccctgccgatcg

SEQ ID NO: 44819 - DNA, 20 bp, Artificial Sequence
  MKO10044819_A_Rbm42
  gRNA
gcccacggtagaagcgatgc

SEQ ID NO: 44820 - DNA, 20 bp, Artificial Sequence
  MKO10044820_A_Rbm43
  gRNA
gagaactcggcgtcgatact

SEQ ID NO: 44821 - DNA, 20 bp, Artificial Sequence
  MKO10044821_A_Rbm43
  gRNA
ccacatgtccaccctcgtct

SEQ ID NO: 44822 - DNA, 20 bp, Artificial Sequence
  MKO10044822_A_Rbm43
  gRNA
gaagtgctacttccaagacg

SEQ ID NO: 44823 - DNA, 20 bp, Artificial Sequence
  MKO10044823_A_Rbm44
  gRNA
aataactccgttgcaaccat

SEQ ID NO: 44824 - DNA, 20 bp, Artificial Sequence
  MKO10044824_A_Rbm44
  gRNA
gcgtggcctgtaacaccgcc

SEQ ID NO: 44825 - DNA, 20 bp, Artificial Sequence
  MKO10044825_A_Rbm44
  gRNA
agtccataagggcatacctc

SEQ ID NO: 44826 - DNA, 20 bp, Artificial Sequence
  MKO10044826_A_Rbm45
  gRNA
ggactctcgacaccaccgac

SEQ ID NO: 44827 - DNA, 20 bp, Artificial Sequence
  MKO10044827_A_Rbm45
  gRNA
attgcccagtcccgatcatc

SEQ ID NO: 44828 - DNA, 20 bp, Artificial Sequence
  MKO10044828_A_Rbm45
  gRNA
gtaccttgaacttctcccgc

SEQ ID NO: 44829 - DNA, 20 bp, Artificial Sequence
  MKO10044829_A_Rbm46
  gRNA
actctccccactcgtctcaa

SEQ ID NO: 44830 - DNA, 20 bp, Artificial Sequence
  MKO10044830_A_Rbm46
  gRNA
tgagatccatttgcgattgc

SEQ ID NO: 44831 - DNA, 20 bp, Artificial Sequence
  MKO10044831_A_Rbm46
  gRNA
tcagaatgaagccgcattgc

SEQ ID NO: 44832 - DNA, 20 bp, Artificial Sequence
  MKO10044832_A_Rbm47
  gRNA
aacaactacgagatccgccc

SEQ ID NO: 44833 - DNA, 20 bp, Artificial Sequence
  MKO10044833_A_Rbm47
  gRNA
gccgtgtatgggggctacgc

SEQ ID NO: 44834 - DNA, 20 bp, Artificial Sequence
  MKO10044834_A_Rbm47
  gRNA
aagtacggtggacccccgcc

SEQ ID NO: 44835 - DNA, 20 bp, Artificial Sequence
  MKO10044835_A_Rbm48
  gRNA
gcgagactgtgatcgagaac

SEQ ID NO: 44836 - DNA, 20 bp, Artificial Sequence
  MKO10044836_A_Rbm48
  gRNA
cgctctagatgaatacccag

SEQ ID NO: 44837 - DNA, 20 bp, Artificial Sequence
  MKO10044837_A_Rbm48
  gRNA
atacaacggcaaccttaatt

SEQ ID NO: 44838 - DNA, 20 bp, Artificial Sequence
  MKO10044838_A_Rbm4b
  gRNA
acagccgcattccgacgtag

SEQ ID NO: 44839 - DNA, 20 bp, Artificial Sequence
  MKO10044839_A_Rbm4b
  gRNA
cgtccgatcttacgaagctg

SEQ ID NO: 44840 - DNA, 20 bp, Artificial Sequence
  MKO10044840_A_Rbm4b
  gRNA
aggatggtgaagctgttcat

SEQ ID NO: 44841 - DNA, 20 bp, Artificial Sequence
  MKO10044841_A_Rbm4
  gRNA
agccccctgcgtcgcgctac

SEQ ID NO: 44842 - DNA, 20 bp, Artificial Sequence
  MKO10044842_A_Rbm4
  gRNA
acgcggcccgaacgatctat

SEQ ID NO: 44843 - DNA, 20 bp, Artificial Sequence
  MKO10044843_A_Rbm4
  gRNA
gagatggtgaagctgttcat

SEQ ID NO: 44844 - DNA, 20 bp, Artificial Sequence
  MKO10044844_A_Rbm5
  gRNA
tcttacatcgctctcggtga

SEQ ID NO: 44845 - DNA, 20 bp, Artificial Sequence
  MKO10044845_A_Rbm5
  gRNA
ctgtctctaggtgtaagccg

SEQ ID NO: 44846 - DNA, 20 bp, Artificial Sequence
  MKO10044846_A_Rbm5
  gRNA
agcaagaccatcatgctccg

SEQ ID NO: 44847 - DNA, 20 bp, Artificial Sequence
  MKO10044847_A_Rbm6
  gRNA
ctgtccccaggttacgacta

SEQ ID NO: 44848 - DNA, 20 bp, Artificial Sequence
  MKO10044848_A_Rbm6
  gRNA
aaggaccacctatggactac

SEQ ID NO: 44849 - DNA, 20 bp, Artificial Sequence
  MKO10044849_A_Rbm6
  gRNA
aacatacctgaaggtcttgt

SEQ ID NO: 44850 - DNA, 20 bp, Artificial Sequence
  MKO10044850_A_Rbm7
  gRNA
aatcccaactgatccgcatg

SEQ ID NO: 44851 - DNA, 20 bp, Artificial Sequence
  MKO10044851_A_Rbm7
  gRNA
gcttgccgctgataatcttc

SEQ ID NO: 44852 - DNA, 20 bp, Artificial Sequence
  MKO10044852_A_Rbm7
  gRNA
caacctccacatctcctaac

SEQ ID NO: 44853 - DNA, 20 bp, Artificial Sequence
  MKO10044853_A_Rbm8a
  gRNA
tagaagaggggtcccgagcg

SEQ ID NO: 44854 - DNA, 20 bp, Artificial Sequence
  MKO10044854_A_Rbm8a
  gRNA
aatcctcccgcatccgcgct

SEQ ID NO: 44855 - DNA, 20 bp, Artificial Sequence
  MKO10044855_A_Rbm8a
  gRNA
aagggccgcggctttggctc

SEQ ID NO: 44856 - DNA, 20 bp, Artificial Sequence
  MKO10044856_A_Rbms1
  gRNA
cttatccaaaatcgcctttg

SEQ ID NO: 44857 - DNA, 20 bp, Artificial Sequence
  MKO10044857_A_Rbms1
  gRNA
gcggcaggttagaaatgtac

SEQ ID NO: 44858 - DNA, 20 bp, Artificial Sequence
  MKO10044858_A_Rbms1
  gRNA
tggcaccactggaatcacgt

SEQ ID NO: 44859 - DNA, 20 bp, Artificial Sequence
  MKO10044859_A_Rbms2
  gRNA
aaaaccaacctgtatatccg

SEQ ID NO: 44860 - DNA, 20 bp, Artificial Sequence
  MKO10044860_A_Rbms2
  gRNA
tgcaaagccgacccctctgc

SEQ ID NO: 44861 - DNA, 20 bp, Artificial Sequence
  MKO10044861_A_Rbms2
  gRNA
cttgtccaggatggccttag

SEQ ID NO: 44862 - DNA, 20 bp, Artificial Sequence
  MKO10044862_A_Rbms3
  gRNA
gaggacagtagtacgtgtac

SEQ ID NO: 44863 - DNA, 20 bp, Artificial Sequence
  MKO10044863_A_Rbms3
  gRNA
acggttgacatagcttgatg

SEQ ID NO: 44864 - DNA, 20 bp, Artificial Sequence
  MKO10044864_A_Rbms3
  gRNA
ttgcacgccatttgccttca

SEQ ID NO: 44865 - DNA, 20 bp, Artificial Sequence
  MKO10044865_A_Rbmx2
  gRNA
cccgcgcagccctctgacta

SEQ ID NO: 44866 - DNA, 20 bp, Artificial Sequence
  MKO10044866_A_Rbmx2
  gRNA
gtcaaactaccgggctcctc

SEQ ID NO: 44867 - DNA, 20 bp, Artificial Sequence
  MKO10044867_A_Rbmx2
  gRNA
tcaacttggagtggcggaaa

SEQ ID NO: 44868 - DNA, 20 bp, Artificial Sequence
  MKO10044868_A_Rbmxl1
  gRNA
atggttgaagcagatcgccc

SEQ ID NO: 44869 - DNA, 20 bp, Artificial Sequence
  MKO10044869_A_Rbmxl1
  gRNA
tgcctccccctctatcagat

SEQ ID NO: 44870 - DNA, 20 bp, Artificial Sequence
  MKO10044870_A_Rbmxl1
  gRNA
actttaacatgagttcttcc

SEQ ID NO: 44871 - DNA, 20 bp, Artificial Sequence
  MKO10044871_A_Rbmxl2
  gRNA
attcgtctcgcgcgctcgag

SEQ ID NO: 44872 - DNA, 20 bp, Artificial Sequence
  MKO10044872_A_Rbmxl2
  gRNA
tactgtgagcgcgacggcta

SEQ ID NO: 44873 - DNA, 20 bp, Artificial Sequence
  MKO10044873_A_Rbmxl2
  gRNA
cgcagcgagcgctactcgag

SEQ ID NO: 44874 - DNA, 20 bp, Artificial Sequence
  MKO10044874_A_Rbmx
  gRNA
ccttaagcccctgtgtcccg

SEQ ID NO: 44875 - DNA, 20 bp, Artificial Sequence
  MKO10044875_A_Rbmx
  gRNA
ctcttgacttattcgtttct

SEQ ID NO: 44876 - DNA, 20 bp, Artificial Sequence
  MKO10044876_A_Rbmx
  gRNA
cgagaaacgaataagtcaag

SEQ ID NO: 44877 - DNA, 20 bp, Artificial Sequence
  MKO10044877_A_Rbmy
  gRNA
cagcattcttagcatctgca

SEQ ID NO: 44878 - DNA, 20 bp, Artificial Sequence
  MKO10044878_A_Rbmy
  gRNA
cgtgaaactaagaagtctag

SEQ ID NO: 44879 - DNA, 20 bp, Artificial Sequence
  MKO10044879_A_Rbmy
  gRNA
cccaagttcccttcacatga

SEQ ID NO: 44880 - DNA, 20 bp, Artificial Sequence
  MKO10044880_A_Rbp1
  gRNA
cgcgcttaccgagcgcgcgc

SEQ ID NO: 44881 - DNA, 20 bp, Artificial Sequence
  MKO10044881_A_Rbp1
  gRNA
accccttgtagacgtcaacg

SEQ ID NO: 44882 - DNA, 20 bp, Artificial Sequence
  MKO10044882_A_Rbp1
  gRNA
catagacgaccgcaagtgca

SEQ ID NO: 44883 - DNA, 20 bp, Artificial Sequence
  MKO10044883_A_Rbp2
  gRNA
cacgttccgcaactacgacc

SEQ ID NO: 44884 - DNA, 20 bp, Artificial Sequence
  MKO10044884_A_Rbp2
  gRNA
cctggacggccgacatgtca

SEQ ID NO: 44885 - DNA, 20 bp, Artificial Sequence
  MKO10044885_A_Rbp2
  gRNA
atcatgacgaaggaccaaaa

SEQ ID NO: 44886 - DNA, 20 bp, Artificial Sequence
  MKO10044886_A_Rbp3
  gRNA
ggtgatttcgccgaccagtg

SEQ ID NO: 44887 - DNA, 20 bp, Artificial Sequence
  MKO10044887_A_Rbp3
  gRNA
acgtggacaccgtctacgat

SEQ ID NO: 44888 - DNA, 20 bp, Artificial Sequence
  MKO10044888_A_Rbp3
  gRNA
atgactcggtcagcgaactt

SEQ ID NO: 44889 - DNA, 20 bp, Artificial Sequence
  MKO10044889_A_Rbp4
  gRNA
gcagcgccgagcgcgactgc

SEQ ID NO: 44890 - DNA, 20 bp, Artificial Sequence
  MKO10044890_A_Rbp4
  gRNA
gctcaccctgcagtcgcgct

SEQ ID NO: 44891 - DNA, 20 bp, Artificial Sequence
  MKO10044891_A_Rbp4
  gRNA
agtccgtgtcgatgatccag

SEQ ID NO: 44892 - DNA, 20 bp, Artificial Sequence
  MKO10044892_A_Rbp7
  gRNA
aaactcacttgcgtacagag

SEQ ID NO: 44893 - DNA, 20 bp, Artificial Sequence
  MKO10044893_A_Rbp7
  gRNA
tctcagcagcgacaacttcg

SEQ ID NO: 44894 - DNA, 20 bp, Artificial Sequence
  MKO10044894_A_Rbp7
  gRNA
cgaaggggaccagctccacc

SEQ ID NO: 44895 - DNA, 20 bp, Artificial Sequence
  MKO10044895_A_Rbpjl
  gRNA
tgggcccggtctccgcagat

SEQ ID NO: 44896 - DNA, 20 bp, Artificial Sequence
  MKO10044896_A_Rbpjl
  gRNA
gcccaccgtctgcggttaca

SEQ ID NO: 44897 - DNA, 20 bp, Artificial Sequence
  MKO10044897_A_Rbpjl
  gRNA
ccctccagccaggacccgcg

SEQ ID NO: 44898 - DNA, 20 bp, Artificial Sequence
  MKO10044898_A_Rbpj
  gRNA
tgcttacctagtgagtcgtt

SEQ ID NO: 44899 - DNA, 20 bp, Artificial Sequence
  MKO10044899_A_Rbpj
  gRNA
tttccaggaagtttggtgag

SEQ ID NO: 44900 - DNA, 20 bp, Artificial Sequence
  MKO10044900_A_Rbpj
  gRNA
cgaaattatttaaaagaacg

SEQ ID NO: 44901 - DNA, 20 bp, Artificial Sequence
  MKO10044901_A_Rbpms2
  gRNA
gtccgcacactgtttgtcag

SEQ ID NO: 44902 - DNA, 20 bp, Artificial Sequence
  MKO10044902_A_Rbpms2
  gRNA
gtcttgaggtgagcttgatc

SEQ ID NO: 44903 - DNA, 20 bp, Artificial Sequence
  MKO10044903_A_Rbpms2
  gRNA
gatcaagctcacctcaagac

SEQ ID NO: 44904 - DNA, 20 bp, Artificial Sequence
  MKO10044904_A_Rbpms
  gRNA
accgggaagatgaacggcgg

SEQ ID NO: 44905 - DNA, 20 bp, Artificial Sequence
  MKO10044905_A_Rbpms
  gRNA
gtccggaccctatttgtcag

SEQ ID NO: 44906 - DNA, 20 bp, Artificial Sequence
  MKO10044906_A_Rbpms
  gRNA
gaaggagaacaccccgagcg

SEQ ID NO: 44907 - DNA, 20 bp, Artificial Sequence
  MKO10044907_A_Rbx1
  gRNA
tcccacaggtatcgaatgtc

SEQ ID NO: 44908 - DNA, 20 bp, Artificial Sequence
  MKO10044908_A_Rbx1
  gRNA
gtctttcaggtatgggcatt

SEQ ID NO: 44909 - DNA, 20 bp, Artificial Sequence
  MKO10044909_A_Rbx1
  gRNA
ctccttgcagtggaatgcag

SEQ ID NO: 44910 - DNA, 20 bp, Artificial Sequence
  MKO10044910_A_Rc3h1
  gRNA
ttctgagtcgcccaatgcag

SEQ ID NO: 44911 - DNA, 20 bp, Artificial Sequence
  MKO10044911_A_Rc3h1
  gRNA
agaagagtcttcatcacgtt

SEQ ID NO: 44912 - DNA, 20 bp, Artificial Sequence
  MKO10044912_A_Rc3h1
  gRNA
atcgagcagccctcatagca

SEQ ID NO: 44913 - DNA, 20 bp, Artificial Sequence
  MKO10044913_A_Rc3h2
  gRNA
aatacggagtcctgcttcca

SEQ ID NO: 44914 - DNA, 20 bp, Artificial Sequence
  MKO10044914_A_Rc3h2
  gRNA
tcgtgtcagagctatgcgag

SEQ ID NO: 44915 - DNA, 20 bp, Artificial Sequence
  MKO10044915_A_Rc3h2
  gRNA
ccctgagccgtccaatgcaa

SEQ ID NO: 44916 - DNA, 20 bp, Artificial Sequence
  MKO10044916_A_Rcan1
  gRNA
gcgcgccggttcagctgagg

SEQ ID NO: 44917 - DNA, 20 bp, Artificial Sequence
  MKO10044917_A_Rcan1
  gRNA
ttaagagcttcaaacgtgtc

SEQ ID NO: 44918 - DNA, 20 bp, Artificial Sequence
  MKO10044918_A_Rcan1
  gRNA
aggggttgctgaagtttatc

SEQ ID NO: 44919 - DNA, 20 bp, Artificial Sequence
  MKO10044919_A_Rcan2
  gRNA
tgagtctacaccgagcgtcg

SEQ ID NO: 44920 - DNA, 20 bp, Artificial Sequence
  MKO10044920_A_Rcan2
  gRNA
tgaaatttattcgaacccgt

SEQ ID NO: 44921 - DNA, 20 bp, Artificial Sequence
  MKO10044921_A_Rcan2
  gRNA
gcgcttacctggtcctagtt

SEQ ID NO: 44922 - DNA, 20 bp, Artificial Sequence
  MKO10044922_A_Rcan3
  gRNA
aaagcttcagcttccgtccg

SEQ ID NO: 44923 - DNA, 20 bp, Artificial Sequence
  MKO10044923_A_Rcan3
  gRNA
gctgaagctttacttcgcac

SEQ ID NO: 44924 - DNA, 20 bp, Artificial Sequence
  MKO10044924_A_Rcan3
  gRNA
aaccgagtccacccccagtg

SEQ ID NO: 44925 - DNA, 20 bp, Artificial Sequence
  MKO10044925_A_Rcbtb1
  gRNA
tactaatctcttgatcaagc

SEQ ID NO: 44926 - DNA, 20 bp, Artificial Sequence
  MKO10044926_A_Rcbtb1
  gRNA
ctataacaactgtggtcagg

SEQ ID NO: 44927 - DNA, 20 bp, Artificial Sequence
  MKO10044927_A_Rcbtb1
  gRNA
tagatggagtcgtctatgcc

SEQ ID NO: 44928 - DNA, 20 bp, Artificial Sequence
  MKO10044928_A_Rcbtb2
  gRNA
catatcgtccttgcgacaac

SEQ ID NO: 44929 - DNA, 20 bp, Artificial Sequence
  MKO10044929_A_Rcbtb2
  gRNA
ctaacatcttcaacgatgac

SEQ ID NO: 44930 - DNA, 20 bp, Artificial Sequence
  MKO10044930_A_Rcbtb2
  gRNA
ttctgttacctgttgtcgca

SEQ ID NO: 44931 - DNA, 20 bp, Artificial Sequence
  MKO10044931_A_Rcc1
  gRNA
agacacggccgtcttcggtg

SEQ ID NO: 44932 - DNA, 20 bp, Artificial Sequence
  MKO10044932_A_Rcc1
  gRNA
agtgcagctggatgcgcccg

SEQ ID NO: 44933 - DNA, 20 bp, Artificial Sequence
  MKO10044933_A_Rcc1
  gRNA
ccttctcttagctatgcgct

SEQ ID NO: 44934 - DNA, 20 bp, Artificial Sequence
  MKO10044934_A_Rcc2
  gRNA
gcagctgcgtaccgcaacct

SEQ ID NO: 44935 - DNA, 20 bp, Artificial Sequence
  MKO10044935_A_Rcc2
  gRNA
ccgtccaatcaagtcccagt

SEQ ID NO: 44936 - DNA, 20 bp, Artificial Sequence
  MKO10044936_A_Rcc2
  gRNA
ctgccagcacgattgcctca

SEQ ID NO: 44937 - DNA, 20 bp, Artificial Sequence
  MKO10044937_A_Rccd1
  gRNA
cggctccagcacggaagtgc

SEQ ID NO: 44938 - DNA, 20 bp, Artificial Sequence
  MKO10044938_A_Rccd1
  gRNA
ggtaccaggttctgcgttac

SEQ ID NO: 44939 - DNA, 20 bp, Artificial Sequence
  MKO10044939_A_Rccd1
  gRNA
cggatcccgacacacagctg

SEQ ID NO: 44940 - DNA, 20 bp, Artificial Sequence
  MKO10044940_A_Rce1
  gRNA
ggaacgccgcttgataacag

SEQ ID NO: 44941 - DNA, 20 bp, Artificial Sequence
  MKO10044941_A_Rce1
  gRNA
gcccatgctagcgccgtgca

SEQ ID NO: 44942 - DNA, 20 bp, Artificial Sequence
  MKO10044942_A_Rce1
  gRNA
accaccccgctgttatcaag

SEQ ID NO: 44943 - DNA, 20 bp, Artificial Sequence
  MKO10044943_A_Rchy1
  gRNA
tgcctaaccacgaatcttcg

SEQ ID NO: 44944 - DNA, 20 bp, Artificial Sequence
  MKO10044944_A_Rchy1
  gRNA
gctagatcgtttcaaagtca

SEQ ID NO: 44945 - DNA, 20 bp, Artificial Sequence
  MKO10044945_A_Rchy1
  gRNA
gtgacaagctttatacctgc

SEQ ID NO: 44946 - DNA, 20 bp, Artificial Sequence
  MKO10044946_A_Rcl1
  gRNA
gctccacagacccgccatac

SEQ ID NO: 44947 - DNA, 20 bp, Artificial Sequence
  MKO10044947_A_Rcl1
  gRNA
tactcaccgaagggtcaacc

SEQ ID NO: 44948 - DNA, 20 bp, Artificial Sequence
  MKO10044948_A_Rcl1
  gRNA
agcacttcgccccctcctcc

SEQ ID NO: 44949 - DNA, 20 bp, Artificial Sequence
  MKO10044949_A_Rcn1
  gRNA
tgcgcatggtcgtagtcctg

SEQ ID NO: 44950 - DNA, 20 bp, Artificial Sequence
  MKO10044950_A_Rcn1
  gRNA
tcaggactacgaccatgcgc

SEQ ID NO: 44951 - DNA, 20 bp, Artificial Sequence
  MKO10044951_A_Rcn1
  gRNA
actcaccgatgtactcatcc

SEQ ID NO: 44952 - DNA, 20 bp, Artificial Sequence
  MKO10044952_A_Rcn2
  gRNA
gtcgatgagtatgttaaact

SEQ ID NO: 44953 - DNA, 20 bp, Artificial Sequence
  MKO10044953_A_Rcn2
  gRNA
acaacatccagatgtacgac

SEQ ID NO: 44954 - DNA, 20 bp, Artificial Sequence
  MKO10044954_A_Rcn2
  gRNA
acagcgacggcgctgtgacg

SEQ ID NO: 44955 - DNA, 20 bp, Artificial Sequence
  MKO10044955_A_Rcn3
  gRNA
caggcggatcgtagaccgca

SEQ ID NO: 44956 - DNA, 20 bp, Artificial Sequence
  MKO10044956_A_Rcn3
  gRNA
cgccatcttggtcggctacc

SEQ ID NO: 44957 - DNA, 20 bp, Artificial Sequence
  MKO10044957_A_Rcn3
  gRNA
ccctcacatgcgggacatcg

SEQ ID NO: 44958 - DNA, 20 bp, Artificial Sequence
  MKO10044958_A_Rcor1
  gRNA
ttgactgcgccttgccagtt

SEQ ID NO: 44959 - DNA, 20 bp, Artificial Sequence
  MKO10044959_A_Rcor1
  gRNA
cccgcttctgtttccgagca

SEQ ID NO: 44960 - DNA, 20 bp, Artificial Sequence
  MKO10044960_A_Rcor1
  gRNA
agtcaagaacgagacaatct

SEQ ID NO: 44961 - DNA, 20 bp, Artificial Sequence
  MKO10044961_A_Rcor2
  gRNA
ccgaagtcgaactagtgtga

SEQ ID NO: 44962 - DNA, 20 bp, Artificial Sequence
  MKO10044962_A_Rcor2
  gRNA
ccatcacactagttcgactt

SEQ ID NO: 44963 - DNA, 20 bp, Artificial Sequence
  MKO10044963_A_Rcor2
  gRNA
gtaccatctgctggatccgc

SEQ ID NO: 44964 - DNA, 20 bp, Artificial Sequence
  MKO10044964_A_Rcor3
  gRNA
cggatccctgaattcgatcc

SEQ ID NO: 44965 - DNA, 20 bp, Artificial Sequence
  MKO10044965_A_Rcor3
  gRNA
tatctacctggatcgaattc

SEQ ID NO: 44966 - DNA, 20 bp, Artificial Sequence
  MKO10044966_A_Rcor3
  gRNA
tgaagttagggaggtccgca

SEQ ID NO: 44967 - DNA, 20 bp, Artificial Sequence
  MKO10044967_A_Rcsd1
  gRNA
catccgatcccacccaagtg

SEQ ID NO: 44968 - DNA, 20 bp, Artificial Sequence
  MKO10044968_A_Rcsd1
  gRNA
atacctgaagcttctcgatc

SEQ ID NO: 44969 - DNA, 20 bp, Artificial Sequence
  MKO10044969_A_Rcsd1
  gRNA
tgatacgatggccttgagtc

SEQ ID NO: 44970 - DNA, 20 bp, Artificial Sequence
  MKO10044970_A_Rcvrn
  gRNA
gcggaacacgtgctgcgcgt

SEQ ID NO: 44971 - DNA, 20 bp, Artificial Sequence
  MKO10044971_A_Rcvrn
  gRNA
cgaactcctgccgcgtgatg

SEQ ID NO: 44972 - DNA, 20 bp, Artificial Sequence
  MKO10044972_A_Rcvrn
  gRNA
ggaattcatcgaggggaccc

SEQ ID NO: 44973 - DNA, 20 bp, Artificial Sequence
  MKO10044973_A_Rd3
  gRNA
gtgtcgttccaccggagcca

SEQ ID NO: 44974 - DNA, 20 bp, Artificial Sequence
  MKO10044974_A_Rd3
  gRNA
ggcccggaccccggccgaga

SEQ ID NO: 44975 - DNA, 20 bp, Artificial Sequence
  MKO10044975_A_Rd3
  gRNA
gctgttccgctccgtgttgc

SEQ ID NO: 44976 - DNA, 20 bp, Artificial Sequence
  MKO10044976_A_Rdh10
  gRNA
agctcgcgaccgtcacaatg

SEQ ID NO: 44977 - DNA, 20 bp, Artificial Sequence
  MKO10044977_A_Rdh10
  gRNA
tgtgacggtcgcgagctccc

SEQ ID NO: 44978 - DNA, 20 bp, Artificial Sequence
  MKO10044978_A_Rdh10
  gRNA
cctgcccccgtgtaacttac

SEQ ID NO: 44979 - DNA, 20 bp, Artificial Sequence
  MKO10044979_A_Rdh11
  gRNA
tcaggtcttcgtacggaaac

SEQ ID NO: 44980 - DNA, 20 bp, Artificial Sequence
  MKO10044980_A_Rdh11
  gRNA
gccgtctgcagtcttcgagt

SEQ ID NO: 44981 - DNA, 20 bp, Artificial Sequence
  MKO10044981_A_Rdh11
  gRNA
cgtgagatccaagccgtcac

SEQ ID NO: 44982 - DNA, 20 bp, Artificial Sequence
  MKO10044982_A_Rdh12
  gRNA
ccaatttccgcactagcacc

SEQ ID NO: 44983 - DNA, 20 bp, Artificial Sequence
  MKO10044983_A_Rdh12
  gRNA
ggaaacggatcttgccaatc

SEQ ID NO: 44984 - DNA, 20 bp, Artificial Sequence
  MKO10044984_A_Rdh12
  gRNA
tctgctcttcactcgagaac

SEQ ID NO: 44985 - DNA, 20 bp, Artificial Sequence
  MKO10044985_A_Rdh13
  gRNA
accttcagggactatgtcgc

SEQ ID NO: 44986 - DNA, 20 bp, Artificial Sequence
  MKO10044986_A_Rdh13
  gRNA
agcacgtacgcggggattca

SEQ ID NO: 44987 - DNA, 20 bp, Artificial Sequence
  MKO10044987_A_Rdh13
  gRNA
tccaggaggcaacgtcattc

SEQ ID NO: 44988 - DNA, 20 bp, Artificial Sequence
  MKO10044988_A_Rdh14
  gRNA
gaattagcccgtcgcttaga

SEQ ID NO: 44989 - DNA, 20 bp, Artificial Sequence
  MKO10044989_A_Rdh14
  gRNA
tcgggaccgcgctcgagcag

SEQ ID NO: 44990 - DNA, 20 bp, Artificial Sequence
  MKO10044990_A_Rdh14
  gRNA
gcctgttcacctgacgtaga

SEQ ID NO: 44991 - DNA, 20 bp, Artificial Sequence
  MKO10044991_A_Rdh16
  gRNA
aggtgcaacaaggacctgtc

SEQ ID NO: 44992 - DNA, 20 bp, Artificial Sequence
  MKO10044992_A_Rdh16
  gRNA
ggtcaacgtctccagtgtca

SEQ ID NO: 44993 - DNA, 20 bp, Artificial Sequence
  MKO10044993_A_Rdh16
  gRNA
agacactcgacccatgacac

SEQ ID NO: 44994 - DNA, 20 bp, Artificial Sequence
  MKO10044994_A_Rdh19
  gRNA
tgacactcgacccatgatgc

SEQ ID NO: 44995 - DNA, 20 bp, Artificial Sequence
  MKO10044995_A_Rdh19
  gRNA
gtggctctacctagtatcac

SEQ ID NO: 44996 - DNA, 20 bp, Artificial Sequence
  MKO10044996_A_Rdh19
  gRNA
cgagtgtcacttcatggtaa

SEQ ID NO: 44997 - DNA, 20 bp, Artificial Sequence
  MKO10044997_A_Rdh1
  gRNA
cttgtgtgacaagtagtgac

SEQ ID NO: 44998 - DNA, 20 bp, Artificial Sequence
  MKO10044998_A_Rdh1
  gRNA
cctgctgagtatcgagtgcg

SEQ ID NO: 44999 - DNA, 20 bp, Artificial Sequence
  MKO10044999_A_Rdh1
  gRNA
acacaagtcttgaagcctcc

SEQ ID NO: 45000 - DNA, 20 bp, Artificial Sequence
  MKO10045000_A_Rdh5
  gRNA
ccgtagtgggcctgtatagc

SEQ ID NO: 45001 - DNA, 20 bp, Artificial Sequence
  MKO10045001_A_Rdh5
  gRNA
ccggctacctccagctatac

SEQ ID NO: 45002 - DNA, 20 bp, Artificial Sequence
  MKO10045002_A_Rdh5
  gRNA
gatgttgaccacccgacccc

SEQ ID NO: 45003 - DNA, 20 bp, Artificial Sequence
  MKO10045003_A_Rdh7
  gRNA
acattagtcctgaacccgcc

SEQ ID NO: 45004 - DNA, 20 bp, Artificial Sequence
  MKO10045004_A_Rdh7
  gRNA
gtgtgatagcctctcgtagt

SEQ ID NO: 45005 - DNA, 20 bp, Artificial Sequence
  MKO10045005_A_Rdh7
  gRNA
acacaaagacactcgaccca

SEQ ID NO: 45006 - DNA, 20 bp, Artificial Sequence
  MKO10045006_A_Rdh8
  gRNA
agatattgaattgtcgcagc

SEQ ID NO: 45007 - DNA, 20 bp, Artificial Sequence
  MKO10045007_A_Rdh8
  gRNA
cactgctgaccaccacgatg

SEQ ID NO: 45008 - DNA, 20 bp, Artificial Sequence
  MKO10045008_A_Rdh8
  gRNA
catcattgcacacgtccagc

SEQ ID NO: 45009 - DNA, 20 bp, Artificial Sequence
  MKO10045009_A_Rdh9
  gRNA
gatcaacgtcgccagtgtct

SEQ ID NO: 45010 - DNA, 20 bp, Artificial Sequence
  MKO10045010_A_Rdh9
  gRNA
aactatgtggctctttctag

SEQ ID NO: 45011 - DNA, 20 bp, Artificial Sequence
  MKO10045011_A_Rdh9
  gRNA
tctgaaaaggctaaacgaat

SEQ ID NO: 45012 - DNA, 20 bp, Artificial Sequence
  MKO10045012_A_Rdm1
  gRNA
ggacgagccactgcagcgtt

SEQ ID NO: 45013 - DNA, 20 bp, Artificial Sequence
  MKO10045013_A_Rdm1
  gRNA
tgctgcccccctacggatgc

SEQ ID NO: 45014 - DNA, 20 bp, Artificial Sequence
  MKO10045014_A_Rdm1
  gRNA
atggtcgaaaaggatcatca

SEQ ID NO: 45015 - DNA, 20 bp, Artificial Sequence
  MKO10045015_A_Rdx
  gRNA
gccatccagcccaatacaac

SEQ ID NO: 45016 - DNA, 20 bp, Artificial Sequence
  MKO10045016_A_Rdx
  gRNA
gctctaaacttgaactgtaa

SEQ ID NO: 45017 - DNA, 20 bp, Artificial Sequence
  MKO10045017_A_Rdx
  gRNA
tatgctgtccaagccaagta

SEQ ID NO: 45018 - DNA, 20 bp, Artificial Sequence
  MKO10045018_A_Rec8
  gRNA
tatcaatgcgaatccgcagc

SEQ ID NO: 45019 - DNA, 20 bp, Artificial Sequence
  MKO10045019_A_Rec8
  gRNA
agagtgcaacctccggtggc

SEQ ID NO: 45020 - DNA, 20 bp, Artificial Sequence
  MKO10045020_A_Rec8
  gRNA
gggcggggcagcccggccac

SEQ ID NO: 45021 - DNA, 20 bp, Artificial Sequence
  MKO10045021_A_Reck
  gRNA
tgcatgaattcgtctttgcc

SEQ ID NO: 45022 - DNA, 20 bp, Artificial Sequence
  MKO10045022_A_Reck
  gRNA
ggggtatttaagaagtccga

SEQ ID NO: 45023 - DNA, 20 bp, Artificial Sequence
  MKO10045023_A_Reck
  gRNA
tattggcttggagtgccgac

SEQ ID NO: 45024 - DNA, 20 bp, Artificial Sequence
  MKO10045024_A_Recql4
  gRNA
tctgcgttgcagctcgactc

SEQ ID NO: 45025 - DNA, 20 bp, Artificial Sequence
  MKO10045025_A_Recql4
  gRNA
aacaaacgctttgtacgagt

SEQ ID NO: 45026 - DNA, 20 bp, Artificial Sequence
  MKO10045026_A_Recql4
  gRNA
acggagaagcctgccccgat

SEQ ID NO: 45027 - DNA, 20 bp, Artificial Sequence
  MKO10045027_A_Recql5
  gRNA
catgtgccaagcgggaacgt

SEQ ID NO: 45028 - DNA, 20 bp, Artificial Sequence
  MKO10045028_A_Recql5
  gRNA
ccgacgtctatggcaatctg

SEQ ID NO: 45029 - DNA, 20 bp, Artificial Sequence
  MKO10045029_A_Recql5
  gRNA
cttacctgcgtggtaagcct

SEQ ID NO: 45030 - DNA, 20 bp, Artificial Sequence
  MKO10045030_A_Recql
  gRNA
tttagaatggcatccgtctc

SEQ ID NO: 45031 - DNA, 20 bp, Artificial Sequence
  MKO10045031_A_Recql
  gRNA
ataccgtctgagcacagcgc

SEQ ID NO: 45032 - DNA, 20 bp, Artificial Sequence
  MKO10045032_A_Recql
  gRNA
ggctgaggcgagcagcgact

SEQ ID NO: 45033 - DNA, 20 bp, Artificial Sequence
  MKO10045033_A_Reep1
  gRNA
cgtctctgcaggcttatatt

SEQ ID NO: 45034 - DNA, 20 bp, Artificial Sequence
  MKO10045034_A_Reep1
  gRNA
tatgacgcccttgtgcactt

SEQ ID NO: 45035 - DNA, 20 bp, Artificial Sequence
  MKO10045035_A_Reep1
  gRNA
gccttgtatgaataatatgc

SEQ ID NO: 45036 - DNA, 20 bp, Artificial Sequence
  MKO10045036_A_Reep2
  gRNA
agagctatgagacgatgatg

SEQ ID NO: 45037 - DNA, 20 bp, Artificial Sequence
  MKO10045037_A_Reep2
  gRNA
gtgttgggtgcacgaacttg

SEQ ID NO: 45038 - DNA, 20 bp, Artificial Sequence
  MKO10045038_A_Reep2
  gRNA
cgtgaagaccaaaaacgtga

SEQ ID NO: 45039 - DNA, 20 bp, Artificial Sequence
  MKO10045039_A_Reep3
  gRNA
ccgtttcaatgacagtgtag

SEQ ID NO: 45040 - DNA, 20 bp, Artificial Sequence
  MKO10045040_A_Reep3
  gRNA
cgacagcagccaaatgacga

SEQ ID NO: 45041 - DNA, 20 bp, Artificial Sequence
  MKO10045041_A_Reep3
  gRNA
taaactcgcccctctagtgt

SEQ ID NO: 45042 - DNA, 20 bp, Artificial Sequence
  MKO10045042_A_Reep4
  gRNA
gatcgacgcgtgtatcgtgc

SEQ ID NO: 45043 - DNA, 20 bp, Artificial Sequence
  MKO10045043_A_Reep4
  gRNA
atccctatcccgccatgaga

SEQ ID NO: 45044 - DNA, 20 bp, Artificial Sequence
  MKO10045044_A_Reep4
  gRNA
gggatgggtggacaaacttt

SEQ ID NO: 45045 - DNA, 20 bp, Artificial Sequence
  MKO10045045_A_Reep5
  gRNA
ctgacgtactgggtggtata

SEQ ID NO: 45046 - DNA, 20 bp, Artificial Sequence
  MKO10045046_A_Reep5
  gRNA
gtctccaggtgtcatcggac

SEQ ID NO: 45047 - DNA, 20 bp, Artificial Sequence
  MKO10045047_A_Reep5
  gRNA
cttcctcaagcacgagtccc

SEQ ID NO: 45048 - DNA, 20 bp, Artificial Sequence
  MKO10045048_A_Reep6
  gRNA
ccagaaaacgttcgaagcgc

SEQ ID NO: 45049 - DNA, 20 bp, Artificial Sequence
  MKO10045049_A_Reep6
  gRNA
ttcgagcgccccgagcgctt

SEQ ID NO: 45050 - DNA, 20 bp, Artificial Sequence
  MKO10045050_A_Reep6
  gRNA
accttgcccgcgtagtagaa

SEQ ID NO: 45051 - DNA, 20 bp, Artificial Sequence
  MKO10045051_A_Reg1
  gRNA
tctcctaacagttccaatcg

SEQ ID NO: 45052 - DNA, 20 bp, Artificial Sequence
  MKO10045052_A_Reg1
  gRNA
gcactacagacgccaatgtc

SEQ ID NO: 45053 - DNA, 20 bp, Artificial Sequence
  MKO10045053_A_Reg1
  gRNA
agatacacagtagccacgat

SEQ ID NO: 45054 - DNA, 20 bp, Artificial Sequence
  MKO10045054_A_Reg2
  gRNA
cttcactatagaaccgtcgt

SEQ ID NO: 45055 - DNA, 20 bp, Artificial Sequence
  MKO10045055_A_Reg2
  gRNA
gctccaagcactgccaaccg

SEQ ID NO: 45056 - DNA, 20 bp, Artificial Sequence
  MKO10045056_A_Reg2
  gRNA
gagcaactttgtggcctcgc

SEQ ID NO: 45057 - DNA, 20 bp, Artificial Sequence
  MKO10045057_A_Reg3a
  gRNA
gcgataagccttgtaaccca

SEQ ID NO: 45058 - DNA, 20 bp, Artificial Sequence
  MKO10045058_A_Reg3a
  gRNA
tagttatgacacctaaatcc

SEQ ID NO: 45059 - DNA, 20 bp, Artificial Sequence
  MKO10045059_A_Reg3a
  gRNA
ccttcctctactgtcaaccg

SEQ ID NO: 45060 - DNA, 20 bp, Artificial Sequence
  MKO10045060_A_Reg3b
  gRNA
cgcacgcattagttgcccca

SEQ ID NO: 45061 - DNA, 20 bp, Artificial Sequence
  MKO10045061_A_Reg3b
  gRNA
agctaccaatacacttggat

SEQ ID NO: 45062 - DNA, 20 bp, Artificial Sequence
  MKO10045062_A_Reg3b
  gRNA
cgctattgagcacagatacg

SEQ ID NO: 45063 - DNA, 20 bp, Artificial Sequence
  MKO10045063_A_Reg3d
  gRNA
accctctgaccttctataac

SEQ ID NO: 45064 - DNA, 20 bp, Artificial Sequence
  MKO10045064_A_Reg3d
  gRNA
tggtatctcccagttataga

SEQ ID NO: 45065 - DNA, 20 bp, Artificial Sequence
  MKO10045065_A_Reg3d
  gRNA
agacccttcatagcatgtcc

SEQ ID NO: 45066 - DNA, 20 bp, Artificial Sequence
  MKO10045066_A_Reg3g
  gRNA
atctcaccagtgtcgggtca

SEQ ID NO: 45067 - DNA, 20 bp, Artificial Sequence
  MKO10045067_A_Reg3g
  gRNA
ggtaccctgtcaagagcctc

SEQ ID NO: 45068 - DNA, 20 bp, Artificial Sequence
  MKO10045068_A_Reg3g
  gRNA
cctagatggcctgccaaaag

SEQ ID NO: 45069 - DNA, 20 bp, Artificial Sequence
  MKO10045069_A_Reg4
  gRNA
tgggattccagcgtctgtac

SEQ ID NO: 45070 - DNA, 20 bp, Artificial Sequence
  MKO10045070_A_Reg4
  gRNA
gacctatagtaaaaccatcc

SEQ ID NO: 45071 - DNA, 20 bp, Artificial Sequence
  MKO10045071_A_Reg4
  gRNA
ggcatctgtcttgaatcaaa

SEQ ID NO: 45072 - DNA, 20 bp, Artificial Sequence
  MKO10045072_A_Rela
  gRNA
gcgattccgctataaatgcg

SEQ ID NO: 45073 - DNA, 20 bp, Artificial Sequence
  MKO10045073_A_Rela
  gRNA
tcatcgaacagccgaagcaa

SEQ ID NO: 45074 - DNA, 20 bp, Artificial Sequence
  MKO10045074_A_Rela
  gRNA
gcccagaccgcagtatccat

SEQ ID NO: 45075 - DNA, 20 bp, Artificial Sequence
  MKO10045075_A_Relb
  gRNA
agcggccctcgcactcgtag

SEQ ID NO: 45076 - DNA, 20 bp, Artificial Sequence
  MKO10045076_A_Relb
  gRNA
gcgcttccgctacgagtgcg

SEQ ID NO: 45077 - DNA, 20 bp, Artificial Sequence
  MKO10045077_A_Relb
  gRNA
actgcacggacggcgtctgc

SEQ ID NO: 45078 - DNA, 20 bp, Artificial Sequence
  MKO10045078_A_Rell1
  gRNA
acggccacggcgacaaggcg

SEQ ID NO: 45079 - DNA, 20 bp, Artificial Sequence
  MKO10045079_A_Rell1
  gRNA
acagcgtgggcgatattgaa

SEQ ID NO: 45080 - DNA, 20 bp, Artificial Sequence
  MKO10045080_A_Rell1
  gRNA
gttccgcctctgttgtacac

SEQ ID NO: 45081 - DNA, 20 bp, Artificial Sequence
  MKO10045081_A_Rell2
  gRNA
tgtccgtcagggtcgctcta

SEQ ID NO: 45082 - DNA, 20 bp, Artificial Sequence
  MKO10045082_A_Rell2
  gRNA
ggggtcccctcaagtgtaca

SEQ ID NO: 45083 - DNA, 20 bp, Artificial Sequence
  MKO10045083_A_Rell2
  gRNA
ccagccgcctgactaccccc

SEQ ID NO: 45084 - DNA, 20 bp, Artificial Sequence
  MKO10045084_A_Reln
  gRNA
atcatgtccgaccaccagtt

SEQ ID NO: 45085 - DNA, 20 bp, Artificial Sequence
  MKO10045085_A_Reln
  gRNA
ggacggcttaccgaatccaa

SEQ ID NO: 45086 - DNA, 20 bp, Artificial Sequence
  MKO10045086_A_Reln
  gRNA
ccagggctactgcaacacat

SEQ ID NO: 45087 - DNA, 20 bp, Artificial Sequence
  MKO10045087_A_Relt
  gRNA
ctgccacttcgacgccacgc

SEQ ID NO: 45088 - DNA, 20 bp, Artificial Sequence
  MKO10045088_A_Relt
  gRNA
ccgaggttcaccgttgctac

SEQ ID NO: 45089 - DNA, 20 bp, Artificial Sequence
  MKO10045089_A_Relt
  gRNA
gcatggataggagttccatg

SEQ ID NO: 45090 - DNA, 20 bp, Artificial Sequence
  MKO10045090_A_Rel
  gRNA
gtgaagttaccatgttcatc

SEQ ID NO: 45091 - DNA, 20 bp, Artificial Sequence
  MKO10045091_A_Rel
  gRNA
cacttacggttgtcataaat

SEQ ID NO: 45092 - DNA, 20 bp, Artificial Sequence
  MKO10045092_A_Rel
  gRNA
ttgtctgtgctgcgctcccc

SEQ ID NO: 45093 - DNA, 20 bp, Artificial Sequence
  MKO10045093_A_Rem1
  gRNA
gcttgctcgacgtcgcagag

SEQ ID NO: 45094 - DNA, 20 bp, Artificial Sequence
  MKO10045094_A_Rem1
  gRNA
ccagcgcgcccgccgattcc

SEQ ID NO: 45095 - DNA, 20 bp, Artificial Sequence
  MKO10045095_A_Rem1
  gRNA
ccagctgaggcgcacgcatc

SEQ ID NO: 45096 - DNA, 20 bp, Artificial Sequence
  MKO10045096_A_Rem2
  gRNA
aggctctcacggcgcgtagg

SEQ ID NO: 45097 - DNA, 20 bp, Artificial Sequence
  MKO10045097_A_Rem2
  gRNA
ttgaagaacttagcgttgcg

SEQ ID NO: 45098 - DNA, 20 bp, Artificial Sequence
  MKO10045098_A_Rem2
  gRNA
caccatgatccgtctctcat

SEQ ID NO: 45099 - DNA, 20 bp, Artificial Sequence
  MKO10045099_A_Ren1
  gRNA
tttcccgctcaggccgttgg

SEQ ID NO: 45100 - DNA, 20 bp, Artificial Sequence
  MKO10045100_A_Ren1
  gRNA
aaccccgccaacggcctgag

SEQ ID NO: 45101 - DNA, 20 bp, Artificial Sequence
  MKO10045101_A_Ren1
  gRNA
tacttacagtcaccgagtcc

SEQ ID NO: 45102 - DNA, 20 bp, Artificial Sequence
  MKO10045102_A_Ren2
  gRNA
tttcccgctcaggccgttgg

SEQ ID NO: 45103 - DNA, 20 bp, Artificial Sequence
  MKO10045103_A_Ren2
  gRNA
aaccccgccaacggcctgag

SEQ ID NO: 45104 - DNA, 20 bp, Artificial Sequence
  MKO10045104_A_Ren2
  gRNA
tacttacagtcaccgagtcc

SEQ ID NO: 45105 - DNA, 20 bp, Artificial Sequence
  MKO10045105_A_Renbp
  gRNA
ttgatcgtgtgatcgctttc

SEQ ID NO: 45106 - DNA, 20 bp, Artificial Sequence
  MKO10045106_A_Renbp
  gRNA
ggatagctaacccgtgttcc

SEQ ID NO: 45107 - DNA, 20 bp, Artificial Sequence
  MKO10045107_A_Renbp
  gRNA
cttccgccgtgttgagcttc

SEQ ID NO: 45108 - DNA, 20 bp, Artificial Sequence
  MKO10045108_A_Rep15
  gRNA
tgaagccgtatttgcttatc

SEQ ID NO: 45109 - DNA, 20 bp, Artificial Sequence
  MKO10045109_A_Rep15
  gRNA
cagtcagtgaactcgctgca

SEQ ID NO: 45110 - DNA, 20 bp, Artificial Sequence
  MKO10045110_A_Rep15
  gRNA
tcagcggatactcaaacccg

SEQ ID NO: 45111 - DNA, 20 bp, Artificial Sequence
  MKO10045111_A_Repin1
  gRNA
acggcgaccacactcctcgc

SEQ ID NO: 45112 - DNA, 20 bp, Artificial Sequence
  MKO10045112_A_Repin1
  gRNA
gtatgcgccggtgcgaggtc

SEQ ID NO: 45113 - DNA, 20 bp, Artificial Sequence
  MKO10045113_A_Repin1
  gRNA
ctgaatgcgacagacgcttc

SEQ ID NO: 45114 - DNA, 20 bp, Artificial Sequence
  MKO10045114_A_Reps1
  gRNA
cgccgagcagaaatactact

SEQ ID NO: 45115 - DNA, 20 bp, Artificial Sequence
  MKO10045115_A_Reps1
  gRNA
tacctggaggaccacgtcgt

SEQ ID NO: 45116 - DNA, 20 bp, Artificial Sequence
  MKO10045116_A_Reps1
  gRNA
tgaaccgcgtcatggcttcc

SEQ ID NO: 45117 - DNA, 20 bp, Artificial Sequence
  MKO10045117_A_Reps2
  gRNA
aagagatgcctgccgacgaa

SEQ ID NO: 45118 - DNA, 20 bp, Artificial Sequence
  MKO10045118_A_Reps2
  gRNA
caggagccaaaccctttcgt

SEQ ID NO: 45119 - DNA, 20 bp, Artificial Sequence
  MKO10045119_A_Reps2
  gRNA
cttccccgcctcattaccag

SEQ ID NO: 45120 - DNA, 20 bp, Artificial Sequence
  MKO10045120_A_Rer1
  gRNA
gtacattgtgacctacgcct

SEQ ID NO: 45121 - DNA, 20 bp, Artificial Sequence
  MKO10045121_A_Rer1
  gRNA
gacgttaaaagcctcgaaga

SEQ ID NO: 45122 - DNA, 20 bp, Artificial Sequence
  MKO10045122_A_Rer1
  gRNA
aatttcgtcccttcattcga

SEQ ID NO: 45123 - DNA, 20 bp, Artificial Sequence
  MKO10045123_A_Rere
  gRNA
actgtgtgtatatcgagagt

SEQ ID NO: 45124 - DNA, 20 bp, Artificial Sequence
  MKO10045124_A_Rere
  gRNA
agttcccgattcttgatgac

SEQ ID NO: 45125 - DNA, 20 bp, Artificial Sequence
  MKO10045125_A_Rere
  gRNA
atctactcatgaacgtcaaa

SEQ ID NO: 45126 - DNA, 20 bp, Artificial Sequence
  MKO10045126_A_Rergl
  gRNA
gctcccgaattctgtagata

SEQ ID NO: 45127 - DNA, 20 bp, Artificial Sequence
  MKO10045127_A_Rergl
  gRNA
ttccttaccaagcgattcat

SEQ ID NO: 45128 - DNA, 20 bp, Artificial Sequence
  MKO10045128_A_Rergl
  gRNA
caccgacgactcattgtaaa

SEQ ID NO: 45129 - DNA, 20 bp, Artificial Sequence
  MKO10045129_A_Rerg
  gRNA
gtttacgacatcaccgatcg

SEQ ID NO: 45130 - DNA, 20 bp, Artificial Sequence
  MKO10045130_A_Rerg
  gRNA
ttcttcgaagctccctcgat

SEQ ID NO: 45131 - DNA, 20 bp, Artificial Sequence
  MKO10045131_A_Rerg
  gRNA
gtactcccagatgaaccgtt

SEQ ID NO: 45132 - DNA, 20 bp, Artificial Sequence
  MKO10045132_A_Resp18
  gRNA
ttccaccagattgtacccga

SEQ ID NO: 45133 - DNA, 20 bp, Artificial Sequence
  MKO10045133_A_Resp18
  gRNA
gcttaccttcgggtacaatc

SEQ ID NO: 45134 - DNA, 20 bp, Artificial Sequence
  MKO10045134_A_Resp18
  gRNA
cctcaccccagcgtttgccg

SEQ ID NO: 45135 - DNA, 20 bp, Artificial Sequence
  MKO10045135_A_Rest
  gRNA
catcatctgcacgtacacga

SEQ ID NO: 45136 - DNA, 20 bp, Artificial Sequence
  MKO10045136_A_Rest
  gRNA
atcgcctgcgaaacctcccc

SEQ ID NO: 45137 - DNA, 20 bp, Artificial Sequence
  MKO10045137_A_Rest
  gRNA
accaacgtgccaaagggcgg

SEQ ID NO: 45138 - DNA, 20 bp, Artificial Sequence
  MKO10045138_A_Retnla
  gRNA
attctccacgataatctcta

SEQ ID NO: 45139 - DNA, 20 bp, Artificial Sequence
  MKO10045139_A_Retnla
  gRNA
gcctgtgcttactcgttgac

SEQ ID NO: 45140 - DNA, 20 bp, Artificial Sequence
  MKO10045140_A_Retnla
  gRNA
tccagtcaacgagtaagcac

SEQ ID NO: 45141 - DNA, 20 bp, Artificial Sequence
  MKO10045141_A_Retnlb
  gRNA
gcgttccctgggactatcag

SEQ ID NO: 45142 - DNA, 20 bp, Artificial Sequence
  MKO10045142_A_Retnlb
  gRNA
agaagacgtgacactagtgc

SEQ ID NO: 45143 - DNA, 20 bp, Artificial Sequence
  MKO10045143_A_Retnlb
  gRNA
tgcactagtgtcacgtcttc

SEQ ID NO: 45144 - DNA, 20 bp, Artificial Sequence
  MKO10045144_A_Retnlg
  gRNA
ggggaccttagaatctattg

SEQ ID NO: 45145 - DNA, 20 bp, Artificial Sequence
  MKO10045145_A_Retnlg
  gRNA
tgaagccgtgatactagtac

SEQ ID NO: 45146 - DNA, 20 bp, Artificial Sequence
  MKO10045146_A_Retnlg
  gRNA
caccgcccgttgctgccaac

SEQ ID NO: 45147 - DNA, 20 bp, Artificial Sequence
  MKO10045147_A_Retn
  gRNA
acgaatgtcccacgagccac

SEQ ID NO: 45148 - DNA, 20 bp, Artificial Sequence
  MKO10045148_A_Retn
  gRNA
cgacctgcagcttacagcag

SEQ ID NO: 45149 - DNA, 20 bp, Artificial Sequence
  MKO10045149_A_Retn
  gRNA
aagttggcctcctgcccaga

SEQ ID NO: 45150 - DNA, 20 bp, Artificial Sequence
  MKO10045150_A_Retsat
  gRNA
atgacaacagccgcccgcct

SEQ ID NO: 45151 - DNA, 20 bp, Artificial Sequence
  MKO10045151_A_Retsat
  gRNA
gtggtgatcggcagcggcat

SEQ ID NO: 45152 - DNA, 20 bp, Artificial Sequence
  MKO10045152_A_Retsat
  gRNA
atctcactggaaccccctcg

SEQ ID NO: 45153 - DNA, 20 bp, Artificial Sequence
  MKO10045153_A_Ret
  gRNA
gcgatggcgaaagcgacgtc

SEQ ID NO: 45154 - DNA, 20 bp, Artificial Sequence
  MKO10045154_A_Ret
  gRNA
tctatggcgtctaccgtaca

SEQ ID NO: 45155 - DNA, 20 bp, Artificial Sequence
  MKO10045155_A_Ret
  gRNA
agaagtgccgagcttccgcc

SEQ ID NO: 45156 - DNA, 20 bp, Artificial Sequence
  MKO10045156_A_Rev1
  gRNA
acggcgtctgcaatatttag

SEQ ID NO: 45157 - DNA, 20 bp, Artificial Sequence
  MKO10045157_A_Rev1
  gRNA
tgaaatgaagttgcagtccg

SEQ ID NO: 45158 - DNA, 20 bp, Artificial Sequence
  MKO10045158_A_Rev1
  gRNA
ttggtcgtagggcgggtaca

SEQ ID NO: 45159 - DNA, 20 bp, Artificial Sequence
  MKO10045159_A_Rev3l
  gRNA
tagggaatatgcgcttcatg

SEQ ID NO: 45160 - DNA, 20 bp, Artificial Sequence
  MKO10045160_A_Rev3l
  gRNA
tacctctatgtgccatacga

SEQ ID NO: 45161 - DNA, 20 bp, Artificial Sequence
  MKO10045161_A_Rev3l
  gRNA
tgctgtccataaccatcgta

SEQ ID NO: 45162 - DNA, 20 bp, Artificial Sequence
  MKO10045162_A_Rex2
  gRNA
ttgttcttctcccagattct

SEQ ID NO: 45163 - DNA, 20 bp, Artificial Sequence
  MKO10045163_A_Rex2
  gRNA
tttgctcctcaccaagaatc

SEQ ID NO: 45164 - DNA, 20 bp, Artificial Sequence
  MKO10045164_A_Rex2
  gRNA
gtccaaaaacacgtccttga

SEQ ID NO: 45165 - DNA, 20 bp, Artificial Sequence
  MKO10045165_A_Rexo1
  gRNA
ggccacccggcgtgtaagtt

SEQ ID NO: 45166 - DNA, 20 bp, Artificial Sequence
  MKO10045166_A_Rexo1
  gRNA
agcacgccccccgactgctc

SEQ ID NO: 45167 - DNA, 20 bp, Artificial Sequence
  MKO10045167_A_Rexo1
  gRNA
ggaacgcaaggcccgctccc

SEQ ID NO: 45168 - DNA, 20 bp, Artificial Sequence
  MKO10045168_A_Rexo2
  gRNA
atgctgtccagcaactcgtc

SEQ ID NO: 45169 - DNA, 20 bp, Artificial Sequence
  MKO10045169_A_Rexo2
  gRNA
aggagtctgctgtcgtacaa

SEQ ID NO: 45170 - DNA, 20 bp, Artificial Sequence
  MKO10045170_A_Rexo2
  gRNA
taagatcagagtcagttatc

SEQ ID NO: 45171 - DNA, 20 bp, Artificial Sequence
  MKO10045171_A_Rexo4
  gRNA
tgatacttactcagtgggcg

SEQ ID NO: 45172 - DNA, 20 bp, Artificial Sequence
  MKO10045172_A_Rexo4
  gRNA
ccctagcttgacaaaagcct

SEQ ID NO: 45173 - DNA, 20 bp, Artificial Sequence
  MKO10045173_A_Rexo4
  gRNA
gtgtcgatcgtgaaccagta

SEQ ID NO: 45174 - DNA, 20 bp, Artificial Sequence
  MKO10045174_A_Rfc1
  gRNA
cttacctgtctcagagacgt

SEQ ID NO: 45175 - DNA, 20 bp, Artificial Sequence
  MKO10045175_A_Rfc1
  gRNA
acgtcagtgctcgactattt

SEQ ID NO: 45176 - DNA, 20 bp, Artificial Sequence
  MKO10045176_A_Rfc1
  gRNA
tttggaggcgtcctctttac

SEQ ID NO: 45177 - DNA, 20 bp, Artificial Sequence
  MKO10045177_A_Rfc2
  gRNA
attgaagctcaacgaaatag

SEQ ID NO: 45178 - DNA, 20 bp, Artificial Sequence
  MKO10045178_A_Rfc2
  gRNA
gttccaggactgcgtccttc

SEQ ID NO: 45179 - DNA, 20 bp, Artificial Sequence
  MKO10045179_A_Rfc2
  gRNA
cttgctgggccccgccctga

SEQ ID NO: 45180 - DNA, 20 bp, Artificial Sequence
  MKO10045180_A_Rfc3
  gRNA
cagcgaccgagttgtaattc

SEQ ID NO: 45181 - DNA, 20 bp, Artificial Sequence
  MKO10045181_A_Rfc3
  gRNA
tcggatcgggggtatcacct

SEQ ID NO: 45182 - DNA, 20 bp, Artificial Sequence
  MKO10045182_A_Rfc3
  gRNA
tgatacccccgatccgaagc

SEQ ID NO: 45183 - DNA, 20 bp, Artificial Sequence
  MKO10045183_A_Rfc4
  gRNA
ttaaatgcatctgatgaacg

SEQ ID NO: 45184 - DNA, 20 bp, Artificial Sequence
  MKO10045184_A_Rfc4
  gRNA
actcttaatcgaaagagttc

SEQ ID NO: 45185 - DNA, 20 bp, Artificial Sequence
  MKO10045185_A_Rfc4
  gRNA
ctccagccgtccaaagtgtg

SEQ ID NO: 45186 - DNA, 20 bp, Artificial Sequence
  MKO10045186_A_Rfc5
  gRNA
gcccagaacgccttgagacg

SEQ ID NO: 45187 - DNA, 20 bp, Artificial Sequence
  MKO10045187_A_Rfc5
  gRNA
cccgaacaatatcgatccct

SEQ ID NO: 45188 - DNA, 20 bp, Artificial Sequence
  MKO10045188_A_Rfc5
  gRNA
gcaaacctcacctcgtctca

SEQ ID NO: 45189 - DNA, 20 bp, Artificial Sequence
  MKO10045189_A_Rfesd
  gRNA
gactctgactattatgccac

SEQ ID NO: 45190 - DNA, 20 bp, Artificial Sequence
  MKO10045190_A_Rfesd
  gRNA
ttctggagggcccttacact

SEQ ID NO: 45191 - DNA, 20 bp, Artificial Sequence
  MKO10045191_A_Rfesd
  gRNA
attgccgttatccaccttca

SEQ ID NO: 45192 - DNA, 20 bp, Artificial Sequence
  MKO10045192_A_Rffl
  gRNA
ccttcagctgccgtacggtc

SEQ ID NO: 45193 - DNA, 20 bp, Artificial Sequence
  MKO10045193_A_Rffl
  gRNA
tccgggttgtgcttgcgaaa

SEQ ID NO: 45194 - DNA, 20 bp, Artificial Sequence
  MKO10045194_A_Rffl
  gRNA
acattgaaggcctgaccgta

SEQ ID NO: 45195 - DNA, 20 bp, Artificial Sequence
  MKO10045195_A_Rfk
  gRNA
gtggtgcgtggcttcggccg

SEQ ID NO: 45196 - DNA, 20 bp, Artificial Sequence
  MKO10045196_A_Rfk
  gRNA
tattatggttgggccagcgt

SEQ ID NO: 45197 - DNA, 20 bp, Artificial Sequence
  MKO10045197_A_Rfk
  gRNA
ggccgaagccacgcaccacc

SEQ ID NO: 45198 - DNA, 20 bp, Artificial Sequence
  MKO10045198_A_Rfng
  gRNA
ttgccctcaaaatgagcccg

SEQ ID NO: 45199 - DNA, 20 bp, Artificial Sequence
  MKO10045199_A_Rfng
  gRNA
ggtccaggctaggtcgcccc

SEQ ID NO: 45200 - DNA, 20 bp, Artificial Sequence
  MKO10045200_A_Rfng
  gRNA
ggtgcgcacagcagagcaat

SEQ ID NO: 45201 - DNA, 20 bp, Artificial Sequence
  MKO10045201_A_Rfpl3s
  gRNA
tggcaaatcgtcactagttg

SEQ ID NO: 45202 - DNA, 20 bp, Artificial Sequence
  MKO10045202_A_Rfpl3s
  gRNA
ctaatttgcaggtccaacca

SEQ ID NO: 45203 - DNA, 20 bp, Artificial Sequence
  MKO10045203_A_Rfpl3s
  gRNA
tgccactgtattcatgatcc

SEQ ID NO: 45204 - DNA, 20 bp, Artificial Sequence
  MKO10045204_A_Rfpl4b
  gRNA
ggaaccctctaatgatttaa

SEQ ID NO: 45205 - DNA, 20 bp, Artificial Sequence
  MKO10045205_A_Rfpl4b
  gRNA
agtgggagttgtccacgaca

SEQ ID NO: 45206 - DNA, 20 bp, Artificial Sequence
  MKO10045206_A_Rfpl4b
  gRNA
attaccccatcatacttgac

SEQ ID NO: 45207 - DNA, 20 bp, Artificial Sequence
  MKO10045207_A_Rfpl4
  gRNA
atgcccactctacgtagccg

SEQ ID NO: 45208 - DNA, 20 bp, Artificial Sequence
  MKO10045208_A_Rfpl4
  gRNA
tcacttcaggccgccattac

SEQ ID NO: 45209 - DNA, 20 bp, Artificial Sequence
  MKO10045209_A_Rfpl4
  gRNA
cacagtacaccgtccccttc

SEQ ID NO: 45210 - DNA, 20 bp, Artificial Sequence
  MKO10045210_A_Rft1
  gRNA
gtacaactcacgttagccac

SEQ ID NO: 45211 - DNA, 20 bp, Artificial Sequence
  MKO10045211_A_Rft1
  gRNA
acaggacaagaagagccgtc

SEQ ID NO: 45212 - DNA, 20 bp, Artificial Sequence
  MKO10045212_A_Rft1
  gRNA
ttccgaagagcttgtctgag

SEQ ID NO: 45213 - DNA, 20 bp, Artificial Sequence
  MKO10045213_A_Rftn1
  gRNA
tgccgagatcctccgccacg

SEQ ID NO: 45214 - DNA, 20 bp, Artificial Sequence
  MKO10045214_A_Rftn1
  gRNA
aaggctgagcttcacgacga

SEQ ID NO: 45215 - DNA, 20 bp, Artificial Sequence
  MKO10045215_A_Rftn1
  gRNA
tgcaggagtgaaccgaagac

SEQ ID NO: 45216 - DNA, 20 bp, Artificial Sequence
  MKO10045216_A_Rftn2
  gRNA
accatgtacagcttaccatc

SEQ ID NO: 45217 - DNA, 20 bp, Artificial Sequence
  MKO10045217_A_Rftn2
  gRNA
tcccttccgcgtcactttca

SEQ ID NO: 45218 - DNA, 20 bp, Artificial Sequence
  MKO10045218_A_Rftn2
  gRNA
aaggcgcgcaaggcttgtga

SEQ ID NO: 45219 - DNA, 20 bp, Artificial Sequence
  MKO10045219_A_Rfwd2
  gRNA
atacggtgctactcactgag

SEQ ID NO: 45220 - DNA, 20 bp, Artificial Sequence
  MKO10045220_A_Rfwd2
  gRNA
gatggtcttaccaaaagctg

SEQ ID NO: 45221 - DNA, 20 bp, Artificial Sequence
  MKO10045221_A_Rfwd2
  gRNA
aaagactcacccaagaaatt

SEQ ID NO: 45222 - DNA, 20 bp, Artificial Sequence
  MKO10045222_A_Rfwd3
  gRNA
tctggtgctaacccaaccgc

SEQ ID NO: 45223 - DNA, 20 bp, Artificial Sequence
  MKO10045223_A_Rfwd3
  gRNA
atctagcagctccggcggtt

SEQ ID NO: 45224 - DNA, 20 bp, Artificial Sequence
  MKO10045224_A_Rfwd3
  gRNA
agatgatgcagtccctaaag

SEQ ID NO: 45225 - DNA, 20 bp, Artificial Sequence
  MKO10045225_A_Rfx1
  gRNA
cctgcagcttaccaacattc

SEQ ID NO: 45226 - DNA, 20 bp, Artificial Sequence
  MKO10045226_A_Rfx1
  gRNA
cttgggtgggaacaccggtc

SEQ ID NO: 45227 - DNA, 20 bp, Artificial Sequence
  MKO10045227_A_Rfx1
  gRNA
ccactcttagtgcccggtgc

SEQ ID NO: 45228 - DNA, 20 bp, Artificial Sequence
  MKO10045228_A_Rfx2
  gRNA
ggggacgctgtctacgccaa

SEQ ID NO: 45229 - DNA, 20 bp, Artificial Sequence
  MKO10045229_A_Rfx2
  gRNA
gcacacgtacatggctccgt

SEQ ID NO: 45230 - DNA, 20 bp, Artificial Sequence
  MKO10045230_A_Rfx2
  gRNA
agcagattcgccagcgtcag

SEQ ID NO: 45231 - DNA, 20 bp, Artificial Sequence
  MKO10045231_A_Rfx3
  gRNA
ctatttgatcggcaattcaa

SEQ ID NO: 45232 - DNA, 20 bp, Artificial Sequence
  MKO10045232_A_Rfx3
  gRNA
gggattcagatgggcgtcac

SEQ ID NO: 45233 - DNA, 20 bp, Artificial Sequence
  MKO10045233_A_Rfx3
  gRNA
ccggtcaatgccgcctcttt

SEQ ID NO: 45234 - DNA, 20 bp, Artificial Sequence
  MKO10045234_A_Rfx4
  gRNA
ctccacggtggtgaacatcg

SEQ ID NO: 45235 - DNA, 20 bp, Artificial Sequence
  MKO10045235_A_Rfx4
  gRNA
cggcaacgcctgcagcaccg

SEQ ID NO: 45236 - DNA, 20 bp, Artificial Sequence
  MKO10045236_A_Rfx4
  gRNA
tattctccccggtccaagct

SEQ ID NO: 45237 - DNA, 20 bp, Artificial Sequence
  MKO10045237_A_Rfx5
  gRNA
gtacctcttctcgccaacgc

SEQ ID NO: 45238 - DNA, 20 bp, Artificial Sequence
  MKO10045238_A_Rfx5
  gRNA
tgtgctgagcgggcggcaac

SEQ ID NO: 45239 - DNA, 20 bp, Artificial Sequence
  MKO10045239_A_Rfx5
  gRNA
agtcttcgggccttgatgtc

SEQ ID NO: 45240 - DNA, 20 bp, Artificial Sequence
  MKO10045240_A_Rfx6
  gRNA
agaaagatgtctgtcgcttc

SEQ ID NO: 45241 - DNA, 20 bp, Artificial Sequence
  MKO10045241_A_Rfx6
  gRNA
atactcgacaatgccatcaa

SEQ ID NO: 45242 - DNA, 20 bp, Artificial Sequence
  MKO10045242_A_Rfx6
  gRNA
agatacaaatcttcgcaaaa

SEQ ID NO: 45243 - DNA, 20 bp, Artificial Sequence
  MKO10045243_A_Rfx7
  gRNA
ctgtgcccgactagatgaca

SEQ ID NO: 45244 - DNA, 20 bp, Artificial Sequence
  MKO10045244_A_Rfx7
  gRNA
tgagacgtcactccccaaac

SEQ ID NO: 45245 - DNA, 20 bp, Artificial Sequence
  MKO10045245_A_Rfx7
  gRNA
aggagctactgcgacaatct

SEQ ID NO: 45246 - DNA, 20 bp, Artificial Sequence
  MKO10045246_A_Rfx8
  gRNA
caagtcaacccagcgacatt

SEQ ID NO: 45247 - DNA, 20 bp, Artificial Sequence
  MKO10045247_A_Rfx8
  gRNA
ctatagcaacgttctccagc

SEQ ID NO: 45248 - DNA, 20 bp, Artificial Sequence
  MKO10045248_A_Rfx8
  gRNA
gagatttatgtcgagacctg

SEQ ID NO: 45249 - DNA, 20 bp, Artificial Sequence
  MKO10045249_A_Rfxank
  gRNA
gtggctacacggacatcgtg

SEQ ID NO: 45250 - DNA, 20 bp, Artificial Sequence
  MKO10045250_A_Rfxank
  gRNA
atagacgtacccagtctagc

SEQ ID NO: 45251 - DNA, 20 bp, Artificial Sequence
  MKO10045251_A_Rfxank
  gRNA
ggggtgaagccacgctcatc

SEQ ID NO: 45252 - DNA, 20 bp, Artificial Sequence
  MKO10045252_A_Rfxap
  gRNA
ctccaagacctgcacgtacg

SEQ ID NO: 45253 - DNA, 20 bp, Artificial Sequence
  MKO10045253_A_Rfxap
  gRNA
ggacgacgacgccgacctgc

SEQ ID NO: 45254 - DNA, 20 bp, Artificial Sequence
  MKO10045254_A_Rfxap
  gRNA
tcttgcagggcgatcaccaa

SEQ ID NO: 45255 - DNA, 20 bp, Artificial Sequence
  MKO10045255_A_Rgag1
  gRNA
acgcttcaacaatatgatga

SEQ ID NO: 45256 - DNA, 20 bp, Artificial Sequence
  MKO10045256_A_Rgag1
  gRNA
tagagccgtcattagcactt

SEQ ID NO: 45257 - DNA, 20 bp, Artificial Sequence
  MKO10045257_A_Rgag1
  gRNA
tttcaagtagtaacagcgtt

SEQ ID NO: 45258 - DNA, 20 bp, Artificial Sequence
  MKO10045258_A_Rgag4
  gRNA
atgtctcgagctacatccgc

SEQ ID NO: 45259 - DNA, 20 bp, Artificial Sequence
  MKO10045259_A_Rgag4
  gRNA
ccagaatcgagtcccacttc

SEQ ID NO: 45260 - DNA, 20 bp, Artificial Sequence
  MKO10045260_A_Rgag4
  gRNA
ctatggcggagctaatggtc

SEQ ID NO: 45261 - DNA, 20 bp, Artificial Sequence
  MKO10045261_A_Rgcc
  gRNA
gtcgaactcgcacagcacgt

SEQ ID NO: 45262 - DNA, 20 bp, Artificial Sequence
  MKO10045262_A_Rgcc
  gRNA
cgtgctgtgcgagttcgacg

SEQ ID NO: 45263 - DNA, 20 bp, Artificial Sequence
  MKO10045263_A_Rgcc
  gRNA
cgaagacttcattgccgatc

SEQ ID NO: 45264 - DNA, 20 bp, Artificial Sequence
  MKO10045264_A_Rgl1
  gRNA
tccctggcagagctcgattc

SEQ ID NO: 45265 - DNA, 20 bp, Artificial Sequence
  MKO10045265_A_Rgl1
  gRNA
agtacgagacctgcaagatc

SEQ ID NO: 45266 - DNA, 20 bp, Artificial Sequence
  MKO10045266_A_Rgl1
  gRNA
tgtccccaaaagccgtcagc

SEQ ID NO: 45267 - DNA, 20 bp, Artificial Sequence
  MKO10045267_A_Rgl2
  gRNA
gttcggccaagtggtcagcg

SEQ ID NO: 45268 - DNA, 20 bp, Artificial Sequence
  MKO10045268_A_Rgl2
  gRNA
ctgtcacaagccgccagtac

SEQ ID NO: 45269 - DNA, 20 bp, Artificial Sequence
  MKO10045269_A_Rgl2
  gRNA
ccacccgggcccggaggttt

SEQ ID NO: 45270 - DNA, 20 bp, Artificial Sequence
  MKO10045270_A_Rgl3
  gRNA
tgtacccacagcccgcgttt

SEQ ID NO: 45271 - DNA, 20 bp, Artificial Sequence
  MKO10045271_A_Rgl3
  gRNA
cctcagcgcccgcaccttgc

SEQ ID NO: 45272 - DNA, 20 bp, Artificial Sequence
  MKO10045272_A_Rgl3
  gRNA
ccgtgtacagcgtctccctg

SEQ ID NO: 45273 - DNA, 20 bp, Artificial Sequence
  MKO10045273_A_Rgma
  gRNA
cgaggaggtagtcaacgccg

SEQ ID NO: 45274 - DNA, 20 bp, Artificial Sequence
  MKO10045274_A_Rgma
  gRNA
cggggctatccgagcgctcc

SEQ ID NO: 45275 - DNA, 20 bp, Artificial Sequence
  MKO10045275_A_Rgma
  gRNA
cgagggtcggccacaatccc

SEQ ID NO: 45276 - DNA, 20 bp, Artificial Sequence
  MKO10045276_A_Rgmb
  gRNA
tcaagtgacgaacgtgcctg

SEQ ID NO: 45277 - DNA, 20 bp, Artificial Sequence
  MKO10045277_A_Rgmb
  gRNA
gggcatgcatctctacgtag

SEQ ID NO: 45278 - DNA, 20 bp, Artificial Sequence
  MKO10045278_A_Rgmb
  gRNA
gcaggtcgaagacacacgat

SEQ ID NO: 45279 - DNA, 20 bp, Artificial Sequence
  MKO10045279_A_Rgn
  gRNA
tggaggaagagtaattcgcc

SEQ ID NO: 45280 - DNA, 20 bp, Artificial Sequence
  MKO10045280_A_Rgn
  gRNA
ccgcagaattgtttacaaga

SEQ ID NO: 45281 - DNA, 20 bp, Artificial Sequence
  MKO10045281_A_Rgn
  gRNA
tttgactatgacctacaaac

SEQ ID NO: 45282 - DNA, 20 bp, Artificial Sequence
  MKO10045282_A_Rgp1
  gRNA
cagtgctactcgactctcgc

SEQ ID NO: 45283 - DNA, 20 bp, Artificial Sequence
  MKO10045283_A_Rgp1
  gRNA
tgatgggtgagttcacgcgc

SEQ ID NO: 45284 - DNA, 20 bp, Artificial Sequence
  MKO10045284_A_Rgp1
  gRNA
acgtccggctgactagagtc

SEQ ID NO: 45285 - DNA, 20 bp, Artificial Sequence
  MKO10045285_A_Rgr
  gRNA
ccgctgcaacaagggcattc

SEQ ID NO: 45286 - DNA, 20 bp, Artificial Sequence
  MKO10045286_A_Rgr
  gRNA
gtggcagtgcagccgttgcc

SEQ ID NO: 45287 - DNA, 20 bp, Artificial Sequence
  MKO10045287_A_Rgr
  gRNA
gctgtacactggactattcg

SEQ ID NO: 45288 - DNA, 20 bp, Artificial Sequence
  MKO10045288_A_Rgs10
  gRNA
tctgaaacccaagcgaactg

SEQ ID NO: 45289 - DNA, 20 bp, Artificial Sequence
  MKO10045289_A_Rgs10
  gRNA
ctccacgttgacttgtgaag

SEQ ID NO: 45290 - DNA, 20 bp, Artificial Sequence
  MKO10045290_A_Rgs10
  gRNA
ttagctgcggtctgagcatc

SEQ ID NO: 45291 - DNA, 20 bp, Artificial Sequence
  MKO10045291_A_Rgs11
  gRNA
gcgggtagtcgtgagtatgc

SEQ ID NO: 45292 - DNA, 20 bp, Artificial Sequence
  MKO10045292_A_Rgs11
  gRNA
gagcctcacccgctaccgcg

SEQ ID NO: 45293 - DNA, 20 bp, Artificial Sequence
  MKO10045293_A_Rgs11
  gRNA
agatgtagccgtgctgcgcc

SEQ ID NO: 45294 - DNA, 20 bp, Artificial Sequence
  MKO10045294_A_Rgs12
  gRNA
ttgcaactctcctctctcgt

SEQ ID NO: 45295 - DNA, 20 bp, Artificial Sequence
  MKO10045295_A_Rgs12
  gRNA
gagaagtagcgaacaccaac

SEQ ID NO: 45296 - DNA, 20 bp, Artificial Sequence
  MKO10045296_A_Rgs12
  gRNA
ctacctgtcagctctcttac

SEQ ID NO: 45297 - DNA, 20 bp, Artificial Sequence
  MKO10045297_A_Rgs13
  gRNA
ttaacatcgacagtacaaca

SEQ ID NO: 45298 - DNA, 20 bp, Artificial Sequence
  MKO10045298_A_Rgs13
  gRNA
acaagaaaattgcttcacga

SEQ ID NO: 45299 - DNA, 20 bp, Artificial Sequence
  MKO10045299_A_Rgs13
  gRNA
ttcttcaaagcatgtttgag

SEQ ID NO: 45300 - DNA, 20 bp, Artificial Sequence
  MKO10045300_A_Rgs14
  gRNA
gatctgctggaaacgttcgc

SEQ ID NO: 45301 - DNA, 20 bp, Artificial Sequence
  MKO10045301_A_Rgs14
  gRNA
cccagtgaacatcgaccgac

SEQ ID NO: 45302 - DNA, 20 bp, Artificial Sequence
  MKO10045302_A_Rgs14
  gRNA
gcgcagagaacgtaactttc

SEQ ID NO: 45303 - DNA, 20 bp, Artificial Sequence
  MKO10045303_A_Rgs16
  gRNA
gtcaccagcttatcgcgacc

SEQ ID NO: 45304 - DNA, 20 bp, Artificial Sequence
  MKO10045304_A_Rgs16
  gRNA
gggtattagcaaattcgagt

SEQ ID NO: 45305 - DNA, 20 bp, Artificial Sequence
  MKO10045305_A_Rgs16
  gRNA
cactaccagttgcttcgatg

SEQ ID NO: 45306 - DNA, 20 bp, Artificial Sequence
  MKO10045306_A_Rgs17
  gRNA
gtaatcctcgtatatcatcc

SEQ ID NO: 45307 - DNA, 20 bp, Artificial Sequence
  MKO10045307_A_Rgs17
  gRNA
tttccgagagttcctccgaa

SEQ ID NO: 45308 - DNA, 20 bp, Artificial Sequence
  MKO10045308_A_Rgs17
  gRNA
cctggattctcgagttagag

SEQ ID NO: 45309 - DNA, 20 bp, Artificial Sequence
  MKO10045309_A_Rgs18
  gRNA
atgatcgtgatcgtctccta

SEQ ID NO: 45310 - DNA, 20 bp, Artificial Sequence
  MKO10045310_A_Rgs18
  gRNA
tttgtgccgtatcaaaactg

SEQ ID NO: 45311 - DNA, 20 bp, Artificial Sequence
  MKO10045311_A_Rgs18
  gRNA
gacaaattgctctctcatag

SEQ ID NO: 45312 - DNA, 20 bp, Artificial Sequence
  MKO10045312_A_Rgs19
  gRNA
ccggaatacactgcggcccg

SEQ ID NO: 45313 - DNA, 20 bp, Artificial Sequence
  MKO10045313_A_Rgs19
  gRNA
gccaagctcgttgccgttct

SEQ ID NO: 45314 - DNA, 20 bp, Artificial Sequence
  MKO10045314_A_Rgs19
  gRNA
tgcgtcatggctggacatcg

SEQ ID NO: 45315 - DNA, 20 bp, Artificial Sequence
  MKO10045315_A_Rgs1
  gRNA
gagatcgatgatcccacatc

SEQ ID NO: 45316 - DNA, 20 bp, Artificial Sequence
  MKO10045316_A_Rgs1
  gRNA
ttagcaggtcaaaatgtctt

SEQ ID NO: 45317 - DNA, 20 bp, Artificial Sequence
  MKO10045317_A_Rgs1
  gRNA
ctgctgaagaagtaatgcag

SEQ ID NO: 45318 - DNA, 20 bp, Artificial Sequence
  MKO10045318_A_Rgs20
  gRNA
cttggactcccgagtacgag

SEQ ID NO: 45319 - DNA, 20 bp, Artificial Sequence
  MKO10045319_A_Rgs20
  gRNA
gagcgtcatcgaatatgtgc

SEQ ID NO: 45320 - DNA, 20 bp, Artificial Sequence
  MKO10045320_A_Rgs20
  gRNA
ttccggctggagtgaccatc

SEQ ID NO: 45321 - DNA, 20 bp, Artificial Sequence
  MKO10045321_A_Rgs22
  gRNA
attagatttaacgtagacta

SEQ ID NO: 45322 - DNA, 20 bp, Artificial Sequence
  MKO10045322_A_Rgs22
  gRNA
aagtgtcccctgcgaagatg

SEQ ID NO: 45323 - DNA, 20 bp, Artificial Sequence
  MKO10045323_A_Rgs22
  gRNA
cagtgtctcaagcgtgaaca

SEQ ID NO: 45324 - DNA, 20 bp, Artificial Sequence
  MKO10045324_A_Rgs2
  gRNA
aattcggactccaagaaccg

SEQ ID NO: 45325 - DNA, 20 bp, Artificial Sequence
  MKO10045325_A_Rgs2
  gRNA
gggcaatcagagatttcgtt

SEQ ID NO: 45326 - DNA, 20 bp, Artificial Sequence
  MKO10045326_A_Rgs2
  gRNA
ctataccgacttcatagaga

SEQ ID NO: 45327 - DNA, 20 bp, Artificial Sequence
  MKO10045327_A_Rgs3
  gRNA
cgccgcaagactccgccatc

SEQ ID NO: 45328 - DNA, 20 bp, Artificial Sequence
  MKO10045328_A_Rgs3
  gRNA
ggaccacacgccacacgagc

SEQ ID NO: 45329 - DNA, 20 bp, Artificial Sequence
  MKO10045329_A_Rgs3
  gRNA
caaagccgtctttgcccctc

SEQ ID NO: 45330 - DNA, 20 bp, Artificial Sequence
  MKO10045330_A_Rgs4
  gRNA
cctcgctgtattccgacttc

SEQ ID NO: 45331 - DNA, 20 bp, Artificial Sequence
  MKO10045331_A_Rgs4
  gRNA
caagatagaatcgagacttg

SEQ ID NO: 45332 - DNA, 20 bp, Artificial Sequence
  MKO10045332_A_Rgs4
  gRNA
gtgtgaagaactgtgttcgc

SEQ ID NO: 45333 - DNA, 20 bp, Artificial Sequence
  MKO10045333_A_Rgs5
  gRNA
gatcttcttgtaattctcac

SEQ ID NO: 45334 - DNA, 20 bp, Artificial Sequence
  MKO10045334_A_Rgs5
  gRNA
cctgcagtggcgccagtccc

SEQ ID NO: 45335 - DNA, 20 bp, Artificial Sequence
  MKO10045335_A_Rgs5
  gRNA
gatcaagtcccccatcaaaa

SEQ ID NO: 45336 - DNA, 20 bp, Artificial Sequence
  MKO10045336_A_Rgs6
  gRNA
tatgttacctgtgacgacac

SEQ ID NO: 45337 - DNA, 20 bp, Artificial Sequence
  MKO10045337_A_Rgs6
  gRNA
gcctacctggaaacggtaaa

SEQ ID NO: 45338 - DNA, 20 bp, Artificial Sequence
  MKO10045338_A_Rgs6
  gRNA
cagcgatccccactgctcgc

SEQ ID NO: 45339 - DNA, 20 bp, Artificial Sequence
  MKO10045339_A_Rgs7bp
  gRNA
ccaagagttcaacacgcaag

SEQ ID NO: 45340 - DNA, 20 bp, Artificial Sequence
  MKO10045340_A_Rgs7bp
  gRNA
agatccatcccgaaatctgc

SEQ ID NO: 45341 - DNA, 20 bp, Artificial Sequence
  MKO10045341_A_Rgs7bp
  gRNA
tctcttcagtttcatcgaaa

SEQ ID NO: 45342 - DNA, 20 bp, Artificial Sequence
  MKO10045342_A_Rgs7
  gRNA
acttacttgaaaccggtaga

SEQ ID NO: 45343 - DNA, 20 bp, Artificial Sequence
  MKO10045343_A_Rgs7
  gRNA
aacagtggaggctctccatt

SEQ ID NO: 45344 - DNA, 20 bp, Artificial Sequence
  MKO10045344_A_Rgs7
  gRNA
tagggtcagacattgttcaa

SEQ ID NO: 45345 - DNA, 20 bp, Artificial Sequence
  MKO10045345_A_Rgs8
  gRNA
tatcgatttccagacccgag

SEQ ID NO: 45346 - DNA, 20 bp, Artificial Sequence
  MKO10045346_A_Rgs8
  gRNA
gactagctttgcagttgacc

SEQ ID NO: 45347 - DNA, 20 bp, Artificial Sequence
  MKO10045347_A_Rgs8
  gRNA
cttccgtgccttcttgaaga

SEQ ID NO: 45348 - DNA, 20 bp, Artificial Sequence
  MKO10045348_A_Rgs9bp
  gRNA
cccggttgaccgtcgcgctc

SEQ ID NO: 45349 - DNA, 20 bp, Artificial Sequence
  MKO10045349_A_Rgs9bp
  gRNA
ctcaaactccgcgcgctcct

SEQ ID NO: 45350 - DNA, 20 bp, Artificial Sequence
  MKO10045350_A_Rgs9bp
  gRNA
tgaaagtcaacgtgccccgc

SEQ ID NO: 45351 - DNA, 20 bp, Artificial Sequence
  MKO10045351_A_Rgs9
  gRNA
aatcggtagagactgctgtc

SEQ ID NO: 45352 - DNA, 20 bp, Artificial Sequence
  MKO10045352_A_Rgs9
  gRNA
agtgtccctcacgccatgac

SEQ ID NO: 45353 - DNA, 20 bp, Artificial Sequence
  MKO10045353_A_Rgs9
  gRNA
agaatgacgatccgacacca

SEQ ID NO: 45354 - DNA, 20 bp, Artificial Sequence
  MKO10045354_A_Rgsl1
  gRNA
tctgcgctcacctccttccg

SEQ ID NO: 45355 - DNA, 20 bp, Artificial Sequence
  MKO10045355_A_Rgsl1
  gRNA
taaggaaactgacgagctcc

SEQ ID NO: 45356 - DNA, 20 bp, Artificial Sequence
  MKO10045356_A_Rgsl1
  gRNA
gccagaagtaccttatgact

SEQ ID NO: 45357 - DNA, 20 bp, Artificial Sequence
  MKO10045357_A_Rhag
  gRNA
ccaatggggtacgattatgc

SEQ ID NO: 45358 - DNA, 20 bp, Artificial Sequence
  MKO10045358_A_Rhag
  gRNA
cctgcataatcgtaccccat

SEQ ID NO: 45359 - DNA, 20 bp, Artificial Sequence
  MKO10045359_A_Rhag
  gRNA
tccagccttgtagagcgccg

SEQ ID NO: 45360 - DNA, 20 bp, Artificial Sequence
  MKO10045360_A_Rhbdd1
  gRNA
cacctggccggcattctggt

SEQ ID NO: 45361 - DNA, 20 bp, Artificial Sequence
  MKO10045361_A_Rhbdd1
  gRNA
tgacctatgatgcaacttac

SEQ ID NO: 45362 - DNA, 20 bp, Artificial Sequence
  MKO10045362_A_Rhbdd1
  gRNA
aactatgatgtctacacagc

SEQ ID NO: 45363 - DNA, 20 bp, Artificial Sequence
  MKO10045363_A_Rhbdd2
  gRNA
cctcatgcgagagcggaccg

SEQ ID NO: 45364 - DNA, 20 bp, Artificial Sequence
  MKO10045364_A_Rhbdd2
  gRNA
cctcggtccgctctcgcatg

SEQ ID NO: 45365 - DNA, 20 bp, Artificial Sequence
  MKO10045365_A_Rhbdd2
  gRNA
cgagcaccagaagcgactcg

SEQ ID NO: 45366 - DNA, 20 bp, Artificial Sequence
  MKO10045366_A_Rhbdd3
  gRNA
ttgcttcagcaacgacgatg

SEQ ID NO: 45367 - DNA, 20 bp, Artificial Sequence
  MKO10045367_A_Rhbdd3
  gRNA
cctagacgagcagatgctac

SEQ ID NO: 45368 - DNA, 20 bp, Artificial Sequence
  MKO10045368_A_Rhbdd3
  gRNA
ggcagctacagggcgtgtag

SEQ ID NO: 45369 - DNA, 20 bp, Artificial Sequence
  MKO10045369_A_Rhbdf1
  gRNA
gattcacgtttgcgacgccg

SEQ ID NO: 45370 - DNA, 20 bp, Artificial Sequence
  MKO10045370_A_Rhbdf1
  gRNA
agctaaagccgcaggtcatc

SEQ ID NO: 45371 - DNA, 20 bp, Artificial Sequence
  MKO10045371_A_Rhbdf1
  gRNA
gcaagaaagcctgtcgccgc

SEQ ID NO: 45372 - DNA, 20 bp, Artificial Sequence
  MKO10045372_A_Rhbdf2
  gRNA
cgttccgtgctagatgcgac

SEQ ID NO: 45373 - DNA, 20 bp, Artificial Sequence
  MKO10045373_A_Rhbdf2
  gRNA
tgaggccggtccacctcatc

SEQ ID NO: 45374 - DNA, 20 bp, Artificial Sequence
  MKO10045374_A_Rhbdf2
  gRNA
cccatctgccccgccgcaag

SEQ ID NO: 45375 - DNA, 20 bp, Artificial Sequence
  MKO10045375_A_Rhbdl1
  gRNA
tgagacgtgccccgtagcac

SEQ ID NO: 45376 - DNA, 20 bp, Artificial Sequence
  MKO10045376_A_Rhbdl1
  gRNA
atcggtgcggacaccttcgc

SEQ ID NO: 45377 - DNA, 20 bp, Artificial Sequence
  MKO10045377_A_Rhbdl1
  gRNA
tgcccgctgtccgttagcaa

SEQ ID NO: 45378 - DNA, 20 bp, Artificial Sequence
  MKO10045378_A_Rhbdl2
  gRNA
ctactcgttatcattctgat

SEQ ID NO: 45379 - DNA, 20 bp, Artificial Sequence
  MKO10045379_A_Rhbdl2
  gRNA
ctgcagagtccagcacatcg

SEQ ID NO: 45380 - DNA, 20 bp, Artificial Sequence
  MKO10045380_A_Rhbdl2
  gRNA
ccgagtggggctggtgtacc

SEQ ID NO: 45381 - DNA, 20 bp, Artificial Sequence
  MKO10045381_A_Rhbdl3
  gRNA
catgatcacaatcacgctgc

SEQ ID NO: 45382 - DNA, 20 bp, Artificial Sequence
  MKO10045382_A_Rhbdl3
  gRNA
ctcccggggcagagtctcgt

SEQ ID NO: 45383 - DNA, 20 bp, Artificial Sequence
  MKO10045383_A_Rhbdl3
  gRNA
catagcgccaagcctgcgca

SEQ ID NO: 45384 - DNA, 20 bp, Artificial Sequence
  MKO10045384_A_Rhbg
  gRNA
caactccgcgccgacagcgc

SEQ ID NO: 45385 - DNA, 20 bp, Artificial Sequence
  MKO10045385_A_Rhbg
  gRNA
gatcaacgctgacttctgcg

SEQ ID NO: 45386 - DNA, 20 bp, Artificial Sequence
  MKO10045386_A_Rhbg
  gRNA
ggatgggcagcatcggaccg

SEQ ID NO: 45387 - DNA, 20 bp, Artificial Sequence
  MKO10045387_A_Rhcg
  gRNA
gggctcacttctcgacgctc

SEQ ID NO: 45388 - DNA, 20 bp, Artificial Sequence
  MKO10045388_A_Rhcg
  gRNA
cgctgaagccgtagcgctgc

SEQ ID NO: 45389 - DNA, 20 bp, Artificial Sequence
  MKO10045389_A_Rhcg
  gRNA
tctcaccaatcatggcgaaa

SEQ ID NO: 45390 - DNA, 20 bp, Artificial Sequence
  MKO10045390_A_Rhd
  gRNA
gttcaacacctactacgccc

SEQ ID NO: 45391 - DNA, 20 bp, Artificial Sequence
  MKO10045391_A_Rhd
  gRNA
catcagatttgccgacgaga

SEQ ID NO: 45392 - DNA, 20 bp, Artificial Sequence
  MKO10045392_A_Rhd
  gRNA
gcgcccgctgagatcagcac

SEQ ID NO: 45393 - DNA, 20 bp, Artificial Sequence
  MKO10045393_A_Rhebl1
  gRNA
atttgtggaaggcgagttcc

SEQ ID NO: 45394 - DNA, 20 bp, Artificial Sequence
  MKO10045394_A_Rhebl1
  gRNA
agtatacaagaacgtaacca

SEQ ID NO: 45395 - DNA, 20 bp, Artificial Sequence
  MKO10045395_A_Rhebl1
  gRNA
ctgtaccaaaagctacacga

SEQ ID NO: 45396 - DNA, 20 bp, Artificial Sequence
  MKO10045396_A_Rheb
  gRNA
agcgttcaccaagttgatca

SEQ ID NO: 45397 - DNA, 20 bp, Artificial Sequence
  MKO10045397_A_Rheb
  gRNA
gatcgtaggaatcaacaaat

SEQ ID NO: 45398 - DNA, 20 bp, Artificial Sequence
  MKO10045398_A_Rheb
  gRNA
ttgacaattcagtttgttga

SEQ ID NO: 45399 - DNA, 20 bp, Artificial Sequence
  MKO10045399_A_Rhoa
  gRNA
tcgtgtgctcgtcattccga

SEQ ID NO: 45400 - DNA, 20 bp, Artificial Sequence
  MKO10045400_A_Rhoa
  gRNA
cgagcacacgagacgggagt

SEQ ID NO: 45401 - DNA, 20 bp, Artificial Sequence
  MKO10045401_A_Rhoa
  gRNA
ggctactcacctaaactatc

SEQ ID NO: 45402 - DNA, 20 bp, Artificial Sequence
  MKO10045402_A_Rhobtb1
  gRNA
cggcgtagcggaggtctagc

SEQ ID NO: 45403 - DNA, 20 bp, Artificial Sequence
  MKO10045403_A_Rhobtb1
  gRNA
accaggacgacgggcgttcg

SEQ ID NO: 45404 - DNA, 20 bp, Artificial Sequence
  MKO10045404_A_Rhobtb1
  gRNA
cgaagaggacgtcggcgcac

SEQ ID NO: 45405 - DNA, 20 bp, Artificial Sequence
  MKO10045405_A_Rhobtb2
  gRNA
gcgacttcccgacccttctc

SEQ ID NO: 45406 - DNA, 20 bp, Artificial Sequence
  MKO10045406_A_Rhobtb2
  gRNA
accccgtaagatcccgtcac

SEQ ID NO: 45407 - DNA, 20 bp, Artificial Sequence
  MKO10045407_A_Rhobtb2
  gRNA
cccccacagatccgacgtgg

SEQ ID NO: 45408 - DNA, 20 bp, Artificial Sequence
  MKO10045408_A_Rhobtb3
  gRNA
cttgacgttcccgaacgcac

SEQ ID NO: 45409 - DNA, 20 bp, Artificial Sequence
  MKO10045409_A_Rhobtb3
  gRNA
tgcgttcgggaacgtcaagc

SEQ ID NO: 45410 - DNA, 20 bp, Artificial Sequence
  MKO10045410_A_Rhobtb3
  gRNA
ccaacagccgcaatgattac

SEQ ID NO: 45411 - DNA, 20 bp, Artificial Sequence
  MKO10045411_A_Rhob
  gRNA
aggaggactacgatcgttta

SEQ ID NO: 45412 - DNA, 20 bp, Artificial Sequence
  MKO10045412_A_Rhob
  gRNA
aacctcgcgcacgccctcct

SEQ ID NO: 45413 - DNA, 20 bp, Artificial Sequence
  MKO10045413_A_Rhob
  gRNA
ggacatgctcgtcgctgcgc

SEQ ID NO: 45414 - DNA, 20 bp, Artificial Sequence
  MKO10045414_A_Rhoc
  gRNA
tcaggagccggttcgatctg

SEQ ID NO: 45415 - DNA, 20 bp, Artificial Sequence
  MKO10045415_A_Rhoc
  gRNA
ctatatagccgacatcgaag

SEQ ID NO: 45416 - DNA, 20 bp, Artificial Sequence
  MKO10045416_A_Rhoc
  gRNA
aggtccggaagaataagcgc

SEQ ID NO: 45417 - DNA, 20 bp, Artificial Sequence
  MKO10045417_A_Rhod
  gRNA
ctgcaagatagacctgcgta

SEQ ID NO: 45418 - DNA, 20 bp, Artificial Sequence
  MKO10045418_A_Rhod
  gRNA
ccagcaccttgtccttacgc

SEQ ID NO: 45419 - DNA, 20 bp, Artificial Sequence
  MKO10045419_A_Rhod
  gRNA
taccggctgtgtcccagatt

SEQ ID NO: 45420 - DNA, 20 bp, Artificial Sequence
  MKO10045420_A_Rhof
  gRNA
ctcgcagcactacgccccgt

SEQ ID NO: 45421 - DNA, 20 bp, Artificial Sequence
  MKO10045421_A_Rhof
  gRNA
gatgaggacgttgtcgtaac

SEQ ID NO: 45422 - DNA, 20 bp, Artificial Sequence
  MKO10045422_A_Rhof
  gRNA
ttacgacaacgtcctcatca

SEQ ID NO: 45423 - DNA, 20 bp, Artificial Sequence
  MKO10045423_A_Rhog
  gRNA
aacccaacaccgataaagcg

SEQ ID NO: 45424 - DNA, 20 bp, Artificial Sequence
  MKO10045424_A_Rhog
  gRNA
cgcccacgctttatcggtgt

SEQ ID NO: 45425 - DNA, 20 bp, Artificial Sequence
  MKO10045425_A_Rhog
  gRNA
tgcgcccatcaaccgcactc

SEQ ID NO: 45426 - DNA, 20 bp, Artificial Sequence
  MKO10045426_A_Rhoh
  gRNA
acccgtattctcgtacaccg

SEQ ID NO: 45427 - DNA, 20 bp, Artificial Sequence
  MKO10045427_A_Rhoh
  gRNA
acccacggtgtacgagaata

SEQ ID NO: 45428 - DNA, 20 bp, Artificial Sequence
  MKO10045428_A_Rhoh
  gRNA
cccttctatggcattgatgc

SEQ ID NO: 45429 - DNA, 20 bp, Artificial Sequence
  MKO10045429_A_Rhoj
  gRNA
catgtacagcagacgcgcca

SEQ ID NO: 45430 - DNA, 20 bp, Artificial Sequence
  MKO10045430_A_Rhoj
  gRNA
agcctcttaccacaacgttc

SEQ ID NO: 45431 - DNA, 20 bp, Artificial Sequence
  MKO10045431_A_Rhoj
  gRNA
ttctcccctagttaccgtga

SEQ ID NO: 45432 - DNA, 20 bp, Artificial Sequence
  MKO10045432_A_Rhoq
  gRNA
aacgtccccttcttgttaat

SEQ ID NO: 45433 - DNA, 20 bp, Artificial Sequence
  MKO10045433_A_Rhoq
  gRNA
aggaagactatgatcgtctg

SEQ ID NO: 45434 - DNA, 20 bp, Artificial Sequence
  MKO10045434_A_Rhoq
  gRNA
ccttgcagtcagcgtcaccg

SEQ ID NO: 45435 - DNA, 20 bp, Artificial Sequence
  MKO10045435_A_Rhot1
  gRNA
gacatcactgattatgtcgc

SEQ ID NO: 45436 - DNA, 20 bp, Artificial Sequence
  MKO10045436_A_Rhot1
  gRNA
acacacattgtcgattattc

SEQ ID NO: 45437 - DNA, 20 bp, Artificial Sequence
  MKO10045437_A_Rhot1
  gRNA
ccatgcgtgcgggccgagtg

SEQ ID NO: 45438 - DNA, 20 bp, Artificial Sequence
  MKO10045438_A_Rhot2
  gRNA
cggcgaggagtttcccgagg

SEQ ID NO: 45439 - DNA, 20 bp, Artificial Sequence
  MKO10045439_A_Rhot2
  gRNA
actcctcgccgaccagcgac

SEQ ID NO: 45440 - DNA, 20 bp, Artificial Sequence
  MKO10045440_A_Rhot2
  gRNA
caccttctccggggtgacgt

SEQ ID NO: 45441 - DNA, 20 bp, Artificial Sequence
  MKO10045441_A_Rhou
  gRNA
cccgcgatggccccgcagca

SEQ ID NO: 45442 - DNA, 20 bp, Artificial Sequence
  MKO10045442_A_Rhou
  gRNA
gtaccgcctcgccgagagcg

SEQ ID NO: 45443 - DNA, 20 bp, Artificial Sequence
  MKO10045443_A_Rhou
  gRNA
gggcagtgacgtcgaatctc

SEQ ID NO: 45444 - DNA, 20 bp, Artificial Sequence
  MKO10045444_A_Rhov
  gRNA
gcgcgcggggtacccattgc

SEQ ID NO: 45445 - DNA, 20 bp, Artificial Sequence
  MKO10045445_A_Rhov
  gRNA
tcccaaagctcgattcgcac

SEQ ID NO: 45446 - DNA, 20 bp, Artificial Sequence
  MKO10045446_A_Rhov
  gRNA
cccctgtgcgaatcgagctt

SEQ ID NO: 45447 - DNA, 20 bp, Artificial Sequence
  MKO10045447_A_Rhox10
  gRNA
tacttcgacctcgattatta

SEQ ID NO: 45448 - DNA, 20 bp, Artificial Sequence
  MKO10045448_A_Rhox10
  gRNA
agggcagcccaatgtcgctt

SEQ ID NO: 45449 - DNA, 20 bp, Artificial Sequence
  MKO10045449_A_Rhox10
  gRNA
ctactcagcaatgctacatc

SEQ ID NO: 45450 - DNA, 20 bp, Artificial Sequence
  MKO10045450_A_Rhox11
  gRNA
ccagtgagcagtcgttattc

SEQ ID NO: 45451 - DNA, 20 bp, Artificial Sequence
  MKO10045451_A_Rhox11
  gRNA
ggcttcgccgatgaagtaac

SEQ ID NO: 45452 - DNA, 20 bp, Artificial Sequence
  MKO10045452_A_Rhox11
  gRNA
agaacttcgcatgaagactt

SEQ ID NO: 45453 - DNA, 20 bp, Artificial Sequence
  MKO10045453_A_Rhox12
  gRNA
aaggatgatgtgatctacgt

SEQ ID NO: 45454 - DNA, 20 bp, Artificial Sequence
  MKO10045454_A_Rhox12
  gRNA
cacaaggccacggatccagt

SEQ ID NO: 45455 - DNA, 20 bp, Artificial Sequence
  MKO10045455_A_Rhox12
  gRNA
agcgtcactgcatggcatcc

SEQ ID NO: 45456 - DNA, 20 bp, Artificial Sequence
  MKO10045456_A_Rhox13
  gRNA
cgagtcgtcatcactctcgt

SEQ ID NO: 45457 - DNA, 20 bp, Artificial Sequence
  MKO10045457_A_Rhox13
  gRNA
cgactcgagcaccagcgacg

SEQ ID NO: 45458 - DNA, 20 bp, Artificial Sequence
  MKO10045458_A_Rhox13
  gRNA
atgctgagaaatattccgcc

SEQ ID NO: 45459 - DNA, 20 bp, Artificial Sequence
  MKO10045459_A_Rhox1
  gRNA
ctccatgttccgaaagccgt

SEQ ID NO: 45460 - DNA, 20 bp, Artificial Sequence
  MKO10045460_A_Rhox1
  gRNA
cctgcttcgtataatacctg

SEQ ID NO: 45461 - DNA, 20 bp, Artificial Sequence
  MKO10045461_A_Rhox1
  gRNA
gtacccgagaaggccatgac

SEQ ID NO: 45462 - DNA, 20 bp, Artificial Sequence
  MKO10045462_A_Rhox2a
  gRNA
cgtcaattacaagcttgatg

SEQ ID NO: 45463 - DNA, 20 bp, Artificial Sequence
  MKO10045463_A_Rhox2a
  gRNA
gaggatgaggaaaatgcgaa

SEQ ID NO: 45464 - DNA, 20 bp, Artificial Sequence
  MKO10045464_A_Rhox2a
  gRNA
tgctgatgtagtgattgcac

SEQ ID NO: 45465 - DNA, 20 bp, Artificial Sequence
  MKO10045465_A_Rhox2b
  gRNA
gaaaatgtaaagcatgtgtc

SEQ ID NO: 45466 - DNA, 20 bp, Artificial Sequence
  MKO10045466_A_Rhox2b
  gRNA
cgtcaattacaagcttgatg

SEQ ID NO: 45467 - DNA, 20 bp, Artificial Sequence
  MKO10045467_A_Rhox2b
  gRNA
gaggatgaggaaaatgcgaa

SEQ ID NO: 45468 - DNA, 20 bp, Artificial Sequence
  MKO10045468_A_Rhox2c
  gRNA
cgtcaattacaagcttgatg

SEQ ID NO: 45469 - DNA, 20 bp, Artificial Sequence
  MKO10045469_A_Rhox2c
  gRNA
gaggatgaggaaaatgcgaa

SEQ ID NO: 45470 - DNA, 20 bp, Artificial Sequence
  MKO10045470_A_Rhox2c
  gRNA
tgctgatgtagtgattgcac

SEQ ID NO: 45471 - DNA, 20 bp, Artificial Sequence
  MKO10045471_A_Rhox2d
  gRNA
tgcccgaattccgctacagt

SEQ ID NO: 45472 - DNA, 20 bp, Artificial Sequence
  MKO10045472_A_Rhox2d
  gRNA
agctctgttgccaactgtag

SEQ ID NO: 45473 - DNA, 20 bp, Artificial Sequence
  MKO10045473_A_Rhox2d
  gRNA
aaaacgtctggcaaaatcca

SEQ ID NO: 45474 - DNA, 20 bp, Artificial Sequence
  MKO10045474_A_Rhox2e
  gRNA
cgtcaattacaagcttgatg

SEQ ID NO: 45475 - DNA, 20 bp, Artificial Sequence
  MKO10045475_A_Rhox2e
  gRNA
gaggatgaggaaaatgcgaa

SEQ ID NO: 45476 - DNA, 20 bp, Artificial Sequence
  MKO10045476_A_Rhox2e
  gRNA
tgctgatgtagtgattgcac

SEQ ID NO: 45477 - DNA, 20 bp, Artificial Sequence
  MKO10045477_A_Rhox2f
  gRNA
cattgaagctgtgtcgccaa

SEQ ID NO: 45478 - DNA, 20 bp, Artificial Sequence
  MKO10045478_A_Rhox2f
  gRNA
aggtcggctacttgcgcagc

SEQ ID NO: 45479 - DNA, 20 bp, Artificial Sequence
  MKO10045479_A_Rhox2f
  gRNA
catcaattacctgcttgatg

SEQ ID NO: 45480 - DNA, 20 bp, Artificial Sequence
  MKO10045480_A_Rhox2g
  gRNA
tgcctgaattccttcacggt

SEQ ID NO: 45481 - DNA, 20 bp, Artificial Sequence
  MKO10045481_A_Rhox2g
  gRNA
aaagtgtctggcaagatcca

SEQ ID NO: 45482 - DNA, 20 bp, Artificial Sequence
  MKO10045482_A_Rhox2g
  gRNA
agctctgttgccaaccgtga

SEQ ID NO: 45483 - DNA, 20 bp, Artificial Sequence
  MKO10045483_A_Rhox2h
  gRNA
gggccggctgcgcctgtagc

SEQ ID NO: 45484 - DNA, 20 bp, Artificial Sequence
  MKO10045484_A_Rhox2h
  gRNA
cattgaagttgtgtcgccaa

SEQ ID NO: 45485 - DNA, 20 bp, Artificial Sequence
  MKO10045485_A_Rhox2h
  gRNA
catcaattacctgcttgatg

SEQ ID NO: 45486 - DNA, 20 bp, Artificial Sequence
  MKO10045486_A_Rhox3a
  gRNA
tgactgaccttgaagctctg

SEQ ID NO: 45487 - DNA, 20 bp, Artificial Sequence
  MKO10045487_A_Rhox3a
  gRNA
cagaacgttccatctctaac

SEQ ID NO: 45488 - DNA, 20 bp, Artificial Sequence
  MKO10045488_A_Rhox3a
  gRNA
gactgagaaaataattcatc

SEQ ID NO: 45489 - DNA, 20 bp, Artificial Sequence
  MKO10045489_A_Rhox3c
  gRNA
agagcttcaagatcagtcta

SEQ ID NO: 45490 - DNA, 20 bp, Artificial Sequence
  MKO10045490_A_Rhox3c
  gRNA
ctagaaaacaactggcccga

SEQ ID NO: 45491 - DNA, 20 bp, Artificial Sequence
  MKO10045491_A_Rhox3c
  gRNA
gtgaccaggctgaagcacca

SEQ ID NO: 45492 - DNA, 20 bp, Artificial Sequence
  MKO10045492_A_Rhox3e
  gRNA
tgactgaccttgaagctctg

SEQ ID NO: 45493 - DNA, 20 bp, Artificial Sequence
  MKO10045493_A_Rhox3e
  gRNA
cagaacgttccatctctaac

SEQ ID NO: 45494 - DNA, 20 bp, Artificial Sequence
  MKO10045494_A_Rhox3e
  gRNA
gactgagaaaataattcatc

SEQ ID NO: 45495 - DNA, 20 bp, Artificial Sequence
  MKO10045495_A_Rhox3f
  gRNA
cagaacgttccatgtctaac

SEQ ID NO: 45496 - DNA, 20 bp, Artificial Sequence
  MKO10045496_A_Rhox3f
  gRNA
actatgtatccagttagaca

SEQ ID NO: 45497 - DNA, 20 bp, Artificial Sequence
  MKO10045497_A_Rhox3f
  gRNA
gtgaccaggctgaagcgcta

SEQ ID NO: 45498 - DNA, 20 bp, Artificial Sequence
  MKO10045498_A_Rhox3g
  gRNA
cttggtgatatttgcactgc

SEQ ID NO: 45499 - DNA, 20 bp, Artificial Sequence
  MKO10045499_A_Rhox3g
  gRNA
tcatttcttccctcttcagc

SEQ ID NO: 45500 - DNA, 20 bp, Artificial Sequence
  MKO10045500_A_Rhox3g
  gRNA
agtattaccacagagcttca

SEQ ID NO: 45501 - DNA, 20 bp, Artificial Sequence
  MKO10045501_A_Rhox3h
  gRNA
ggagagagtcccgccgccgc

SEQ ID NO: 45502 - DNA, 20 bp, Artificial Sequence
  MKO10045502_A_Rhox3h
  gRNA
tcatttcttgactcttcagc

SEQ ID NO: 45503 - DNA, 20 bp, Artificial Sequence
  MKO10045503_A_Rhox3h
  gRNA
cagaacgttccatctctaac

SEQ ID NO: 45504 - DNA, 20 bp, Artificial Sequence
  MKO10045504_A_Rhox4a
  gRNA
tgccaagtccctcatgaagt

SEQ ID NO: 45505 - DNA, 20 bp, Artificial Sequence
  MKO10045505_A_Rhox4a
  gRNA
caccaactacctacttcatg

SEQ ID NO: 45506 - DNA, 20 bp, Artificial Sequence
  MKO10045506_A_Rhox4a
  gRNA
ctgcttacctttcctctgca

SEQ ID NO: 45507 - DNA, 20 bp, Artificial Sequence
  MKO10045507_A_Rhox4b
  gRNA
tgccaagtccctcatgaagt

SEQ ID NO: 45508 - DNA, 20 bp, Artificial Sequence
  MKO10045508_A_Rhox4b
  gRNA
caccaactacctacttcatg

SEQ ID NO: 45509 - DNA, 20 bp, Artificial Sequence
  MKO10045509_A_Rhox4b
  gRNA
ctgcttacctttcctctgca

SEQ ID NO: 45510 - DNA, 20 bp, Artificial Sequence
  MKO10045510_A_Rhox4c
  gRNA
aatgaatgacgatgcccctg

SEQ ID NO: 45511 - DNA, 20 bp, Artificial Sequence
  MKO10045511_A_Rhox4c
  gRNA
tgccaagtccctcatgaagt

SEQ ID NO: 45512 - DNA, 20 bp, Artificial Sequence
  MKO10045512_A_Rhox4c
  gRNA
caccaactacctacttcatg

SEQ ID NO: 45513 - DNA, 20 bp, Artificial Sequence
  MKO10045513_A_Rhox4d
  gRNA
tgccaagtccctcatgaagt

SEQ ID NO: 45514 - DNA, 20 bp, Artificial Sequence
  MKO10045514_A_Rhox4d
  gRNA
caccaactacctacttcatg

SEQ ID NO: 45515 - DNA, 20 bp, Artificial Sequence
  MKO10045515_A_Rhox4d
  gRNA
ctgcttacctttcctctgca

SEQ ID NO: 45516 - DNA, 20 bp, Artificial Sequence
  MKO10045516_A_Rhox4e
  gRNA
tgccaagtccctcatgaagt

SEQ ID NO: 45517 - DNA, 20 bp, Artificial Sequence
  MKO10045517_A_Rhox4e
  gRNA
caccaactacctacttcatg

SEQ ID NO: 45518 - DNA, 20 bp, Artificial Sequence
  MKO10045518_A_Rhox4e
  gRNA
ctgcttacctttcctctgca

SEQ ID NO: 45519 - DNA, 20 bp, Artificial Sequence
  MKO10045519_A_Rhox4f
  gRNA
ccagtccggagccacagcag

SEQ ID NO: 45520 - DNA, 20 bp, Artificial Sequence
  MKO10045520_A_Rhox4f
  gRNA
tgacaagtccctcatgaagt

SEQ ID NO: 45521 - DNA, 20 bp, Artificial Sequence
  MKO10045521_A_Rhox4f
  gRNA
caccaactacctacttcatg

SEQ ID NO: 45522 - DNA, 20 bp, Artificial Sequence
  MKO10045522_A_Rhox4g
  gRNA
caccaactacctacttcatg

SEQ ID NO: 45523 - DNA, 20 bp, Artificial Sequence
  MKO10045523_A_Rhox4g
  gRNA
tgccaagtccctcatgaagt

SEQ ID NO: 45524 - DNA, 20 bp, Artificial Sequence
  MKO10045524_A_Rhox4g
  gRNA
acatacaggtgggaagacac

SEQ ID NO: 45525 - DNA, 20 bp, Artificial Sequence
  MKO10045525_A_Rhox5
  gRNA
ggttcgcccagcatcgactg

SEQ ID NO: 45526 - DNA, 20 bp, Artificial Sequence
  MKO10045526_A_Rhox5
  gRNA
ttcgagtgtcctgcttgtcg

SEQ ID NO: 45527 - DNA, 20 bp, Artificial Sequence
  MKO10045527_A_Rhox5
  gRNA
ccagttccctcagtcgatgc

SEQ ID NO: 45528 - DNA, 20 bp, Artificial Sequence
  MKO10045528_A_Rhox6
  gRNA
aactgcggtacagacgcacc

SEQ ID NO: 45529 - DNA, 20 bp, Artificial Sequence
  MKO10045529_A_Rhox6
  gRNA
atcttcagggagagtcgctc

SEQ ID NO: 45530 - DNA, 20 bp, Artificial Sequence
  MKO10045530_A_Rhox6
  gRNA
cgctcagggtgagtttgatc

SEQ ID NO: 45531 - DNA, 20 bp, Artificial Sequence
  MKO10045531_A_Rhox7
  gRNA
aatagcagtgcccccgcata

SEQ ID NO: 45532 - DNA, 20 bp, Artificial Sequence
  MKO10045532_A_Rhox7
  gRNA
agaatcgggtccctgagtgt

SEQ ID NO: 45533 - DNA, 20 bp, Artificial Sequence
  MKO10045533_A_Rhox7
  gRNA
tccgccccattctgctgcag

SEQ ID NO: 45534 - DNA, 20 bp, Artificial Sequence
  MKO10045534_A_Rhox8
  gRNA
agctaccccgcaaccgctac

SEQ ID NO: 45535 - DNA, 20 bp, Artificial Sequence
  MKO10045535_A_Rhox8
  gRNA
ttcttaccgggccgcagcac

SEQ ID NO: 45536 - DNA, 20 bp, Artificial Sequence
  MKO10045536_A_Rhox8
  gRNA
gttgacggtgctcctgcttc

SEQ ID NO: 45537 - DNA, 20 bp, Artificial Sequence
  MKO10045537_A_Rhox9
  gRNA
acctggtgcggcgggtccgc

SEQ ID NO: 45538 - DNA, 20 bp, Artificial Sequence
  MKO10045538_A_Rhox9
  gRNA
ccactctcagctgcgtgatc

SEQ ID NO: 45539 - DNA, 20 bp, Artificial Sequence
  MKO10045539_A_Rhox9
  gRNA
tataggagtggtttaagatg

SEQ ID NO: 45540 - DNA, 20 bp, Artificial Sequence
  MKO10045540_A_Rho
  gRNA
gaccaccacgtagcgctcaa

SEQ ID NO: 45541 - DNA, 20 bp, Artificial Sequence
  MKO10045541_A_Rho
  gRNA
attcttgccgcagcacagcg

SEQ ID NO: 45542 - DNA, 20 bp, Artificial Sequence
  MKO10045542_A_Rho
  gRNA
ttacaggtgaaatcgccctg

SEQ ID NO: 45543 - DNA, 20 bp, Artificial Sequence
  MKO10045543_A_Rhpn1
  gRNA
cgaggaaagctctcggccgc

SEQ ID NO: 45544 - DNA, 20 bp, Artificial Sequence
  MKO10045544_A_Rhpn1
  gRNA
cggatgctgccgtcgtcctg

SEQ ID NO: 45545 - DNA, 20 bp, Artificial Sequence
  MKO10045545_A_Rhpn1
  gRNA
ccggtgctgaaaacctctac

SEQ ID NO: 45546 - DNA, 20 bp, Artificial Sequence
  MKO10045546_A_Rhpn2
  gRNA
agaccttatggacctgcgac

SEQ ID NO: 45547 - DNA, 20 bp, Artificial Sequence
  MKO10045547_A_Rhpn2
  gRNA
ttacctgtcgcaggtccata

SEQ ID NO: 45548 - DNA, 20 bp, Artificial Sequence
  MKO10045548_A_Rhpn2
  gRNA
gaacctgttcccgcaccttc

SEQ ID NO: 45549 - DNA, 20 bp, Artificial Sequence
  MKO10045549_A_Ribc1
  gRNA
gcgccaagccgaaaagttag

SEQ ID NO: 45550 - DNA, 20 bp, Artificial Sequence
  MKO10045550_A_Ribc1
  gRNA
caagcatgcgcactatgatc

SEQ ID NO: 45551 - DNA, 20 bp, Artificial Sequence
  MKO10045551_A_Ribc1
  gRNA
tcgggtcccttattatgaga

SEQ ID NO: 45552 - DNA, 20 bp, Artificial Sequence
  MKO10045552_A_Ribc2
  gRNA
tcaaactcacgtcgagtttc

SEQ ID NO: 45553 - DNA, 20 bp, Artificial Sequence
  MKO10045553_A_Ribc2
  gRNA
tcatgcccttccagcggtca

SEQ ID NO: 45554 - DNA, 20 bp, Artificial Sequence
  MKO10045554_A_Ribc2
  gRNA
gctttctgagaaccctcgac

SEQ ID NO: 45555 - DNA, 20 bp, Artificial Sequence
  MKO10045555_A_Ric3
  gRNA
gatgcagtaatcgtttctct

SEQ ID NO: 45556 - DNA, 20 bp, Artificial Sequence
  MKO10045556_A_Ric3
  gRNA
gaccatctgagggtgccgag

SEQ ID NO: 45557 - DNA, 20 bp, Artificial Sequence
  MKO10045557_A_Ric3
  gRNA
atcagctccgagaaatcacc

SEQ ID NO: 45558 - DNA, 20 bp, Artificial Sequence
  MKO10045558_A_Ric8b
  gRNA
agcgcgccctctacatcgtc

SEQ ID NO: 45559 - DNA, 20 bp, Artificial Sequence
  MKO10045559_A_Ric8b
  gRNA
ccacgagtcagacgattctt

SEQ ID NO: 45560 - DNA, 20 bp, Artificial Sequence
  MKO10045560_A_Ric8b
  gRNA
ctcgatagcccccgcctcgc

SEQ ID NO: 45561 - DNA, 20 bp, Artificial Sequence
  MKO10045561_A_Ric8
  gRNA
gattcggatagtctgcagcc

SEQ ID NO: 45562 - DNA, 20 bp, Artificial Sequence
  MKO10045562_A_Ric8
  gRNA
ccgtgcgaagggctgttagc

SEQ ID NO: 45563 - DNA, 20 bp, Artificial Sequence
  MKO10045563_A_Ric8
  gRNA
agtgccgcagaagagtcccc

SEQ ID NO: 45564 - DNA, 20 bp, Artificial Sequence
  MKO10045564_A_Rictor
  gRNA
atagcgcagcgctcgcaacc

SEQ ID NO: 45565 - DNA, 20 bp, Artificial Sequence
  MKO10045565_A_Rictor
  gRNA
ttacctcgggtcagatcgag

SEQ ID NO: 45566 - DNA, 20 bp, Artificial Sequence
  MKO10045566_A_Rictor
  gRNA
gtcccgctcgatctgacccg

SEQ ID NO: 45567 - DNA, 20 bp, Artificial Sequence
  MKO10045567_A_Rif1
  gRNA
ttcctttaaagtcgtatgac

SEQ ID NO: 45568 - DNA, 20 bp, Artificial Sequence
  MKO10045568_A_Rif1
  gRNA
aaaccgtgtacagccgagaa

SEQ ID NO: 45569 - DNA, 20 bp, Artificial Sequence
  MKO10045569_A_Rif1
  gRNA
actcttaatgataccattca

SEQ ID NO: 45570 - DNA, 20 bp, Artificial Sequence
  MKO10045570_A_Riiad1
  gRNA
tttcatttgcgatccgagtc

SEQ ID NO: 45571 - DNA, 20 bp, Artificial Sequence
  MKO10045571_A_Riiad1
  gRNA
ggatcccggaacgctgaacc

SEQ ID NO: 45572 - DNA, 20 bp, Artificial Sequence
  MKO10045572_A_Riiad1
  gRNA
gatccggccccactatccca

SEQ ID NO: 45573 - DNA, 20 bp, Artificial Sequence
  MKO10045573_A_Rilpl1
  gRNA
aactcggaaagcttcgcgag

SEQ ID NO: 45574 - DNA, 20 bp, Artificial Sequence
  MKO10045574_A_Rilpl1
  gRNA
tgcgggacgtcctgcacgag

SEQ ID NO: 45575 - DNA, 20 bp, Artificial Sequence
  MKO10045575_A_Rilpl1
  gRNA
tcaaggaccccaaccgcccg

SEQ ID NO: 45576 - DNA, 20 bp, Artificial Sequence
  MKO10045576_A_Rilpl2
  gRNA
gatgtcgtacacgtcgtcgg

SEQ ID NO: 45577 - DNA, 20 bp, Artificial Sequence
  MKO10045577_A_Rilpl2
  gRNA
cagctcgcggcccactacat

SEQ ID NO: 45578 - DNA, 20 bp, Artificial Sequence
  MKO10045578_A_Rilpl2
  gRNA
tgccatgggcaacggcgaga

SEQ ID NO: 45579 - DNA, 20 bp, Artificial Sequence
  MKO10045579_A_Rilp
  gRNA
ctagctcctggcggaggcgt

SEQ ID NO: 45580 - DNA, 20 bp, Artificial Sequence
  MKO10045580_A_Rilp
  gRNA
cgcgctgctccgacagctca

SEQ ID NO: 45581 - DNA, 20 bp, Artificial Sequence
  MKO10045581_A_Rilp
  gRNA
gtctcttaccgggtcatctg

SEQ ID NO: 45582 - DNA, 20 bp, Artificial Sequence
  MKO10045582_A_Rimbp2
  gRNA
ggtgactatattccgctgtc

SEQ ID NO: 45583 - DNA, 20 bp, Artificial Sequence
  MKO10045583_A_Rimbp2
  gRNA
gctgctggatcgcaagagga

SEQ ID NO: 45584 - DNA, 20 bp, Artificial Sequence
  MKO10045584_A_Rimbp2
  gRNA
caatactcccagtgtgttgc

SEQ ID NO: 45585 - DNA, 20 bp, Artificial Sequence
  MKO10045585_A_Rimbp3
  gRNA
gcgcgcggcttgttcgccgt

SEQ ID NO: 45586 - DNA, 20 bp, Artificial Sequence
  MKO10045586_A_Rimbp3
  gRNA
cgaaacgcctccgttccgac

SEQ ID NO: 45587 - DNA, 20 bp, Artificial Sequence
  MKO10045587_A_Rimbp3
  gRNA
gcgcgatgttgtattgcgcc

SEQ ID NO: 45588 - DNA, 20 bp, Artificial Sequence
  MKO10045588_A_Rimkla
  gRNA
tactcgaacaaccaccacgt

SEQ ID NO: 45589 - DNA, 20 bp, Artificial Sequence
  MKO10045589_A_Rimkla
  gRNA
tggtgatctcactatccgac

SEQ ID NO: 45590 - DNA, 20 bp, Artificial Sequence
  MKO10045590_A_Rimkla
  gRNA
aagtgcccactgaccgagca

SEQ ID NO: 45591 - DNA, 20 bp, Artificial Sequence
  MKO10045591_A_Rimklb
  gRNA
cttgaggtcggttcatcaat

SEQ ID NO: 45592 - DNA, 20 bp, Artificial Sequence
  MKO10045592_A_Rimklb
  gRNA
catgttgtcgacagcagcgc

SEQ ID NO: 45593 - DNA, 20 bp, Artificial Sequence
  MKO10045593_A_Rimklb
  gRNA
agggtcgctatcaacagagc

SEQ ID NO: 45594 - DNA, 20 bp, Artificial Sequence
  MKO10045594_A_Rims1
  gRNA
aaagatgatgccccgacgtg

SEQ ID NO: 45595 - DNA, 20 bp, Artificial Sequence
  MKO10045595_A_Rims1
  gRNA
catcatctttgtgctcgccc

SEQ ID NO: 45596 - DNA, 20 bp, Artificial Sequence
  MKO10045596_A_Rims1
  gRNA
tgcgccccaggtgtgttgtc

SEQ ID NO: 45597 - DNA, 20 bp, Artificial Sequence
  MKO10045597_A_Rims2
  gRNA
tttccattgaatacgatcgt

SEQ ID NO: 45598 - DNA, 20 bp, Artificial Sequence
  MKO10045598_A_Rims2
  gRNA
tcctcgagggcttcgaaatg

SEQ ID NO: 45599 - DNA, 20 bp, Artificial Sequence
  MKO10045599_A_Rims2
  gRNA
aaaccaacgatcgtattcaa

SEQ ID NO: 45600 - DNA, 20 bp, Artificial Sequence
  MKO10045600_A_Rims3
  gRNA
gcggagccgtgtaacccgcc

SEQ ID NO: 45601 - DNA, 20 bp, Artificial Sequence
  MKO10045601_A_Rims3
  gRNA
gcagccgggagtctaccgat

SEQ ID NO: 45602 - DNA, 20 bp, Artificial Sequence
  MKO10045602_A_Rims3
  gRNA
ctttcagctccaagccgtgt

SEQ ID NO: 45603 - DNA, 20 bp, Artificial Sequence
  MKO10045603_A_Rims4
  gRNA
actggacccgttgtacaacc

SEQ ID NO: 45604 - DNA, 20 bp, Artificial Sequence
  MKO10045604_A_Rims4
  gRNA
tggcggcccacaaactgtgc

SEQ ID NO: 45605 - DNA, 20 bp, Artificial Sequence
  MKO10045605_A_Rims4
  gRNA
acaacgggtccagtgacttg

SEQ ID NO: 45606 - DNA, 20 bp, Artificial Sequence
  MKO10045606_A_Rin1
  gRNA
gagtgttagatttccgcacc

SEQ ID NO: 45607 - DNA, 20 bp, Artificial Sequence
  MKO10045607_A_Rin1
  gRNA
cagtactctcttcgatatag

SEQ ID NO: 45608 - DNA, 20 bp, Artificial Sequence
  MKO10045608_A_Rin1
  gRNA
cagccgcgctgcacgtgctg

SEQ ID NO: 45609 - DNA, 20 bp, Artificial Sequence
  MKO10045609_A_Rin2
  gRNA
gcttgaagaactagcccaac

SEQ ID NO: 45610 - DNA, 20 bp, Artificial Sequence
  MKO10045610_A_Rin2
  gRNA
cccacttacttagtcccagt

SEQ ID NO: 45611 - DNA, 20 bp, Artificial Sequence
  MKO10045611_A_Rin2
  gRNA
cttcgcctgccctgtgaatt

SEQ ID NO: 45612 - DNA, 20 bp, Artificial Sequence
  MKO10045612_A_Rin3
  gRNA
acttgagaccatctccaacc

SEQ ID NO: 45613 - DNA, 20 bp, Artificial Sequence
  MKO10045613_A_Rin3
  gRNA
ctggggcagccgtagagtga

SEQ ID NO: 45614 - DNA, 20 bp, Artificial Sequence
  MKO10045614_A_Rin3
  gRNA
ttgcgttctactgtgtcagt

SEQ ID NO: 45615 - DNA, 20 bp, Artificial Sequence
  MKO10045615_A_Ring1
  gRNA
cgaagttggggtccggccgt

SEQ ID NO: 45616 - DNA, 20 bp, Artificial Sequence
  MKO10045616_A_Ring1
  gRNA
acccgctccgcggggtcgct

SEQ ID NO: 45617 - DNA, 20 bp, Artificial Sequence
  MKO10045617_A_Ring1
  gRNA
aatacgaggcccatcaggac

SEQ ID NO: 45618 - DNA, 20 bp, Artificial Sequence
  MKO10045618_A_Rinl
  gRNA
ttgtctgctccatccgctag

SEQ ID NO: 45619 - DNA, 20 bp, Artificial Sequence
  MKO10045619_A_Rinl
  gRNA
caggctcatgtccgatgacc

SEQ ID NO: 45620 - DNA, 20 bp, Artificial Sequence
  MKO10045620_A_Rinl
  gRNA
agccacttcttcgactgcag

SEQ ID NO: 45621 - DNA, 20 bp, Artificial Sequence
  MKO10045621_A_Rint1
  gRNA
gccgctcaatctcttccatc

SEQ ID NO: 45622 - DNA, 20 bp, Artificial Sequence
  MKO10045622_A_Rint1
  gRNA
taagtgggtgtcgcagactg

SEQ ID NO: 45623 - DNA, 20 bp, Artificial Sequence
  MKO10045623_A_Rint1
  gRNA
gcgcgtcgtcactgccacct

SEQ ID NO: 45624 - DNA, 20 bp, Artificial Sequence
  MKO10045624_A_Riok1
  gRNA
gggcgacgctgagaccgatg

SEQ ID NO: 45625 - DNA, 20 bp, Artificial Sequence
  MKO10045625_A_Riok1
  gRNA
atagttactgccgccattcc

SEQ ID NO: 45626 - DNA, 20 bp, Artificial Sequence
  MKO10045626_A_Riok1
  gRNA
cgacagagcaaccgtagaac

SEQ ID NO: 45627 - DNA, 20 bp, Artificial Sequence
  MKO10045627_A_Riok2
  gRNA
tgaagcataaacttatagcg

SEQ ID NO: 45628 - DNA, 20 bp, Artificial Sequence
  MKO10045628_A_Riok2
  gRNA
agcgcgattaccacaagcac

SEQ ID NO: 45629 - DNA, 20 bp, Artificial Sequence
  MKO10045629_A_Riok2
  gRNA
taatcgccatgcagtgatca

SEQ ID NO: 45630 - DNA, 20 bp, Artificial Sequence
  MKO10045630_A_Riok3
  gRNA
cgagacgatccctacagacc

SEQ ID NO: 45631 - DNA, 20 bp, Artificial Sequence
  MKO10045631_A_Riok3
  gRNA
gtgtcacgtacacaacttca

SEQ ID NO: 45632 - DNA, 20 bp, Artificial Sequence
  MKO10045632_A_Riok3
  gRNA
cacttccagtgacctaatgc

SEQ ID NO: 45633 - DNA, 20 bp, Artificial Sequence
  MKO10045633_A_Ripk1
  gRNA
gggtctttagcacgtgcatc

SEQ ID NO: 45634 - DNA, 20 bp, Artificial Sequence
  MKO10045634_A_Ripk1
  gRNA
tgtgaaagtcacgatcaacg

SEQ ID NO: 45635 - DNA, 20 bp, Artificial Sequence
  MKO10045635_A_Ripk1
  gRNA
gtacacgtccgacttctccg

SEQ ID NO: 45636 - DNA, 20 bp, Artificial Sequence
  MKO10045636_A_Ripk2
  gRNA
agttacaaatctgcacccga

SEQ ID NO: 45637 - DNA, 20 bp, Artificial Sequence
  MKO10045637_A_Ripk2
  gRNA
gtatatatcatgcttcacac

SEQ ID NO: 45638 - DNA, 20 bp, Artificial Sequence
  MKO10045638_A_Ripk2
  gRNA
ctcaatggccatgcaatatc

SEQ ID NO: 45639 - DNA, 20 bp, Artificial Sequence
  MKO10045639_A_Ripk3
  gRNA
tgggggcaccctagcgtact

SEQ ID NO: 45640 - DNA, 20 bp, Artificial Sequence
  MKO10045640_A_Ripk3
  gRNA
accctccctgaaacgtggac

SEQ ID NO: 45641 - DNA, 20 bp, Artificial Sequence
  MKO10045641_A_Ripk3
  gRNA
ctaaccttggcgtggagctc

SEQ ID NO: 45642 - DNA, 20 bp, Artificial Sequence
  MKO10045642_A_Ripk4
  gRNA
accgttgcatgagccctatc

SEQ ID NO: 45643 - DNA, 20 bp, Artificial Sequence
  MKO10045643_A_Ripk4
  gRNA
cgtgcacgatgcgaaagcgc

SEQ ID NO: 45644 - DNA, 20 bp, Artificial Sequence
  MKO10045644_A_Ripk4
  gRNA
ggtaagcgattgtaccaaac

SEQ ID NO: 45645 - DNA, 20 bp, Artificial Sequence
  MKO10045645_A_Ripply1
  gRNA
aagcttacctgaccgggtga

SEQ ID NO: 45646 - DNA, 20 bp, Artificial Sequence
  MKO10045646_A_Ripply1
  gRNA
cctctataaacgaccagcca

SEQ ID NO: 45647 - DNA, 20 bp, Artificial Sequence
  MKO10045647_A_Ripply1
  gRNA
gggattgcttcaatttggac

SEQ ID NO: 45648 - DNA, 20 bp, Artificial Sequence
  MKO10045648_A_Ripply2
  gRNA
tgataggtacccgggctgcg

SEQ ID NO: 45649 - DNA, 20 bp, Artificial Sequence
  MKO10045649_A_Ripply2
  gRNA
tgctgggttgtgcgcgctct

SEQ ID NO: 45650 - DNA, 20 bp, Artificial Sequence
  MKO10045650_A_Ripply2
  gRNA
agaccgtgggttcgaactcc

SEQ ID NO: 45651 - DNA, 20 bp, Artificial Sequence
  MKO10045651_A_Ripply3
  gRNA
gcttaccggacgttcagttc

SEQ ID NO: 45652 - DNA, 20 bp, Artificial Sequence
  MKO10045652_A_Ripply3
  gRNA
cctcacctttcgggcccgcg

SEQ ID NO: 45653 - DNA, 20 bp, Artificial Sequence
  MKO10045653_A_Ripply3
  gRNA
gggaggctaccgctgccacg

SEQ ID NO: 45654 - DNA, 20 bp, Artificial Sequence
  MKO10045654_A_Rit1
  gRNA
tatcatcggtgcgtcggacc

SEQ ID NO: 45655 - DNA, 20 bp, Artificial Sequence
  MKO10045655_A_Rit1
  gRNA
gtttaaactcccgaacttcg

SEQ ID NO: 45656 - DNA, 20 bp, Artificial Sequence
  MKO10045656_A_Rit1
  gRNA
aaacgtcgtcgatgtagtaa

SEQ ID NO: 45657 - DNA, 20 bp, Artificial Sequence
  MKO10045657_A_Rit2
  gRNA
catcatcgataccgaatcgc

SEQ ID NO: 45658 - DNA, 20 bp, Artificial Sequence
  MKO10045658_A_Rit2
  gRNA
tgacttggagcagttccgtc

SEQ ID NO: 45659 - DNA, 20 bp, Artificial Sequence
  MKO10045659_A_Rit2
  gRNA
atgcgggagcagtacatgcg

SEQ ID NO: 45660 - DNA, 20 bp, Artificial Sequence
  MKO10045660_A_Rlbp1
  gRNA
tcgaccatacttgtcccgac

SEQ ID NO: 45661 - DNA, 20 bp, Artificial Sequence
  MKO10045661_A_Rlbp1
  gRNA
ccgtgcccgcaagttcgatg

SEQ ID NO: 45662 - DNA, 20 bp, Artificial Sequence
  MKO10045662_A_Rlbp1
  gRNA
cacgacccacatcgaacttg

SEQ ID NO: 45663 - DNA, 20 bp, Artificial Sequence
  MKO10045663_A_Rlf
  gRNA
cttgctgaaaacacgacacc

SEQ ID NO: 45664 - DNA, 20 bp, Artificial Sequence
  MKO10045664_A_Rlf
  gRNA
ctcctgaatagcctcttcgc

SEQ ID NO: 45665 - DNA, 20 bp, Artificial Sequence
  MKO10045665_A_Rlf
  gRNA
ggagtcacatgatgcattgt

SEQ ID NO: 45666 - DNA, 20 bp, Artificial Sequence
  MKO10045666_A_Rlim
  gRNA
gaattgcgctccgctcgaga

SEQ ID NO: 45667 - DNA, 20 bp, Artificial Sequence
  MKO10045667_A_Rlim
  gRNA
acgtccactgcatcgaccgc

SEQ ID NO: 45668 - DNA, 20 bp, Artificial Sequence
  MKO10045668_A_Rlim
  gRNA
aactcagattctaacgataa

SEQ ID NO: 45669 - DNA, 20 bp, Artificial Sequence
  MKO10045669_A_Rln1
  gRNA
tccgagactcgcgtcctgca

SEQ ID NO: 45670 - DNA, 20 bp, Artificial Sequence
  MKO10045670_A_Rln1
  gRNA
catttcagcgtcgtatcgaa

SEQ ID NO: 45671 - DNA, 20 bp, Artificial Sequence
  MKO10045671_A_Rln1
  gRNA
atcttctgctacaaccgacg

SEQ ID NO: 45672 - DNA, 20 bp, Artificial Sequence
  MKO10045672_A_Rln3
  gRNA
cggtcgggagttcatccgcg

SEQ ID NO: 45673 - DNA, 20 bp, Artificial Sequence
  MKO10045673_A_Rln3
  gRNA
tctacggtggtcgagccagc

SEQ ID NO: 45674 - DNA, 20 bp, Artificial Sequence
  MKO10045674_A_Rln3
  gRNA
gcaggggacttcttcgctga

SEQ ID NO: 45675 - DNA, 20 bp, Artificial Sequence
  MKO10045675_A_Rltpr
  gRNA
ggtgggcgagatctgccgcc

SEQ ID NO: 45676 - DNA, 20 bp, Artificial Sequence
  MKO10045676_A_Rltpr
  gRNA
gggtgaggttgccgtgcacc

SEQ ID NO: 45677 - DNA, 20 bp, Artificial Sequence
  MKO10045677_A_Rltpr
  gRNA
ggtccgaagtagagtctact

SEQ ID NO: 45678 - DNA, 20 bp, Artificial Sequence
  MKO10045678_A_Rmdn1
  gRNA
gcaatctgcattagtgatgt

SEQ ID NO: 45679 - DNA, 20 bp, Artificial Sequence
  MKO10045679_A_Rmdn1
  gRNA
tactaagctgtgcaatgtca

SEQ ID NO: 45680 - DNA, 20 bp, Artificial Sequence
  MKO10045680_A_Rmdn1
  gRNA
tgcaaatgcctatgttatca

SEQ ID NO: 45681 - DNA, 20 bp, Artificial Sequence
  MKO10045681_A_Rmdn2
  gRNA
gagactcatttgtccgcaaa

SEQ ID NO: 45682 - DNA, 20 bp, Artificial Sequence
  MKO10045682_A_Rmdn2
  gRNA
taggtatattacagctaaca

SEQ ID NO: 45683 - DNA, 20 bp, Artificial Sequence
  MKO10045683_A_Rmdn2
  gRNA
attaccagagcgcccatgaa

SEQ ID NO: 45684 - DNA, 20 bp, Artificial Sequence
  MKO10045684_A_Rmdn3
  gRNA
ctcgtaatcagactccgcgt

SEQ ID NO: 45685 - DNA, 20 bp, Artificial Sequence
  MKO10045685_A_Rmdn3
  gRNA
ttacgagcgggactccgaca

SEQ ID NO: 45686 - DNA, 20 bp, Artificial Sequence
  MKO10045686_A_Rmdn3
  gRNA
actcacagacgccgagagcg

SEQ ID NO: 45687 - DNA, 20 bp, Artificial Sequence
  MKO10045687_A_Rmi1
  gRNA
gacatttctgtaacccttct

SEQ ID NO: 45688 - DNA, 20 bp, Artificial Sequence
  MKO10045688_A_Rmi1
  gRNA
atttattcaaccgtttcttt

SEQ ID NO: 45689 - DNA, 20 bp, Artificial Sequence
  MKO10045689_A_Rmi1
  gRNA
ctgtattaagagttgaaacc

SEQ ID NO: 45690 - DNA, 20 bp, Artificial Sequence
  MKO10045690_A_Rmi2
  gRNA
ctccgctcgagtcgcgcagc

SEQ ID NO: 45691 - DNA, 20 bp, Artificial Sequence
  MKO10045691_A_Rmi2
  gRNA
tccgagtcgctgtcctccgg

SEQ ID NO: 45692 - DNA, 20 bp, Artificial Sequence
  MKO10045692_A_Rmi2
  gRNA
ccagttcccacatgctttcg

SEQ ID NO: 45693 - DNA, 20 bp, Artificial Sequence
  MKO10045693_A_Rmnd1
  gRNA
gaagtgacaagcctgcctag

SEQ ID NO: 45694 - DNA, 20 bp, Artificial Sequence
  MKO10045694_A_Rmnd1
  gRNA
cacagatgcagcaaatattt

SEQ ID NO: 45695 - DNA, 20 bp, Artificial Sequence
  MKO10045695_A_Rmnd1
  gRNA
aaccgcagatgagtatcacc

SEQ ID NO: 45696 - DNA, 20 bp, Artificial Sequence
  MKO10045696_A_Rmnd5a
  gRNA
catagcagtgtttctcgagt

SEQ ID NO: 45697 - DNA, 20 bp, Artificial Sequence
  MKO10045697_A_Rmnd5a
  gRNA
catagcccaaaacagttcct

SEQ ID NO: 45698 - DNA, 20 bp, Artificial Sequence
  MKO10045698_A_Rmnd5a
  gRNA
ctacatccagcattccttgt

SEQ ID NO: 45699 - DNA, 20 bp, Artificial Sequence
  MKO10045699_A_Rmnd5b
  gRNA
gctctacgatggccatctgc

SEQ ID NO: 45700 - DNA, 20 bp, Artificial Sequence
  MKO10045700_A_Rmnd5b
  gRNA
gatccgattcaactccaaga

SEQ ID NO: 45701 - DNA, 20 bp, Artificial Sequence
  MKO10045701_A_Rmnd5b
  gRNA
tcacagcagcgtctctcgag

SEQ ID NO: 45702 - DNA, 20 bp, Artificial Sequence
  MKO10045702_A_Rnase10
  gRNA
cctcatggatgaacgtgtac

SEQ ID NO: 45703 - DNA, 20 bp, Artificial Sequence
  MKO10045703_A_Rnase10
  gRNA
ccagtacacgttcatccatg

SEQ ID NO: 45704 - DNA, 20 bp, Artificial Sequence
  MKO10045704_A_Rnase10
  gRNA
ctaaagctgcttacaagtgt

SEQ ID NO: 45705 - DNA, 20 bp, Artificial Sequence
  MKO10045705_A_Rnase11
  gRNA
tttctgctgttgctcgccct

SEQ ID NO: 45706 - DNA, 20 bp, Artificial Sequence
  MKO10045706_A_Rnase11
  gRNA
actggagcgtaccacgtgca

SEQ ID NO: 45707 - DNA, 20 bp, Artificial Sequence
  MKO10045707_A_Rnase11
  gRNA
gtgtaaacagcctaagagtc

SEQ ID NO: 45708 - DNA, 20 bp, Artificial Sequence
  MKO10045708_A_Rnase12
  gRNA
gtccacatgcaattgttcta

SEQ ID NO: 45709 - DNA, 20 bp, Artificial Sequence
  MKO10045709_A_Rnase12
  gRNA
gtccatagaacaattgcatg

SEQ ID NO: 45710 - DNA, 20 bp, Artificial Sequence
  MKO10045710_A_Rnase12
  gRNA
tgcatgtcttcatccacgag

SEQ ID NO: 45711 - DNA, 20 bp, Artificial Sequence
  MKO10045711_A_Rnase13
  gRNA
ggcctcatggcctacgtgag

SEQ ID NO: 45712 - DNA, 20 bp, Artificial Sequence
  MKO10045712_A_Rnase13
  gRNA
tgaggccattacagtatccg

SEQ ID NO: 45713 - DNA, 20 bp, Artificial Sequence
  MKO10045713_A_Rnase13
  gRNA
cttacatgttgactacccca

SEQ ID NO: 45714 - DNA, 20 bp, Artificial Sequence
  MKO10045714_A_Rnase1
  gRNA
tacgtaggggttcccttcac

SEQ ID NO: 45715 - DNA, 20 bp, Artificial Sequence
  MKO10045715_A_Rnase1
  gRNA
tgccaagggctcatgcacga

SEQ ID NO: 45716 - DNA, 20 bp, Artificial Sequence
  MKO10045716_A_Rnase1
  gRNA
gcaaccaaatgatgaaacgc

SEQ ID NO: 45717 - DNA, 20 bp, Artificial Sequence
  MKO10045717_A_Rnase4
  gRNA
aggtgttgaagcgtttgcac

SEQ ID NO: 45718 - DNA, 20 bp, Artificial Sequence
  MKO10045718_A_Rnase4
  gRNA
aggcccccaactgtagatac

SEQ ID NO: 45719 - DNA, 20 bp, Artificial Sequence
  MKO10045719_A_Rnase4
  gRNA
aatgacaactcgcctagtgc

SEQ ID NO: 45720 - DNA, 20 bp, Artificial Sequence
  MKO10045720_A_Rnase6
  gRNA
ataattgttgacaccgcgca

SEQ ID NO: 45721 - DNA, 20 bp, Artificial Sequence
  MKO10045721_A_Rnase6
  gRNA
gttcttccgaccgttcttgc

SEQ ID NO: 45722 - DNA, 20 bp, Artificial Sequence
  MKO10045722_A_Rnase6
  gRNA
attgcttatcactactatag

SEQ ID NO: 45723 - DNA, 20 bp, Artificial Sequence
  MKO10045723_A_Rnase9
  gRNA
caggcgaacttgatgaccaa

SEQ ID NO: 45724 - DNA, 20 bp, Artificial Sequence
  MKO10045724_A_Rnase9
  gRNA
actcctgcaatgtagtgttc

SEQ ID NO: 45725 - DNA, 20 bp, Artificial Sequence
  MKO10045725_A_Rnase9
  gRNA
ctaataaagtcacgtacttc

SEQ ID NO: 45726 - DNA, 20 bp, Artificial Sequence
  MKO10045726_A_Rnaseh1
  gRNA
tgcccgcttccgtccattac

SEQ ID NO: 45727 - DNA, 20 bp, Artificial Sequence
  MKO10045727_A_Rnaseh1
  gRNA
agagtcagtcgttgtctaca

SEQ ID NO: 45728 - DNA, 20 bp, Artificial Sequence
  MKO10045728_A_Rnaseh1
  gRNA
tgtcaggagctcttcaagcc

SEQ ID NO: 45729 - DNA, 20 bp, Artificial Sequence
  MKO10045729_A_Rnaseh2a
  gRNA
gcctcaccgcccaagcatgc

SEQ ID NO: 45730 - DNA, 20 bp, Artificial Sequence
  MKO10045730_A_Rnaseh2a
  gRNA
agtgctgttgtaatcgagcc

SEQ ID NO: 45731 - DNA, 20 bp, Artificial Sequence
  MKO10045731_A_Rnaseh2a
  gRNA
caggctcacctgccactttc

SEQ ID NO: 45732 - DNA, 20 bp, Artificial Sequence
  MKO10045732_A_Rnaseh2b
  gRNA
acgtgtcatcgaccacgact

SEQ ID NO: 45733 - DNA, 20 bp, Artificial Sequence
  MKO10045733_A_Rnaseh2b
  gRNA
agacccacctgagtgcgggt

SEQ ID NO: 45734 - DNA, 20 bp, Artificial Sequence
  MKO10045734_A_Rnaseh2b
  gRNA
cagcctcctgttcgtaaagc

SEQ ID NO: 45735 - DNA, 20 bp, Artificial Sequence
  MKO10045735_A_Rnaseh2c
  gRNA
cggactcaccgtctgcatcg

SEQ ID NO: 45736 - DNA, 20 bp, Artificial Sequence
  MKO10045736_A_Rnaseh2c
  gRNA
gggctacaggcgtcgtttcg

SEQ ID NO: 45737 - DNA, 20 bp, Artificial Sequence
  MKO10045737_A_Rnaseh2c
  gRNA
ggcgtgaagaagcgatctac

SEQ ID NO: 45738 - DNA, 20 bp, Artificial Sequence
  MKO10045738_A_Rnasek
  gRNA
ctacaactgtttcatcgccg

SEQ ID NO: 45739 - DNA, 20 bp, Artificial Sequence
  MKO10045739_A_Rnasek
  gRNA
agttcgtctcaacaagcgca

SEQ ID NO: 45740 - DNA, 20 bp, Artificial Sequence
  MKO10045740_A_Rnasek
  gRNA
gtggcatcgtcctcagcgcc

SEQ ID NO: 45741 - DNA, 20 bp, Artificial Sequence
  MKO10045741_A_Rnasel
  gRNA
tataggcgaacacatcaatg

SEQ ID NO: 45742 - DNA, 20 bp, Artificial Sequence
  MKO10045742_A_Rnasel
  gRNA
gcagccgctatagaacactc

SEQ ID NO: 45743 - DNA, 20 bp, Artificial Sequence
  MKO10045743_A_Rnasel
  gRNA
gttctctacgtggtaatgaa

SEQ ID NO: 45744 - DNA, 20 bp, Artificial Sequence
  MKO10045744_A_Rnaset2a
  gRNA
ttaacagtggcagccatgag

SEQ ID NO: 45745 - DNA, 20 bp, Artificial Sequence
  MKO10045745_A_Rnaset2a
  gRNA
gagctcaccttgcatactgt

SEQ ID NO: 45746 - DNA, 20 bp, Artificial Sequence
  MKO10045746_A_Rnaset2a
  gRNA
taacagctgccaagactctc

SEQ ID NO: 45747 - DNA, 20 bp, Artificial Sequence
  MKO10045747_A_Rnaset2b
  gRNA
gagctcaccttgcatactgt

SEQ ID NO: 45748 - DNA, 20 bp, Artificial Sequence
  MKO10045748_A_Rnaset2b
  gRNA
ttaacagtggcagccatgag

SEQ ID NO: 45749 - DNA, 20 bp, Artificial Sequence
  MKO10045749_A_Rnaset2b
  gRNA
tccagtaatccagagagtct

SEQ ID NO: 45750 - DNA, 20 bp, Artificial Sequence
  MKO10045750_A_Rnd1
  gRNA
cttcggacggggctcttcgg

SEQ ID NO: 45751 - DNA, 20 bp, Artificial Sequence
  MKO10045751_A_Rnd1
  gRNA
ggcacccatctcctacgagc

SEQ ID NO: 45752 - DNA, 20 bp, Artificial Sequence
  MKO10045752_A_Rnd1
  gRNA
ctgtgcgatagccaagcagt

SEQ ID NO: 45753 - DNA, 20 bp, Artificial Sequence
  MKO10045753_A_Rnd2
  gRNA
cttctctcggccgtggccat

SEQ ID NO: 45754 - DNA, 20 bp, Artificial Sequence
  MKO10045754_A_Rnd2
  gRNA
tacgtcgtactgactctcgc

SEQ ID NO: 45755 - DNA, 20 bp, Artificial Sequence
  MKO10045755_A_Rnd2
  gRNA
agtgtagttctcaaacaccg

SEQ ID NO: 45756 - DNA, 20 bp, Artificial Sequence
  MKO10045756_A_Rnd3
  gRNA
catgtgcgaaatccgctttg

SEQ ID NO: 45757 - DNA, 20 bp, Artificial Sequence
  MKO10045757_A_Rnd3
  gRNA
cgtccagaattacgtcccta

SEQ ID NO: 45758 - DNA, 20 bp, Artificial Sequence
  MKO10045758_A_Rnd3
  gRNA
ggacggacgttgtcatagta

SEQ ID NO: 45759 - DNA, 20 bp, Artificial Sequence
  MKO10045759_A_Rnf103
  gRNA
gtacagtgcagcgtacccgc

SEQ ID NO: 45760 - DNA, 20 bp, Artificial Sequence
  MKO10045760_A_Rnf103
  gRNA
gagaaccacaaatcgcttga

SEQ ID NO: 45761 - DNA, 20 bp, Artificial Sequence
  MKO10045761_A_Rnf103
  gRNA
aaaacctggccaggacgaac

SEQ ID NO: 45762 - DNA, 20 bp, Artificial Sequence
  MKO10045762_A_Rnf10
  gRNA
gtgtccacagcgcgttatct

SEQ ID NO: 45763 - DNA, 20 bp, Artificial Sequence
  MKO10045763_A_Rnf10
  gRNA
acgcttgcgattgtaacgct

SEQ ID NO: 45764 - DNA, 20 bp, Artificial Sequence
  MKO10045764_A_Rnf10
  gRNA
caaagtgagctgcgtagtct

SEQ ID NO: 45765 - DNA, 20 bp, Artificial Sequence
  MKO10045765_A_Rnf111
  gRNA
cctcaagtacaggcgccttg

SEQ ID NO: 45766 - DNA, 20 bp, Artificial Sequence
  MKO10045766_A_Rnf111
  gRNA
acacacctggtcatggtagc

SEQ ID NO: 45767 - DNA, 20 bp, Artificial Sequence
  MKO10045767_A_Rnf111
  gRNA
ctctgatactacttcaactg

SEQ ID NO: 45768 - DNA, 20 bp, Artificial Sequence
  MKO10045768_A_Rnf112
  gRNA
gcttcgagagcccatctcgc

SEQ ID NO: 45769 - DNA, 20 bp, Artificial Sequence
  MKO10045769_A_Rnf112
  gRNA
caggtgggcggctcccgggt

SEQ ID NO: 45770 - DNA, 20 bp, Artificial Sequence
  MKO10045770_A_Rnf112
  gRNA
ggacacacccgtctgcttat

SEQ ID NO: 45771 - DNA, 20 bp, Artificial Sequence
  MKO10045771_A_Rnf113a1
  gRNA
ggcgaccgccgtctacgaac

SEQ ID NO: 45772 - DNA, 20 bp, Artificial Sequence
  MKO10045772_A_Rnf113a1
  gRNA
gatcgaacgtgagcttgatg

SEQ ID NO: 45773 - DNA, 20 bp, Artificial Sequence
  MKO10045773_A_Rnf113a1
  gRNA
cgtctacaagtctacccgtt

SEQ ID NO: 45774 - DNA, 20 bp, Artificial Sequence
  MKO10045774_A_Rnf113a2
  gRNA
cgcacgccggccgcttccga

SEQ ID NO: 45775 - DNA, 20 bp, Artificial Sequence
  MKO10045775_A_Rnf113a2
  gRNA
cgtctacaagtccacgcgct

SEQ ID NO: 45776 - DNA, 20 bp, Artificial Sequence
  MKO10045776_A_Rnf113a2
  gRNA
acagtagcgcgtagatgttc

SEQ ID NO: 45777 - DNA, 20 bp, Artificial Sequence
  MKO10045777_A_Rnf114
  gRNA
taggtcggtacctcggctga

SEQ ID NO: 45778 - DNA, 20 bp, Artificial Sequence
  MKO10045778_A_Rnf114
  gRNA
cagcaccgataccaagtctg

SEQ ID NO: 45779 - DNA, 20 bp, Artificial Sequence
  MKO10045779_A_Rnf114
  gRNA
gccgctcgagctccacagct

SEQ ID NO: 45780 - DNA, 20 bp, Artificial Sequence
  MKO10045780_A_Rnf115
  gRNA
gcggaagtactcgtcccgac

SEQ ID NO: 45781 - DNA, 20 bp, Artificial Sequence
  MKO10045781_A_Rnf115
  gRNA
acaactcacccttcgatagc

SEQ ID NO: 45782 - DNA, 20 bp, Artificial Sequence
  MKO10045782_A_Rnf115
  gRNA
tcgctgtgctattgtctgtc

SEQ ID NO: 45783 - DNA, 20 bp, Artificial Sequence
  MKO10045783_A_Rnf11
  gRNA
ttcacgagtctcagtccgac

SEQ ID NO: 45784 - DNA, 20 bp, Artificial Sequence
  MKO10045784_A_Rnf11
  gRNA
catccgaagtcggggatttg

SEQ ID NO: 45785 - DNA, 20 bp, Artificial Sequence
  MKO10045785_A_Rnf11
  gRNA
atgcacggcagaaatcgaat

SEQ ID NO: 45786 - DNA, 20 bp, Artificial Sequence
  MKO10045786_A_Rnf121
  gRNA
gaggaccatttcagcgtgca

SEQ ID NO: 45787 - DNA, 20 bp, Artificial Sequence
  MKO10045787_A_Rnf121
  gRNA
ctctagtacagacaacccca

SEQ ID NO: 45788 - DNA, 20 bp, Artificial Sequence
  MKO10045788_A_Rnf121
  gRNA
cgaatgcatgccaaacatcg

SEQ ID NO: 45789 - DNA, 20 bp, Artificial Sequence
  MKO10045789_A_Rnf122
  gRNA
gagcgagcgatacggctaca

SEQ ID NO: 45790 - DNA, 20 bp, Artificial Sequence
  MKO10045790_A_Rnf122
  gRNA
ccccacatacttgcggtgaa

SEQ ID NO: 45791 - DNA, 20 bp, Artificial Sequence
  MKO10045791_A_Rnf122
  gRNA
gctccacaggtggtgcttaa

SEQ ID NO: 45792 - DNA, 20 bp, Artificial Sequence
  MKO10045792_A_Rnf123
  gRNA
tcgacttggcccatctactg

SEQ ID NO: 45793 - DNA, 20 bp, Artificial Sequence
  MKO10045793_A_Rnf123
  gRNA
ccacgtgctcaggcaggtta

SEQ ID NO: 45794 - DNA, 20 bp, Artificial Sequence
  MKO10045794_A_Rnf123
  gRNA
ccataacctgcctgagcacg

SEQ ID NO: 45795 - DNA, 20 bp, Artificial Sequence
  MKO10045795_A_Rnf125
  gRNA
gtgtcgccaagttctagcag

SEQ ID NO: 45796 - DNA, 20 bp, Artificial Sequence
  MKO10045796_A_Rnf125
  gRNA
ggctttcatcaggtcgtgaa

SEQ ID NO: 45797 - DNA, 20 bp, Artificial Sequence
  MKO10045797_A_Rnf125
  gRNA
aacttggcgacaccacagca

SEQ ID NO: 45798 - DNA, 20 bp, Artificial Sequence
  MKO10045798_A_Rnf126
  gRNA
gctatcgtcgaagatgccaa

SEQ ID NO: 45799 - DNA, 20 bp, Artificial Sequence
  MKO10045799_A_Rnf126
  gRNA
atgaagccagactcgcacct

SEQ ID NO: 45800 - DNA, 20 bp, Artificial Sequence
  MKO10045800_A_Rnf126
  gRNA
ccccgtaccgatgccgagac

SEQ ID NO: 45801 - DNA, 20 bp, Artificial Sequence
  MKO10045801_A_Rnf128
  gRNA
gtcacaatggtcatcgaagt

SEQ ID NO: 45802 - DNA, 20 bp, Artificial Sequence
  MKO10045802_A_Rnf128
  gRNA
tgctgccgtaattatgaaaa

SEQ ID NO: 45803 - DNA, 20 bp, Artificial Sequence
  MKO10045803_A_Rnf128
  gRNA
cagctgcgcaccttgaaaca

SEQ ID NO: 45804 - DNA, 20 bp, Artificial Sequence
  MKO10045804_A_Rnf130
  gRNA
ccgccaaagaacttcagccg

SEQ ID NO: 45805 - DNA, 20 bp, Artificial Sequence
  MKO10045805_A_Rnf130
  gRNA
actgcacagtgatcgaagtc

SEQ ID NO: 45806 - DNA, 20 bp, Artificial Sequence
  MKO10045806_A_Rnf130
  gRNA
atccactgtttgatattagg

SEQ ID NO: 45807 - DNA, 20 bp, Artificial Sequence
  MKO10045807_A_Rnf133
  gRNA
cctacttcttctgcgaacgc

SEQ ID NO: 45808 - DNA, 20 bp, Artificial Sequence
  MKO10045808_A_Rnf133
  gRNA
aagtaaagtgacccacgtgc

SEQ ID NO: 45809 - DNA, 20 bp, Artificial Sequence
  MKO10045809_A_Rnf133
  gRNA
ccgttcaatgagtgcgatcc

SEQ ID NO: 45810 - DNA, 20 bp, Artificial Sequence
  MKO10045810_A_Rnf135
  gRNA
gtgatcggccactgcgtaga

SEQ ID NO: 45811 - DNA, 20 bp, Artificial Sequence
  MKO10045811_A_Rnf135
  gRNA
gccccaagaagctaccccga

SEQ ID NO: 45812 - DNA, 20 bp, Artificial Sequence
  MKO10045812_A_Rnf135
  gRNA
tcaaacgcaaagacccaact

SEQ ID NO: 45813 - DNA, 20 bp, Artificial Sequence
  MKO10045813_A_Rnf138rt1
  gRNA
gcttctaccggtcgccacta

SEQ ID NO: 45814 - DNA, 20 bp, Artificial Sequence
  MKO10045814_A_Rnf138rt1
  gRNA
gcgttgaactctatcgtatg

SEQ ID NO: 45815 - DNA, 20 bp, Artificial Sequence
  MKO10045815_A_Rnf138rt1
  gRNA
tccgcggcagatccgcagac

SEQ ID NO: 45816 - DNA, 20 bp, Artificial Sequence
  MKO10045816_A_Rnf138
  gRNA
atacattgtcccctatgtcg

SEQ ID NO: 45817 - DNA, 20 bp, Artificial Sequence
  MKO10045817_A_Rnf138
  gRNA
cgtggccgccgaaagttcct

SEQ ID NO: 45818 - DNA, 20 bp, Artificial Sequence
  MKO10045818_A_Rnf138
  gRNA
tagtcacacttccacgacat

SEQ ID NO: 45819 - DNA, 20 bp, Artificial Sequence
  MKO10045819_A_Rnf139
  gRNA
aaattcgataatattgcccg

SEQ ID NO: 45820 - DNA, 20 bp, Artificial Sequence
  MKO10045820_A_Rnf139
  gRNA
aggcatatgtaccgaattta

SEQ ID NO: 45821 - DNA, 20 bp, Artificial Sequence
  MKO10045821_A_Rnf139
  gRNA
atcgtagtaggagttgaaga

SEQ ID NO: 45822 - DNA, 20 bp, Artificial Sequence
  MKO10045822_A_Rnf13
  gRNA
cgttggatcccatgctaatc

SEQ ID NO: 45823 - DNA, 20 bp, Artificial Sequence
  MKO10045823_A_Rnf13
  gRNA
aatcagcacgatgaacgtgc

SEQ ID NO: 45824 - DNA, 20 bp, Artificial Sequence
  MKO10045824_A_Rnf13
  gRNA
ggttatagactaccagctga

SEQ ID NO: 45825 - DNA, 20 bp, Artificial Sequence
  MKO10045825_A_Rnf141
  gRNA
ctgacaggagtgatcgacac

SEQ ID NO: 45826 - DNA, 20 bp, Artificial Sequence
  MKO10045826_A_Rnf141
  gRNA
tgtacgggtggtctgtacca

SEQ ID NO: 45827 - DNA, 20 bp, Artificial Sequence
  MKO10045827_A_Rnf141
  gRNA
accgaggatgggttctcatc

SEQ ID NO: 45828 - DNA, 20 bp, Artificial Sequence
  MKO10045828_A_Rnf144a
  gRNA
gtgtacatcgagcgggatga

SEQ ID NO: 45829 - DNA, 20 bp, Artificial Sequence
  MKO10045829_A_Rnf144a
  gRNA
gctctgcttgcaaagcccgc

SEQ ID NO: 45830 - DNA, 20 bp, Artificial Sequence
  MKO10045830_A_Rnf144a
  gRNA
ctcgatgtacaccctgcact

SEQ ID NO: 45831 - DNA, 20 bp, Artificial Sequence
  MKO10045831_A_Rnf144b
  gRNA
atttacattgagcgcaacga

SEQ ID NO: 45832 - DNA, 20 bp, Artificial Sequence
  MKO10045832_A_Rnf144b
  gRNA
caaaccgggcactgcttgat

SEQ ID NO: 45833 - DNA, 20 bp, Artificial Sequence
  MKO10045833_A_Rnf144b
  gRNA
accgtgtgccatatttcagc

SEQ ID NO: 45834 - DNA, 20 bp, Artificial Sequence
  MKO10045834_A_Rnf145
  gRNA
cgcttacctgaactaactcc

SEQ ID NO: 45835 - DNA, 20 bp, Artificial Sequence
  MKO10045835_A_Rnf145
  gRNA
gcagacttagcgaggttata

SEQ ID NO: 45836 - DNA, 20 bp, Artificial Sequence
  MKO10045836_A_Rnf145
  gRNA
gagagaggttctaaatacat

SEQ ID NO: 45837 - DNA, 20 bp, Artificial Sequence
  MKO10045837_A_Rnf146
  gRNA
gccgaccagtcagaccgatc

SEQ ID NO: 45838 - DNA, 20 bp, Artificial Sequence
  MKO10045838_A_Rnf146
  gRNA
tctcataggatggccggctg

SEQ ID NO: 45839 - DNA, 20 bp, Artificial Sequence
  MKO10045839_A_Rnf146
  gRNA
ggcatcctcactatcactac

SEQ ID NO: 45840 - DNA, 20 bp, Artificial Sequence
  MKO10045840_A_Rnf148
  gRNA
gctgcaacttcgagtgctcc

SEQ ID NO: 45841 - DNA, 20 bp, Artificial Sequence
  MKO10045841_A_Rnf148
  gRNA
aaccggatcatatcagagct

SEQ ID NO: 45842 - DNA, 20 bp, Artificial Sequence
  MKO10045842_A_Rnf148
  gRNA
acaagacttgcatcgatccc

SEQ ID NO: 45843 - DNA, 20 bp, Artificial Sequence
  MKO10045843_A_Rnf149
  gRNA
gttcggtgatccaaaagcca

SEQ ID NO: 45844 - DNA, 20 bp, Artificial Sequence
  MKO10045844_A_Rnf149
  gRNA
cgtaacaaacccaatatccc

SEQ ID NO: 45845 - DNA, 20 bp, Artificial Sequence
  MKO10045845_A_Rnf149
  gRNA
tcaaaaatttcccgtccttt

SEQ ID NO: 45846 - DNA, 20 bp, Artificial Sequence
  MKO10045846_A_Rnf14
  gRNA
ttatgcagactgacctatca

SEQ ID NO: 45847 - DNA, 20 bp, Artificial Sequence
  MKO10045847_A_Rnf14
  gRNA
tgaccaggagtcgccactga

SEQ ID NO: 45848 - DNA, 20 bp, Artificial Sequence
  MKO10045848_A_Rnf14
  gRNA
tcttggacttcaatcaagct

SEQ ID NO: 45849 - DNA, 20 bp, Artificial Sequence
  MKO10045849_A_Rnf150
  gRNA
aaaatatgtgagccgcacgt

SEQ ID NO: 45850 - DNA, 20 bp, Artificial Sequence
  MKO10045850_A_Rnf150
  gRNA
acaagcccaacgatgtggtc

SEQ ID NO: 45851 - DNA, 20 bp, Artificial Sequence
  MKO10045851_A_Rnf150
  gRNA
agacaaacacaaccgacgtg

SEQ ID NO: 45852 - DNA, 20 bp, Artificial Sequence
  MKO10045852_A_Rnf151
  gRNA
cccaagcatcacgtagctcg

SEQ ID NO: 45853 - DNA, 20 bp, Artificial Sequence
  MKO10045853_A_Rnf151
  gRNA
tccggttgcgctcatggcgt

SEQ ID NO: 45854 - DNA, 20 bp, Artificial Sequence
  MKO10045854_A_Rnf151
  gRNA
tcagagctaccttgacttgt

SEQ ID NO: 45855 - DNA, 20 bp, Artificial Sequence
  MKO10045855_A_Rnf152
  gRNA
attattacagcccccgacga

SEQ ID NO: 45856 - DNA, 20 bp, Artificial Sequence
  MKO10045856_A_Rnf152
  gRNA
agtgcacacgccagaccatg

SEQ ID NO: 45857 - DNA, 20 bp, Artificial Sequence
  MKO10045857_A_Rnf152
  gRNA
tttggtgatgccacggcacc

SEQ ID NO: 45858 - DNA, 20 bp, Artificial Sequence
  MKO10045858_A_Rnf157
  gRNA
cccctcggagtgggccgaag

SEQ ID NO: 45859 - DNA, 20 bp, Artificial Sequence
  MKO10045859_A_Rnf157
  gRNA
ggtcgctgttctcgccaaac

SEQ ID NO: 45860 - DNA, 20 bp, Artificial Sequence
  MKO10045860_A_Rnf157
  gRNA
gaagtttgactccacgcatc

SEQ ID NO: 45861 - DNA, 20 bp, Artificial Sequence
  MKO10045861_A_Rnf165
  gRNA
cttcaccccagcttcgactt

SEQ ID NO: 45862 - DNA, 20 bp, Artificial Sequence
  MKO10045862_A_Rnf165
  gRNA
ccaccccgtgcagtcgcagc

SEQ ID NO: 45863 - DNA, 20 bp, Artificial Sequence
  MKO10045863_A_Rnf165
  gRNA
gcaggctcgtctcgcatccc

SEQ ID NO: 45864 - DNA, 20 bp, Artificial Sequence
  MKO10045864_A_Rnf166
  gRNA
gcctaccacgaaggtgtcgt

SEQ ID NO: 45865 - DNA, 20 bp, Artificial Sequence
  MKO10045865_A_Rnf166
  gRNA
cttcttgttgcaaccccgac

SEQ ID NO: 45866 - DNA, 20 bp, Artificial Sequence
  MKO10045866_A_Rnf166
  gRNA
ccgcagtgatcccaaccgtg

SEQ ID NO: 45867 - DNA, 20 bp, Artificial Sequence
  MKO10045867_A_Rnf167
  gRNA
tctgagcgacgagggactgc

SEQ ID NO: 45868 - DNA, 20 bp, Artificial Sequence
  MKO10045868_A_Rnf167
  gRNA
cagtccctcgtcgctcagag

SEQ ID NO: 45869 - DNA, 20 bp, Artificial Sequence
  MKO10045869_A_Rnf167
  gRNA
caccatgttcagcagttcat

SEQ ID NO: 45870 - DNA, 20 bp, Artificial Sequence
  MKO10045870_A_Rnf168
  gRNA
aacttacgatactggtgctc

SEQ ID NO: 45871 - DNA, 20 bp, Artificial Sequence
  MKO10045871_A_Rnf168
  gRNA
cactgagccgacgaactggc

SEQ ID NO: 45872 - DNA, 20 bp, Artificial Sequence
  MKO10045872_A_Rnf168
  gRNA
atgagtgccagccagttcgt

SEQ ID NO: 45873 - DNA, 20 bp, Artificial Sequence
  MKO10045873_A_Rnf169
  gRNA
tctgaatccgagagacgcgc

SEQ ID NO: 45874 - DNA, 20 bp, Artificial Sequence
  MKO10045874_A_Rnf169
  gRNA
ttaccctgccaggaacgcta

SEQ ID NO: 45875 - DNA, 20 bp, Artificial Sequence
  MKO10045875_A_Rnf169
  gRNA
acctcgtaccttggctctgt

SEQ ID NO: 45876 - DNA, 20 bp, Artificial Sequence
  MKO10045876_A_Rnf170
  gRNA
ctcacctgagaagtgcatac

SEQ ID NO: 45877 - DNA, 20 bp, Artificial Sequence
  MKO10045877_A_Rnf170
  gRNA
actaccgtttgtctacagat

SEQ ID NO: 45878 - DNA, 20 bp, Artificial Sequence
  MKO10045878_A_Rnf170
  gRNA
atcagcatacctgttctgtt

SEQ ID NO: 45879 - DNA, 20 bp, Artificial Sequence
  MKO10045879_A_Rnf17
  gRNA
tcctcgatgaagccatctac

SEQ ID NO: 45880 - DNA, 20 bp, Artificial Sequence
  MKO10045880_A_Rnf17
  gRNA
cataccgacattacagctga

SEQ ID NO: 45881 - DNA, 20 bp, Artificial Sequence
  MKO10045881_A_Rnf17
  gRNA
cccagtagatggcttcatcg

SEQ ID NO: 45882 - DNA, 20 bp, Artificial Sequence
  MKO10045882_A_Rnf180
  gRNA
aatacgtcgctcgcacctcc

SEQ ID NO: 45883 - DNA, 20 bp, Artificial Sequence
  MKO10045883_A_Rnf180
  gRNA
cgagccctgcctacgaactc

SEQ ID NO: 45884 - DNA, 20 bp, Artificial Sequence
  MKO10045884_A_Rnf180
  gRNA
gggccccgtttcatttagcc

SEQ ID NO: 45885 - DNA, 20 bp, Artificial Sequence
  MKO10045885_A_Rnf181
  gRNA
aacagtcatcagtagcgcca

SEQ ID NO: 45886 - DNA, 20 bp, Artificial Sequence
  MKO10045886_A_Rnf181
  gRNA
cacggagccatgtacacgtg

SEQ ID NO: 45887 - DNA, 20 bp, Artificial Sequence
  MKO10045887_A_Rnf181
  gRNA
gcgctactgatgactgttct

SEQ ID NO: 45888 - DNA, 20 bp, Artificial Sequence
  MKO10045888_A_Rnf182
  gRNA
tcaccaccgtgtcccataac

SEQ ID NO: 45889 - DNA, 20 bp, Artificial Sequence
  MKO10045889_A_Rnf182
  gRNA
aggctgctgacttcgtcatc

SEQ ID NO: 45890 - DNA, 20 bp, Artificial Sequence
  MKO10045890_A_Rnf182
  gRNA
ccacacgtcctctaattgct

SEQ ID NO: 45891 - DNA, 20 bp, Artificial Sequence
  MKO10045891_A_Rnf183
  gRNA
ccatcagataggcgaagatc

SEQ ID NO: 45892 - DNA, 20 bp, Artificial Sequence
  MKO10045892_A_Rnf183
  gRNA
gccccaccatgtcatcctag

SEQ ID NO: 45893 - DNA, 20 bp, Artificial Sequence
  MKO10045893_A_Rnf183
  gRNA
tcagaggatgagcgaaccac

SEQ ID NO: 45894 - DNA, 20 bp, Artificial Sequence
  MKO10045894_A_Rnf185
  gRNA
ctttgagtgcaacatatgcc

SEQ ID NO: 45895 - DNA, 20 bp, Artificial Sequence
  MKO10045895_A_Rnf185
  gRNA
caggcatatgttgcactcaa

SEQ ID NO: 45896 - DNA, 20 bp, Artificial Sequence
  MKO10045896_A_Rnf185
  gRNA
tagttggccgtgtttacatc

SEQ ID NO: 45897 - DNA, 20 bp, Artificial Sequence
  MKO10045897_A_Rnf186
  gRNA
gctccggtggatgtcgcatg

SEQ ID NO: 45898 - DNA, 20 bp, Artificial Sequence
  MKO10045898_A_Rnf186
  gRNA
ggacaaggctgatccgcgca

SEQ ID NO: 45899 - DNA, 20 bp, Artificial Sequence
  MKO10045899_A_Rnf186
  gRNA
acctgctgacaaccgatgtc

SEQ ID NO: 45900 - DNA, 20 bp, Artificial Sequence
  MKO10045900_A_Rnf187
  gRNA
agaagcgcaccacgcacgcc

SEQ ID NO: 45901 - DNA, 20 bp, Artificial Sequence
  MKO10045901_A_Rnf187
  gRNA
cagctgctctgtcgcgccga

SEQ ID NO: 45902 - DNA, 20 bp, Artificial Sequence
  MKO10045902_A_Rnf187
  gRNA
ccgacccggcagatcgcttc

SEQ ID NO: 45903 - DNA, 20 bp, Artificial Sequence
  MKO10045903_A_Rnf19a
  gRNA
gacctgtgatgctgctcgac

SEQ ID NO: 45904 - DNA, 20 bp, Artificial Sequence
  MKO10045904_A_Rnf19a
  gRNA
tcctgtgtacgtgggccgca

SEQ ID NO: 45905 - DNA, 20 bp, Artificial Sequence
  MKO10045905_A_Rnf19a
  gRNA
cagggtgacaccgcctgcta

SEQ ID NO: 45906 - DNA, 20 bp, Artificial Sequence
  MKO10045906_A_Rnf19b
  gRNA
tggcattgcaattcccgcca

SEQ ID NO: 45907 - DNA, 20 bp, Artificial Sequence
  MKO10045907_A_Rnf19b
  gRNA
acctttctccccacgtatac

SEQ ID NO: 45908 - DNA, 20 bp, Artificial Sequence
  MKO10045908_A_Rnf19b
  gRNA
gggctcagactttacgagtt

SEQ ID NO: 45909 - DNA, 20 bp, Artificial Sequence
  MKO10045909_A_Rnf207
  gRNA
gcgccatgacattgtagccc

SEQ ID NO: 45910 - DNA, 20 bp, Artificial Sequence
  MKO10045910_A_Rnf207
  gRNA
tacacttctggatcacgtcg

SEQ ID NO: 45911 - DNA, 20 bp, Artificial Sequence
  MKO10045911_A_Rnf207
  gRNA
aactgcagcagccggtccac

SEQ ID NO: 45912 - DNA, 20 bp, Artificial Sequence
  MKO10045912_A_Rnf208
  gRNA
aatcagtatgtgattcgacc

SEQ ID NO: 45913 - DNA, 20 bp, Artificial Sequence
  MKO10045913_A_Rnf208
  gRNA
gacgttgtatgtatgcccac

SEQ ID NO: 45914 - DNA, 20 bp, Artificial Sequence
  MKO10045914_A_Rnf208
  gRNA
atacatacaacgtcactcaa

SEQ ID NO: 45915 - DNA, 20 bp, Artificial Sequence
  MKO10045915_A_Rnf20
  gRNA
tgaaaagctggagcgacgcc

SEQ ID NO: 45916 - DNA, 20 bp, Artificial Sequence
  MKO10045916_A_Rnf20
  gRNA
catccttaaacgttatgatc

SEQ ID NO: 45917 - DNA, 20 bp, Artificial Sequence
  MKO10045917_A_Rnf20
  gRNA
cataacgtttaaggatgatg

SEQ ID NO: 45918 - DNA, 20 bp, Artificial Sequence
  MKO10045918_A_Rnf214
  gRNA
cccagcagcctccgtcctaa

SEQ ID NO: 45919 - DNA, 20 bp, Artificial Sequence
  MKO10045919_A_Rnf214
  gRNA
gccttaagagaccgagtgac

SEQ ID NO: 45920 - DNA, 20 bp, Artificial Sequence
  MKO10045920_A_Rnf214
  gRNA
gaagctgctttaactgcacc

SEQ ID NO: 45921 - DNA, 20 bp, Artificial Sequence
  MKO10045921_A_Rnf215
  gRNA
ccctttcagccaacatcgag

SEQ ID NO: 45922 - DNA, 20 bp, Artificial Sequence
  MKO10045922_A_Rnf215
  gRNA
gagcaagagatacccgtaga

SEQ ID NO: 45923 - DNA, 20 bp, Artificial Sequence
  MKO10045923_A_Rnf215
  gRNA
ctctccaaggatggctacgg

SEQ ID NO: 45924 - DNA, 20 bp, Artificial Sequence
  MKO10045924_A_Rnf216
  gRNA
tacttgccttcgcgtcatcc

SEQ ID NO: 45925 - DNA, 20 bp, Artificial Sequence
  MKO10045925_A_Rnf216
  gRNA
tcagtagatgaccagctaat

SEQ ID NO: 45926 - DNA, 20 bp, Artificial Sequence
  MKO10045926_A_Rnf216
  gRNA
cgatattgtcaaccccagat

SEQ ID NO: 45927 - DNA, 20 bp, Artificial Sequence
  MKO10045927_A_Rnf217
  gRNA
cttaccgattacaactgcta

SEQ ID NO: 45928 - DNA, 20 bp, Artificial Sequence
  MKO10045928_A_Rnf217
  gRNA
agacaagttactgcgtcact

SEQ ID NO: 45929 - DNA, 20 bp, Artificial Sequence
  MKO10045929_A_Rnf217
  gRNA
gtcccacttgccaattgatc

SEQ ID NO: 45930 - DNA, 20 bp, Artificial Sequence
  MKO10045930_A_Rnf219
  gRNA
ctgccctgcatcaacgctaa

SEQ ID NO: 45931 - DNA, 20 bp, Artificial Sequence
  MKO10045931_A_Rnf219
  gRNA
gttccatttgcatcgacttg

SEQ ID NO: 45932 - DNA, 20 bp, Artificial Sequence
  MKO10045932_A_Rnf219
  gRNA
gccgtaaattctccctcagc

SEQ ID NO: 45933 - DNA, 20 bp, Artificial Sequence
  MKO10045933_A_Rnf220
  gRNA
gccggttggctcgcactcgc

SEQ ID NO: 45934 - DNA, 20 bp, Artificial Sequence
  MKO10045934_A_Rnf220
  gRNA
tcctgcgagtgcgagccaac

SEQ ID NO: 45935 - DNA, 20 bp, Artificial Sequence
  MKO10045935_A_Rnf220
  gRNA
catatgttcctgcaactcgc

SEQ ID NO: 45936 - DNA, 20 bp, Artificial Sequence
  MKO10045936_A_Rnf222
  gRNA
aaggtgacatagcggcagat

SEQ ID NO: 45937 - DNA, 20 bp, Artificial Sequence
  MKO10045937_A_Rnf222
  gRNA
cgtgctgccccgacgcagcc

SEQ ID NO: 45938 - DNA, 20 bp, Artificial Sequence
  MKO10045938_A_Rnf222
  gRNA
tcagcaagaagagctcccgc

SEQ ID NO: 45939 - DNA, 20 bp, Artificial Sequence
  MKO10045939_A_Rnf223
  gRNA
gcgcaccagccgtcagctac

SEQ ID NO: 45940 - DNA, 20 bp, Artificial Sequence
  MKO10045940_A_Rnf223
  gRNA
tcccggcgacgtcttaagga

SEQ ID NO: 45941 - DNA, 20 bp, Artificial Sequence
  MKO10045941_A_Rnf223
  gRNA
ttccttccttaagacgtcgc

SEQ ID NO: 45942 - DNA, 20 bp, Artificial Sequence
  MKO10045942_A_Rnf24
  gRNA
gtgtcccctgtgcaacatgc

SEQ ID NO: 45943 - DNA, 20 bp, Artificial Sequence
  MKO10045943_A_Rnf24
  gRNA
ggcccaattgcacagtaaac

SEQ ID NO: 45944 - DNA, 20 bp, Artificial Sequence
  MKO10045944_A_Rnf24
  gRNA
cttcaagcctagagatgaac

SEQ ID NO: 45945 - DNA, 20 bp, Artificial Sequence
  MKO10045945_A_Rnf25
  gRNA
atctccatccgtaaccctcg

SEQ ID NO: 45946 - DNA, 20 bp, Artificial Sequence
  MKO10045946_A_Rnf25
  gRNA
tgctcatctgaaagtcctcg

SEQ ID NO: 45947 - DNA, 20 bp, Artificial Sequence
  MKO10045947_A_Rnf25
  gRNA
agcagacaaactgcgaatct

SEQ ID NO: 45948 - DNA, 20 bp, Artificial Sequence
  MKO10045948_A_Rnf26
  gRNA
ccaaatcggggaggagcacc

SEQ ID NO: 45949 - DNA, 20 bp, Artificial Sequence
  MKO10045949_A_Rnf26
  gRNA
cctggtgctcctccccgatt

SEQ ID NO: 45950 - DNA, 20 bp, Artificial Sequence
  MKO10045950_A_Rnf26
  gRNA
cggctgactcgccttccact

SEQ ID NO: 45951 - DNA, 20 bp, Artificial Sequence
  MKO10045951_A_Rnf2
  gRNA
aagcgggcccgagtaacaaa

SEQ ID NO: 45952 - DNA, 20 bp, Artificial Sequence
  MKO10045952_A_Rnf2
  gRNA
cccttaattagattacagcg

SEQ ID NO: 45953 - DNA, 20 bp, Artificial Sequence
  MKO10045953_A_Rnf2
  gRNA
cgcttcatactcatcacgac

SEQ ID NO: 45954 - DNA, 20 bp, Artificial Sequence
  MKO10045954_A_Rnf31
  gRNA
catacaaccgtagtacatcc

SEQ ID NO: 45955 - DNA, 20 bp, Artificial Sequence
  MKO10045955_A_Rnf31
  gRNA
agggtggccgggatgtacta

SEQ ID NO: 45956 - DNA, 20 bp, Artificial Sequence
  MKO10045956_A_Rnf31
  gRNA
taaccccgtctttcgcagca

SEQ ID NO: 45957 - DNA, 20 bp, Artificial Sequence
  MKO10045957_A_Rnf32
  gRNA
taggatcgttcatctaacaa

SEQ ID NO: 45958 - DNA, 20 bp, Artificial Sequence
  MKO10045958_A_Rnf32
  gRNA
gttagcttacctaaagttaa

SEQ ID NO: 45959 - DNA, 20 bp, Artificial Sequence
  MKO10045959_A_Rnf32
  gRNA
gaatggagtccccttgtaga

SEQ ID NO: 45960 - DNA, 20 bp, Artificial Sequence
  MKO10045960_A_Rnf34
  gRNA
aaccgacacttgtcgtgaga

SEQ ID NO: 45961 - DNA, 20 bp, Artificial Sequence
  MKO10045961_A_Rnf34
  gRNA
tgaggaggagatactgccgc

SEQ ID NO: 45962 - DNA, 20 bp, Artificial Sequence
  MKO10045962_A_Rnf34
  gRNA
agttgacaaaattccgagcc

SEQ ID NO: 45963 - DNA, 20 bp, Artificial Sequence
  MKO10045963_A_Rnf38
  gRNA
taactacggtggcaccccat

SEQ ID NO: 45964 - DNA, 20 bp, Artificial Sequence
  MKO10045964_A_Rnf38
  gRNA
cttcctcgctgacgcctaac

SEQ ID NO: 45965 - DNA, 20 bp, Artificial Sequence
  MKO10045965_A_Rnf38
  gRNA
tgccaccgtagttaccgtgt

SEQ ID NO: 45966 - DNA, 20 bp, Artificial Sequence
  MKO10045966_A_Rnf39
  gRNA
ctgtgcgagggtcgagcgtc

SEQ ID NO: 45967 - DNA, 20 bp, Artificial Sequence
  MKO10045967_A_Rnf39
  gRNA
ctccactgccagtcgcacgt

SEQ ID NO: 45968 - DNA, 20 bp, Artificial Sequence
  MKO10045968_A_Rnf39
  gRNA
aagatacgcagcggggtacg

SEQ ID NO: 45969 - DNA, 20 bp, Artificial Sequence
  MKO10045969_A_Rnf40
  gRNA
aggtggcacgggtgcgcacc

SEQ ID NO: 45970 - DNA, 20 bp, Artificial Sequence
  MKO10045970_A_Rnf40
  gRNA
ctcctacctccaacgagatg

SEQ ID NO: 45971 - DNA, 20 bp, Artificial Sequence
  MKO10045971_A_Rnf40
  gRNA
aggcctcggaccgcctgcaa

SEQ ID NO: 45972 - DNA, 20 bp, Artificial Sequence
  MKO10045972_A_Rnf41
  gRNA
tacgtggccaagcgcatccc

SEQ ID NO: 45973 - DNA, 20 bp, Artificial Sequence
  MKO10045973_A_Rnf41
  gRNA
gcagtcgcgcattgcagagc

SEQ ID NO: 45974 - DNA, 20 bp, Artificial Sequence
  MKO10045974_A_Rnf41
  gRNA
tgtcatcaagcgctccctcg

SEQ ID NO: 45975 - DNA, 20 bp, Artificial Sequence
  MKO10045975_A_Rnf43
  gRNA
gagacgcttaccccggcggg

SEQ ID NO: 45976 - DNA, 20 bp, Artificial Sequence
  MKO10045976_A_Rnf43
  gRNA
caggggcgaggagctcgtcg

SEQ ID NO: 45977 - DNA, 20 bp, Artificial Sequence
  MKO10045977_A_Rnf43
  gRNA
tttccacaggcccgaatggc

SEQ ID NO: 45978 - DNA, 20 bp, Artificial Sequence
  MKO10045978_A_Rnf44
  gRNA
gataacgagatggaccttcg

SEQ ID NO: 45979 - DNA, 20 bp, Artificial Sequence
  MKO10045979_A_Rnf44
  gRNA
ggcactgagggcgacaaggc

SEQ ID NO: 45980 - DNA, 20 bp, Artificial Sequence
  MKO10045980_A_Rnf44
  gRNA
cacttaccatacgtgggtgc

SEQ ID NO: 45981 - DNA, 20 bp, Artificial Sequence
  MKO10045981_A_Rnf4
  gRNA
gactcacaatgactctgttg

SEQ ID NO: 45982 - DNA, 20 bp, Artificial Sequence
  MKO10045982_A_Rnf4
  gRNA
cacgggctctaaagattcac

SEQ ID NO: 45983 - DNA, 20 bp, Artificial Sequence
  MKO10045983_A_Rnf4
  gRNA
ccatactcctcgaagcacca

SEQ ID NO: 45984 - DNA, 20 bp, Artificial Sequence
  MKO10045984_A_Rnf5
  gRNA
gagaaggtcgtccctcttta

SEQ ID NO: 45985 - DNA, 20 bp, Artificial Sequence
  MKO10045985_A_Rnf5
  gRNA
tggctccctcgcccataaag

SEQ ID NO: 45986 - DNA, 20 bp, Artificial Sequence
  MKO10045986_A_Rnf5
  gRNA
ccctaggggttccagccatt

SEQ ID NO: 45987 - DNA, 20 bp, Artificial Sequence
  MKO10045987_A_Rnf6
  gRNA
cacattcccagtgcgccgaa

SEQ ID NO: 45988 - DNA, 20 bp, Artificial Sequence
  MKO10045988_A_Rnf6
  gRNA
cgtggtcgagccatcctccg

SEQ ID NO: 45989 - DNA, 20 bp, Artificial Sequence
  MKO10045989_A_Rnf6
  gRNA
gatccgtctagatctagatc

SEQ ID NO: 45990 - DNA, 20 bp, Artificial Sequence
  MKO10045990_A_Rnf7
  gRNA
agatgttctctctcaagaag

SEQ ID NO: 45991 - DNA, 20 bp, Artificial Sequence
  MKO10045991_A_Rnf7
  gRNA
cgccgccgccatggccgacg

SEQ ID NO: 45992 - DNA, 20 bp, Artificial Sequence
  MKO10045992_A_Rnf7
  gRNA
tcaagctgaaaacaagcaag

SEQ ID NO: 45993 - DNA, 20 bp, Artificial Sequence
  MKO10045993_A_Rnf8
  gRNA
tgacgcatcgagtcagtcct

SEQ ID NO: 45994 - DNA, 20 bp, Artificial Sequence
  MKO10045994_A_Rnf8
  gRNA
ttactggcgacattagccag

SEQ ID NO: 45995 - DNA, 20 bp, Artificial Sequence
  MKO10045995_A_Rnf8
  gRNA
ggcaaacctttgatatcagc

SEQ ID NO: 45996 - DNA, 20 bp, Artificial Sequence
  MKO10045996_A_Rnft1
  gRNA
aagctcaactgttcgagtgt

SEQ ID NO: 45997 - DNA, 20 bp, Artificial Sequence
  MKO10045997_A_Rnft1
  gRNA
caaactccccgtagcttata

SEQ ID NO: 45998 - DNA, 20 bp, Artificial Sequence
  MKO10045998_A_Rnft1
  gRNA
taccgaaaccaaactggtat

SEQ ID NO: 45999 - DNA, 20 bp, Artificial Sequence
  MKO10045999_A_Rnft2
  gRNA
aggtgcttccttcggcgctg

SEQ ID NO: 46000 - DNA, 20 bp, Artificial Sequence
  MKO10046000_A_Rnft2
  gRNA
acgtcacctggtgcgcagca

SEQ ID NO: 46001 - DNA, 20 bp, Artificial Sequence
  MKO10046001_A_Rnft2
  gRNA
tcgcagcagaagtcgcagcc

SEQ ID NO: 46002 - DNA, 20 bp, Artificial Sequence
  MKO10046002_A_Rngtt
  gRNA
accaacatacctataagttc

SEQ ID NO: 46003 - DNA, 20 bp, Artificial Sequence
  MKO10046003_A_Rngtt
  gRNA
tagataatttgagagcatac

SEQ ID NO: 46004 - DNA, 20 bp, Artificial Sequence
  MKO10046004_A_Rngtt
  gRNA
cttacctctgaagacgatgc

SEQ ID NO: 46005 - DNA, 20 bp, Artificial Sequence
  MKO10046005_A_Rnh1
  gRNA
ggcctccaaagcttcgctac

SEQ ID NO: 46006 - DNA, 20 bp, Artificial Sequence
  MKO10046006_A_Rnh1
  gRNA
cagttcctgtagcgaagctt

SEQ ID NO: 46007 - DNA, 20 bp, Artificial Sequence
  MKO10046007_A_Rnh1
  gRNA
tcttacaagtgggattctgc

SEQ ID NO: 46008 - DNA, 20 bp, Artificial Sequence
  MKO10046008_A_Rnls
  gRNA
cagtaattagtgaacgccag

SEQ ID NO: 46009 - DNA, 20 bp, Artificial Sequence
  MKO10046009_A_Rnls
  gRNA
ctactcctctcgctatgctc

SEQ ID NO: 46010 - DNA, 20 bp, Artificial Sequence
  MKO10046010_A_Rnls
  gRNA
cttctgcacatccgcctcac

SEQ ID NO: 46011 - DNA, 20 bp, Artificial Sequence
  MKO10046011_A_Rnmtl1
  gRNA
tcaacgctcggcgctgggtc

SEQ ID NO: 46012 - DNA, 20 bp, Artificial Sequence
  MKO10046012_A_Rnmtl1
  gRNA
ggcagggcttcgctacgata

SEQ ID NO: 46013 - DNA, 20 bp, Artificial Sequence
  MKO10046013_A_Rnmtl1
  gRNA
ataaaaccggtgaccgtgac

SEQ ID NO: 46014 - DNA, 20 bp, Artificial Sequence
  MKO10046014_A_Rnmt
  gRNA
gactttgactacgcttcgcc

SEQ ID NO: 46015 - DNA, 20 bp, Artificial Sequence
  MKO10046015_A_Rnmt
  gRNA
tgcggtacctcatcgtcctg

SEQ ID NO: 46016 - DNA, 20 bp, Artificial Sequence
  MKO10046016_A_Rnmt
  gRNA
agaagcgactgacgctttcg

SEQ ID NO: 46017 - DNA, 20 bp, Artificial Sequence
  MKO10046017_A_Rnpc3
  gRNA
cgcaaatatagtaaatgctc

SEQ ID NO: 46018 - DNA, 20 bp, Artificial Sequence
  MKO10046018_A_Rnpc3
  gRNA
tgtcccaaaattctatgtac

SEQ ID NO: 46019 - DNA, 20 bp, Artificial Sequence
  MKO10046019_A_Rnpc3
  gRNA
gacctagaagtttcagctga

SEQ ID NO: 46020 - DNA, 20 bp, Artificial Sequence
  MKO10046020_A_Rnpepl1
  gRNA
cttcccgtgcttcgatacgc

SEQ ID NO: 46021 - DNA, 20 bp, Artificial Sequence
  MKO10046021_A_Rnpepl1
  gRNA
ctacgaggtaggcgggtact

SEQ ID NO: 46022 - DNA, 20 bp, Artificial Sequence
  MKO10046022_A_Rnpepl1
  gRNA
accgccggcgtatcgaagca

SEQ ID NO: 46023 - DNA, 20 bp, Artificial Sequence
  MKO10046023_A_Rnpep
  gRNA
gctcacctaccgcgtcgggg

SEQ ID NO: 46024 - DNA, 20 bp, Artificial Sequence
  MKO10046024_A_Rnpep
  gRNA
tgccgccgatcgcttcgagc

SEQ ID NO: 46025 - DNA, 20 bp, Artificial Sequence
  MKO10046025_A_Rnpep
  gRNA
ggtttaagaccgcctgaccc

SEQ ID NO: 46026 - DNA, 20 bp, Artificial Sequence
  MKO10046026_A_Rnps1
  gRNA
ctctctctaggatcatatca

SEQ ID NO: 46027 - DNA, 20 bp, Artificial Sequence
  MKO10046027_A_Rnps1
  gRNA
tgaggatgcatcctctcaac

SEQ ID NO: 46028 - DNA, 20 bp, Artificial Sequence
  MKO10046028_A_Rnps1
  gRNA
tgttaccttggtcacattcc

SEQ ID NO: 46029 - DNA, 20 bp, Artificial Sequence
  MKO10046029_A_Robo1
  gRNA
tatacgcgtaaaagcgatgc

SEQ ID NO: 46030 - DNA, 20 bp, Artificial Sequence
  MKO10046030_A_Robo1
  gRNA
ctacctccagcgatgcgttg

SEQ ID NO: 46031 - DNA, 20 bp, Artificial Sequence
  MKO10046031_A_Robo1
  gRNA
gccccaccccgacgatagaa

SEQ ID NO: 46032 - DNA, 20 bp, Artificial Sequence
  MKO10046032_A_Robo2
  gRNA
cgcagaagtaaaccggacga

SEQ ID NO: 46033 - DNA, 20 bp, Artificial Sequence
  MKO10046033_A_Robo2
  gRNA
caaacgtaactcccttcgtc

SEQ ID NO: 46034 - DNA, 20 bp, Artificial Sequence
  MKO10046034_A_Robo2
  gRNA
acagatgtggtagtcgcagc

SEQ ID NO: 46035 - DNA, 20 bp, Artificial Sequence
  MKO10046035_A_Robo3
  gRNA
ggcggctgctccacgatgcg

SEQ ID NO: 46036 - DNA, 20 bp, Artificial Sequence
  MKO10046036_A_Robo3
  gRNA
agcgacgcccgtgcacaatg

SEQ ID NO: 46037 - DNA, 20 bp, Artificial Sequence
  MKO10046037_A_Robo3
  gRNA
attgccggaaatcatcacgg

SEQ ID NO: 46038 - DNA, 20 bp, Artificial Sequence
  MKO10046038_A_Robo4
  gRNA
catccggcaaaaggtaatgt

SEQ ID NO: 46039 - DNA, 20 bp, Artificial Sequence
  MKO10046039_A_Robo4
  gRNA
ggacagagggccgatgtaac

SEQ ID NO: 46040 - DNA, 20 bp, Artificial Sequence
  MKO10046040_A_Robo4
  gRNA
ctaaaccccgaacctgtaaa

SEQ ID NO: 46041 - DNA, 20 bp, Artificial Sequence
  MKO10046041_A_Rock1
  gRNA
gtaatcggcagaggtgcatt

SEQ ID NO: 46042 - DNA, 20 bp, Artificial Sequence
  MKO10046042_A_Rock1
  gRNA
catagcataaaccttcctag

SEQ ID NO: 46043 - DNA, 20 bp, Artificial Sequence
  MKO10046043_A_Rock1
  gRNA
tggcgtttgccaatagtcct

SEQ ID NO: 46044 - DNA, 20 bp, Artificial Sequence
  MKO10046044_A_Rock2
  gRNA
aaatcctcaggttcgtcata

SEQ ID NO: 46045 - DNA, 20 bp, Artificial Sequence
  MKO10046045_A_Rock2
  gRNA
gtacatcataattactcata

SEQ ID NO: 46046 - DNA, 20 bp, Artificial Sequence
  MKO10046046_A_Rock2
  gRNA
tatgcttacctgaactaccc

SEQ ID NO: 46047 - DNA, 20 bp, Artificial Sequence
  MKO10046047_A_Rogdi
  gRNA
cgccgtgctgagacagctgc

SEQ ID NO: 46048 - DNA, 20 bp, Artificial Sequence
  MKO10046048_A_Rogdi
  gRNA
tgcaacaactggttgttccg

SEQ ID NO: 46049 - DNA, 20 bp, Artificial Sequence
  MKO10046049_A_Rogdi
  gRNA
ggggactcaccgcttggctg

SEQ ID NO: 46050 - DNA, 20 bp, Artificial Sequence
  MKO10046050_A_Rom1
  gRNA
cctccaaccccgtatccgtt

SEQ ID NO: 46051 - DNA, 20 bp, Artificial Sequence
  MKO10046051_A_Rom1
  gRNA
ctgtcaggccaaacgtctga

SEQ ID NO: 46052 - DNA, 20 bp, Artificial Sequence
  MKO10046052_A_Rom1
  gRNA
aggtttaggttgggctgccg

SEQ ID NO: 46053 - DNA, 20 bp, Artificial Sequence
  MKO10046053_A_Romo1
  gRNA
cgggagctaatgggcggcat

SEQ ID NO: 46054 - DNA, 20 bp, Artificial Sequence
  MKO10046054_A_Romo1
  gRNA
gccgcagatgccggtggccg

SEQ ID NO: 46055 - DNA, 20 bp, Artificial Sequence
  MKO10046055_A_Romo1
  gRNA
tcctcctcaggatcggaatg

SEQ ID NO: 46056 - DNA, 20 bp, Artificial Sequence
  MKO10046056_A_Ropn1l
  gRNA
ggactttcggacttcttcgt

SEQ ID NO: 46057 - DNA, 20 bp, Artificial Sequence
  MKO10046057_A_Ropn1l
  gRNA
atgcgagcaggcccgccctc

SEQ ID NO: 46058 - DNA, 20 bp, Artificial Sequence
  MKO10046058_A_Ropn1l
  gRNA
ggacccagaactcccggccg

SEQ ID NO: 46059 - DNA, 20 bp, Artificial Sequence
  MKO10046059_A_Ropn1
  gRNA
gtacacgtatatcgctgaag

SEQ ID NO: 46060 - DNA, 20 bp, Artificial Sequence
  MKO10046060_A_Ropn1
  gRNA
tatttcggagccatgtcccg

SEQ ID NO: 46061 - DNA, 20 bp, Artificial Sequence
  MKO10046061_A_Ropn1
  gRNA
tctcttcatcccacgttagc

SEQ ID NO: 46062 - DNA, 20 bp, Artificial Sequence
  MKO10046062_A_Ror1
  gRNA
ggagtacttacgaggatcct

SEQ ID NO: 46063 - DNA, 20 bp, Artificial Sequence
  MKO10046063_A_Ror1
  gRNA
tccttccgggcaaccaacta

SEQ ID NO: 46064 - DNA, 20 bp, Artificial Sequence
  MKO10046064_A_Ror1
  gRNA
attgcatgtgcacgatttat

SEQ ID NO: 46065 - DNA, 20 bp, Artificial Sequence
  MKO10046065_A_Ror2
  gRNA
agcgcgcacaagcgatccct

SEQ ID NO: 46066 - DNA, 20 bp, Artificial Sequence
  MKO10046066_A_Ror2
  gRNA
atcgcttgtgcgcgcttcat

SEQ ID NO: 46067 - DNA, 20 bp, Artificial Sequence
  MKO10046067_A_Ror2
  gRNA
agtgatggtcttcagcccgt

SEQ ID NO: 46068 - DNA, 20 bp, Artificial Sequence
  MKO10046068_A_Rora
  gRNA
gagagacagcttgtacgccg

SEQ ID NO: 46069 - DNA, 20 bp, Artificial Sequence
  MKO10046069_A_Rora
  gRNA
gacttccccaaccgtgtcca

SEQ ID NO: 46070 - DNA, 20 bp, Artificial Sequence
  MKO10046070_A_Rora
  gRNA
cacacgtaatgacaccataa

SEQ ID NO: 46071 - DNA, 20 bp, Artificial Sequence
  MKO10046071_A_Rorb
  gRNA
tgccgccggtctcggtgttc

SEQ ID NO: 46072 - DNA, 20 bp, Artificial Sequence
  MKO10046072_A_Rorb
  gRNA
cagccgtctcccgatcagtc

SEQ ID NO: 46073 - DNA, 20 bp, Artificial Sequence
  MKO10046073_A_Rorb
  gRNA
cacacgtgatgactccgtag

SEQ ID NO: 46074 - DNA, 20 bp, Artificial Sequence
  MKO10046074_A_Rorc
  gRNA
gttgcggctggttcggtcaa

SEQ ID NO: 46075 - DNA, 20 bp, Artificial Sequence
  MKO10046075_A_Rorc
  gRNA
cttgagtatagtccagaacg

SEQ ID NO: 46076 - DNA, 20 bp, Artificial Sequence
  MKO10046076_A_Rorc
  gRNA
gcagttctgctgacgcgtgc

SEQ ID NO: 46077 - DNA, 20 bp, Artificial Sequence
  MKO10046077_A_Ros1
  gRNA
tgcggagggtagctacgaag

SEQ ID NO: 46078 - DNA, 20 bp, Artificial Sequence
  MKO10046078_A_Ros1
  gRNA
cacctacgccaccatttgtg

SEQ ID NO: 46079 - DNA, 20 bp, Artificial Sequence
  MKO10046079_A_Ros1
  gRNA
cacacggtacaatctgagtg

SEQ ID NO: 46080 - DNA, 20 bp, Artificial Sequence
  MKO10046080_A_Rp1l1
  gRNA
tcactgcctgtatcgccgtc

SEQ ID NO: 46081 - DNA, 20 bp, Artificial Sequence
  MKO10046081_A_Rp1l1
  gRNA
tctgcgctttcccgtcaagc

SEQ ID NO: 46082 - DNA, 20 bp, Artificial Sequence
  MKO10046082_A_Rp1l1
  gRNA
ggtgacggaacgcaccccaa

SEQ ID NO: 46083 - DNA, 20 bp, Artificial Sequence
  MKO10046083_A_Rp1
  gRNA
acccacagtttggcggcgtt

SEQ ID NO: 46084 - DNA, 20 bp, Artificial Sequence
  MKO10046084_A_Rp1
  gRNA
cgggtgtcatcggacaatcc

SEQ ID NO: 46085 - DNA, 20 bp, Artificial Sequence
  MKO10046085_A_Rp1
  gRNA
tctgcattgccgtacatgcc

SEQ ID NO: 46086 - DNA, 20 bp, Artificial Sequence
  MKO10046086_A_Rp2h
  gRNA
gaaacagtaggtcgcttacc

SEQ ID NO: 46087 - DNA, 20 bp, Artificial Sequence
  MKO10046087_A_Rp2h
  gRNA
atccgcttcatatccccatc

SEQ ID NO: 46088 - DNA, 20 bp, Artificial Sequence
  MKO10046088_A_Rp2h
  gRNA
agtctctcacacgaaattgc

SEQ ID NO: 46089 - DNA, 20 bp, Artificial Sequence
  MKO10046089_A_Rp9
  gRNA
tcgcgaatgatgtcgtacat

SEQ ID NO: 46090 - DNA, 20 bp, Artificial Sequence
  MKO10046090_A_Rp9
  gRNA
attctttgtcgcctgttcga

SEQ ID NO: 46091 - DNA, 20 bp, Artificial Sequence
  MKO10046091_A_Rp9
  gRNA
acgctccgactaaaggactg

SEQ ID NO: 46092 - DNA, 20 bp, Artificial Sequence
  MKO10046092_A_Rpa1
  gRNA
tgacgatgaacttgtggacc

SEQ ID NO: 46093 - DNA, 20 bp, Artificial Sequence
  MKO10046093_A_Rpa1
  gRNA
cctcgatggccccctcgctc

SEQ ID NO: 46094 - DNA, 20 bp, Artificial Sequence
  MKO10046094_A_Rpa1
  gRNA
aacatccgtcccatttctac

SEQ ID NO: 46095 - DNA, 20 bp, Artificial Sequence
  MKO10046095_A_Rpa2
  gRNA
cgatatgacagctccgccca

SEQ ID NO: 46096 - DNA, 20 bp, Artificial Sequence
  MKO10046096_A_Rpa2
  gRNA
gtagccgcctgctccgccat

SEQ ID NO: 46097 - DNA, 20 bp, Artificial Sequence
  MKO10046097_A_Rpa2
  gRNA
ggcggctacacgcagtcccc

SEQ ID NO: 46098 - DNA, 20 bp, Artificial Sequence
  MKO10046098_A_Rpa3
  gRNA
tagcttgacgaggaaatctc

SEQ ID NO: 46099 - DNA, 20 bp, Artificial Sequence
  MKO10046099_A_Rpa3
  gRNA
tgcatcttataccctgttta

SEQ ID NO: 46100 - DNA, 20 bp, Artificial Sequence
  MKO10046100_A_Rpa3
  gRNA
tactggctccatcaattcaa

SEQ ID NO: 46101 - DNA, 20 bp, Artificial Sequence
  MKO10046101_A_Rpain
  gRNA
gctcctgaacaaatatcgcc

SEQ ID NO: 46102 - DNA, 20 bp, Artificial Sequence
  MKO10046102_A_Rpain
  gRNA
ctcttcatactcgcttatga

SEQ ID NO: 46103 - DNA, 20 bp, Artificial Sequence
  MKO10046103_A_Rpain
  gRNA
catcataagcgagtatgaag

SEQ ID NO: 46104 - DNA, 20 bp, Artificial Sequence
  MKO10046104_A_Rpap1
  gRNA
gcctgtgttccatcgctctc

SEQ ID NO: 46105 - DNA, 20 bp, Artificial Sequence
  MKO10046105_A_Rpap1
  gRNA
aggcgggaaagcaacaccac

SEQ ID NO: 46106 - DNA, 20 bp, Artificial Sequence
  MKO10046106_A_Rpap1
  gRNA
tcgtgaggcagcgggtgacc

SEQ ID NO: 46107 - DNA, 20 bp, Artificial Sequence
  MKO10046107_A_Rpap2
  gRNA
agctcactacagcgacgttg

SEQ ID NO: 46108 - DNA, 20 bp, Artificial Sequence
  MKO10046108_A_Rpap2
  gRNA
tcttcctctcgaacccatac

SEQ ID NO: 46109 - DNA, 20 bp, Artificial Sequence
  MKO10046109_A_Rpap2
  gRNA
ttcttcagcagctgaaagtc

SEQ ID NO: 46110 - DNA, 20 bp, Artificial Sequence
  MKO10046110_A_Rpap3
  gRNA
taagccgacgctctgtttgt

SEQ ID NO: 46111 - DNA, 20 bp, Artificial Sequence
  MKO10046111_A_Rpap3
  gRNA
aaaccgagctgcacctcgcc

SEQ ID NO: 46112 - DNA, 20 bp, Artificial Sequence
  MKO10046112_A_Rpap3
  gRNA
gctgccaacaaacagagcgt

SEQ ID NO: 46113 - DNA, 20 bp, Artificial Sequence
  MKO10046113_A_Rpe65
  gRNA
actggcagtctcctccgatg

SEQ ID NO: 46114 - DNA, 20 bp, Artificial Sequence
  MKO10046114_A_Rpe65
  gRNA
gcatagtaatcttctcccac

SEQ ID NO: 46115 - DNA, 20 bp, Artificial Sequence
  MKO10046115_A_Rpe65
  gRNA
ttcagaattgaacaccctgc

SEQ ID NO: 46116 - DNA, 20 bp, Artificial Sequence
  MKO10046116_A_Rpe
  gRNA
tttcggaggctttcaaccac

SEQ ID NO: 46117 - DNA, 20 bp, Artificial Sequence
  MKO10046117_A_Rpe
  gRNA
atgaccgtagaacctgggtt

SEQ ID NO: 46118 - DNA, 20 bp, Artificial Sequence
  MKO10046118_A_Rpe
  gRNA
tcgtctaggttcactggttg

SEQ ID NO: 46119 - DNA, 20 bp, Artificial Sequence
  MKO10046119_A_Rpf1
  gRNA
gagagaggctcttggcgata

SEQ ID NO: 46120 - DNA, 20 bp, Artificial Sequence
  MKO10046120_A_Rpf1
  gRNA
ggtggcttacgatgaagcga

SEQ ID NO: 46121 - DNA, 20 bp, Artificial Sequence
  MKO10046121_A_Rpf1
  gRNA
tggtctcgtcgtaaacgcgc

SEQ ID NO: 46122 - DNA, 20 bp, Artificial Sequence
  MKO10046122_A_Rpf2
  gRNA
tatgcactgaagaaaccata

SEQ ID NO: 46123 - DNA, 20 bp, Artificial Sequence
  MKO10046123_A_Rpf2
  gRNA
agtgacgtctgatcctcaaa

SEQ ID NO: 46124 - DNA, 20 bp, Artificial Sequence
  MKO10046124_A_Rpf2
  gRNA
tcacctattactaggttatt

SEQ ID NO: 46125 - DNA, 20 bp, Artificial Sequence
  MKO10046125_A_Rpgrip1l
  gRNA
ctcgagttaacaccggccgc

SEQ ID NO: 46126 - DNA, 20 bp, Artificial Sequence
  MKO10046126_A_Rpgrip1l
  gRNA
attaactagccgtattaact

SEQ ID NO: 46127 - DNA, 20 bp, Artificial Sequence
  MKO10046127_A_Rpgrip1l
  gRNA
cttcactgtgcgtgcagttg

SEQ ID NO: 46128 - DNA, 20 bp, Artificial Sequence
  MKO10046128_A_Rpgrip1
  gRNA
tgcactgcctaccgcggtcg

SEQ ID NO: 46129 - DNA, 20 bp, Artificial Sequence
  MKO10046129_A_Rpgrip1
  gRNA
ctgcgtcccgcgtggactcg

SEQ ID NO: 46130 - DNA, 20 bp, Artificial Sequence
  MKO10046130_A_Rpgrip1
  gRNA
agaaggttccttcaccaacg

SEQ ID NO: 46131 - DNA, 20 bp, Artificial Sequence
  MKO10046131_A_Rpgr
  gRNA
tactgtacctgttgaaacta

SEQ ID NO: 46132 - DNA, 20 bp, Artificial Sequence
  MKO10046132_A_Rpgr
  gRNA
atccctcatgaagtgactgt

SEQ ID NO: 46133 - DNA, 20 bp, Artificial Sequence
  MKO10046133_A_Rpgr
  gRNA
acatgttcggcagtaacaac

SEQ ID NO: 46134 - DNA, 20 bp, Artificial Sequence
  MKO10046134_A_Rph3al
  gRNA
ccgtattctgcaaagactgc

SEQ ID NO: 46135 - DNA, 20 bp, Artificial Sequence
  MKO10046135_A_Rph3al
  gRNA
tcaggggcctggttctacaa

SEQ ID NO: 46136 - DNA, 20 bp, Artificial Sequence
  MKO10046136_A_Rph3al
  gRNA
atcttgcccctgaaaacccc

SEQ ID NO: 46137 - DNA, 20 bp, Artificial Sequence
  MKO10046137_A_Rph3a
  gRNA
ctccaacaaccgtccgcatc

SEQ ID NO: 46138 - DNA, 20 bp, Artificial Sequence
  MKO10046138_A_Rph3a
  gRNA
caggcgcctggtggaccgtc

SEQ ID NO: 46139 - DNA, 20 bp, Artificial Sequence
  MKO10046139_A_Rph3a
  gRNA
acagtcttcacacacgacac

SEQ ID NO: 46140 - DNA, 20 bp, Artificial Sequence
  MKO10046140_A_Rpia
  gRNA
tacctattcgctgcacagcg

SEQ ID NO: 46141 - DNA, 20 bp, Artificial Sequence
  MKO10046141_A_Rpia
  gRNA
cagattgaccttgccatcga

SEQ ID NO: 46142 - DNA, 20 bp, Artificial Sequence
  MKO10046142_A_Rpia
  gRNA
gtccacgctgtgcagcgaat

SEQ ID NO: 46143 - DNA, 20 bp, Artificial Sequence
  MKO10046143_A_Rpl10a
  gRNA
ctcacttgcggcgcttgcgc

SEQ ID NO: 46144 - DNA, 20 bp, Artificial Sequence
  MKO10046144_A_Rpl10a
  gRNA
ctcgctcaggtttctggaga

SEQ ID NO: 46145 - DNA, 20 bp, Artificial Sequence
  MKO10046145_A_Rpl10a
  gRNA
ccagactgaccttcttcatc

SEQ ID NO: 46146 - DNA, 20 bp, Artificial Sequence
  MKO10046146_A_Rpl10l
  gRNA
gcgagccggacgacgaccca

SEQ ID NO: 46147 - DNA, 20 bp, Artificial Sequence
  MKO10046147_A_Rpl10l
  gRNA
tgtcgccatgggtcgtcgtc

SEQ ID NO: 46148 - DNA, 20 bp, Artificial Sequence
  MKO10046148_A_Rpl10l
  gRNA
actctcgccaccgtaccttg

SEQ ID NO: 46149 - DNA, 20 bp, Artificial Sequence
  MKO10046149_A_Rpl10
  gRNA
ctacctaccttctggcggcc

SEQ ID NO: 46150 - DNA, 20 bp, Artificial Sequence
  MKO10046150_A_Rpl10
  gRNA
actacttaccagggacacca

SEQ ID NO: 46151 - DNA, 20 bp, Artificial Sequence
  MKO10046151_A_Rpl10
  gRNA
tatgagcaactctcttctga

SEQ ID NO: 46152 - DNA, 20 bp, Artificial Sequence
  MKO10046152_A_Rpl11
  gRNA
catgcgctggttccagcaga

SEQ ID NO: 46153 - DNA, 20 bp, Artificial Sequence
  MKO10046153_A_Rpl11
  gRNA
cagaccccggtgttctccaa

SEQ ID NO: 46154 - DNA, 20 bp, Artificial Sequence
  MKO10046154_A_Rpl11
  gRNA
cctcttcgcagcaagatcaa

SEQ ID NO: 46155 - DNA, 20 bp, Artificial Sequence
  MKO10046155_A_Rpl12
  gRNA
cgacgacttaccagacccag

SEQ ID NO: 46156 - DNA, 20 bp, Artificial Sequence
  MKO10046156_A_Rpl12
  gRNA
gaagatcggtcctctgggtc

SEQ ID NO: 46157 - DNA, 20 bp, Artificial Sequence
  MKO10046157_A_Rpl12
  gRNA
ctacagtctccgaagaaagt

SEQ ID NO: 46158 - DNA, 20 bp, Artificial Sequence
  MKO10046158_A_Rpl13a
  gRNA
gttaactctaggccggaagg

SEQ ID NO: 46159 - DNA, 20 bp, Artificial Sequence
  MKO10046159_A_Rpl13a
  gRNA
gatccctccaccctatgaca

SEQ ID NO: 46160 - DNA, 20 bp, Artificial Sequence
  MKO10046160_A_Rpl13a
  gRNA
gtttccacaggttctggtat

SEQ ID NO: 46161 - DNA, 20 bp, Artificial Sequence
  MKO10046161_A_Rpl13
  gRNA
tttcctgcaggcgcaaggcc

SEQ ID NO: 46162 - DNA, 20 bp, Artificial Sequence
  MKO10046162_A_Rpl13
  gRNA
acaggctgaagaacttaagc

SEQ ID NO: 46163 - DNA, 20 bp, Artificial Sequence
  MKO10046163_A_Rpl13
  gRNA
ctctttccaggtgtacaaaa

SEQ ID NO: 46164 - DNA, 20 bp, Artificial Sequence
  MKO10046164_A_Rpl14
  gRNA
ttaggtgttcaggcgttacg

SEQ ID NO: 46165 - DNA, 20 bp, Artificial Sequence
  MKO10046165_A_Rpl14
  gRNA
gtatcctaggctttagtgga

SEQ ID NO: 46166 - DNA, 20 bp, Artificial Sequence
  MKO10046166_A_Rpl14
  gRNA
tcatcctcaagttcccacac

SEQ ID NO: 46167 - DNA, 20 bp, Artificial Sequence
  MKO10046167_A_Rpl15
  gRNA
gtgtaggctatgtcatttac

SEQ ID NO: 46168 - DNA, 20 bp, Artificial Sequence
  MKO10046168_A_Rpl15
  gRNA
tcacctcagcaacagactga

SEQ ID NO: 46169 - DNA, 20 bp, Artificial Sequence
  MKO10046169_A_Rpl15
  gRNA
gggtgcatacaagtacatcc

SEQ ID NO: 46170 - DNA, 20 bp, Artificial Sequence
  MKO10046170_A_Rpl17
  gRNA
aaaccttcgtgttcacttta

SEQ ID NO: 46171 - DNA, 20 bp, Artificial Sequence
  MKO10046171_A_Rpl17
  gRNA
tttgcagcatgcaaatcaag

SEQ ID NO: 46172 - DNA, 20 bp, Artificial Sequence
  MKO10046172_A_Rpl17
  gRNA
ttctctttcaggccaaacag

SEQ ID NO: 46173 - DNA, 20 bp, Artificial Sequence
  MKO10046173_A_Rpl18a
  gRNA
tctttccacagaccgagaca

SEQ ID NO: 46174 - DNA, 20 bp, Artificial Sequence
  MKO10046174_A_Rpl18a
  gRNA
ctttcagcttcgggagtaca

SEQ ID NO: 46175 - DNA, 20 bp, Artificial Sequence
  MKO10046175_A_Rpl18a
  gRNA
tccgcagtacacaatttccc

SEQ ID NO: 46176 - DNA, 20 bp, Artificial Sequence
  MKO10046176_A_Rpl18
  gRNA
gactactaaccatgcgggac

SEQ ID NO: 46177 - DNA, 20 bp, Artificial Sequence
  MKO10046177_A_Rpl18
  gRNA
acctctgtccctgtcccgca

SEQ ID NO: 46178 - DNA, 20 bp, Artificial Sequence
  MKO10046178_A_Rpl18
  gRNA
tggtcacttaccttcagctt

SEQ ID NO: 46179 - DNA, 20 bp, Artificial Sequence
  MKO10046179_A_Rpl19
  gRNA
cttacgccaggagcttcttg

SEQ ID NO: 46180 - DNA, 20 bp, Artificial Sequence
  MKO10046180_A_Rpl19
  gRNA
atactcacgggagttggcat

SEQ ID NO: 46181 - DNA, 20 bp, Artificial Sequence
  MKO10046181_A_Rpl19
  gRNA
ccttcccaggtcagcagatc

SEQ ID NO: 46182 - DNA, 20 bp, Artificial Sequence
  MKO10046182_A_Rpl21
  gRNA
tcattccaggggcaaaattc

SEQ ID NO: 46183 - DNA, 20 bp, Artificial Sequence
  MKO10046183_A_Rpl21
  gRNA
cttgtagattcgcatgtatg

SEQ ID NO: 46184 - DNA, 20 bp, Artificial Sequence
  MKO10046184_A_Rpl21
  gRNA
atacatgcgaatctacaaga

SEQ ID NO: 46185 - DNA, 20 bp, Artificial Sequence
  MKO10046185_A_Rpl22l1
  gRNA
gaaaataggaacagtttcta

SEQ ID NO: 46186 - DNA, 20 bp, Artificial Sequence
  MKO10046186_A_Rpl22l1
  gRNA
tcaaaaattccatcttctac

SEQ ID NO: 46187 - DNA, 20 bp, Artificial Sequence
  MKO10046187_A_Rpl22l1
  gRNA
agaagcctaagaagtccacc

SEQ ID NO: 46188 - DNA, 20 bp, Artificial Sequence
  MKO10046188_A_Rpl22
  gRNA
cttgctcttgctgcgttcga

SEQ ID NO: 46189 - DNA, 20 bp, Artificial Sequence
  MKO10046189_A_Rpl22
  gRNA
catactaaccacaggcgcca

SEQ ID NO: 46190 - DNA, 20 bp, Artificial Sequence
  MKO10046190_A_Rpl22
  gRNA
ctctgccgccatggcgcctg

SEQ ID NO: 46191 - DNA, 20 bp, Artificial Sequence
  MKO10046191_A_Rpl23a
  gRNA
tgccctagatgttgccaaca

SEQ ID NO: 46192 - DNA, 20 bp, Artificial Sequence
  MKO10046192_A_Rpl23a
  gRNA
ttaccttgttggcaacatct

SEQ ID NO: 46193 - DNA, 20 bp, Artificial Sequence
  MKO10046193_A_Rpl23a
  gRNA
ccctactgacttgtttctcc

SEQ ID NO: 46194 - DNA, 20 bp, Artificial Sequence
  MKO10046194_A_Rpl23
  gRNA
caaacaggctctgctatcac

SEQ ID NO: 46195 - DNA, 20 bp, Artificial Sequence
  MKO10046195_A_Rpl23
  gRNA
gtccttagtacatccagcag

SEQ ID NO: 46196 - DNA, 20 bp, Artificial Sequence
  MKO10046196_A_Rpl23
  gRNA
gcaggacgcggtgggtcctc

SEQ ID NO: 46197 - DNA, 20 bp, Artificial Sequence
  MKO10046197_A_Rpl24
  gRNA
ctttaccttcccgtcggtcc

SEQ ID NO: 46198 - DNA, 20 bp, Artificial Sequence
  MKO10046198_A_Rpl24
  gRNA
acctgatagcctgctctcgc

SEQ ID NO: 46199 - DNA, 20 bp, Artificial Sequence
  MKO10046199_A_Rpl24
  gRNA
gtcgagctgtgcagtttcag

SEQ ID NO: 46200 - DNA, 20 bp, Artificial Sequence
  MKO10046200_A_Rpl26
  gRNA
ttgtgcaggtcgttatcacc

SEQ ID NO: 46201 - DNA, 20 bp, Artificial Sequence
  MKO10046201_A_Rpl26
  gRNA
aaacacccaccttgctgggg

SEQ ID NO: 46202 - DNA, 20 bp, Artificial Sequence
  MKO10046202_A_Rpl26
  gRNA
aacttcgtcatccttccgaa

SEQ ID NO: 46203 - DNA, 20 bp, Artificial Sequence
  MKO10046203_A_Rpl27a
  gRNA
cacacttaccgatgcggccg

SEQ ID NO: 46204 - DNA, 20 bp, Artificial Sequence
  MKO10046204_A_Rpl27a
  gRNA
cccagtcacccaggttactt

SEQ ID NO: 46205 - DNA, 20 bp, Artificial Sequence
  MKO10046205_A_Rpl27a
  gRNA
ccacgcagccatccagactg

SEQ ID NO: 46206 - DNA, 20 bp, Artificial Sequence
  MKO10046206_A_Rpl27
  gRNA
acgcaaagccgtcatcgtga

SEQ ID NO: 46207 - DNA, 20 bp, Artificial Sequence
  MKO10046207_A_Rpl27
  gRNA
gtctggtaccttcacgatga

SEQ ID NO: 46208 - DNA, 20 bp, Artificial Sequence
  MKO10046208_A_Rpl27
  gRNA
ctcgtctagaacattgacga

SEQ ID NO: 46209 - DNA, 20 bp, Artificial Sequence
  MKO10046209_A_Rpl28
  gRNA
ttactcaccatacgcagatc

SEQ ID NO: 46210 - DNA, 20 bp, Artificial Sequence
  MKO10046210_A_Rpl28
  gRNA
gtcctcaggcggccatccgc

SEQ ID NO: 46211 - DNA, 20 bp, Artificial Sequence
  MKO10046211_A_Rpl28
  gRNA
attcctcttgatcaagaaac

SEQ ID NO: 46212 - DNA, 20 bp, Artificial Sequence
  MKO10046212_A_Rpl29
  gRNA
gaacttacactggttgtgtg

SEQ ID NO: 46213 - DNA, 20 bp, Artificial Sequence
  MKO10046213_A_Rpl29
  gRNA
gcccgcaaatggcacagaaa

SEQ ID NO: 46214 - DNA, 20 bp, Artificial Sequence
  MKO10046214_A_Rpl29
  gRNA
gagattcgtatctttgcgac

SEQ ID NO: 46215 - DNA, 20 bp, Artificial Sequence
  MKO10046215_A_Rpl30
  gRNA
ttcactcaccgtcttctttg

SEQ ID NO: 46216 - DNA, 20 bp, Artificial Sequence
  MKO10046216_A_Rpl30
  gRNA
tgcattgtagaaaaagtctc

SEQ ID NO: 46217 - DNA, 20 bp, Artificial Sequence
  MKO10046217_A_Rpl30
  gRNA
gatggtggccgcaaagaaga

SEQ ID NO: 46218 - DNA, 20 bp, Artificial Sequence
  MKO10046218_A_Rpl31-ps12
  gRNA
caacacaaaaatcaacaaca

SEQ ID NO: 46219 - DNA, 20 bp, Artificial Sequence
  MKO10046219_A_Rpl31-ps12
  gRNA
caactttatttgacatgagc

SEQ ID NO: 46220 - DNA, 20 bp, Artificial Sequence
  MKO10046220_A_Rpl31-ps12
  gRNA
cttgtccagaaaacgtaatg

SEQ ID NO: 46221 - DNA, 20 bp, Artificial Sequence
  MKO10046221_A_Rpl31
  gRNA
acttcagtaccttattccct

SEQ ID NO: 46222 - DNA, 20 bp, Artificial Sequence
  MKO10046222_A_Rpl31
  gRNA
tctccttccagatctacaga

SEQ ID NO: 46223 - DNA, 20 bp, Artificial Sequence
  MKO10046223_A_Rpl31
  gRNA
ctagatggctcccgcaaaga

SEQ ID NO: 46224 - DNA, 20 bp, Artificial Sequence
  MKO10046224_A_Rpl32
  gRNA
tgtgtcttcagcgaaactgg

SEQ ID NO: 46225 - DNA, 20 bp, Artificial Sequence
  MKO10046225_A_Rpl32
  gRNA
agaccgatatgtgaaaatta

SEQ ID NO: 46226 - DNA, 20 bp, Artificial Sequence
  MKO10046226_A_Rpl32
  gRNA
aaggcatcatggctgccctc

SEQ ID NO: 46227 - DNA, 20 bp, Artificial Sequence
  MKO10046227_A_Rpl34-ps1
  gRNA
cttcctaggtctcgaacccc

SEQ ID NO: 46228 - DNA, 20 bp, Artificial Sequence
  MKO10046228_A_Rpl34-ps1
  gRNA
taaattgtaggcactcagga

SEQ ID NO: 46229 - DNA, 20 bp, Artificial Sequence
  MKO10046229_A_Rpl34-ps1
  gRNA
ttctacaggttcgtgctgtg

SEQ ID NO: 46230 - DNA, 20 bp, Artificial Sequence
  MKO10046230_A_Rpl34
  gRNA
cttcctaggtctcgaacccc

SEQ ID NO: 46231 - DNA, 20 bp, Artificial Sequence
  MKO10046231_A_Rpl34
  gRNA
ttctacaggttcgtgctgtg

SEQ ID NO: 46232 - DNA, 20 bp, Artificial Sequence
  MKO10046232_A_Rpl34
  gRNA
tcacctgtcacggacacact

SEQ ID NO: 46233 - DNA, 20 bp, Artificial Sequence
  MKO10046233_A_Rpl35a
  gRNA
ttgtcttaggctgtggtgca

SEQ ID NO: 46234 - DNA, 20 bp, Artificial Sequence
  MKO10046234_A_Rpl35a
  gRNA
cccagatgctgtacccatcc

SEQ ID NO: 46235 - DNA, 20 bp, Artificial Sequence
  MKO10046235_A_Rpl35a
  gRNA
cattggacacagaatccgtg

SEQ ID NO: 46236 - DNA, 20 bp, Artificial Sequence
  MKO10046236_A_Rpl35
  gRNA
ctcattgcaggccaagatta

SEQ ID NO: 46237 - DNA, 20 bp, Artificial Sequence
  MKO10046237_A_Rpl35
  gRNA
cacttacatcttggagagct

SEQ ID NO: 46238 - DNA, 20 bp, Artificial Sequence
  MKO10046238_A_Rpl35
  gRNA
tcaccttgtagaatttcctg

SEQ ID NO: 46239 - DNA, 20 bp, Artificial Sequence
  MKO10046239_A_Rpl36al
  gRNA
cgctacgatcgcaagcagag

SEQ ID NO: 46240 - DNA, 20 bp, Artificial Sequence
  MKO10046240_A_Rpl36al
  gRNA
gatcgtagcgccgctttcct

SEQ ID NO: 46241 - DNA, 20 bp, Artificial Sequence
  MKO10046241_A_Rpl36al
  gRNA
tcaacgtaccaaaaacccga

SEQ ID NO: 46242 - DNA, 20 bp, Artificial Sequence
  MKO10046242_A_Rpl36a
  gRNA
caggaaagcggcgttacgac

SEQ ID NO: 46243 - DNA, 20 bp, Artificial Sequence
  MKO10046243_A_Rpl36a
  gRNA
tcttgtactgtgtcaccttg

SEQ ID NO: 46244 - DNA, 20 bp, Artificial Sequence
  MKO10046244_A_Rpl36a
  gRNA
tgaacgtgcctaaaacccgc

SEQ ID NO: 46245 - DNA, 20 bp, Artificial Sequence
  MKO10046245_A_Rpl36
  gRNA
cagcactcaccccgcgtcgc

SEQ ID NO: 46246 - DNA, 20 bp, Artificial Sequence
  MKO10046246_A_Rpl36
  gRNA
catggctctgcgctacccca

SEQ ID NO: 46247 - DNA, 20 bp, Artificial Sequence
  MKO10046247_A_Rpl36
  gRNA
cttgagtgcgcgcttgtcct

SEQ ID NO: 46248 - DNA, 20 bp, Artificial Sequence
  MKO10046248_A_Rpl37a
  gRNA
aaacactcacttgtaggtcc

SEQ ID NO: 46249 - DNA, 20 bp, Artificial Sequence
  MKO10046249_A_Rpl37a
  gRNA
ccgacttgccttgccacaga

SEQ ID NO: 46250 - DNA, 20 bp, Artificial Sequence
  MKO10046250_A_Rpl37a
  gRNA
acaggctaaacgcaccaaga

SEQ ID NO: 46251 - DNA, 20 bp, Artificial Sequence
  MKO10046251_A_Rpl37
  gRNA
agattgtctaccgcagattc

SEQ ID NO: 46252 - DNA, 20 bp, Artificial Sequence
  MKO10046252_A_Rpl37
  gRNA
gcacagacatggattccgtg

SEQ ID NO: 46253 - DNA, 20 bp, Artificial Sequence
  MKO10046253_A_Rpl37
  gRNA
caaaactgtacctgaatctg

SEQ ID NO: 46254 - DNA, 20 bp, Artificial Sequence
  MKO10046254_A_Rpl38
  gRNA
ggcgtactcacccgggggta

SEQ ID NO: 46255 - DNA, 20 bp, Artificial Sequence
  MKO10046255_A_Rpl38
  gRNA
gttacagcctcggaaaattg

SEQ ID NO: 46256 - DNA, 20 bp, Artificial Sequence
  MKO10046256_A_Rpl38
  gRNA
tacacttggcatccttccgc

SEQ ID NO: 46257 - DNA, 20 bp, Artificial Sequence
  MKO10046257_A_Rpl39l
  gRNA
acattggagacgaaccaaat

SEQ ID NO: 46258 - DNA, 20 bp, Artificial Sequence
  MKO10046258_A_Rpl39l
  gRNA
ggttccttatagacccaatt

SEQ ID NO: 46259 - DNA, 20 bp, Artificial Sequence
  MKO10046259_A_Rpl39l
  gRNA
tcgtctccaatgtctccgct

SEQ ID NO: 46260 - DNA, 20 bp, Artificial Sequence
  MKO10046260_A_Rpl39
  gRNA
tttccgaatcaagcgattcc

SEQ ID NO: 46261 - DNA, 20 bp, Artificial Sequence
  MKO10046261_A_Rpl39
  gRNA
aaaatcgccctattcctcag

SEQ ID NO: 46262 - DNA, 20 bp, Artificial Sequence
  MKO10046262_A_Rpl39
  gRNA
acaactctaagagaagacac

SEQ ID NO: 46263 - DNA, 20 bp, Artificial Sequence
  MKO10046263_A_Rpl3l
  gRNA
cttgtcagttacgtcgtagc

SEQ ID NO: 46264 - DNA, 20 bp, Artificial Sequence
  MKO10046264_A_Rpl3l
  gRNA
atggagcagcctactcgggc

SEQ ID NO: 46265 - DNA, 20 bp, Artificial Sequence
  MKO10046265_A_Rpl3l
  gRNA
tcctgccagatctaccgcat

SEQ ID NO: 46266 - DNA, 20 bp, Artificial Sequence
  MKO10046266_A_Rpl3
  gRNA
ccgcatcattgcccacactc

SEQ ID NO: 46267 - DNA, 20 bp, Artificial Sequence
  MKO10046267_A_Rpl3
  gRNA
aaggcacaagtctaagaaga

SEQ ID NO: 46268 - DNA, 20 bp, Artificial Sequence
  MKO10046268_A_Rpl3
  gRNA
acaggaaattctcagctccc

SEQ ID NO: 46269 - DNA, 20 bp, Artificial Sequence
  MKO10046269_A_Rpl41
  gRNA
ctcctgcgccatgagagcga

SEQ ID NO: 46270 - DNA, 20 bp, Artificial Sequence
  MKO10046270_A_Rpl41
  gRNA
gccgctcaccttcgctctca

SEQ ID NO: 46271 - DNA, 20 bp, Artificial Sequence
  MKO10046271_A_Rpl4
  gRNA
tttgttaggtcatcgtattg

SEQ ID NO: 46272 - DNA, 20 bp, Artificial Sequence
  MKO10046272_A_Rpl4
  gRNA
catacctgccaattcactga

SEQ ID NO: 46273 - DNA, 20 bp, Artificial Sequence
  MKO10046273_A_Rpl4
  gRNA
tgtttgcaccaaccaaaacc

SEQ ID NO: 46274 - DNA, 20 bp, Artificial Sequence
  MKO10046274_A_Rpl5
  gRNA
gaggcttgtctatccctcat

SEQ ID NO: 46275 - DNA, 20 bp, Artificial Sequence
  MKO10046275_A_Rpl5
  gRNA
ataccctgcgggccagcagc

SEQ ID NO: 46276 - DNA, 20 bp, Artificial Sequence
  MKO10046276_A_Rpl5
  gRNA
tctgttcatagcttctgaat

SEQ ID NO: 46277 - DNA, 20 bp, Artificial Sequence
  MKO10046277_A_Rpl6
  gRNA
cactcctcaccttgcccctg

SEQ ID NO: 46278 - DNA, 20 bp, Artificial Sequence
  MKO10046278_A_Rpl6
  gRNA
ccgtggctcagcagcttccg

SEQ ID NO: 46279 - DNA, 20 bp, Artificial Sequence
  MKO10046279_A_Rpl6
  gRNA
gaagaagaagaaaaaagaga

SEQ ID NO: 46280 - DNA, 20 bp, Artificial Sequence
  MKO10046280_A_Rpl7a
  gRNA
ccatgacgtagaccccattg

SEQ ID NO: 46281 - DNA, 20 bp, Artificial Sequence
  MKO10046281_A_Rpl7a
  gRNA
cactgacctgctcggaggac

SEQ ID NO: 46282 - DNA, 20 bp, Artificial Sequence
  MKO10046282_A_Rpl7a
  gRNA
cgtacagcccaaagggaaga

SEQ ID NO: 46283 - DNA, 20 bp, Artificial Sequence
  MKO10046283_A_Rpl7l1
  gRNA
actcacccccaggtcacata

SEQ ID NO: 46284 - DNA, 20 bp, Artificial Sequence
  MKO10046284_A_Rpl7l1
  gRNA
cttgtcacgttgctgtcgcc

SEQ ID NO: 46285 - DNA, 20 bp, Artificial Sequence
  MKO10046285_A_Rpl7l1
  gRNA
tggagccttatgtgacctgg

SEQ ID NO: 46286 - DNA, 20 bp, Artificial Sequence
  MKO10046286_A_Rpl7
  gRNA
cctttgtcatcagaattcga

SEQ ID NO: 46287 - DNA, 20 bp, Artificial Sequence
  MKO10046287_A_Rpl7
  gRNA
actcacccccatgcaatgta

SEQ ID NO: 46288 - DNA, 20 bp, Artificial Sequence
  MKO10046288_A_Rpl7
  gRNA
ccctcgaattctgatgacaa

SEQ ID NO: 46289 - DNA, 20 bp, Artificial Sequence
  MKO10046289_A_Rpl8
  gRNA
caacacacgatcgtaccctc

SEQ ID NO: 46290 - DNA, 20 bp, Artificial Sequence
  MKO10046290_A_Rpl8
  gRNA
tacgatcgtgtgttgtctgg

SEQ ID NO: 46291 - DNA, 20 bp, Artificial Sequence
  MKO10046291_A_Rpl8
  gRNA
agagctgttcatcgcagcgg

SEQ ID NO: 46292 - DNA, 20 bp, Artificial Sequence
  MKO10046292_A_Rpl9
  gRNA
ttcagctccgggttgacaaa

SEQ ID NO: 46293 - DNA, 20 bp, Artificial Sequence
  MKO10046293_A_Rpl9
  gRNA
tttagtcgaaatcactctga

SEQ ID NO: 46294 - DNA, 20 bp, Artificial Sequence
  MKO10046294_A_Rpl9
  gRNA
attgaacttgtttcaaattc

SEQ ID NO: 46295 - DNA, 20 bp, Artificial Sequence
  MKO10046295_A_Rplp0
  gRNA
catacagggtgtccgcaacg

SEQ ID NO: 46296 - DNA, 20 bp, Artificial Sequence
  MKO10046296_A_Rplp0
  gRNA
ccttccctcggagcgacatg

SEQ ID NO: 46297 - DNA, 20 bp, Artificial Sequence
  MKO10046297_A_Rplp0
  gRNA
tctactcaccagaatttcaa

SEQ ID NO: 46298 - DNA, 20 bp, Artificial Sequence
  MKO10046298_A_Rplp1
  gRNA
cttaccttggcaaacaagcc

SEQ ID NO: 46299 - DNA, 20 bp, Artificial Sequence
  MKO10046299_A_Rplp1
  gRNA
cctcatcctgcacgacgacg

SEQ ID NO: 46300 - DNA, 20 bp, Artificial Sequence
  MKO10046300_A_Rplp1
  gRNA
ccgtcacctcgtcgtcgtgc

SEQ ID NO: 46301 - DNA, 20 bp, Artificial Sequence
  MKO10046301_A_Rplp2
  gRNA
cctccatttacctgcagcgg

SEQ ID NO: 46302 - DNA, 20 bp, Artificial Sequence
  MKO10046302_A_Rplp2
  gRNA
ttgtgtaggtgttggcaagc

SEQ ID NO: 46303 - DNA, 20 bp, Artificial Sequence
  MKO10046303_A_Rplp2
  gRNA
caagaaaatactagacagcg

SEQ ID NO: 46304 - DNA, 20 bp, Artificial Sequence
  MKO10046304_A_Rpn1
  gRNA
ttccacaacgaccgagatct

SEQ ID NO: 46305 - DNA, 20 bp, Artificial Sequence
  MKO10046305_A_Rpn1
  gRNA
gtccaagatctcggtcgttg

SEQ ID NO: 46306 - DNA, 20 bp, Artificial Sequence
  MKO10046306_A_Rpn1
  gRNA
tctcccgctacgattaccag

SEQ ID NO: 46307 - DNA, 20 bp, Artificial Sequence
  MKO10046307_A_Rpn2
  gRNA
ccttaccgctcgcctcggca

SEQ ID NO: 46308 - DNA, 20 bp, Artificial Sequence
  MKO10046308_A_Rpn2
  gRNA
gaagagagaatccacgttgc

SEQ ID NO: 46309 - DNA, 20 bp, Artificial Sequence
  MKO10046309_A_Rpn2
  gRNA
gtctgccttctactccatcg

SEQ ID NO: 46310 - DNA, 20 bp, Artificial Sequence
  MKO10046310_A_Rpp14
  gRNA
ccatcttgagaatatgcagc

SEQ ID NO: 46311 - DNA, 20 bp, Artificial Sequence
  MKO10046311_A_Rpp14
  gRNA
cgacagtgtcttctcatcgt

SEQ ID NO: 46312 - DNA, 20 bp, Artificial Sequence
  MKO10046312_A_Rpp14
  gRNA
tcagccctgagagacctgtt

SEQ ID NO: 46313 - DNA, 20 bp, Artificial Sequence
  MKO10046313_A_Rpp21
  gRNA
gaggaccagccgcttcgcga

SEQ ID NO: 46314 - DNA, 20 bp, Artificial Sequence
  MKO10046314_A_Rpp21
  gRNA
cagagaaaaccatcgcgaag

SEQ ID NO: 46315 - DNA, 20 bp, Artificial Sequence
  MKO10046315_A_Rpp21
  gRNA
acgtctctggcgctgcgtgc

SEQ ID NO: 46316 - DNA, 20 bp, Artificial Sequence
  MKO10046316_A_Rpp25l
  gRNA
cacgtggcgtcggactgtga

SEQ ID NO: 46317 - DNA, 20 bp, Artificial Sequence
  MKO10046317_A_Rpp25l
  gRNA
agtccgacgccacgtgcctg

SEQ ID NO: 46318 - DNA, 20 bp, Artificial Sequence
  MKO10046318_A_Rpp25l
  gRNA
actgcttagtcgggacccct

SEQ ID NO: 46319 - DNA, 20 bp, Artificial Sequence
  MKO10046319_A_Rpp25
  gRNA
ctacggtgtcgacgtccaag

SEQ ID NO: 46320 - DNA, 20 bp, Artificial Sequence
  MKO10046320_A_Rpp25
  gRNA
gagaatctcggcgcacgtga

SEQ ID NO: 46321 - DNA, 20 bp, Artificial Sequence
  MKO10046321_A_Rpp25
  gRNA
cgagattctcaagcgccgcc

SEQ ID NO: 46322 - DNA, 20 bp, Artificial Sequence
  MKO10046322_A_Rpp30
  gRNA
acaatgcctacctgtacgat

SEQ ID NO: 46323 - DNA, 20 bp, Artificial Sequence
  MKO10046323_A_Rpp30
  gRNA
tatagagagcaacttcgtca

SEQ ID NO: 46324 - DNA, 20 bp, Artificial Sequence
  MKO10046324_A_Rpp30
  gRNA
cacaactttacccatcgtac

SEQ ID NO: 46325 - DNA, 20 bp, Artificial Sequence
  MKO10046325_A_Rpp38
  gRNA
ttccgaatagatcccctctt

SEQ ID NO: 46326 - DNA, 20 bp, Artificial Sequence
  MKO10046326_A_Rpp38
  gRNA
tgtccaaaatctcgttgtcc

SEQ ID NO: 46327 - DNA, 20 bp, Artificial Sequence
  MKO10046327_A_Rpp38
  gRNA
tgcccagcttaaacgtgcca

SEQ ID NO: 46328 - DNA, 20 bp, Artificial Sequence
  MKO10046328_A_Rpp40
  gRNA
ggtcgtccatctcggtattc

SEQ ID NO: 46329 - DNA, 20 bp, Artificial Sequence
  MKO10046329_A_Rpp40
  gRNA
tttctgccagaataccgaga

SEQ ID NO: 46330 - DNA, 20 bp, Artificial Sequence
  MKO10046330_A_Rpp40
  gRNA
ggataaatccattaggtcaa

SEQ ID NO: 46331 - DNA, 20 bp, Artificial Sequence
  MKO10046331_A_Rprd1a
  gRNA
gacacttcttgaacttcgac

SEQ ID NO: 46332 - DNA, 20 bp, Artificial Sequence
  MKO10046332_A_Rprd1a
  gRNA
ttgaatgcctccactattac

SEQ ID NO: 46333 - DNA, 20 bp, Artificial Sequence
  MKO10046333_A_Rprd1a
  gRNA
gaggacttatgagcaaataa

SEQ ID NO: 46334 - DNA, 20 bp, Artificial Sequence
  MKO10046334_A_Rprd1b
  gRNA
tcgctgctagagaaaattac

SEQ ID NO: 46335 - DNA, 20 bp, Artificial Sequence
  MKO10046335_A_Rprd1b
  gRNA
caagaacgaagtgtgtacgg

SEQ ID NO: 46336 - DNA, 20 bp, Artificial Sequence
  MKO10046336_A_Rprd1b
  gRNA
atctggaaaatgctgcgtca

SEQ ID NO: 46337 - DNA, 20 bp, Artificial Sequence
  MKO10046337_A_Rprd2
  gRNA
aatgccacaatcatgtcttc

SEQ ID NO: 46338 - DNA, 20 bp, Artificial Sequence
  MKO10046338_A_Rprd2
  gRNA
tagaacgaatctttaaaatc

SEQ ID NO: 46339 - DNA, 20 bp, Artificial Sequence
  MKO10046339_A_Rprd2
  gRNA
gataaaagagattcaaacga

SEQ ID NO: 46340 - DNA, 20 bp, Artificial Sequence
  MKO10046340_A_Rprml
  gRNA
ccggcgctcagtatagtccc

SEQ ID NO: 46341 - DNA, 20 bp, Artificial Sequence
  MKO10046341_A_Rprml
  gRNA
cagcctgtgggtgtcgcgcg

SEQ ID NO: 46342 - DNA, 20 bp, Artificial Sequence
  MKO10046342_A_Rprml
  gRNA
gcaccactgaccgccagcga

SEQ ID NO: 46343 - DNA, 20 bp, Artificial Sequence
  MKO10046343_A_Rprm
  gRNA
gaccgacgatggcttcgccg

SEQ ID NO: 46344 - DNA, 20 bp, Artificial Sequence
  MKO10046344_A_Rprm
  gRNA
gcgctcgtcggggcctccct

SEQ ID NO: 46345 - DNA, 20 bp, Artificial Sequence
  MKO10046345_A_Rprm
  gRNA
gcgcctcgctactgttgacc

SEQ ID NO: 46346 - DNA, 20 bp, Artificial Sequence
  MKO10046346_A_Rps10
  gRNA
gaatcagtacctttgggccg

SEQ ID NO: 46347 - DNA, 20 bp, Artificial Sequence
  MKO10046347_A_Rps10
  gRNA
ttcttgcagagaggcggctt

SEQ ID NO: 46348 - DNA, 20 bp, Artificial Sequence
  MKO10046348_A_Rps10
  gRNA
actcacaaactggaactcag

SEQ ID NO: 46349 - DNA, 20 bp, Artificial Sequence
  MKO10046349_A_Rps11
  gRNA
ccccacagggatgtacagat

SEQ ID NO: 46350 - DNA, 20 bp, Artificial Sequence
  MKO10046350_A_Rps11
  gRNA
cctcggtactacaagaatat

SEQ ID NO: 46351 - DNA, 20 bp, Artificial Sequence
  MKO10046351_A_Rps11
  gRNA
ccgatattcttgtagtaccg

SEQ ID NO: 46352 - DNA, 20 bp, Artificial Sequence
  MKO10046352_A_Rps12
  gRNA
cacgtacttgtctaaggctt

SEQ ID NO: 46353 - DNA, 20 bp, Artificial Sequence
  MKO10046353_A_Rps12
  gRNA
ctgcattccagcatagctgc

SEQ ID NO: 46354 - DNA, 20 bp, Artificial Sequence
  MKO10046354_A_Rps12
  gRNA
ttacctttatcaggttgatt

SEQ ID NO: 46355 - DNA, 20 bp, Artificial Sequence
  MKO10046355_A_Rps13
  gRNA
ctaccgccgtagcgtcccca

SEQ ID NO: 46356 - DNA, 20 bp, Artificial Sequence
  MKO10046356_A_Rps13
  gRNA
tactcaccgtggggacgcta

SEQ ID NO: 46357 - DNA, 20 bp, Artificial Sequence
  MKO10046357_A_Rps13
  gRNA
tcaacactcacctatctggg

SEQ ID NO: 46358 - DNA, 20 bp, Artificial Sequence
  MKO10046358_A_Rps14
  gRNA
cctagaaatggcgccacgca

SEQ ID NO: 46359 - DNA, 20 bp, Artificial Sequence
  MKO10046359_A_Rps14
  gRNA
tactcacttgccagaaagat

SEQ ID NO: 46360 - DNA, 20 bp, Artificial Sequence
  MKO10046360_A_Rps14
  gRNA
ctcagagctcttgctcgctc

SEQ ID NO: 46361 - DNA, 20 bp, Artificial Sequence
  MKO10046361_A_Rps15a
  gRNA
actcacccaaactgacgtga

SEQ ID NO: 46362 - DNA, 20 bp, Artificial Sequence
  MKO10046362_A_Rps15a
  gRNA
ctcaccgtgcttcatcatca

SEQ ID NO: 46363 - DNA, 20 bp, Artificial Sequence
  MKO10046363_A_Rps15a
  gRNA
acgtttaaaaaaagaatccc

SEQ ID NO: 46364 - DNA, 20 bp, Artificial Sequence
  MKO10046364_A_Rps15
  gRNA
actaggacatgtcgagcagt

SEQ ID NO: 46365 - DNA, 20 bp, Artificial Sequence
  MKO10046365_A_Rps15
  gRNA
aactcactttgatctccacc

SEQ ID NO: 46366 - DNA, 20 bp, Artificial Sequence
  MKO10046366_A_Rps15
  gRNA
aacctgcagccagagatgat

SEQ ID NO: 46367 - DNA, 20 bp, Artificial Sequence
  MKO10046367_A_Rps16
  gRNA
gccgcgcacgctgcagtaca

SEQ ID NO: 46368 - DNA, 20 bp, Artificial Sequence
  MKO10046368_A_Rps16
  gRNA
ctgagacttaccataaattt

SEQ ID NO: 46369 - DNA, 20 bp, Artificial Sequence
  MKO10046369_A_Rps16
  gRNA
cccttcacagaaaacagcca

SEQ ID NO: 46370 - DNA, 20 bp, Artificial Sequence
  MKO10046370_A_Rps17
  gRNA
tcgcaccaagaccgtgaaga

SEQ ID NO: 46371 - DNA, 20 bp, Artificial Sequence
  MKO10046371_A_Rps17
  gRNA
cttgttccgaagcttcttgc

SEQ ID NO: 46372 - DNA, 20 bp, Artificial Sequence
  MKO10046372_A_Rps17
  gRNA
atgtcacgcatctgatgaag

SEQ ID NO: 46373 - DNA, 20 bp, Artificial Sequence
  MKO10046373_A_Rps18
  gRNA
ttctgcagccttcgtgtccg

SEQ ID NO: 46374 - DNA, 20 bp, Artificial Sequence
  MKO10046374_A_Rps18
  gRNA
aaaatctaggttctggccaa

SEQ ID NO: 46375 - DNA, 20 bp, Artificial Sequence
  MKO10046375_A_Rps18
  gRNA
cacccacttacccccaaaag

SEQ ID NO: 46376 - DNA, 20 bp, Artificial Sequence
  MKO10046376_A_Rps19bp1
  gRNA
aaggcgcctaagtccgctct

SEQ ID NO: 46377 - DNA, 20 bp, Artificial Sequence
  MKO10046377_A_Rps19bp1
  gRNA
ctccggcgaagcggacccgg

SEQ ID NO: 46378 - DNA, 20 bp, Artificial Sequence
  MKO10046378_A_Rps19bp1
  gRNA
ggtctcgacactgccgtttc

SEQ ID NO: 46379 - DNA, 20 bp, Artificial Sequence
  MKO10046379_A_Rps19
  gRNA
gggccgcaagctgacgcctc

SEQ ID NO: 46380 - DNA, 20 bp, Artificial Sequence
  MKO10046380_A_Rps19
  gRNA
gtccctgaggcgtcagcttg

SEQ ID NO: 46381 - DNA, 20 bp, Artificial Sequence
  MKO10046381_A_Rps19
  gRNA
cacccacagcttccacagca

SEQ ID NO: 46382 - DNA, 20 bp, Artificial Sequence
  MKO10046382_A_Rps20
  gRNA
accggtgcgcatgcctacca

SEQ ID NO: 46383 - DNA, 20 bp, Artificial Sequence
  MKO10046383_A_Rps20
  gRNA
taacaggcatttaaagatac

SEQ ID NO: 46384 - DNA, 20 bp, Artificial Sequence
  MKO10046384_A_Rps20
  gRNA
accttggtaggcatgcgcac

SEQ ID NO: 46385 - DNA, 20 bp, Artificial Sequence
  MKO10046385_A_Rps21
  gRNA
agaactcaccatcctgcgaa

SEQ ID NO: 46386 - DNA, 20 bp, Artificial Sequence
  MKO10046386_A_Rps21
  gRNA
tcacctcggccacgttcatc

SEQ ID NO: 46387 - DNA, 20 bp, Artificial Sequence
  MKO10046387_A_Rps21
  gRNA
ctgcggggccattcgcagga

SEQ ID NO: 46388 - DNA, 20 bp, Artificial Sequence
  MKO10046388_A_Rps23
  gRNA
aagtcacctcaatgaagttc

SEQ ID NO: 46389 - DNA, 20 bp, Artificial Sequence
  MKO10046389_A_Rps23
  gRNA
tcaggaaaatgatgaagttc

SEQ ID NO: 46390 - DNA, 20 bp, Artificial Sequence
  MKO10046390_A_Rps23
  gRNA
cacaattccctttgcatgag

SEQ ID NO: 46391 - DNA, 20 bp, Artificial Sequence
  MKO10046391_A_Rps24
  gRNA
gaatgagcctaaacacagac

SEQ ID NO: 46392 - DNA, 20 bp, Artificial Sequence
  MKO10046392_A_Rps24
  gRNA
actcttgccagtctgtgttt

SEQ ID NO: 46393 - DNA, 20 bp, Artificial Sequence
  MKO10046393_A_Rps24
  gRNA
agaatgacacagtaaccatc

SEQ ID NO: 46394 - DNA, 20 bp, Artificial Sequence
  MKO10046394_A_Rps25
  gRNA
ctccttaggacttatcaagc

SEQ ID NO: 46395 - DNA, 20 bp, Artificial Sequence
  MKO10046395_A_Rps25
  gRNA
gatgagcagaagtggtccaa

SEQ ID NO: 46396 - DNA, 20 bp, Artificial Sequence
  MKO10046396_A_Rps25
  gRNA
ttgccaccagatttatttac

SEQ ID NO: 46397 - DNA, 20 bp, Artificial Sequence
  MKO10046397_A_Rps26
  gRNA
tctgaagcaagcgtcttcga

SEQ ID NO: 46398 - DNA, 20 bp, Artificial Sequence
  MKO10046398_A_Rps26
  gRNA
cttacagcaggtctgaatcg

SEQ ID NO: 46399 - DNA, 20 bp, Artificial Sequence
  MKO10046399_A_Rps26
  gRNA
accaaaaaaagaagaaacaa

SEQ ID NO: 46400 - DNA, 20 bp, Artificial Sequence
  MKO10046400_A_Rps27a
  gRNA
aacttggcaggttgaaccct

SEQ ID NO: 46401 - DNA, 20 bp, Artificial Sequence
  MKO10046401_A_Rps27a
  gRNA
tttacttgccttccttatcc

SEQ ID NO: 46402 - DNA, 20 bp, Artificial Sequence
  MKO10046402_A_Rps27a
  gRNA
acaggagtccacccttcatc

SEQ ID NO: 46403 - DNA, 20 bp, Artificial Sequence
  MKO10046403_A_Rps27l
  gRNA
agccataccttctgtgagcc

SEQ ID NO: 46404 - DNA, 20 bp, Artificial Sequence
  MKO10046404_A_Rps27l
  gRNA
tttcagccatgcacagactg

SEQ ID NO: 46405 - DNA, 20 bp, Artificial Sequence
  MKO10046405_A_Rps27l
  gRNA
agatctgttacacccttcct

SEQ ID NO: 46406 - DNA, 20 bp, Artificial Sequence
  MKO10046406_A_Rps27rt
  gRNA
cgagaacatgcctctcgcaa

SEQ ID NO: 46407 - DNA, 20 bp, Artificial Sequence
  MKO10046407_A_Rps27rt
  gRNA
tcagtgctgcttcctcctga

SEQ ID NO: 46408 - DNA, 20 bp, Artificial Sequence
  MKO10046408_A_Rps27rt
  gRNA
ccttcatccctctccagaag

SEQ ID NO: 46409 - DNA, 20 bp, Artificial Sequence
  MKO10046409_A_Rps27
  gRNA
ttcttccaggatgctccttc

SEQ ID NO: 46410 - DNA, 20 bp, Artificial Sequence
  MKO10046410_A_Rps27
  gRNA
ccttcatccctctccagaag

SEQ ID NO: 46411 - DNA, 20 bp, Artificial Sequence
  MKO10046411_A_Rps27
  gRNA
gcatttcacgtccataaagt

SEQ ID NO: 46412 - DNA, 20 bp, Artificial Sequence
  MKO10046412_A_Rps28
  gRNA
cctgtaggtaaccaaagtgc

SEQ ID NO: 46413 - DNA, 20 bp, Artificial Sequence
  MKO10046413_A_Rps28
  gRNA
cctcaccctagccagcttga

SEQ ID NO: 46414 - DNA, 20 bp, Artificial Sequence
  MKO10046414_A_Rps28
  gRNA
gtaggtgcgagtggaattca

SEQ ID NO: 46415 - DNA, 20 bp, Artificial Sequence
  MKO10046415_A_Rps29
  gRNA
ctcaccaagagcgggaaccc

SEQ ID NO: 46416 - DNA, 20 bp, Artificial Sequence
  MKO10046416_A_Rps29
  gRNA
gaaggacataggcttcatta

SEQ ID NO: 46417 - DNA, 20 bp, Artificial Sequence
  MKO10046417_A_Rps29
  gRNA
tgggtcaccagcagctctac

SEQ ID NO: 46418 - DNA, 20 bp, Artificial Sequence
  MKO10046418_A_Rps2
  gRNA
gatacctaccaaagttgccc

SEQ ID NO: 46419 - DNA, 20 bp, Artificial Sequence
  MKO10046419_A_Rps2
  gRNA
tcataggctttcgtcgctat

SEQ ID NO: 46420 - DNA, 20 bp, Artificial Sequence
  MKO10046420_A_Rps2
  gRNA
caaccttgaacctggtccgc

SEQ ID NO: 46421 - DNA, 20 bp, Artificial Sequence
  MKO10046421_A_Rps3a1
  gRNA
ttcccacttacattcaaact

SEQ ID NO: 46422 - DNA, 20 bp, Artificial Sequence
  MKO10046422_A_Rps3a1
  gRNA
tgcaggattccagacagcat

SEQ ID NO: 46423 - DNA, 20 bp, Artificial Sequence
  MKO10046423_A_Rps3a1
  gRNA
cacctgccacttcttgacca

SEQ ID NO: 46424 - DNA, 20 bp, Artificial Sequence
  MKO10046424_A_Rps3
  gRNA
ttcgaaccgcaagccctcca

SEQ ID NO: 46425 - DNA, 20 bp, Artificial Sequence
  MKO10046425_A_Rps3
  gRNA
gcagttgtccagaagcgctt

SEQ ID NO: 46426 - DNA, 20 bp, Artificial Sequence
  MKO10046426_A_Rps3
  gRNA
ggccaagggctgcgaggttg

SEQ ID NO: 46427 - DNA, 20 bp, Artificial Sequence
  MKO10046427_A_Rps4x
  gRNA
caggctcctcgtccatccac

SEQ ID NO: 46428 - DNA, 20 bp, Artificial Sequence
  MKO10046428_A_Rps4x
  gRNA
tactcacccataaacccagc

SEQ ID NO: 46429 - DNA, 20 bp, Artificial Sequence
  MKO10046429_A_Rps4x
  gRNA
acaccaaccttggcctcctc

SEQ ID NO: 46430 - DNA, 20 bp, Artificial Sequence
  MKO10046430_A_Rps5
  gRNA
acctgattcactcgacgcag

SEQ ID NO: 46431 - DNA, 20 bp, Artificial Sequence
  MKO10046431_A_Rps5
  gRNA
ggccggtacagtgagacgac

SEQ ID NO: 46432 - DNA, 20 bp, Artificial Sequence
  MKO10046432_A_Rps5
  gRNA
gttagtaaggcgctccacga

SEQ ID NO: 46433 - DNA, 20 bp, Artificial Sequence
  MKO10046433_A_Rps6ka1
  gRNA
ggccagtgcgtgaccgtgtt

SEQ ID NO: 46434 - DNA, 20 bp, Artificial Sequence
  MKO10046434_A_Rps6ka1
  gRNA
tgacgtgaaccacccgttcg

SEQ ID NO: 46435 - DNA, 20 bp, Artificial Sequence
  MKO10046435_A_Rps6ka1
  gRNA
ctccatcacacaccacgtca

SEQ ID NO: 46436 - DNA, 20 bp, Artificial Sequence
  MKO10046436_A_Rps6ka2
  gRNA
ctcccagttcgagctactaa

SEQ ID NO: 46437 - DNA, 20 bp, Artificial Sequence
  MKO10046437_A_Rps6ka2
  gRNA
ttgttgtacagtgcgagacc

SEQ ID NO: 46438 - DNA, 20 bp, Artificial Sequence
  MKO10046438_A_Rps6ka2
  gRNA
aaacctttagtagctcgaac

SEQ ID NO: 46439 - DNA, 20 bp, Artificial Sequence
  MKO10046439_A_Rps6ka3
  gRNA
ttatagttcgagaccgtgtt

SEQ ID NO: 46440 - DNA, 20 bp, Artificial Sequence
  MKO10046440_A_Rps6ka3
  gRNA
aaaaatggaacgtgatatct

SEQ ID NO: 46441 - DNA, 20 bp, Artificial Sequence
  MKO10046441_A_Rps6ka3
  gRNA
gcagcacttacctttcagcg

SEQ ID NO: 46442 - DNA, 20 bp, Artificial Sequence
  MKO10046442_A_Rps6ka4
  gRNA
gcatacccgcaccgaacgct

SEQ ID NO: 46443 - DNA, 20 bp, Artificial Sequence
  MKO10046443_A_Rps6ka4
  gRNA
cttcgcgctgctcaaggtgc

SEQ ID NO: 46444 - DNA, 20 bp, Artificial Sequence
  MKO10046444_A_Rps6ka4
  gRNA
ggtgcagcgcgcgaagacac

SEQ ID NO: 46445 - DNA, 20 bp, Artificial Sequence
  MKO10046445_A_Rps6ka5
  gRNA
ctctgcgtgtcctgttaagt

SEQ ID NO: 46446 - DNA, 20 bp, Artificial Sequence
  MKO10046446_A_Rps6ka5
  gRNA
catgtggtgctgacagattt

SEQ ID NO: 46447 - DNA, 20 bp, Artificial Sequence
  MKO10046447_A_Rps6ka5
  gRNA
cacgaagtgcagatctatgt

SEQ ID NO: 46448 - DNA, 20 bp, Artificial Sequence
  MKO10046448_A_Rps6ka6
  gRNA
cagtcacccagcgcgagacc

SEQ ID NO: 46449 - DNA, 20 bp, Artificial Sequence
  MKO10046449_A_Rps6ka6
  gRNA
gatgctaccgttcgcccctg

SEQ ID NO: 46450 - DNA, 20 bp, Artificial Sequence
  MKO10046450_A_Rps6ka6
  gRNA
gtacttacccggcaagaaac

SEQ ID NO: 46451 - DNA, 20 bp, Artificial Sequence
  MKO10046451_A_Rps6kb1
  gRNA
ccgggcccatgaggcgacga

SEQ ID NO: 46452 - DNA, 20 bp, Artificial Sequence
  MKO10046452_A_Rps6kb1
  gRNA
tagcgcctgacttccgacac

SEQ ID NO: 46453 - DNA, 20 bp, Artificial Sequence
  MKO10046453_A_Rps6kb1
  gRNA
gtacttggtaaagggggcta

SEQ ID NO: 46454 - DNA, 20 bp, Artificial Sequence
  MKO10046454_A_Rps6kb2
  gRNA
cgaattaagggctgctggcc

SEQ ID NO: 46455 - DNA, 20 bp, Artificial Sequence
  MKO10046455_A_Rps6kb2
  gRNA
cttggcactgcatacaatct

SEQ ID NO: 46456 - DNA, 20 bp, Artificial Sequence
  MKO10046456_A_Rps6kb2
  gRNA
gcccgatgcgctcaggaccc

SEQ ID NO: 46457 - DNA, 20 bp, Artificial Sequence
  MKO10046457_A_Rps6kc1
  gRNA
actacctcctggacgtcctc

SEQ ID NO: 46458 - DNA, 20 bp, Artificial Sequence
  MKO10046458_A_Rps6kc1
  gRNA
ttaccttcagtaccgcactc

SEQ ID NO: 46459 - DNA, 20 bp, Artificial Sequence
  MKO10046459_A_Rps6kc1
  gRNA
tctagggcggttcgacaaga

SEQ ID NO: 46460 - DNA, 20 bp, Artificial Sequence
  MKO10046460_A_Rps6kl1
  gRNA
ggatgatcgtcagccgctcc

SEQ ID NO: 46461 - DNA, 20 bp, Artificial Sequence
  MKO10046461_A_Rps6kl1
  gRNA
gttgcgatacttcgtgagcg

SEQ ID NO: 46462 - DNA, 20 bp, Artificial Sequence
  MKO10046462_A_Rps6kl1
  gRNA
tctcctcaccgtgttgggac

SEQ ID NO: 46463 - DNA, 20 bp, Artificial Sequence
  MKO10046463_A_Rps6
  gRNA
caacgcagggttatgtggtc

SEQ ID NO: 46464 - DNA, 20 bp, Artificial Sequence
  MKO10046464_A_Rps6
  gRNA
tccattaccttctttgttta

SEQ ID NO: 46465 - DNA, 20 bp, Artificial Sequence
  MKO10046465_A_Rps6
  gRNA
taaggagagaaggatattcc

SEQ ID NO: 46466 - DNA, 20 bp, Artificial Sequence
  MKO10046466_A_Rps7
  gRNA
gcacgtggtcttcattgctc

SEQ ID NO: 46467 - DNA, 20 bp, Artificial Sequence
  MKO10046467_A_Rps7
  gRNA
tcctcccaggaaatcgaagt

SEQ ID NO: 46468 - DNA, 20 bp, Artificial Sequence
  MKO10046468_A_Rps7
  gRNA
ataagcagaagcgccccaga

SEQ ID NO: 46469 - DNA, 20 bp, Artificial Sequence
  MKO10046469_A_Rps8
  gRNA
acggcccgctgccaacacga

SEQ ID NO: 46470 - DNA, 20 bp, Artificial Sequence
  MKO10046470_A_Rps8
  gRNA
acgcaccttcgtgttggcag

SEQ ID NO: 46471 - DNA, 20 bp, Artificial Sequence
  MKO10046471_A_Rps8
  gRNA
ccgcaagaagggggccaagc

SEQ ID NO: 46472 - DNA, 20 bp, Artificial Sequence
  MKO10046472_A_Rps9
  gRNA
caactcacctaatgtgacgt

SEQ ID NO: 46473 - DNA, 20 bp, Artificial Sequence
  MKO10046473_A_Rps9
  gRNA
cctgtccagggtccgcaagc

SEQ ID NO: 46474 - DNA, 20 bp, Artificial Sequence
  MKO10046474_A_Rps9
  gRNA
cctggacggccgccgccata

SEQ ID NO: 46475 - DNA, 20 bp, Artificial Sequence
  MKO10046475_A_Rpsa
  gRNA
acgcacccgtggggaactgc

SEQ ID NO: 46476 - DNA, 20 bp, Artificial Sequence
  MKO10046476_A_Rpsa
  gRNA
ccaagtaccttgttgttgca

SEQ ID NO: 46477 - DNA, 20 bp, Artificial Sequence
  MKO10046477_A_Rpsa
  gRNA
cttacagggagctcactcag

SEQ ID NO: 46478 - DNA, 20 bp, Artificial Sequence
  MKO10046478_A_Rptn
  gRNA
tcttggacatagtcgtacaa

SEQ ID NO: 46479 - DNA, 20 bp, Artificial Sequence
  MKO10046479_A_Rptn
  gRNA
gtacgactatgtccaagaac

SEQ ID NO: 46480 - DNA, 20 bp, Artificial Sequence
  MKO10046480_A_Rptn
  gRNA
caggactatgctgaatatca

SEQ ID NO: 46481 - DNA, 20 bp, Artificial Sequence
  MKO10046481_A_Rptor
  gRNA
ccacgtctgcaggtcgtata

SEQ ID NO: 46482 - DNA, 20 bp, Artificial Sequence
  MKO10046482_A_Rptor
  gRNA
cccgttcctccttggcgttc

SEQ ID NO: 46483 - DNA, 20 bp, Artificial Sequence
  MKO10046483_A_Rptor
  gRNA
gtctacgactgttccaatgc

SEQ ID NO: 46484 - DNA, 20 bp, Artificial Sequence
  MKO10046484_A_Rpusd1
  gRNA
gtgacgatcaactatgccat

SEQ ID NO: 46485 - DNA, 20 bp, Artificial Sequence
  MKO10046485_A_Rpusd1
  gRNA
gacgcataccatgtgcatcg

SEQ ID NO: 46486 - DNA, 20 bp, Artificial Sequence
  MKO10046486_A_Rpusd1
  gRNA
gtgctgctaaagccacttac

SEQ ID NO: 46487 - DNA, 20 bp, Artificial Sequence
  MKO10046487_A_Rpusd2
  gRNA
gcggcctcgtagtaagacag

SEQ ID NO: 46488 - DNA, 20 bp, Artificial Sequence
  MKO10046488_A_Rpusd2
  gRNA
tcgtgccgcctccgaagaaa

SEQ ID NO: 46489 - DNA, 20 bp, Artificial Sequence
  MKO10046489_A_Rpusd2
  gRNA
aggcggtccagccgatgcag

SEQ ID NO: 46490 - DNA, 20 bp, Artificial Sequence
  MKO10046490_A_Rpusd3
  gRNA
agtcgaggaccagcccttcc

SEQ ID NO: 46491 - DNA, 20 bp, Artificial Sequence
  MKO10046491_A_Rpusd3
  gRNA
ctctcaccagtaggtggctg

SEQ ID NO: 46492 - DNA, 20 bp, Artificial Sequence
  MKO10046492_A_Rpusd3
  gRNA
tcccaggtgctcgcacaacc

SEQ ID NO: 46493 - DNA, 20 bp, Artificial Sequence
  MKO10046493_A_Rpusd4
  gRNA
tgaccacgaggtcgttgtcc

SEQ ID NO: 46494 - DNA, 20 bp, Artificial Sequence
  MKO10046494_A_Rpusd4
  gRNA
ttacagcaacgtgcgcatcg

SEQ ID NO: 46495 - DNA, 20 bp, Artificial Sequence
  MKO10046495_A_Rpusd4
  gRNA
caagggaacacgcaccgtga

SEQ ID NO: 46496 - DNA, 20 bp, Artificial Sequence
  MKO10046496_A_Rqcd1
  gRNA
tactattgcagcactgttac

SEQ ID NO: 46497 - DNA, 20 bp, Artificial Sequence
  MKO10046497_A_Rqcd1
  gRNA
ggtgagccgaagatattcaa

SEQ ID NO: 46498 - DNA, 20 bp, Artificial Sequence
  MKO10046498_A_Rqcd1
  gRNA
ctcgtccctttgaatatctt

SEQ ID NO: 46499 - DNA, 20 bp, Artificial Sequence
  MKO10046499_A_Rrad
  gRNA
ctcgacggcggtcgcgctcc

SEQ ID NO: 46500 - DNA, 20 bp, Artificial Sequence
  MKO10046500_A_Rrad
  gRNA
ggtggacgagcgagaccttc

SEQ ID NO: 46501 - DNA, 20 bp, Artificial Sequence
  MKO10046501_A_Rrad
  gRNA
tgacctggtgcgctctcgtg

SEQ ID NO: 46502 - DNA, 20 bp, Artificial Sequence
  MKO10046502_A_Rraga
  gRNA
tgacgtagagagccgcgaac

SEQ ID NO: 46503 - DNA, 20 bp, Artificial Sequence
  MKO10046503_A_Rraga
  gRNA
gaggcgtttgtctcgcccgc

SEQ ID NO: 46504 - DNA, 20 bp, Artificial Sequence
  MKO10046504_A_Rraga
  gRNA
attatattgcgcgcgacact

SEQ ID NO: 46505 - DNA, 20 bp, Artificial Sequence
  MKO10046505_A_Rragb
  gRNA
acattctcatgttcgatttc

SEQ ID NO: 46506 - DNA, 20 bp, Artificial Sequence
  MKO10046506_A_Rragb
  gRNA
accaagacgacgtgtgtctc

SEQ ID NO: 46507 - DNA, 20 bp, Artificial Sequence
  MKO10046507_A_Rragb
  gRNA
gccagagacacacgtcgtct

SEQ ID NO: 46508 - DNA, 20 bp, Artificial Sequence
  MKO10046508_A_Rragc
  gRNA
gatatatgtcattgatgcac

SEQ ID NO: 46509 - DNA, 20 bp, Artificial Sequence
  MKO10046509_A_Rragc
  gRNA
tgacttccaggacgactaca

SEQ ID NO: 46510 - DNA, 20 bp, Artificial Sequence
  MKO10046510_A_Rragc
  gRNA
tttctgtaccaccttactga

SEQ ID NO: 46511 - DNA, 20 bp, Artificial Sequence
  MKO10046511_A_Rragd
  gRNA
tattgcaaccgacagcacgc

SEQ ID NO: 46512 - DNA, 20 bp, Artificial Sequence
  MKO10046512_A_Rragd
  gRNA
tccaagaacagcgtctcgct

SEQ ID NO: 46513 - DNA, 20 bp, Artificial Sequence
  MKO10046513_A_Rragd
  gRNA
cccgagcgagacgctgttct

SEQ ID NO: 46514 - DNA, 20 bp, Artificial Sequence
  MKO10046514_A_Rras2
  gRNA
aagctttccacgaacttgtc

SEQ ID NO: 46515 - DNA, 20 bp, Artificial Sequence
  MKO10046515_A_Rras2
  gRNA
gttctgcttaccttataacc

SEQ ID NO: 46516 - DNA, 20 bp, Artificial Sequence
  MKO10046516_A_Rras2
  gRNA
atcatagtccgtcacaaaat

SEQ ID NO: 46517 - DNA, 20 bp, Artificial Sequence
  MKO10046517_A_Rras
  gRNA
tggtgtttgccattaacgac

SEQ ID NO: 46518 - DNA, 20 bp, Artificial Sequence
  MKO10046518_A_Rras
  gRNA
atcgacattcagacgcagtt

SEQ ID NO: 46519 - DNA, 20 bp, Artificial Sequence
  MKO10046519_A_Rras
  gRNA
tcctcactgtccagccgtgc

SEQ ID NO: 46520 - DNA, 20 bp, Artificial Sequence
  MKO10046520_A_Rrbp1
  gRNA
aagagagggccgtcgcaatc

SEQ ID NO: 46521 - DNA, 20 bp, Artificial Sequence
  MKO10046521_A_Rrbp1
  gRNA
agagaatctcaataagccgc

SEQ ID NO: 46522 - DNA, 20 bp, Artificial Sequence
  MKO10046522_A_Rrbp1
  gRNA
gccacagcggatacacgcac

SEQ ID NO: 46523 - DNA, 20 bp, Artificial Sequence
  MKO10046523_A_Rreb1
  gRNA
atgacgtcgaattcgcccat

SEQ ID NO: 46524 - DNA, 20 bp, Artificial Sequence
  MKO10046524_A_Rreb1
  gRNA
gctgaccatgcacatccgtc

SEQ ID NO: 46525 - DNA, 20 bp, Artificial Sequence
  MKO10046525_A_Rreb1
  gRNA
gcaccagcatgtgacgatcc

SEQ ID NO: 46526 - DNA, 20 bp, Artificial Sequence
  MKO10046526_A_Rrh
  gRNA
atcattattccgccagttta

SEQ ID NO: 46527 - DNA, 20 bp, Artificial Sequence
  MKO10046527_A_Rrh
  gRNA
actgttactaccacgtcagt

SEQ ID NO: 46528 - DNA, 20 bp, Artificial Sequence
  MKO10046528_A_Rrh
  gRNA
agttatgccccggatcctac

SEQ ID NO: 46529 - DNA, 20 bp, Artificial Sequence
  MKO10046529_A_Rrm1
  gRNA
gtgcttcgtggtcaaggtcg

SEQ ID NO: 46530 - DNA, 20 bp, Artificial Sequence
  MKO10046530_A_Rrm1
  gRNA
aactacataaatccgcacaa

SEQ ID NO: 46531 - DNA, 20 bp, Artificial Sequence
  MKO10046531_A_Rrm1
  gRNA
tgtcaaacataactcgctct

SEQ ID NO: 46532 - DNA, 20 bp, Artificial Sequence
  MKO10046532_A_Rrm2b
  gRNA
ccatagaagcagcgagcctc

SEQ ID NO: 46533 - DNA, 20 bp, Artificial Sequence
  MKO10046533_A_Rrm2b
  gRNA
ccagaggctcgctgcttcta

SEQ ID NO: 46534 - DNA, 20 bp, Artificial Sequence
  MKO10046534_A_Rrm2b
  gRNA
attctaggttgacttgtcaa

SEQ ID NO: 46535 - DNA, 20 bp, Artificial Sequence
  MKO10046535_A_Rrm2
  gRNA
tctcagcagcacccgcgtcc

SEQ ID NO: 46536 - DNA, 20 bp, Artificial Sequence
  MKO10046536_A_Rrm2
  gRNA
gattctcctcgcagctttgc

SEQ ID NO: 46537 - DNA, 20 bp, Artificial Sequence
  MKO10046537_A_Rrm2
  gRNA
acttcaggtggacctttcca

SEQ ID NO: 46538 - DNA, 20 bp, Artificial Sequence
  MKO10046538_A_Rrn3
  gRNA
gctctctaacgcgagcatat

SEQ ID NO: 46539 - DNA, 20 bp, Artificial Sequence
  MKO10046539_A_Rrn3
  gRNA
ctagtagccagttaatgatc

SEQ ID NO: 46540 - DNA, 20 bp, Artificial Sequence
  MKO10046540_A_Rrn3
  gRNA
ctcctccgaaaaaaactgtt

SEQ ID NO: 46541 - DNA, 20 bp, Artificial Sequence
  MKO10046541_A_Rrnad1
  gRNA
aaagccaggtgtccgggtaa

SEQ ID NO: 46542 - DNA, 20 bp, Artificial Sequence
  MKO10046542_A_Rrnad1
  gRNA
ggcttgacatgtttccgaaa

SEQ ID NO: 46543 - DNA, 20 bp, Artificial Sequence
  MKO10046543_A_Rrnad1
  gRNA
aagaagcttagcgatctcac

SEQ ID NO: 46544 - DNA, 20 bp, Artificial Sequence
  MKO10046544_A_Rrp12
  gRNA
gccactcagaaacgtgcccg

SEQ ID NO: 46545 - DNA, 20 bp, Artificial Sequence
  MKO10046545_A_Rrp12
  gRNA
tacagaggtgattcgatccc

SEQ ID NO: 46546 - DNA, 20 bp, Artificial Sequence
  MKO10046546_A_Rrp12
  gRNA
tcttggtccatggtcgtctc

SEQ ID NO: 46547 - DNA, 20 bp, Artificial Sequence
  MKO10046547_A_Rrp15
  gRNA
gacgccgcagagtcgagtgc

SEQ ID NO: 46548 - DNA, 20 bp, Artificial Sequence
  MKO10046548_A_Rrp15
  gRNA
accttcagaggattgcgaca

SEQ ID NO: 46549 - DNA, 20 bp, Artificial Sequence
  MKO10046549_A_Rrp15
  gRNA
acatcagcttggctcgcttg

SEQ ID NO: 46550 - DNA, 20 bp, Artificial Sequence
  MKO10046550_A_Rrp1b
  gRNA
cctccaagctgtttacaacg

SEQ ID NO: 46551 - DNA, 20 bp, Artificial Sequence
  MKO10046551_A_Rrp1b
  gRNA
caacctttagctgatccgcc

SEQ ID NO: 46552 - DNA, 20 bp, Artificial Sequence
  MKO10046552_A_Rrp1b
  gRNA
cccttgccactctcgattca

SEQ ID NO: 46553 - DNA, 20 bp, Artificial Sequence
  MKO10046553_A_Rrp1
  gRNA
tcaccatgtagaacttatcc

SEQ ID NO: 46554 - DNA, 20 bp, Artificial Sequence
  MKO10046554_A_Rrp1
  gRNA
cctccgtcgtgtgaaaagca

SEQ ID NO: 46555 - DNA, 20 bp, Artificial Sequence
  MKO10046555_A_Rrp1
  gRNA
gggcattgacagactgcgcc

SEQ ID NO: 46556 - DNA, 20 bp, Artificial Sequence
  MKO10046556_A_Rrp36
  gRNA
tgtgtgtcgccgataagcac

SEQ ID NO: 46557 - DNA, 20 bp, Artificial Sequence
  MKO10046557_A_Rrp36
  gRNA
cagttgaagaagcaccgctc

SEQ ID NO: 46558 - DNA, 20 bp, Artificial Sequence
  MKO10046558_A_Rrp36
  gRNA
cctgacgtaagaatggcacc

SEQ ID NO: 46559 - DNA, 20 bp, Artificial Sequence
  MKO10046559_A_Rrp7a
  gRNA
gcagcctaccggcaccggct

SEQ ID NO: 46560 - DNA, 20 bp, Artificial Sequence
  MKO10046560_A_Rrp7a
  gRNA
aacaggagaggcaccgagac

SEQ ID NO: 46561 - DNA, 20 bp, Artificial Sequence
  MKO10046561_A_Rrp7a
  gRNA
agacagcaccgagttcgcca

SEQ ID NO: 46562 - DNA, 20 bp, Artificial Sequence
  MKO10046562_A_Rrp8
  gRNA
aattgtagcagtactcgtcc

SEQ ID NO: 46563 - DNA, 20 bp, Artificial Sequence
  MKO10046563_A_Rrp8
  gRNA
gttgtgtcatgcgtgctcgc

SEQ ID NO: 46564 - DNA, 20 bp, Artificial Sequence
  MKO10046564_A_Rrp8
  gRNA
acgcaagcgccgccatctct

SEQ ID NO: 46565 - DNA, 20 bp, Artificial Sequence
  MKO10046565_A_Rrp9
  gRNA
tcaggtggccgggcgcttga

SEQ ID NO: 46566 - DNA, 20 bp, Artificial Sequence
  MKO10046566_A_Rrp9
  gRNA
tgaagcccgtgcattcgagg

SEQ ID NO: 46567 - DNA, 20 bp, Artificial Sequence
  MKO10046567_A_Rrp9
  gRNA
cctctcgctctcagaatcgc

SEQ ID NO: 46568 - DNA, 20 bp, Artificial Sequence
  MKO10046568_A_Rrs1
  gRNA
caaggtttccaccgcttcgg

SEQ ID NO: 46569 - DNA, 20 bp, Artificial Sequence
  MKO10046569_A_Rrs1
  gRNA
ctggaagcgtcccaccgaag

SEQ ID NO: 46570 - DNA, 20 bp, Artificial Sequence
  MKO10046570_A_Rrs1
  gRNA
gctgcgtgttgtcccgcgcc

SEQ ID NO: 46571 - DNA, 20 bp, Artificial Sequence
  MKO10046571_A_Rs1
  gRNA
cgtctatgtcacagcgtcct

SEQ ID NO: 46572 - DNA, 20 bp, Artificial Sequence
  MKO10046572_A_Rs1
  gRNA
acgctgtgacatagacgagt

SEQ ID NO: 46573 - DNA, 20 bp, Artificial Sequence
  MKO10046573_A_Rs1
  gRNA
attgggattgtcatcgacag

SEQ ID NO: 46574 - DNA, 20 bp, Artificial Sequence
  MKO10046574_A_Rsad1
  gRNA
cagagtccgtaaagcgtcgc

SEQ ID NO: 46575 - DNA, 20 bp, Artificial Sequence
  MKO10046575_A_Rsad1
  gRNA
tgacttccgaatcggcaggc

SEQ ID NO: 46576 - DNA, 20 bp, Artificial Sequence
  MKO10046576_A_Rsad1
  gRNA
ctgcagcgtttctcgcaata

SEQ ID NO: 46577 - DNA, 20 bp, Artificial Sequence
  MKO10046577_A_Rsad2
  gRNA
tgtcattaatcgcttcaacg

SEQ ID NO: 46578 - DNA, 20 bp, Artificial Sequence
  MKO10046578_A_Rsad2
  gRNA
ctgcgacagcttcgatgagc

SEQ ID NO: 46579 - DNA, 20 bp, Artificial Sequence
  MKO10046579_A_Rsad2
  gRNA
tcacaaagaggtgtcctgtt

SEQ ID NO: 46580 - DNA, 20 bp, Artificial Sequence
  MKO10046580_A_Rsbn1l
  gRNA
atgactgccgcgcctccgtt

SEQ ID NO: 46581 - DNA, 20 bp, Artificial Sequence
  MKO10046581_A_Rsbn1l
  gRNA
accaagctgatctgtcgcat

SEQ ID NO: 46582 - DNA, 20 bp, Artificial Sequence
  MKO10046582_A_Rsbn1l
  gRNA
cccgatgcgacagatcagct

SEQ ID NO: 46583 - DNA, 20 bp, Artificial Sequence
  MKO10046583_A_Rsbn1
  gRNA
cctaccgagcaggtcctatg

SEQ ID NO: 46584 - DNA, 20 bp, Artificial Sequence
  MKO10046584_A_Rsbn1
  gRNA
acaagacttatctgccgcat

SEQ ID NO: 46585 - DNA, 20 bp, Artificial Sequence
  MKO10046585_A_Rsbn1
  gRNA
gcgatgacgggcctataatg

SEQ ID NO: 46586 - DNA, 20 bp, Artificial Sequence
  MKO10046586_A_Rsc1a1
  gRNA
accgggcttgatggcgcaga

SEQ ID NO: 46587 - DNA, 20 bp, Artificial Sequence
  MKO10046587_A_Rsc1a1
  gRNA
ctcggggctctgcatcgagt

SEQ ID NO: 46588 - DNA, 20 bp, Artificial Sequence
  MKO10046588_A_Rsc1a1
  gRNA
tccgtctgcgccatcaagcc

SEQ ID NO: 46589 - DNA, 20 bp, Artificial Sequence
  MKO10046589_A_Rsf1
  gRNA
actatgcgtctccagccaat

SEQ ID NO: 46590 - DNA, 20 bp, Artificial Sequence
  MKO10046590_A_Rsf1
  gRNA
gtttagaaatcgaaacgagt

SEQ ID NO: 46591 - DNA, 20 bp, Artificial Sequence
  MKO10046591_A_Rsf1
  gRNA
ccatctttgtctcgcccaat

SEQ ID NO: 46592 - DNA, 20 bp, Artificial Sequence
  MKO10046592_A_Rsg1
  gRNA
ataactatcttgacgagccc

SEQ ID NO: 46593 - DNA, 20 bp, Artificial Sequence
  MKO10046593_A_Rsg1
  gRNA
gtcttcgaaggaggcacgat

SEQ ID NO: 46594 - DNA, 20 bp, Artificial Sequence
  MKO10046594_A_Rsg1
  gRNA
cacactcttcacccggaaca

SEQ ID NO: 46595 - DNA, 20 bp, Artificial Sequence
  MKO10046595_A_Rsl1d1
  gRNA
gagattaaccgatgtatcac

SEQ ID NO: 46596 - DNA, 20 bp, Artificial Sequence
  MKO10046596_A_Rsl1d1
  gRNA
ttactgatgcgagaattcga

SEQ ID NO: 46597 - DNA, 20 bp, Artificial Sequence
  MKO10046597_A_Rsl1d1
  gRNA
ttgacccgaagttctttctc

SEQ ID NO: 46598 - DNA, 20 bp, Artificial Sequence
  MKO10046598_A_Rsl1
  gRNA
tcctacatacctgggtacac

SEQ ID NO: 46599 - DNA, 20 bp, Artificial Sequence
  MKO10046599_A_Rsl1
  gRNA
gacacattgttcatgcttga

SEQ ID NO: 46600 - DNA, 20 bp, Artificial Sequence
  MKO10046600_A_Rsl1
  gRNA
gtcagtttgctgcaattgtt

SEQ ID NO: 46601 - DNA, 20 bp, Artificial Sequence
  MKO10046601_A_Rsl24d1
  gRNA
gctcaccagcgagaggagcc

SEQ ID NO: 46602 - DNA, 20 bp, Artificial Sequence
  MKO10046602_A_Rsl24d1
  gRNA
atacctgttcattataaatt

SEQ ID NO: 46603 - DNA, 20 bp, Artificial Sequence
  MKO10046603_A_Rsl24d1
  gRNA
gctccttgccagctgctttc

SEQ ID NO: 46604 - DNA, 20 bp, Artificial Sequence
  MKO10046604_A_Rslcan18
  gRNA
cgatgaacctacactcgaga

SEQ ID NO: 46605 - DNA, 20 bp, Artificial Sequence
  MKO10046605_A_Rslcan18
  gRNA
gctcaccaactgatgctgat

SEQ ID NO: 46606 - DNA, 20 bp, Artificial Sequence
  MKO10046606_A_Rslcan18
  gRNA
accttgcccttctcgagtgt

SEQ ID NO: 46607 - DNA, 20 bp, Artificial Sequence
  MKO10046607_A_Rsph1
  gRNA
cagtaagtatgtcggtacct

SEQ ID NO: 46608 - DNA, 20 bp, Artificial Sequence
  MKO10046608_A_Rsph1
  gRNA
tactgccggtctctgcgtag

SEQ ID NO: 46609 - DNA, 20 bp, Artificial Sequence
  MKO10046609_A_Rsph1
  gRNA
tgacatagtagtacacgcct

SEQ ID NO: 46610 - DNA, 20 bp, Artificial Sequence
  MKO10046610_A_Rsph3a
  gRNA
tgtgcttaccacctgtcctg

SEQ ID NO: 46611 - DNA, 20 bp, Artificial Sequence
  MKO10046611_A_Rsph3a
  gRNA
gttgaagaacctatgagtta

SEQ ID NO: 46612 - DNA, 20 bp, Artificial Sequence
  MKO10046612_A_Rsph3a
  gRNA
cacatgctttctgccctcca

SEQ ID NO: 46613 - DNA, 20 bp, Artificial Sequence
  MKO10046613_A_Rsph3b
  gRNA
gttgaagaacctatgagtta

SEQ ID NO: 46614 - DNA, 20 bp, Artificial Sequence
  MKO10046614_A_Rsph3b
  gRNA
tgtgcttaccacctgtcctg

SEQ ID NO: 46615 - DNA, 20 bp, Artificial Sequence
  MKO10046615_A_Rsph3b
  gRNA
agagcttcagcgacagcagc

SEQ ID NO: 46616 - DNA, 20 bp, Artificial Sequence
  MKO10046616_A_Rsph4a
  gRNA
caaattgcccgcatttcagc

SEQ ID NO: 46617 - DNA, 20 bp, Artificial Sequence
  MKO10046617_A_Rsph4a
  gRNA
ctgcacgtgatgaacccaat

SEQ ID NO: 46618 - DNA, 20 bp, Artificial Sequence
  MKO10046618_A_Rsph4a
  gRNA
attgccagggtcgctgtaat

SEQ ID NO: 46619 - DNA, 20 bp, Artificial Sequence
  MKO10046619_A_Rsph6a
  gRNA
atccgcaggggcgctgtaca

SEQ ID NO: 46620 - DNA, 20 bp, Artificial Sequence
  MKO10046620_A_Rsph6a
  gRNA
gatgcagcccacctacgaga

SEQ ID NO: 46621 - DNA, 20 bp, Artificial Sequence
  MKO10046621_A_Rsph6a
  gRNA
tgaaccgaccacctccgcag

SEQ ID NO: 46622 - DNA, 20 bp, Artificial Sequence
  MKO10046622_A_Rsph9
  gRNA
gtcggacttggagccctcgc

SEQ ID NO: 46623 - DNA, 20 bp, Artificial Sequence
  MKO10046623_A_Rsph9
  gRNA
gtgcgttgcccctttccatc

SEQ ID NO: 46624 - DNA, 20 bp, Artificial Sequence
  MKO10046624_A_Rsph9
  gRNA
gctcctcgcaccaagaacta

SEQ ID NO: 46625 - DNA, 20 bp, Artificial Sequence
  MKO10046625_A_Rspo1
  gRNA
cccgcaagtgtaccgtgcgc

SEQ ID NO: 46626 - DNA, 20 bp, Artificial Sequence
  MKO10046626_A_Rspo1
  gRNA
gaggaacgacatccgccagg

SEQ ID NO: 46627 - DNA, 20 bp, Artificial Sequence
  MKO10046627_A_Rspo1
  gRNA
tcctgcgcacggtacacttg

SEQ ID NO: 46628 - DNA, 20 bp, Artificial Sequence
  MKO10046628_A_Rspo2
  gRNA
agcagaaacaaccgcacgtg

SEQ ID NO: 46629 - DNA, 20 bp, Artificial Sequence
  MKO10046629_A_Rspo2
  gRNA
tttaacaatctgccgtgttc

SEQ ID NO: 46630 - DNA, 20 bp, Artificial Sequence
  MKO10046630_A_Rspo2
  gRNA
tgcaccgttagatgagacta

SEQ ID NO: 46631 - DNA, 20 bp, Artificial Sequence
  MKO10046631_A_Rspo3
  gRNA
tatacaagttcttgtctcgc

SEQ ID NO: 46632 - DNA, 20 bp, Artificial Sequence
  MKO10046632_A_Rspo3
  gRNA
gcaacgtgttcagattacaa

SEQ ID NO: 46633 - DNA, 20 bp, Artificial Sequence
  MKO10046633_A_Rspo3
  gRNA
tgtctctcttcgtgtccaag

SEQ ID NO: 46634 - DNA, 20 bp, Artificial Sequence
  MKO10046634_A_Rspo4
  gRNA
gaaggatcggcgccagcgta

SEQ ID NO: 46635 - DNA, 20 bp, Artificial Sequence
  MKO10046635_A_Rspo4
  gRNA
cctagaaacccgggtccggg

SEQ ID NO: 46636 - DNA, 20 bp, Artificial Sequence
  MKO10046636_A_Rspo4
  gRNA
ttcctcttcatccgccgtga

SEQ ID NO: 46637 - DNA, 20 bp, Artificial Sequence
  MKO10046637_A_Rspry1
  gRNA
taggaatacatccgcagtct

SEQ ID NO: 46638 - DNA, 20 bp, Artificial Sequence
  MKO10046638_A_Rspry1
  gRNA
ctaagtaaacctatgcttgc

SEQ ID NO: 46639 - DNA, 20 bp, Artificial Sequence
  MKO10046639_A_Rspry1
  gRNA
taacttactttagtgggcaa

SEQ ID NO: 46640 - DNA, 20 bp, Artificial Sequence
  MKO10046640_A_Rsrc1
  gRNA
gtcacagaagaacccgtagc

SEQ ID NO: 46641 - DNA, 20 bp, Artificial Sequence
  MKO10046641_A_Rsrc1
  gRNA
aaagaagtcgcagtcgttcc

SEQ ID NO: 46642 - DNA, 20 bp, Artificial Sequence
  MKO10046642_A_Rsrc1
  gRNA
tttattgtaggtccaggtca

SEQ ID NO: 46643 - DNA, 20 bp, Artificial Sequence
  MKO10046643_A_Rsrc2
  gRNA
aaaggaagaagtctcgatcg

SEQ ID NO: 46644 - DNA, 20 bp, Artificial Sequence
  MKO10046644_A_Rsrc2
  gRNA
cccgatccagatccagacac

SEQ ID NO: 46645 - DNA, 20 bp, Artificial Sequence
  MKO10046645_A_Rsrc2
  gRNA
gctattgatacagaacgaga

SEQ ID NO: 46646 - DNA, 20 bp, Artificial Sequence
  MKO10046646_A_Rsu1
  gRNA
aggttgaacacgctgcctcg

SEQ ID NO: 46647 - DNA, 20 bp, Artificial Sequence
  MKO10046647_A_Rsu1
  gRNA
cgcttagatagagtgcacgc

SEQ ID NO: 46648 - DNA, 20 bp, Artificial Sequence
  MKO10046648_A_Rsu1
  gRNA
gggagggagccgaatcctcg

SEQ ID NO: 46649 - DNA, 20 bp, Artificial Sequence
  MKO10046649_A_Rtbdn
  gRNA
cgcgccgccgccctcgtgcc

SEQ ID NO: 46650 - DNA, 20 bp, Artificial Sequence
  MKO10046650_A_Rtbdn
  gRNA
aacctggagctgctacccgc

SEQ ID NO: 46651 - DNA, 20 bp, Artificial Sequence
  MKO10046651_A_Rtbdn
  gRNA
gggcgtgccccgaagagctg

SEQ ID NO: 46652 - DNA, 20 bp, Artificial Sequence
  MKO10046652_A_Rtca
  gRNA
ccgtcggagctccgtctgaa

SEQ ID NO: 46653 - DNA, 20 bp, Artificial Sequence
  MKO10046653_A_Rtca
  gRNA
gcggatcttctgcacgcgca

SEQ ID NO: 46654 - DNA, 20 bp, Artificial Sequence
  MKO10046654_A_Rtca
  gRNA
ccgacggggaagccgcaaac

SEQ ID NO: 46655 - DNA, 20 bp, Artificial Sequence
  MKO10046655_A_Rtcb
  gRNA
ttctcttgcagcggtctatc

SEQ ID NO: 46656 - DNA, 20 bp, Artificial Sequence
  MKO10046656_A_Rtcb
  gRNA
gtacttaccaccacctcgac

SEQ ID NO: 46657 - DNA, 20 bp, Artificial Sequence
  MKO10046657_A_Rtcb
  gRNA
gagcgatgtacagcctgtga

SEQ ID NO: 46658 - DNA, 20 bp, Artificial Sequence
  MKO10046658_A_Rtdr1
  gRNA
catgatgtatagaacctccg

SEQ ID NO: 46659 - DNA, 20 bp, Artificial Sequence
  MKO10046659_A_Rtdr1
  gRNA
atcatggccacccattacgt

SEQ ID NO: 46660 - DNA, 20 bp, Artificial Sequence
  MKO10046660_A_Rtdr1
  gRNA
ccaagccgtgccctgtttaa

SEQ ID NO: 46661 - DNA, 20 bp, Artificial Sequence
  MKO10046661_A_Rtel1
  gRNA
agcttcggaataccgcctac

SEQ ID NO: 46662 - DNA, 20 bp, Artificial Sequence
  MKO10046662_A_Rtel1
  gRNA
gtcacctattgagtctccgc

SEQ ID NO: 46663 - DNA, 20 bp, Artificial Sequence
  MKO10046663_A_Rtel1
  gRNA
aggcggtattccgaagctca

SEQ ID NO: 46664 - DNA, 20 bp, Artificial Sequence
  MKO10046664_A_Rtf1
  gRNA
cactgcgcttccgtttcgcc

SEQ ID NO: 46665 - DNA, 20 bp, Artificial Sequence
  MKO10046665_A_Rtf1
  gRNA
acggaagcgcagtgactccg

SEQ ID NO: 46666 - DNA, 20 bp, Artificial Sequence
  MKO10046666_A_Rtf1
  gRNA
tctccgtcatctgctccagt

SEQ ID NO: 46667 - DNA, 20 bp, Artificial Sequence
  MKO10046667_A_Rtfdc1
  gRNA
ggcagatgaaccgcgctctc

SEQ ID NO: 46668 - DNA, 20 bp, Artificial Sequence
  MKO10046668_A_Rtfdc1
  gRNA
ggttgacaaagacgctgaac

SEQ ID NO: 46669 - DNA, 20 bp, Artificial Sequence
  MKO10046669_A_Rtfdc1
  gRNA
tagactgtataacaaagacg

SEQ ID NO: 46670 - DNA, 20 bp, Artificial Sequence
  MKO10046670_A_Rtkn2
  gRNA
tgctcggatccaggcgtaca

SEQ ID NO: 46671 - DNA, 20 bp, Artificial Sequence
  MKO10046671_A_Rtkn2
  gRNA
ttagagatccgcatgcgaga

SEQ ID NO: 46672 - DNA, 20 bp, Artificial Sequence
  MKO10046672_A_Rtkn2
  gRNA
atatccgaataccattaatg

SEQ ID NO: 46673 - DNA, 20 bp, Artificial Sequence
  MKO10046673_A_Rtkn
  gRNA
acctccggatcccactcatg

SEQ ID NO: 46674 - DNA, 20 bp, Artificial Sequence
  MKO10046674_A_Rtkn
  gRNA
tgagctgcagcggcgaaagg

SEQ ID NO: 46675 - DNA, 20 bp, Artificial Sequence
  MKO10046675_A_Rtkn
  gRNA
tagatcatgagatccggatg

SEQ ID NO: 46676 - DNA, 20 bp, Artificial Sequence
  MKO10046676_A_Rtl1
  gRNA
cgacgtgtttaacccgaggg

SEQ ID NO: 46677 - DNA, 20 bp, Artificial Sequence
  MKO10046677_A_Rtl1
  gRNA
cacactgacggtaacgttgc

SEQ ID NO: 46678 - DNA, 20 bp, Artificial Sequence
  MKO10046678_A_Rtl1
  gRNA
ccgcttcctggtcgccaaac

SEQ ID NO: 46679 - DNA, 20 bp, Artificial Sequence
  MKO10046679_A_Rtn1
  gRNA
cgacgctcacaacgctgaac

SEQ ID NO: 46680 - DNA, 20 bp, Artificial Sequence
  MKO10046680_A_Rtn1
  gRNA
attgaagagcgcgccaacgt

SEQ ID NO: 46681 - DNA, 20 bp, Artificial Sequence
  MKO10046681_A_Rtn1
  gRNA
tggtgcttaacgtacacaac

SEQ ID NO: 46682 - DNA, 20 bp, Artificial Sequence
  MKO10046682_A_Rtn2
  gRNA
gaagaccgctcccgacgtcc

SEQ ID NO: 46683 - DNA, 20 bp, Artificial Sequence
  MKO10046683_A_Rtn2
  gRNA
gcactttagcatcgtgtccg

SEQ ID NO: 46684 - DNA, 20 bp, Artificial Sequence
  MKO10046684_A_Rtn2
  gRNA
ccacgtgggaggcgatctgc

SEQ ID NO: 46685 - DNA, 20 bp, Artificial Sequence
  MKO10046685_A_Rtn3
  gRNA
gcgcgcctcacccgcacacg

SEQ ID NO: 46686 - DNA, 20 bp, Artificial Sequence
  MKO10046686_A_Rtn3
  gRNA
gccgagccgtcagctctcgg

SEQ ID NO: 46687 - DNA, 20 bp, Artificial Sequence
  MKO10046687_A_Rtn3
  gRNA
tcaccttaccgagaatcaga

SEQ ID NO: 46688 - DNA, 20 bp, Artificial Sequence
  MKO10046688_A_Rtn4ip1
  gRNA
ttgagtatgagtaagcgatt

SEQ ID NO: 46689 - DNA, 20 bp, Artificial Sequence
  MKO10046689_A_Rtn4ip1
  gRNA
acctgacgcacccaagatta

SEQ ID NO: 46690 - DNA, 20 bp, Artificial Sequence
  MKO10046690_A_Rtn4ip1
  gRNA
aaccttgtttatggcagacc

SEQ ID NO: 46691 - DNA, 20 bp, Artificial Sequence
  MKO10046691_A_Rtn4rl1
  gRNA
caaccgacagctgcgaacgc

SEQ ID NO: 46692 - DNA, 20 bp, Artificial Sequence
  MKO10046692_A_Rtn4rl1
  gRNA
gaaagagcttaccgaactgc

SEQ ID NO: 46693 - DNA, 20 bp, Artificial Sequence
  MKO10046693_A_Rtn4rl1
  gRNA
gcggccaacatgcttcgcaa

SEQ ID NO: 46694 - DNA, 20 bp, Artificial Sequence
  MKO10046694_A_Rtn4rl2
  gRNA
cgcccaccgaggacgactac

SEQ ID NO: 46695 - DNA, 20 bp, Artificial Sequence
  MKO10046695_A_Rtn4rl2
  gRNA
gctacggcggcgaggatcag

SEQ ID NO: 46696 - DNA, 20 bp, Artificial Sequence
  MKO10046696_A_Rtn4rl2
  gRNA
tgctgagctggcaacgatac

SEQ ID NO: 46697 - DNA, 20 bp, Artificial Sequence
  MKO10046697_A_Rtn4r
  gRNA
ggctgcgggtgcgattcttc

SEQ ID NO: 46698 - DNA, 20 bp, Artificial Sequence
  MKO10046698_A_Rtn4r
  gRNA
ccctaccacgttccacggcc

SEQ ID NO: 46699 - DNA, 20 bp, Artificial Sequence
  MKO10046699_A_Rtn4r
  gRNA
aagatgaagagggcgtcctc

SEQ ID NO: 46700 - DNA, 20 bp, Artificial Sequence
  MKO10046700_A_Rtn4
  gRNA
tgatgccgttcatatataac

SEQ ID NO: 46701 - DNA, 20 bp, Artificial Sequence
  MKO10046701_A_Rtn4
  gRNA
tacgttggtgccttgttcaa

SEQ ID NO: 46702 - DNA, 20 bp, Artificial Sequence
  MKO10046702_A_Rtn4
  gRNA
gttcagcattgtcagtgtaa

SEQ ID NO: 46703 - DNA, 20 bp, Artificial Sequence
  MKO10046703_A_Rtp1
  gRNA
tcgccggttgtcctgccggc

SEQ ID NO: 46704 - DNA, 20 bp, Artificial Sequence
  MKO10046704_A_Rtp1
  gRNA
caggacaaccggcgacaccg

SEQ ID NO: 46705 - DNA, 20 bp, Artificial Sequence
  MKO10046705_A_Rtp1
  gRNA
cttacacatgtcttcgtcag

SEQ ID NO: 46706 - DNA, 20 bp, Artificial Sequence
  MKO10046706_A_Rtp2
  gRNA
gcgcgagcagtgttacgatg

SEQ ID NO: 46707 - DNA, 20 bp, Artificial Sequence
  MKO10046707_A_Rtp2
  gRNA
caatccgctgtctggccggc

SEQ ID NO: 46708 - DNA, 20 bp, Artificial Sequence
  MKO10046708_A_Rtp2
  gRNA
caccctcaagcccaatgagc

SEQ ID NO: 46709 - DNA, 20 bp, Artificial Sequence
  MKO10046709_A_Rtp3
  gRNA
tgctgctctgctgccgtcga

SEQ ID NO: 46710 - DNA, 20 bp, Artificial Sequence
  MKO10046710_A_Rtp3
  gRNA
gaagtgggtgggacgtataa

SEQ ID NO: 46711 - DNA, 20 bp, Artificial Sequence
  MKO10046711_A_Rtp3
  gRNA
ccatcctggcttcaaaacgt

SEQ ID NO: 46712 - DNA, 20 bp, Artificial Sequence
  MKO10046712_A_Rtp4
  gRNA
ccacgacacacgcaattgtg

SEQ ID NO: 46713 - DNA, 20 bp, Artificial Sequence
  MKO10046713_A_Rtp4
  gRNA
cctcacaattgcgtgtgtcg

SEQ ID NO: 46714 - DNA, 20 bp, Artificial Sequence
  MKO10046714_A_Rtp4
  gRNA
tccccgatgacttcagtact

SEQ ID NO: 46715 - DNA, 20 bp, Artificial Sequence
  MKO10046715_A_Rttn
  gRNA
tcaatcaagtgttggacggc

SEQ ID NO: 46716 - DNA, 20 bp, Artificial Sequence
  MKO10046716_A_Rttn
  gRNA
aattgaaccattcgagcaaa

SEQ ID NO: 46717 - DNA, 20 bp, Artificial Sequence
  MKO10046717_A_Rttn
  gRNA
atctaagctccgtccaaatg

SEQ ID NO: 46718 - DNA, 20 bp, Artificial Sequence
  MKO10046718_A_Rufy1
  gRNA
tggcacgctcctccatcatc

SEQ ID NO: 46719 - DNA, 20 bp, Artificial Sequence
  MKO10046719_A_Rufy1
  gRNA
gctggtgggactcaacgttc

SEQ ID NO: 46720 - DNA, 20 bp, Artificial Sequence
  MKO10046720_A_Rufy1
  gRNA
cagtgagttctatgagcccg

SEQ ID NO: 46721 - DNA, 20 bp, Artificial Sequence
  MKO10046721_A_Rufy2
  gRNA
gcgagtgtccgggacttgcc

SEQ ID NO: 46722 - DNA, 20 bp, Artificial Sequence
  MKO10046722_A_Rufy2
  gRNA
tgagtaccatgcactgatga

SEQ ID NO: 46723 - DNA, 20 bp, Artificial Sequence
  MKO10046723_A_Rufy2
  gRNA
tacaaaggaccccacagccg

SEQ ID NO: 46724 - DNA, 20 bp, Artificial Sequence
  MKO10046724_A_Rufy3
  gRNA
cgatgacattcagacccacc

SEQ ID NO: 46725 - DNA, 20 bp, Artificial Sequence
  MKO10046725_A_Rufy3
  gRNA
ccgagacgtacttgagtcct

SEQ ID NO: 46726 - DNA, 20 bp, Artificial Sequence
  MKO10046726_A_Rufy3
  gRNA
gaagaaggagctattatcgc

SEQ ID NO: 46727 - DNA, 20 bp, Artificial Sequence
  MKO10046727_A_Rufy4
  gRNA
gcgcacaacagagggctccg

SEQ ID NO: 46728 - DNA, 20 bp, Artificial Sequence
  MKO10046728_A_Rufy4
  gRNA
ggcaaggcagagtcggataa

SEQ ID NO: 46729 - DNA, 20 bp, Artificial Sequence
  MKO10046729_A_Rufy4
  gRNA
atccgactctgccttgcccg

SEQ ID NO: 46730 - DNA, 20 bp, Artificial Sequence
  MKO10046730_A_Rundc1
  gRNA
ccgtgcatatgtggaatccc

SEQ ID NO: 46731 - DNA, 20 bp, Artificial Sequence
  MKO10046731_A_Rundc1
  gRNA
acatgaccacgtcatcactt

SEQ ID NO: 46732 - DNA, 20 bp, Artificial Sequence
  MKO10046732_A_Rundc1
  gRNA
tcaacgtgtggacgcagcag

SEQ ID NO: 46733 - DNA, 20 bp, Artificial Sequence
  MKO10046733_A_Rundc3a
  gRNA
atcttcccgcaacgtgatcg

SEQ ID NO: 46734 - DNA, 20 bp, Artificial Sequence
  MKO10046734_A_Rundc3a
  gRNA
tgcgctccacgatcacgttg

SEQ ID NO: 46735 - DNA, 20 bp, Artificial Sequence
  MKO10046735_A_Rundc3a
  gRNA
atggcctacctttaaatcgg

SEQ ID NO: 46736 - DNA, 20 bp, Artificial Sequence
  MKO10046736_A_Rundc3b
  gRNA
atgaaagcccacgtagcttc

SEQ ID NO: 46737 - DNA, 20 bp, Artificial Sequence
  MKO10046737_A_Rundc3b
  gRNA
catgagtgctactctgatcc

SEQ ID NO: 46738 - DNA, 20 bp, Artificial Sequence
  MKO10046738_A_Rundc3b
  gRNA
caaagcaagaccgatcaatc

SEQ ID NO: 46739 - DNA, 20 bp, Artificial Sequence
  MKO10046739_A_Runx1t1
  gRNA
tgtcgttggcgtaaatgagc

SEQ ID NO: 46740 - DNA, 20 bp, Artificial Sequence
  MKO10046740_A_Runx1t1
  gRNA
cttctcgacgtgaacgaaaa

SEQ ID NO: 46741 - DNA, 20 bp, Artificial Sequence
  MKO10046741_A_Runx1t1
  gRNA
aagagttcgcacccttgtac

SEQ ID NO: 46742 - DNA, 20 bp, Artificial Sequence
  MKO10046742_A_Runx1
  gRNA
ccgggtgaaatgggtgtcgc

SEQ ID NO: 46743 - DNA, 20 bp, Artificial Sequence
  MKO10046743_A_Runx1
  gRNA
tagcgagattcaacgacctc

SEQ ID NO: 46744 - DNA, 20 bp, Artificial Sequence
  MKO10046744_A_Runx1
  gRNA
tttgtcgggcggagcggtag

SEQ ID NO: 46745 - DNA, 20 bp, Artificial Sequence
  MKO10046745_A_Runx2
  gRNA
tgtcgtgcggcggcctcaat

SEQ ID NO: 46746 - DNA, 20 bp, Artificial Sequence
  MKO10046746_A_Runx2
  gRNA
gccgcacgacaaccgcacca

SEQ ID NO: 46747 - DNA, 20 bp, Artificial Sequence
  MKO10046747_A_Runx2
  gRNA
gagacctacctcgtccgctc

SEQ ID NO: 46748 - DNA, 20 bp, Artificial Sequence
  MKO10046748_A_Runx3
  gRNA
gttcaacgaccttcgattcg

SEQ ID NO: 46749 - DNA, 20 bp, Artificial Sequence
  MKO10046749_A_Runx3
  gRNA
ggacgtgctggccgaccacg

SEQ ID NO: 46750 - DNA, 20 bp, Artificial Sequence
  MKO10046750_A_Runx3
  gRNA
ccggcccgaagtgcgctcga

SEQ ID NO: 46751 - DNA, 20 bp, Artificial Sequence
  MKO10046751_A_Rusc1
  gRNA
ctgaagcgctgacagctatc

SEQ ID NO: 46752 - DNA, 20 bp, Artificial Sequence
  MKO10046752_A_Rusc1
  gRNA
gtacagccaggtcagccgac

SEQ ID NO: 46753 - DNA, 20 bp, Artificial Sequence
  MKO10046753_A_Rusc1
  gRNA
aggttcctgcacacattcga

SEQ ID NO: 46754 - DNA, 20 bp, Artificial Sequence
  MKO10046754_A_Rusc2
  gRNA
cttccggtggccttcgatct

SEQ ID NO: 46755 - DNA, 20 bp, Artificial Sequence
  MKO10046755_A_Rusc2
  gRNA
atcccggctcgtgccaaaat

SEQ ID NO: 46756 - DNA, 20 bp, Artificial Sequence
  MKO10046756_A_Rusc2
  gRNA
acccgtccttcgctacagca

SEQ ID NO: 46757 - DNA, 20 bp, Artificial Sequence
  MKO10046757_A_Ruvbl1
  gRNA
tctttcagggttgcggataa

SEQ ID NO: 46758 - DNA, 20 bp, Artificial Sequence
  MKO10046758_A_Ruvbl1
  gRNA
atgaacaccttgccagttcc

SEQ ID NO: 46759 - DNA, 20 bp, Artificial Sequence
  MKO10046759_A_Ruvbl1
  gRNA
cacactcaccaatggccctg

SEQ ID NO: 46760 - DNA, 20 bp, Artificial Sequence
  MKO10046760_A_Ruvbl2
  gRNA
gtgacaagaatcgagcgaat

SEQ ID NO: 46761 - DNA, 20 bp, Artificial Sequence
  MKO10046761_A_Ruvbl2
  gRNA
gggcgggccgtcctcattgc

SEQ ID NO: 46762 - DNA, 20 bp, Artificial Sequence
  MKO10046762_A_Ruvbl2
  gRNA
caagccttccgccgttccat

SEQ ID NO: 46763 - DNA, 20 bp, Artificial Sequence
  MKO10046763_A_Rwdd1
  gRNA
ccacaggccgaggagaatct

SEQ ID NO: 46764 - DNA, 20 bp, Artificial Sequence
  MKO10046764_A_Rwdd1
  gRNA
agcctccgatgtcacagtaa

SEQ ID NO: 46765 - DNA, 20 bp, Artificial Sequence
  MKO10046765_A_Rwdd1
  gRNA
actttatgaaatattctccc

SEQ ID NO: 46766 - DNA, 20 bp, Artificial Sequence
  MKO10046766_A_Rwdd2a
  gRNA
cgtgatgacaaattcgatgt

SEQ ID NO: 46767 - DNA, 20 bp, Artificial Sequence
  MKO10046767_A_Rwdd2a
  gRNA
cttgactggcttcgcctgta

SEQ ID NO: 46768 - DNA, 20 bp, Artificial Sequence
  MKO10046768_A_Rwdd2a
  gRNA
gcgcctcttccattcgtttg

SEQ ID NO: 46769 - DNA, 20 bp, Artificial Sequence
  MKO10046769_A_Rwdd2b
  gRNA
ctcgtgaaagcgagatcctc

SEQ ID NO: 46770 - DNA, 20 bp, Artificial Sequence
  MKO10046770_A_Rwdd2b
  gRNA
ctttacgatcaatgtgagcc

SEQ ID NO: 46771 - DNA, 20 bp, Artificial Sequence
  MKO10046771_A_Rwdd2b
  gRNA
gctcatagtgaatgaccagc

SEQ ID NO: 46772 - DNA, 20 bp, Artificial Sequence
  MKO10046772_A_Rwdd3
  gRNA
tcttctgcgggcccaacgag

SEQ ID NO: 46773 - DNA, 20 bp, Artificial Sequence
  MKO10046773_A_Rwdd3
  gRNA
agaaccagctcgtgaaccat

SEQ ID NO: 46774 - DNA, 20 bp, Artificial Sequence
  MKO10046774_A_Rwdd3
  gRNA
tcgtcccccgtcgcactttc

SEQ ID NO: 46775 - DNA, 20 bp, Artificial Sequence
  MKO10046775_A_Rwdd4a
  gRNA
cacgttgttcgagtacgcta

SEQ ID NO: 46776 - DNA, 20 bp, Artificial Sequence
  MKO10046776_A_Rwdd4a
  gRNA
agcgtactcgaacaacgtgt

SEQ ID NO: 46777 - DNA, 20 bp, Artificial Sequence
  MKO10046777_A_Rwdd4a
  gRNA
agtttcaaccgagatgatat

SEQ ID NO: 46778 - DNA, 20 bp, Artificial Sequence
  MKO10046778_A_Rxfp1
  gRNA
tgatgggacagctcgtaaat

SEQ ID NO: 46779 - DNA, 20 bp, Artificial Sequence
  MKO10046779_A_Rxfp1
  gRNA
agtcactctcggaagtgcac

SEQ ID NO: 46780 - DNA, 20 bp, Artificial Sequence
  MKO10046780_A_Rxfp1
  gRNA
tacttcctgaagccgttggg

SEQ ID NO: 46781 - DNA, 20 bp, Artificial Sequence
  MKO10046781_A_Rxfp2
  gRNA
ttgcgggaatggtgccgacg

SEQ ID NO: 46782 - DNA, 20 bp, Artificial Sequence
  MKO10046782_A_Rxfp2
  gRNA
tcacagtaatgttacgttgc

SEQ ID NO: 46783 - DNA, 20 bp, Artificial Sequence
  MKO10046783_A_Rxfp2
  gRNA
ctcaccacagttgtcctcgt

SEQ ID NO: 46784 - DNA, 20 bp, Artificial Sequence
  MKO10046784_A_Rxfp3
  gRNA
atctccgaccgtcgcgtagt

SEQ ID NO: 46785 - DNA, 20 bp, Artificial Sequence
  MKO10046785_A_Rxfp3
  gRNA
cgcggcgcactaagcagtag

SEQ ID NO: 46786 - DNA, 20 bp, Artificial Sequence
  MKO10046786_A_Rxfp3
  gRNA
gacgacgatggtcaccgact

SEQ ID NO: 46787 - DNA, 20 bp, Artificial Sequence
  MKO10046787_A_Rxfp4
  gRNA
cactgagtatcgcgcgatac

SEQ ID NO: 46788 - DNA, 20 bp, Artificial Sequence
  MKO10046788_A_Rxfp4
  gRNA
agcccgctctgtccgtgtcc

SEQ ID NO: 46789 - DNA, 20 bp, Artificial Sequence
  MKO10046789_A_Rxfp4
  gRNA
cctgctggggctcccgccgc

SEQ ID NO: 46790 - DNA, 20 bp, Artificial Sequence
  MKO10046790_A_Rxra
  gRNA
gccatggagcctcgacccgt

SEQ ID NO: 46791 - DNA, 20 bp, Artificial Sequence
  MKO10046791_A_Rxra
  gRNA
cttcgggactggtagccccc

SEQ ID NO: 46792 - DNA, 20 bp, Artificial Sequence
  MKO10046792_A_Rxra
  gRNA
gtccaccagcagtgccaacg

SEQ ID NO: 46793 - DNA, 20 bp, Artificial Sequence
  MKO10046793_A_Rxrb
  gRNA
agtactgacagcgattccgc

SEQ ID NO: 46794 - DNA, 20 bp, Artificial Sequence
  MKO10046794_A_Rxrb
  gRNA
tttgttatcacgacacgagt

SEQ ID NO: 46795 - DNA, 20 bp, Artificial Sequence
  MKO10046795_A_Rxrb
  gRNA
aactccacagtgtcgctccc

SEQ ID NO: 46796 - DNA, 20 bp, Artificial Sequence
  MKO10046796_A_Rxrg
  gRNA
ctccacgttcatgtcaccgt

SEQ ID NO: 46797 - DNA, 20 bp, Artificial Sequence
  MKO10046797_A_Rxrg
  gRNA
acaatctttgttatcccgac

SEQ ID NO: 46798 - DNA, 20 bp, Artificial Sequence
  MKO10046798_A_Rxrg
  gRNA
tagccacgaagacatgcccg

SEQ ID NO: 46799 - DNA, 20 bp, Artificial Sequence
  MKO10046799_A_Rybp
  gRNA
aatgcagcatctgcgatgtg

SEQ ID NO: 46800 - DNA, 20 bp, Artificial Sequence
  MKO10046800_A_Rybp
  gRNA
tttcactgtaccttgaggtg

SEQ ID NO: 46801 - DNA, 20 bp, Artificial Sequence
  MKO10046801_A_Rybp
  gRNA
acctcgcatcaattctcagc

SEQ ID NO: 46802 - DNA, 20 bp, Artificial Sequence
  MKO10046802_A_Ryk
  gRNA
cgggtcgagctttcttgtac

SEQ ID NO: 46803 - DNA, 20 bp, Artificial Sequence
  MKO10046803_A_Ryk
  gRNA
gacttcagagtcgactttgc

SEQ ID NO: 46804 - DNA, 20 bp, Artificial Sequence
  MKO10046804_A_Ryk
  gRNA
gaggtcccacgcactttatc

SEQ ID NO: 46805 - DNA, 20 bp, Artificial Sequence
  MKO10046805_A_Ryr1
  gRNA
ccggcacgcacacagtcgta

SEQ ID NO: 46806 - DNA, 20 bp, Artificial Sequence
  MKO10046806_A_Ryr1
  gRNA
tcagaatgtaccccctgatc

SEQ ID NO: 46807 - DNA, 20 bp, Artificial Sequence
  MKO10046807_A_Ryr1
  gRNA
cacaccggcctccacagtat

SEQ ID NO: 46808 - DNA, 20 bp, Artificial Sequence
  MKO10046808_A_Ryr2
  gRNA
cctgcagggcccgtactgac

SEQ ID NO: 46809 - DNA, 20 bp, Artificial Sequence
  MKO10046809_A_Ryr2
  gRNA
cctgtcagtacgggccctgc

SEQ ID NO: 46810 - DNA, 20 bp, Artificial Sequence
  MKO10046810_A_Ryr2
  gRNA
tccacagaagttcatgatga

SEQ ID NO: 46811 - DNA, 20 bp, Artificial Sequence
  MKO10046811_A_Ryr3
  gRNA
gaattgcatgcccgtagagc

SEQ ID NO: 46812 - DNA, 20 bp, Artificial Sequence
  MKO10046812_A_Ryr3
  gRNA
ctgtgtctgcaatttcgtgc

SEQ ID NO: 46813 - DNA, 20 bp, Artificial Sequence
  MKO10046813_A_Ryr3
  gRNA
cgttcccacaggcggcacaa

SEQ ID NO: 46814 - DNA, 20 bp, Artificial Sequence
  MKO10046814_A_S100a10
  gRNA
ccatgatgcttacgtttcac

SEQ ID NO: 46815 - DNA, 20 bp, Artificial Sequence
  MKO10046815_A_S100a10
  gRNA
ccactttgccatctcggcac

SEQ ID NO: 46816 - DNA, 20 bp, Artificial Sequence
  MKO10046816_A_S100a10
  gRNA
gcacttacttccaaaaaccc

SEQ ID NO: 46817 - DNA, 20 bp, Artificial Sequence
  MKO10046817_A_S100a11
  gRNA
ctatagctaagccaccaatg

SEQ ID NO: 46818 - DNA, 20 bp, Artificial Sequence
  MKO10046818_A_S100a11
  gRNA
ttgcagaaccagaaggatcc

SEQ ID NO: 46819 - DNA, 20 bp, Artificial Sequence
  MKO10046819_A_S100a11
  gRNA
agccagctctgtgttcatga

SEQ ID NO: 46820 - DNA, 20 bp, Artificial Sequence
  MKO10046820_A_S100a13
  gRNA
tgggatgcagctaaccgatc

SEQ ID NO: 46821 - DNA, 20 bp, Artificial Sequence
  MKO10046821_A_S100a13
  gRNA
ggcggtcccctcagcggagg

SEQ ID NO: 46822 - DNA, 20 bp, Artificial Sequence
  MKO10046822_A_S100a13
  gRNA
gcgtccttcccgccctgcaa

SEQ ID NO: 46823 - DNA, 20 bp, Artificial Sequence
  MKO10046823_A_S100a14
  gRNA
caactgtaatgactcgaaac

SEQ ID NO: 46824 - DNA, 20 bp, Artificial Sequence
  MKO10046824_A_S100a14
  gRNA
agtcctcagctccgagtaac

SEQ ID NO: 46825 - DNA, 20 bp, Artificial Sequence
  MKO10046825_A_S100a14
  gRNA
ctcagtaccggcatgaggtg

SEQ ID NO: 46826 - DNA, 20 bp, Artificial Sequence
  MKO10046826_A_S100a16
  gRNA
caaagcagatgcgcccgtcg

SEQ ID NO: 46827 - DNA, 20 bp, Artificial Sequence
  MKO10046827_A_S100a16
  gRNA
gcatctgctttgacgaatac

SEQ ID NO: 46828 - DNA, 20 bp, Artificial Sequence
  MKO10046828_A_S100a16
  gRNA
gtggggataccgtcagcatg

SEQ ID NO: 46829 - DNA, 20 bp, Artificial Sequence
  MKO10046829_A_S100a1
  gRNA
tgtccccttccttgcccgaa

SEQ ID NO: 46830 - DNA, 20 bp, Artificial Sequence
  MKO10046830_A_S100a1
  gRNA
cacattgatgagggtctcca

SEQ ID NO: 46831 - DNA, 20 bp, Artificial Sequence
  MKO10046831_A_S100a1
  gRNA
agatggggaagtggacttca

SEQ ID NO: 46832 - DNA, 20 bp, Artificial Sequence
  MKO10046832_A_S100a2
  gRNA
ggaaatgaacaacctcgata

SEQ ID NO: 46833 - DNA, 20 bp, Artificial Sequence
  MKO10046833_A_S100a2
  gRNA
acatccggaagtccacctgc

SEQ ID NO: 46834 - DNA, 20 bp, Artificial Sequence
  MKO10046834_A_S100a2
  gRNA
ccacaagtacgccagtcaag

SEQ ID NO: 46835 - DNA, 20 bp, Artificial Sequence
  MKO10046835_A_S100a3
  gRNA
ggtgctcaccggcgtccagg

SEQ ID NO: 46836 - DNA, 20 bp, Artificial Sequence
  MKO10046836_A_S100a3
  gRNA
taccaacaaagactgcgaag

SEQ ID NO: 46837 - DNA, 20 bp, Artificial Sequence
  MKO10046837_A_S100a3
  gRNA
gtccacttcgcagtctttgt

SEQ ID NO: 46838 - DNA, 20 bp, Artificial Sequence
  MKO10046838_A_S100a4
  gRNA
ggttaccatggcaagaccct

SEQ ID NO: 46839 - DNA, 20 bp, Artificial Sequence
  MKO10046839_A_S100a4
  gRNA
aggtggacacaattacatcc

SEQ ID NO: 46840 - DNA, 20 bp, Artificial Sequence
  MKO10046840_A_S100a4
  gRNA
ccaagttgctcatcaccttc

SEQ ID NO: 46841 - DNA, 20 bp, Artificial Sequence
  MKO10046841_A_S100a5
  gRNA
attgtaggccatgcacagcg

SEQ ID NO: 46842 - DNA, 20 bp, Artificial Sequence
  MKO10046842_A_S100a5
  gRNA
gttcctgaccacgctgtgca

SEQ ID NO: 46843 - DNA, 20 bp, Artificial Sequence
  MKO10046843_A_S100a5
  gRNA
gtggtcagtgccttctcaag

SEQ ID NO: 46844 - DNA, 20 bp, Artificial Sequence
  MKO10046844_A_S100a6
  gRNA
ggatgatctggaccgtaaca

SEQ ID NO: 46845 - DNA, 20 bp, Artificial Sequence
  MKO10046845_A_S100a6
  gRNA
atcagtcatggcatgccctc

SEQ ID NO: 46846 - DNA, 20 bp, Artificial Sequence
  MKO10046846_A_S100a6
  gRNA
ccaggaaggcgacatactcc

SEQ ID NO: 46847 - DNA, 20 bp, Artificial Sequence
  MKO10046847_A_S100a7a
  gRNA
tgatgagttcctgtacatct

SEQ ID NO: 46848 - DNA, 20 bp, Artificial Sequence
  MKO10046848_A_S100a7a
  gRNA
aacagctctgtgatgtagta

SEQ ID NO: 46849 - DNA, 20 bp, Artificial Sequence
  MKO10046849_A_S100a7a
  gRNA
gcctcgcttcatggacacct

SEQ ID NO: 46850 - DNA, 20 bp, Artificial Sequence
  MKO10046850_A_S100a8
  gRNA
cgtgacaatgccgtctgaac

SEQ ID NO: 46851 - DNA, 20 bp, Artificial Sequence
  MKO10046851_A_S100a8
  gRNA
agaagctctgctactccttg

SEQ ID NO: 46852 - DNA, 20 bp, Artificial Sequence
  MKO10046852_A_S100a8
  gRNA
tgacaatgcaattaacttcg

SEQ ID NO: 46853 - DNA, 20 bp, Artificial Sequence
  MKO10046853_A_S100a9
  gRNA
ctgcatgagaacaacccacg

SEQ ID NO: 46854 - DNA, 20 bp, Artificial Sequence
  MKO10046854_A_S100a9
  gRNA
atgctgcgctccatctgaga

SEQ ID NO: 46855 - DNA, 20 bp, Artificial Sequence
  MKO10046855_A_S100a9
  gRNA
ctcatgcagcttctcatgac

SEQ ID NO: 46856 - DNA, 20 bp, Artificial Sequence
  MKO10046856_A_S100b
  gRNA
gttcatggccttcgtcgcca

SEQ ID NO: 46857 - DNA, 20 bp, Artificial Sequence
  MKO10046857_A_S100b
  gRNA
cgtggtcaccatggcgacga

SEQ ID NO: 46858 - DNA, 20 bp, Artificial Sequence
  MKO10046858_A_S100b
  gRNA
agctcccgggatgtccgagc

SEQ ID NO: 46859 - DNA, 20 bp, Artificial Sequence
  MKO10046859_A_S100g
  gRNA
ctggtccggatcgccttcct

SEQ ID NO: 46860 - DNA, 20 bp, Artificial Sequence
  MKO10046860_A_S100g
  gRNA
cgatccggaccagctctcca

SEQ ID NO: 46861 - DNA, 20 bp, Artificial Sequence
  MKO10046861_A_S100g
  gRNA
aaagcaggcttcaagtactc

SEQ ID NO: 46862 - DNA, 20 bp, Artificial Sequence
  MKO10046862_A_S100pbp
  gRNA
ctctcaatagaaactacgcc

SEQ ID NO: 46863 - DNA, 20 bp, Artificial Sequence
  MKO10046863_A_S100pbp
  gRNA
gcatatgaacttgatccatc

SEQ ID NO: 46864 - DNA, 20 bp, Artificial Sequence
  MKO10046864_A_S100pbp
  gRNA
taccgtgtggtaagatctga

SEQ ID NO: 46865 - DNA, 20 bp, Artificial Sequence
  MKO10046865_A_S100z
  gRNA
actcttgcaaggagggcgac

SEQ ID NO: 46866 - DNA, 20 bp, Artificial Sequence
  MKO10046866_A_S100z
  gRNA
cgtcagcatgcccacccagc

SEQ ID NO: 46867 - DNA, 20 bp, Artificial Sequence
  MKO10046867_A_S100z
  gRNA
gcattatcttatccaccaac

SEQ ID NO: 46868 - DNA, 20 bp, Artificial Sequence
  MKO10046868_A_S1pr1
  gRNA
gccctctcggacctattagc

SEQ ID NO: 46869 - DNA, 20 bp, Artificial Sequence
  MKO10046869_A_S1pr1
  gRNA
agatgcgccgggccttcatc

SEQ ID NO: 46870 - DNA, 20 bp, Artificial Sequence
  MKO10046870_A_S1pr1
  gRNA
gtccggcattacaactacac

SEQ ID NO: 46871 - DNA, 20 bp, Artificial Sequence
  MKO10046871_A_S1pr2
  gRNA
accagcaacatccgcgtggc

SEQ ID NO: 46872 - DNA, 20 bp, Artificial Sequence
  MKO10046872_A_S1pr2
  gRNA
catcttgtgctgcgccatcg

SEQ ID NO: 46873 - DNA, 20 bp, Artificial Sequence
  MKO10046873_A_S1pr2
  gRNA
tagccgggaccttcggaggg

SEQ ID NO: 46874 - DNA, 20 bp, Artificial Sequence
  MKO10046874_A_S1pr3
  gRNA
gcgcgcatacaagatgacga

SEQ ID NO: 46875 - DNA, 20 bp, Artificial Sequence
  MKO10046875_A_S1pr3
  gRNA
ggtgtgcggctgtctagtca

SEQ ID NO: 46876 - DNA, 20 bp, Artificial Sequence
  MKO10046876_A_S1pr3
  gRNA
ggcgcgcctcatctctttgc

SEQ ID NO: 46877 - DNA, 20 bp, Artificial Sequence
  MKO10046877_A_S1pr4
  gRNA
gcggcgggaccgcatgtaga

SEQ ID NO: 46878 - DNA, 20 bp, Artificial Sequence
  MKO10046878_A_S1pr4
  gRNA
gtcggtggccgcaggttgcc

SEQ ID NO: 46879 - DNA, 20 bp, Artificial Sequence
  MKO10046879_A_S1pr4
  gRNA
ctgcccgccgcaagtcccgc

SEQ ID NO: 46880 - DNA, 20 bp, Artificial Sequence
  MKO10046880_A_S1pr5
  gRNA
gagcaatagcgacgcgcccc

SEQ ID NO: 46881 - DNA, 20 bp, Artificial Sequence
  MKO10046881_A_S1pr5
  gRNA
gggccaacgcgcgtcgcctg

SEQ ID NO: 46882 - DNA, 20 bp, Artificial Sequence
  MKO10046882_A_S1pr5
  gRNA
ccacgctaagggtacgaagc

SEQ ID NO: 46883 - DNA, 20 bp, Artificial Sequence
  MKO10046883_A_Saa1
  gRNA
ttctcctagtgatggaagag

SEQ ID NO: 46884 - DNA, 20 bp, Artificial Sequence
  MKO10046884_A_Saa1
  gRNA
tctgccgaagaattcctgaa

SEQ ID NO: 46885 - DNA, 20 bp, Artificial Sequence
  MKO10046885_A_Saa1
  gRNA
ggaactatgatgctgctcaa

SEQ ID NO: 46886 - DNA, 20 bp, Artificial Sequence
  MKO10046886_A_Saa2
  gRNA
gaggactctcagtatttggc

SEQ ID NO: 46887 - DNA, 20 bp, Artificial Sequence
  MKO10046887_A_Saa2
  gRNA
attcttcggcagaggacacg

SEQ ID NO: 46888 - DNA, 20 bp, Artificial Sequence
  MKO10046888_A_Saa2
  gRNA
tacactgacatgaaggaagc

SEQ ID NO: 46889 - DNA, 20 bp, Artificial Sequence
  MKO10046889_A_Saa3
  gRNA
cccaaccacttccgacctgc

SEQ ID NO: 46890 - DNA, 20 bp, Artificial Sequence
  MKO10046890_A_Saa3
  gRNA
ggaactatgatgctgcccgg

SEQ ID NO: 46891 - DNA, 20 bp, Artificial Sequence
  MKO10046891_A_Saa3
  gRNA
gttcagaagttcacgggaca

SEQ ID NO: 46892 - DNA, 20 bp, Artificial Sequence
  MKO10046892_A_Saa4
  gRNA
gccctcgggtcggaagtgat

SEQ ID NO: 46893 - DNA, 20 bp, Artificial Sequence
  MKO10046893_A_Saa4
  gRNA
tcccacgagcatagaagtat

SEQ ID NO: 46894 - DNA, 20 bp, Artificial Sequence
  MKO10046894_A_Saa4
  gRNA
ccccaatcacttccgacccg

SEQ ID NO: 46895 - DNA, 20 bp, Artificial Sequence
  MKO10046895_A_Saal1
  gRNA
cgagtccatcagcaagaacg

SEQ ID NO: 46896 - DNA, 20 bp, Artificial Sequence
  MKO10046896_A_Saal1
  gRNA
atgatcctcgttcttgctga

SEQ ID NO: 46897 - DNA, 20 bp, Artificial Sequence
  MKO10046897_A_Saal1
  gRNA
tgacatattcatgggagtgc

SEQ ID NO: 46898 - DNA, 20 bp, Artificial Sequence
  MKO10046898_A_Sac3d1
  gRNA
ccgcggcgacgtgtcgtgcg

SEQ ID NO: 46899 - DNA, 20 bp, Artificial Sequence
  MKO10046899_A_Sac3d1
  gRNA
gatctagccgcactgcgcgc

SEQ ID NO: 46900 - DNA, 20 bp, Artificial Sequence
  MKO10046900_A_Sac3d1
  gRNA
tgcgaagcaggcgaaacagt

SEQ ID NO: 46901 - DNA, 20 bp, Artificial Sequence
  MKO10046901_A_Sacm1l
  gRNA
gctaaaccatgtcttgagta

SEQ ID NO: 46902 - DNA, 20 bp, Artificial Sequence
  MKO10046902_A_Sacm1l
  gRNA
gctgttacaagaccaatatt

SEQ ID NO: 46903 - DNA, 20 bp, Artificial Sequence
  MKO10046903_A_Sacm1l
  gRNA
gatactgggcacaatccatc

SEQ ID NO: 46904 - DNA, 20 bp, Artificial Sequence
  MKO10046904_A_Sacs
  gRNA
gtccgcgtgaccgtgctccg

SEQ ID NO: 46905 - DNA, 20 bp, Artificial Sequence
  MKO10046905_A_Sacs
  gRNA
cggtgccggcgaccgctacc

SEQ ID NO: 46906 - DNA, 20 bp, Artificial Sequence
  MKO10046906_A_Sacs
  gRNA
ttaaggatctgtcctccttc

SEQ ID NO: 46907 - DNA, 20 bp, Artificial Sequence
  MKO10046907_A_Sae1
  gRNA
tgtgggccgcaatagggccg

SEQ ID NO: 46908 - DNA, 20 bp, Artificial Sequence
  MKO10046908_A_Sae1
  gRNA
cgcatcaaacttcgtgaaga

SEQ ID NO: 46909 - DNA, 20 bp, Artificial Sequence
  MKO10046909_A_Sae1
  gRNA
gggtacacctttgcgaatct

SEQ ID NO: 46910 - DNA, 20 bp, Artificial Sequence
  MKO10046910_A_Safb2
  gRNA
tgacggtgtcggccttcccc

SEQ ID NO: 46911 - DNA, 20 bp, Artificial Sequence
  MKO10046911_A_Safb2
  gRNA
tgatgacagtaaagagtacg

SEQ ID NO: 46912 - DNA, 20 bp, Artificial Sequence
  MKO10046912_A_Safb2
  gRNA
gtcagaccttaaagtaactc

SEQ ID NO: 46913 - DNA, 20 bp, Artificial Sequence
  MKO10046913_A_Safb
  gRNA
tgtggaggacaacgggctcg

SEQ ID NO: 46914 - DNA, 20 bp, Artificial Sequence
  MKO10046914_A_Safb
  gRNA
tgacgtatctacattgttaa

SEQ ID NO: 46915 - DNA, 20 bp, Artificial Sequence
  MKO10046915_A_Safb
  gRNA
tcctccacaccctcgtcttc

SEQ ID NO: 46916 - DNA, 20 bp, Artificial Sequence
  MKO10046916_A_Sag
  gRNA
ccccaacaggagggtatacc

SEQ ID NO: 46917 - DNA, 20 bp, Artificial Sequence
  MKO10046917_A_Sag
  gRNA
catagcggaaggcgcaggtc

SEQ ID NO: 46918 - DNA, 20 bp, Artificial Sequence
  MKO10046918_A_Sag
  gRNA
tggctgcaacatcactgaac

SEQ ID NO: 46919 - DNA, 20 bp, Artificial Sequence
  MKO10046919_A_Sall1
  gRNA
agaccattggcgaactcgcc

SEQ ID NO: 46920 - DNA, 20 bp, Artificial Sequence
  MKO10046920_A_Sall1
  gRNA
tattcgccgcgtctttcatt

SEQ ID NO: 46921 - DNA, 20 bp, Artificial Sequence
  MKO10046921_A_Sall1
  gRNA
tttccaatccgaccccgaag

SEQ ID NO: 46922 - DNA, 20 bp, Artificial Sequence
  MKO10046922_A_Sall2
  gRNA
tgcgcgcaaattgccccttg

SEQ ID NO: 46923 - DNA, 20 bp, Artificial Sequence
  MKO10046923_A_Sall2
  gRNA
caatttgcgcgcacatttcg

SEQ ID NO: 46924 - DNA, 20 bp, Artificial Sequence
  MKO10046924_A_Sall2
  gRNA
cccaccgttctcagatgcgc

SEQ ID NO: 46925 - DNA, 20 bp, Artificial Sequence
  MKO10046925_A_Sall3
  gRNA
cggaggtgccatcccgcctt

SEQ ID NO: 46926 - DNA, 20 bp, Artificial Sequence
  MKO10046926_A_Sall3
  gRNA
tgctccgaagccccgtcctg

SEQ ID NO: 46927 - DNA, 20 bp, Artificial Sequence
  MKO10046927_A_Sall3
  gRNA
ggctcggctttagtaagcga

SEQ ID NO: 46928 - DNA, 20 bp, Artificial Sequence
  MKO10046928_A_Sall4
  gRNA
ccataccggtgaagcggccc

SEQ ID NO: 46929 - DNA, 20 bp, Artificial Sequence
  MKO10046929_A_Sall4
  gRNA
gccaaggacgaagtcgtcct

SEQ ID NO: 46930 - DNA, 20 bp, Artificial Sequence
  MKO10046930_A_Sall4
  gRNA
tgcggctgcgatgctagcaa

SEQ ID NO: 46931 - DNA, 20 bp, Artificial Sequence
  MKO10046931_A_Samd10
  gRNA
tgcgggagtcatgccacgtg

SEQ ID NO: 46932 - DNA, 20 bp, Artificial Sequence
  MKO10046932_A_Samd10
  gRNA
agaaggcctcgacgtagacg

SEQ ID NO: 46933 - DNA, 20 bp, Artificial Sequence
  MKO10046933_A_Samd10
  gRNA
gccacttgcaaacgtcttgt

SEQ ID NO: 46934 - DNA, 20 bp, Artificial Sequence
  MKO10046934_A_Samd11
  gRNA
ctaggccttgcttccgtcga

SEQ ID NO: 46935 - DNA, 20 bp, Artificial Sequence
  MKO10046935_A_Samd11
  gRNA
cgtctacagcagaccatcga

SEQ ID NO: 46936 - DNA, 20 bp, Artificial Sequence
  MKO10046936_A_Samd11
  gRNA
ccaaggtgaaagcccgactc

SEQ ID NO: 46937 - DNA, 20 bp, Artificial Sequence
  MKO10046937_A_Samd12
  gRNA
gcagagtgatcaataccccg

SEQ ID NO: 46938 - DNA, 20 bp, Artificial Sequence
  MKO10046938_A_Samd12
  gRNA
tgtcaaaaccagtagccctg

SEQ ID NO: 46939 - DNA, 20 bp, Artificial Sequence
  MKO10046939_A_Samd12
  gRNA
aaactgcaaattgaaggcga

SEQ ID NO: 46940 - DNA, 20 bp, Artificial Sequence
  MKO10046940_A_Samd14
  gRNA
agggtaacgacgcacgaagc

SEQ ID NO: 46941 - DNA, 20 bp, Artificial Sequence
  MKO10046941_A_Samd14
  gRNA
gcacaacgccgcctcgcatg

SEQ ID NO: 46942 - DNA, 20 bp, Artificial Sequence
  MKO10046942_A_Samd14
  gRNA
tccgccgagcatccaccagc

SEQ ID NO: 46943 - DNA, 20 bp, Artificial Sequence
  MKO10046943_A_Samd1
  gRNA
acctgcggggcggtcactct

SEQ ID NO: 46944 - DNA, 20 bp, Artificial Sequence
  MKO10046944_A_Samd1
  gRNA
cccgagagtgaccgccccgc

SEQ ID NO: 46945 - DNA, 20 bp, Artificial Sequence
  MKO10046945_A_Samd1
  gRNA
ctgatgcagtcccgggcgca

SEQ ID NO: 46946 - DNA, 20 bp, Artificial Sequence
  MKO10046946_A_Samd3
  gRNA
gctgtaccatccgatcatta

SEQ ID NO: 46947 - DNA, 20 bp, Artificial Sequence
  MKO10046947_A_Samd3
  gRNA
ttactcacagcgagccttcc

SEQ ID NO: 46948 - DNA, 20 bp, Artificial Sequence
  MKO10046948_A_Samd3
  gRNA
gactaagtcctacatcttac

SEQ ID NO: 46949 - DNA, 20 bp, Artificial Sequence
  MKO10046949_A_Samd4b
  gRNA
gccagagggctagcgcattg

SEQ ID NO: 46950 - DNA, 20 bp, Artificial Sequence
  MKO10046950_A_Samd4b
  gRNA
tgagcagcacctagagtcgc

SEQ ID NO: 46951 - DNA, 20 bp, Artificial Sequence
  MKO10046951_A_Samd4b
  gRNA
cactagctagccgctcttcc

SEQ ID NO: 46952 - DNA, 20 bp, Artificial Sequence
  MKO10046952_A_Samd4
  gRNA
ggacttactcgtgcttgcgc

SEQ ID NO: 46953 - DNA, 20 bp, Artificial Sequence
  MKO10046953_A_Samd4
  gRNA
ggggcagttcacccgagtca

SEQ ID NO: 46954 - DNA, 20 bp, Artificial Sequence
  MKO10046954_A_Samd4
  gRNA
agagcgcagcgtacttgtgc

SEQ ID NO: 46955 - DNA, 20 bp, Artificial Sequence
  MKO10046955_A_Samd5
  gRNA
tgaaccgcagcccgtgccac

SEQ ID NO: 46956 - DNA, 20 bp, Artificial Sequence
  MKO10046956_A_Samd5
  gRNA
atcgtagccattatccacga

SEQ ID NO: 46957 - DNA, 20 bp, Artificial Sequence
  MKO10046957_A_Samd5
  gRNA
tcctagagtacttaatgaat

SEQ ID NO: 46958 - DNA, 20 bp, Artificial Sequence
  MKO10046958_A_Samd7
  gRNA
ttgaaagacatcacgctgcc

SEQ ID NO: 46959 - DNA, 20 bp, Artificial Sequence
  MKO10046959_A_Samd7
  gRNA
gaagttatacacatcgtcca

SEQ ID NO: 46960 - DNA, 20 bp, Artificial Sequence
  MKO10046960_A_Samd7
  gRNA
ctctttccattctacgttgc

SEQ ID NO: 46961 - DNA, 20 bp, Artificial Sequence
  MKO10046961_A_Samd8
  gRNA
gtcaactctgcattcgccgc

SEQ ID NO: 46962 - DNA, 20 bp, Artificial Sequence
  MKO10046962_A_Samd8
  gRNA
tgcaacaagcaccgccttga

SEQ ID NO: 46963 - DNA, 20 bp, Artificial Sequence
  MKO10046963_A_Samd8
  gRNA
tacgacgggcatttgccatc

SEQ ID NO: 46964 - DNA, 20 bp, Artificial Sequence
  MKO10046964_A_Samd9l
  gRNA
tatccgggaaccacggttcg

SEQ ID NO: 46965 - DNA, 20 bp, Artificial Sequence
  MKO10046965_A_Samd9l
  gRNA
acaccaacaatttccccgtg

SEQ ID NO: 46966 - DNA, 20 bp, Artificial Sequence
  MKO10046966_A_Samd9l
  gRNA
cttccacgaaccgtggttcc

SEQ ID NO: 46967 - DNA, 20 bp, Artificial Sequence
  MKO10046967_A_Samhd1
  gRNA
tcgcagcggggtcgcttagc

SEQ ID NO: 46968 - DNA, 20 bp, Artificial Sequence
  MKO10046968_A_Samhd1
  gRNA
ggtacttaacttcgcagccc

SEQ ID NO: 46969 - DNA, 20 bp, Artificial Sequence
  MKO10046969_A_Samhd1
  gRNA
gcttgatatagcgaagtcgc

SEQ ID NO: 46970 - DNA, 20 bp, Artificial Sequence
  MKO10046970_A_Samm50
  gRNA
ctggagcccctcccgtcgag

SEQ ID NO: 46971 - DNA, 20 bp, Artificial Sequence
  MKO10046971_A_Samm50
  gRNA
tgcggcgatctcatgaagcc

SEQ ID NO: 46972 - DNA, 20 bp, Artificial Sequence
  MKO10046972_A_Samm50
  gRNA
cgagtttgtggaagttgagc

SEQ ID NO: 46973 - DNA, 20 bp, Artificial Sequence
  MKO10046973_A_Samsn1
  gRNA
taatcgggacagcttccgac

SEQ ID NO: 46974 - DNA, 20 bp, Artificial Sequence
  MKO10046974_A_Samsn1
  gRNA
atgatgacagcccctactca

SEQ ID NO: 46975 - DNA, 20 bp, Artificial Sequence
  MKO10046975_A_Samsn1
  gRNA
actcaaagccagcgactcta

SEQ ID NO: 46976 - DNA, 20 bp, Artificial Sequence
  MKO10046976_A_Samt1
  gRNA
atcaactcatcgttgatact

SEQ ID NO: 46977 - DNA, 20 bp, Artificial Sequence
  MKO10046977_A_Samt1
  gRNA
ctacagatttatcaatgaga

SEQ ID NO: 46978 - DNA, 20 bp, Artificial Sequence
  MKO10046978_A_Samt1
  gRNA
tatcacttcacgcatctaga

SEQ ID NO: 46979 - DNA, 20 bp, Artificial Sequence
  MKO10046979_A_Samt2
  gRNA
aaagtccgatgtaaacaagc

SEQ ID NO: 46980 - DNA, 20 bp, Artificial Sequence
  MKO10046980_A_Samt2
  gRNA
cattattgtcaaattcccag

SEQ ID NO: 46981 - DNA, 20 bp, Artificial Sequence
  MKO10046981_A_Samt2
  gRNA
gctataccctcaacactaaa

SEQ ID NO: 46982 - DNA, 20 bp, Artificial Sequence
  MKO10046982_A_Samt3
  gRNA
tccttgcaaacagccgatgc

SEQ ID NO: 46983 - DNA, 20 bp, Artificial Sequence
  MKO10046983_A_Samt3
  gRNA
cacgaatgactcgtttgtta

SEQ ID NO: 46984 - DNA, 20 bp, Artificial Sequence
  MKO10046984_A_Samt3
  gRNA
tcctcacctgcgatatacaa

SEQ ID NO: 46985 - DNA, 20 bp, Artificial Sequence
  MKO10046985_A_Samt4
  gRNA
ctttagcagcctatcagctt

SEQ ID NO: 46986 - DNA, 20 bp, Artificial Sequence
  MKO10046986_A_Samt4
  gRNA
tcttcacccttgatacacaa

SEQ ID NO: 46987 - DNA, 20 bp, Artificial Sequence
  MKO10046987_A_Samt4
  gRNA
aagagcatcttcaagttgac

SEQ ID NO: 46988 - DNA, 20 bp, Artificial Sequence
  MKO10046988_A_Sap130
  gRNA
gggagcgttgctgcggatta

SEQ ID NO: 46989 - DNA, 20 bp, Artificial Sequence
  MKO10046989_A_Sap130
  gRNA
ataatccgcagcaacgctcc

SEQ ID NO: 46990 - DNA, 20 bp, Artificial Sequence
  MKO10046990_A_Sap130
  gRNA
gcaggcgcaatgggacggct

SEQ ID NO: 46991 - DNA, 20 bp, Artificial Sequence
  MKO10046991_A_Sap18
  gRNA
cgcaccttctcgcggtcgat

SEQ ID NO: 46992 - DNA, 20 bp, Artificial Sequence
  MKO10046992_A_Sap18
  gRNA
gaagccgatcgaccgcgaga

SEQ ID NO: 46993 - DNA, 20 bp, Artificial Sequence
  MKO10046993_A_Sap18
  gRNA
atcttaaaagacctggatat

SEQ ID NO: 46994 - DNA, 20 bp, Artificial Sequence
  MKO10046994_A_Sap25
  gRNA
agagcagacacccaactgcg

SEQ ID NO: 46995 - DNA, 20 bp, Artificial Sequence
  MKO10046995_A_Sap25
  gRNA
ctgccccagttatcatacat

SEQ ID NO: 46996 - DNA, 20 bp, Artificial Sequence
  MKO10046996_A_Sap25
  gRNA
caggggtatctttgtctaac

SEQ ID NO: 46997 - DNA, 20 bp, Artificial Sequence
  MKO10046997_A_Sap30bp
  gRNA
aagatcccaccagaaccgcc

SEQ ID NO: 46998 - DNA, 20 bp, Artificial Sequence
  MKO10046998_A_Sap30bp
  gRNA
ggacgagaacagtaagcagt

SEQ ID NO: 46999 - DNA, 20 bp, Artificial Sequence
  MKO10046999_A_Sap30bp
  gRNA
ggtactcacccactaattcc

SEQ ID NO: 47000 - DNA, 20 bp, Artificial Sequence
  MKO10047000_A_Sap30l
  gRNA
acacgctccgacgttacaaa

SEQ ID NO: 47001 - DNA, 20 bp, Artificial Sequence
  MKO10047001_A_Sap30l
  gRNA
tatagtgccgtttgtaacgt

SEQ ID NO: 47002 - DNA, 20 bp, Artificial Sequence
  MKO10047002_A_Sap30l
  gRNA
agcgctcgccgtccgcgatg

SEQ ID NO: 47003 - DNA, 20 bp, Artificial Sequence
  MKO10047003_A_Sap30
  gRNA
tgcgttcccattccccgccg

SEQ ID NO: 47004 - DNA, 20 bp, Artificial Sequence
  MKO10047004_A_Sap30
  gRNA
ccacctggagcggccggtcc

SEQ ID NO: 47005 - DNA, 20 bp, Artificial Sequence
  MKO10047005_A_Sap30
  gRNA
ggagtgtcgatgtcctgaac

SEQ ID NO: 47006 - DNA, 20 bp, Artificial Sequence
  MKO10047006_A_Sapcd1
  gRNA
cctcagccggtctgcgaacc

SEQ ID NO: 47007 - DNA, 20 bp, Artificial Sequence
  MKO10047007_A_Sapcd1
  gRNA
cagtgtagggcgcttgcacc

SEQ ID NO: 47008 - DNA, 20 bp, Artificial Sequence
  MKO10047008_A_Sapcd1
  gRNA
tgaccacctctcccgtggac

SEQ ID NO: 47009 - DNA, 20 bp, Artificial Sequence
  MKO10047009_A_Sapcd2
  gRNA
tatgccttcgacgctcgcct

SEQ ID NO: 47010 - DNA, 20 bp, Artificial Sequence
  MKO10047010_A_Sapcd2
  gRNA
gggcccgaggcgagcgtcga

SEQ ID NO: 47011 - DNA, 20 bp, Artificial Sequence
  MKO10047011_A_Sapcd2
  gRNA
tgatggcacggggccgagac

SEQ ID NO: 47012 - DNA, 20 bp, Artificial Sequence
  MKO10047012_A_Sar1a
  gRNA
aaaactatgccattaatcgc

SEQ ID NO: 47013 - DNA, 20 bp, Artificial Sequence
  MKO10047013_A_Sar1a
  gRNA
aattatctcccagcgattaa

SEQ ID NO: 47014 - DNA, 20 bp, Artificial Sequence
  MKO10047014_A_Sar1a
  gRNA
caacgtgccaattcttatct

SEQ ID NO: 47015 - DNA, 20 bp, Artificial Sequence
  MKO10047015_A_Sar1b
  gRNA
cacttactgggatgtagcgt

SEQ ID NO: 47016 - DNA, 20 bp, Artificial Sequence
  MKO10047016_A_Sar1b
  gRNA
aacgtgcctattctaattct

SEQ ID NO: 47017 - DNA, 20 bp, Artificial Sequence
  MKO10047017_A_Sar1b
  gRNA
aactaccttcctgctatcaa

SEQ ID NO: 47018 - DNA, 20 bp, Artificial Sequence
  MKO10047018_A_Sardh
  gRNA
caaagtcgtccgtccgcaca

SEQ ID NO: 47019 - DNA, 20 bp, Artificial Sequence
  MKO10047019_A_Sardh
  gRNA
tctatatccgctgatgaacg

SEQ ID NO: 47020 - DNA, 20 bp, Artificial Sequence
  MKO10047020_A_Sardh
  gRNA
cgtcgtcactgagcgcatcg

SEQ ID NO: 47021 - DNA, 20 bp, Artificial Sequence
  MKO10047021_A_Sarm1
  gRNA
agggaccgcgtggcgcgcat

SEQ ID NO: 47022 - DNA, 20 bp, Artificial Sequence
  MKO10047022_A_Sarm1
  gRNA
ggcgcttgtcgagccgctcg

SEQ ID NO: 47023 - DNA, 20 bp, Artificial Sequence
  MKO10047023_A_Sarm1
  gRNA
caataggcgcagcgcgcgct

SEQ ID NO: 47024 - DNA, 20 bp, Artificial Sequence
  MKO10047024_A_Sarnp
  gRNA
tcttagggcatcggaaaaga

SEQ ID NO: 47025 - DNA, 20 bp, Artificial Sequence
  MKO10047025_A_Sarnp
  gRNA
caggcctatcttgaagacca

SEQ ID NO: 47026 - DNA, 20 bp, Artificial Sequence
  MKO10047026_A_Sarnp
  gRNA
ctcaccatggtcttcaagat

SEQ ID NO: 47027 - DNA, 20 bp, Artificial Sequence
  MKO10047027_A_Sars2
  gRNA
tctcccggcctcgggcccgc

SEQ ID NO: 47028 - DNA, 20 bp, Artificial Sequence
  MKO10047028_A_Sars2
  gRNA
cggcctttaccgtgtctggg

SEQ ID NO: 47029 - DNA, 20 bp, Artificial Sequence
  MKO10047029_A_Sars2
  gRNA
ggcagcttcgagagcagatc

SEQ ID NO: 47030 - DNA, 20 bp, Artificial Sequence
  MKO10047030_A_Sars
  gRNA
tttgagaacctccgcgagat

SEQ ID NO: 47031 - DNA, 20 bp, Artificial Sequence
  MKO10047031_A_Sars
  gRNA
tatccacccgaaacaaatcc

SEQ ID NO: 47032 - DNA, 20 bp, Artificial Sequence
  MKO10047032_A_Sars
  gRNA
agaagcgcttcaaggacccg

SEQ ID NO: 47033 - DNA, 20 bp, Artificial Sequence
  MKO10047033_A_Sart1
  gRNA
cagttcttcccgctgtcgca

SEQ ID NO: 47034 - DNA, 20 bp, Artificial Sequence
  MKO10047034_A_Sart1
  gRNA
ggctgcagtatcatccagcc

SEQ ID NO: 47035 - DNA, 20 bp, Artificial Sequence
  MKO10047035_A_Sart1
  gRNA
agccgatgttatcaacccca

SEQ ID NO: 47036 - DNA, 20 bp, Artificial Sequence
  MKO10047036_A_Sart3
  gRNA
agagctcgtacacgtgctcg

SEQ ID NO: 47037 - DNA, 20 bp, Artificial Sequence
  MKO10047037_A_Sart3
  gRNA
cacccgagcagcctccacga

SEQ ID NO: 47038 - DNA, 20 bp, Artificial Sequence
  MKO10047038_A_Sart3
  gRNA
gtgggatcgccagctgtcgc

SEQ ID NO: 47039 - DNA, 20 bp, Artificial Sequence
  MKO10047039_A_Sash1
  gRNA
ccggaaacggcgcgtttccc

SEQ ID NO: 47040 - DNA, 20 bp, Artificial Sequence
  MKO10047040_A_Sash1
  gRNA
cgccgtgtcaacaccagaag

SEQ ID NO: 47041 - DNA, 20 bp, Artificial Sequence
  MKO10047041_A_Sash1
  gRNA
ggaccgcagctgaagtgacg

SEQ ID NO: 47042 - DNA, 20 bp, Artificial Sequence
  MKO10047042_A_Sash3
  gRNA
atcgaagcccagctcccccg

SEQ ID NO: 47043 - DNA, 20 bp, Artificial Sequence
  MKO10047043_A_Sash3
  gRNA
gttcttaccccggaggattc

SEQ ID NO: 47044 - DNA, 20 bp, Artificial Sequence
  MKO10047044_A_Sash3
  gRNA
cctgcagtttcaatgagtcg

SEQ ID NO: 47045 - DNA, 20 bp, Artificial Sequence
  MKO10047045_A_Sass6
  gRNA
ccctttcgaatccagtacac

SEQ ID NO: 47046 - DNA, 20 bp, Artificial Sequence
  MKO10047046_A_Sass6
  gRNA
aacacgcgaaagagactcca

SEQ ID NO: 47047 - DNA, 20 bp, Artificial Sequence
  MKO10047047_A_Sass6
  gRNA
atacgaaccttcctgtgtac

SEQ ID NO: 47048 - DNA, 20 bp, Artificial Sequence
  MKO10047048_A_Sat1
  gRNA
ctgtcttacagatctccaag

SEQ ID NO: 47049 - DNA, 20 bp, Artificial Sequence
  MKO10047049_A_Sat1
  gRNA
attacaggacatagcattgt

SEQ ID NO: 47050 - DNA, 20 bp, Artificial Sequence
  MKO10047050_A_Sat1
  gRNA
gtcataggtaaaatagtaca

SEQ ID NO: 47051 - DNA, 20 bp, Artificial Sequence
  MKO10047051_A_Sat2
  gRNA
ttccagataaacgtttcgtc

SEQ ID NO: 47052 - DNA, 20 bp, Artificial Sequence
  MKO10047052_A_Sat2
  gRNA
cagccagtaccccgatattg

SEQ ID NO: 47053 - DNA, 20 bp, Artificial Sequence
  MKO10047053_A_Sat2
  gRNA
tccactataggtcaagggat

SEQ ID NO: 47054 - DNA, 20 bp, Artificial Sequence
  MKO10047054_A_Satb1
  gRNA
ggagcacgcggaatttgtat

SEQ ID NO: 47055 - DNA, 20 bp, Artificial Sequence
  MKO10047055_A_Satb1
  gRNA
gcatctgtcacatacgacag

SEQ ID NO: 47056 - DNA, 20 bp, Artificial Sequence
  MKO10047056_A_Satb1
  gRNA
atctggactagggctcatcc

SEQ ID NO: 47057 - DNA, 20 bp, Artificial Sequence
  MKO10047057_A_Satb2
  gRNA
agagcacgctgagttcgtct

SEQ ID NO: 47058 - DNA, 20 bp, Artificial Sequence
  MKO10047058_A_Satb2
  gRNA
caccgtccgcaatgccttaa

SEQ ID NO: 47059 - DNA, 20 bp, Artificial Sequence
  MKO10047059_A_Satb2
  gRNA
gcgtggttccattgctccgc

SEQ ID NO: 47060 - DNA, 20 bp, Artificial Sequence
  MKO10047060_A_Satl1
  gRNA
tggcaaactgcttcacctag

SEQ ID NO: 47061 - DNA, 20 bp, Artificial Sequence
  MKO10047061_A_Satl1
  gRNA
tgaagcagtttgccaatccg

SEQ ID NO: 47062 - DNA, 20 bp, Artificial Sequence
  MKO10047062_A_Satl1
  gRNA
gcaaccaggcagtagaaaag

SEQ ID NO: 47063 - DNA, 20 bp, Artificial Sequence
  MKO10047063_A_Sav1
  gRNA
ggtggaggctgatcataccg

SEQ ID NO: 47064 - DNA, 20 bp, Artificial Sequence
  MKO10047064_A_Sav1
  gRNA
ggaccgtgccgaatgaatga

SEQ ID NO: 47065 - DNA, 20 bp, Artificial Sequence
  MKO10047065_A_Sav1
  gRNA
agtcatccccttgaacgaga

SEQ ID NO: 47066 - DNA, 20 bp, Artificial Sequence
  MKO10047066_A_Saysd1
  gRNA
gtctttggggtcgccgccgc

SEQ ID NO: 47067 - DNA, 20 bp, Artificial Sequence
  MKO10047067_A_Saysd1
  gRNA
cgaggtctgtacgctctgac

SEQ ID NO: 47068 - DNA, 20 bp, Artificial Sequence
  MKO10047068_A_Saysd1
  gRNA
cgcctactctgtgttcaacc

SEQ ID NO: 47069 - DNA, 20 bp, Artificial Sequence
  MKO10047069_A_Sbds
  gRNA
ggatgaagcgcaatcgcatg

SEQ ID NO: 47070 - DNA, 20 bp, Artificial Sequence
  MKO10047070_A_Sbds
  gRNA
caggtgtgcctcatcgaccc

SEQ ID NO: 47071 - DNA, 20 bp, Artificial Sequence
  MKO10047071_A_Sbds
  gRNA
ttcatcctgccagtgaacga

SEQ ID NO: 47072 - DNA, 20 bp, Artificial Sequence
  MKO10047072_A_Sbf1
  gRNA
gtagtccgcgagccgcgcca

SEQ ID NO: 47073 - DNA, 20 bp, Artificial Sequence
  MKO10047073_A_Sbf1
  gRNA
tgagactcaccgcgcgggtg

SEQ ID NO: 47074 - DNA, 20 bp, Artificial Sequence
  MKO10047074_A_Sbf1
  gRNA
ctgtggatgacagccgcgct

SEQ ID NO: 47075 - DNA, 20 bp, Artificial Sequence
  MKO10047075_A_Sbf2
  gRNA
ctaatctggataccaacacc

SEQ ID NO: 47076 - DNA, 20 bp, Artificial Sequence
  MKO10047076_A_Sbf2
  gRNA
agtatttgcccccaaaagcc

SEQ ID NO: 47077 - DNA, 20 bp, Artificial Sequence
  MKO10047077_A_Sbf2
  gRNA
atttgcgatgagactttcca

SEQ ID NO: 47078 - DNA, 20 bp, Artificial Sequence
  MKO10047078_A_Sbk1
  gRNA
tcttcgaggagttcgtgcgc

SEQ ID NO: 47079 - DNA, 20 bp, Artificial Sequence
  MKO10047079_A_Sbk1
  gRNA
cttcggcatgacgcggcgcg

SEQ ID NO: 47080 - DNA, 20 bp, Artificial Sequence
  MKO10047080_A_Sbk1
  gRNA
tgacgtggtcttcgagaccg

SEQ ID NO: 47081 - DNA, 20 bp, Artificial Sequence
  MKO10047081_A_Sbk2
  gRNA
ccggttcggccgtgtcctgc

SEQ ID NO: 47082 - DNA, 20 bp, Artificial Sequence
  MKO10047082_A_Sbk2
  gRNA
agtctgtcagcttgacgcgc

SEQ ID NO: 47083 - DNA, 20 bp, Artificial Sequence
  MKO10047083_A_Sbk2
  gRNA
gtacgaggaagtgcgtcccc

SEQ ID NO: 47084 - DNA, 20 bp, Artificial Sequence
  MKO10047084_A_Sbk3
  gRNA
aacctagctttcggatgaga

SEQ ID NO: 47085 - DNA, 20 bp, Artificial Sequence
  MKO10047085_A_Sbk3
  gRNA
taccgtctcatccgaaagct

SEQ ID NO: 47086 - DNA, 20 bp, Artificial Sequence
  MKO10047086_A_Sbk3
  gRNA
ctgggtttgactcgacctga

SEQ ID NO: 47087 - DNA, 20 bp, Artificial Sequence
  MKO10047087_A_Sbno1
  gRNA
ctcccgcactgttaaatgtg

SEQ ID NO: 47088 - DNA, 20 bp, Artificial Sequence
  MKO10047088_A_Sbno1
  gRNA
tattggcatatactctgcgt

SEQ ID NO: 47089 - DNA, 20 bp, Artificial Sequence
  MKO10047089_A_Sbno1
  gRNA
tgcctattcgttgttgcagg

SEQ ID NO: 47090 - DNA, 20 bp, Artificial Sequence
  MKO10047090_A_Sbno2
  gRNA
tcaacgaggtgcctaccatc

SEQ ID NO: 47091 - DNA, 20 bp, Artificial Sequence
  MKO10047091_A_Sbno2
  gRNA
ctacagctgttcatacctag

SEQ ID NO: 47092 - DNA, 20 bp, Artificial Sequence
  MKO10047092_A_Sbno2
  gRNA
ctaggacccctcatgcctcg

SEQ ID NO: 47093 - DNA, 20 bp, Artificial Sequence
  MKO10047093_A_Sbpl
  gRNA
gcaccgggcctctgcgtcac

SEQ ID NO: 47094 - DNA, 20 bp, Artificial Sequence
  MKO10047094_A_Sbpl
  gRNA
gtactcactctgggctctgc

SEQ ID NO: 47095 - DNA, 20 bp, Artificial Sequence
  MKO10047095_A_Sbpl
  gRNA
agcccatccctgtgacgcag

SEQ ID NO: 47096 - DNA, 20 bp, Artificial Sequence
  MKO10047096_A_Sbp
  gRNA
agccaatccctctgacgcag

SEQ ID NO: 47097 - DNA, 20 bp, Artificial Sequence
  MKO10047097_A_Sbp
  gRNA
tggggaaatatcaatgctaa

SEQ ID NO: 47098 - DNA, 20 bp, Artificial Sequence
  MKO10047098_A_Sbp
  gRNA
ctcactctgggctctgcatg

SEQ ID NO: 47099 - DNA, 20 bp, Artificial Sequence
  MKO10047099_A_Sbsn
  gRNA
ggtcaaccacgccgctggac

SEQ ID NO: 47100 - DNA, 20 bp, Artificial Sequence
  MKO10047100_A_Sbsn
  gRNA
gcaaccactacagtagtatc

SEQ ID NO: 47101 - DNA, 20 bp, Artificial Sequence
  MKO10047101_A_Sbsn
  gRNA
gataaatggcttgttgaccg

SEQ ID NO: 47102 - DNA, 20 bp, Artificial Sequence
  MKO10047102_A_Sbspon
  gRNA
cattggcaatcctcgatgtc

SEQ ID NO: 47103 - DNA, 20 bp, Artificial Sequence
  MKO10047103_A_Sbspon
  gRNA
cagggcgcccctccgtttag

SEQ ID NO: 47104 - DNA, 20 bp, Artificial Sequence
  MKO10047104_A_Sbspon
  gRNA
tcaacagtcccctgactcga

SEQ ID NO: 47105 - DNA, 20 bp, Artificial Sequence
  MKO10047105_A_Sc4mol
  gRNA
gagtttatcccaccacgtga

SEQ ID NO: 47106 - DNA, 20 bp, Artificial Sequence
  MKO10047106_A_Sc4mol
  gRNA
ggcattctttcccaatcata

SEQ ID NO: 47107 - DNA, 20 bp, Artificial Sequence
  MKO10047107_A_Sc4mol
  gRNA
atgggtgaccatacgtttgc

SEQ ID NO: 47108 - DNA, 20 bp, Artificial Sequence
  MKO10047108_A_Sc5d
  gRNA
acacgatctcacgcgagact

SEQ ID NO: 47109 - DNA, 20 bp, Artificial Sequence
  MKO10047109_A_Sc5d
  gRNA
ctctgaaggaagccgtccac

SEQ ID NO: 47110 - DNA, 20 bp, Artificial Sequence
  MKO10047110_A_Sc5d
  gRNA
cggagtgaagaagtagtaat

SEQ ID NO: 47111 - DNA, 20 bp, Artificial Sequence
  MKO10047111_A_Scaf11
  gRNA
agcaatactgccgatgcctc

SEQ ID NO: 47112 - DNA, 20 bp, Artificial Sequence
  MKO10047112_A_Scaf11
  gRNA
tgaaaaggtttccgatcgat

SEQ ID NO: 47113 - DNA, 20 bp, Artificial Sequence
  MKO10047113_A_Scaf11
  gRNA
tactaacctcttgttgcctt

SEQ ID NO: 47114 - DNA, 20 bp, Artificial Sequence
  MKO10047114_A_Scaf1
  gRNA
ccagatggcgctcggtgtcg

SEQ ID NO: 47115 - DNA, 20 bp, Artificial Sequence
  MKO10047115_A_Scaf1
  gRNA
ctgaggtccgcatcggtgac

SEQ ID NO: 47116 - DNA, 20 bp, Artificial Sequence
  MKO10047116_A_Scaf1
  gRNA
tttgcagcgggccattcagc

SEQ ID NO: 47117 - DNA, 20 bp, Artificial Sequence
  MKO10047117_A_Scaf4
  gRNA
tagttcgtgtgctaaatctt

SEQ ID NO: 47118 - DNA, 20 bp, Artificial Sequence
  MKO10047118_A_Scaf4
  gRNA
cgatggagtcgatgacatac

SEQ ID NO: 47119 - DNA, 20 bp, Artificial Sequence
  MKO10047119_A_Scaf4
  gRNA
tgctactggagcagcattac

SEQ ID NO: 47120 - DNA, 20 bp, Artificial Sequence
  MKO10047120_A_Scaf8
  gRNA
actccattgtgcgacaatcc

SEQ ID NO: 47121 - DNA, 20 bp, Artificial Sequence
  MKO10047121_A_Scaf8
  gRNA
cagaatttatatcgttgccc

SEQ ID NO: 47122 - DNA, 20 bp, Artificial Sequence
  MKO10047122_A_Scaf8
  gRNA
gccaaaacaggcgtgacaac

SEQ ID NO: 47123 - DNA, 20 bp, Artificial Sequence
  MKO10047123_A_Scai
  gRNA
caccccgaaaacggaaaagc

SEQ ID NO: 47124 - DNA, 20 bp, Artificial Sequence
  MKO10047124_A_Scai
  gRNA
atcaaaagttcttccgaagt

SEQ ID NO: 47125 - DNA, 20 bp, Artificial Sequence
  MKO10047125_A_Scai
  gRNA
gtaatacagctgcccgatct

SEQ ID NO: 47126 - DNA, 20 bp, Artificial Sequence
  MKO10047126_A_Scamp1
  gRNA
tcatgctaccgtgcgagagt

SEQ ID NO: 47127 - DNA, 20 bp, Artificial Sequence
  MKO10047127_A_Scamp1
  gRNA
tgaagcttatgtactaccta

SEQ ID NO: 47128 - DNA, 20 bp, Artificial Sequence
  MKO10047128_A_Scamp1
  gRNA
ccctttctccgactctcgca

SEQ ID NO: 47129 - DNA, 20 bp, Artificial Sequence
  MKO10047129_A_Scamp2
  gRNA
aaagcatcttgcaaatccgc

SEQ ID NO: 47130 - DNA, 20 bp, Artificial Sequence
  MKO10047130_A_Scamp2
  gRNA
ggcaggcttgcttcgacagc

SEQ ID NO: 47131 - DNA, 20 bp, Artificial Sequence
  MKO10047131_A_Scamp2
  gRNA
agatccctgctgactaccag

SEQ ID NO: 47132 - DNA, 20 bp, Artificial Sequence
  MKO10047132_A_Scamp3
  gRNA
ggaactcaaccgcaaggcag

SEQ ID NO: 47133 - DNA, 20 bp, Artificial Sequence
  MKO10047133_A_Scamp3
  gRNA
cagccagcagtatgccacgc

SEQ ID NO: 47134 - DNA, 20 bp, Artificial Sequence
  MKO10047134_A_Scamp3
  gRNA
cgtccagcgtggcatactgc

SEQ ID NO: 47135 - DNA, 20 bp, Artificial Sequence
  MKO10047135_A_Scamp4
  gRNA
actcaccttcacgatagtga

SEQ ID NO: 47136 - DNA, 20 bp, Artificial Sequence
  MKO10047136_A_Scamp4
  gRNA
taccggaaggccttgtatgc

SEQ ID NO: 47137 - DNA, 20 bp, Artificial Sequence
  MKO10047137_A_Scamp4
  gRNA
agctccgcccgcaatccacc

SEQ ID NO: 47138 - DNA, 20 bp, Artificial Sequence
  MKO10047138_A_Scamp5
  gRNA
gccgatgttcgtcccgaaga

SEQ ID NO: 47139 - DNA, 20 bp, Artificial Sequence
  MKO10047139_A_Scamp5
  gRNA
gacgaacatcggctcagcag

SEQ ID NO: 47140 - DNA, 20 bp, Artificial Sequence
  MKO10047140_A_Scamp5
  gRNA
acctggtgggctgtctcgcg

SEQ ID NO: 47141 - DNA, 20 bp, Artificial Sequence
  MKO10047141_A_Scand1
  gRNA
cgacggggccgcacagtcgc

SEQ ID NO: 47142 - DNA, 20 bp, Artificial Sequence
  MKO10047142_A_Scand1
  gRNA
gcggccccgtcgcccgattc

SEQ ID NO: 47143 - DNA, 20 bp, Artificial Sequence
  MKO10047143_A_Scand1
  gRNA
agcgaaactgccggaagcgc

SEQ ID NO: 47144 - DNA, 20 bp, Artificial Sequence
  MKO10047144_A_Scaper
  gRNA
ttgacttaagagctcgctac

SEQ ID NO: 47145 - DNA, 20 bp, Artificial Sequence
  MKO10047145_A_Scaper
  gRNA
ccgcaagaaacttgatagct

SEQ ID NO: 47146 - DNA, 20 bp, Artificial Sequence
  MKO10047146_A_Scaper
  gRNA
atttcaaagcattgattgac

SEQ ID NO: 47147 - DNA, 20 bp, Artificial Sequence
  MKO10047147_A_Scap
  gRNA
aattccacaggtcccgttcc

SEQ ID NO: 47148 - DNA, 20 bp, Artificial Sequence
  MKO10047148_A_Scap
  gRNA
cggagcctacttcccgaaca

SEQ ID NO: 47149 - DNA, 20 bp, Artificial Sequence
  MKO10047149_A_Scap
  gRNA
catgccgaccctgacatcat

SEQ ID NO: 47150 - DNA, 20 bp, Artificial Sequence
  MKO10047150_A_Scara3
  gRNA
aagacagccgcacgtcgtcc

SEQ ID NO: 47151 - DNA, 20 bp, Artificial Sequence
  MKO10047151_A_Scara3
  gRNA
cattgcgaaggatttctccg

SEQ ID NO: 47152 - DNA, 20 bp, Artificial Sequence
  MKO10047152_A_Scara3
  gRNA
atccttcccatgcacccaag

SEQ ID NO: 47153 - DNA, 20 bp, Artificial Sequence
  MKO10047153_A_Scara5
  gRNA
gcgcagacactcgccgtatg

SEQ ID NO: 47154 - DNA, 20 bp, Artificial Sequence
  MKO10047154_A_Scara5
  gRNA
gggccaacaacgagtctgtc

SEQ ID NO: 47155 - DNA, 20 bp, Artificial Sequence
  MKO10047155_A_Scara5
  gRNA
accgtgagtgaccgtgacaa

SEQ ID NO: 47156 - DNA, 20 bp, Artificial Sequence
  MKO10047156_A_Scarb1
  gRNA
acaggctgctcgggtctatg

SEQ ID NO: 47157 - DNA, 20 bp, Artificial Sequence
  MKO10047157_A_Scarb1
  gRNA
aagccagtagtccgggagcg

SEQ ID NO: 47158 - DNA, 20 bp, Artificial Sequence
  MKO10047158_A_Scarb1
  gRNA
cgtgttgagaaaatgcacga

SEQ ID NO: 47159 - DNA, 20 bp, Artificial Sequence
  MKO10047159_A_Scarb2
  gRNA
gttctaatcaagtcaacgtt

SEQ ID NO: 47160 - DNA, 20 bp, Artificial Sequence
  MKO10047160_A_Scarb2
  gRNA
ccgaaattcggggagacgtc

SEQ ID NO: 47161 - DNA, 20 bp, Artificial Sequence
  MKO10047161_A_Scarb2
  gRNA
cctgacgtctccccgaattt

SEQ ID NO: 47162 - DNA, 20 bp, Artificial Sequence
  MKO10047162_A_Scarf1
  gRNA
ctggcatgggcgacgacacg

SEQ ID NO: 47163 - DNA, 20 bp, Artificial Sequence
  MKO10047163_A_Scarf1
  gRNA
gtgcccagtttccgcttgac

SEQ ID NO: 47164 - DNA, 20 bp, Artificial Sequence
  MKO10047164_A_Scarf1
  gRNA
tctttgggtcgcactgtccg

SEQ ID NO: 47165 - DNA, 20 bp, Artificial Sequence
  MKO10047165_A_Scarf2
  gRNA
tgtcgcgagccatgccccgc

SEQ ID NO: 47166 - DNA, 20 bp, Artificial Sequence
  MKO10047166_A_Scarf2
  gRNA
gtacgtgtcacgcgcgccgc

SEQ ID NO: 47167 - DNA, 20 bp, Artificial Sequence
  MKO10047167_A_Scarf2
  gRNA
cagccgtgcacggtagtcga

SEQ ID NO: 47168 - DNA, 20 bp, Artificial Sequence
  MKO10047168_A_Sccpdh
  gRNA
ttaccggtcctacgcagttg

SEQ ID NO: 47169 - DNA, 20 bp, Artificial Sequence
  MKO10047169_A_Sccpdh
  gRNA
attaccgttcatctggttcc

SEQ ID NO: 47170 - DNA, 20 bp, Artificial Sequence
  MKO10047170_A_Sccpdh
  gRNA
tatagcactcctagatctgc

SEQ ID NO: 47171 - DNA, 20 bp, Artificial Sequence
  MKO10047171_A_Scd1
  gRNA
caccttcttgcgatacactc

SEQ ID NO: 47172 - DNA, 20 bp, Artificial Sequence
  MKO10047172_A_Scd1
  gRNA
gtgacttacccacggcaccc

SEQ ID NO: 47173 - DNA, 20 bp, Artificial Sequence
  MKO10047173_A_Scd1
  gRNA
tattcacgaccccacctatc

SEQ ID NO: 47174 - DNA, 20 bp, Artificial Sequence
  MKO10047174_A_Scd2
  gRNA
caccttcttgcgatacgccg

SEQ ID NO: 47175 - DNA, 20 bp, Artificial Sequence
  MKO10047175_A_Scd2
  gRNA
gtactatgtaatcagcgccc

SEQ ID NO: 47176 - DNA, 20 bp, Artificial Sequence
  MKO10047176_A_Scd2
  gRNA
agagctaatgttcttgtcgt

SEQ ID NO: 47177 - DNA, 20 bp, Artificial Sequence
  MKO10047177_A_Scd3
  gRNA
acgataagaacatcgatccc

SEQ ID NO: 47178 - DNA, 20 bp, Artificial Sequence
  MKO10047178_A_Scd3
  gRNA
gggatcgatgttcttatcgt

SEQ ID NO: 47179 - DNA, 20 bp, Artificial Sequence
  MKO10047179_A_Scd3
  gRNA
aaggtacttaccgaagaggc

SEQ ID NO: 47180 - DNA, 20 bp, Artificial Sequence
  MKO10047180_A_Scd4
  gRNA
gctccacaagcgatgcgctc

SEQ ID NO: 47181 - DNA, 20 bp, Artificial Sequence
  MKO10047181_A_Scd4
  gRNA
tatgcgtctcgaatttcctg

SEQ ID NO: 47182 - DNA, 20 bp, Artificial Sequence
  MKO10047182_A_Scd4
  gRNA
tcccgttgaagatctccagc

SEQ ID NO: 47183 - DNA, 20 bp, Artificial Sequence
  MKO10047183_A_Scel
  gRNA
acttacgtcttggttgattg

SEQ ID NO: 47184 - DNA, 20 bp, Artificial Sequence
  MKO10047184_A_Scel
  gRNA
gcacaactcccatgatgcct

SEQ ID NO: 47185 - DNA, 20 bp, Artificial Sequence
  MKO10047185_A_Scel
  gRNA
agccaaaagccacaattagc

SEQ ID NO: 47186 - DNA, 20 bp, Artificial Sequence
  MKO10047186_A_Scfd1
  gRNA
agacattgcgaatgcagcat

SEQ ID NO: 47187 - DNA, 20 bp, Artificial Sequence
  MKO10047187_A_Scfd1
  gRNA
gatctcggtctgagtgcaaa

SEQ ID NO: 47188 - DNA, 20 bp, Artificial Sequence
  MKO10047188_A_Scfd1
  gRNA
agaagccttaccttccatac

SEQ ID NO: 47189 - DNA, 20 bp, Artificial Sequence
  MKO10047189_A_Scfd2
  gRNA
ccacgacgtgatggtcaaca

SEQ ID NO: 47190 - DNA, 20 bp, Artificial Sequence
  MKO10047190_A_Scfd2
  gRNA
ccatgttgaccatcacgtcg

SEQ ID NO: 47191 - DNA, 20 bp, Artificial Sequence
  MKO10047191_A_Scfd2
  gRNA
ctgtagcgatgacccgactg

SEQ ID NO: 47192 - DNA, 20 bp, Artificial Sequence
  MKO10047192_A_Scg2
  gRNA
cgtcaaccctctcacgcttc

SEQ ID NO: 47193 - DNA, 20 bp, Artificial Sequence
  MKO10047193_A_Scg2
  gRNA
ggataatactcgaggctctg

SEQ ID NO: 47194 - DNA, 20 bp, Artificial Sequence
  MKO10047194_A_Scg2
  gRNA
cattgcctatgaagatgtcg

SEQ ID NO: 47195 - DNA, 20 bp, Artificial Sequence
  MKO10047195_A_Scg3
  gRNA
gagtacgattccaccaagag

SEQ ID NO: 47196 - DNA, 20 bp, Artificial Sequence
  MKO10047196_A_Scg3
  gRNA
tccagttgatgaaggccgtc

SEQ ID NO: 47197 - DNA, 20 bp, Artificial Sequence
  MKO10047197_A_Scg3
  gRNA
gtcgttctcctcataaatcc

SEQ ID NO: 47198 - DNA, 20 bp, Artificial Sequence
  MKO10047198_A_Scg5
  gRNA
gatccagaacatgactaccc

SEQ ID NO: 47199 - DNA, 20 bp, Artificial Sequence
  MKO10047199_A_Scg5
  gRNA
cgctgcagggggagctcacg

SEQ ID NO: 47200 - DNA, 20 bp, Artificial Sequence
  MKO10047200_A_Scg5
  gRNA
agtgtcaatccctatctaca

SEQ ID NO: 47201 - DNA, 20 bp, Artificial Sequence
  MKO10047201_A_Scgb1a1
  gRNA
gatcgccatcacaatcactg

SEQ ID NO: 47202 - DNA, 20 bp, Artificial Sequence
  MKO10047202_A_Scgb1a1
  gRNA
gagcttcatgatgtttatcc

SEQ ID NO: 47203 - DNA, 20 bp, Artificial Sequence
  MKO10047203_A_Scgb1a1
  gRNA
gcttcttcggacatctgccc

SEQ ID NO: 47204 - DNA, 20 bp, Artificial Sequence
  MKO10047204_A_Scgb1b19
  gRNA
caaagatgaccctgtagtac

SEQ ID NO: 47205 - DNA, 20 bp, Artificial Sequence
  MKO10047205_A_Scgb1b19
  gRNA
tgtcaatagcaccttgacag

SEQ ID NO: 47206 - DNA, 20 bp, Artificial Sequence
  MKO10047206_A_Scgb1b19
  gRNA
accaacctccccctgaagtc

SEQ ID NO: 47207 - DNA, 20 bp, Artificial Sequence
  MKO10047207_A_Scgb1b20
  gRNA
aattgtagccatcaacatat

SEQ ID NO: 47208 - DNA, 20 bp, Artificial Sequence
  MKO10047208_A_Scgb1b20
  gRNA
gccttgctcctcctgacttc

SEQ ID NO: 47209 - DNA, 20 bp, Artificial Sequence
  MKO10047209_A_Scgb1b20
  gRNA
accaacctccccctgaagtc

SEQ ID NO: 47210 - DNA, 20 bp, Artificial Sequence
  MKO10047210_A_Scgb1b24
  gRNA
agatgcaaacatcaacatgc

SEQ ID NO: 47211 - DNA, 20 bp, Artificial Sequence
  MKO10047211_A_Scgb1b24
  gRNA
acccacatacccctgaatgc

SEQ ID NO: 47212 - DNA, 20 bp, Artificial Sequence
  MKO10047212_A_Scgb1b24
  gRNA
atgttcatctattctttcac

SEQ ID NO: 47213 - DNA, 20 bp, Artificial Sequence
  MKO10047213_A_Scgb1b27
  gRNA
acacacctccctctgaaatc

SEQ ID NO: 47214 - DNA, 20 bp, Artificial Sequence
  MKO10047214_A_Scgb1b27
  gRNA
caatgaaaacactaaagtac

SEQ ID NO: 47215 - DNA, 20 bp, Artificial Sequence
  MKO10047215_A_Scgb1b27
  gRNA
agaataaaataacagccagc

SEQ ID NO: 47216 - DNA, 20 bp, Artificial Sequence
  MKO10047216_A_Scgb1b29
  gRNA
accaacctcctcctgaagtc

SEQ ID NO: 47217 - DNA, 20 bp, Artificial Sequence
  MKO10047217_A_Scgb1b29
  gRNA
accattatcatgaagcttgc

SEQ ID NO: 47218 - DNA, 20 bp, Artificial Sequence
  MKO10047218_A_Scgb1b29
  gRNA
tatcttgtcttcctctgtca

SEQ ID NO: 47219 - DNA, 20 bp, Artificial Sequence
  MKO10047219_A_Scgb1b2
  gRNA
aactcaagatatgtgtcgat

SEQ ID NO: 47220 - DNA, 20 bp, Artificial Sequence
  MKO10047220_A_Scgb1b2
  gRNA
agaagagtatgttaattatg

SEQ ID NO: 47221 - DNA, 20 bp, Artificial Sequence
  MKO10047221_A_Scgb1b2
  gRNA
accctgctcctcctaacttc

SEQ ID NO: 47222 - DNA, 20 bp, Artificial Sequence
  MKO10047222_A_Scgb1b30
  gRNA
ggccgaggaagacaagacgc

SEQ ID NO: 47223 - DNA, 20 bp, Artificial Sequence
  MKO10047223_A_Scgb1b30
  gRNA
caataatgaccctctcgtac

SEQ ID NO: 47224 - DNA, 20 bp, Artificial Sequence
  MKO10047224_A_Scgb1b30
  gRNA
gatgtacccatcaacatgac

SEQ ID NO: 47225 - DNA, 20 bp, Artificial Sequence
  MKO10047225_A_Scgb1b3
  gRNA
cacagcaccagcaagcttca

SEQ ID NO: 47226 - DNA, 20 bp, Artificial Sequence
  MKO10047226_A_Scgb1b3
  gRNA
actactaccatgaagcttgc

SEQ ID NO: 47227 - DNA, 20 bp, Artificial Sequence
  MKO10047227_A_Scgb1b3
  gRNA
catttgcccagctataaaag

SEQ ID NO: 47228 - DNA, 20 bp, Artificial Sequence
  MKO10047228_A_Scgb1b7
  gRNA
accaacctcctcctgaagtc

SEQ ID NO: 47229 - DNA, 20 bp, Artificial Sequence
  MKO10047229_A_Scgb1b7
  gRNA
accattatcatgaagcttgc

SEQ ID NO: 47230 - DNA, 20 bp, Artificial Sequence
  MKO10047230_A_Scgb1b7
  gRNA
tatcttgtcttcctctgtca

SEQ ID NO: 47231 - DNA, 20 bp, Artificial Sequence
  MKO10047231_A_Scgb1c1
  gRNA
accccggaagaactctacga

SEQ ID NO: 47232 - DNA, 20 bp, Artificial Sequence
  MKO10047232_A_Scgb1c1
  gRNA
gagctcgctcagcgctgact

SEQ ID NO: 47233 - DNA, 20 bp, Artificial Sequence
  MKO10047233_A_Scgb1c1
  gRNA
agggagcagcgctcttctgc

SEQ ID NO: 47234 - DNA, 20 bp, Artificial Sequence
  MKO10047234_A_Scgb2b12
  gRNA
cttgcatagacttcgaagaa

SEQ ID NO: 47235 - DNA, 20 bp, Artificial Sequence
  MKO10047235_A_Scgb2b12
  gRNA
tgtcaagactatagtatgac

SEQ ID NO: 47236 - DNA, 20 bp, Artificial Sequence
  MKO10047236_A_Scgb2b12
  gRNA
aagattaagaaatatacttc

SEQ ID NO: 47237 - DNA, 20 bp, Artificial Sequence
  MKO10047237_A_Scgb2b15
  gRNA
catgaaagggacccttctgc

SEQ ID NO: 47238 - DNA, 20 bp, Artificial Sequence
  MKO10047238_A_Scgb2b15
  gRNA
cagttctccagtcaccagca

SEQ ID NO: 47239 - DNA, 20 bp, Artificial Sequence
  MKO10047239_A_Scgb2b15
  gRNA
gtctatgcaagtgttctctc

SEQ ID NO: 47240 - DNA, 20 bp, Artificial Sequence
  MKO10047240_A_Scgb2b17
  gRNA
catgaaagggacccttctgc

SEQ ID NO: 47241 - DNA, 20 bp, Artificial Sequence
  MKO10047241_A_Scgb2b17
  gRNA
cagttctccagtcaccagca

SEQ ID NO: 47242 - DNA, 20 bp, Artificial Sequence
  MKO10047242_A_Scgb2b17
  gRNA
gtctatgcaagtgttctctc

SEQ ID NO: 47243 - DNA, 20 bp, Artificial Sequence
  MKO10047243_A_Scgb2b19
  gRNA
gcatgtgttcctttcttcga

SEQ ID NO: 47244 - DNA, 20 bp, Artificial Sequence
  MKO10047244_A_Scgb2b19
  gRNA
caagtgttgtctcaggaagt

SEQ ID NO: 47245 - DNA, 20 bp, Artificial Sequence
  MKO10047245_A_Scgb2b19
  gRNA
tttagcactcttcaccatga

SEQ ID NO: 47246 - DNA, 20 bp, Artificial Sequence
  MKO10047246_A_Scgb2b20
  gRNA
aattcaggactgctacagtg

SEQ ID NO: 47247 - DNA, 20 bp, Artificial Sequence
  MKO10047247_A_Scgb2b20
  gRNA
gcatgtcttcctttcttcga

SEQ ID NO: 47248 - DNA, 20 bp, Artificial Sequence
  MKO10047248_A_Scgb2b20
  gRNA
gaaggggacacttcttctgc

SEQ ID NO: 47249 - DNA, 20 bp, Artificial Sequence
  MKO10047249_A_Scgb2b24
  gRNA
tttcttcggaatagtactgc

SEQ ID NO: 47250 - DNA, 20 bp, Artificial Sequence
  MKO10047250_A_Scgb2b24
  gRNA
catgaacttagcgcattcaa

SEQ ID NO: 47251 - DNA, 20 bp, Artificial Sequence
  MKO10047251_A_Scgb2b24
  gRNA
agaaacctttacgaaaatta

SEQ ID NO: 47252 - DNA, 20 bp, Artificial Sequence
  MKO10047252_A_Scgb2b26
  gRNA
aagtattgctccgtaagttc

SEQ ID NO: 47253 - DNA, 20 bp, Artificial Sequence
  MKO10047253_A_Scgb2b26
  gRNA
ctaaggaggaccttcctgca

SEQ ID NO: 47254 - DNA, 20 bp, Artificial Sequence
  MKO10047254_A_Scgb2b26
  gRNA
ccatagtatttcttgcattc

SEQ ID NO: 47255 - DNA, 20 bp, Artificial Sequence
  MKO10047255_A_Scgb2b27
  gRNA
cagtagcttgaaacatcgaa

SEQ ID NO: 47256 - DNA, 20 bp, Artificial Sequence
  MKO10047256_A_Scgb2b27
  gRNA
gaggacgttaccattatttg

SEQ ID NO: 47257 - DNA, 20 bp, Artificial Sequence
  MKO10047257_A_Scgb2b27
  gRNA
actcttcagctctgaatgca

SEQ ID NO: 47258 - DNA, 20 bp, Artificial Sequence
  MKO10047258_A_Scgb2b2
  gRNA
cccaaatatacgccgaagaa

SEQ ID NO: 47259 - DNA, 20 bp, Artificial Sequence
  MKO10047259_A_Scgb2b2
  gRNA
tgctccatttgatcctactg

SEQ ID NO: 47260 - DNA, 20 bp, Artificial Sequence
  MKO10047260_A_Scgb2b2
  gRNA
gtataacccattaacttcta

SEQ ID NO: 47261 - DNA, 20 bp, Artificial Sequence
  MKO10047261_A_Scgb2b3
  gRNA
gtctatttgagcactgtctc

SEQ ID NO: 47262 - DNA, 20 bp, Artificial Sequence
  MKO10047262_A_Scgb2b3
  gRNA
tcttatttcaaccctactga

SEQ ID NO: 47263 - DNA, 20 bp, Artificial Sequence
  MKO10047263_A_Scgb2b3
  gRNA
agccaagctctccaatcacc

SEQ ID NO: 47264 - DNA, 20 bp, Artificial Sequence
  MKO10047264_A_Scgb2b7
  gRNA
tttcctcactgtagcagtcc

SEQ ID NO: 47265 - DNA, 20 bp, Artificial Sequence
  MKO10047265_A_Scgb2b7
  gRNA
tcctgagagaacacttgcat

SEQ ID NO: 47266 - DNA, 20 bp, Artificial Sequence
  MKO10047266_A_Scgb2b7
  gRNA
gaaggggacacttcttctgc

SEQ ID NO: 47267 - DNA, 20 bp, Artificial Sequence
  MKO10047267_A_Scgb3a1
  gRNA
gcggccacgggttctaccgc

SEQ ID NO: 47268 - DNA, 20 bp, Artificial Sequence
  MKO10047268_A_Scgb3a1
  gRNA
caagcctgcggtagaacccg

SEQ ID NO: 47269 - DNA, 20 bp, Artificial Sequence
  MKO10047269_A_Scgb3a1
  gRNA
cccctcaaccgaacattgtc

SEQ ID NO: 47270 - DNA, 20 bp, Artificial Sequence
  MKO10047270_A_Scgb3a2
  gRNA
gagggaataatgtcgtccaa

SEQ ID NO: 47271 - DNA, 20 bp, Artificial Sequence
  MKO10047271_A_Scgb3a2
  gRNA
ctaggaggctctttcacacc

SEQ ID NO: 47272 - DNA, 20 bp, Artificial Sequence
  MKO10047272_A_Scgb3a2
  gRNA
gaagaagtgtgtggacgagc

SEQ ID NO: 47273 - DNA, 20 bp, Artificial Sequence
  MKO10047273_A_Scgn
  gRNA
gatttggcgcaaatacgatg

SEQ ID NO: 47274 - DNA, 20 bp, Artificial Sequence
  MKO10047274_A_Scgn
  gRNA
aggccgcatactgatgaaag

SEQ ID NO: 47275 - DNA, 20 bp, Artificial Sequence
  MKO10047275_A_Scgn
  gRNA
gaccagccacaacgtctcta

SEQ ID NO: 47276 - DNA, 20 bp, Artificial Sequence
  MKO10047276_A_Schip1
  gRNA
agttgtgtctctatccgaat

SEQ ID NO: 47277 - DNA, 20 bp, Artificial Sequence
  MKO10047277_A_Schip1
  gRNA
gcccgatagtcatgtctctc

SEQ ID NO: 47278 - DNA, 20 bp, Artificial Sequence
  MKO10047278_A_Schip1
  gRNA
cccccacttactttcaatct

SEQ ID NO: 47279 - DNA, 20 bp, Artificial Sequence
  MKO10047279_A_Scimp
  gRNA
cccacttcagcttgccaaaa

SEQ ID NO: 47280 - DNA, 20 bp, Artificial Sequence
  MKO10047280_A_Scimp
  gRNA
aattgctaagccctcaaaac

SEQ ID NO: 47281 - DNA, 20 bp, Artificial Sequence
  MKO10047281_A_Scimp
  gRNA
cactgatgagtaccaagctg

SEQ ID NO: 47282 - DNA, 20 bp, Artificial Sequence
  MKO10047282_A_Scin
  gRNA
cacccaaatagtcgtccatc

SEQ ID NO: 47283 - DNA, 20 bp, Artificial Sequence
  MKO10047283_A_Scin
  gRNA
caccccgagttcgcgcgcgc

SEQ ID NO: 47284 - DNA, 20 bp, Artificial Sequence
  MKO10047284_A_Scin
  gRNA
tccgacgtaaaagtcaccat

SEQ ID NO: 47285 - DNA, 20 bp, Artificial Sequence
  MKO10047285_A_Sclt1
  gRNA
attccacatacctgcatagt

SEQ ID NO: 47286 - DNA, 20 bp, Artificial Sequence
  MKO10047286_A_Sclt1
  gRNA
caggcagctgacctattacc

SEQ ID NO: 47287 - DNA, 20 bp, Artificial Sequence
  MKO10047287_A_Sclt1
  gRNA
ttctcatactcagcaatgag

SEQ ID NO: 47288 - DNA, 20 bp, Artificial Sequence
  MKO10047288_A_Scly
  gRNA
taatgagaccggcgtcatca

SEQ ID NO: 47289 - DNA, 20 bp, Artificial Sequence
  MKO10047289_A_Scly
  gRNA
tgcccattcaccttcgacac

SEQ ID NO: 47290 - DNA, 20 bp, Artificial Sequence
  MKO10047290_A_Scly
  gRNA
aaatgcagctcgagcgagcc

SEQ ID NO: 47291 - DNA, 20 bp, Artificial Sequence
  MKO10047291_A_Scmh1
  gRNA
cgacttcgtctgcgccttga

SEQ ID NO: 47292 - DNA, 20 bp, Artificial Sequence
  MKO10047292_A_Scmh1
  gRNA
acctgtcaatccaacgaccg

SEQ ID NO: 47293 - DNA, 20 bp, Artificial Sequence
  MKO10047293_A_Scmh1
  gRNA
acctagaggtgaccccatga

SEQ ID NO: 47294 - DNA, 20 bp, Artificial Sequence
  MKO10047294_A_Scml2
  gRNA
agccaggttacgtctacgac

SEQ ID NO: 47295 - DNA, 20 bp, Artificial Sequence
  MKO10047295_A_Scml2
  gRNA
cacaccgaatcaatattgcg

SEQ ID NO: 47296 - DNA, 20 bp, Artificial Sequence
  MKO10047296_A_Scml2
  gRNA
ttcttactacgtgtactaac

SEQ ID NO: 47297 - DNA, 20 bp, Artificial Sequence
  MKO10047297_A_Scml4
  gRNA
taccgaggcgagctggtgtc

SEQ ID NO: 47298 - DNA, 20 bp, Artificial Sequence
  MKO10047298_A_Scml4
  gRNA
tcgattgtgcgcaccagcct

SEQ ID NO: 47299 - DNA, 20 bp, Artificial Sequence
  MKO10047299_A_Scml4
  gRNA
gagcatcggcgcctctgaca

SEQ ID NO: 47300 - DNA, 20 bp, Artificial Sequence
  MKO10047300_A_Scn10a
  gRNA
tgagaactcggaatgtccgc

SEQ ID NO: 47301 - DNA, 20 bp, Artificial Sequence
  MKO10047301_A_Scn10a
  gRNA
tgcggacattccgagttctc

SEQ ID NO: 47302 - DNA, 20 bp, Artificial Sequence
  MKO10047302_A_Scn10a
  gRNA
cgagtggacggacactttga

SEQ ID NO: 47303 - DNA, 20 bp, Artificial Sequence
  MKO10047303_A_Scn11a
  gRNA
tctatcgcttcagcgccaag

SEQ ID NO: 47304 - DNA, 20 bp, Artificial Sequence
  MKO10047304_A_Scn11a
  gRNA
ctttgtagatacgtcttcat

SEQ ID NO: 47305 - DNA, 20 bp, Artificial Sequence
  MKO10047305_A_Scn11a
  gRNA
gcgaatcatgaagcttctga

SEQ ID NO: 47306 - DNA, 20 bp, Artificial Sequence
  MKO10047306_A_Scn1a
  gRNA
ttactttccttcgcgaccca

SEQ ID NO: 47307 - DNA, 20 bp, Artificial Sequence
  MKO10047307_A_Scn1a
  gRNA
caatgagtaaccctcccgac

SEQ ID NO: 47308 - DNA, 20 bp, Artificial Sequence
  MKO10047308_A_Scn1a
  gRNA
taacacccttcaatcctctt

SEQ ID NO: 47309 - DNA, 20 bp, Artificial Sequence
  MKO10047309_A_Scn1b
  gRNA
ggaggtggattccgataccg

SEQ ID NO: 47310 - DNA, 20 bp, Artificial Sequence
  MKO10047310_A_Scn1b
  gRNA
ggtctcactacgacgcttac

SEQ ID NO: 47311 - DNA, 20 bp, Artificial Sequence
  MKO10047311_A_Scn1b
  gRNA
cgtcgtcaagaagatccacc

SEQ ID NO: 47312 - DNA, 20 bp, Artificial Sequence
  MKO10047312_A_Scn2a1
  gRNA
catggtcataaatacacagt

SEQ ID NO: 47313 - DNA, 20 bp, Artificial Sequence
  MKO10047313_A_Scn2a1
  gRNA
ccatgagcaaccctccagac

SEQ ID NO: 47314 - DNA, 20 bp, Artificial Sequence
  MKO10047314_A_Scn2a1
  gRNA
tagaagatttcacatttcta

SEQ ID NO: 47315 - DNA, 20 bp, Artificial Sequence
  MKO10047315_A_Scn2b
  gRNA
ggcgggtatcggacccattg

SEQ ID NO: 47316 - DNA, 20 bp, Artificial Sequence
  MKO10047316_A_Scn2b
  gRNA
cactgacacgtcgtacttac

SEQ ID NO: 47317 - DNA, 20 bp, Artificial Sequence
  MKO10047317_A_Scn2b
  gRNA
acccacgatgaccgccaccg

SEQ ID NO: 47318 - DNA, 20 bp, Artificial Sequence
  MKO10047318_A_Scn3a
  gRNA
taactccactaaaccccgtt

SEQ ID NO: 47319 - DNA, 20 bp, Artificial Sequence
  MKO10047319_A_Scn3a
  gRNA
cattgagcaatcctcctgac

SEQ ID NO: 47320 - DNA, 20 bp, Artificial Sequence
  MKO10047320_A_Scn3a
  gRNA
tgagtcacttataaagatct

SEQ ID NO: 47321 - DNA, 20 bp, Artificial Sequence
  MKO10047321_A_Scn3b
  gRNA
aggaaatctttaccgccctc

SEQ ID NO: 47322 - DNA, 20 bp, Artificial Sequence
  MKO10047322_A_Scn3b
  gRNA
cagatatatgagtatcgaaa

SEQ ID NO: 47323 - DNA, 20 bp, Artificial Sequence
  MKO10047323_A_Scn3b
  gRNA
gaactctgtggtacccgtgg

SEQ ID NO: 47324 - DNA, 20 bp, Artificial Sequence
  MKO10047324_A_Scn4a
  gRNA
acacacttactccacgtcct

SEQ ID NO: 47325 - DNA, 20 bp, Artificial Sequence
  MKO10047325_A_Scn4a
  gRNA
ccatgagcaacccgccttct

SEQ ID NO: 47326 - DNA, 20 bp, Artificial Sequence
  MKO10047326_A_Scn4a
  gRNA
aatacctgggatgaccgtga

SEQ ID NO: 47327 - DNA, 20 bp, Artificial Sequence
  MKO10047327_A_Scn4b
  gRNA
accaccatctacgctattaa

SEQ ID NO: 47328 - DNA, 20 bp, Artificial Sequence
  MKO10047328_A_Scn4b
  gRNA
tgagccgttaatagcgtaga

SEQ ID NO: 47329 - DNA, 20 bp, Artificial Sequence
  MKO10047329_A_Scn4b
  gRNA
gcagatacacctgcttcgtg

SEQ ID NO: 47330 - DNA, 20 bp, Artificial Sequence
  MKO10047330_A_Scn5a
  gRNA
cacaacacgaccctccgcct

SEQ ID NO: 47331 - DNA, 20 bp, Artificial Sequence
  MKO10047331_A_Scn5a
  gRNA
ttcagccatgcgcttctcga

SEQ ID NO: 47332 - DNA, 20 bp, Artificial Sequence
  MKO10047332_A_Scn5a
  gRNA
gcccttattcagcacgatga

SEQ ID NO: 47333 - DNA, 20 bp, Artificial Sequence
  MKO10047333_A_Scn7a
  gRNA
tctattgccaatatccattc

SEQ ID NO: 47334 - DNA, 20 bp, Artificial Sequence
  MKO10047334_A_Scn7a
  gRNA
aagattatccctttgaacca

SEQ ID NO: 47335 - DNA, 20 bp, Artificial Sequence
  MKO10047335_A_Scn7a
  gRNA
gcatgagtaatctaccagaa

SEQ ID NO: 47336 - DNA, 20 bp, Artificial Sequence
  MKO10047336_A_Scn8a
  gRNA
cctccaggggaaccgcaacc

SEQ ID NO: 47337 - DNA, 20 bp, Artificial Sequence
  MKO10047337_A_Scn8a
  gRNA
gcctttcacccccgagtcgc

SEQ ID NO: 47338 - DNA, 20 bp, Artificial Sequence
  MKO10047338_A_Scn8a
  gRNA
tcaccttcttacgagacccg

SEQ ID NO: 47339 - DNA, 20 bp, Artificial Sequence
  MKO10047339_A_Scn9a
  gRNA
ccacgcaaaagcctcttgca

SEQ ID NO: 47340 - DNA, 20 bp, Artificial Sequence
  MKO10047340_A_Scn9a
  gRNA
tcaccttcctccgtgaccct

SEQ ID NO: 47341 - DNA, 20 bp, Artificial Sequence
  MKO10047341_A_Scn9a
  gRNA
ggagacagcatgtacaaagc

SEQ ID NO: 47342 - DNA, 20 bp, Artificial Sequence
  MKO10047342_A_Scnm1
  gRNA
tcgaccagtactagacacgc

SEQ ID NO: 47343 - DNA, 20 bp, Artificial Sequence
  MKO10047343_A_Scnm1
  gRNA
atggccagcgtgtctagtac

SEQ ID NO: 47344 - DNA, 20 bp, Artificial Sequence
  MKO10047344_A_Scnm1
  gRNA
gaggcactgatgctgcggga

SEQ ID NO: 47345 - DNA, 20 bp, Artificial Sequence
  MKO10047345_A_Scnn1a
  gRNA
attgttgtcgcgtacactgg

SEQ ID NO: 47346 - DNA, 20 bp, Artificial Sequence
  MKO10047346_A_Scnn1a
  gRNA
gcctactcacgcctgattgc

SEQ ID NO: 47347 - DNA, 20 bp, Artificial Sequence
  MKO10047347_A_Scnn1a
  gRNA
aaagcgtctgttccgtgatg

SEQ ID NO: 47348 - DNA, 20 bp, Artificial Sequence
  MKO10047348_A_Scnn1b
  gRNA
ggcactggtgaagttccgca

SEQ ID NO: 47349 - DNA, 20 bp, Artificial Sequence
  MKO10047349_A_Scnn1b
  gRNA
agtcctcctgaccgatgtcc

SEQ ID NO: 47350 - DNA, 20 bp, Artificial Sequence
  MKO10047350_A_Scnn1b
  gRNA
cagggttccgctcatcaata

SEQ ID NO: 47351 - DNA, 20 bp, Artificial Sequence
  MKO10047351_A_Scnn1g
  gRNA
ataccctttcatcgaagacg

SEQ ID NO: 47352 - DNA, 20 bp, Artificial Sequence
  MKO10047352_A_Scnn1g
  gRNA
cgttcatgagtcgaagaaac

SEQ ID NO: 47353 - DNA, 20 bp, Artificial Sequence
  MKO10047353_A_Scnn1g
  gRNA
gccttcccacgtggaccgca

SEQ ID NO: 47354 - DNA, 20 bp, Artificial Sequence
  MKO10047354_A_Sco1
  gRNA
acctttcacataagtcgcaa

SEQ ID NO: 47355 - DNA, 20 bp, Artificial Sequence
  MKO10047355_A_Sco1
  gRNA
gccattgcgacttatgtgaa

SEQ ID NO: 47356 - DNA, 20 bp, Artificial Sequence
  MKO10047356_A_Sco1
  gRNA
gtaatacaccctgtatgctc

SEQ ID NO: 47357 - DNA, 20 bp, Artificial Sequence
  MKO10047357_A_Sco2
  gRNA
taccgcgtatactacagcgc

SEQ ID NO: 47358 - DNA, 20 bp, Artificial Sequence
  MKO10047358_A_Sco2
  gRNA
ttcttgcacatagcgggcca

SEQ ID NO: 47359 - DNA, 20 bp, Artificial Sequence
  MKO10047359_A_Sco2
  gRNA
tgatatttgccccgatgagc

SEQ ID NO: 47360 - DNA, 20 bp, Artificial Sequence
  MKO10047360_A_Scoc
  gRNA
gaactccaacacacacttga

SEQ ID NO: 47361 - DNA, 20 bp, Artificial Sequence
  MKO10047361_A_Scoc
  gRNA
ggcattgctcatgagcaaga

SEQ ID NO: 47362 - DNA, 20 bp, Artificial Sequence
  MKO10047362_A_Scoc
  gRNA
cggattgagcacaggggagg

SEQ ID NO: 47363 - DNA, 20 bp, Artificial Sequence
  MKO10047363_A_Scp2d1
  gRNA
cctgctttgatcttcgcttg

SEQ ID NO: 47364 - DNA, 20 bp, Artificial Sequence
  MKO10047364_A_Scp2d1
  gRNA
cctcaagcgaagatcaaagc

SEQ ID NO: 47365 - DNA, 20 bp, Artificial Sequence
  MKO10047365_A_Scp2d1
  gRNA
atgatgaagacggtatctgc

SEQ ID NO: 47366 - DNA, 20 bp, Artificial Sequence
  MKO10047366_A_Scp2
  gRNA
acagatcccttactccgcag

SEQ ID NO: 47367 - DNA, 20 bp, Artificial Sequence
  MKO10047367_A_Scp2
  gRNA
gcatgcgttggctatgtgta

SEQ ID NO: 47368 - DNA, 20 bp, Artificial Sequence
  MKO10047368_A_Scp2
  gRNA
atggcccatcaactgattca

SEQ ID NO: 47369 - DNA, 20 bp, Artificial Sequence
  MKO10047369_A_Scpep1
  gRNA
cgtgtccaggtcctttgcgt

SEQ ID NO: 47370 - DNA, 20 bp, Artificial Sequence
  MKO10047370_A_Scpep1
  gRNA
tgtacccaggtagtatttcg

SEQ ID NO: 47371 - DNA, 20 bp, Artificial Sequence
  MKO10047371_A_Scpep1
  gRNA
tcaagcctcgaaatactacc

SEQ ID NO: 47372 - DNA, 20 bp, Artificial Sequence
  MKO10047372_A_Scrg1
  gRNA
tcgcaattgtcacaaccttc

SEQ ID NO: 47373 - DNA, 20 bp, Artificial Sequence
  MKO10047373_A_Scrg1
  gRNA
agatcctcagtggttgttgc

SEQ ID NO: 47374 - DNA, 20 bp, Artificial Sequence
  MKO10047374_A_Scrg1
  gRNA
ctaacagcaaagttagccca

SEQ ID NO: 47375 - DNA, 20 bp, Artificial Sequence
  MKO10047375_A_Scrib
  gRNA
cctgcagggacacgtcattc

SEQ ID NO: 47376 - DNA, 20 bp, Artificial Sequence
  MKO10047376_A_Scrib
  gRNA
cttcacacagctacgcagcc

SEQ ID NO: 47377 - DNA, 20 bp, Artificial Sequence
  MKO10047377_A_Scrib
  gRNA
gagctagatgtgtcccggaa

SEQ ID NO: 47378 - DNA, 20 bp, Artificial Sequence
  MKO10047378_A_Scrn1
  gRNA
cttcatccagcttagtcgcg

SEQ ID NO: 47379 - DNA, 20 bp, Artificial Sequence
  MKO10047379_A_Scrn1
  gRNA
gtctgcttatcacgatggcg

SEQ ID NO: 47380 - DNA, 20 bp, Artificial Sequence
  MKO10047380_A_Scrn1
  gRNA
ttctccagccgatgaccgtt

SEQ ID NO: 47381 - DNA, 20 bp, Artificial Sequence
  MKO10047381_A_Scrn2
  gRNA
cttgctggaccgctatgggc

SEQ ID NO: 47382 - DNA, 20 bp, Artificial Sequence
  MKO10047382_A_Scrn2
  gRNA
cacctgttccacctcgatat

SEQ ID NO: 47383 - DNA, 20 bp, Artificial Sequence
  MKO10047383_A_Scrn2
  gRNA
ttgtgatagcagaacggctc

SEQ ID NO: 47384 - DNA, 20 bp, Artificial Sequence
  MKO10047384_A_Scrn3
  gRNA
tgaggaactacgctaagcag

SEQ ID NO: 47385 - DNA, 20 bp, Artificial Sequence
  MKO10047385_A_Scrn3
  gRNA
ccggtcaatcttggttgtta

SEQ ID NO: 47386 - DNA, 20 bp, Artificial Sequence
  MKO10047386_A_Scrn3
  gRNA
agtacttccccgacgtctcc

SEQ ID NO: 47387 - DNA, 20 bp, Artificial Sequence
  MKO10047387_A_Scrt1
  gRNA
ggtctacgatggcgacgctg

SEQ ID NO: 47388 - DNA, 20 bp, Artificial Sequence
  MKO10047388_A_Scrt1
  gRNA
tcgccatcgtagaccgacgc

SEQ ID NO: 47389 - DNA, 20 bp, Artificial Sequence
  MKO10047389_A_Scrt1
  gRNA
gtcgcactccgagatcgctg

SEQ ID NO: 47390 - DNA, 20 bp, Artificial Sequence
  MKO10047390_A_Scrt2
  gRNA
gcgcgcaagtgcccgacgtg

SEQ ID NO: 47391 - DNA, 20 bp, Artificial Sequence
  MKO10047391_A_Scrt2
  gRNA
cgcggaagtagcgcgccgac

SEQ ID NO: 47392 - DNA, 20 bp, Artificial Sequence
  MKO10047392_A_Scrt2
  gRNA
gcccactcaccgttgtcccc

SEQ ID NO: 47393 - DNA, 20 bp, Artificial Sequence
  MKO10047393_A_Sctr
  gRNA
ccttgatgaaccgtgtacga

SEQ ID NO: 47394 - DNA, 20 bp, Artificial Sequence
  MKO10047394_A_Sctr
  gRNA
acgccgcacatcacacaatc

SEQ ID NO: 47395 - DNA, 20 bp, Artificial Sequence
  MKO10047395_A_Sctr
  gRNA
accgtctgctccttcgtaca

SEQ ID NO: 47396 - DNA, 20 bp, Artificial Sequence
  MKO10047396_A_Sct
  gRNA
ctaagggcttggaccgggcc

SEQ ID NO: 47397 - DNA, 20 bp, Artificial Sequence
  MKO10047397_A_Sct
  gRNA
cagcgagctcagccgcttgc

SEQ ID NO: 47398 - DNA, 20 bp, Artificial Sequence
  MKO10047398_A_Sct
  gRNA
ctgctgttgatcgttcagag

SEQ ID NO: 47399 - DNA, 20 bp, Artificial Sequence
  MKO10047399_A_Scube1
  gRNA
accattggagcggtgtatgc

SEQ ID NO: 47400 - DNA, 20 bp, Artificial Sequence
  MKO10047400_A_Scube1
  gRNA
acctgcatacaccgctccaa

SEQ ID NO: 47401 - DNA, 20 bp, Artificial Sequence
  MKO10047401_A_Scube1
  gRNA
tgagcattcatccacgtcca

SEQ ID NO: 47402 - DNA, 20 bp, Artificial Sequence
  MKO10047402_A_Scube2
  gRNA
tatcgctgcacctgtttcga

SEQ ID NO: 47403 - DNA, 20 bp, Artificial Sequence
  MKO10047403_A_Scube2
  gRNA
cacatctgcaccaacgttat

SEQ ID NO: 47404 - DNA, 20 bp, Artificial Sequence
  MKO10047404_A_Scube2
  gRNA
caacatgaagccatcgaaac

SEQ ID NO: 47405 - DNA, 20 bp, Artificial Sequence
  MKO10047405_A_Scube3
  gRNA
taccggtgtacctgctacga

SEQ ID NO: 47406 - DNA, 20 bp, Artificial Sequence
  MKO10047406_A_Scube3
  gRNA
atccgtcgtagcaggtacac

SEQ ID NO: 47407 - DNA, 20 bp, Artificial Sequence
  MKO10047407_A_Scube3
  gRNA
cttcccgtcccccgtgtagc

SEQ ID NO: 47408 - DNA, 20 bp, Artificial Sequence
  MKO10047408_A_Scx
  gRNA
acacagcgaatgcgcgcgag

SEQ ID NO: 47409 - DNA, 20 bp, Artificial Sequence
  MKO10047409_A_Scx
  gRNA
tacaggtagcgacccggcgg

SEQ ID NO: 47410 - DNA, 20 bp, Artificial Sequence
  MKO10047410_A_Scx
  gRNA
gaatcgccgtctttctgtca

SEQ ID NO: 47411 - DNA, 20 bp, Artificial Sequence
  MKO10047411_A_Scyl1
  gRNA
ggatcatactgctcgagctc

SEQ ID NO: 47412 - DNA, 20 bp, Artificial Sequence
  MKO10047412_A_Scyl1
  gRNA
gctcgagcagtatgatcccc

SEQ ID NO: 47413 - DNA, 20 bp, Artificial Sequence
  MKO10047413_A_Scyl1
  gRNA
tacctccaacccatcgatat

SEQ ID NO: 47414 - DNA, 20 bp, Artificial Sequence
  MKO10047414_A_Scyl2
  gRNA
gtcgtagtcgggttagctgt

SEQ ID NO: 47415 - DNA, 20 bp, Artificial Sequence
  MKO10047415_A_Scyl2
  gRNA
gccagtgacatgtactcgtt

SEQ ID NO: 47416 - DNA, 20 bp, Artificial Sequence
  MKO10047416_A_Scyl2
  gRNA
atgtacgccgtgtttaatca

SEQ ID NO: 47417 - DNA, 20 bp, Artificial Sequence
  MKO10047417_A_Scyl3
  gRNA
aggcatcccgggcgtggccg

SEQ ID NO: 47418 - DNA, 20 bp, Artificial Sequence
  MKO10047418_A_Scyl3
  gRNA
ccgagtcccacggccacgcc

SEQ ID NO: 47419 - DNA, 20 bp, Artificial Sequence
  MKO10047419_A_Scyl3
  gRNA
cactcacaaaaacagacgac

SEQ ID NO: 47420 - DNA, 20 bp, Artificial Sequence
  MKO10047420_A_Sdad1
  gRNA
gcatctcagtaacttcccgc

SEQ ID NO: 47421 - DNA, 20 bp, Artificial Sequence
  MKO10047421_A_Sdad1
  gRNA
cttcctaccatgcggagatc

SEQ ID NO: 47422 - DNA, 20 bp, Artificial Sequence
  MKO10047422_A_Sdad1
  gRNA
gctggtgatgttcatggcgc

SEQ ID NO: 47423 - DNA, 20 bp, Artificial Sequence
  MKO10047423_A_Sdc1
  gRNA
attccgcaggccgggctcta

SEQ ID NO: 47424 - DNA, 20 bp, Artificial Sequence
  MKO10047424_A_Sdc1
  gRNA
actgccaatcagcttcccgc

SEQ ID NO: 47425 - DNA, 20 bp, Artificial Sequence
  MKO10047425_A_Sdc1
  gRNA
cctgcggaatcagcccccgg

SEQ ID NO: 47426 - DNA, 20 bp, Artificial Sequence
  MKO10047426_A_Sdc2
  gRNA
cttatctcagccgtcattgc

SEQ ID NO: 47427 - DNA, 20 bp, Artificial Sequence
  MKO10047427_A_Sdc2
  gRNA
tgccttctggtaagctgcgc

SEQ ID NO: 47428 - DNA, 20 bp, Artificial Sequence
  MKO10047428_A_Sdc2
  gRNA
aacagagctgacatccgata

SEQ ID NO: 47429 - DNA, 20 bp, Artificial Sequence
  MKO10047429_A_Sdc3
  gRNA
tgaaccgcatggccgtctca

SEQ ID NO: 47430 - DNA, 20 bp, Artificial Sequence
  MKO10047430_A_Sdc3
  gRNA
ccacgacaatgccatcgatt

SEQ ID NO: 47431 - DNA, 20 bp, Artificial Sequence
  MKO10047431_A_Sdc3
  gRNA
tacgtcagccacggtagccg

SEQ ID NO: 47432 - DNA, 20 bp, Artificial Sequence
  MKO10047432_A_Sdc4
  gRNA
gccgccagcatcttcgtcgt

SEQ ID NO: 47433 - DNA, 20 bp, Artificial Sequence
  MKO10047433_A_Sdc4
  gRNA
catgtcatcccccacgtcgg

SEQ ID NO: 47434 - DNA, 20 bp, Artificial Sequence
  MKO10047434_A_Sdc4
  gRNA
tacctttgcagatgacacgg

SEQ ID NO: 47435 - DNA, 20 bp, Artificial Sequence
  MKO10047435_A_Sdcbp2
  gRNA
caagactggacttcgcctgc

SEQ ID NO: 47436 - DNA, 20 bp, Artificial Sequence
  MKO10047436_A_Sdcbp2
  gRNA
tctctgcacgcagtataccc

SEQ ID NO: 47437 - DNA, 20 bp, Artificial Sequence
  MKO10047437_A_Sdcbp2
  gRNA
agtcacagccatcaatttgc

SEQ ID NO: 47438 - DNA, 20 bp, Artificial Sequence
  MKO10047438_A_Sdcbp
  gRNA
cctgtgacaggtaacgatgc

SEQ ID NO: 47439 - DNA, 20 bp, Artificial Sequence
  MKO10047439_A_Sdcbp
  gRNA
ccagcatcgttacctgtcac

SEQ ID NO: 47440 - DNA, 20 bp, Artificial Sequence
  MKO10047440_A_Sdcbp
  gRNA
cgccagccaagcatttgttc

SEQ ID NO: 47441 - DNA, 20 bp, Artificial Sequence
  MKO10047441_A_Sdccag3
  gRNA
agggcgcgccccctctatcg

SEQ ID NO: 47442 - DNA, 20 bp, Artificial Sequence
  MKO10047442_A_Sdccag3
  gRNA
ctccgcgtccgcgatagagg

SEQ ID NO: 47443 - DNA, 20 bp, Artificial Sequence
  MKO10047443_A_Sdccag3
  gRNA
aacctacttgccatctgccg

SEQ ID NO: 47444 - DNA, 20 bp, Artificial Sequence
  MKO10047444_A_Sdccag8
  gRNA
cggccgtcagaatgtgacga

SEQ ID NO: 47445 - DNA, 20 bp, Artificial Sequence
  MKO10047445_A_Sdccag8
  gRNA
ggggacaactttcgtcttcg

SEQ ID NO: 47446 - DNA, 20 bp, Artificial Sequence
  MKO10047446_A_Sdccag8
  gRNA
tgagactggtcgttaatgat

SEQ ID NO: 47447 - DNA, 20 bp, Artificial Sequence
  MKO10047447_A_Sde2
  gRNA
gcatggagccgtgtacagtt

SEQ ID NO: 47448 - DNA, 20 bp, Artificial Sequence
  MKO10047448_A_Sde2
  gRNA
cctcgttaatgccggtgata

SEQ ID NO: 47449 - DNA, 20 bp, Artificial Sequence
  MKO10047449_A_Sde2
  gRNA
gggtctatgcttcgagcact

SEQ ID NO: 47450 - DNA, 20 bp, Artificial Sequence
  MKO10047450_A_Sdf2l1
  gRNA
gcgaatccgccagtaactat

SEQ ID NO: 47451 - DNA, 20 bp, Artificial Sequence
  MKO10047451_A_Sdf2l1
  gRNA
gtcgccgctatccaacaacc

SEQ ID NO: 47452 - DNA, 20 bp, Artificial Sequence
  MKO10047452_A_Sdf2l1
  gRNA
ggtagcggggccaacgctgc

SEQ ID NO: 47453 - DNA, 20 bp, Artificial Sequence
  MKO10047453_A_Sdf2
  gRNA
tgtcgttacttgcggctccg

SEQ ID NO: 47454 - DNA, 20 bp, Artificial Sequence
  MKO10047454_A_Sdf2
  gRNA
cgctgtgggagcgtccaaca

SEQ ID NO: 47455 - DNA, 20 bp, Artificial Sequence
  MKO10047455_A_Sdf2
  gRNA
cagtacggacgacccataag

SEQ ID NO: 47456 - DNA, 20 bp, Artificial Sequence
  MKO10047456_A_Sdf4
  gRNA
cccactgtaccgtcaccgtc

SEQ ID NO: 47457 - DNA, 20 bp, Artificial Sequence
  MKO10047457_A_Sdf4
  gRNA
cctcagagaccgatggtatc

SEQ ID NO: 47458 - DNA, 20 bp, Artificial Sequence
  MKO10047458_A_Sdf4
  gRNA
gggtagacgtgaacactgac

SEQ ID NO: 47459 - DNA, 20 bp, Artificial Sequence
  MKO10047459_A_Sdhaf1
  gRNA
gtatcgagtatctgtatcgc

SEQ ID NO: 47460 - DNA, 20 bp, Artificial Sequence
  MKO10047460_A_Sdhaf1
  gRNA
gcgcgggagacgcgatccga

SEQ ID NO: 47461 - DNA, 20 bp, Artificial Sequence
  MKO10047461_A_Sdhaf1
  gRNA
taccgcgagctgctgcgcgc

SEQ ID NO: 47462 - DNA, 20 bp, Artificial Sequence
  MKO10047462_A_Sdhaf2
  gRNA
cgttaatcaggcgatcatag

SEQ ID NO: 47463 - DNA, 20 bp, Artificial Sequence
  MKO10047463_A_Sdhaf2
  gRNA
ggtcaccttgatcccgacgc

SEQ ID NO: 47464 - DNA, 20 bp, Artificial Sequence
  MKO10047464_A_Sdhaf2
  gRNA
tctctcacccgcgccagcgt

SEQ ID NO: 47465 - DNA, 20 bp, Artificial Sequence
  MKO10047465_A_Sdha
  gRNA
ctccgactggctgggggatc

SEQ ID NO: 47466 - DNA, 20 bp, Artificial Sequence
  MKO10047466_A_Sdha
  gRNA
aagatttatcagcgtgcatt

SEQ ID NO: 47467 - DNA, 20 bp, Artificial Sequence
  MKO10047467_A_Sdha
  gRNA
tcactcttacacacgttgta

SEQ ID NO: 47468 - DNA, 20 bp, Artificial Sequence
  MKO10047468_A_Sdhb
  gRNA
acctcgtacgtctgcattcg

SEQ ID NO: 47469 - DNA, 20 bp, Artificial Sequence
  MKO10047469_A_Sdhb
  gRNA
acctcgaatgcagacgtacg

SEQ ID NO: 47470 - DNA, 20 bp, Artificial Sequence
  MKO10047470_A_Sdhb
  gRNA
ctccatcaggtgcggaccta

SEQ ID NO: 47471 - DNA, 20 bp, Artificial Sequence
  MKO10047471_A_Sdhc
  gRNA
tccgtttgccaccgaggctc

SEQ ID NO: 47472 - DNA, 20 bp, Artificial Sequence
  MKO10047472_A_Sdhc
  gRNA
gtcggatcccattcagtgag

SEQ ID NO: 47473 - DNA, 20 bp, Artificial Sequence
  MKO10047473_A_Sdhc
  gRNA
ttagccgagtagatcagtgt

SEQ ID NO: 47474 - DNA, 20 bp, Artificial Sequence
  MKO10047474_A_Sdhd
  gRNA
ctctgcagatgccgacatcg

SEQ ID NO: 47475 - DNA, 20 bp, Artificial Sequence
  MKO10047475_A_Sdhd
  gRNA
gctgggtaccacaccgtcct

SEQ ID NO: 47476 - DNA, 20 bp, Artificial Sequence
  MKO10047476_A_Sdhd
  gRNA
agtcggtaaccacttgtcca

SEQ ID NO: 47477 - DNA, 20 bp, Artificial Sequence
  MKO10047477_A_Sdk1
  gRNA
agaactcacgtgctacgctc

SEQ ID NO: 47478 - DNA, 20 bp, Artificial Sequence
  MKO10047478_A_Sdk1
  gRNA
tcctgttccgcaccacgcag

SEQ ID NO: 47479 - DNA, 20 bp, Artificial Sequence
  MKO10047479_A_Sdk1
  gRNA
catcactcgctgttgtagca

SEQ ID NO: 47480 - DNA, 20 bp, Artificial Sequence
  MKO10047480_A_Sdk2
  gRNA
ttcggttacgcacgatgcag

SEQ ID NO: 47481 - DNA, 20 bp, Artificial Sequence
  MKO10047481_A_Sdk2
  gRNA
catcgggagccaccgtcgac

SEQ ID NO: 47482 - DNA, 20 bp, Artificial Sequence
  MKO10047482_A_Sdk2
  gRNA
ctgcatcgtgcgtaaccgaa

SEQ ID NO: 47483 - DNA, 20 bp, Artificial Sequence
  MKO10047483_A_Sdpr
  gRNA
tcaacatgctggacgccgtg

SEQ ID NO: 47484 - DNA, 20 bp, Artificial Sequence
  MKO10047484_A_Sdpr
  gRNA
tgacgaattgccccgtgatg

SEQ ID NO: 47485 - DNA, 20 bp, Artificial Sequence
  MKO10047485_A_Sdpr
  gRNA
acggggcaattcgtcatcag

SEQ ID NO: 47486 - DNA, 20 bp, Artificial Sequence
  MKO10047486_A_Sdr16c5
  gRNA
gcaagtaaattcgcagccct

SEQ ID NO: 47487 - DNA, 20 bp, Artificial Sequence
  MKO10047487_A_Sdr16c5
  gRNA
tatacaagtagagctgctcc

SEQ ID NO: 47488 - DNA, 20 bp, Artificial Sequence
  MKO10047488_A_Sdr16c5
  gRNA
tctatcctcatcaacaatgc

SEQ ID NO: 47489 - DNA, 20 bp, Artificial Sequence
  MKO10047489_A_Sdr16c6
  gRNA
tcaagcatagcaggactcgt

SEQ ID NO: 47490 - DNA, 20 bp, Artificial Sequence
  MKO10047490_A_Sdr16c6
  gRNA
ctatgcttgaaatacagacc

SEQ ID NO: 47491 - DNA, 20 bp, Artificial Sequence
  MKO10047491_A_Sdr16c6
  gRNA
aaagtcattcctcaatactc

SEQ ID NO: 47492 - DNA, 20 bp, Artificial Sequence
  MKO10047492_A_Sdr39u1
  gRNA
ctggcccgggtcgaatcacg

SEQ ID NO: 47493 - DNA, 20 bp, Artificial Sequence
  MKO10047493_A_Sdr39u1
  gRNA
cctacccacgtgattcgacc

SEQ ID NO: 47494 - DNA, 20 bp, Artificial Sequence
  MKO10047494_A_Sdr39u1
  gRNA
cacctgaacgtaccacgacc

SEQ ID NO: 47495 - DNA, 20 bp, Artificial Sequence
  MKO10047495_A_Sdr42e1
  gRNA
tatccgctgcctcgctgacg

SEQ ID NO: 47496 - DNA, 20 bp, Artificial Sequence
  MKO10047496_A_Sdr42e1
  gRNA
ccacgttgacctcttcgatc

SEQ ID NO: 47497 - DNA, 20 bp, Artificial Sequence
  MKO10047497_A_Sdr42e1
  gRNA
tgtctcacatggactcccca

SEQ ID NO: 47498 - DNA, 20 bp, Artificial Sequence
  MKO10047498_A_Sdr9c7
  gRNA
ccagggttgtagcggattcg

SEQ ID NO: 47499 - DNA, 20 bp, Artificial Sequence
  MKO10047499_A_Sdr9c7
  gRNA
ttccttgacgttctccgact

SEQ ID NO: 47500 - DNA, 20 bp, Artificial Sequence
  MKO10047500_A_Sdr9c7
  gRNA
ccccgaatccgctacaaccc

SEQ ID NO: 47501 - DNA, 20 bp, Artificial Sequence
  MKO10047501_A_Sdsl
  gRNA
cgtttgaccatccccttata

SEQ ID NO: 47502 - DNA, 20 bp, Artificial Sequence
  MKO10047502_A_Sdsl
  gRNA
aattgaaactgtgcgccccg

SEQ ID NO: 47503 - DNA, 20 bp, Artificial Sequence
  MKO10047503_A_Sdsl
  gRNA
tgcatactcggctcgtaagc

SEQ ID NO: 47504 - DNA, 20 bp, Artificial Sequence
  MKO10047504_A_Sds
  gRNA
tggcgaccgcctacgctgcc

SEQ ID NO: 47505 - DNA, 20 bp, Artificial Sequence
  MKO10047505_A_Sds
  gRNA
ggtgttgggcacaacgatag

SEQ ID NO: 47506 - DNA, 20 bp, Artificial Sequence
  MKO10047506_A_Sds
  gRNA
ggatgtgcccatcatcgcca

SEQ ID NO: 47507 - DNA, 20 bp, Artificial Sequence
  MKO10047507_A_Sebox
  gRNA
tggagcgggtatttgcagct

SEQ ID NO: 47508 - DNA, 20 bp, Artificial Sequence
  MKO10047508_A_Sebox
  gRNA
cactttcagtgtcgggcagt

SEQ ID NO: 47509 - DNA, 20 bp, Artificial Sequence
  MKO10047509_A_Sebox
  gRNA
acccaaaatggggcctaggc

SEQ ID NO: 47510 - DNA, 20 bp, Artificial Sequence
  MKO10047510_A_Sec11a
  gRNA
acgatctcccccacgcgtat

SEQ ID NO: 47511 - DNA, 20 bp, Artificial Sequence
  MKO10047511_A_Sec11a
  gRNA
agttgaagatcctatacgcg

SEQ ID NO: 47512 - DNA, 20 bp, Artificial Sequence
  MKO10047512_A_Sec11a
  gRNA
atcgtcacaattccaatgta

SEQ ID NO: 47513 - DNA, 20 bp, Artificial Sequence
  MKO10047513_A_Sec11c
  gRNA
ggtcctcccggaaattcgtg

SEQ ID NO: 47514 - DNA, 20 bp, Artificial Sequence
  MKO10047514_A_Sec11c
  gRNA
gagcgcagaagacacgatca

SEQ ID NO: 47515 - DNA, 20 bp, Artificial Sequence
  MKO10047515_A_Sec11c
  gRNA
cagcgagagtcccatcgtgg

SEQ ID NO: 47516 - DNA, 20 bp, Artificial Sequence
  MKO10047516_A_Sec13
  gRNA
atcctcatcgcagacctcag

SEQ ID NO: 47517 - DNA, 20 bp, Artificial Sequence
  MKO10047517_A_Sec13
  gRNA
agtcgtgtcccgagtgctca

SEQ ID NO: 47518 - DNA, 20 bp, Artificial Sequence
  MKO10047518_A_Sec13
  gRNA
gcccaggccacttgccatac

SEQ ID NO: 47519 - DNA, 20 bp, Artificial Sequence
  MKO10047519_A_Sec14l1
  gRNA
gatgtttatacacccgcact

SEQ ID NO: 47520 - DNA, 20 bp, Artificial Sequence
  MKO10047520_A_Sec14l1
  gRNA
gggctcttcatgtcatcgag

SEQ ID NO: 47521 - DNA, 20 bp, Artificial Sequence
  MKO10047521_A_Sec14l1
  gRNA
acttgcagactgttcgaaac

SEQ ID NO: 47522 - DNA, 20 bp, Artificial Sequence
  MKO10047522_A_Sec14l2
  gRNA
ccgatgatgtcgtaccagac

SEQ ID NO: 47523 - DNA, 20 bp, Artificial Sequence
  MKO10047523_A_Sec14l2
  gRNA
cggcagatgtggctacgact

SEQ ID NO: 47524 - DNA, 20 bp, Artificial Sequence
  MKO10047524_A_Sec14l2
  gRNA
gatgctcacctttcggagca

SEQ ID NO: 47525 - DNA, 20 bp, Artificial Sequence
  MKO10047525_A_Sec14l3
  gRNA
ggtatttaccttgcggagca

SEQ ID NO: 47526 - DNA, 20 bp, Artificial Sequence
  MKO10047526_A_Sec14l3
  gRNA
acatcgatcacatccttgac

SEQ ID NO: 47527 - DNA, 20 bp, Artificial Sequence
  MKO10047527_A_Sec14l3
  gRNA
catcacggtcatagccacac

SEQ ID NO: 47528 - DNA, 20 bp, Artificial Sequence
  MKO10047528_A_Sec14l4
  gRNA
cctctggtgcctgccacgtc

SEQ ID NO: 47529 - DNA, 20 bp, Artificial Sequence
  MKO10047529_A_Sec14l4
  gRNA
cacctcggagccatcgcaga

SEQ ID NO: 47530 - DNA, 20 bp, Artificial Sequence
  MKO10047530_A_Sec14l4
  gRNA
atgactacttccttctgcga

SEQ ID NO: 47531 - DNA, 20 bp, Artificial Sequence
  MKO10047531_A_Sec14l5
  gRNA
cacagacctaccatccgcta

SEQ ID NO: 47532 - DNA, 20 bp, Artificial Sequence
  MKO10047532_A_Sec14l5
  gRNA
cggacgtcctcctcctggac

SEQ ID NO: 47533 - DNA, 20 bp, Artificial Sequence
  MKO10047533_A_Sec14l5
  gRNA
tgcgagccgagtgacagtga

SEQ ID NO: 47534 - DNA, 20 bp, Artificial Sequence
  MKO10047534_A_Sec16a
  gRNA
acgatgacgctgagatccac

SEQ ID NO: 47535 - DNA, 20 bp, Artificial Sequence
  MKO10047535_A_Sec16a
  gRNA
aggtatgaccctcgcttcac

SEQ ID NO: 47536 - DNA, 20 bp, Artificial Sequence
  MKO10047536_A_Sec16a
  gRNA
gttactatgggtctcgcctt

SEQ ID NO: 47537 - DNA, 20 bp, Artificial Sequence
  MKO10047537_A_Sec16b
  gRNA
ggtaccacactccgacaccg

SEQ ID NO: 47538 - DNA, 20 bp, Artificial Sequence
  MKO10047538_A_Sec16b
  gRNA
ggtacttcggcgagcatcat

SEQ ID NO: 47539 - DNA, 20 bp, Artificial Sequence
  MKO10047539_A_Sec16b
  gRNA
gatgctcgccgaagtacctc

SEQ ID NO: 47540 - DNA, 20 bp, Artificial Sequence
  MKO10047540_A_Sec1
  gRNA
ggtcatagttgtcgtcgtcg

SEQ ID NO: 47541 - DNA, 20 bp, Artificial Sequence
  MKO10047541_A_Sec1
  gRNA
cgcctcatcctgaaccgcca

SEQ ID NO: 47542 - DNA, 20 bp, Artificial Sequence
  MKO10047542_A_Sec1
  gRNA
aggcaagccgtccattcatc

SEQ ID NO: 47543 - DNA, 20 bp, Artificial Sequence
  MKO10047543_A_Sec22a
  gRNA
agcagcgatataataatccc

SEQ ID NO: 47544 - DNA, 20 bp, Artificial Sequence
  MKO10047544_A_Sec22a
  gRNA
gaaacctacctggtaaaggc

SEQ ID NO: 47545 - DNA, 20 bp, Artificial Sequence
  MKO10047545_A_Sec22a
  gRNA
tacctgcaggaggctttcta

SEQ ID NO: 47546 - DNA, 20 bp, Artificial Sequence
  MKO10047546_A_Sec22b
  gRNA
ctccagctacattattgagc

SEQ ID NO: 47547 - DNA, 20 bp, Artificial Sequence
  MKO10047547_A_Sec22b
  gRNA
gcggtatttcttagatagac

SEQ ID NO: 47548 - DNA, 20 bp, Artificial Sequence
  MKO10047548_A_Sec22b
  gRNA
ccctattccttcatcgagtt

SEQ ID NO: 47549 - DNA, 20 bp, Artificial Sequence
  MKO10047549_A_Sec22c
  gRNA
tcctacgacaccacctgcgt

SEQ ID NO: 47550 - DNA, 20 bp, Artificial Sequence
  MKO10047550_A_Sec22c
  gRNA
ccgggaggccaggccaacgc

SEQ ID NO: 47551 - DNA, 20 bp, Artificial Sequence
  MKO10047551_A_Sec22c
  gRNA
gaactccacggatgaggttc

SEQ ID NO: 47552 - DNA, 20 bp, Artificial Sequence
  MKO10047552_A_Sec23a
  gRNA
ctgtacctgaggaccgcgtg

SEQ ID NO: 47553 - DNA, 20 bp, Artificial Sequence
  MKO10047553_A_Sec23a
  gRNA
agcaaccgcctccttccaat

SEQ ID NO: 47554 - DNA, 20 bp, Artificial Sequence
  MKO10047554_A_Sec23a
  gRNA
aaggctcaacgacatctgca

SEQ ID NO: 47555 - DNA, 20 bp, Artificial Sequence
  MKO10047555_A_Sec23b
  gRNA
caaaagtgatgagaccaacc

SEQ ID NO: 47556 - DNA, 20 bp, Artificial Sequence
  MKO10047556_A_Sec23b
  gRNA
cacaattgagtacatgatcc

SEQ ID NO: 47557 - DNA, 20 bp, Artificial Sequence
  MKO10047557_A_Sec23b
  gRNA
ccctcggaagacatagctct

SEQ ID NO: 47558 - DNA, 20 bp, Artificial Sequence
  MKO10047558_A_Sec23ip
  gRNA
gaaacgcactcagcgcatct

SEQ ID NO: 47559 - DNA, 20 bp, Artificial Sequence
  MKO10047559_A_Sec23ip
  gRNA
aaatcagtggcaccgcagac

SEQ ID NO: 47560 - DNA, 20 bp, Artificial Sequence
  MKO10047560_A_Sec23ip
  gRNA
ctgacaggagtgtggcgata

SEQ ID NO: 47561 - DNA, 20 bp, Artificial Sequence
  MKO10047561_A_Sec24a
  gRNA
agccgccgtagatccattat

SEQ ID NO: 47562 - DNA, 20 bp, Artificial Sequence
  MKO10047562_A_Sec24a
  gRNA
gtagctccaccaactctacc

SEQ ID NO: 47563 - DNA, 20 bp, Artificial Sequence
  MKO10047563_A_Sec24a
  gRNA
ttctctgcacagtcgaacta

SEQ ID NO: 47564 - DNA, 20 bp, Artificial Sequence
  MKO10047564_A_Sec24b
  gRNA
atcccatttggtttcggatg

SEQ ID NO: 47565 - DNA, 20 bp, Artificial Sequence
  MKO10047565_A_Sec24b
  gRNA
gcccaacagttacgatgcct

SEQ ID NO: 47566 - DNA, 20 bp, Artificial Sequence
  MKO10047566_A_Sec24b
  gRNA
cagcctcatccgaaaccaaa

SEQ ID NO: 47567 - DNA, 20 bp, Artificial Sequence
  MKO10047567_A_Sec24c
  gRNA
gtgaggacacgtggttagcc

SEQ ID NO: 47568 - DNA, 20 bp, Artificial Sequence
  MKO10047568_A_Sec24c
  gRNA
ccttgtggtcagactacata

SEQ ID NO: 47569 - DNA, 20 bp, Artificial Sequence
  MKO10047569_A_Sec24c
  gRNA
tcagggtccagacgcttagg

SEQ ID NO: 47570 - DNA, 20 bp, Artificial Sequence
  MKO10047570_A_Sec24d
  gRNA
gtggtgccggcccagccatc

SEQ ID NO: 47571 - DNA, 20 bp, Artificial Sequence
  MKO10047571_A_Sec24d
  gRNA
cccccacagtttggccccaa

SEQ ID NO: 47572 - DNA, 20 bp, Artificial Sequence
  MKO10047572_A_Sec24d
  gRNA
gagaggcaccagggccgttc

SEQ ID NO: 47573 - DNA, 20 bp, Artificial Sequence
  MKO10047573_A_Sec31a
  gRNA
ggtccagctcgaatatctcg

SEQ ID NO: 47574 - DNA, 20 bp, Artificial Sequence
  MKO10047574_A_Sec31a
  gRNA
ttccctcgagatattcgagc

SEQ ID NO: 47575 - DNA, 20 bp, Artificial Sequence
  MKO10047575_A_Sec31a
  gRNA
taaggtaccacaagttgatc

SEQ ID NO: 47576 - DNA, 20 bp, Artificial Sequence
  MKO10047576_A_Sec31b
  gRNA
ccacaccaccgccttgccgc

SEQ ID NO: 47577 - DNA, 20 bp, Artificial Sequence
  MKO10047577_A_Sec31b
  gRNA
ttccgctcaccccagcggca

SEQ ID NO: 47578 - DNA, 20 bp, Artificial Sequence
  MKO10047578_A_Sec31b
  gRNA
gtaggtttcacaagctaata

SEQ ID NO: 47579 - DNA, 20 bp, Artificial Sequence
  MKO10047579_A_Sec61a1
  gRNA
actcagctgacccgttctac

SEQ ID NO: 47580 - DNA, 20 bp, Artificial Sequence
  MKO10047580_A_Sec61a1
  gRNA
ccttcctcaaggtaccttaa

SEQ ID NO: 47581 - DNA, 20 bp, Artificial Sequence
  MKO10047581_A_Sec61a1
  gRNA
tccggcaagatgacacagaa

SEQ ID NO: 47582 - DNA, 20 bp, Artificial Sequence
  MKO10047582_A_Sec61a2
  gRNA
atttccccaattgtaacgtc

SEQ ID NO: 47583 - DNA, 20 bp, Artificial Sequence
  MKO10047583_A_Sec61a2
  gRNA
atcaaaccagacgttacaat

SEQ ID NO: 47584 - DNA, 20 bp, Artificial Sequence
  MKO10047584_A_Sec61a2
  gRNA
atgtttcagattccgctgtt

SEQ ID NO: 47585 - DNA, 20 bp, Artificial Sequence
  MKO10047585_A_Sec61b
  gRNA
cacttacctctgccgaacag

SEQ ID NO: 47586 - DNA, 20 bp, Artificial Sequence
  MKO10047586_A_Sec61b
  gRNA
acgacttacactttgagccc

SEQ ID NO: 47587 - DNA, 20 bp, Artificial Sequence
  MKO10047587_A_Sec61b
  gRNA
caggggccctgtcccagtgc

SEQ ID NO: 47588 - DNA, 20 bp, Artificial Sequence
  MKO10047588_A_Sec61g
  gRNA
agaaccgagcccaacggaac

SEQ ID NO: 47589 - DNA, 20 bp, Artificial Sequence
  MKO10047589_A_Sec61g
  gRNA
ttgccagcttccggttccgt

SEQ ID NO: 47590 - DNA, 20 bp, Artificial Sequence
  MKO10047590_A_Sec61g
  gRNA
tgcaccaaacccgacagaaa

SEQ ID NO: 47591 - DNA, 20 bp, Artificial Sequence
  MKO10047591_A_Sec62
  gRNA
gtagtcgaccacagactccc

SEQ ID NO: 47592 - DNA, 20 bp, Artificial Sequence
  MKO10047592_A_Sec62
  gRNA
aggacgctttatttacaacc

SEQ ID NO: 47593 - DNA, 20 bp, Artificial Sequence
  MKO10047593_A_Sec62
  gRNA
aacccgatgacccatcatgt

SEQ ID NO: 47594 - DNA, 20 bp, Artificial Sequence
  MKO10047594_A_Sec63
  gRNA
gatgtatgtggtatcgttta

SEQ ID NO: 47595 - DNA, 20 bp, Artificial Sequence
  MKO10047595_A_Sec63
  gRNA
acttcatcacctcctttatc

SEQ ID NO: 47596 - DNA, 20 bp, Artificial Sequence
  MKO10047596_A_Sec63
  gRNA
ttgatattctcggtctgttt

SEQ ID NO: 47597 - DNA, 20 bp, Artificial Sequence
  MKO10047597_A_Secisbp2l
  gRNA
ccgatcaaaaattgtgcttc

SEQ ID NO: 47598 - DNA, 20 bp, Artificial Sequence
  MKO10047598_A_Secisbp2l
  gRNA
tatataacaacgatatacga

SEQ ID NO: 47599 - DNA, 20 bp, Artificial Sequence
  MKO10047599_A_Secisbp2l
  gRNA
gacgaacggctccacttcag

SEQ ID NO: 47600 - DNA, 20 bp, Artificial Sequence
  MKO10047600_A_Secisbp2
  gRNA
cggcaagcccgtcgcagata

SEQ ID NO: 47601 - DNA, 20 bp, Artificial Sequence
  MKO10047601_A_Secisbp2
  gRNA
ttgccgacgtctcctaggag

SEQ ID NO: 47602 - DNA, 20 bp, Artificial Sequence
  MKO10047602_A_Secisbp2
  gRNA
ccattcgtccctaagtttgc

SEQ ID NO: 47603 - DNA, 20 bp, Artificial Sequence
  MKO10047603_A_Sectm1a
  gRNA
cgcgaagagctctccaatag

SEQ ID NO: 47604 - DNA, 20 bp, Artificial Sequence
  MKO10047604_A_Sectm1a
  gRNA
aggatgccctccgtgcagat

SEQ ID NO: 47605 - DNA, 20 bp, Artificial Sequence
  MKO10047605_A_Sectm1a
  gRNA
aaacttctcttggcgtgggt

SEQ ID NO: 47606 - DNA, 20 bp, Artificial Sequence
  MKO10047606_A_Sectm1b
  gRNA
ttatcagggaccttagtgac

SEQ ID NO: 47607 - DNA, 20 bp, Artificial Sequence
  MKO10047607_A_Sectm1b
  gRNA
ctccgacttaccatggttat

SEQ ID NO: 47608 - DNA, 20 bp, Artificial Sequence
  MKO10047608_A_Sectm1b
  gRNA
cagagacgtcaccattgagt

SEQ ID NO: 47609 - DNA, 20 bp, Artificial Sequence
  MKO10047609_A_Seh1l
  gRNA
tcatccccccatgatcgctg

SEQ ID NO: 47610 - DNA, 20 bp, Artificial Sequence
  MKO10047610_A_Seh1l
  gRNA
gaatcaaacgataaacttcg

SEQ ID NO: 47611 - DNA, 20 bp, Artificial Sequence
  MKO10047611_A_Seh1l
  gRNA
ttgaccgaacagcagctgta

SEQ ID NO: 47612 - DNA, 20 bp, Artificial Sequence
  MKO10047612_A_Sel1l2
  gRNA
gtatgatccttctttagcca

SEQ ID NO: 47613 - DNA, 20 bp, Artificial Sequence
  MKO10047613_A_Sel1l2
  gRNA
tgctctggtgaagagtgtgt

SEQ ID NO: 47614 - DNA, 20 bp, Artificial Sequence
  MKO10047614_A_Sel1l2
  gRNA
aatgggcaacaagattctcc

SEQ ID NO: 47615 - DNA, 20 bp, Artificial Sequence
  MKO10047615_A_Sel1l3
  gRNA
aaggcgggaccgtctgcagc

SEQ ID NO: 47616 - DNA, 20 bp, Artificial Sequence
  MKO10047616_A_Sel1l3
  gRNA
gtgggatcctattggcccag

SEQ ID NO: 47617 - DNA, 20 bp, Artificial Sequence
  MKO10047617_A_Sel1l3
  gRNA
acatggggtagtccacgcgc

SEQ ID NO: 47618 - DNA, 20 bp, Artificial Sequence
  MKO10047618_A_Sel1l
  gRNA
tcgatactgacccgaggtcg

SEQ ID NO: 47619 - DNA, 20 bp, Artificial Sequence
  MKO10047619_A_Sel1l
  gRNA
accacgggcaaagtagttgc

SEQ ID NO: 47620 - DNA, 20 bp, Artificial Sequence
  MKO10047620_A_Sel1l
  gRNA
gcaggatgcaggtccgcgtc

SEQ ID NO: 47621 - DNA, 20 bp, Artificial Sequence
  MKO10047621_A_Selenbp1
  gRNA
caaactgctcacgttgcact

SEQ ID NO: 47622 - DNA, 20 bp, Artificial Sequence
  MKO10047622_A_Selenbp1
  gRNA
agaagtcatggtcagcacct

SEQ ID NO: 47623 - DNA, 20 bp, Artificial Sequence
  MKO10047623_A_Selenbp1
  gRNA
tccaggttactccacccctc

SEQ ID NO: 47624 - DNA, 20 bp, Artificial Sequence
  MKO10047624_A_Selenbp2
  gRNA
cgtattgctcacgttgcact

SEQ ID NO: 47625 - DNA, 20 bp, Artificial Sequence
  MKO10047625_A_Selenbp2
  gRNA
tacgcacaccagccactgcc

SEQ ID NO: 47626 - DNA, 20 bp, Artificial Sequence
  MKO10047626_A_Selenbp2
  gRNA
catgtcctcccgcatctacg

SEQ ID NO: 47627 - DNA, 20 bp, Artificial Sequence
  MKO10047627_A_Sele
  gRNA
accgtgcggtgtacgtcctc

SEQ ID NO: 47628 - DNA, 20 bp, Artificial Sequence
  MKO10047628_A_Sele
  gRNA
cgaacgggtgggagcagttc

SEQ ID NO: 47629 - DNA, 20 bp, Artificial Sequence
  MKO10047629_A_Sele
  gRNA
aacgagacgccatcatgcaa

SEQ ID NO: 47630 - DNA, 20 bp, Artificial Sequence
  MKO10047630_A_Selk
  gRNA
taattctgtaggtcaggtgt

SEQ ID NO: 47631 - DNA, 20 bp, Artificial Sequence
  MKO10047631_A_Selk
  gRNA
ttccccagaagaagtctgtt

SEQ ID NO: 47632 - DNA, 20 bp, Artificial Sequence
  MKO10047632_A_Selk
  gRNA
ccctcttccatcgtcgtatc

SEQ ID NO: 47633 - DNA, 20 bp, Artificial Sequence
  MKO10047633_A_Sell
  gRNA
tgacgcctgtcacaaacgaa

SEQ ID NO: 47634 - DNA, 20 bp, Artificial Sequence
  MKO10047634_A_Sell
  gRNA
gtgtggagatctatatcaag

SEQ ID NO: 47635 - DNA, 20 bp, Artificial Sequence
  MKO10047635_A_Sell
  gRNA
gtctggacactgctctgttg

SEQ ID NO: 47636 - DNA, 20 bp, Artificial Sequence
  MKO10047636_A_Selm
  gRNA
ggggcttagcgggcgcccac

SEQ ID NO: 47637 - DNA, 20 bp, Artificial Sequence
  MKO10047637_A_Selm
  gRNA
gctgttaagccgaaattacc

SEQ ID NO: 47638 - DNA, 20 bp, Artificial Sequence
  MKO10047638_A_Selm
  gRNA
atgacagttgaatcgcctaa

SEQ ID NO: 47639 - DNA, 20 bp, Artificial Sequence
  MKO10047639_A_Selo
  gRNA
actcacggatgcttgaccgc

SEQ ID NO: 47640 - DNA, 20 bp, Artificial Sequence
  MKO10047640_A_Selo
  gRNA
gatatcatctcgtcccacgc

SEQ ID NO: 47641 - DNA, 20 bp, Artificial Sequence
  MKO10047641_A_Selo
  gRNA
tgtagactcagacgtgacgc

SEQ ID NO: 47642 - DNA, 20 bp, Artificial Sequence
  MKO10047642_A_Selplg
  gRNA
ctcggaggttccagcgctcg

SEQ ID NO: 47643 - DNA, 20 bp, Artificial Sequence
  MKO10047643_A_Selplg
  gRNA
gagagagattccacgagcgc

SEQ ID NO: 47644 - DNA, 20 bp, Artificial Sequence
  MKO10047644_A_Selplg
  gRNA
cgtccaaccagcatccacag

SEQ ID NO: 47645 - DNA, 20 bp, Artificial Sequence
  MKO10047645_A_Selp
  gRNA
aataaccccccgaagtgtga

SEQ ID NO: 47646 - DNA, 20 bp, Artificial Sequence
  MKO10047646_A_Selp
  gRNA
acccggcgagctgcaatgtt

SEQ ID NO: 47647 - DNA, 20 bp, Artificial Sequence
  MKO10047647_A_Selp
  gRNA
actccggagtcttggcgtcc

SEQ ID NO: 47648 - DNA, 20 bp, Artificial Sequence
  MKO10047648_A_Selrc1
  gRNA
agtcggaatcatggcgggct

SEQ ID NO: 47649 - DNA, 20 bp, Artificial Sequence
  MKO10047649_A_Selrc1
  gRNA
gcttattacgtgactggcaa

SEQ ID NO: 47650 - DNA, 20 bp, Artificial Sequence
  MKO10047650_A_Selrc1
  gRNA
cagtagtccaacgttgtgac

SEQ ID NO: 47651 - DNA, 20 bp, Artificial Sequence
  MKO10047651_A_Selt
  gRNA
tgtactcctcaaacacccgc

SEQ ID NO: 47652 - DNA, 20 bp, Artificial Sequence
  MKO10047652_A_Selt
  gRNA
tagggctatgatcgatgatg

SEQ ID NO: 47653 - DNA, 20 bp, Artificial Sequence
  MKO10047653_A_Selt
  gRNA
actcacctataaattggttg

SEQ ID NO: 47654 - DNA, 20 bp, Artificial Sequence
  MKO10047654_A_Sema3a
  gRNA
ctacatacctattagaagag

SEQ ID NO: 47655 - DNA, 20 bp, Artificial Sequence
  MKO10047655_A_Sema3a
  gRNA
gtcagtagtttgggatcata

SEQ ID NO: 47656 - DNA, 20 bp, Artificial Sequence
  MKO10047656_A_Sema3a
  gRNA
tgtggccagtatcttacaca

SEQ ID NO: 47657 - DNA, 20 bp, Artificial Sequence
  MKO10047657_A_Sema3b
  gRNA
gcccgatgccttgggtcata

SEQ ID NO: 47658 - DNA, 20 bp, Artificial Sequence
  MKO10047658_A_Sema3b
  gRNA
tggtgtccgaaccttcaggc

SEQ ID NO: 47659 - DNA, 20 bp, Artificial Sequence
  MKO10047659_A_Sema3b
  gRNA
gcattcttcacgccattcca

SEQ ID NO: 47660 - DNA, 20 bp, Artificial Sequence
  MKO10047660_A_Sema3c
  gRNA
tagagtcgatcatgaatacc

SEQ ID NO: 47661 - DNA, 20 bp, Artificial Sequence
  MKO10047661_A_Sema3c
  gRNA
atggctgtggaaatttcgtc

SEQ ID NO: 47662 - DNA, 20 bp, Artificial Sequence
  MKO10047662_A_Sema3c
  gRNA
agatcaagaccggatatatg

SEQ ID NO: 47663 - DNA, 20 bp, Artificial Sequence
  MKO10047663_A_Sema3d
  gRNA
aagactcacgtttacgtgtg

SEQ ID NO: 47664 - DNA, 20 bp, Artificial Sequence
  MKO10047664_A_Sema3d
  gRNA
taaactagacacgcacaacc

SEQ ID NO: 47665 - DNA, 20 bp, Artificial Sequence
  MKO10047665_A_Sema3d
  gRNA
ggagcgtttcatccgctgtg

SEQ ID NO: 47666 - DNA, 20 bp, Artificial Sequence
  MKO10047666_A_Sema3e
  gRNA
aagataattaccaactagcg

SEQ ID NO: 47667 - DNA, 20 bp, Artificial Sequence
  MKO10047667_A_Sema3e
  gRNA
cactgactcgttccaagttc

SEQ ID NO: 47668 - DNA, 20 bp, Artificial Sequence
  MKO10047668_A_Sema3e
  gRNA
ccaggaacccctgtttcacc

SEQ ID NO: 47669 - DNA, 20 bp, Artificial Sequence
  MKO10047669_A_Sema3f
  gRNA
aggagcttacctgtgcgcga

SEQ ID NO: 47670 - DNA, 20 bp, Artificial Sequence
  MKO10047670_A_Sema3f
  gRNA
agcctccccgcagcgcattg

SEQ ID NO: 47671 - DNA, 20 bp, Artificial Sequence
  MKO10047671_A_Sema3f
  gRNA
atgcactcctcaatgcgctg

SEQ ID NO: 47672 - DNA, 20 bp, Artificial Sequence
  MKO10047672_A_Sema3g
  gRNA
gtatcgagatcgcctctttc

SEQ ID NO: 47673 - DNA, 20 bp, Artificial Sequence
  MKO10047673_A_Sema3g
  gRNA
ccataaccggacccatctgc

SEQ ID NO: 47674 - DNA, 20 bp, Artificial Sequence
  MKO10047674_A_Sema3g
  gRNA
cggagtgtgccaacttcgtg

SEQ ID NO: 47675 - DNA, 20 bp, Artificial Sequence
  MKO10047675_A_Sema4a
  gRNA
gcagcgtgtcaaagtctcgg

SEQ ID NO: 47676 - DNA, 20 bp, Artificial Sequence
  MKO10047676_A_Sema4a
  gRNA
acgctgctcctgagtgacga

SEQ ID NO: 47677 - DNA, 20 bp, Artificial Sequence
  MKO10047677_A_Sema4a
  gRNA
tttcaacttcattcgagtcc

SEQ ID NO: 47678 - DNA, 20 bp, Artificial Sequence
  MKO10047678_A_Sema4b
  gRNA
acctcttggtactccccgcc

SEQ ID NO: 47679 - DNA, 20 bp, Artificial Sequence
  MKO10047679_A_Sema4b
  gRNA
cagcagaagggccgtgtagt

SEQ ID NO: 47680 - DNA, 20 bp, Artificial Sequence
  MKO10047680_A_Sema4b
  gRNA
cttaccaaccaccagagccg

SEQ ID NO: 47681 - DNA, 20 bp, Artificial Sequence
  MKO10047681_A_Sema4c
  gRNA
actcacgatgtaggtgcact

SEQ ID NO: 47682 - DNA, 20 bp, Artificial Sequence
  MKO10047682_A_Sema4c
  gRNA
gaacatgctcacgttcacct

SEQ ID NO: 47683 - DNA, 20 bp, Artificial Sequence
  MKO10047683_A_Sema4c
  gRNA
ctcgggcccccacatataaa

SEQ ID NO: 47684 - DNA, 20 bp, Artificial Sequence
  MKO10047684_A_Sema4d
  gRNA
gtagtactcgaatgtagttt

SEQ ID NO: 47685 - DNA, 20 bp, Artificial Sequence
  MKO10047685_A_Sema4d
  gRNA
tggtcttaccaggtggtcac

SEQ ID NO: 47686 - DNA, 20 bp, Artificial Sequence
  MKO10047686_A_Sema4d
  gRNA
tccctcacaggtatattgga

SEQ ID NO: 47687 - DNA, 20 bp, Artificial Sequence
  MKO10047687_A_Sema4f
  gRNA
aagcgaaggtgccacacgtg

SEQ ID NO: 47688 - DNA, 20 bp, Artificial Sequence
  MKO10047688_A_Sema4f
  gRNA
gcttctcacacactttacgt

SEQ ID NO: 47689 - DNA, 20 bp, Artificial Sequence
  MKO10047689_A_Sema4f
  gRNA
ggccgcaaaccgggtgagat

SEQ ID NO: 47690 - DNA, 20 bp, Artificial Sequence
  MKO10047690_A_Sema4g
  gRNA
gccgctgtagaaatcgcacg

SEQ ID NO: 47691 - DNA, 20 bp, Artificial Sequence
  MKO10047691_A_Sema4g
  gRNA
ggcccttgaagtgccgaatc

SEQ ID NO: 47692 - DNA, 20 bp, Artificial Sequence
  MKO10047692_A_Sema4g
  gRNA
accacgtgcgatttctacag

SEQ ID NO: 47693 - DNA, 20 bp, Artificial Sequence
  MKO10047693_A_Sema5a
  gRNA
aagaacttgtcgtaggagcg

SEQ ID NO: 47694 - DNA, 20 bp, Artificial Sequence
  MKO10047694_A_Sema5a
  gRNA
ggggaccggctattcacctg

SEQ ID NO: 47695 - DNA, 20 bp, Artificial Sequence
  MKO10047695_A_Sema5a
  gRNA
catgtttagaaattggcccc

SEQ ID NO: 47696 - DNA, 20 bp, Artificial Sequence
  MKO10047696_A_Sema5b
  gRNA
cacgatgagctgattcctcg

SEQ ID NO: 47697 - DNA, 20 bp, Artificial Sequence
  MKO10047697_A_Sema5b
  gRNA
ggagcggcgcgtgtcctcac

SEQ ID NO: 47698 - DNA, 20 bp, Artificial Sequence
  MKO10047698_A_Sema5b
  gRNA
agcttgctcttgatccctcg

SEQ ID NO: 47699 - DNA, 20 bp, Artificial Sequence
  MKO10047699_A_Sema6a
  gRNA
cttaccgagcagcaacgtag

SEQ ID NO: 47700 - DNA, 20 bp, Artificial Sequence
  MKO10047700_A_Sema6a
  gRNA
acccttcctgcagaaactac

SEQ ID NO: 47701 - DNA, 20 bp, Artificial Sequence
  MKO10047701_A_Sema6a
  gRNA
gatgatacgctgtttgtctg

SEQ ID NO: 47702 - DNA, 20 bp, Artificial Sequence
  MKO10047702_A_Sema6b
  gRNA
gagccactatcccgtgttcg

SEQ ID NO: 47703 - DNA, 20 bp, Artificial Sequence
  MKO10047703_A_Sema6b
  gRNA
ggagccgcacacgaacagcg

SEQ ID NO: 47704 - DNA, 20 bp, Artificial Sequence
  MKO10047704_A_Sema6b
  gRNA
tgttaacacgtagcactctc

SEQ ID NO: 47705 - DNA, 20 bp, Artificial Sequence
  MKO10047705_A_Sema6c
  gRNA
agccctatgtgccgcagcta

SEQ ID NO: 47706 - DNA, 20 bp, Artificial Sequence
  MKO10047706_A_Sema6c
  gRNA
acatccgtgttcttgttccc

SEQ ID NO: 47707 - DNA, 20 bp, Artificial Sequence
  MKO10047707_A_Sema6c
  gRNA
ttaccgggcagccacaagca

SEQ ID NO: 47708 - DNA, 20 bp, Artificial Sequence
  MKO10047708_A_Sema6d
  gRNA
gaagctgaccgcccgtaacc

SEQ ID NO: 47709 - DNA, 20 bp, Artificial Sequence
  MKO10047709_A_Sema6d
  gRNA
caggcaacgaatcgcagcac

SEQ ID NO: 47710 - DNA, 20 bp, Artificial Sequence
  MKO10047710_A_Sema6d
  gRNA
agtgatagtcaaccgtgttg

SEQ ID NO: 47711 - DNA, 20 bp, Artificial Sequence
  MKO10047711_A_Sema7a
  gRNA
gagttctcatccgggctgaa

SEQ ID NO: 47712 - DNA, 20 bp, Artificial Sequence
  MKO10047712_A_Sema7a
  gRNA
cagcccggatgagaactccc

SEQ ID NO: 47713 - DNA, 20 bp, Artificial Sequence
  MKO10047713_A_Sema7a
  gRNA
ggtgaacatcggctccacaa

SEQ ID NO: 47714 - DNA, 20 bp, Artificial Sequence
  MKO10047714_A_Senp1
  gRNA
agtggagccgtggttcacta

SEQ ID NO: 47715 - DNA, 20 bp, Artificial Sequence
  MKO10047715_A_Senp1
  gRNA
ttcttacgtcacctgagcca

SEQ ID NO: 47716 - DNA, 20 bp, Artificial Sequence
  MKO10047716_A_Senp1
  gRNA
gaagtctttgcctcgaaacc

SEQ ID NO: 47717 - DNA, 20 bp, Artificial Sequence
  MKO10047717_A_Senp2
  gRNA
gcccaactgacctctccaga

SEQ ID NO: 47718 - DNA, 20 bp, Artificial Sequence
  MKO10047718_A_Senp2
  gRNA
cagtgacccgcgatcagcca

SEQ ID NO: 47719 - DNA, 20 bp, Artificial Sequence
  MKO10047719_A_Senp2
  gRNA
taacttacccaaaggagggc

SEQ ID NO: 47720 - DNA, 20 bp, Artificial Sequence
  MKO10047720_A_Senp3
  gRNA
ggtgagcacgtgtcgcttat

SEQ ID NO: 47721 - DNA, 20 bp, Artificial Sequence
  MKO10047721_A_Senp3
  gRNA
ccccttaccatagcgttgcc

SEQ ID NO: 47722 - DNA, 20 bp, Artificial Sequence
  MKO10047722_A_Senp3
  gRNA
ccacaggtgatgaacatgta

SEQ ID NO: 47723 - DNA, 20 bp, Artificial Sequence
  MKO10047723_A_Senp5
  gRNA
tatggacgatctggcaactt

SEQ ID NO: 47724 - DNA, 20 bp, Artificial Sequence
  MKO10047724_A_Senp5
  gRNA
gctataatggagttaaaaga

SEQ ID NO: 47725 - DNA, 20 bp, Artificial Sequence
  MKO10047725_A_Senp5
  gRNA
ctgcaggttattaatatgta

SEQ ID NO: 47726 - DNA, 20 bp, Artificial Sequence
  MKO10047726_A_Senp6
  gRNA
gaaattgttgctactagttc

SEQ ID NO: 47727 - DNA, 20 bp, Artificial Sequence
  MKO10047727_A_Senp6
  gRNA
ctgtgcagtgaaagcaccgc

SEQ ID NO: 47728 - DNA, 20 bp, Artificial Sequence
  MKO10047728_A_Senp6
  gRNA
gacggctttaaaactttgaa

SEQ ID NO: 47729 - DNA, 20 bp, Artificial Sequence
  MKO10047729_A_Senp7
  gRNA
gggcgtcggcgagcttcatc

SEQ ID NO: 47730 - DNA, 20 bp, Artificial Sequence
  MKO10047730_A_Senp7
  gRNA
gatgaagctcgccgacgccc

SEQ ID NO: 47731 - DNA, 20 bp, Artificial Sequence
  MKO10047731_A_Senp7
  gRNA
cgtacctttcggataaatta

SEQ ID NO: 47732 - DNA, 20 bp, Artificial Sequence
  MKO10047732_A_Senp8
  gRNA
cactattggaccctccaagc

SEQ ID NO: 47733 - DNA, 20 bp, Artificial Sequence
  MKO10047733_A_Senp8
  gRNA
caactcaatccatgcaaagc

SEQ ID NO: 47734 - DNA, 20 bp, Artificial Sequence
  MKO10047734_A_Senp8
  gRNA
gcagtcatgaaactgactat

SEQ ID NO: 47735 - DNA, 20 bp, Artificial Sequence
  MKO10047735_A_Sephs1
  gRNA
cgtcgacgacccgtatatga

SEQ ID NO: 47736 - DNA, 20 bp, Artificial Sequence
  MKO10047736_A_Sephs1
  gRNA
agtgataccgctaattatac

SEQ ID NO: 47737 - DNA, 20 bp, Artificial Sequence
  MKO10047737_A_Sephs1
  gRNA
ctctgtaacaggcggccaaa

SEQ ID NO: 47738 - DNA, 20 bp, Artificial Sequence
  MKO10047738_A_Sephs2
  gRNA
aacccgtggattatcatcgg

SEQ ID NO: 47739 - DNA, 20 bp, Artificial Sequence
  MKO10047739_A_Sephs2
  gRNA
cgggccgcgtcagtccctcc

SEQ ID NO: 47740 - DNA, 20 bp, Artificial Sequence
  MKO10047740_A_Sephs2
  gRNA
gtccatgccaatgctcagcg

SEQ ID NO: 47741 - DNA, 20 bp, Artificial Sequence
  MKO10047741_A_Sepn1
  gRNA
tatggtaagagtctcctcgc

SEQ ID NO: 47742 - DNA, 20 bp, Artificial Sequence
  MKO10047742_A_Sepn1
  gRNA
cctactacaccgtgatgttc

SEQ ID NO: 47743 - DNA, 20 bp, Artificial Sequence
  MKO10047743_A_Sepn1
  gRNA
gaagacccgctttgcccctc

SEQ ID NO: 47744 - DNA, 20 bp, Artificial Sequence
  MKO10047744_A_Sepp1
  gRNA
ggccgtcttgtgtatcacct

SEQ ID NO: 47745 - DNA, 20 bp, Artificial Sequence
  MKO10047745_A_Sepp1
  gRNA
gctcctgtgtaagttgtcta

SEQ ID NO: 47746 - DNA, 20 bp, Artificial Sequence
  MKO10047746_A_Sepp1
  gRNA
actccttagacaacttacac

SEQ ID NO: 47747 - DNA, 20 bp, Artificial Sequence
  MKO10047747_A_Sepsecs
  gRNA
tggttgctcgacgacattac

SEQ ID NO: 47748 - DNA, 20 bp, Artificial Sequence
  MKO10047748_A_Sepsecs
  gRNA
agttacctatcgggcaccct

SEQ ID NO: 47749 - DNA, 20 bp, Artificial Sequence
  MKO10047749_A_Sepsecs
  gRNA
gcgcacagacctgaaagccg

SEQ ID NO: 47750 - DNA, 20 bp, Artificial Sequence
  MKO10047750_A_Sepw1
  gRNA
tcggatttaccttcttggag

SEQ ID NO: 47751 - DNA, 20 bp, Artificial Sequence
  MKO10047751_A_Sepw1
  gRNA
agagagcaagttccggaaac

SEQ ID NO: 47752 - DNA, 20 bp, Artificial Sequence
  MKO10047752_A_Sepw1
  gRNA
tgatggcggtcaccagtttc

SEQ ID NO: 47753 - DNA, 20 bp, Artificial Sequence
  MKO10047753_A_Serac1
  gRNA
gatcaaaaagtcgcacgccc

SEQ ID NO: 47754 - DNA, 20 bp, Artificial Sequence
  MKO10047754_A_Serac1
  gRNA
cgatctagctgcacggctgc

SEQ ID NO: 47755 - DNA, 20 bp, Artificial Sequence
  MKO10047755_A_Serac1
  gRNA
gtgcagctagatcgtcctcc

SEQ ID NO: 47756 - DNA, 20 bp, Artificial Sequence
  MKO10047756_A_Serbp1
  gRNA
cggataggccgttcgataat

SEQ ID NO: 47757 - DNA, 20 bp, Artificial Sequence
  MKO10047757_A_Serbp1
  gRNA
aagacccgatcaacaactac

SEQ ID NO: 47758 - DNA, 20 bp, Artificial Sequence
  MKO10047758_A_Serbp1
  gRNA
tcataaggaataaggcgagt

SEQ ID NO: 47759 - DNA, 20 bp, Artificial Sequence
  MKO10047759_A_Serf1
  gRNA
ctgcatagatttcttctcat

SEQ ID NO: 47760 - DNA, 20 bp, Artificial Sequence
  MKO10047760_A_Serf1
  gRNA
gaaaaacatgaaaaagaccc

SEQ ID NO: 47761 - DNA, 20 bp, Artificial Sequence
  MKO10047761_A_Serf1
  gRNA
tcacctctgctttctctgag

SEQ ID NO: 47762 - DNA, 20 bp, Artificial Sequence
  MKO10047762_A_Serf2
  gRNA
cctggggctacctctgcttg

SEQ ID NO: 47763 - DNA, 20 bp, Artificial Sequence
  MKO10047763_A_Serf2
  gRNA
catgaagaagcagagcgact

SEQ ID NO: 47764 - DNA, 20 bp, Artificial Sequence
  MKO10047764_A_Serf2
  gRNA
catgcagcagaagcagaaaa

SEQ ID NO: 47765 - DNA, 20 bp, Artificial Sequence
  MKO10047765_A_Sergef
  gRNA
acgcatttgcgagggccgtg

SEQ ID NO: 47766 - DNA, 20 bp, Artificial Sequence
  MKO10047766_A_Sergef
  gRNA
tcacggccctcgcaaatgcg

SEQ ID NO: 47767 - DNA, 20 bp, Artificial Sequence
  MKO10047767_A_Sergef
  gRNA
ccgtagggtgcaaacagcta

SEQ ID NO: 47768 - DNA, 20 bp, Artificial Sequence
  MKO10047768_A_Serhl
  gRNA
ctctcgtcccattacaaccc

SEQ ID NO: 47769 - DNA, 20 bp, Artificial Sequence
  MKO10047769_A_Serhl
  gRNA
acaacgccaactcctttgac

SEQ ID NO: 47770 - DNA, 20 bp, Artificial Sequence
  MKO10047770_A_Serhl
  gRNA
ctatggatttcggaggccac

SEQ ID NO: 47771 - DNA, 20 bp, Artificial Sequence
  MKO10047771_A_Serinc1
  gRNA
ccattgtggactgccgctct

SEQ ID NO: 47772 - DNA, 20 bp, Artificial Sequence
  MKO10047772_A_Serinc1
  gRNA
cccacgattcattccaagaa

SEQ ID NO: 47773 - DNA, 20 bp, Artificial Sequence
  MKO10047773_A_Serinc1
  gRNA
gcttgtgtaatgttaatacc

SEQ ID NO: 47774 - DNA, 20 bp, Artificial Sequence
  MKO10047774_A_Serinc2
  gRNA
gactctccagcctggtacgc

SEQ ID NO: 47775 - DNA, 20 bp, Artificial Sequence
  MKO10047775_A_Serinc2
  gRNA
agggcactgacctgcgtacc

SEQ ID NO: 47776 - DNA, 20 bp, Artificial Sequence
  MKO10047776_A_Serinc2
  gRNA
ctcgcggatcccggctactg

SEQ ID NO: 47777 - DNA, 20 bp, Artificial Sequence
  MKO10047777_A_Serinc3
  gRNA
gtagatgagccgagttacag

SEQ ID NO: 47778 - DNA, 20 bp, Artificial Sequence
  MKO10047778_A_Serinc3
  gRNA
ttcaaaatcgctgccattat

SEQ ID NO: 47779 - DNA, 20 bp, Artificial Sequence
  MKO10047779_A_Serinc3
  gRNA
agagaaagattgtgacgtgc

SEQ ID NO: 47780 - DNA, 20 bp, Artificial Sequence
  MKO10047780_A_Serinc4
  gRNA
ctaccactgtcttcgaaagc

SEQ ID NO: 47781 - DNA, 20 bp, Artificial Sequence
  MKO10047781_A_Serinc4
  gRNA
gcgccagagccactgagaac

SEQ ID NO: 47782 - DNA, 20 bp, Artificial Sequence
  MKO10047782_A_Serinc4
  gRNA
cttgcagcctggcattatat

SEQ ID NO: 47783 - DNA, 20 bp, Artificial Sequence
  MKO10047783_A_Serinc5
  gRNA
acaccgcagaataccctacc

SEQ ID NO: 47784 - DNA, 20 bp, Artificial Sequence
  MKO10047784_A_Serinc5
  gRNA
gccctaagttccgacagtct

SEQ ID NO: 47785 - DNA, 20 bp, Artificial Sequence
  MKO10047785_A_Serinc5
  gRNA
gtccgagactgtcggaactt

SEQ ID NO: 47786 - DNA, 20 bp, Artificial Sequence
  MKO10047786_A_Serp1
  gRNA
gtcggtaggaccctggttat

SEQ ID NO: 47787 - DNA, 20 bp, Artificial Sequence
  MKO10047787_A_Serp1
  gRNA
gagaaatgcccccgaagaaa

SEQ ID NO: 47788 - DNA, 20 bp, Artificial Sequence
  MKO10047788_A_Serp1
  gRNA
cgaaaatggtcgccaagcag

SEQ ID NO: 47789 - DNA, 20 bp, Artificial Sequence
  MKO10047789_A_Serp2
  gRNA
tccagatcatacagagcata

SEQ ID NO: 47790 - DNA, 20 bp, Artificial Sequence
  MKO10047790_A_Serp2
  gRNA
tccttatgctctgtatgatc

SEQ ID NO: 47791 - DNA, 20 bp, Artificial Sequence
  MKO10047791_A_Serp2
  gRNA
aagccatggtggccaaacag

SEQ ID NO: 47792 - DNA, 20 bp, Artificial Sequence
  MKO10047792_A_Serpina10
  gRNA
ctacttgaccgtggatctcg

SEQ ID NO: 47793 - DNA, 20 bp, Artificial Sequence
  MKO10047793_A_Serpina10
  gRNA
ttaaggtgcccatgatgtac

SEQ ID NO: 47794 - DNA, 20 bp, Artificial Sequence
  MKO10047794_A_Serpina10
  gRNA
tgcttcgaaagatctccatg

SEQ ID NO: 47795 - DNA, 20 bp, Artificial Sequence
  MKO10047795_A_Serpina11
  gRNA
cctttgatcgctaccagacc

SEQ ID NO: 47796 - DNA, 20 bp, Artificial Sequence
  MKO10047796_A_Serpina11
  gRNA
gaattcggagtggcgtcctc

SEQ ID NO: 47797 - DNA, 20 bp, Artificial Sequence
  MKO10047797_A_Serpina11
  gRNA
ccccggtggacgtcagctgc

SEQ ID NO: 47798 - DNA, 20 bp, Artificial Sequence
  MKO10047798_A_Serpina12
  gRNA
ccatgtcgtacaagcccctt

SEQ ID NO: 47799 - DNA, 20 bp, Artificial Sequence
  MKO10047799_A_Serpina12
  gRNA
tgttgtgtcgagcaagctgc

SEQ ID NO: 47800 - DNA, 20 bp, Artificial Sequence
  MKO10047800_A_Serpina12
  gRNA
gtttccctgagggctattgc

SEQ ID NO: 47801 - DNA, 20 bp, Artificial Sequence
  MKO10047801_A_Serpina1a
  gRNA
gcacatgaagcatgcccgag

SEQ ID NO: 47802 - DNA, 20 bp, Artificial Sequence
  MKO10047802_A_Serpina1a
  gRNA
agcagttacagtcttacaaa

SEQ ID NO: 47803 - DNA, 20 bp, Artificial Sequence
  MKO10047803_A_Serpina1a
  gRNA
aaatgactccctccatctca

SEQ ID NO: 47804 - DNA, 20 bp, Artificial Sequence
  MKO10047804_A_Serpina1b
  gRNA
ggtgcccatgatgatgctct

SEQ ID NO: 47805 - DNA, 20 bp, Artificial Sequence
  MKO10047805_A_Serpina1b
  gRNA
attgcagcatactgtccagc

SEQ ID NO: 47806 - DNA, 20 bp, Artificial Sequence
  MKO10047806_A_Serpina1b
  gRNA
taaaaagaatgtaattcgcc

SEQ ID NO: 47807 - DNA, 20 bp, Artificial Sequence
  MKO10047807_A_Serpina1c
  gRNA
gcacatcaagcattcccgag

SEQ ID NO: 47808 - DNA, 20 bp, Artificial Sequence
  MKO10047808_A_Serpina1c
  gRNA
accttctgggcctctttagc

SEQ ID NO: 47809 - DNA, 20 bp, Artificial Sequence
  MKO10047809_A_Serpina1c
  gRNA
gggtgatcgaagcgcacgat

SEQ ID NO: 47810 - DNA, 20 bp, Artificial Sequence
  MKO10047810_A_Serpina1d
  gRNA
actttgccctcagactatac

SEQ ID NO: 47811 - DNA, 20 bp, Artificial Sequence
  MKO10047811_A_Serpina1d
  gRNA
ccagctccctgtatagtctg

SEQ ID NO: 47812 - DNA, 20 bp, Artificial Sequence
  MKO10047812_A_Serpina1d
  gRNA
ggacgagtccaccacagtga

SEQ ID NO: 47813 - DNA, 20 bp, Artificial Sequence
  MKO10047813_A_Serpina1e
  gRNA
gggcggttgaagtgcaagat

SEQ ID NO: 47814 - DNA, 20 bp, Artificial Sequence
  MKO10047814_A_Serpina1e
  gRNA
gcagcagctacagtcttaca

SEQ ID NO: 47815 - DNA, 20 bp, Artificial Sequence
  MKO10047815_A_Serpina1e
  gRNA
actttgccatcagtctatac

SEQ ID NO: 47816 - DNA, 20 bp, Artificial Sequence
  MKO10047816_A_Serpina1f
  gRNA
tagcagcgtgttcatccacc

SEQ ID NO: 47817 - DNA, 20 bp, Artificial Sequence
  MKO10047817_A_Serpina1f
  gRNA
tcaataattgtcgtctcatc

SEQ ID NO: 47818 - DNA, 20 bp, Artificial Sequence
  MKO10047818_A_Serpina1f
  gRNA
taacctacccacacttccgc

SEQ ID NO: 47819 - DNA, 20 bp, Artificial Sequence
  MKO10047819_A_Serpina3a
  gRNA
tgaccctgaagacacgttcc

SEQ ID NO: 47820 - DNA, 20 bp, Artificial Sequence
  MKO10047820_A_Serpina3a
  gRNA
gtttaagagtattagcgtta

SEQ ID NO: 47821 - DNA, 20 bp, Artificial Sequence
  MKO10047821_A_Serpina3a
  gRNA
tgtgcccatgatgaaaaccg

SEQ ID NO: 47822 - DNA, 20 bp, Artificial Sequence
  MKO10047822_A_Serpina3b
  gRNA
ctcatctttagcggaatgga

SEQ ID NO: 47823 - DNA, 20 bp, Artificial Sequence
  MKO10047823_A_Serpina3b
  gRNA
cagagcagttgcgatgccaa

SEQ ID NO: 47824 - DNA, 20 bp, Artificial Sequence
  MKO10047824_A_Serpina3b
  gRNA
cttgatctaaaacaatgtac

SEQ ID NO: 47825 - DNA, 20 bp, Artificial Sequence
  MKO10047825_A_Serpina3c
  gRNA
ccatcagtgtatccgtatcc

SEQ ID NO: 47826 - DNA, 20 bp, Artificial Sequence
  MKO10047826_A_Serpina3c
  gRNA
tacggatacactgatggtgc

SEQ ID NO: 47827 - DNA, 20 bp, Artificial Sequence
  MKO10047827_A_Serpina3c
  gRNA
aatgcgaaaattgacccctg

SEQ ID NO: 47828 - DNA, 20 bp, Artificial Sequence
  MKO10047828_A_Serpina3f
  gRNA
atgggagatgccctttgatc

SEQ ID NO: 47829 - DNA, 20 bp, Artificial Sequence
  MKO10047829_A_Serpina3f
  gRNA
agattacaccttgacaacat

SEQ ID NO: 47830 - DNA, 20 bp, Artificial Sequence
  MKO10047830_A_Serpina3f
  gRNA
ctatgaaaatatatttcgac

SEQ ID NO: 47831 - DNA, 20 bp, Artificial Sequence
  MKO10047831_A_Serpina3g
  gRNA
aaatgtatcattcgggtcaa

SEQ ID NO: 47832 - DNA, 20 bp, Artificial Sequence
  MKO10047832_A_Serpina3g
  gRNA
attgtgtccatgatgaaaac

SEQ ID NO: 47833 - DNA, 20 bp, Artificial Sequence
  MKO10047833_A_Serpina3g
  gRNA
ccatcaatgtgctctctttc

SEQ ID NO: 47834 - DNA, 20 bp, Artificial Sequence
  MKO10047834_A_Serpina3i
  gRNA
tgagcacgtccttcccgtgc

SEQ ID NO: 47835 - DNA, 20 bp, Artificial Sequence
  MKO10047835_A_Serpina3i
  gRNA
gtgctcaaggctgtagtcat

SEQ ID NO: 47836 - DNA, 20 bp, Artificial Sequence
  MKO10047836_A_Serpina3i
  gRNA
aaatgtatcacgggggtcaa

SEQ ID NO: 47837 - DNA, 20 bp, Artificial Sequence
  MKO10047837_A_Serpina3j
  gRNA
gatgtttcacagcgctgcgc

SEQ ID NO: 47838 - DNA, 20 bp, Artificial Sequence
  MKO10047838_A_Serpina3j
  gRNA
tgacccttatgaaacgttca

SEQ ID NO: 47839 - DNA, 20 bp, Artificial Sequence
  MKO10047839_A_Serpina3j
  gRNA
gtccccatgaacgtttcata

SEQ ID NO: 47840 - DNA, 20 bp, Artificial Sequence
  MKO10047840_A_Serpina3k
  gRNA
ggttattggtggcattcgta

SEQ ID NO: 47841 - DNA, 20 bp, Artificial Sequence
  MKO10047841_A_Serpina3k
  gRNA
tctccatcgctagtgactac

SEQ ID NO: 47842 - DNA, 20 bp, Artificial Sequence
  MKO10047842_A_Serpina3k
  gRNA
cagcctgtagtcactagcga

SEQ ID NO: 47843 - DNA, 20 bp, Artificial Sequence
  MKO10047843_A_Serpina3m
  gRNA
ctatgactgtgcagttcaac

SEQ ID NO: 47844 - DNA, 20 bp, Artificial Sequence
  MKO10047844_A_Serpina3m
  gRNA
gtcttacctgagacacactc

SEQ ID NO: 47845 - DNA, 20 bp, Artificial Sequence
  MKO10047845_A_Serpina3m
  gRNA
ctctactgactacaacctga

SEQ ID NO: 47846 - DNA, 20 bp, Artificial Sequence
  MKO10047846_A_Serpina3n
  gRNA
tcagacttgaacgtgtcaag

SEQ ID NO: 47847 - DNA, 20 bp, Artificial Sequence
  MKO10047847_A_Serpina3n
  gRNA
gttcaagtctgagttctacg

SEQ ID NO: 47848 - DNA, 20 bp, Artificial Sequence
  MKO10047848_A_Serpina3n
  gRNA
tccattcccaacgtgccatc

SEQ ID NO: 47849 - DNA, 20 bp, Artificial Sequence
  MKO10047849_A_Serpina5
  gRNA
tcgtcccggatatgtactgc

SEQ ID NO: 47850 - DNA, 20 bp, Artificial Sequence
  MKO10047850_A_Serpina5
  gRNA
cttgagcgtgtctatgagtt

SEQ ID NO: 47851 - DNA, 20 bp, Artificial Sequence
  MKO10047851_A_Serpina5
  gRNA
cccatgatgaaccgtgaaga

SEQ ID NO: 47852 - DNA, 20 bp, Artificial Sequence
  MKO10047852_A_Serpina6
  gRNA
caacttgtacaaacgcctag

SEQ ID NO: 47853 - DNA, 20 bp, Artificial Sequence
  MKO10047853_A_Serpina6
  gRNA
ctgtcgtcgctgcacttaat

SEQ ID NO: 47854 - DNA, 20 bp, Artificial Sequence
  MKO10047854_A_Serpina6
  gRNA
ttcaagttctcaccgagacc

SEQ ID NO: 47855 - DNA, 20 bp, Artificial Sequence
  MKO10047855_A_Serpina7
  gRNA
gtaagaatgctctatccaat

SEQ ID NO: 47856 - DNA, 20 bp, Artificial Sequence
  MKO10047856_A_Serpina7
  gRNA
tcttcaccctgttatccgat

SEQ ID NO: 47857 - DNA, 20 bp, Artificial Sequence
  MKO10047857_A_Serpina7
  gRNA
catcatgggcacttgtactg

SEQ ID NO: 47858 - DNA, 20 bp, Artificial Sequence
  MKO10047858_A_Serpina9
  gRNA
ccaaacttatagtccgctca

SEQ ID NO: 47859 - DNA, 20 bp, Artificial Sequence
  MKO10047859_A_Serpina9
  gRNA
catcgcggattcccatcttg

SEQ ID NO: 47860 - DNA, 20 bp, Artificial Sequence
  MKO10047860_A_Serpina9
  gRNA
cgctgcccatccgcaattcc

SEQ ID NO: 47861 - DNA, 20 bp, Artificial Sequence
  MKO10047861_A_Serpinb10
  gRNA
tcaacaaagttaacagattg

SEQ ID NO: 47862 - DNA, 20 bp, Artificial Sequence
  MKO10047862_A_Serpinb10
  gRNA
tgtcgactgagtcatctggg

SEQ ID NO: 47863 - DNA, 20 bp, Artificial Sequence
  MKO10047863_A_Serpinb10
  gRNA
cagtgaaaagcaccaccgaa

SEQ ID NO: 47864 - DNA, 20 bp, Artificial Sequence
  MKO10047864_A_Serpinb11
  gRNA
aattgacccatcctcggtca

SEQ ID NO: 47865 - DNA, 20 bp, Artificial Sequence
  MKO10047865_A_Serpinb11
  gRNA
actcactaggaccatgaccg

SEQ ID NO: 47866 - DNA, 20 bp, Artificial Sequence
  MKO10047866_A_Serpinb11
  gRNA
agattctgttagcaacgctg

SEQ ID NO: 47867 - DNA, 20 bp, Artificial Sequence
  MKO10047867_A_Serpinb12
  gRNA
ctacactttcgactgttgtg

SEQ ID NO: 47868 - DNA, 20 bp, Artificial Sequence
  MKO10047868_A_Serpinb12
  gRNA
ggaatactctgatgacgtaa

SEQ ID NO: 47869 - DNA, 20 bp, Artificial Sequence
  MKO10047869_A_Serpinb12
  gRNA
tattgataactcaactgtgc

SEQ ID NO: 47870 - DNA, 20 bp, Artificial Sequence
  MKO10047870_A_Serpinb13
  gRNA
acagcctgttgcttatgatc

SEQ ID NO: 47871 - DNA, 20 bp, Artificial Sequence
  MKO10047871_A_Serpinb13
  gRNA
gagctgttcaaagagccttc

SEQ ID NO: 47872 - DNA, 20 bp, Artificial Sequence
  MKO10047872_A_Serpinb13
  gRNA
tttgaacagctccaccaagc

SEQ ID NO: 47873 - DNA, 20 bp, Artificial Sequence
  MKO10047873_A_Serpinb1a
  gRNA
aatgctgaagtgagcaaacg

SEQ ID NO: 47874 - DNA, 20 bp, Artificial Sequence
  MKO10047874_A_Serpinb1a
  gRNA
cagtatgaccaaacttgtgc

SEQ ID NO: 47875 - DNA, 20 bp, Artificial Sequence
  MKO10047875_A_Serpinb1a
  gRNA
gcttcaacccagaaaatgta

SEQ ID NO: 47876 - DNA, 20 bp, Artificial Sequence
  MKO10047876_A_Serpinb1b
  gRNA
tgctccattcagactgaata

SEQ ID NO: 47877 - DNA, 20 bp, Artificial Sequence
  MKO10047877_A_Serpinb1b
  gRNA
acacccttagccagcagttc

SEQ ID NO: 47878 - DNA, 20 bp, Artificial Sequence
  MKO10047878_A_Serpinb1b
  gRNA
tgagtccacgggtcttaaga

SEQ ID NO: 47879 - DNA, 20 bp, Artificial Sequence
  MKO10047879_A_Serpinb1c
  gRNA
cattccagacctgaagtgca

SEQ ID NO: 47880 - DNA, 20 bp, Artificial Sequence
  MKO10047880_A_Serpinb1c
  gRNA
agtgaatgccacctatttca

SEQ ID NO: 47881 - DNA, 20 bp, Artificial Sequence
  MKO10047881_A_Serpinb1c
  gRNA
cgagaccacaggtcttgagg

SEQ ID NO: 47882 - DNA, 20 bp, Artificial Sequence
  MKO10047882_A_Serpinb2
  gRNA
atcccaaacctgctacccga

SEQ ID NO: 47883 - DNA, 20 bp, Artificial Sequence
  MKO10047883_A_Serpinb2
  gRNA
tgtctcataccgagttcaca

SEQ ID NO: 47884 - DNA, 20 bp, Artificial Sequence
  MKO10047884_A_Serpinb2
  gRNA
gtgctgcagtttaatgaaat

SEQ ID NO: 47885 - DNA, 20 bp, Artificial Sequence
  MKO10047885_A_Serpinb3a
  gRNA
caatgatgcttatgatctaa

SEQ ID NO: 47886 - DNA, 20 bp, Artificial Sequence
  MKO10047886_A_Serpinb3a
  gRNA
ccattatagtgctcctgttc

SEQ ID NO: 47887 - DNA, 20 bp, Artificial Sequence
  MKO10047887_A_Serpinb3a
  gRNA
ttcctaatgggagcctgaac

SEQ ID NO: 47888 - DNA, 20 bp, Artificial Sequence
  MKO10047888_A_Serpinb3b
  gRNA
cctaagcagtagcactatac

SEQ ID NO: 47889 - DNA, 20 bp, Artificial Sequence
  MKO10047889_A_Serpinb3b
  gRNA
ccagtatagtgctactgctt

SEQ ID NO: 47890 - DNA, 20 bp, Artificial Sequence
  MKO10047890_A_Serpinb3b
  gRNA
tcaagctaaggtggaatcac

SEQ ID NO: 47891 - DNA, 20 bp, Artificial Sequence
  MKO10047891_A_Serpinb3c
  gRNA
ccagtttagtgctactgctc

SEQ ID NO: 47892 - DNA, 20 bp, Artificial Sequence
  MKO10047892_A_Serpinb3c
  gRNA
cctgagcagtagcactaaac

SEQ ID NO: 47893 - DNA, 20 bp, Artificial Sequence
  MKO10047893_A_Serpinb3c
  gRNA
gaaaaacttacctggagtaa

SEQ ID NO: 47894 - DNA, 20 bp, Artificial Sequence
  MKO10047894_A_Serpinb3d
  gRNA
caagtgattccacgttagct

SEQ ID NO: 47895 - DNA, 20 bp, Artificial Sequence
  MKO10047895_A_Serpinb3d
  gRNA
atttgtttgccttgccatcc

SEQ ID NO: 47896 - DNA, 20 bp, Artificial Sequence
  MKO10047896_A_Serpinb3d
  gRNA
caataatgcttatgacctaa

SEQ ID NO: 47897 - DNA, 20 bp, Artificial Sequence
  MKO10047897_A_Serpinb5
  gRNA
gcatactcagatgcttattc

SEQ ID NO: 47898 - DNA, 20 bp, Artificial Sequence
  MKO10047898_A_Serpinb5
  gRNA
tgaccagaccaaaatccttg

SEQ ID NO: 47899 - DNA, 20 bp, Artificial Sequence
  MKO10047899_A_Serpinb5
  gRNA
tatgctcattgtgctcccca

SEQ ID NO: 47900 - DNA, 20 bp, Artificial Sequence
  MKO10047900_A_Serpinb6a
  gRNA
agtttaacaaagagcatacc

SEQ ID NO: 47901 - DNA, 20 bp, Artificial Sequence
  MKO10047901_A_Serpinb6a
  gRNA
ggactttcagggtgctacag

SEQ ID NO: 47902 - DNA, 20 bp, Artificial Sequence
  MKO10047902_A_Serpinb6a
  gRNA
ggtcacttacctgagccatc

SEQ ID NO: 47903 - DNA, 20 bp, Artificial Sequence
  MKO10047903_A_Serpinb6b
  gRNA
tgaacacattgaactaagta

SEQ ID NO: 47904 - DNA, 20 bp, Artificial Sequence
  MKO10047904_A_Serpinb6b
  gRNA
tcgtttctgtgagaagtgat

SEQ ID NO: 47905 - DNA, 20 bp, Artificial Sequence
  MKO10047905_A_Serpinb6b
  gRNA
ctcacagaaacgaacaagac

SEQ ID NO: 47906 - DNA, 20 bp, Artificial Sequence
  MKO10047906_A_Serpinb6c
  gRNA
tgaagtagacagcattcacg

SEQ ID NO: 47907 - DNA, 20 bp, Artificial Sequence
  MKO10047907_A_Serpinb6c
  gRNA
tcacttcgctgagaagtaac

SEQ ID NO: 47908 - DNA, 20 bp, Artificial Sequence
  MKO10047908_A_Serpinb6c
  gRNA
gtgtttgaatgtattgtacc

SEQ ID NO: 47909 - DNA, 20 bp, Artificial Sequence
  MKO10047909_A_Serpinb6d
  gRNA
ggtggatatctcttctatat

SEQ ID NO: 47910 - DNA, 20 bp, Artificial Sequence
  MKO10047910_A_Serpinb6d
  gRNA
tccatgtgaagatatccacc

SEQ ID NO: 47911 - DNA, 20 bp, Artificial Sequence
  MKO10047911_A_Serpinb6d
  gRNA
gaagtgaacaagactgatcc

SEQ ID NO: 47912 - DNA, 20 bp, Artificial Sequence
  MKO10047912_A_Serpinb6e
  gRNA
gtcgacagcacatcaacgcc

SEQ ID NO: 47913 - DNA, 20 bp, Artificial Sequence
  MKO10047913_A_Serpinb6e
  gRNA
atgtgctgtcgacactgctc

SEQ ID NO: 47914 - DNA, 20 bp, Artificial Sequence
  MKO10047914_A_Serpinb6e
  gRNA
tggaggtgcagatgtccagc

SEQ ID NO: 47915 - DNA, 20 bp, Artificial Sequence
  MKO10047915_A_Serpinb7
  gRNA
ccatgacagccgacgagctg

SEQ ID NO: 47916 - DNA, 20 bp, Artificial Sequence
  MKO10047916_A_Serpinb7
  gRNA
cgacagcagcctcagctcgt

SEQ ID NO: 47917 - DNA, 20 bp, Artificial Sequence
  MKO10047917_A_Serpinb7
  gRNA
tatgaactcagcattgccac

SEQ ID NO: 47918 - DNA, 20 bp, Artificial Sequence
  MKO10047918_A_Serpinb8
  gRNA
tttgaccgaaagtacacgag

SEQ ID NO: 47919 - DNA, 20 bp, Artificial Sequence
  MKO10047919_A_Serpinb8
  gRNA
tgaaagcactgatctcgccg

SEQ ID NO: 47920 - DNA, 20 bp, Artificial Sequence
  MKO10047920_A_Serpinb8
  gRNA
aaaagtgcctgccgactctt

SEQ ID NO: 47921 - DNA, 20 bp, Artificial Sequence
  MKO10047921_A_Serpinb9b
  gRNA
gagtcatctgccaacaactc

SEQ ID NO: 47922 - DNA, 20 bp, Artificial Sequence
  MKO10047922_A_Serpinb9b
  gRNA
tgaatcatagaagcgaaaac

SEQ ID NO: 47923 - DNA, 20 bp, Artificial Sequence
  MKO10047923_A_Serpinb9b
  gRNA
tgacgagaaccagcctggtc

SEQ ID NO: 47924 - DNA, 20 bp, Artificial Sequence
  MKO10047924_A_Serpinb9c
  gRNA
caccgaaatccagatatctg

SEQ ID NO: 47925 - DNA, 20 bp, Artificial Sequence
  MKO10047925_A_Serpinb9c
  gRNA
tggtggactttatgtcaaac

SEQ ID NO: 47926 - DNA, 20 bp, Artificial Sequence
  MKO10047926_A_Serpinb9c
  gRNA
ggcaacttacctcagatatc

SEQ ID NO: 47927 - DNA, 20 bp, Artificial Sequence
  MKO10047927_A_Serpinb9d
  gRNA
tgtgaatcaatggagtcttt

SEQ ID NO: 47928 - DNA, 20 bp, Artificial Sequence
  MKO10047928_A_Serpinb9d
  gRNA
agagtttataccatgttcct

SEQ ID NO: 47929 - DNA, 20 bp, Artificial Sequence
  MKO10047929_A_Serpinb9d
  gRNA
cgtggtcctactcccagata

SEQ ID NO: 47930 - DNA, 20 bp, Artificial Sequence
  MKO10047930_A_Serpinb9e
  gRNA
agcattggcgagaattagcc

SEQ ID NO: 47931 - DNA, 20 bp, Artificial Sequence
  MKO10047931_A_Serpinb9e
  gRNA
gccaatgctttatacttcca

SEQ ID NO: 47932 - DNA, 20 bp, Artificial Sequence
  MKO10047932_A_Serpinb9e
  gRNA
ctgatgtccacaccctgatc

SEQ ID NO: 47933 - DNA, 20 bp, Artificial Sequence
  MKO10047933_A_Serpinb9f
  gRNA
ccattctaaggcagtacttt

SEQ ID NO: 47934 - DNA, 20 bp, Artificial Sequence
  MKO10047934_A_Serpinb9f
  gRNA
ccaaaagtactgccttagaa

SEQ ID NO: 47935 - DNA, 20 bp, Artificial Sequence
  MKO10047935_A_Serpinb9f
  gRNA
cttcttaccattagtctgtt

SEQ ID NO: 47936 - DNA, 20 bp, Artificial Sequence
  MKO10047936_A_Serpinb9g
  gRNA
cgtggtcctactcccagatg

SEQ ID NO: 47937 - DNA, 20 bp, Artificial Sequence
  MKO10047937_A_Serpinb9g
  gRNA
cccagatgaagatgtccatc

SEQ ID NO: 47938 - DNA, 20 bp, Artificial Sequence
  MKO10047938_A_Serpinb9g
  gRNA
ccatagtaaggcagtacttt

SEQ ID NO: 47939 - DNA, 20 bp, Artificial Sequence
  MKO10047939_A_Serpinb9
  gRNA
atataacctcgcctatgtga

SEQ ID NO: 47940 - DNA, 20 bp, Artificial Sequence
  MKO10047940_A_Serpinb9
  gRNA
gctccgtcgattcagaaacc

SEQ ID NO: 47941 - DNA, 20 bp, Artificial Sequence
  MKO10047941_A_Serpinb9
  gRNA
cagcctggtttctgaatcga

SEQ ID NO: 47942 - DNA, 20 bp, Artificial Sequence
  MKO10047942_A_Serpinc1
  gRNA
gaaccgttctataaggtcga

SEQ ID NO: 47943 - DNA, 20 bp, Artificial Sequence
  MKO10047943_A_Serpinc1
  gRNA
caaattcaaataccggcgcg

SEQ ID NO: 47944 - DNA, 20 bp, Artificial Sequence
  MKO10047944_A_Serpinc1
  gRNA
atcttgatagctctcgttga

SEQ ID NO: 47945 - DNA, 20 bp, Artificial Sequence
  MKO10047945_A_Serpind1
  gRNA
agctttgaagtcctcccgta

SEQ ID NO: 47946 - DNA, 20 bp, Artificial Sequence
  MKO10047946_A_Serpind1
  gRNA
agctgacccatcgtctattc

SEQ ID NO: 47947 - DNA, 20 bp, Artificial Sequence
  MKO10047947_A_Serpind1
  gRNA
ccaggtcaatggcgatcctc

SEQ ID NO: 47948 - DNA, 20 bp, Artificial Sequence
  MKO10047948_A_Serpine1
  gRNA
aacgtcatactcgagcccat

SEQ ID NO: 47949 - DNA, 20 bp, Artificial Sequence
  MKO10047949_A_Serpine1
  gRNA
cagctcgtctacagccccct

SEQ ID NO: 47950 - DNA, 20 bp, Artificial Sequence
  MKO10047950_A_Serpine1
  gRNA
tgtagacgagctgacacgcc

SEQ ID NO: 47951 - DNA, 20 bp, Artificial Sequence
  MKO10047951_A_Serpine2
  gRNA
agggcaccatcgatcagatt

SEQ ID NO: 47952 - DNA, 20 bp, Artificial Sequence
  MKO10047952_A_Serpine2
  gRNA
ggtgttcatccagctatcaa

SEQ ID NO: 47953 - DNA, 20 bp, Artificial Sequence
  MKO10047953_A_Serpine2
  gRNA
tgaaatacactgcattaacg

SEQ ID NO: 47954 - DNA, 20 bp, Artificial Sequence
  MKO10047954_A_Serpine3
  gRNA
cggccccacaacgggctatc

SEQ ID NO: 47955 - DNA, 20 bp, Artificial Sequence
  MKO10047955_A_Serpine3
  gRNA
cgagcctaacagcactacca

SEQ ID NO: 47956 - DNA, 20 bp, Artificial Sequence
  MKO10047956_A_Serpine3
  gRNA
aaggcccagatagcccgttg

SEQ ID NO: 47957 - DNA, 20 bp, Artificial Sequence
  MKO10047957_A_Serpinf1
  gRNA
gtacagatcgtagccgaagt

SEQ ID NO: 47958 - DNA, 20 bp, Artificial Sequence
  MKO10047958_A_Serpinf1
  gRNA
gtccaagccgtatcgtaaga

SEQ ID NO: 47959 - DNA, 20 bp, Artificial Sequence
  MKO10047959_A_Serpinf1
  gRNA
gaagattgcccggtccacga

SEQ ID NO: 47960 - DNA, 20 bp, Artificial Sequence
  MKO10047960_A_Serpinf2
  gRNA
gttctctccggtgagcgccg

SEQ ID NO: 47961 - DNA, 20 bp, Artificial Sequence
  MKO10047961_A_Serpinf2
  gRNA
cagccagtcggattgtccct

SEQ ID NO: 47962 - DNA, 20 bp, Artificial Sequence
  MKO10047962_A_Serpinf2
  gRNA
cctggttgtccaacttgaag

SEQ ID NO: 47963 - DNA, 20 bp, Artificial Sequence
  MKO10047963_A_Serping1
  gRNA
ccagcagcttgcggatctta

SEQ ID NO: 47964 - DNA, 20 bp, Artificial Sequence
  MKO10047964_A_Serping1
  gRNA
ccataagatccgcaagctgc

SEQ ID NO: 47965 - DNA, 20 bp, Artificial Sequence
  MKO10047965_A_Serping1
  gRNA
gtactttacgctactcatca

SEQ ID NO: 47966 - DNA, 20 bp, Artificial Sequence
  MKO10047966_A_Serpinh1
  gRNA
atcgcgcatgtctggcaaga

SEQ ID NO: 47967 - DNA, 20 bp, Artificial Sequence
  MKO10047967_A_Serpinh1
  gRNA
tcacggagctgggcccgtac

SEQ ID NO: 47968 - DNA, 20 bp, Artificial Sequence
  MKO10047968_A_Serpinh1
  gRNA
gttacgatgatgcaccggac

SEQ ID NO: 47969 - DNA, 20 bp, Artificial Sequence
  MKO10047969_A_Serpini1
  gRNA
actttcatcatctttcgtga

SEQ ID NO: 47970 - DNA, 20 bp, Artificial Sequence
  MKO10047970_A_Serpini1
  gRNA
aagcacagctgatcgaagaa

SEQ ID NO: 47971 - DNA, 20 bp, Artificial Sequence
  MKO10047971_A_Serpini1
  gRNA
aattcgctctttgtacaaaa

SEQ ID NO: 47972 - DNA, 20 bp, Artificial Sequence
  MKO10047972_A_Serpini2
  gRNA
atttggccccttgactcgtc

SEQ ID NO: 47973 - DNA, 20 bp, Artificial Sequence
  MKO10047973_A_Serpini2
  gRNA
ttcgatgctcgtgtcttccg

SEQ ID NO: 47974 - DNA, 20 bp, Artificial Sequence
  MKO10047974_A_Serpini2
  gRNA
caccaggaccagacgagtca

SEQ ID NO: 47975 - DNA, 20 bp, Artificial Sequence
  MKO10047975_A_Sertad1
  gRNA
agtggcgcagaccccgccga

SEQ ID NO: 47976 - DNA, 20 bp, Artificial Sequence
  MKO10047976_A_Sertad1
  gRNA
ccaaagttcactgtcgtaca

SEQ ID NO: 47977 - DNA, 20 bp, Artificial Sequence
  MKO10047977_A_Sertad1
  gRNA
cgagccggacctccggcacc

SEQ ID NO: 47978 - DNA, 20 bp, Artificial Sequence
  MKO10047978_A_Sertad2
  gRNA
catcgttgtcgtcctcgagc

SEQ ID NO: 47979 - DNA, 20 bp, Artificial Sequence
  MKO10047979_A_Sertad2
  gRNA
gaagatagtctggcgctgta

SEQ ID NO: 47980 - DNA, 20 bp, Artificial Sequence
  MKO10047980_A_Sertad2
  gRNA
aaaatcgtgtccccctccga

SEQ ID NO: 47981 - DNA, 20 bp, Artificial Sequence
  MKO10047981_A_Sertad3
  gRNA
ccagaatgagatcgtgtccc

SEQ ID NO: 47982 - DNA, 20 bp, Artificial Sequence
  MKO10047982_A_Sertad3
  gRNA
tggaaccgatggtggtagat

SEQ ID NO: 47983 - DNA, 20 bp, Artificial Sequence
  MKO10047983_A_Sertad3
  gRNA
tgatacatctgcggtggaaa

SEQ ID NO: 47984 - DNA, 20 bp, Artificial Sequence
  MKO10047984_A_Sertad4
  gRNA
aagcacctcggccgccgctg

SEQ ID NO: 47985 - DNA, 20 bp, Artificial Sequence
  MKO10047985_A_Sertad4
  gRNA
tacggaggtgcgagcccccc

SEQ ID NO: 47986 - DNA, 20 bp, Artificial Sequence
  MKO10047986_A_Sertad4
  gRNA
gtgtgctcgctcctcgaaaa

SEQ ID NO: 47987 - DNA, 20 bp, Artificial Sequence
  MKO10047987_A_Sertm1
  gRNA
cgaggacgagtccaccgacg

SEQ ID NO: 47988 - DNA, 20 bp, Artificial Sequence
  MKO10047988_A_Sertm1
  gRNA
atactccgggtacgaggagc

SEQ ID NO: 47989 - DNA, 20 bp, Artificial Sequence
  MKO10047989_A_Sertm1
  gRNA
tcccacatcgctgtccacgt

SEQ ID NO: 47990 - DNA, 20 bp, Artificial Sequence
  MKO10047990_A_Sesn1
  gRNA
ttccaatgtagtgccgataa

SEQ ID NO: 47991 - DNA, 20 bp, Artificial Sequence
  MKO10047991_A_Sesn1
  gRNA
cagctggtctctcgccgagc

SEQ ID NO: 47992 - DNA, 20 bp, Artificial Sequence
  MKO10047992_A_Sesn1
  gRNA
gattaccaaagaacatatcg

SEQ ID NO: 47993 - DNA, 20 bp, Artificial Sequence
  MKO10047993_A_Sesn2
  gRNA
tttcccgtaggagcatcggg

SEQ ID NO: 47994 - DNA, 20 bp, Artificial Sequence
  MKO10047994_A_Sesn2
  gRNA
tcaacaagttactggcgcat

SEQ ID NO: 47995 - DNA, 20 bp, Artificial Sequence
  MKO10047995_A_Sesn2
  gRNA
ctcgagagcctcgccgagcc

SEQ ID NO: 47996 - DNA, 20 bp, Artificial Sequence
  MKO10047996_A_Sesn3
  gRNA
gtactctacatccggtcgcc

SEQ ID NO: 47997 - DNA, 20 bp, Artificial Sequence
  MKO10047997_A_Sesn3
  gRNA
gttcatccgccgtatttgct

SEQ ID NO: 47998 - DNA, 20 bp, Artificial Sequence
  MKO10047998_A_Sesn3
  gRNA
cttggctcactatcacgctt

SEQ ID NO: 47999 - DNA, 20 bp, Artificial Sequence
  MKO10047999_A_Sestd1
  gRNA
gacagttgtcttaatgctgc

SEQ ID NO: 48000 - DNA, 20 bp, Artificial Sequence
  MKO10048000_A_Sestd1
  gRNA
cagaggattcactgtgatcg

SEQ ID NO: 48001 - DNA, 20 bp, Artificial Sequence
  MKO10048001_A_Sestd1
  gRNA
catccatacttgtctgctca

SEQ ID NO: 48002 - DNA, 20 bp, Artificial Sequence
  MKO10048002_A_Setbp1
  gRNA
agtcgaaagagtacctccgc

SEQ ID NO: 48003 - DNA, 20 bp, Artificial Sequence
  MKO10048003_A_Setbp1
  gRNA
agctaccgccgaaaaactga

SEQ ID NO: 48004 - DNA, 20 bp, Artificial Sequence
  MKO10048004_A_Setbp1
  gRNA
ggagtcctcatcgaactgtg

SEQ ID NO: 48005 - DNA, 20 bp, Artificial Sequence
  MKO10048005_A_Setd1a
  gRNA
tttagactgaagcccgccga

SEQ ID NO: 48006 - DNA, 20 bp, Artificial Sequence
  MKO10048006_A_Setd1a
  gRNA
catagtacttcattcgttgt

SEQ ID NO: 48007 - DNA, 20 bp, Artificial Sequence
  MKO10048007_A_Setd1a
  gRNA
ggcctaggtgctttcgagtg

SEQ ID NO: 48008 - DNA, 20 bp, Artificial Sequence
  MKO10048008_A_Setd1b
  gRNA
cccactgtcgcggctcccaa

SEQ ID NO: 48009 - DNA, 20 bp, Artificial Sequence
  MKO10048009_A_Setd1b
  gRNA
acgtccgtgaaaacttccta

SEQ ID NO: 48010 - DNA, 20 bp, Artificial Sequence
  MKO10048010_A_Setd1b
  gRNA
tcgtcagtcacccccaatag

SEQ ID NO: 48011 - DNA, 20 bp, Artificial Sequence
  MKO10048011_A_Setd2
  gRNA
gatctctttcggaccgacat

SEQ ID NO: 48012 - DNA, 20 bp, Artificial Sequence
  MKO10048012_A_Setd2
  gRNA
gtcggtccgaaagagatcga

SEQ ID NO: 48013 - DNA, 20 bp, Artificial Sequence
  MKO10048013_A_Setd2
  gRNA
actgcattcgcttaatatcc

SEQ ID NO: 48014 - DNA, 20 bp, Artificial Sequence
  MKO10048014_A_Setd3
  gRNA
ctatttctataaagtcatcc

SEQ ID NO: 48015 - DNA, 20 bp, Artificial Sequence
  MKO10048015_A_Setd3
  gRNA
agcagtcctgcacccagccc

SEQ ID NO: 48016 - DNA, 20 bp, Artificial Sequence
  MKO10048016_A_Setd3
  gRNA
gggaagagtacacgcagatc

SEQ ID NO: 48017 - DNA, 20 bp, Artificial Sequence
  MKO10048017_A_Setd4
  gRNA
gatgagcaaagcgtcgttgc

SEQ ID NO: 48018 - DNA, 20 bp, Artificial Sequence
  MKO10048018_A_Setd4
  gRNA
gtgtgcgcttgctccgttcc

SEQ ID NO: 48019 - DNA, 20 bp, Artificial Sequence
  MKO10048019_A_Setd4
  gRNA
cctggtgttcaccgtgcacc

SEQ ID NO: 48020 - DNA, 20 bp, Artificial Sequence
  MKO10048020_A_Setd5
  gRNA
tcgcccgtagaggaacgctg

SEQ ID NO: 48021 - DNA, 20 bp, Artificial Sequence
  MKO10048021_A_Setd5
  gRNA
acgctcttctcattaactgc

SEQ ID NO: 48022 - DNA, 20 bp, Artificial Sequence
  MKO10048022_A_Setd5
  gRNA
gtgtattccactcataatta

SEQ ID NO: 48023 - DNA, 20 bp, Artificial Sequence
  MKO10048023_A_Setd6
  gRNA
ctgacctataagccatcacg

SEQ ID NO: 48024 - DNA, 20 bp, Artificial Sequence
  MKO10048024_A_Setd6
  gRNA
agtcgcaaccgctcttcctc

SEQ ID NO: 48025 - DNA, 20 bp, Artificial Sequence
  MKO10048025_A_Setd6
  gRNA
cactgccgagtactctagat

SEQ ID NO: 48026 - DNA, 20 bp, Artificial Sequence
  MKO10048026_A_Setd7
  gRNA
ttacgtggacgatgccctgc

SEQ ID NO: 48027 - DNA, 20 bp, Artificial Sequence
  MKO10048027_A_Setd7
  gRNA
cgtccacgtaatatccctcc

SEQ ID NO: 48028 - DNA, 20 bp, Artificial Sequence
  MKO10048028_A_Setd7
  gRNA
cccgacgtcacttcaaagtg

SEQ ID NO: 48029 - DNA, 20 bp, Artificial Sequence
  MKO10048029_A_Setd8
  gRNA
gcctgcttaccccgtcgctg

SEQ ID NO: 48030 - DNA, 20 bp, Artificial Sequence
  MKO10048030_A_Setd8
  gRNA
gaagatgtgcaagccccgcg

SEQ ID NO: 48031 - DNA, 20 bp, Artificial Sequence
  MKO10048031_A_Setd8
  gRNA
ttctaggagaacgtgtttgc

SEQ ID NO: 48032 - DNA, 20 bp, Artificial Sequence
  MKO10048032_A_Setdb1
  gRNA
cctacagcttcgtgaagcta

SEQ ID NO: 48033 - DNA, 20 bp, Artificial Sequence
  MKO10048033_A_Setdb1
  gRNA
caactcaccttctggtcttt

SEQ ID NO: 48034 - DNA, 20 bp, Artificial Sequence
  MKO10048034_A_Setdb1
  gRNA
agttctcaagatctacataa

SEQ ID NO: 48035 - DNA, 20 bp, Artificial Sequence
  MKO10048035_A_Setdb2
  gRNA
tacgggatagtacagccctt

SEQ ID NO: 48036 - DNA, 20 bp, Artificial Sequence
  MKO10048036_A_Setdb2
  gRNA
taggtgatgcaaagactttc

SEQ ID NO: 48037 - DNA, 20 bp, Artificial Sequence
  MKO10048037_A_Setdb2
  gRNA
ttcattacttattccaatcc

SEQ ID NO: 48038 - DNA, 20 bp, Artificial Sequence
  MKO10048038_A_Setmar
  gRNA
accattgagtcaattcggac

SEQ ID NO: 48039 - DNA, 20 bp, Artificial Sequence
  MKO10048039_A_Setmar
  gRNA
gaactctcttacgactattc

SEQ ID NO: 48040 - DNA, 20 bp, Artificial Sequence
  MKO10048040_A_Setmar
  gRNA
gaacaacaagatgtagcgtg

SEQ ID NO: 48041 - DNA, 20 bp, Artificial Sequence
  MKO10048041_A_Setx
  gRNA
caattacttaggttcggcga

SEQ ID NO: 48042 - DNA, 20 bp, Artificial Sequence
  MKO10048042_A_Setx
  gRNA
cgctcatgcagaagcaagta

SEQ ID NO: 48043 - DNA, 20 bp, Artificial Sequence
  MKO10048043_A_Setx
  gRNA
gaacagctgtttgactgtag

SEQ ID NO: 48044 - DNA, 20 bp, Artificial Sequence
  MKO10048044_A_Set
  gRNA
acatttgtcaaccatccaca

SEQ ID NO: 48045 - DNA, 20 bp, Artificial Sequence
  MKO10048045_A_Set
  gRNA
tctctagtgtctgcactgct

SEQ ID NO: 48046 - DNA, 20 bp, Artificial Sequence
  MKO10048046_A_Set
  gRNA
aagtacaaaatgaaatagac

SEQ ID NO: 48047 - DNA, 20 bp, Artificial Sequence
  MKO10048047_A_Sez6l2
  gRNA
cccggcaagaagccgatctc

SEQ ID NO: 48048 - DNA, 20 bp, Artificial Sequence
  MKO10048048_A_Sez6l2
  gRNA
cgaagggtttgtggagtctc

SEQ ID NO: 48049 - DNA, 20 bp, Artificial Sequence
  MKO10048049_A_Sez6l2
  gRNA
tgaatctcaatgccataacc

SEQ ID NO: 48050 - DNA, 20 bp, Artificial Sequence
  MKO10048050_A_Sez6l
  gRNA
gatcgcgcccttcactgcac

SEQ ID NO: 48051 - DNA, 20 bp, Artificial Sequence
  MKO10048051_A_Sez6l
  gRNA
cacaagccgcgggacccgac

SEQ ID NO: 48052 - DNA, 20 bp, Artificial Sequence
  MKO10048052_A_Sez6l
  gRNA
tagctacgatgcccgtggca

SEQ ID NO: 48053 - DNA, 20 bp, Artificial Sequence
  MKO10048053_A_Sez6
  gRNA
tttccccgacgtccagcgta

SEQ ID NO: 48054 - DNA, 20 bp, Artificial Sequence
  MKO10048054_A_Sez6
  gRNA
taccagtccgactccagccg

SEQ ID NO: 48055 - DNA, 20 bp, Artificial Sequence
  MKO10048055_A_Sez6
  gRNA
ccttaccttggtagcggaaa

SEQ ID NO: 48056 - DNA, 20 bp, Artificial Sequence
  MKO10048056_A_Sf1
  gRNA
ctgtgcgcagtttacgagtc

SEQ ID NO: 48057 - DNA, 20 bp, Artificial Sequence
  MKO10048057_A_Sf1
  gRNA
cggagcgaacgccacgccgc

SEQ ID NO: 48058 - DNA, 20 bp, Artificial Sequence
  MKO10048058_A_Sf1
  gRNA
ctgactcgtaaactgcgcac

SEQ ID NO: 48059 - DNA, 20 bp, Artificial Sequence
  MKO10048059_A_Sf3a1
  gRNA
ccaagagaccatagtaccga

SEQ ID NO: 48060 - DNA, 20 bp, Artificial Sequence
  MKO10048060_A_Sf3a1
  gRNA
gggtaaataatgccgaccac

SEQ ID NO: 48061 - DNA, 20 bp, Artificial Sequence
  MKO10048061_A_Sf3a1
  gRNA
agggggctccttcggtacta

SEQ ID NO: 48062 - DNA, 20 bp, Artificial Sequence
  MKO10048062_A_Sf3a2
  gRNA
tgcactcataggatcccaag

SEQ ID NO: 48063 - DNA, 20 bp, Artificial Sequence
  MKO10048063_A_Sf3a2
  gRNA
ctctttgcaggggagctacc

SEQ ID NO: 48064 - DNA, 20 bp, Artificial Sequence
  MKO10048064_A_Sf3a2
  gRNA
aggctgggcgggggcttctt

SEQ ID NO: 48065 - DNA, 20 bp, Artificial Sequence
  MKO10048065_A_Sf3a3
  gRNA
catcttgcatggcccgagtg

SEQ ID NO: 48066 - DNA, 20 bp, Artificial Sequence
  MKO10048066_A_Sf3a3
  gRNA
ccatcggaagcacccaaatg

SEQ ID NO: 48067 - DNA, 20 bp, Artificial Sequence
  MKO10048067_A_Sf3a3
  gRNA
tcaattccgatcaccgcact

SEQ ID NO: 48068 - DNA, 20 bp, Artificial Sequence
  MKO10048068_A_Sf3b1
  gRNA
gtcctccaaagattgccgat

SEQ ID NO: 48069 - DNA, 20 bp, Artificial Sequence
  MKO10048069_A_Sf3b1
  gRNA
gcctggatatcatgcccccg

SEQ ID NO: 48070 - DNA, 20 bp, Artificial Sequence
  MKO10048070_A_Sf3b1
  gRNA
tatatcattaagcaacgcca

SEQ ID NO: 48071 - DNA, 20 bp, Artificial Sequence
  MKO10048071_A_Sf3b2
  gRNA
tcgtcctatagggagtcgcg

SEQ ID NO: 48072 - DNA, 20 bp, Artificial Sequence
  MKO10048072_A_Sf3b2
  gRNA
gtcttaccgcgaggccccag

SEQ ID NO: 48073 - DNA, 20 bp, Artificial Sequence
  MKO10048073_A_Sf3b2
  gRNA
gctgcagacctacacccgtc

SEQ ID NO: 48074 - DNA, 20 bp, Artificial Sequence
  MKO10048074_A_Sf3b3
  gRNA
ggatgtcgccgtattgttcc

SEQ ID NO: 48075 - DNA, 20 bp, Artificial Sequence
  MKO10048075_A_Sf3b3
  gRNA
tccggtcacttatggcgttt

SEQ ID NO: 48076 - DNA, 20 bp, Artificial Sequence
  MKO10048076_A_Sf3b3
  gRNA
tcacgtggttggcgtagacg

SEQ ID NO: 48077 - DNA, 20 bp, Artificial Sequence
  MKO10048077_A_Sf3b4
  gRNA
ccaatgggcatgcccccccg

SEQ ID NO: 48078 - DNA, 20 bp, Artificial Sequence
  MKO10048078_A_Sf3b4
  gRNA
tttagatgccacggtgtacg

SEQ ID NO: 48079 - DNA, 20 bp, Artificial Sequence
  MKO10048079_A_Sf3b4
  gRNA
tacacaggcatgccgcctcc

SEQ ID NO: 48080 - DNA, 20 bp, Artificial Sequence
  MKO10048080_A_Sf3b5
  gRNA
agagcggcgcgatgacggac

SEQ ID NO: 48081 - DNA, 20 bp, Artificial Sequence
  MKO10048081_A_Sf3b5
  gRNA
gtggcccgtgccgatgtact

SEQ ID NO: 48082 - DNA, 20 bp, Artificial Sequence
  MKO10048082_A_Sf3b5
  gRNA
acgagagcaaagcccgcgtg

SEQ ID NO: 48083 - DNA, 20 bp, Artificial Sequence
  MKO10048083_A_Sfi1
  gRNA
gattacaagaacttcgaatc

SEQ ID NO: 48084 - DNA, 20 bp, Artificial Sequence
  MKO10048084_A_Sfi1
  gRNA
tcactcgaatccacaaatac

SEQ ID NO: 48085 - DNA, 20 bp, Artificial Sequence
  MKO10048085_A_Sfi1
  gRNA
actatcatgcctcacaaaac

SEQ ID NO: 48086 - DNA, 20 bp, Artificial Sequence
  MKO10048086_A_Sfmbt1
  gRNA
tacatgtttaaacgatgcgt

SEQ ID NO: 48087 - DNA, 20 bp, Artificial Sequence
  MKO10048087_A_Sfmbt1
  gRNA
ccttacctaatgggggctga

SEQ ID NO: 48088 - DNA, 20 bp, Artificial Sequence
  MKO10048088_A_Sfmbt1
  gRNA
catagccttcataacgaagc

SEQ ID NO: 48089 - DNA, 20 bp, Artificial Sequence
  MKO10048089_A_Sfmbt2
  gRNA
gagttgcgcttcttcgaaac

SEQ ID NO: 48090 - DNA, 20 bp, Artificial Sequence
  MKO10048090_A_Sfmbt2
  gRNA
catagcggatctgcaccctg

SEQ ID NO: 48091 - DNA, 20 bp, Artificial Sequence
  MKO10048091_A_Sfmbt2
  gRNA
ccccgtaaccacagtaacgc

SEQ ID NO: 48092 - DNA, 20 bp, Artificial Sequence
  MKO10048092_A_Sfn
  gRNA
cgagtccagcaggccgagta

SEQ ID NO: 48093 - DNA, 20 bp, Artificial Sequence
  MKO10048093_A_Sfn
  gRNA
caccacgttcttgtaagcta

SEQ ID NO: 48094 - DNA, 20 bp, Artificial Sequence
  MKO10048094_A_Sfn
  gRNA
agttggctgaacaggccgaa

SEQ ID NO: 48095 - DNA, 20 bp, Artificial Sequence
  MKO10048095_A_Sfpq
  gRNA
ggcctcttccaaaagttcgt

SEQ ID NO: 48096 - DNA, 20 bp, Artificial Sequence
  MKO10048096_A_Sfpq
  gRNA
agacaacttacgttgtcagt

SEQ ID NO: 48097 - DNA, 20 bp, Artificial Sequence
  MKO10048097_A_Sfpq
  gRNA
cttggcgcaaaagatttgct

SEQ ID NO: 48098 - DNA, 20 bp, Artificial Sequence
  MKO10048098_A_Sfr1
  gRNA
accgagctgatcgacttcta

SEQ ID NO: 48099 - DNA, 20 bp, Artificial Sequence
  MKO10048099_A_Sfr1
  gRNA
ctaactttaacctccgaaga

SEQ ID NO: 48100 - DNA, 20 bp, Artificial Sequence
  MKO10048100_A_Sfr1
  gRNA
cccgtagaagtcgatcagct

SEQ ID NO: 48101 - DNA, 20 bp, Artificial Sequence
  MKO10048101_A_Sfrp1
  gRNA
ggcccatctacccgtgtcgc

SEQ ID NO: 48102 - DNA, 20 bp, Artificial Sequence
  MKO10048102_A_Sfrp1
  gRNA
gctcacgtagtcgtactcgc

SEQ ID NO: 48103 - DNA, 20 bp, Artificial Sequence
  MKO10048103_A_Sfrp1
  gRNA
gacttcaactcgttgtcgca

SEQ ID NO: 48104 - DNA, 20 bp, Artificial Sequence
  MKO10048104_A_Sfrp2
  gRNA
cgacatcaacgctccgtatc

SEQ ID NO: 48105 - DNA, 20 bp, Artificial Sequence
  MKO10048105_A_Sfrp2
  gRNA
ggaggtggtcgctactagcg

SEQ ID NO: 48106 - DNA, 20 bp, Artificial Sequence
  MKO10048106_A_Sfrp2
  gRNA
gccccggtcatgtccgcctt

SEQ ID NO: 48107 - DNA, 20 bp, Artificial Sequence
  MKO10048107_A_Sfrp4
  gRNA
agatcggtgcaagtgcaaaa

SEQ ID NO: 48108 - DNA, 20 bp, Artificial Sequence
  MKO10048108_A_Sfrp4
  gRNA
ccaaaataaaagccgtccag

SEQ ID NO: 48109 - DNA, 20 bp, Artificial Sequence
  MKO10048109_A_Sfrp4
  gRNA
acgtttacagtcagcatcaa

SEQ ID NO: 48110 - DNA, 20 bp, Artificial Sequence
  MKO10048110_A_Sfrp5
  gRNA
ctgtgcgaagccgtgcgcgc

SEQ ID NO: 48111 - DNA, 20 bp, Artificial Sequence
  MKO10048111_A_Sfrp5
  gRNA
aaccgtagtagtcgtactcc

SEQ ID NO: 48112 - DNA, 20 bp, Artificial Sequence
  MKO10048112_A_Sfrp5
  gRNA
tgctcacggccgtctaccgc

SEQ ID NO: 48113 - DNA, 20 bp, Artificial Sequence
  MKO10048113_A_Sfrs18
  gRNA
agcatcgtagaacaacctcc

SEQ ID NO: 48114 - DNA, 20 bp, Artificial Sequence
  MKO10048114_A_Sfrs18
  gRNA
gggagtttgcccctgacaac

SEQ ID NO: 48115 - DNA, 20 bp, Artificial Sequence
  MKO10048115_A_Sfrs18
  gRNA
aaacagatgcagtaaaacgc

SEQ ID NO: 48116 - DNA, 20 bp, Artificial Sequence
  MKO10048116_A_Sfswap
  gRNA
cattacagatacgacgggcg

SEQ ID NO: 48117 - DNA, 20 bp, Artificial Sequence
  MKO10048117_A_Sfswap
  gRNA
attaagcgtcccgtctgatg

SEQ ID NO: 48118 - DNA, 20 bp, Artificial Sequence
  MKO10048118_A_Sfswap
  gRNA
ctcaagcaagtccgtatgca

SEQ ID NO: 48119 - DNA, 20 bp, Artificial Sequence
  MKO10048119_A_Sft2d1
  gRNA
tttagggaacggggttgcta

SEQ ID NO: 48120 - DNA, 20 bp, Artificial Sequence
  MKO10048120_A_Sft2d1
  gRNA
cacacctggccaatgcagca

SEQ ID NO: 48121 - DNA, 20 bp, Artificial Sequence
  MKO10048121_A_Sft2d1
  gRNA
ttacccacagagcagcacac

SEQ ID NO: 48122 - DNA, 20 bp, Artificial Sequence
  MKO10048122_A_Sft2d2
  gRNA
gcgtctcatcgccacaattc

SEQ ID NO: 48123 - DNA, 20 bp, Artificial Sequence
  MKO10048123_A_Sft2d2
  gRNA
tggaggcgtcgtcgctgagc

SEQ ID NO: 48124 - DNA, 20 bp, Artificial Sequence
  MKO10048124_A_Sft2d2
  gRNA
aaagaggccgagtcccttcc

SEQ ID NO: 48125 - DNA, 20 bp, Artificial Sequence
  MKO10048125_A_Sft2d3
  gRNA
gcgtgcggccgcctgctacg

SEQ ID NO: 48126 - DNA, 20 bp, Artificial Sequence
  MKO10048126_A_Sft2d3
  gRNA
gcgctgctctacgcgttgat

SEQ ID NO: 48127 - DNA, 20 bp, Artificial Sequence
  MKO10048127_A_Sft2d3
  gRNA
ctaggccagtcccgcgattt

SEQ ID NO: 48128 - DNA, 20 bp, Artificial Sequence
  MKO10048128_A_Sfta2
  gRNA
gaggcgcatcaaagactcca

SEQ ID NO: 48129 - DNA, 20 bp, Artificial Sequence
  MKO10048129_A_Sfta2
  gRNA
ctcctcagcagctcacacgc

SEQ ID NO: 48130 - DNA, 20 bp, Artificial Sequence
  MKO10048130_A_Sfta2
  gRNA
agggccaaaggtgactttgc

SEQ ID NO: 48131 - DNA, 20 bp, Artificial Sequence
  MKO10048131_A_Sftpa1
  gRNA
agcaatgtggccaccggctc

SEQ ID NO: 48132 - DNA, 20 bp, Artificial Sequence
  MKO10048132_A_Sftpa1
  gRNA
gatggtatcaaaggagaccc

SEQ ID NO: 48133 - DNA, 20 bp, Artificial Sequence
  MKO10048133_A_Sftpa1
  gRNA
cttctttgtaatgcttgcga

SEQ ID NO: 48134 - DNA, 20 bp, Artificial Sequence
  MKO10048134_A_Sftpb
  gRNA
catcaagcacttggcgacac

SEQ ID NO: 48135 - DNA, 20 bp, Artificial Sequence
  MKO10048135_A_Sftpb
  gRNA
ggaacggcatccggcatccc

SEQ ID NO: 48136 - DNA, 20 bp, Artificial Sequence
  MKO10048136_A_Sftpb
  gRNA
tcaattctggtgccaaagcc

SEQ ID NO: 48137 - DNA, 20 bp, Artificial Sequence
  MKO10048137_A_Sftpc
  gRNA
ctacaatcaccacgacaacg

SEQ ID NO: 48138 - DNA, 20 bp, Artificial Sequence
  MKO10048138_A_Sftpc
  gRNA
ctctctcaggattactcggc

SEQ ID NO: 48139 - DNA, 20 bp, Artificial Sequence
  MKO10048139_A_Sftpc
  gRNA
gagctggcttataggccgtc

SEQ ID NO: 48140 - DNA, 20 bp, Artificial Sequence
  MKO10048140_A_Sftpd
  gRNA
cctgtagatccttgcatgcc

SEQ ID NO: 48141 - DNA, 20 bp, Artificial Sequence
  MKO10048141_A_Sftpd
  gRNA
cttagtccacgttctccctt

SEQ ID NO: 48142 - DNA, 20 bp, Artificial Sequence
  MKO10048142_A_Sftpd
  gRNA
tgctggcgaacctggaccaa

SEQ ID NO: 48143 - DNA, 20 bp, Artificial Sequence
  MKO10048143_A_Sfxn1
  gRNA
agcgaagtacgcgtacgact

SEQ ID NO: 48144 - DNA, 20 bp, Artificial Sequence
  MKO10048144_A_Sfxn1
  gRNA
gaacaaaacgtcctatcagt

SEQ ID NO: 48145 - DNA, 20 bp, Artificial Sequence
  MKO10048145_A_Sfxn1
  gRNA
aaaccagtccttcaatgccg

SEQ ID NO: 48146 - DNA, 20 bp, Artificial Sequence
  MKO10048146_A_Sfxn2
  gRNA
actcactgctgtcgcatcat

SEQ ID NO: 48147 - DNA, 20 bp, Artificial Sequence
  MKO10048147_A_Sfxn2
  gRNA
tgcgaagaagctctacgact

SEQ ID NO: 48148 - DNA, 20 bp, Artificial Sequence
  MKO10048148_A_Sfxn2
  gRNA
gctcgcctacctgacagacg

SEQ ID NO: 48149 - DNA, 20 bp, Artificial Sequence
  MKO10048149_A_Sfxn3
  gRNA
ggcacgaatcgaccgactag

SEQ ID NO: 48150 - DNA, 20 bp, Artificial Sequence
  MKO10048150_A_Sfxn3
  gRNA
tgctgagtcatacacgtatt

SEQ ID NO: 48151 - DNA, 20 bp, Artificial Sequence
  MKO10048151_A_Sfxn3
  gRNA
tagcacctgcccccgctagt

SEQ ID NO: 48152 - DNA, 20 bp, Artificial Sequence
  MKO10048152_A_Sfxn4
  gRNA
ctgacaaaatcttcgaaaaa

SEQ ID NO: 48153 - DNA, 20 bp, Artificial Sequence
  MKO10048153_A_Sfxn4
  gRNA
gacataccacttggttatcc

SEQ ID NO: 48154 - DNA, 20 bp, Artificial Sequence
  MKO10048154_A_Sfxn4
  gRNA
agatgcacccaaacactacc

SEQ ID NO: 48155 - DNA, 20 bp, Artificial Sequence
  MKO10048155_A_Sfxn5
  gRNA
gtgcctgaagcgaccgtaga

SEQ ID NO: 48156 - DNA, 20 bp, Artificial Sequence
  MKO10048156_A_Sfxn5
  gRNA
caaccaggctatcctacacc

SEQ ID NO: 48157 - DNA, 20 bp, Artificial Sequence
  MKO10048157_A_Sfxn5
  gRNA
aagatcttctcgttggtgtc

SEQ ID NO: 48158 - DNA, 20 bp, Artificial Sequence
  MKO10048158_A_Sgca
  gRNA
gtcaaaactgtctcgattgt

SEQ ID NO: 48159 - DNA, 20 bp, Artificial Sequence
  MKO10048159_A_Sgca
  gRNA
caaccgcttcctcaccgcct

SEQ ID NO: 48160 - DNA, 20 bp, Artificial Sequence
  MKO10048160_A_Sgca
  gRNA
gtccccgtaggtctcctggc

SEQ ID NO: 48161 - DNA, 20 bp, Artificial Sequence
  MKO10048161_A_Sgcb
  gRNA
aaactgcatcccgatgtcgc

SEQ ID NO: 48162 - DNA, 20 bp, Artificial Sequence
  MKO10048162_A_Sgcb
  gRNA
gtgatccgcattgggccaaa

SEQ ID NO: 48163 - DNA, 20 bp, Artificial Sequence
  MKO10048163_A_Sgcb
  gRNA
ccacccgctttataagagca

SEQ ID NO: 48164 - DNA, 20 bp, Artificial Sequence
  MKO10048164_A_Sgcd
  gRNA
ccctatacttcaaatctgcc

SEQ ID NO: 48165 - DNA, 20 bp, Artificial Sequence
  MKO10048165_A_Sgcd
  gRNA
tggtcgggacttgatttctt

SEQ ID NO: 48166 - DNA, 20 bp, Artificial Sequence
  MKO10048166_A_Sgcd
  gRNA
aatgttcactgtcacgttcc

SEQ ID NO: 48167 - DNA, 20 bp, Artificial Sequence
  MKO10048167_A_Sgce
  gRNA
ctgcagatgggtacacgttc

SEQ ID NO: 48168 - DNA, 20 bp, Artificial Sequence
  MKO10048168_A_Sgce
  gRNA
cggaacgtgtacccatctgc

SEQ ID NO: 48169 - DNA, 20 bp, Artificial Sequence
  MKO10048169_A_Sgce
  gRNA
tggatatatcgaagccatcc

SEQ ID NO: 48170 - DNA, 20 bp, Artificial Sequence
  MKO10048170_A_Sgcg
  gRNA
gtcagtgctcgcaactcaga

SEQ ID NO: 48171 - DNA, 20 bp, Artificial Sequence
  MKO10048171_A_Sgcg
  gRNA
gagcactgactgtcacgttc

SEQ ID NO: 48172 - DNA, 20 bp, Artificial Sequence
  MKO10048172_A_Sgcg
  gRNA
cactctggagcgtatttctt

SEQ ID NO: 48173 - DNA, 20 bp, Artificial Sequence
  MKO10048173_A_Sgcz
  gRNA
cgccatccataaatccccac

SEQ ID NO: 48174 - DNA, 20 bp, Artificial Sequence
  MKO10048174_A_Sgcz
  gRNA
ggatttatggatggcgaaag

SEQ ID NO: 48175 - DNA, 20 bp, Artificial Sequence
  MKO10048175_A_Sgcz
  gRNA
tatttcttaggacagtccat

SEQ ID NO: 48176 - DNA, 20 bp, Artificial Sequence
  MKO10048176_A_Sgip1
  gRNA
agaggctcgccagaccgaga

SEQ ID NO: 48177 - DNA, 20 bp, Artificial Sequence
  MKO10048177_A_Sgip1
  gRNA
atagcaaagcagagtgtgcg

SEQ ID NO: 48178 - DNA, 20 bp, Artificial Sequence
  MKO10048178_A_Sgip1
  gRNA
caggactgaaaaaacgtaca

SEQ ID NO: 48179 - DNA, 20 bp, Artificial Sequence
  MKO10048179_A_Sgk1
  gRNA
gaacgctaacccctctcctc

SEQ ID NO: 48180 - DNA, 20 bp, Artificial Sequence
  MKO10048180_A_Sgk1
  gRNA
gatatacttaccggaggaga

SEQ ID NO: 48181 - DNA, 20 bp, Artificial Sequence
  MKO10048181_A_Sgk1
  gRNA
tcttctgaataaaatcgttc

SEQ ID NO: 48182 - DNA, 20 bp, Artificial Sequence
  MKO10048182_A_Sgk2
  gRNA
ggctccgtccgacttgcgct

SEQ ID NO: 48183 - DNA, 20 bp, Artificial Sequence
  MKO10048183_A_Sgk2
  gRNA
cggagccttctacgccgtga

SEQ ID NO: 48184 - DNA, 20 bp, Artificial Sequence
  MKO10048184_A_Sgk2
  gRNA
cgttgcgctctgccatgatg

SEQ ID NO: 48185 - DNA, 20 bp, Artificial Sequence
  MKO10048185_A_Sgk3
  gRNA
tgtccgagcattccttcaaa

SEQ ID NO: 48186 - DNA, 20 bp, Artificial Sequence
  MKO10048186_A_Sgk3
  gRNA
cccacaggtttataaagttc

SEQ ID NO: 48187 - DNA, 20 bp, Artificial Sequence
  MKO10048187_A_Sgk3
  gRNA
gtcttgggctgtccatttga

SEQ ID NO: 48188 - DNA, 20 bp, Artificial Sequence
  MKO10048188_A_Sgms1
  gRNA
agaagattccaacgacgctg

SEQ ID NO: 48189 - DNA, 20 bp, Artificial Sequence
  MKO10048189_A_Sgms1
  gRNA
acattgtaatacaccgatac

SEQ ID NO: 48190 - DNA, 20 bp, Artificial Sequence
  MKO10048190_A_Sgms1
  gRNA
tgagcgttagcatgaccgtg

SEQ ID NO: 48191 - DNA, 20 bp, Artificial Sequence
  MKO10048191_A_Sgms2
  gRNA
cccgagacaagaagttcgtc

SEQ ID NO: 48192 - DNA, 20 bp, Artificial Sequence
  MKO10048192_A_Sgms2
  gRNA
tgataccaccagaagtgacg

SEQ ID NO: 48193 - DNA, 20 bp, Artificial Sequence
  MKO10048193_A_Sgms2
  gRNA
agcgcatgaacactataccg

SEQ ID NO: 48194 - DNA, 20 bp, Artificial Sequence
  MKO10048194_A_Sgol1
  gRNA
gacgtacctgtggtttggta

SEQ ID NO: 48195 - DNA, 20 bp, Artificial Sequence
  MKO10048195_A_Sgol1
  gRNA
tataagccactccacgactt

SEQ ID NO: 48196 - DNA, 20 bp, Artificial Sequence
  MKO10048196_A_Sgol1
  gRNA
gattgtccttaccaaaccac

SEQ ID NO: 48197 - DNA, 20 bp, Artificial Sequence
  MKO10048197_A_Sgol2
  gRNA
tcgcttaaagttaaatacct

SEQ ID NO: 48198 - DNA, 20 bp, Artificial Sequence
  MKO10048198_A_Sgol2
  gRNA
tttcaaattgcactgatgta

SEQ ID NO: 48199 - DNA, 20 bp, Artificial Sequence
  MKO10048199_A_Sgol2
  gRNA
cttgcatatggaagatgcgc

SEQ ID NO: 48200 - DNA, 20 bp, Artificial Sequence
  MKO10048200_A_Sgpl1
  gRNA
gatgccatttattggacgta

SEQ ID NO: 48201 - DNA, 20 bp, Artificial Sequence
  MKO10048201_A_Sgpl1
  gRNA
atccttggagatcgaacaac

SEQ ID NO: 48202 - DNA, 20 bp, Artificial Sequence
  MKO10048202_A_Sgpl1
  gRNA
gaaggacttcgagccttatt

SEQ ID NO: 48203 - DNA, 20 bp, Artificial Sequence
  MKO10048203_A_Sgpp1
  gRNA
agcccgttgcgcacgccgtt

SEQ ID NO: 48204 - DNA, 20 bp, Artificial Sequence
  MKO10048204_A_Sgpp1
  gRNA
gccatattacggatcgtcct

SEQ ID NO: 48205 - DNA, 20 bp, Artificial Sequence
  MKO10048205_A_Sgpp1
  gRNA
gcagcgccgcaactcgttga

SEQ ID NO: 48206 - DNA, 20 bp, Artificial Sequence
  MKO10048206_A_Sgpp2
  gRNA
ctgactactacagcccgacc

SEQ ID NO: 48207 - DNA, 20 bp, Artificial Sequence
  MKO10048207_A_Sgpp2
  gRNA
ccttacctgataccggtcca

SEQ ID NO: 48208 - DNA, 20 bp, Artificial Sequence
  MKO10048208_A_Sgpp2
  gRNA
accatgagaataatacttgc

SEQ ID NO: 48209 - DNA, 20 bp, Artificial Sequence
  MKO10048209_A_Sgsh
  gRNA
accccagatctacgaccctc

SEQ ID NO: 48210 - DNA, 20 bp, Artificial Sequence
  MKO10048210_A_Sgsh
  gRNA
cacctcacctgtgcgcactc

SEQ ID NO: 48211 - DNA, 20 bp, Artificial Sequence
  MKO10048211_A_Sgsh
  gRNA
ggtcatggaaagccacgtac

SEQ ID NO: 48212 - DNA, 20 bp, Artificial Sequence
  MKO10048212_A_Sgsm1
  gRNA
ccgcgatcttgttgcttcgc

SEQ ID NO: 48213 - DNA, 20 bp, Artificial Sequence
  MKO10048213_A_Sgsm1
  gRNA
taccagaaagttcgtccacg

SEQ ID NO: 48214 - DNA, 20 bp, Artificial Sequence
  MKO10048214_A_Sgsm1
  gRNA
cctgcgaagcaacaagatcg

SEQ ID NO: 48215 - DNA, 20 bp, Artificial Sequence
  MKO10048215_A_Sgsm2
  gRNA
cagctaagacgccgtgctgc

SEQ ID NO: 48216 - DNA, 20 bp, Artificial Sequence
  MKO10048216_A_Sgsm2
  gRNA
ccaagaagcccttcggaaac

SEQ ID NO: 48217 - DNA, 20 bp, Artificial Sequence
  MKO10048217_A_Sgsm2
  gRNA
tggcagcaagtattacgaga

SEQ ID NO: 48218 - DNA, 20 bp, Artificial Sequence
  MKO10048218_A_Sgsm3
  gRNA
accccccgcagaggctacgt

SEQ ID NO: 48219 - DNA, 20 bp, Artificial Sequence
  MKO10048219_A_Sgsm3
  gRNA
gaaactccgttccctagtgc

SEQ ID NO: 48220 - DNA, 20 bp, Artificial Sequence
  MKO10048220_A_Sgsm3
  gRNA
tgttacctgtttggcagcga

SEQ ID NO: 48221 - DNA, 20 bp, Artificial Sequence
  MKO10048221_A_Sgta
  gRNA
cgcgccattggcatcgaccc

SEQ ID NO: 48222 - DNA, 20 bp, Artificial Sequence
  MKO10048222_A_Sgta
  gRNA
gaactacgtgggggccgtgc

SEQ ID NO: 48223 - DNA, 20 bp, Artificial Sequence
  MKO10048223_A_Sgta
  gRNA
gctcaatggccttgccgtag

SEQ ID NO: 48224 - DNA, 20 bp, Artificial Sequence
  MKO10048224_A_Sgtb
  gRNA
gttcacaaactccgtctgta

SEQ ID NO: 48225 - DNA, 20 bp, Artificial Sequence
  MKO10048225_A_Sgtb
  gRNA
gtatttcgagtcaattgcaa

SEQ ID NO: 48226 - DNA, 20 bp, Artificial Sequence
  MKO10048226_A_Sgtb
  gRNA
atgccgtttattattgcaac

SEQ ID NO: 48227 - DNA, 20 bp, Artificial Sequence
  MKO10048227_A_Sh2b1
  gRNA
gagtaacgaccgcctgtcgc

SEQ ID NO: 48228 - DNA, 20 bp, Artificial Sequence
  MKO10048228_A_Sh2b1
  gRNA
cgaccttaccctgcgacagg

SEQ ID NO: 48229 - DNA, 20 bp, Artificial Sequence
  MKO10048229_A_Sh2b1
  gRNA
gcagttccatcgaatcaaaa

SEQ ID NO: 48230 - DNA, 20 bp, Artificial Sequence
  MKO10048230_A_Sh2b2
  gRNA
acccaccgctgtcgtcgtct

SEQ ID NO: 48231 - DNA, 20 bp, Artificial Sequence
  MKO10048231_A_Sh2b2
  gRNA
ccccgagacgacgacagcgg

SEQ ID NO: 48232 - DNA, 20 bp, Artificial Sequence
  MKO10048232_A_Sh2b2
  gRNA
acctcaatgatggccgacag

SEQ ID NO: 48233 - DNA, 20 bp, Artificial Sequence
  MKO10048233_A_Sh2b3
  gRNA
ggtccgaccatgtacacgcc

SEQ ID NO: 48234 - DNA, 20 bp, Artificial Sequence
  MKO10048234_A_Sh2b3
  gRNA
gccgcaccaggaacacgccg

SEQ ID NO: 48235 - DNA, 20 bp, Artificial Sequence
  MKO10048235_A_Sh2b3
  gRNA
gtgtacatggtcggacctcc

SEQ ID NO: 48236 - DNA, 20 bp, Artificial Sequence
  MKO10048236_A_Sh2d1a
  gRNA
ggcgtcacgatgccttgatc

SEQ ID NO: 48237 - DNA, 20 bp, Artificial Sequence
  MKO10048237_A_Sh2d1a
  gRNA
agaagctcttactcgctacc

SEQ ID NO: 48238 - DNA, 20 bp, Artificial Sequence
  MKO10048238_A_Sh2d1a
  gRNA
cgagacagcgagagtgtccc

SEQ ID NO: 48239 - DNA, 20 bp, Artificial Sequence
  MKO10048239_A_Sh2d1b1
  gRNA
agaaacaacctatgccaaag

SEQ ID NO: 48240 - DNA, 20 bp, Artificial Sequence
  MKO10048240_A_Sh2d1b1
  gRNA
atttggagaccaattcctgt

SEQ ID NO: 48241 - DNA, 20 bp, Artificial Sequence
  MKO10048241_A_Sh2d1b1
  gRNA
ttccccagagaacactgata

SEQ ID NO: 48242 - DNA, 20 bp, Artificial Sequence
  MKO10048242_A_Sh2d1b2
  gRNA
aagttcagtcttctcgctcc

SEQ ID NO: 48243 - DNA, 20 bp, Artificial Sequence
  MKO10048243_A_Sh2d1b2
  gRNA
cagaagccgcttctcattat

SEQ ID NO: 48244 - DNA, 20 bp, Artificial Sequence
  MKO10048244_A_Sh2d1b2
  gRNA
ttccccagagaacactgatg

SEQ ID NO: 48245 - DNA, 20 bp, Artificial Sequence
  MKO10048245_A_Sh2d2a
  gRNA
ctgccctatcggcattccct

SEQ ID NO: 48246 - DNA, 20 bp, Artificial Sequence
  MKO10048246_A_Sh2d2a
  gRNA
caccaccgtgtggttagttc

SEQ ID NO: 48247 - DNA, 20 bp, Artificial Sequence
  MKO10048247_A_Sh2d2a
  gRNA
gcccagcatgcaagttatga

SEQ ID NO: 48248 - DNA, 20 bp, Artificial Sequence
  MKO10048248_A_Sh2d3c
  gRNA
cctcacgagggatgcgtccg

SEQ ID NO: 48249 - DNA, 20 bp, Artificial Sequence
  MKO10048249_A_Sh2d3c
  gRNA
tgccctcgtgcgctaccacg

SEQ ID NO: 48250 - DNA, 20 bp, Artificial Sequence
  MKO10048250_A_Sh2d3c
  gRNA
gacaaggtcacccgcagcga

SEQ ID NO: 48251 - DNA, 20 bp, Artificial Sequence
  MKO10048251_A_Sh2d4a
  gRNA
ccaacagactaaacccgtca

SEQ ID NO: 48252 - DNA, 20 bp, Artificial Sequence
  MKO10048252_A_Sh2d4a
  gRNA
tgggcgccgataagcaggtg

SEQ ID NO: 48253 - DNA, 20 bp, Artificial Sequence
  MKO10048253_A_Sh2d4a
  gRNA
ctttctagtgcgaaaatcta

SEQ ID NO: 48254 - DNA, 20 bp, Artificial Sequence
  MKO10048254_A_Sh2d4b
  gRNA
gccgtcgtgctcagcgagcc

SEQ ID NO: 48255 - DNA, 20 bp, Artificial Sequence
  MKO10048255_A_Sh2d4b
  gRNA
cccgggctcgctgagcacga

SEQ ID NO: 48256 - DNA, 20 bp, Artificial Sequence
  MKO10048256_A_Sh2d4b
  gRNA
acgtatacacgaggaattca

SEQ ID NO: 48257 - DNA, 20 bp, Artificial Sequence
  MKO10048257_A_Sh2d5
  gRNA
ctcaggactgttcccgacgc

SEQ ID NO: 48258 - DNA, 20 bp, Artificial Sequence
  MKO10048258_A_Sh2d5
  gRNA
aagggctctcgcactaatgc

SEQ ID NO: 48259 - DNA, 20 bp, Artificial Sequence
  MKO10048259_A_Sh2d5
  gRNA
agcgcatcctctatgccacc

SEQ ID NO: 48260 - DNA, 20 bp, Artificial Sequence
  MKO10048260_A_Sh2d7
  gRNA
caggttggaatctgctcgta

SEQ ID NO: 48261 - DNA, 20 bp, Artificial Sequence
  MKO10048261_A_Sh2d7
  gRNA
tctgtgtagatgacgtcact

SEQ ID NO: 48262 - DNA, 20 bp, Artificial Sequence
  MKO10048262_A_Sh2d7
  gRNA
cggggactggtggccttgtc

SEQ ID NO: 48263 - DNA, 20 bp, Artificial Sequence
  MKO10048263_A_Sh3bgrl2
  gRNA
ggttaacctaccgtggatgc

SEQ ID NO: 48264 - DNA, 20 bp, Artificial Sequence
  MKO10048264_A_Sh3bgrl2
  gRNA
gtcttcgtcgcctcatgctc

SEQ ID NO: 48265 - DNA, 20 bp, Artificial Sequence
  MKO10048265_A_Sh3bgrl2
  gRNA
cgatccccattaaatatctg

SEQ ID NO: 48266 - DNA, 20 bp, Artificial Sequence
  MKO10048266_A_Sh3bgrl3
  gRNA
cctgcgcgtctacagcacgt

SEQ ID NO: 48267 - DNA, 20 bp, Artificial Sequence
  MKO10048267_A_Sh3bgrl3
  gRNA
ccgacgtgctgtagacgcgc

SEQ ID NO: 48268 - DNA, 20 bp, Artificial Sequence
  MKO10048268_A_Sh3bgrl3
  gRNA
catctcgaagggcgttgtcc

SEQ ID NO: 48269 - DNA, 20 bp, Artificial Sequence
  MKO10048269_A_Sh3bgrl
  gRNA
ttcaatgaatgccagtaccg

SEQ ID NO: 48270 - DNA, 20 bp, Artificial Sequence
  MKO10048270_A_Sh3bgrl
  gRNA
gaagacagtcgaccatccac

SEQ ID NO: 48271 - DNA, 20 bp, Artificial Sequence
  MKO10048271_A_Sh3bgrl
  gRNA
attccaggaagccgaagccc

SEQ ID NO: 48272 - DNA, 20 bp, Artificial Sequence
  MKO10048272_A_Sh3bgr
  gRNA
tgcaagcttacctttgaccc

SEQ ID NO: 48273 - DNA, 20 bp, Artificial Sequence
  MKO10048273_A_Sh3bgr
  gRNA
ggctccccctcctgggtcaa

SEQ ID NO: 48274 - DNA, 20 bp, Artificial Sequence
  MKO10048274_A_Sh3bgr
  gRNA
ggcaaagggatcccattctg

SEQ ID NO: 48275 - DNA, 20 bp, Artificial Sequence
  MKO10048275_A_Sh3bp1
  gRNA
tctcaaactcggctaggatt

SEQ ID NO: 48276 - DNA, 20 bp, Artificial Sequence
  MKO10048276_A_Sh3bp1
  gRNA
atgtcctgcagccgctcagc

SEQ ID NO: 48277 - DNA, 20 bp, Artificial Sequence
  MKO10048277_A_Sh3bp1
  gRNA
tgtccatgtcagccccgctt

SEQ ID NO: 48278 - DNA, 20 bp, Artificial Sequence
  MKO10048278_A_Sh3bp2
  gRNA
gctggatggccttgctacgc

SEQ ID NO: 48279 - DNA, 20 bp, Artificial Sequence
  MKO10048279_A_Sh3bp2
  gRNA
agtagtagatgcagcgcttg

SEQ ID NO: 48280 - DNA, 20 bp, Artificial Sequence
  MKO10048280_A_Sh3bp2
  gRNA
ttgcagcttcatggcggctg

SEQ ID NO: 48281 - DNA, 20 bp, Artificial Sequence
  MKO10048281_A_Sh3bp4
  gRNA
gagaagacttccgaaccgcc

SEQ ID NO: 48282 - DNA, 20 bp, Artificial Sequence
  MKO10048282_A_Sh3bp4
  gRNA
ccatggcagcccagcgtatc

SEQ ID NO: 48283 - DNA, 20 bp, Artificial Sequence
  MKO10048283_A_Sh3bp4
  gRNA
gtggtacatcggctactacc

SEQ ID NO: 48284 - DNA, 20 bp, Artificial Sequence
  MKO10048284_A_Sh3bp5l
  gRNA
cacagcccgctcataccgca

SEQ ID NO: 48285 - DNA, 20 bp, Artificial Sequence
  MKO10048285_A_Sh3bp5l
  gRNA
ctactatgaggctcgacgac

SEQ ID NO: 48286 - DNA, 20 bp, Artificial Sequence
  MKO10048286_A_Sh3bp5l
  gRNA
catggctgacaaaaatcgac

SEQ ID NO: 48287 - DNA, 20 bp, Artificial Sequence
  MKO10048287_A_Sh3bp5
  gRNA
ggagtacctcggtggccctc

SEQ ID NO: 48288 - DNA, 20 bp, Artificial Sequence
  MKO10048288_A_Sh3bp5
  gRNA
acccatggcagcgttgtacc

SEQ ID NO: 48289 - DNA, 20 bp, Artificial Sequence
  MKO10048289_A_Sh3bp5
  gRNA
gtttcaccgttgcctcgacc

SEQ ID NO: 48290 - DNA, 20 bp, Artificial Sequence
  MKO10048290_A_Sh3d19
  gRNA
tcgtattacagtaggcttcc

SEQ ID NO: 48291 - DNA, 20 bp, Artificial Sequence
  MKO10048291_A_Sh3d19
  gRNA
gtgtcccggtttgggacgag

SEQ ID NO: 48292 - DNA, 20 bp, Artificial Sequence
  MKO10048292_A_Sh3d19
  gRNA
gctaccccctcgtcccaaac

SEQ ID NO: 48293 - DNA, 20 bp, Artificial Sequence
  MKO10048293_A_Sh3d21
  gRNA
cctatttgactaccaacccg

SEQ ID NO: 48294 - DNA, 20 bp, Artificial Sequence
  MKO10048294_A_Sh3d21
  gRNA
tcacctgtccgcaggtagtc

SEQ ID NO: 48295 - DNA, 20 bp, Artificial Sequence
  MKO10048295_A_Sh3d21
  gRNA
gacgagctgacgcttcaaac

SEQ ID NO: 48296 - DNA, 20 bp, Artificial Sequence
  MKO10048296_A_Sh3gl1
  gRNA
ggtgatgccctgctagatgc

SEQ ID NO: 48297 - DNA, 20 bp, Artificial Sequence
  MKO10048297_A_Sh3gl1
  gRNA
ggagagtgcatggttcgcca

SEQ ID NO: 48298 - DNA, 20 bp, Artificial Sequence
  MKO10048298_A_Sh3gl1
  gRNA
tgaacaccgtatccaagatc

SEQ ID NO: 48299 - DNA, 20 bp, Artificial Sequence
  MKO10048299_A_Sh3gl2
  gRNA
aacaccatgtcgaaaatccg

SEQ ID NO: 48300 - DNA, 20 bp, Artificial Sequence
  MKO10048300_A_Sh3gl2
  gRNA
tttgaagtcatcatcgagct

SEQ ID NO: 48301 - DNA, 20 bp, Artificial Sequence
  MKO10048301_A_Sh3gl2
  gRNA
gccagcagtgcttccgcctg

SEQ ID NO: 48302 - DNA, 20 bp, Artificial Sequence
  MKO10048302_A_Sh3gl3
  gRNA
aacactgtgtcgaagctccg

SEQ ID NO: 48303 - DNA, 20 bp, Artificial Sequence
  MKO10048303_A_Sh3gl3
  gRNA
tgacattacctggattgggt

SEQ ID NO: 48304 - DNA, 20 bp, Artificial Sequence
  MKO10048304_A_Sh3gl3
  gRNA
ttcatctagcttcgttcctt

SEQ ID NO: 48305 - DNA, 20 bp, Artificial Sequence
  MKO10048305_A_Sh3glb1
  gRNA
accaagtcgtataaacaacc

SEQ ID NO: 48306 - DNA, 20 bp, Artificial Sequence
  MKO10048306_A_Sh3glb1
  gRNA
atttggctgcaacagcactt

SEQ ID NO: 48307 - DNA, 20 bp, Artificial Sequence
  MKO10048307_A_Sh3glb1
  gRNA
aagctgaatgtaccaaaata

SEQ ID NO: 48308 - DNA, 20 bp, Artificial Sequence
  MKO10048308_A_Sh3glb2
  gRNA
gcagaaccggcgtcttgacc

SEQ ID NO: 48309 - DNA, 20 bp, Artificial Sequence
  MKO10048309_A_Sh3glb2
  gRNA
aggcatccaggtcaagacgc

SEQ ID NO: 48310 - DNA, 20 bp, Artificial Sequence
  MKO10048310_A_Sh3glb2
  gRNA
ctactcaccgtagggagtgc

SEQ ID NO: 48311 - DNA, 20 bp, Artificial Sequence
  MKO10048311_A_Sh3kbp1
  gRNA
ttctaggactgcatcgacgt

SEQ ID NO: 48312 - DNA, 20 bp, Artificial Sequence
  MKO10048312_A_Sh3kbp1
  gRNA
ctgtccatctccgtcttcga

SEQ ID NO: 48313 - DNA, 20 bp, Artificial Sequence
  MKO10048313_A_Sh3kbp1
  gRNA
cctgccccttgtttgacgac

SEQ ID NO: 48314 - DNA, 20 bp, Artificial Sequence
  MKO10048314_A_Sh3pxd2a
  gRNA
ctgcgtgcaagatgccaccg

SEQ ID NO: 48315 - DNA, 20 bp, Artificial Sequence
  MKO10048315_A_Sh3pxd2a
  gRNA
tatacattatcaacgtgacc

SEQ ID NO: 48316 - DNA, 20 bp, Artificial Sequence
  MKO10048316_A_Sh3pxd2a
  gRNA
gtctcttcacagccacgtcg

SEQ ID NO: 48317 - DNA, 20 bp, Artificial Sequence
  MKO10048317_A_Sh3pxd2b
  gRNA
ggcgtttgacggctacgtcc

SEQ ID NO: 48318 - DNA, 20 bp, Artificial Sequence
  MKO10048318_A_Sh3pxd2b
  gRNA
gatggcctccgtggcgccac

SEQ ID NO: 48319 - DNA, 20 bp, Artificial Sequence
  MKO10048319_A_Sh3pxd2b
  gRNA
gcgccacggaggccatctac

SEQ ID NO: 48320 - DNA, 20 bp, Artificial Sequence
  MKO10048320_A_Sh3rf1
  gRNA
catcatcattctgcgccgac

SEQ ID NO: 48321 - DNA, 20 bp, Artificial Sequence
  MKO10048321_A_Sh3rf1
  gRNA
gcccggacagttcgctgatg

SEQ ID NO: 48322 - DNA, 20 bp, Artificial Sequence
  MKO10048322_A_Sh3rf1
  gRNA
ggatactgtacctttgcgaa

SEQ ID NO: 48323 - DNA, 20 bp, Artificial Sequence
  MKO10048323_A_Sh3rf2
  gRNA
cctgttgctcgtgcgtttgc

SEQ ID NO: 48324 - DNA, 20 bp, Artificial Sequence
  MKO10048324_A_Sh3rf2
  gRNA
aggtgtcttgccgagacgtt

SEQ ID NO: 48325 - DNA, 20 bp, Artificial Sequence
  MKO10048325_A_Sh3rf2
  gRNA
tgcgttccggacagagctcg

SEQ ID NO: 48326 - DNA, 20 bp, Artificial Sequence
  MKO10048326_A_Sh3rf3
  gRNA
ctggtaccacggcgagctgc

SEQ ID NO: 48327 - DNA, 20 bp, Artificial Sequence
  MKO10048327_A_Sh3rf3
  gRNA
ctcgtagctgtagagcgcct

SEQ ID NO: 48328 - DNA, 20 bp, Artificial Sequence
  MKO10048328_A_Sh3rf3
  gRNA
cgtcacgctgagcgcagtga

SEQ ID NO: 48329 - DNA, 20 bp, Artificial Sequence
  MKO10048329_A_Sh3tc1
  gRNA
cagccagcccgaccacgatg

SEQ ID NO: 48330 - DNA, 20 bp, Artificial Sequence
  MKO10048330_A_Sh3tc1
  gRNA
tgtggctcctccccgcatcg

SEQ ID NO: 48331 - DNA, 20 bp, Artificial Sequence
  MKO10048331_A_Sh3tc1
  gRNA
cccggctatcgttctccagc

SEQ ID NO: 48332 - DNA, 20 bp, Artificial Sequence
  MKO10048332_A_Sh3tc2
  gRNA
ggaagtccacgcgctattta

SEQ ID NO: 48333 - DNA, 20 bp, Artificial Sequence
  MKO10048333_A_Sh3tc2
  gRNA
agctcaccttaaatagcgcg

SEQ ID NO: 48334 - DNA, 20 bp, Artificial Sequence
  MKO10048334_A_Sh3tc2
  gRNA
tgctgttgagccagtacgtg

SEQ ID NO: 48335 - DNA, 20 bp, Artificial Sequence
  MKO10048335_A_Sh3yl1
  gRNA
ttccatccggaagacgcgcc

SEQ ID NO: 48336 - DNA, 20 bp, Artificial Sequence
  MKO10048336_A_Sh3yl1
  gRNA
actgtcgcagttgggcccct

SEQ ID NO: 48337 - DNA, 20 bp, Artificial Sequence
  MKO10048337_A_Sh3yl1
  gRNA
tacatttcaggtatccgatt

SEQ ID NO: 48338 - DNA, 20 bp, Artificial Sequence
  MKO10048338_A_Shank1
  gRNA
agtctatatgcgccccgccc

SEQ ID NO: 48339 - DNA, 20 bp, Artificial Sequence
  MKO10048339_A_Shank1
  gRNA
attcggacgctgtgcctggg

SEQ ID NO: 48340 - DNA, 20 bp, Artificial Sequence
  MKO10048340_A_Shank1
  gRNA
cgtcctgtagactctcgctc

SEQ ID NO: 48341 - DNA, 20 bp, Artificial Sequence
  MKO10048341_A_Shank2
  gRNA
cctagccgatacccccattg

SEQ ID NO: 48342 - DNA, 20 bp, Artificial Sequence
  MKO10048342_A_Shank2
  gRNA
tggcaagccggactaaggac

SEQ ID NO: 48343 - DNA, 20 bp, Artificial Sequence
  MKO10048343_A_Shank2
  gRNA
ccgtgacgaccttaaggatg

SEQ ID NO: 48344 - DNA, 20 bp, Artificial Sequence
  MKO10048344_A_Shank3
  gRNA
ccgcaacggcggtgctcatc

SEQ ID NO: 48345 - DNA, 20 bp, Artificial Sequence
  MKO10048345_A_Shank3
  gRNA
cgttgtccaactgtgccgca

SEQ ID NO: 48346 - DNA, 20 bp, Artificial Sequence
  MKO10048346_A_Shank3
  gRNA
cgtagttgagcgcgtcttga

SEQ ID NO: 48347 - DNA, 20 bp, Artificial Sequence
  MKO10048347_A_Sharpin
  gRNA
cgtgcacttcctcgaccccg

SEQ ID NO: 48348 - DNA, 20 bp, Artificial Sequence
  MKO10048348_A_Sharpin
  gRNA
gctatttgttacaccgtccg

SEQ ID NO: 48349 - DNA, 20 bp, Artificial Sequence
  MKO10048349_A_Sharpin
  gRNA
ggttcccaccaggtcccata

SEQ ID NO: 48350 - DNA, 20 bp, Artificial Sequence
  MKO10048350_A_Shbg
  gRNA
ctcgccgaatacagccgtcc

SEQ ID NO: 48351 - DNA, 20 bp, Artificial Sequence
  MKO10048351_A_Shbg
  gRNA
cctcctttgagtttcgaacc

SEQ ID NO: 48352 - DNA, 20 bp, Artificial Sequence
  MKO10048352_A_Shbg
  gRNA
gctgtattcggcgagatatc

SEQ ID NO: 48353 - DNA, 20 bp, Artificial Sequence
  MKO10048353_A_Shb
  gRNA
gtacgacaccccgtacgagc

SEQ ID NO: 48354 - DNA, 20 bp, Artificial Sequence
  MKO10048354_A_Shb
  gRNA
tggcgccgtcggtcccgaga

SEQ ID NO: 48355 - DNA, 20 bp, Artificial Sequence
  MKO10048355_A_Shb
  gRNA
cgtacggggtgtcgtacaac

SEQ ID NO: 48356 - DNA, 20 bp, Artificial Sequence
  MKO10048356_A_Shc1
  gRNA
tttgtcaataagcccacacg

SEQ ID NO: 48357 - DNA, 20 bp, Artificial Sequence
  MKO10048357_A_Shc1
  gRNA
attgacaaagctcccgtgtc

SEQ ID NO: 48358 - DNA, 20 bp, Artificial Sequence
  MKO10048358_A_Shc1
  gRNA
tctcctccttgtcgcccctt

SEQ ID NO: 48359 - DNA, 20 bp, Artificial Sequence
  MKO10048359_A_Shc2
  gRNA
tcttaccgtgtcaccacccg

SEQ ID NO: 48360 - DNA, 20 bp, Artificial Sequence
  MKO10048360_A_Shc2
  gRNA
gcttcgatccatgcgctccc

SEQ ID NO: 48361 - DNA, 20 bp, Artificial Sequence
  MKO10048361_A_Shc2
  gRNA
aaaagcaacctgcgcttcgc

SEQ ID NO: 48362 - DNA, 20 bp, Artificial Sequence
  MKO10048362_A_Shc3
  gRNA
acttaccgggtctccccctg

SEQ ID NO: 48363 - DNA, 20 bp, Artificial Sequence
  MKO10048363_A_Shc3
  gRNA
agatgctcatccctgcgaac

SEQ ID NO: 48364 - DNA, 20 bp, Artificial Sequence
  MKO10048364_A_Shc3
  gRNA
agtgcgcagattcaggctgg

SEQ ID NO: 48365 - DNA, 20 bp, Artificial Sequence
  MKO10048365_A_Shc4
  gRNA
tcccgttaagttcctgacaa

SEQ ID NO: 48366 - DNA, 20 bp, Artificial Sequence
  MKO10048366_A_Shc4
  gRNA
caaatgaaatcgattgcatt

SEQ ID NO: 48367 - DNA, 20 bp, Artificial Sequence
  MKO10048367_A_Shc4
  gRNA
gatgaaccttgacaaccaac

SEQ ID NO: 48368 - DNA, 20 bp, Artificial Sequence
  MKO10048368_A_Shcbp1l
  gRNA
cggccgaggccgtcgagtgc

SEQ ID NO: 48369 - DNA, 20 bp, Artificial Sequence
  MKO10048369_A_Shcbp1l
  gRNA
tttcttgaagcgctgcgcga

SEQ ID NO: 48370 - DNA, 20 bp, Artificial Sequence
  MKO10048370_A_Shcbp1l
  gRNA
ggtgtatcccgtggacgggc

SEQ ID NO: 48371 - DNA, 20 bp, Artificial Sequence
  MKO10048371_A_Shcbp1
  gRNA
catccctgaaggcggtcgta

SEQ ID NO: 48372 - DNA, 20 bp, Artificial Sequence
  MKO10048372_A_Shcbp1
  gRNA
caagccttacgaccgccttc

SEQ ID NO: 48373 - DNA, 20 bp, Artificial Sequence
  MKO10048373_A_Shcbp1
  gRNA
aatacttacaatctcagtcg

SEQ ID NO: 48374 - DNA, 20 bp, Artificial Sequence
  MKO10048374_A_Shd
  gRNA
tcgttcggctcagcgagacc

SEQ ID NO: 48375 - DNA, 20 bp, Artificial Sequence
  MKO10048375_A_Shd
  gRNA
ttcgtagcctgctcctcata

SEQ ID NO: 48376 - DNA, 20 bp, Artificial Sequence
  MKO10048376_A_Shd
  gRNA
gctttacgatactccatatg

SEQ ID NO: 48377 - DNA, 20 bp, Artificial Sequence
  MKO10048377_A_She
  gRNA
cagatcgcgagagccctgtc

SEQ ID NO: 48378 - DNA, 20 bp, Artificial Sequence
  MKO10048378_A_She
  gRNA
tgatcgacctccgggcagag

SEQ ID NO: 48379 - DNA, 20 bp, Artificial Sequence
  MKO10048379_A_She
  gRNA
ccaccctccgaaggctcgta

SEQ ID NO: 48380 - DNA, 20 bp, Artificial Sequence
  MKO10048380_A_Shfm1
  gRNA
tccaagagacccaagtcgac

SEQ ID NO: 48381 - DNA, 20 bp, Artificial Sequence
  MKO10048381_A_Shfm1
  gRNA
cgagttcgaggagtttcccg

SEQ ID NO: 48382 - DNA, 20 bp, Artificial Sequence
  MKO10048382_A_Shfm1
  gRNA
atgacttctctaaccagtta

SEQ ID NO: 48383 - DNA, 20 bp, Artificial Sequence
  MKO10048383_A_Shf
  gRNA
cagggagtcgcgcctgccag

SEQ ID NO: 48384 - DNA, 20 bp, Artificial Sequence
  MKO10048384_A_Shf
  gRNA
cagccgcaagctgcccatta

SEQ ID NO: 48385 - DNA, 20 bp, Artificial Sequence
  MKO10048385_A_Shf
  gRNA
catgtgttccgctcccttaa

SEQ ID NO: 48386 - DNA, 20 bp, Artificial Sequence
  MKO10048386_A_Shh
  gRNA
ccgcgacgaaggcgccaaga

SEQ ID NO: 48387 - DNA, 20 bp, Artificial Sequence
  MKO10048387_A_Shh
  gRNA
cttctacgtgatcgagacgc

SEQ ID NO: 48388 - DNA, 20 bp, Artificial Sequence
  MKO10048388_A_Shh
  gRNA
tagggtcttctcggctacgt

SEQ ID NO: 48389 - DNA, 20 bp, Artificial Sequence
  MKO10048389_A_Shisa2
  gRNA
tacgtgccgttcctcatcgt

SEQ ID NO: 48390 - DNA, 20 bp, Artificial Sequence
  MKO10048390_A_Shisa2
  gRNA
ctgcgacaacgaccgccagc

SEQ ID NO: 48391 - DNA, 20 bp, Artificial Sequence
  MKO10048391_A_Shisa2
  gRNA
gcccttggtggggtacgatc

SEQ ID NO: 48392 - DNA, 20 bp, Artificial Sequence
  MKO10048392_A_Shisa3
  gRNA
cacttacgcgcggtgatgcc

SEQ ID NO: 48393 - DNA, 20 bp, Artificial Sequence
  MKO10048393_A_Shisa3
  gRNA
caccaacgaccgcggagagc

SEQ ID NO: 48394 - DNA, 20 bp, Artificial Sequence
  MKO10048394_A_Shisa3
  gRNA
atacacctaacccaaccgtc

SEQ ID NO: 48395 - DNA, 20 bp, Artificial Sequence
  MKO10048395_A_Shisa4
  gRNA
gcgtaccttcaaacgtgctc

SEQ ID NO: 48396 - DNA, 20 bp, Artificial Sequence
  MKO10048396_A_Shisa4
  gRNA
gctgctggcgccttcggtat

SEQ ID NO: 48397 - DNA, 20 bp, Artificial Sequence
  MKO10048397_A_Shisa4
  gRNA
tccggggggtactggtatac

SEQ ID NO: 48398 - DNA, 20 bp, Artificial Sequence
  MKO10048398_A_Shisa5
  gRNA
ttcggagcgaccgtcgccat

SEQ ID NO: 48399 - DNA, 20 bp, Artificial Sequence
  MKO10048399_A_Shisa5
  gRNA
atgaaccacggtagtagttg

SEQ ID NO: 48400 - DNA, 20 bp, Artificial Sequence
  MKO10048400_A_Shisa5
  gRNA
gcacgtccgagcagcagtat

SEQ ID NO: 48401 - DNA, 20 bp, Artificial Sequence
  MKO10048401_A_Shisa6
  gRNA
tagggcatgccgaattcatc

SEQ ID NO: 48402 - DNA, 20 bp, Artificial Sequence
  MKO10048402_A_Shisa6
  gRNA
aaagacgtccgtatgcgaga

SEQ ID NO: 48403 - DNA, 20 bp, Artificial Sequence
  MKO10048403_A_Shisa6
  gRNA
gttctggtaagagcgtgaga

SEQ ID NO: 48404 - DNA, 20 bp, Artificial Sequence
  MKO10048404_A_Shisa7
  gRNA
accaagaccagccccgcgag

SEQ ID NO: 48405 - DNA, 20 bp, Artificial Sequence
  MKO10048405_A_Shisa7
  gRNA
cgagcaccgccacatgcgcc

SEQ ID NO: 48406 - DNA, 20 bp, Artificial Sequence
  MKO10048406_A_Shisa7
  gRNA
ggctgttgacgttgtagtgc

SEQ ID NO: 48407 - DNA, 20 bp, Artificial Sequence
  MKO10048407_A_Shisa9
  gRNA
gacatcgaagtagccccgac

SEQ ID NO: 48408 - DNA, 20 bp, Artificial Sequence
  MKO10048408_A_Shisa9
  gRNA
gggcaagcccccagcgcgta

SEQ ID NO: 48409 - DNA, 20 bp, Artificial Sequence
  MKO10048409_A_Shisa9
  gRNA
atgacttctacgccaaaaga

SEQ ID NO: 48410 - DNA, 20 bp, Artificial Sequence
  MKO10048410_A_Shkbp1
  gRNA
gtggagtgagtccgtagaat

SEQ ID NO: 48411 - DNA, 20 bp, Artificial Sequence
  MKO10048411_A_Shkbp1
  gRNA
tccgcaggaaattaaggatg

SEQ ID NO: 48412 - DNA, 20 bp, Artificial Sequence
  MKO10048412_A_Shkbp1
  gRNA
cctctcgccagacgcttacc

SEQ ID NO: 48413 - DNA, 20 bp, Artificial Sequence
  MKO10048413_A_Shmt1
  gRNA
cacccgaagctgatcatcgc

SEQ ID NO: 48414 - DNA, 20 bp, Artificial Sequence
  MKO10048414_A_Shmt1
  gRNA
gaccgagttcatcgatgagc

SEQ ID NO: 48415 - DNA, 20 bp, Artificial Sequence
  MKO10048415_A_Shmt1
  gRNA
agagcctcatgggcgaatca

SEQ ID NO: 48416 - DNA, 20 bp, Artificial Sequence
  MKO10048416_A_Shmt2
  gRNA
ttccacggcagatactacgg

SEQ ID NO: 48417 - DNA, 20 bp, Artificial Sequence
  MKO10048417_A_Shmt2
  gRNA
actacttacattgagcttat

SEQ ID NO: 48418 - DNA, 20 bp, Artificial Sequence
  MKO10048418_A_Shmt2
  gRNA
tcgagctgctctgccagcgc

SEQ ID NO: 48419 - DNA, 20 bp, Artificial Sequence
  MKO10048419_A_Shoc2
  gRNA
ccccacatacctattgtatc

SEQ ID NO: 48420 - DNA, 20 bp, Artificial Sequence
  MKO10048420_A_Shoc2
  gRNA
ctgtccagtttaaatcgcct

SEQ ID NO: 48421 - DNA, 20 bp, Artificial Sequence
  MKO10048421_A_Shoc2
  gRNA
cttgcagcacaatgacctac

SEQ ID NO: 48422 - DNA, 20 bp, Artificial Sequence
  MKO10048422_A_Shox2
  gRNA
catcatgtaaggcgcgtgcg

SEQ ID NO: 48423 - DNA, 20 bp, Artificial Sequence
  MKO10048423_A_Shox2
  gRNA
tcctcgcgcatgaaagcgtc

SEQ ID NO: 48424 - DNA, 20 bp, Artificial Sequence
  MKO10048424_A_Shox2
  gRNA
gttgcaccctatgtcaacgt

SEQ ID NO: 48425 - DNA, 20 bp, Artificial Sequence
  MKO10048425_A_Shpk
  gRNA
gtcccgacactccgatgccc

SEQ ID NO: 48426 - DNA, 20 bp, Artificial Sequence
  MKO10048426_A_Shpk
  gRNA
ctgaccagaatgccgctagc

SEQ ID NO: 48427 - DNA, 20 bp, Artificial Sequence
  MKO10048427_A_Shpk
  gRNA
gttaaaatagccccagctag

SEQ ID NO: 48428 - DNA, 20 bp, Artificial Sequence
  MKO10048428_A_Shprh
  gRNA
ccagcaccctgcgttgattc

SEQ ID NO: 48429 - DNA, 20 bp, Artificial Sequence
  MKO10048429_A_Shprh
  gRNA
ttgattgtgtgagtgccgtc

SEQ ID NO: 48430 - DNA, 20 bp, Artificial Sequence
  MKO10048430_A_Shprh
  gRNA
tacagtttctccctatcgtg

SEQ ID NO: 48431 - DNA, 20 bp, Artificial Sequence
  MKO10048431_A_Shq1
  gRNA
agtttccttgggcaatcgaa

SEQ ID NO: 48432 - DNA, 20 bp, Artificial Sequence
  MKO10048432_A_Shq1
  gRNA
tggaaacctgcgggccggtg

SEQ ID NO: 48433 - DNA, 20 bp, Artificial Sequence
  MKO10048433_A_Shq1
  gRNA
aacacatttaggtgcttccg

SEQ ID NO: 48434 - DNA, 20 bp, Artificial Sequence
  MKO10048434_A_Shroom1
  gRNA
agcgcctcaaaatgccgact

SEQ ID NO: 48435 - DNA, 20 bp, Artificial Sequence
  MKO10048435_A_Shroom1
  gRNA
gcaagcggtgaacggctctg

SEQ ID NO: 48436 - DNA, 20 bp, Artificial Sequence
  MKO10048436_A_Shroom1
  gRNA
cagaccaaaccggctggctg

SEQ ID NO: 48437 - DNA, 20 bp, Artificial Sequence
  MKO10048437_A_Shroom2
  gRNA
cctccaattcgaagaacgtg

SEQ ID NO: 48438 - DNA, 20 bp, Artificial Sequence
  MKO10048438_A_Shroom2
  gRNA
gaccgctcatgaatgtactg

SEQ ID NO: 48439 - DNA, 20 bp, Artificial Sequence
  MKO10048439_A_Shroom2
  gRNA
aagtgcctgttgaaccaaac

SEQ ID NO: 48440 - DNA, 20 bp, Artificial Sequence
  MKO10048440_A_Shroom3
  gRNA
tgccgtcgcgctcgaagatg

SEQ ID NO: 48441 - DNA, 20 bp, Artificial Sequence
  MKO10048441_A_Shroom3
  gRNA
gtcacgctgtgtcgctcccg

SEQ ID NO: 48442 - DNA, 20 bp, Artificial Sequence
  MKO10048442_A_Shroom3
  gRNA
gaagggctgactccgatatt

SEQ ID NO: 48443 - DNA, 20 bp, Artificial Sequence
  MKO10048443_A_Shroom4
  gRNA
gtgtgacacgaacgaagccg

SEQ ID NO: 48444 - DNA, 20 bp, Artificial Sequence
  MKO10048444_A_Shroom4
  gRNA
tcagtgactttaatcggccc

SEQ ID NO: 48445 - DNA, 20 bp, Artificial Sequence
  MKO10048445_A_Shroom4
  gRNA
tcttggcgggagccatacaa

SEQ ID NO: 48446 - DNA, 20 bp, Artificial Sequence
  MKO10048446_A_Siae
  gRNA
tcatggtccaagcccaccgc

SEQ ID NO: 48447 - DNA, 20 bp, Artificial Sequence
  MKO10048447_A_Siae
  gRNA
ctagatctttaacgcctcaa

SEQ ID NO: 48448 - DNA, 20 bp, Artificial Sequence
  MKO10048448_A_Siae
  gRNA
aatgtacgtcccaccccaac

SEQ ID NO: 48449 - DNA, 20 bp, Artificial Sequence
  MKO10048449_A_Siah1a
  gRNA
attccctcatgaatagaccg

SEQ ID NO: 48450 - DNA, 20 bp, Artificial Sequence
  MKO10048450_A_Siah1a
  gRNA
tcataggcggcgattgactt

SEQ ID NO: 48451 - DNA, 20 bp, Artificial Sequence
  MKO10048451_A_Siah1a
  gRNA
tgggtaatgctgtagcagtc

SEQ ID NO: 48452 - DNA, 20 bp, Artificial Sequence
  MKO10048452_A_Siah1b
  gRNA
accatttagctcaagtcgat

SEQ ID NO: 48453 - DNA, 20 bp, Artificial Sequence
  MKO10048453_A_Siah1b
  gRNA
tcataggcgccgattaactt

SEQ ID NO: 48454 - DNA, 20 bp, Artificial Sequence
  MKO10048454_A_Siah1b
  gRNA
ccctgtaaatattccgcttc

SEQ ID NO: 48455 - DNA, 20 bp, Artificial Sequence
  MKO10048455_A_Siah2
  gRNA
gttagggcgcccctgcacgt

SEQ ID NO: 48456 - DNA, 20 bp, Artificial Sequence
  MKO10048456_A_Siah2
  gRNA
cgaagagcgaggtcagctcg

SEQ ID NO: 48457 - DNA, 20 bp, Artificial Sequence
  MKO10048457_A_Siah2
  gRNA
ggaaccggaggagactgacc

SEQ ID NO: 48458 - DNA, 20 bp, Artificial Sequence
  MKO10048458_A_Siah3
  gRNA
gccatcacggagacggacgt

SEQ ID NO: 48459 - DNA, 20 bp, Artificial Sequence
  MKO10048459_A_Siah3
  gRNA
tccgacgtccgtctccgtga

SEQ ID NO: 48460 - DNA, 20 bp, Artificial Sequence
  MKO10048460_A_Siah3
  gRNA
actcacctttaggttgtgcg

SEQ ID NO: 48461 - DNA, 20 bp, Artificial Sequence
  MKO10048461_A_Sidt1
  gRNA
gatttcgatcgcgtctacag

SEQ ID NO: 48462 - DNA, 20 bp, Artificial Sequence
  MKO10048462_A_Sidt1
  gRNA
gcgatccgcgagaccccgcc

SEQ ID NO: 48463 - DNA, 20 bp, Artificial Sequence
  MKO10048463_A_Sidt1
  gRNA
actgttgacatgcacccgca

SEQ ID NO: 48464 - DNA, 20 bp, Artificial Sequence
  MKO10048464_A_Sidt2
  gRNA
caggtgcccctaatccttcg

SEQ ID NO: 48465 - DNA, 20 bp, Artificial Sequence
  MKO10048465_A_Sidt2
  gRNA
gctgtttgtggtccgccaga

SEQ ID NO: 48466 - DNA, 20 bp, Artificial Sequence
  MKO10048466_A_Sidt2
  gRNA
attaccgagtccacaccatc

SEQ ID NO: 48467 - DNA, 20 bp, Artificial Sequence
  MKO10048467_A_Sigirr
  gRNA
ccgcgacctcttgcctcgcg

SEQ ID NO: 48468 - DNA, 20 bp, Artificial Sequence
  MKO10048468_A_Sigirr
  gRNA
ccccgacgccgctccaactg

SEQ ID NO: 48469 - DNA, 20 bp, Artificial Sequence
  MKO10048469_A_Sigirr
  gRNA
gccgacacttaacatagagc

SEQ ID NO: 48470 - DNA, 20 bp, Artificial Sequence
  MKO10048470_A_Siglec15
  gRNA
cgtcgccggtgaactccacg

SEQ ID NO: 48471 - DNA, 20 bp, Artificial Sequence
  MKO10048471_A_Siglec15
  gRNA
tgcacgtgtagcggccgtcg

SEQ ID NO: 48472 - DNA, 20 bp, Artificial Sequence
  MKO10048472_A_Siglec15
  gRNA
cgagccgtacgcgggcccgc

SEQ ID NO: 48473 - DNA, 20 bp, Artificial Sequence
  MKO10048473_A_Siglec1
  gRNA
tctgctctgtagcacgccga

SEQ ID NO: 48474 - DNA, 20 bp, Artificial Sequence
  MKO10048474_A_Siglec1
  gRNA
agatcagtgatagcaaccgc

SEQ ID NO: 48475 - DNA, 20 bp, Artificial Sequence
  MKO10048475_A_Siglec1
  gRNA
gggccatatgtagggtcgtc

SEQ ID NO: 48476 - DNA, 20 bp, Artificial Sequence
  MKO10048476_A_Siglec5
  gRNA
gcgaataaccgtccgtagcc

SEQ ID NO: 48477 - DNA, 20 bp, Artificial Sequence
  MKO10048477_A_Siglec5
  gRNA
cccacagcgatcagtactga

SEQ ID NO: 48478 - DNA, 20 bp, Artificial Sequence
  MKO10048478_A_Siglec5
  gRNA
tggtcctccaactccgcccg

SEQ ID NO: 48479 - DNA, 20 bp, Artificial Sequence
  MKO10048479_A_Siglece
  gRNA
cctccgtgcttaagatgcac

SEQ ID NO: 48480 - DNA, 20 bp, Artificial Sequence
  MKO10048480_A_Siglece
  gRNA
atccccctgcgaacctaagc

SEQ ID NO: 48481 - DNA, 20 bp, Artificial Sequence
  MKO10048481_A_Siglece
  gRNA
ccgatactcacgccaggagg

SEQ ID NO: 48482 - DNA, 20 bp, Artificial Sequence
  MKO10048482_A_Siglecg
  gRNA
ccctgtggggtcgagaaccc

SEQ ID NO: 48483 - DNA, 20 bp, Artificial Sequence
  MKO10048483_A_Siglecg
  gRNA
gccagggttctcgaccccac

SEQ ID NO: 48484 - DNA, 20 bp, Artificial Sequence
  MKO10048484_A_Siglecg
  gRNA
cttaaccgttccccacttta

SEQ ID NO: 48485 - DNA, 20 bp, Artificial Sequence
  MKO10048485_A_Siglech
  gRNA
gagatcccatacgaagagag

SEQ ID NO: 48486 - DNA, 20 bp, Artificial Sequence
  MKO10048486_A_Siglech
  gRNA
accagcaacacacatggatc

SEQ ID NO: 48487 - DNA, 20 bp, Artificial Sequence
  MKO10048487_A_Siglech
  gRNA
gtcagctgccctcatatccc

SEQ ID NO: 48488 - DNA, 20 bp, Artificial Sequence
  MKO10048488_A_Sigmar1
  gRNA
ggccccgggcataggcccga

SEQ ID NO: 48489 - DNA, 20 bp, Artificial Sequence
  MKO10048489_A_Sigmar1
  gRNA
tatttgtgaacgcgggcggc

SEQ ID NO: 48490 - DNA, 20 bp, Artificial Sequence
  MKO10048490_A_Sigmar1
  gRNA
cgctagaatgccgtgggccg

SEQ ID NO: 48491 - DNA, 20 bp, Artificial Sequence
  MKO10048491_A_Sik1
  gRNA
cggggggctcccacaccacg

SEQ ID NO: 48492 - DNA, 20 bp, Artificial Sequence
  MKO10048492_A_Sik1
  gRNA
ctcctacccagacgtccagc

SEQ ID NO: 48493 - DNA, 20 bp, Artificial Sequence
  MKO10048493_A_Sik1
  gRNA
aacatggatatcaagctagc

SEQ ID NO: 48494 - DNA, 20 bp, Artificial Sequence
  MKO10048494_A_Sik2
  gRNA
ctttaaaactggtgaactgc

SEQ ID NO: 48495 - DNA, 20 bp, Artificial Sequence
  MKO10048495_A_Sik2
  gRNA
atcctaatagatttcggctt

SEQ ID NO: 48496 - DNA, 20 bp, Artificial Sequence
  MKO10048496_A_Sik2
  gRNA
cacaaggtacaacatacttt

SEQ ID NO: 48497 - DNA, 20 bp, Artificial Sequence
  MKO10048497_A_Sik3
  gRNA
tgacagaatacgctagcgga

SEQ ID NO: 48498 - DNA, 20 bp, Artificial Sequence
  MKO10048498_A_Sik3
  gRNA
gccgccccagagctcttcga

SEQ ID NO: 48499 - DNA, 20 bp, Artificial Sequence
  MKO10048499_A_Sik3
  gRNA
gacagagcgcatgatttacc

SEQ ID NO: 48500 - DNA, 20 bp, Artificial Sequence
  MKO10048500_A_Sike1
  gRNA
ggacgataaccaattctgta

SEQ ID NO: 48501 - DNA, 20 bp, Artificial Sequence
  MKO10048501_A_Sike1
  gRNA
tgatcagttccaacgcatcc

SEQ ID NO: 48502 - DNA, 20 bp, Artificial Sequence
  MKO10048502_A_Sike1
  gRNA
agaggatgcatccgacgtga

SEQ ID NO: 48503 - DNA, 20 bp, Artificial Sequence
  MKO10048503_A_Sil1
  gRNA
cctcgtttactccagtctgt

SEQ ID NO: 48504 - DNA, 20 bp, Artificial Sequence
  MKO10048504_A_Sil1
  gRNA
ggagctagacaccgagatcc

SEQ ID NO: 48505 - DNA, 20 bp, Artificial Sequence
  MKO10048505_A_Sil1
  gRNA
tgttccacccaactcaagag

SEQ ID NO: 48506 - DNA, 20 bp, Artificial Sequence
  MKO10048506_A_Sim1
  gRNA
ttcgcgaccaacgttgtcca

SEQ ID NO: 48507 - DNA, 20 bp, Artificial Sequence
  MKO10048507_A_Sim1
  gRNA
caccagtcgaaccagcccct

SEQ ID NO: 48508 - DNA, 20 bp, Artificial Sequence
  MKO10048508_A_Sim1
  gRNA
acacaccttgtagccaccgc

SEQ ID NO: 48509 - DNA, 20 bp, Artificial Sequence
  MKO10048509_A_Sim2
  gRNA
tcttcgaatgaagtgcgtct

SEQ ID NO: 48510 - DNA, 20 bp, Artificial Sequence
  MKO10048510_A_Sim2
  gRNA
tcccaggtctaggagacgcg

SEQ ID NO: 48511 - DNA, 20 bp, Artificial Sequence
  MKO10048511_A_Sim2
  gRNA
cggtgggtgggctgtaagta

SEQ ID NO: 48512 - DNA, 20 bp, Artificial Sequence
  MKO10048512_A_Simc1
  gRNA
accattcttagtcttcgatg

SEQ ID NO: 48513 - DNA, 20 bp, Artificial Sequence
  MKO10048513_A_Simc1
  gRNA
gcagaatcgtgatactccta

SEQ ID NO: 48514 - DNA, 20 bp, Artificial Sequence
  MKO10048514_A_Simc1
  gRNA
cgtagaaagagaactcgtcc

SEQ ID NO: 48515 - DNA, 20 bp, Artificial Sequence
  MKO10048515_A_Sin3a
  gRNA
gtgcagaatgaagcgacgtt

SEQ ID NO: 48516 - DNA, 20 bp, Artificial Sequence
  MKO10048516_A_Sin3a
  gRNA
cgccctgtcctatcttgacc

SEQ ID NO: 48517 - DNA, 20 bp, Artificial Sequence
  MKO10048517_A_Sin3a
  gRNA
ccggggcaaggacccggtgc

SEQ ID NO: 48518 - DNA, 20 bp, Artificial Sequence
  MKO10048518_A_Sin3b
  gRNA
tggctcccgctggggtcgtt

SEQ ID NO: 48519 - DNA, 20 bp, Artificial Sequence
  MKO10048519_A_Sin3b
  gRNA
caagatcaagacccgctttc

SEQ ID NO: 48520 - DNA, 20 bp, Artificial Sequence
  MKO10048520_A_Sin3b
  gRNA
cggcagcttctcgtgccctc

SEQ ID NO: 48521 - DNA, 20 bp, Artificial Sequence
  MKO10048521_A_Sipa1l1
  gRNA
gacttagagcgtcgcttgag

SEQ ID NO: 48522 - DNA, 20 bp, Artificial Sequence
  MKO10048522_A_Sipa1l1
  gRNA
tgcgctgccgaattctgcga

SEQ ID NO: 48523 - DNA, 20 bp, Artificial Sequence
  MKO10048523_A_Sipa1l1
  gRNA
caacgtgcagtgcctgcgct

SEQ ID NO: 48524 - DNA, 20 bp, Artificial Sequence
  MKO10048524_A_Sipa1l2
  gRNA
aacccttcagccgcactctc

SEQ ID NO: 48525 - DNA, 20 bp, Artificial Sequence
  MKO10048525_A_Sipa1l2
  gRNA
cagcaagtaccgtgcgcagc

SEQ ID NO: 48526 - DNA, 20 bp, Artificial Sequence
  MKO10048526_A_Sipa1l2
  gRNA
gtcgcagttcaactacaggg

SEQ ID NO: 48527 - DNA, 20 bp, Artificial Sequence
  MKO10048527_A_Sipa1l3
  gRNA
ctccctctacacgacgtacc

SEQ ID NO: 48528 - DNA, 20 bp, Artificial Sequence
  MKO10048528_A_Sipa1l3
  gRNA
agtcctggtacgtcgtgtag

SEQ ID NO: 48529 - DNA, 20 bp, Artificial Sequence
  MKO10048529_A_Sipa1l3
  gRNA
caccaagtatgccgcgcagc

SEQ ID NO: 48530 - DNA, 20 bp, Artificial Sequence
  MKO10048530_A_Sipa1
  gRNA
gcgtggtccgcacgatgacc

SEQ ID NO: 48531 - DNA, 20 bp, Artificial Sequence
  MKO10048531_A_Sipa1
  gRNA
ggcatcctgtactgccgcgc

SEQ ID NO: 48532 - DNA, 20 bp, Artificial Sequence
  MKO10048532_A_Sipa1
  gRNA
ccccgaggggcctatctccg

SEQ ID NO: 48533 - DNA, 20 bp, Artificial Sequence
  MKO10048533_A_Sirpa
  gRNA
ccgcggcccatggagcccgc

SEQ ID NO: 48534 - DNA, 20 bp, Artificial Sequence
  MKO10048534_A_Sirpa
  gRNA
ctgttgatctacagtttcgc

SEQ ID NO: 48535 - DNA, 20 bp, Artificial Sequence
  MKO10048535_A_Sirpa
  gRNA
tactcctctgtaccacctaa

SEQ ID NO: 48536 - DNA, 20 bp, Artificial Sequence
  MKO10048536_A_Sirpb1a
  gRNA
ggggaatgttctcctgtgaa

SEQ ID NO: 48537 - DNA, 20 bp, Artificial Sequence
  MKO10048537_A_Sirpb1a
  gRNA
ctcttgatatacccgttcac

SEQ ID NO: 48538 - DNA, 20 bp, Artificial Sequence
  MKO10048538_A_Sirpb1a
  gRNA
cattgaaacccatactgtgc

SEQ ID NO: 48539 - DNA, 20 bp, Artificial Sequence
  MKO10048539_A_Sirpb1b
  gRNA
ctcttgatacagtcgttcac

SEQ ID NO: 48540 - DNA, 20 bp, Artificial Sequence
  MKO10048540_A_Sirpb1b
  gRNA
ggcactgagttgtcagtact

SEQ ID NO: 48541 - DNA, 20 bp, Artificial Sequence
  MKO10048541_A_Sirpb1b
  gRNA
ctctcagatcatttgtgaag

SEQ ID NO: 48542 - DNA, 20 bp, Artificial Sequence
  MKO10048542_A_Sirt1
  gRNA
cggacgagccgctccgcaag

SEQ ID NO: 48543 - DNA, 20 bp, Artificial Sequence
  MKO10048543_A_Sirt1
  gRNA
tcgaagtcgtcagccgccct

SEQ ID NO: 48544 - DNA, 20 bp, Artificial Sequence
  MKO10048544_A_Sirt1
  gRNA
tatctatgctcgccttgcgg

SEQ ID NO: 48545 - DNA, 20 bp, Artificial Sequence
  MKO10048545_A_Sirt2
  gRNA
ccctaactcacggtccggct

SEQ ID NO: 48546 - DNA, 20 bp, Artificial Sequence
  MKO10048546_A_Sirt2
  gRNA
gctctatcccgggcagttca

SEQ ID NO: 48547 - DNA, 20 bp, Artificial Sequence
  MKO10048547_A_Sirt2
  gRNA
ccccgttcccatggccgagc

SEQ ID NO: 48548 - DNA, 20 bp, Artificial Sequence
  MKO10048548_A_Sirt3
  gRNA
catgaactacatcccctagc

SEQ ID NO: 48549 - DNA, 20 bp, Artificial Sequence
  MKO10048549_A_Sirt3
  gRNA
ttgctgtagaggccgctccc

SEQ ID NO: 48550 - DNA, 20 bp, Artificial Sequence
  MKO10048550_A_Sirt3
  gRNA
agctgtaccctgggcactac

SEQ ID NO: 48551 - DNA, 20 bp, Artificial Sequence
  MKO10048551_A_Sirt4
  gRNA
gtcccgtgctgtgatcgatg

SEQ ID NO: 48552 - DNA, 20 bp, Artificial Sequence
  MKO10048552_A_Sirt4
  gRNA
agtttcgggcccagtaccgc

SEQ ID NO: 48553 - DNA, 20 bp, Artificial Sequence
  MKO10048553_A_Sirt4
  gRNA
tccccaaagaaaacgacgtc

SEQ ID NO: 48554 - DNA, 20 bp, Artificial Sequence
  MKO10048554_A_Sirt5
  gRNA
taccggggaagtttgtcgac

SEQ ID NO: 48555 - DNA, 20 bp, Artificial Sequence
  MKO10048555_A_Sirt5
  gRNA
cattgacgagttgcatcgca

SEQ ID NO: 48556 - DNA, 20 bp, Artificial Sequence
  MKO10048556_A_Sirt5
  gRNA
gatcggactcctatagttct

SEQ ID NO: 48557 - DNA, 20 bp, Artificial Sequence
  MKO10048557_A_Sirt6
  gRNA
cgagggccgagcattctcga

SEQ ID NO: 48558 - DNA, 20 bp, Artificial Sequence
  MKO10048558_A_Sirt6
  gRNA
cgtgcagcccgtctacgttc

SEQ ID NO: 48559 - DNA, 20 bp, Artificial Sequence
  MKO10048559_A_Sirt6
  gRNA
tgttcaccgacctgaagtcg

SEQ ID NO: 48560 - DNA, 20 bp, Artificial Sequence
  MKO10048560_A_Sirt7
  gRNA
gcggaggaaggtccgcgaac

SEQ ID NO: 48561 - DNA, 20 bp, Artificial Sequence
  MKO10048561_A_Sirt7
  gRNA
tgctgccgacctaagcgaag

SEQ ID NO: 48562 - DNA, 20 bp, Artificial Sequence
  MKO10048562_A_Sirt7
  gRNA
cgtaggtgtcacgcatcctg

SEQ ID NO: 48563 - DNA, 20 bp, Artificial Sequence
  MKO10048563_A_Sis
  gRNA
ccttgaaccggaaacgatta

SEQ ID NO: 48564 - DNA, 20 bp, Artificial Sequence
  MKO10048564_A_Sis
  gRNA
gtcagacccgtaatcgtttc

SEQ ID NO: 48565 - DNA, 20 bp, Artificial Sequence
  MKO10048565_A_Sis
  gRNA
cgttcagcatcaaagtcatc

SEQ ID NO: 48566 - DNA, 20 bp, Artificial Sequence
  MKO10048566_A_Sit1
  gRNA
tcccctccataagccacgcg

SEQ ID NO: 48567 - DNA, 20 bp, Artificial Sequence
  MKO10048567_A_Sit1
  gRNA
cagtccccacgcgtggctta

SEQ ID NO: 48568 - DNA, 20 bp, Artificial Sequence
  MKO10048568_A_Sit1
  gRNA
gtcggctgtctcaagaacca

SEQ ID NO: 48569 - DNA, 20 bp, Artificial Sequence
  MKO10048569_A_Siva1
  gRNA
ctgtgcagctatgccgacga

SEQ ID NO: 48570 - DNA, 20 bp, Artificial Sequence
  MKO10048570_A_Siva1
  gRNA
tgcgaacgggcagctccgct

SEQ ID NO: 48571 - DNA, 20 bp, Artificial Sequence
  MKO10048571_A_Siva1
  gRNA
cagtgtcttctcaccatcgt

SEQ ID NO: 48572 - DNA, 20 bp, Artificial Sequence
  MKO10048572_A_Six1
  gRNA
atgtcgatgctgccgtcgtt

SEQ ID NO: 48573 - DNA, 20 bp, Artificial Sequence
  MKO10048573_A_Six1
  gRNA
gggtcggccgcgaagtttct

SEQ ID NO: 48574 - DNA, 20 bp, Artificial Sequence
  MKO10048574_A_Six1
  gRNA
ccgagttctggtctggactt

SEQ ID NO: 48575 - DNA, 20 bp, Artificial Sequence
  MKO10048575_A_Six2
  gRNA
agaaccggcggcagcgcgac

SEQ ID NO: 48576 - DNA, 20 bp, Artificial Sequence
  MKO10048576_A_Six2
  gRNA
ccgtgggcaagtaccgcgtg

SEQ ID NO: 48577 - DNA, 20 bp, Artificial Sequence
  MKO10048577_A_Six2
  gRNA
actggtacgggtactgcgct

SEQ ID NO: 48578 - DNA, 20 bp, Artificial Sequence
  MKO10048578_A_Six3
  gRNA
cgccagttcgcgtttcttgc

SEQ ID NO: 48579 - DNA, 20 bp, Artificial Sequence
  MKO10048579_A_Six3
  gRNA
tacatcacattccgagtcgc

SEQ ID NO: 48580 - DNA, 20 bp, Artificial Sequence
  MKO10048580_A_Six3
  gRNA
tacttgtccaccgggccgag

SEQ ID NO: 48581 - DNA, 20 bp, Artificial Sequence
  MKO10048581_A_Six4
  gRNA
tctgaaggcgcgagcgctcg

SEQ ID NO: 48582 - DNA, 20 bp, Artificial Sequence
  MKO10048582_A_Six4
  gRNA
gaagtcgcgcaacgcgctca

SEQ ID NO: 48583 - DNA, 20 bp, Artificial Sequence
  MKO10048583_A_Six4
  gRNA
ggacacattaaccaacgacg

SEQ ID NO: 48584 - DNA, 20 bp, Artificial Sequence
  MKO10048584_A_Six5
  gRNA
gcaccggatcgctgccacgt

SEQ ID NO: 48585 - DNA, 20 bp, Artificial Sequence
  MKO10048585_A_Six5
  gRNA
atagcggttgccgcggtagc

SEQ ID NO: 48586 - DNA, 20 bp, Artificial Sequence
  MKO10048586_A_Six5
  gRNA
gctggactcatcctccgtag

SEQ ID NO: 48587 - DNA, 20 bp, Artificial Sequence
  MKO10048587_A_Six6
  gRNA
cgcggcacctgcttcgagag

SEQ ID NO: 48588 - DNA, 20 bp, Artificial Sequence
  MKO10048588_A_Six6
  gRNA
gatgtcgcactcactgtcgc

SEQ ID NO: 48589 - DNA, 20 bp, Artificial Sequence
  MKO10048589_A_Six6
  gRNA
cacataccccggctacttgc

SEQ ID NO: 48590 - DNA, 20 bp, Artificial Sequence
  MKO10048590_A_Ska1
  gRNA
ctctgggtcgccgtcacttg

SEQ ID NO: 48591 - DNA, 20 bp, Artificial Sequence
  MKO10048591_A_Ska1
  gRNA
acaaactaacagttcactca

SEQ ID NO: 48592 - DNA, 20 bp, Artificial Sequence
  MKO10048592_A_Ska1
  gRNA
tccccatctgcctcaagtga

SEQ ID NO: 48593 - DNA, 20 bp, Artificial Sequence
  MKO10048593_A_Ska2
  gRNA
gccattaaaatctcatatgc

SEQ ID NO: 48594 - DNA, 20 bp, Artificial Sequence
  MKO10048594_A_Ska2
  gRNA
attacctctcctgctgaatg

SEQ ID NO: 48595 - DNA, 20 bp, Artificial Sequence
  MKO10048595_A_Ska2
  gRNA
ccagaaagctgattctgatt

SEQ ID NO: 48596 - DNA, 20 bp, Artificial Sequence
  MKO10048596_A_Ska3
  gRNA
aatcctccttgtcacgcgct

SEQ ID NO: 48597 - DNA, 20 bp, Artificial Sequence
  MKO10048597_A_Ska3
  gRNA
ctaccaagcgcgtgacaagg

SEQ ID NO: 48598 - DNA, 20 bp, Artificial Sequence
  MKO10048598_A_Ska3
  gRNA
ttcaagtgctgaagaccccg

SEQ ID NO: 48599 - DNA, 20 bp, Artificial Sequence
  MKO10048599_A_Skap1
  gRNA
tttagataccgaagacttcc

SEQ ID NO: 48600 - DNA, 20 bp, Artificial Sequence
  MKO10048600_A_Skap1
  gRNA
gattgtcatcagagccgtcc

SEQ ID NO: 48601 - DNA, 20 bp, Artificial Sequence
  MKO10048601_A_Skap1
  gRNA
aatgcaggctgtcgccctcc

SEQ ID NO: 48602 - DNA, 20 bp, Artificial Sequence
  MKO10048602_A_Skap2
  gRNA
gaatatgacgatccctttgc

SEQ ID NO: 48603 - DNA, 20 bp, Artificial Sequence
  MKO10048603_A_Skap2
  gRNA
tacctggaaaaacgcagaaa

SEQ ID NO: 48604 - DNA, 20 bp, Artificial Sequence
  MKO10048604_A_Skap2
  gRNA
atctttatcgtagcgctctg

SEQ ID NO: 48605 - DNA, 20 bp, Artificial Sequence
  MKO10048605_A_Skida1
  gRNA
ccgaccgactctccttcgct

SEQ ID NO: 48606 - DNA, 20 bp, Artificial Sequence
  MKO10048606_A_Skida1
  gRNA
tgagcgtgcatttggccgcg

SEQ ID NO: 48607 - DNA, 20 bp, Artificial Sequence
  MKO10048607_A_Skida1
  gRNA
ggaaggcgacgtagtttccc

SEQ ID NO: 48608 - DNA, 20 bp, Artificial Sequence
  MKO10048608_A_Skil
  gRNA
gcgaatgcatgacgaacgtc

SEQ ID NO: 48609 - DNA, 20 bp, Artificial Sequence
  MKO10048609_A_Skil
  gRNA
cgcttggcgtgctcgccatc

SEQ ID NO: 48610 - DNA, 20 bp, Artificial Sequence
  MKO10048610_A_Skil
  gRNA
gatggcaattccattcccga

SEQ ID NO: 48611 - DNA, 20 bp, Artificial Sequence
  MKO10048611_A_Skint10
  gRNA
aaaagaagcgttgtcctacc

SEQ ID NO: 48612 - DNA, 20 bp, Artificial Sequence
  MKO10048612_A_Skint10
  gRNA
gtactcttggagtgtacttc

SEQ ID NO: 48613 - DNA, 20 bp, Artificial Sequence
  MKO10048613_A_Skint10
  gRNA
acatatattccgatttgaat

SEQ ID NO: 48614 - DNA, 20 bp, Artificial Sequence
  MKO10048614_A_Skint11
  gRNA
aggagaagtattatcctatc

SEQ ID NO: 48615 - DNA, 20 bp, Artificial Sequence
  MKO10048615_A_Skint11
  gRNA
tccctctctacttgatgttc

SEQ ID NO: 48616 - DNA, 20 bp, Artificial Sequence
  MKO10048616_A_Skint11
  gRNA
agatgtttctacacatgacg

SEQ ID NO: 48617 - DNA, 20 bp, Artificial Sequence
  MKO10048617_A_Skint1
  gRNA
gtgcaccctcctaataccaa

SEQ ID NO: 48618 - DNA, 20 bp, Artificial Sequence
  MKO10048618_A_Skint1
  gRNA
tcccacgacctctcatgcaa

SEQ ID NO: 48619 - DNA, 20 bp, Artificial Sequence
  MKO10048619_A_Skint1
  gRNA
tctaagccgttcactataaa

SEQ ID NO: 48620 - DNA, 20 bp, Artificial Sequence
  MKO10048620_A_Skint2
  gRNA
atgcagccccctaatatcaa

SEQ ID NO: 48621 - DNA, 20 bp, Artificial Sequence
  MKO10048621_A_Skint2
  gRNA
aatgtacatgactgagcttg

SEQ ID NO: 48622 - DNA, 20 bp, Artificial Sequence
  MKO10048622_A_Skint2
  gRNA
ctgaactctgtgttaccatc

SEQ ID NO: 48623 - DNA, 20 bp, Artificial Sequence
  MKO10048623_A_Skint3
  gRNA
caggttctgtatagcgattc

SEQ ID NO: 48624 - DNA, 20 bp, Artificial Sequence
  MKO10048624_A_Skint3
  gRNA
atgcatcccccgaatattaa

SEQ ID NO: 48625 - DNA, 20 bp, Artificial Sequence
  MKO10048625_A_Skint3
  gRNA
gaatgtagcaagtgacaatc

SEQ ID NO: 48626 - DNA, 20 bp, Artificial Sequence
  MKO10048626_A_Skint4
  gRNA
ccattacggtataggtgcac

SEQ ID NO: 48627 - DNA, 20 bp, Artificial Sequence
  MKO10048627_A_Skint4
  gRNA
cctgtgcacctataccgtaa

SEQ ID NO: 48628 - DNA, 20 bp, Artificial Sequence
  MKO10048628_A_Skint4
  gRNA
atgcatacgcctaatattaa

SEQ ID NO: 48629 - DNA, 20 bp, Artificial Sequence
  MKO10048629_A_Skint5
  gRNA
gacttaggatcaacaaactc

SEQ ID NO: 48630 - DNA, 20 bp, Artificial Sequence
  MKO10048630_A_Skint5
  gRNA
agagcatatcatagacgtca

SEQ ID NO: 48631 - DNA, 20 bp, Artificial Sequence
  MKO10048631_A_Skint5
  gRNA
aaagtaactagtgttgacag

SEQ ID NO: 48632 - DNA, 20 bp, Artificial Sequence
  MKO10048632_A_Skint6
  gRNA
agcataagctttgtcctacc

SEQ ID NO: 48633 - DNA, 20 bp, Artificial Sequence
  MKO10048633_A_Skint6
  gRNA
aaagtaactagtgttgatag

SEQ ID NO: 48634 - DNA, 20 bp, Artificial Sequence
  MKO10048634_A_Skint6
  gRNA
ttattaaatccaactcctac

SEQ ID NO: 48635 - DNA, 20 bp, Artificial Sequence
  MKO10048635_A_Skint7
  gRNA
gtcatggtggagtgtaattc

SEQ ID NO: 48636 - DNA, 20 bp, Artificial Sequence
  MKO10048636_A_Skint7
  gRNA
aaagtttagcttccattgta

SEQ ID NO: 48637 - DNA, 20 bp, Artificial Sequence
  MKO10048637_A_Skint7
  gRNA
ccttaccaatgttcatttaa

SEQ ID NO: 48638 - DNA, 20 bp, Artificial Sequence
  MKO10048638_A_Skint8
  gRNA
catttacctctgtaccggtg

SEQ ID NO: 48639 - DNA, 20 bp, Artificial Sequence
  MKO10048639_A_Skint8
  gRNA
atcatgaacctcaacgtgac

SEQ ID NO: 48640 - DNA, 20 bp, Artificial Sequence
  MKO10048640_A_Skint8
  gRNA
gtgcatttcttagtctgttc

SEQ ID NO: 48641 - DNA, 20 bp, Artificial Sequence
  MKO10048641_A_Skint9
  gRNA
acatattctccgatttgaac

SEQ ID NO: 48642 - DNA, 20 bp, Artificial Sequence
  MKO10048642_A_Skint9
  gRNA
cttctgaaactcacgtagat

SEQ ID NO: 48643 - DNA, 20 bp, Artificial Sequence
  MKO10048643_A_Skint9
  gRNA
ttcagatgccctgttcaaat

SEQ ID NO: 48644 - DNA, 20 bp, Artificial Sequence
  MKO10048644_A_Skiv2l2
  gRNA
tttgctgccttcccaactcg

SEQ ID NO: 48645 - DNA, 20 bp, Artificial Sequence
  MKO10048645_A_Skiv2l2
  gRNA
ataccacttaaacctcgagt

SEQ ID NO: 48646 - DNA, 20 bp, Artificial Sequence
  MKO10048646_A_Skiv2l2
  gRNA
gtatctgctcatacgtcagc

SEQ ID NO: 48647 - DNA, 20 bp, Artificial Sequence
  MKO10048647_A_Skiv2l
  gRNA
ttggattgccccatagcgac

SEQ ID NO: 48648 - DNA, 20 bp, Artificial Sequence
  MKO10048648_A_Skiv2l
  gRNA
gaacttaccccttcgagctc

SEQ ID NO: 48649 - DNA, 20 bp, Artificial Sequence
  MKO10048649_A_Skiv2l
  gRNA
aagtggggtgcactggccgt

SEQ ID NO: 48650 - DNA, 20 bp, Artificial Sequence
  MKO10048650_A_Ski
  gRNA
cttgtatccagccacgaaaa

SEQ ID NO: 48651 - DNA, 20 bp, Artificial Sequence
  MKO10048651_A_Ski
  gRNA
cacctgtctcgaatcaaagc

SEQ ID NO: 48652 - DNA, 20 bp, Artificial Sequence
  MKO10048652_A_Ski
  gRNA
aggcatgcatgctccgcccg

SEQ ID NO: 48653 - DNA, 20 bp, Artificial Sequence
  MKO10048653_A_Skor1
  gRNA
ttcgtccgcggtgtccacgt

SEQ ID NO: 48654 - DNA, 20 bp, Artificial Sequence
  MKO10048654_A_Skor1
  gRNA
cgtccgcaccgtcctcgtcc

SEQ ID NO: 48655 - DNA, 20 bp, Artificial Sequence
  MKO10048655_A_Skor1
  gRNA
ctcgacgacagccgacgact

SEQ ID NO: 48656 - DNA, 20 bp, Artificial Sequence
  MKO10048656_A_Skor2
  gRNA
ttcacctcattcgctcaaaa

SEQ ID NO: 48657 - DNA, 20 bp, Artificial Sequence
  MKO10048657_A_Skor2
  gRNA
ccaagttattatatctacaa

SEQ ID NO: 48658 - DNA, 20 bp, Artificial Sequence
  MKO10048658_A_Skor2
  gRNA
atccttactgaagactggga

SEQ ID NO: 48659 - DNA, 20 bp, Artificial Sequence
  MKO10048659_A_Skp1a
  gRNA
aggtacgcaaagagaaccaa

SEQ ID NO: 48660 - DNA, 20 bp, Artificial Sequence
  MKO10048660_A_Skp1a
  gRNA
ttcacttctcttcacaccat

SEQ ID NO: 48661 - DNA, 20 bp, Artificial Sequence
  MKO10048661_A_Skp1a
  gRNA
gattaaggggaaaactcctg

SEQ ID NO: 48662 - DNA, 20 bp, Artificial Sequence
  MKO10048662_A_Skp2
  gRNA
aagttctcccgactaagctt

SEQ ID NO: 48663 - DNA, 20 bp, Artificial Sequence
  MKO10048663_A_Skp2
  gRNA
catttatcactgagttcgac

SEQ ID NO: 48664 - DNA, 20 bp, Artificial Sequence
  MKO10048664_A_Skp2
  gRNA
tcctttatggagcagccgct

SEQ ID NO: 48665 - DNA, 20 bp, Artificial Sequence
  MKO10048665_A_Sla2
  gRNA
cccgagtctcagagatagtc

SEQ ID NO: 48666 - DNA, 20 bp, Artificial Sequence
  MKO10048666_A_Sla2
  gRNA
cctgagccgggagaaagccg

SEQ ID NO: 48667 - DNA, 20 bp, Artificial Sequence
  MKO10048667_A_Sla2
  gRNA
tttacccacctctcctggtc

SEQ ID NO: 48668 - DNA, 20 bp, Artificial Sequence
  MKO10048668_A_Slain1
  gRNA
ccggatgccgagcaccgctg

SEQ ID NO: 48669 - DNA, 20 bp, Artificial Sequence
  MKO10048669_A_Slain1
  gRNA
agagtatgatcgctacagcc

SEQ ID NO: 48670 - DNA, 20 bp, Artificial Sequence
  MKO10048670_A_Slain1
  gRNA
ctcggcatccgggccagatt

SEQ ID NO: 48671 - DNA, 20 bp, Artificial Sequence
  MKO10048671_A_Slain2
  gRNA
gtggacacgccgacccgagc

SEQ ID NO: 48672 - DNA, 20 bp, Artificial Sequence
  MKO10048672_A_Slain2
  gRNA
tgacaagcgctccagctcgt

SEQ ID NO: 48673 - DNA, 20 bp, Artificial Sequence
  MKO10048673_A_Slain2
  gRNA
acttgcctgcaccaaactaa

SEQ ID NO: 48674 - DNA, 20 bp, Artificial Sequence
  MKO10048674_A_Slamf1
  gRNA
gcttcctggggacgtcgcca

SEQ ID NO: 48675 - DNA, 20 bp, Artificial Sequence
  MKO10048675_A_Slamf1
  gRNA
tgtccgcatcctcgtcacca

SEQ ID NO: 48676 - DNA, 20 bp, Artificial Sequence
  MKO10048676_A_Slamf1
  gRNA
atcatcgcaagcatgcaagc

SEQ ID NO: 48677 - DNA, 20 bp, Artificial Sequence
  MKO10048677_A_Slamf6
  gRNA
gggttctaactaatccaccc

SEQ ID NO: 48678 - DNA, 20 bp, Artificial Sequence
  MKO10048678_A_Slamf6
  gRNA
gattacttaggttgataacg

SEQ ID NO: 48679 - DNA, 20 bp, Artificial Sequence
  MKO10048679_A_Slamf6
  gRNA
cctttgactagccaacatcc

SEQ ID NO: 48680 - DNA, 20 bp, Artificial Sequence
  MKO10048680_A_Slamf7
  gRNA
acatgtcagattgattacgc

SEQ ID NO: 48681 - DNA, 20 bp, Artificial Sequence
  MKO10048681_A_Slamf7
  gRNA
cctgagtgaagttagatccg

SEQ ID NO: 48682 - DNA, 20 bp, Artificial Sequence
  MKO10048682_A_Slamf7
  gRNA
cttgttgctttgccgatcta

SEQ ID NO: 48683 - DNA, 20 bp, Artificial Sequence
  MKO10048683_A_Slamf8
  gRNA
tctgtaccactctcgtttcc

SEQ ID NO: 48684 - DNA, 20 bp, Artificial Sequence
  MKO10048684_A_Slamf8
  gRNA
ctcctacaaggacgtgctac

SEQ ID NO: 48685 - DNA, 20 bp, Artificial Sequence
  MKO10048685_A_Slamf8
  gRNA
taccagtagcacgtccttgt

SEQ ID NO: 48686 - DNA, 20 bp, Artificial Sequence
  MKO10048686_A_Slamf9
  gRNA
gggacagccagccgttatca

SEQ ID NO: 48687 - DNA, 20 bp, Artificial Sequence
  MKO10048687_A_Slamf9
  gRNA
agttcccgtcgcatctctgt

SEQ ID NO: 48688 - DNA, 20 bp, Artificial Sequence
  MKO10048688_A_Slamf9
  gRNA
actcacggtagacacggaga

SEQ ID NO: 48689 - DNA, 20 bp, Artificial Sequence
  MKO10048689_A_Sla
  gRNA
acattagccccccaatattc

SEQ ID NO: 48690 - DNA, 20 bp, Artificial Sequence
  MKO10048690_A_Sla
  gRNA
aatattggggggctaatgtc

SEQ ID NO: 48691 - DNA, 20 bp, Artificial Sequence
  MKO10048691_A_Sla
  gRNA
tactcacccatggtacactc

SEQ ID NO: 48692 - DNA, 20 bp, Artificial Sequence
  MKO10048692_A_Slbp
  gRNA
aaactgctcataaacgactt

SEQ ID NO: 48693 - DNA, 20 bp, Artificial Sequence
  MKO10048693_A_Slbp
  gRNA
tcgggacccacctttcaggt

SEQ ID NO: 48694 - DNA, 20 bp, Artificial Sequence
  MKO10048694_A_Slbp
  gRNA
tctcggacggaagcgcagag

SEQ ID NO: 48695 - DNA, 20 bp, Artificial Sequence
  MKO10048695_A_Slc10a1
  gRNA
aatctacgacggagatctta

SEQ ID NO: 48696 - DNA, 20 bp, Artificial Sequence
  MKO10048696_A_Slc10a1
  gRNA
ctatgtaccctacgtcctca

SEQ ID NO: 48697 - DNA, 20 bp, Artificial Sequence
  MKO10048697_A_Slc10a1
  gRNA
cgtcatgacaccacacttac

SEQ ID NO: 48698 - DNA, 20 bp, Artificial Sequence
  MKO10048698_A_Slc10a2
  gRNA
ttacttaccaatgctatcat

SEQ ID NO: 48699 - DNA, 20 bp, Artificial Sequence
  MKO10048699_A_Slc10a2
  gRNA
tcccgagtcaacccacatct

SEQ ID NO: 48700 - DNA, 20 bp, Artificial Sequence
  MKO10048700_A_Slc10a2
  gRNA
caggtgccgaacagtagcct

SEQ ID NO: 48701 - DNA, 20 bp, Artificial Sequence
  MKO10048701_A_Slc10a3
  gRNA
ctctccgttcttcgatcagc

SEQ ID NO: 48702 - DNA, 20 bp, Artificial Sequence
  MKO10048702_A_Slc10a3
  gRNA
gtgatctctagccaatacac

SEQ ID NO: 48703 - DNA, 20 bp, Artificial Sequence
  MKO10048703_A_Slc10a3
  gRNA
cacccctgctgatcgaagaa

SEQ ID NO: 48704 - DNA, 20 bp, Artificial Sequence
  MKO10048704_A_Slc10a4
  gRNA
tcggggctaaagccgatgct

SEQ ID NO: 48705 - DNA, 20 bp, Artificial Sequence
  MKO10048705_A_Slc10a4
  gRNA
tcatgtcgccgtctaccagc

SEQ ID NO: 48706 - DNA, 20 bp, Artificial Sequence
  MKO10048706_A_Slc10a4
  gRNA
ctgcactgcgattctcaaac

SEQ ID NO: 48707 - DNA, 20 bp, Artificial Sequence
  MKO10048707_A_Slc10a5
  gRNA
cggaagaaaacatcgttgta

SEQ ID NO: 48708 - DNA, 20 bp, Artificial Sequence
  MKO10048708_A_Slc10a5
  gRNA
catctacttggctttccgga

SEQ ID NO: 48709 - DNA, 20 bp, Artificial Sequence
  MKO10048709_A_Slc10a5
  gRNA
atgatgacaccagtcgacat

SEQ ID NO: 48710 - DNA, 20 bp, Artificial Sequence
  MKO10048710_A_Slc10a6
  gRNA
tacagacctatgctctgata

SEQ ID NO: 48711 - DNA, 20 bp, Artificial Sequence
  MKO10048711_A_Slc10a6
  gRNA
ccaatgcaaagtttagcagc

SEQ ID NO: 48712 - DNA, 20 bp, Artificial Sequence
  MKO10048712_A_Slc10a6
  gRNA
cattcccagggcggccactg

SEQ ID NO: 48713 - DNA, 20 bp, Artificial Sequence
  MKO10048713_A_Slc10a7
  gRNA
gttgaagaatatcgttgcga

SEQ ID NO: 48714 - DNA, 20 bp, Artificial Sequence
  MKO10048714_A_Slc10a7
  gRNA
tctcaggtgcaccagtgcgc

SEQ ID NO: 48715 - DNA, 20 bp, Artificial Sequence
  MKO10048715_A_Slc10a7
  gRNA
gcaggagctgaccagcgcac

SEQ ID NO: 48716 - DNA, 20 bp, Artificial Sequence
  MKO10048716_A_Slc11a1
  gRNA
gagcatcgctttccttgacc

SEQ ID NO: 48717 - DNA, 20 bp, Artificial Sequence
  MKO10048717_A_Slc11a1
  gRNA
taggtctcccggcaaggcgc

SEQ ID NO: 48718 - DNA, 20 bp, Artificial Sequence
  MKO10048718_A_Slc11a1
  gRNA
catccctacctggtctgcgc

SEQ ID NO: 48719 - DNA, 20 bp, Artificial Sequence
  MKO10048719_A_Slc11a2
  gRNA
gttgactcagatggcgcttc

SEQ ID NO: 48720 - DNA, 20 bp, Artificial Sequence
  MKO10048720_A_Slc11a2
  gRNA
cagcgccttgcagcgagact

SEQ ID NO: 48721 - DNA, 20 bp, Artificial Sequence
  MKO10048721_A_Slc11a2
  gRNA
atcgaatctgatttgcagtc

SEQ ID NO: 48722 - DNA, 20 bp, Artificial Sequence
  MKO10048722_A_Slc12a1
  gRNA
cagtagtgccagtcgctttc

SEQ ID NO: 48723 - DNA, 20 bp, Artificial Sequence
  MKO10048723_A_Slc12a1
  gRNA
attgaatactaccgcaacac

SEQ ID NO: 48724 - DNA, 20 bp, Artificial Sequence
  MKO10048724_A_Slc12a1
  gRNA
gactgtcgtggatcttctta

SEQ ID NO: 48725 - DNA, 20 bp, Artificial Sequence
  MKO10048725_A_Slc12a2
  gRNA
gtatgcgaccacagcatctc

SEQ ID NO: 48726 - DNA, 20 bp, Artificial Sequence
  MKO10048726_A_Slc12a2
  gRNA
atcgtgggtcaagctgggat

SEQ ID NO: 48727 - DNA, 20 bp, Artificial Sequence
  MKO10048727_A_Slc12a2
  gRNA
ctctgtcgtcgtaatagcaa

SEQ ID NO: 48728 - DNA, 20 bp, Artificial Sequence
  MKO10048728_A_Slc12a3
  gRNA
attacggcgcaggcgggcat

SEQ ID NO: 48729 - DNA, 20 bp, Artificial Sequence
  MKO10048729_A_Slc12a3
  gRNA
ttgacccagccgaagcgaac

SEQ ID NO: 48730 - DNA, 20 bp, Artificial Sequence
  MKO10048730_A_Slc12a3
  gRNA
agaacctgttcgcttcggct

SEQ ID NO: 48731 - DNA, 20 bp, Artificial Sequence
  MKO10048731_A_Slc12a4
  gRNA
ttgtcatagtcgccgcgtcg

SEQ ID NO: 48732 - DNA, 20 bp, Artificial Sequence
  MKO10048732_A_Slc12a4
  gRNA
actacggcgagcgcgccgag

SEQ ID NO: 48733 - DNA, 20 bp, Artificial Sequence
  MKO10048733_A_Slc12a4
  gRNA
tcaccttggcagctctccgt

SEQ ID NO: 48734 - DNA, 20 bp, Artificial Sequence
  MKO10048734_A_Slc12a5
  gRNA
atgagtgcaatcgcaaccaa

SEQ ID NO: 48735 - DNA, 20 bp, Artificial Sequence
  MKO10048735_A_Slc12a5
  gRNA
ggtgggcatcgcgggcatca

SEQ ID NO: 48736 - DNA, 20 bp, Artificial Sequence
  MKO10048736_A_Slc12a5
  gRNA
ccaccacccacgtgagccgc

SEQ ID NO: 48737 - DNA, 20 bp, Artificial Sequence
  MKO10048737_A_Slc12a6
  gRNA
ccgagtcagaactccatcac

SEQ ID NO: 48738 - DNA, 20 bp, Artificial Sequence
  MKO10048738_A_Slc12a6
  gRNA
cacccatgaaagtacccatt

SEQ ID NO: 48739 - DNA, 20 bp, Artificial Sequence
  MKO10048739_A_Slc12a6
  gRNA
gtcttctctcctcaaccgca

SEQ ID NO: 48740 - DNA, 20 bp, Artificial Sequence
  MKO10048740_A_Slc12a7
  gRNA
cggcaggtagactccgatga

SEQ ID NO: 48741 - DNA, 20 bp, Artificial Sequence
  MKO10048741_A_Slc12a7
  gRNA
atgagcgccatcgctaccaa

SEQ ID NO: 48742 - DNA, 20 bp, Artificial Sequence
  MKO10048742_A_Slc12a7
  gRNA
gtaccttgacctctcgcctc

SEQ ID NO: 48743 - DNA, 20 bp, Artificial Sequence
  MKO10048743_A_Slc12a8
  gRNA
atcaccgtgctgtcgggcat

SEQ ID NO: 48744 - DNA, 20 bp, Artificial Sequence
  MKO10048744_A_Slc12a8
  gRNA
gagggccacgaggacgacga

SEQ ID NO: 48745 - DNA, 20 bp, Artificial Sequence
  MKO10048745_A_Slc12a8
  gRNA
ttgctgggcatcaacctggc

SEQ ID NO: 48746 - DNA, 20 bp, Artificial Sequence
  MKO10048746_A_Slc12a9
  gRNA
tgcccggtcgaggagctaac

SEQ ID NO: 48747 - DNA, 20 bp, Artificial Sequence
  MKO10048747_A_Slc12a9
  gRNA
ccccccagctggctacgccg

SEQ ID NO: 48748 - DNA, 20 bp, Artificial Sequence
  MKO10048748_A_Slc12a9
  gRNA
gagtctatactggacgtctt

SEQ ID NO: 48749 - DNA, 20 bp, Artificial Sequence
  MKO10048749_A_Slc13a1
  gRNA
taccatcaatgtccagtccg

SEQ ID NO: 48750 - DNA, 20 bp, Artificial Sequence
  MKO10048750_A_Slc13a1
  gRNA
ttcaatgaatctgccgccca

SEQ ID NO: 48751 - DNA, 20 bp, Artificial Sequence
  MKO10048751_A_Slc13a1
  gRNA
tgggatcatgcgttcttcac

SEQ ID NO: 48752 - DNA, 20 bp, Artificial Sequence
  MKO10048752_A_Slc13a2
  gRNA
acccccgacgaacaatatgt

SEQ ID NO: 48753 - DNA, 20 bp, Artificial Sequence
  MKO10048753_A_Slc13a2
  gRNA
cgggccgcactcctatgata

SEQ ID NO: 48754 - DNA, 20 bp, Artificial Sequence
  MKO10048754_A_Slc13a2
  gRNA
atacccgatgggcagcatca

SEQ ID NO: 48755 - DNA, 20 bp, Artificial Sequence
  MKO10048755_A_Slc13a3
  gRNA
ggtccttccgagcttcgcgc

SEQ ID NO: 48756 - DNA, 20 bp, Artificial Sequence
  MKO10048756_A_Slc13a3
  gRNA
tggccatgatcaggccgcta

SEQ ID NO: 48757 - DNA, 20 bp, Artificial Sequence
  MKO10048757_A_Slc13a3
  gRNA
cagagcttacccttccgaac

SEQ ID NO: 48758 - DNA, 20 bp, Artificial Sequence
  MKO10048758_A_Slc13a4
  gRNA
caagcgcatcgccctgcgca

SEQ ID NO: 48759 - DNA, 20 bp, Artificial Sequence
  MKO10048759_A_Slc13a4
  gRNA
ccgccatcaagaccatgcgc

SEQ ID NO: 48760 - DNA, 20 bp, Artificial Sequence
  MKO10048760_A_Slc13a4
  gRNA
ggggtctaacctcactggat

SEQ ID NO: 48761 - DNA, 20 bp, Artificial Sequence
  MKO10048761_A_Slc13a5
  gRNA
gatagccgccaatacagctg

SEQ ID NO: 48762 - DNA, 20 bp, Artificial Sequence
  MKO10048762_A_Slc13a5
  gRNA
caccacgttgggtcccgtcc

SEQ ID NO: 48763 - DNA, 20 bp, Artificial Sequence
  MKO10048763_A_Slc13a5
  gRNA
agccatgatgatacccattg

SEQ ID NO: 48764 - DNA, 20 bp, Artificial Sequence
  MKO10048764_A_Slc14a1
  gRNA
atcgacaacgccatgttgaa

SEQ ID NO: 48765 - DNA, 20 bp, Artificial Sequence
  MKO10048765_A_Slc14a1
  gRNA
ctcaacgcgctcgagaaaac

SEQ ID NO: 48766 - DNA, 20 bp, Artificial Sequence
  MKO10048766_A_Slc14a1
  gRNA
ctgcagatcggcgatagcag

SEQ ID NO: 48767 - DNA, 20 bp, Artificial Sequence
  MKO10048767_A_Slc14a2
  gRNA
tgtcccagcaatcgtccacc

SEQ ID NO: 48768 - DNA, 20 bp, Artificial Sequence
  MKO10048768_A_Slc14a2
  gRNA
gaagacgggcaggtcccact

SEQ ID NO: 48769 - DNA, 20 bp, Artificial Sequence
  MKO10048769_A_Slc14a2
  gRNA
tgtagtggcccgtagctgcc

SEQ ID NO: 48770 - DNA, 20 bp, Artificial Sequence
  MKO10048770_A_Slc15a1
  gRNA
agcagagggcaacgaacgta

SEQ ID NO: 48771 - DNA, 20 bp, Artificial Sequence
  MKO10048771_A_Slc15a1
  gRNA
ttgtccaatcgtgtagacga

SEQ ID NO: 48772 - DNA, 20 bp, Artificial Sequence
  MKO10048772_A_Slc15a1
  gRNA
agagattgtcgtcccagccg

SEQ ID NO: 48773 - DNA, 20 bp, Artificial Sequence
  MKO10048773_A_Slc15a2
  gRNA
gttacctttcatgccataat

SEQ ID NO: 48774 - DNA, 20 bp, Artificial Sequence
  MKO10048774_A_Slc15a2
  gRNA
gaattcgttcaccacaatga

SEQ ID NO: 48775 - DNA, 20 bp, Artificial Sequence
  MKO10048775_A_Slc15a2
  gRNA
ctcaccggagttgacttctt

SEQ ID NO: 48776 - DNA, 20 bp, Artificial Sequence
  MKO10048776_A_Slc15a3
  gRNA
cgatgatgctgtagccccat

SEQ ID NO: 48777 - DNA, 20 bp, Artificial Sequence
  MKO10048777_A_Slc15a3
  gRNA
gttacctggaagaggacctc

SEQ ID NO: 48778 - DNA, 20 bp, Artificial Sequence
  MKO10048778_A_Slc15a3
  gRNA
aatcaggatcaccgcaacat

SEQ ID NO: 48779 - DNA, 20 bp, Artificial Sequence
  MKO10048779_A_Slc15a4
  gRNA
gattcatgtaagatgtcgcg

SEQ ID NO: 48780 - DNA, 20 bp, Artificial Sequence
  MKO10048780_A_Slc15a4
  gRNA
ccaattgaaaaatctccgag

SEQ ID NO: 48781 - DNA, 20 bp, Artificial Sequence
  MKO10048781_A_Slc15a4
  gRNA
acacgggcacaatcttgacc

SEQ ID NO: 48782 - DNA, 20 bp, Artificial Sequence
  MKO10048782_A_Slc15a5
  gRNA
caaacgccctggcgatcgtc

SEQ ID NO: 48783 - DNA, 20 bp, Artificial Sequence
  MKO10048783_A_Slc15a5
  gRNA
acttactcatgcacgctgac

SEQ ID NO: 48784 - DNA, 20 bp, Artificial Sequence
  MKO10048784_A_Slc15a5
  gRNA
atggcgttcattagcgcaat

SEQ ID NO: 48785 - DNA, 20 bp, Artificial Sequence
  MKO10048785_A_Slc16a10
  gRNA
actagtcaacggcatcgtca

SEQ ID NO: 48786 - DNA, 20 bp, Artificial Sequence
  MKO10048786_A_Slc16a10
  gRNA
cactacttcaagaagcgcct

SEQ ID NO: 48787 - DNA, 20 bp, Artificial Sequence
  MKO10048787_A_Slc16a10
  gRNA
attcccctgtgcagcgcctt

SEQ ID NO: 48788 - DNA, 20 bp, Artificial Sequence
  MKO10048788_A_Slc16a11
  gRNA
gacggcgatgacccccaagc

SEQ ID NO: 48789 - DNA, 20 bp, Artificial Sequence
  MKO10048789_A_Slc16a11
  gRNA
gccgcagcattcgccgtgaa

SEQ ID NO: 48790 - DNA, 20 bp, Artificial Sequence
  MKO10048790_A_Slc16a11
  gRNA
gaagtatccgcccccgatca

SEQ ID NO: 48791 - DNA, 20 bp, Artificial Sequence
  MKO10048791_A_Slc16a12
  gRNA
caacaatatcgattaccccg

SEQ ID NO: 48792 - DNA, 20 bp, Artificial Sequence
  MKO10048792_A_Slc16a12
  gRNA
agcctacgttaccttgatcc

SEQ ID NO: 48793 - DNA, 20 bp, Artificial Sequence
  MKO10048793_A_Slc16a12
  gRNA
gatgtcagacttcgtcgtgt

SEQ ID NO: 48794 - DNA, 20 bp, Artificial Sequence
  MKO10048794_A_Slc16a13
  gRNA
ccccaaacacgagcgccgac

SEQ ID NO: 48795 - DNA, 20 bp, Artificial Sequence
  MKO10048795_A_Slc16a13
  gRNA
cgcgtggcatctggttggct

SEQ ID NO: 48796 - DNA, 20 bp, Artificial Sequence
  MKO10048796_A_Slc16a13
  gRNA
cagatgccacgcgccccacg

SEQ ID NO: 48797 - DNA, 20 bp, Artificial Sequence
  MKO10048797_A_Slc16a14
  gRNA
gcccacccgccatcgatatc

SEQ ID NO: 48798 - DNA, 20 bp, Artificial Sequence
  MKO10048798_A_Slc16a14
  gRNA
gatgcacacctacgcgagtc

SEQ ID NO: 48799 - DNA, 20 bp, Artificial Sequence
  MKO10048799_A_Slc16a14
  gRNA
aatgacagccagactcgcgt

SEQ ID NO: 48800 - DNA, 20 bp, Artificial Sequence
  MKO10048800_A_Slc16a1
  gRNA
agccgtccagtaatgatcgc

SEQ ID NO: 48801 - DNA, 20 bp, Artificial Sequence
  MKO10048801_A_Slc16a1
  gRNA
cttctcgtcgacatcggtgc

SEQ ID NO: 48802 - DNA, 20 bp, Artificial Sequence
  MKO10048802_A_Slc16a1
  gRNA
cctttgtctacaacctacgt

SEQ ID NO: 48803 - DNA, 20 bp, Artificial Sequence
  MKO10048803_A_Slc16a2
  gRNA
cccagatacggtaagtgcgc

SEQ ID NO: 48804 - DNA, 20 bp, Artificial Sequence
  MKO10048804_A_Slc16a2
  gRNA
ctaggcgacgttgaaagtag

SEQ ID NO: 48805 - DNA, 20 bp, Artificial Sequence
  MKO10048805_A_Slc16a2
  gRNA
cccccgaagtcccggcatag

SEQ ID NO: 48806 - DNA, 20 bp, Artificial Sequence
  MKO10048806_A_Slc16a3
  gRNA
aagcgtcgccctattgccaa

SEQ ID NO: 48807 - DNA, 20 bp, Artificial Sequence
  MKO10048807_A_Slc16a3
  gRNA
gtgctcatcggacccccgtc

SEQ ID NO: 48808 - DNA, 20 bp, Artificial Sequence
  MKO10048808_A_Slc16a3
  gRNA
ttggctacagcgacacggct

SEQ ID NO: 48809 - DNA, 20 bp, Artificial Sequence
  MKO10048809_A_Slc16a4
  gRNA
tctacagcaattgcccgttc

SEQ ID NO: 48810 - DNA, 20 bp, Artificial Sequence
  MKO10048810_A_Slc16a4
  gRNA
gctatcatctgtgacgtact

SEQ ID NO: 48811 - DNA, 20 bp, Artificial Sequence
  MKO10048811_A_Slc16a4
  gRNA
aaagcgaagagttcagcaat

SEQ ID NO: 48812 - DNA, 20 bp, Artificial Sequence
  MKO10048812_A_Slc16a5
  gRNA
gtgccgtacgctatgcatca

SEQ ID NO: 48813 - DNA, 20 bp, Artificial Sequence
  MKO10048813_A_Slc16a5
  gRNA
ccactaccgtgatgctcgac

SEQ ID NO: 48814 - DNA, 20 bp, Artificial Sequence
  MKO10048814_A_Slc16a5
  gRNA
cctatcctccctggtgacgc

SEQ ID NO: 48815 - DNA, 20 bp, Artificial Sequence
  MKO10048815_A_Slc16a6
  gRNA
agtcaccgcggtcgcttcta

SEQ ID NO: 48816 - DNA, 20 bp, Artificial Sequence
  MKO10048816_A_Slc16a6
  gRNA
ccaccagccgatgtccgaag

SEQ ID NO: 48817 - DNA, 20 bp, Artificial Sequence
  MKO10048817_A_Slc16a6
  gRNA
ttcgatgtagatcttgcgaa

SEQ ID NO: 48818 - DNA, 20 bp, Artificial Sequence
  MKO10048818_A_Slc16a7
  gRNA
cgatatccaagcgatctgac

SEQ ID NO: 48819 - DNA, 20 bp, Artificial Sequence
  MKO10048819_A_Slc16a7
  gRNA
tactaacacgactgttccgc

SEQ ID NO: 48820 - DNA, 20 bp, Artificial Sequence
  MKO10048820_A_Slc16a7
  gRNA
ccacctccagtcagatcgct

SEQ ID NO: 48821 - DNA, 20 bp, Artificial Sequence
  MKO10048821_A_Slc16a8
  gRNA
gactctacttcgagcggcga

SEQ ID NO: 48822 - DNA, 20 bp, Artificial Sequence
  MKO10048822_A_Slc16a8
  gRNA
agcgcgcacgcgcgctaatc

SEQ ID NO: 48823 - DNA, 20 bp, Artificial Sequence
  MKO10048823_A_Slc16a8
  gRNA
gacagccaaagcgcgtcacg

SEQ ID NO: 48824 - DNA, 20 bp, Artificial Sequence
  MKO10048824_A_Slc16a9
  gRNA
tcgcgagaagttaccacgtg

SEQ ID NO: 48825 - DNA, 20 bp, Artificial Sequence
  MKO10048825_A_Slc16a9
  gRNA
gacaaattagcccacgccta

SEQ ID NO: 48826 - DNA, 20 bp, Artificial Sequence
  MKO10048826_A_Slc16a9
  gRNA
gccctcggcctgatttcaac

SEQ ID NO: 48827 - DNA, 20 bp, Artificial Sequence
  MKO10048827_A_Slc17a1
  gRNA
attccagataggtacccgac

SEQ ID NO: 48828 - DNA, 20 bp, Artificial Sequence
  MKO10048828_A_Slc17a1
  gRNA
tttatctaacgaatctgtag

SEQ ID NO: 48829 - DNA, 20 bp, Artificial Sequence
  MKO10048829_A_Slc17a1
  gRNA
ctacagattcgttagataaa

SEQ ID NO: 48830 - DNA, 20 bp, Artificial Sequence
  MKO10048830_A_Slc17a2
  gRNA
gctcacacgctgcgttatca

SEQ ID NO: 48831 - DNA, 20 bp, Artificial Sequence
  MKO10048831_A_Slc17a2
  gRNA
gctcacgctgtttactccac

SEQ ID NO: 48832 - DNA, 20 bp, Artificial Sequence
  MKO10048832_A_Slc17a2
  gRNA
ctgctcattacgctacgcgc

SEQ ID NO: 48833 - DNA, 20 bp, Artificial Sequence
  MKO10048833_A_Slc17a3
  gRNA
tgatcaccgcttaaacccgc

SEQ ID NO: 48834 - DNA, 20 bp, Artificial Sequence
  MKO10048834_A_Slc17a3
  gRNA
cttgaactgctcgagttgcc

SEQ ID NO: 48835 - DNA, 20 bp, Artificial Sequence
  MKO10048835_A_Slc17a3
  gRNA
cactaatgatgccgcccaca

SEQ ID NO: 48836 - DNA, 20 bp, Artificial Sequence
  MKO10048836_A_Slc17a4
  gRNA
gcccagaccaaccacgtact

SEQ ID NO: 48837 - DNA, 20 bp, Artificial Sequence
  MKO10048837_A_Slc17a4
  gRNA
ctcatcaccatcgctgcatc

SEQ ID NO: 48838 - DNA, 20 bp, Artificial Sequence
  MKO10048838_A_Slc17a4
  gRNA
gagctttgccataaccgcca

SEQ ID NO: 48839 - DNA, 20 bp, Artificial Sequence
  MKO10048839_A_Slc17a5
  gRNA
gaacctgagtgttgcgttag

SEQ ID NO: 48840 - DNA, 20 bp, Artificial Sequence
  MKO10048840_A_Slc17a5
  gRNA
tctcgttgtgcttagagcgc

SEQ ID NO: 48841 - DNA, 20 bp, Artificial Sequence
  MKO10048841_A_Slc17a5
  gRNA
gactgataatagaacgtcta

SEQ ID NO: 48842 - DNA, 20 bp, Artificial Sequence
  MKO10048842_A_Slc17a6
  gRNA
ctatgatgtagcggcgcggc

SEQ ID NO: 48843 - DNA, 20 bp, Artificial Sequence
  MKO10048843_A_Slc17a6
  gRNA
aggatatatcgcatcgcggc

SEQ ID NO: 48844 - DNA, 20 bp, Artificial Sequence
  MKO10048844_A_Slc17a6
  gRNA
ctatgcgactgcacgtgctt

SEQ ID NO: 48845 - DNA, 20 bp, Artificial Sequence
  MKO10048845_A_Slc17a7
  gRNA
cgatgatgtagcgacgaggg

SEQ ID NO: 48846 - DNA, 20 bp, Artificial Sequence
  MKO10048846_A_Slc17a7
  gRNA
gccaaaaattcgcagccaac

SEQ ID NO: 48847 - DNA, 20 bp, Artificial Sequence
  MKO10048847_A_Slc17a7
  gRNA
tgtatgaggccgacagtctc

SEQ ID NO: 48848 - DNA, 20 bp, Artificial Sequence
  MKO10048848_A_Slc17a8
  gRNA
taatgcaccctcgccgcaga

SEQ ID NO: 48849 - DNA, 20 bp, Artificial Sequence
  MKO10048849_A_Slc17a8
  gRNA
gacagcaatgatgtaccgtt

SEQ ID NO: 48850 - DNA, 20 bp, Artificial Sequence
  MKO10048850_A_Slc17a8
  gRNA
gattcggtgcaaccttggag

SEQ ID NO: 48851 - DNA, 20 bp, Artificial Sequence
  MKO10048851_A_Slc17a9
  gRNA
tgactcgggcgcagtacagc

SEQ ID NO: 48852 - DNA, 20 bp, Artificial Sequence
  MKO10048852_A_Slc17a9
  gRNA
ggccgcccaccacctgagtc

SEQ ID NO: 48853 - DNA, 20 bp, Artificial Sequence
  MKO10048853_A_Slc17a9
  gRNA
gggcgtaggctccgtgctcc

SEQ ID NO: 48854 - DNA, 20 bp, Artificial Sequence
  MKO10048854_A_Slc18a1
  gRNA
tatacggataactacgagag

SEQ ID NO: 48855 - DNA, 20 bp, Artificial Sequence
  MKO10048855_A_Slc18a1
  gRNA
ctttgaactctgtcgcatac

SEQ ID NO: 48856 - DNA, 20 bp, Artificial Sequence
  MKO10048856_A_Slc18a1
  gRNA
actgagccagcttcggtgac

SEQ ID NO: 48857 - DNA, 20 bp, Artificial Sequence
  MKO10048857_A_Slc18a2
  gRNA
ttcatcatctgtgtacacgc

SEQ ID NO: 48858 - DNA, 20 bp, Artificial Sequence
  MKO10048858_A_Slc18a2
  gRNA
aatgccacggggggcctccc

SEQ ID NO: 48859 - DNA, 20 bp, Artificial Sequence
  MKO10048859_A_Slc18a2
  gRNA
gccttgggtgactcccctcc

SEQ ID NO: 48860 - DNA, 20 bp, Artificial Sequence
  MKO10048860_A_Slc18a3
  gRNA
tacgacgtgccgctgcttat

SEQ ID NO: 48861 - DNA, 20 bp, Artificial Sequence
  MKO10048861_A_Slc18a3
  gRNA
atagcgcgccgctagacgca

SEQ ID NO: 48862 - DNA, 20 bp, Artificial Sequence
  MKO10048862_A_Slc18a3
  gRNA
gggatacttgtcggcgatca

SEQ ID NO: 48863 - DNA, 20 bp, Artificial Sequence
  MKO10048863_A_Slc18b1
  gRNA
tccgaagatcattccaatca

SEQ ID NO: 48864 - DNA, 20 bp, Artificial Sequence
  MKO10048864_A_Slc18b1
  gRNA
atagtagacgccataggctt

SEQ ID NO: 48865 - DNA, 20 bp, Artificial Sequence
  MKO10048865_A_Slc18b1
  gRNA
tctgttctcttgacagtcgc

SEQ ID NO: 48866 - DNA, 20 bp, Artificial Sequence
  MKO10048866_A_Slc19a1
  gRNA
cgcaggtgtgatcgccatcc

SEQ ID NO: 48867 - DNA, 20 bp, Artificial Sequence
  MKO10048867_A_Slc19a1
  gRNA
aaccgcagtacgcttgcgcg

SEQ ID NO: 48868 - DNA, 20 bp, Artificial Sequence
  MKO10048868_A_Slc19a1
  gRNA
ccaagactggcttgtatcgc

SEQ ID NO: 48869 - DNA, 20 bp, Artificial Sequence
  MKO10048869_A_Slc19a2
  gRNA
ccaagtggtgaactacgcgc

SEQ ID NO: 48870 - DNA, 20 bp, Artificial Sequence
  MKO10048870_A_Slc19a2
  gRNA
cctgcgcgtagttcaccact

SEQ ID NO: 48871 - DNA, 20 bp, Artificial Sequence
  MKO10048871_A_Slc19a2
  gRNA
gaactcaccggttcttccac

SEQ ID NO: 48872 - DNA, 20 bp, Artificial Sequence
  MKO10048872_A_Slc19a3
  gRNA
tgtagcgcaggtagtcggtg

SEQ ID NO: 48873 - DNA, 20 bp, Artificial Sequence
  MKO10048873_A_Slc19a3
  gRNA
gggcataacgttctaagctc

SEQ ID NO: 48874 - DNA, 20 bp, Artificial Sequence
  MKO10048874_A_Slc19a3
  gRNA
acacgggtggcagcgttgcc

SEQ ID NO: 48875 - DNA, 20 bp, Artificial Sequence
  MKO10048875_A_Slc1a1
  gRNA
cctttcaggtgtcgctgcac

SEQ ID NO: 48876 - DNA, 20 bp, Artificial Sequence
  MKO10048876_A_Slc1a1
  gRNA
ttagttgtgagtatcaagcc

SEQ ID NO: 48877 - DNA, 20 bp, Artificial Sequence
  MKO10048877_A_Slc1a1
  gRNA
accgtcattgctgtaatcct

SEQ ID NO: 48878 - DNA, 20 bp, Artificial Sequence
  MKO10048878_A_Slc1a2
  gRNA
catgcgcatgtgcgacaagc

SEQ ID NO: 48879 - DNA, 20 bp, Artificial Sequence
  MKO10048879_A_Slc1a2
  gRNA
gctaaagccagcggccgcct

SEQ ID NO: 48880 - DNA, 20 bp, Artificial Sequence
  MKO10048880_A_Slc1a2
  gRNA
gaccatcattgccgccgtgc

SEQ ID NO: 48881 - DNA, 20 bp, Artificial Sequence
  MKO10048881_A_Slc1a3
  gRNA
tccggtacctgtgacgagac

SEQ ID NO: 48882 - DNA, 20 bp, Artificial Sequence
  MKO10048882_A_Slc1a3
  gRNA
caccgcgaccaatcgcatga

SEQ ID NO: 48883 - DNA, 20 bp, Artificial Sequence
  MKO10048883_A_Slc1a3
  gRNA
aatggcggccctagatagta

SEQ ID NO: 48884 - DNA, 20 bp, Artificial Sequence
  MKO10048884_A_Slc1a4
  gRNA
ctacaatcttgcttccgatc

SEQ ID NO: 48885 - DNA, 20 bp, Artificial Sequence
  MKO10048885_A_Slc1a4
  gRNA
gtcgcaaaagctgtcgcaaa

SEQ ID NO: 48886 - DNA, 20 bp, Artificial Sequence
  MKO10048886_A_Slc1a4
  gRNA
tttggtcacgttccccgagc

SEQ ID NO: 48887 - DNA, 20 bp, Artificial Sequence
  MKO10048887_A_Slc1a5
  gRNA
gatcaattcaaccatggtcc

SEQ ID NO: 48888 - DNA, 20 bp, Artificial Sequence
  MKO10048888_A_Slc1a5
  gRNA
tggttgaattgatctcccgc

SEQ ID NO: 48889 - DNA, 20 bp, Artificial Sequence
  MKO10048889_A_Slc1a5
  gRNA
acgaatgagcagctcaccct

SEQ ID NO: 48890 - DNA, 20 bp, Artificial Sequence
  MKO10048890_A_Slc1a6
  gRNA
atggttaccatcatacatcc

SEQ ID NO: 48891 - DNA, 20 bp, Artificial Sequence
  MKO10048891_A_Slc1a6
  gRNA
ggagagctggtacgggcgca

SEQ ID NO: 48892 - DNA, 20 bp, Artificial Sequence
  MKO10048892_A_Slc1a6
  gRNA
agccaatggcatcaatgcct

SEQ ID NO: 48893 - DNA, 20 bp, Artificial Sequence
  MKO10048893_A_Slc1a7
  gRNA
ccccatagatgacgatccgc

SEQ ID NO: 48894 - DNA, 20 bp, Artificial Sequence
  MKO10048894_A_Slc1a7
  gRNA
gaacttaccggacaagatcc

SEQ ID NO: 48895 - DNA, 20 bp, Artificial Sequence
  MKO10048895_A_Slc1a7
  gRNA
gatcgtcatctatggggtcc

SEQ ID NO: 48896 - DNA, 20 bp, Artificial Sequence
  MKO10048896_A_Slc20a1
  gRNA
tcgtgcgttcatcctccgta

SEQ ID NO: 48897 - DNA, 20 bp, Artificial Sequence
  MKO10048897_A_Slc20a1
  gRNA
tgtattgtcggtgcaaccat

SEQ ID NO: 48898 - DNA, 20 bp, Artificial Sequence
  MKO10048898_A_Slc20a1
  gRNA
gaggttgattccgattgtgc

SEQ ID NO: 48899 - DNA, 20 bp, Artificial Sequence
  MKO10048899_A_Slc20a2
  gRNA
tgcatcgtcggctccaccat

SEQ ID NO: 48900 - DNA, 20 bp, Artificial Sequence
  MKO10048900_A_Slc20a2
  gRNA
gcaatagcgctcatatcctt

SEQ ID NO: 48901 - DNA, 20 bp, Artificial Sequence
  MKO10048901_A_Slc20a2
  gRNA
gattagtatgaacagcacgc

SEQ ID NO: 48902 - DNA, 20 bp, Artificial Sequence
  MKO10048902_A_Slc22a12
  gRNA
atgagccagcgtgccgattc

SEQ ID NO: 48903 - DNA, 20 bp, Artificial Sequence
  MKO10048903_A_Slc22a12
  gRNA
tggcctatggtgtgcgcagc

SEQ ID NO: 48904 - DNA, 20 bp, Artificial Sequence
  MKO10048904_A_Slc22a12
  gRNA
gctcatcacggtaggcaagc

SEQ ID NO: 48905 - DNA, 20 bp, Artificial Sequence
  MKO10048905_A_Slc22a13
  gRNA
gtgcggtgcctgttatctga

SEQ ID NO: 48906 - DNA, 20 bp, Artificial Sequence
  MKO10048906_A_Slc22a13
  gRNA
gaccagccatgaacaccgac

SEQ ID NO: 48907 - DNA, 20 bp, Artificial Sequence
  MKO10048907_A_Slc22a13
  gRNA
gtcttggctactgccaatgc

SEQ ID NO: 48908 - DNA, 20 bp, Artificial Sequence
  MKO10048908_A_Slc22a14
  gRNA
ttctccgagagtccccacga

SEQ ID NO: 48909 - DNA, 20 bp, Artificial Sequence
  MKO10048909_A_Slc22a14
  gRNA
ttcctgtcaggcgtcttgac

SEQ ID NO: 48910 - DNA, 20 bp, Artificial Sequence
  MKO10048910_A_Slc22a14
  gRNA
ggtcatactcctgacggggc

SEQ ID NO: 48911 - DNA, 20 bp, Artificial Sequence
  MKO10048911_A_Slc22a15
  gRNA
atcgcgcagtatgccctatt

SEQ ID NO: 48912 - DNA, 20 bp, Artificial Sequence
  MKO10048912_A_Slc22a15
  gRNA
agcggatgaagtaccctaat

SEQ ID NO: 48913 - DNA, 20 bp, Artificial Sequence
  MKO10048913_A_Slc22a15
  gRNA
ccgcgctgactttgtaagat

SEQ ID NO: 48914 - DNA, 20 bp, Artificial Sequence
  MKO10048914_A_Slc22a16
  gRNA
ggattggttcacggcgaatt

SEQ ID NO: 48915 - DNA, 20 bp, Artificial Sequence
  MKO10048915_A_Slc22a16
  gRNA
accaatccagccaaacgata

SEQ ID NO: 48916 - DNA, 20 bp, Artificial Sequence
  MKO10048916_A_Slc22a16
  gRNA
tagacgtagccatcgaagca

SEQ ID NO: 48917 - DNA, 20 bp, Artificial Sequence
  MKO10048917_A_Slc22a17
  gRNA
tcctcaactaccgcaacatc

SEQ ID NO: 48918 - DNA, 20 bp, Artificial Sequence
  MKO10048918_A_Slc22a17
  gRNA
tcagcagcacaatcccacga

SEQ ID NO: 48919 - DNA, 20 bp, Artificial Sequence
  MKO10048919_A_Slc22a17
  gRNA
aagagccataatgcctgtag

SEQ ID NO: 48920 - DNA, 20 bp, Artificial Sequence
  MKO10048920_A_Slc22a18
  gRNA
gggacccttaacaccgcata

SEQ ID NO: 48921 - DNA, 20 bp, Artificial Sequence
  MKO10048921_A_Slc22a18
  gRNA
cttacccgtatgcggtgtta

SEQ ID NO: 48922 - DNA, 20 bp, Artificial Sequence
  MKO10048922_A_Slc22a18
  gRNA
gtatgcgtgaggcgaagagc

SEQ ID NO: 48923 - DNA, 20 bp, Artificial Sequence
  MKO10048923_A_Slc22a19
  gRNA
catagctcacctccaaggtt

SEQ ID NO: 48924 - DNA, 20 bp, Artificial Sequence
  MKO10048924_A_Slc22a19
  gRNA
atacttacttgtctgataag

SEQ ID NO: 48925 - DNA, 20 bp, Artificial Sequence
  MKO10048925_A_Slc22a19
  gRNA
cagtgtctgtccaactcctg

SEQ ID NO: 48926 - DNA, 20 bp, Artificial Sequence
  MKO10048926_A_Slc22a1
  gRNA
ccgctgttaacacgccagac

SEQ ID NO: 48927 - DNA, 20 bp, Artificial Sequence
  MKO10048927_A_Slc22a1
  gRNA
cattatccttaccgcttgag

SEQ ID NO: 48928 - DNA, 20 bp, Artificial Sequence
  MKO10048928_A_Slc22a1
  gRNA
tggcctatgccattccagac

SEQ ID NO: 48929 - DNA, 20 bp, Artificial Sequence
  MKO10048929_A_Slc22a20
  gRNA
ctggcgtggcatacctgatc

SEQ ID NO: 48930 - DNA, 20 bp, Artificial Sequence
  MKO10048930_A_Slc22a20
  gRNA
gctggacgtaccaagaatag

SEQ ID NO: 48931 - DNA, 20 bp, Artificial Sequence
  MKO10048931_A_Slc22a20
  gRNA
ggtgtggtcgtacctgcagc

SEQ ID NO: 48932 - DNA, 20 bp, Artificial Sequence
  MKO10048932_A_Slc22a21
  gRNA
gggacatatatccaactacg

SEQ ID NO: 48933 - DNA, 20 bp, Artificial Sequence
  MKO10048933_A_Slc22a21
  gRNA
agagccccacacagcacgcc

SEQ ID NO: 48934 - DNA, 20 bp, Artificial Sequence
  MKO10048934_A_Slc22a21
  gRNA
ctgctggcaattactttacc

SEQ ID NO: 48935 - DNA, 20 bp, Artificial Sequence
  MKO10048935_A_Slc22a22
  gRNA
ctatgcacaagccacgtctt

SEQ ID NO: 48936 - DNA, 20 bp, Artificial Sequence
  MKO10048936_A_Slc22a22
  gRNA
ttggtatcttgtcctctatc

SEQ ID NO: 48937 - DNA, 20 bp, Artificial Sequence
  MKO10048937_A_Slc22a22
  gRNA
actgttcaacagtattggcc

SEQ ID NO: 48938 - DNA, 20 bp, Artificial Sequence
  MKO10048938_A_Slc22a23
  gRNA
tcgcatgcagggttggccgg

SEQ ID NO: 48939 - DNA, 20 bp, Artificial Sequence
  MKO10048939_A_Slc22a23
  gRNA
cttagcgatatggactttcc

SEQ ID NO: 48940 - DNA, 20 bp, Artificial Sequence
  MKO10048940_A_Slc22a23
  gRNA
attagccatcggagagactc

SEQ ID NO: 48941 - DNA, 20 bp, Artificial Sequence
  MKO10048941_A_Slc22a26
  gRNA
tatattcttaattggcgtgt

SEQ ID NO: 48942 - DNA, 20 bp, Artificial Sequence
  MKO10048942_A_Slc22a26
  gRNA
ggtggctgacagaatcagct

SEQ ID NO: 48943 - DNA, 20 bp, Artificial Sequence
  MKO10048943_A_Slc22a26
  gRNA
atgagaactcattgacagtg

SEQ ID NO: 48944 - DNA, 20 bp, Artificial Sequence
  MKO10048944_A_Slc22a27
  gRNA
atacatgatatcagcaggcc

SEQ ID NO: 48945 - DNA, 20 bp, Artificial Sequence
  MKO10048945_A_Slc22a27
  gRNA
agataaaagcgctgccatca

SEQ ID NO: 48946 - DNA, 20 bp, Artificial Sequence
  MKO10048946_A_Slc22a27
  gRNA
tagtgacagaattcagtgcc

SEQ ID NO: 48947 - DNA, 20 bp, Artificial Sequence
  MKO10048947_A_Slc22a28
  gRNA
tggacaaaccctaaattcct

SEQ ID NO: 48948 - DNA, 20 bp, Artificial Sequence
  MKO10048948_A_Slc22a28
  gRNA
ggtggatgtcagagtcagct

SEQ ID NO: 48949 - DNA, 20 bp, Artificial Sequence
  MKO10048949_A_Slc22a28
  gRNA
caagttactatttactgata

SEQ ID NO: 48950 - DNA, 20 bp, Artificial Sequence
  MKO10048950_A_Slc22a29
  gRNA
taagttcctttaatcccttc

SEQ ID NO: 48951 - DNA, 20 bp, Artificial Sequence
  MKO10048951_A_Slc22a29
  gRNA
attcatgatattggcaggac

SEQ ID NO: 48952 - DNA, 20 bp, Artificial Sequence
  MKO10048952_A_Slc22a29
  gRNA
ttggcgcagacattgtcagc

SEQ ID NO: 48953 - DNA, 20 bp, Artificial Sequence
  MKO10048953_A_Slc22a2
  gRNA
gcccaacagtaaaggcgatt

SEQ ID NO: 48954 - DNA, 20 bp, Artificial Sequence
  MKO10048954_A_Slc22a2
  gRNA
taccaaatcgcctttactgt

SEQ ID NO: 48955 - DNA, 20 bp, Artificial Sequence
  MKO10048955_A_Slc22a2
  gRNA
gcataccggagtctccaaga

SEQ ID NO: 48956 - DNA, 20 bp, Artificial Sequence
  MKO10048956_A_Slc22a30
  gRNA
tggacaagccctaaattcct

SEQ ID NO: 48957 - DNA, 20 bp, Artificial Sequence
  MKO10048957_A_Slc22a30
  gRNA
ggacctggtgtgtgaatctc

SEQ ID NO: 48958 - DNA, 20 bp, Artificial Sequence
  MKO10048958_A_Slc22a30
  gRNA
acactcacctgtctgacaaa

SEQ ID NO: 48959 - DNA, 20 bp, Artificial Sequence
  MKO10048959_A_Slc22a3
  gRNA
tgtgatgccaacgccgaaac

SEQ ID NO: 48960 - DNA, 20 bp, Artificial Sequence
  MKO10048960_A_Slc22a3
  gRNA
tgcacttagccacgcgcctc

SEQ ID NO: 48961 - DNA, 20 bp, Artificial Sequence
  MKO10048961_A_Slc22a3
  gRNA
cgttggcatcacaggagtcg

SEQ ID NO: 48962 - DNA, 20 bp, Artificial Sequence
  MKO10048962_A_Slc22a4
  gRNA
agagaacgcctacgaagaac

SEQ ID NO: 48963 - DNA, 20 bp, Artificial Sequence
  MKO10048963_A_Slc22a4
  gRNA
agaggatcgaatatccctgc

SEQ ID NO: 48964 - DNA, 20 bp, Artificial Sequence
  MKO10048964_A_Slc22a4
  gRNA
agggatattcgatcctctag

SEQ ID NO: 48965 - DNA, 20 bp, Artificial Sequence
  MKO10048965_A_Slc22a5
  gRNA
ctgatgggctccttcatttc

SEQ ID NO: 48966 - DNA, 20 bp, Artificial Sequence
  MKO10048966_A_Slc22a5
  gRNA
gaatataattcgaattgact

SEQ ID NO: 48967 - DNA, 20 bp, Artificial Sequence
  MKO10048967_A_Slc22a5
  gRNA
cactatcttcgatccaagtg

SEQ ID NO: 48968 - DNA, 20 bp, Artificial Sequence
  MKO10048968_A_Slc22a6
  gRNA
tcttcattgagtcagcccgc

SEQ ID NO: 48969 - DNA, 20 bp, Artificial Sequence
  MKO10048969_A_Slc22a6
  gRNA
tcaagatcagcaccttccga

SEQ ID NO: 48970 - DNA, 20 bp, Artificial Sequence
  MKO10048970_A_Slc22a6
  gRNA
ccactctctgcagggctcgg

SEQ ID NO: 48971 - DNA, 20 bp, Artificial Sequence
  MKO10048971_A_Slc22a7
  gRNA
ttgggtacctgatacggagc

SEQ ID NO: 48972 - DNA, 20 bp, Artificial Sequence
  MKO10048972_A_Slc22a7
  gRNA
gccaccgccagctccgtatc

SEQ ID NO: 48973 - DNA, 20 bp, Artificial Sequence
  MKO10048973_A_Slc22a7
  gRNA
acccaacggaagtacaatga

SEQ ID NO: 48974 - DNA, 20 bp, Artificial Sequence
  MKO10048974_A_Slc22a8
  gRNA
gggtaccagagtccatacgc

SEQ ID NO: 48975 - DNA, 20 bp, Artificial Sequence
  MKO10048975_A_Slc22a8
  gRNA
tctgaagacactccaacgtg

SEQ ID NO: 48976 - DNA, 20 bp, Artificial Sequence
  MKO10048976_A_Slc22a8
  gRNA
atgatcttccgattcctgtg

SEQ ID NO: 48977 - DNA, 20 bp, Artificial Sequence
  MKO10048977_A_Slc23a1
  gRNA
tcacccacctcccggatacg

SEQ ID NO: 48978 - DNA, 20 bp, Artificial Sequence
  MKO10048978_A_Slc23a1
  gRNA
ggttccagccaagtcaatcc

SEQ ID NO: 48979 - DNA, 20 bp, Artificial Sequence
  MKO10048979_A_Slc23a1
  gRNA
tggtgccactgaagcacgtc

SEQ ID NO: 48980 - DNA, 20 bp, Artificial Sequence
  MKO10048980_A_Slc23a2
  gRNA
tgtagatcatatccgacctc

SEQ ID NO: 48981 - DNA, 20 bp, Artificial Sequence
  MKO10048981_A_Slc23a2
  gRNA
ctcgttgtcctgctctccgc

SEQ ID NO: 48982 - DNA, 20 bp, Artificial Sequence
  MKO10048982_A_Slc23a2
  gRNA
tcgtgccactgaaacacgtc

SEQ ID NO: 48983 - DNA, 20 bp, Artificial Sequence
  MKO10048983_A_Slc23a3
  gRNA
agagtttcttatccccgcac

SEQ ID NO: 48984 - DNA, 20 bp, Artificial Sequence
  MKO10048984_A_Slc23a3
  gRNA
gaaactctagggacggagcc

SEQ ID NO: 48985 - DNA, 20 bp, Artificial Sequence
  MKO10048985_A_Slc23a3
  gRNA
ctggaacacttctctccgag

SEQ ID NO: 48986 - DNA, 20 bp, Artificial Sequence
  MKO10048986_A_Slc24a1
  gRNA
ctcccgtctgtgctgacccg

SEQ ID NO: 48987 - DNA, 20 bp, Artificial Sequence
  MKO10048987_A_Slc24a1
  gRNA
gatgatactgttgtgcagcg

SEQ ID NO: 48988 - DNA, 20 bp, Artificial Sequence
  MKO10048988_A_Slc24a1
  gRNA
gctggagtgaccgtgaccgc

SEQ ID NO: 48989 - DNA, 20 bp, Artificial Sequence
  MKO10048989_A_Slc24a2
  gRNA
atcccgaaagagcggccacc

SEQ ID NO: 48990 - DNA, 20 bp, Artificial Sequence
  MKO10048990_A_Slc24a2
  gRNA
tggcgattaccttcagcgag

SEQ ID NO: 48991 - DNA, 20 bp, Artificial Sequence
  MKO10048991_A_Slc24a2
  gRNA
aggcagagcttccgcctcgt

SEQ ID NO: 48992 - DNA, 20 bp, Artificial Sequence
  MKO10048992_A_Slc24a3
  gRNA
ctccaatgaagaccgacgac

SEQ ID NO: 48993 - DNA, 20 bp, Artificial Sequence
  MKO10048993_A_Slc24a3
  gRNA
tagccctgcatgaattcccc

SEQ ID NO: 48994 - DNA, 20 bp, Artificial Sequence
  MKO10048994_A_Slc24a3
  gRNA
cgcagacgccaatgatgcac

SEQ ID NO: 48995 - DNA, 20 bp, Artificial Sequence
  MKO10048995_A_Slc24a4
  gRNA
ttacaccaaggatgtgtagc

SEQ ID NO: 48996 - DNA, 20 bp, Artificial Sequence
  MKO10048996_A_Slc24a4
  gRNA
gccgtgctgtcgttctttgt

SEQ ID NO: 48997 - DNA, 20 bp, Artificial Sequence
  MKO10048997_A_Slc24a4
  gRNA
aacatgttctgctggacacg

SEQ ID NO: 48998 - DNA, 20 bp, Artificial Sequence
  MKO10048998_A_Slc24a5
  gRNA
ccttcgggaaactccgatgc

SEQ ID NO: 48999 - DNA, 20 bp, Artificial Sequence
  MKO10048999_A_Slc24a5
  gRNA
tgaactagttaccgccttct

SEQ ID NO: 49000 - DNA, 20 bp, Artificial Sequence
  MKO10049000_A_Slc24a5
  gRNA
caacatcctgcgacagtcca

SEQ ID NO: 49001 - DNA, 20 bp, Artificial Sequence
  MKO10049001_A_Slc25a10
  gRNA
ctcctactcacttgcgtcgt

SEQ ID NO: 49002 - DNA, 20 bp, Artificial Sequence
  MKO10049002_A_Slc25a10
  gRNA
tcaggccgttgtagagcgcc

SEQ ID NO: 49003 - DNA, 20 bp, Artificial Sequence
  MKO10049003_A_Slc25a10
  gRNA
acgtacctgcctgcacagcg

SEQ ID NO: 49004 - DNA, 20 bp, Artificial Sequence
  MKO10049004_A_Slc25a11
  gRNA
acctacaccactactcgcct

SEQ ID NO: 49005 - DNA, 20 bp, Artificial Sequence
  MKO10049005_A_Slc25a11
  gRNA
gtgttgtttgagcgcctgac

SEQ ID NO: 49006 - DNA, 20 bp, Artificial Sequence
  MKO10049006_A_Slc25a11
  gRNA
cttccagctgaccagcgccg

SEQ ID NO: 49007 - DNA, 20 bp, Artificial Sequence
  MKO10049007_A_Slc25a12
  gRNA
gacttcgttcaacgctatct

SEQ ID NO: 49008 - DNA, 20 bp, Artificial Sequence
  MKO10049008_A_Slc25a12
  gRNA
aactcgcagtcccagttaaa

SEQ ID NO: 49009 - DNA, 20 bp, Artificial Sequence
  MKO10049009_A_Slc25a12
  gRNA
tagcgttgaacgaagtcttc

SEQ ID NO: 49010 - DNA, 20 bp, Artificial Sequence
  MKO10049010_A_Slc25a13
  gRNA
gagtgaactccgcatatgta

SEQ ID NO: 49011 - DNA, 20 bp, Artificial Sequence
  MKO10049011_A_Slc25a13
  gRNA
ccagcccaacccgaaaactg

SEQ ID NO: 49012 - DNA, 20 bp, Artificial Sequence
  MKO10049012_A_Slc25a13
  gRNA
gccaccataaacaaggcatc

SEQ ID NO: 49013 - DNA, 20 bp, Artificial Sequence
  MKO10049013_A_Slc25a14
  gRNA
tgaaacgaacatcgatactc

SEQ ID NO: 49014 - DNA, 20 bp, Artificial Sequence
  MKO10049014_A_Slc25a14
  gRNA
gatgcctgtcttagtaacgc

SEQ ID NO: 49015 - DNA, 20 bp, Artificial Sequence
  MKO10049015_A_Slc25a14
  gRNA
gcgattatttgtagaacgtt

SEQ ID NO: 49016 - DNA, 20 bp, Artificial Sequence
  MKO10049016_A_Slc25a15
  gRNA
gcagcccttcgacacgatga

SEQ ID NO: 49017 - DNA, 20 bp, Artificial Sequence
  MKO10049017_A_Slc25a15
  gRNA
ggtccgtaaagtggttggat

SEQ ID NO: 49018 - DNA, 20 bp, Artificial Sequence
  MKO10049018_A_Slc25a15
  gRNA
gcagagaaccagcgcggcaa

SEQ ID NO: 49019 - DNA, 20 bp, Artificial Sequence
  MKO10049019_A_Slc25a16
  gRNA
atgattcggatctttcccta

SEQ ID NO: 49020 - DNA, 20 bp, Artificial Sequence
  MKO10049020_A_Slc25a16
  gRNA
catgaactggattgcaccgt

SEQ ID NO: 49021 - DNA, 20 bp, Artificial Sequence
  MKO10049021_A_Slc25a16
  gRNA
cgcaccctgaccacatcgag

SEQ ID NO: 49022 - DNA, 20 bp, Artificial Sequence
  MKO10049022_A_Slc25a17
  gRNA
aacgacgcatgcagtgctcc

SEQ ID NO: 49023 - DNA, 20 bp, Artificial Sequence
  MKO10049023_A_Slc25a17
  gRNA
ctcgtggttgggtttgtagc

SEQ ID NO: 49024 - DNA, 20 bp, Artificial Sequence
  MKO10049024_A_Slc25a17
  gRNA
accatcctcggtatggtgcc

SEQ ID NO: 49025 - DNA, 20 bp, Artificial Sequence
  MKO10049025_A_Slc25a18
  gRNA
gctcacctcggtacatgccc

SEQ ID NO: 49026 - DNA, 20 bp, Artificial Sequence
  MKO10049026_A_Slc25a18
  gRNA
tctgtagtcgggtcttggca

SEQ ID NO: 49027 - DNA, 20 bp, Artificial Sequence
  MKO10049027_A_Slc25a18
  gRNA
cagcacgtgcagtcttcatc

SEQ ID NO: 49028 - DNA, 20 bp, Artificial Sequence
  MKO10049028_A_Slc25a19
  gRNA
cgggtacgcaggacgtccac

SEQ ID NO: 49029 - DNA, 20 bp, Artificial Sequence
  MKO10049029_A_Slc25a19
  gRNA
tgggcgggttcgaacatgcc

SEQ ID NO: 49030 - DNA, 20 bp, Artificial Sequence
  MKO10049030_A_Slc25a19
  gRNA
ttggacagctccgtagccta

SEQ ID NO: 49031 - DNA, 20 bp, Artificial Sequence
  MKO10049031_A_Slc25a1
  gRNA
cccaaggtaggctcgacagc

SEQ ID NO: 49032 - DNA, 20 bp, Artificial Sequence
  MKO10049032_A_Slc25a1
  gRNA
agaggactattgtgcggtct

SEQ ID NO: 49033 - DNA, 20 bp, Artificial Sequence
  MKO10049033_A_Slc25a1
  gRNA
cagctgcgtcttcacgtatt

SEQ ID NO: 49034 - DNA, 20 bp, Artificial Sequence
  MKO10049034_A_Slc25a20
  gRNA
acggatcaaatgcttactgc

SEQ ID NO: 49035 - DNA, 20 bp, Artificial Sequence
  MKO10049035_A_Slc25a20
  gRNA
cataggggtgactccaatga

SEQ ID NO: 49036 - DNA, 20 bp, Artificial Sequence
  MKO10049036_A_Slc25a20
  gRNA
atgttcgccgtgtgcttctt

SEQ ID NO: 49037 - DNA, 20 bp, Artificial Sequence
  MKO10049037_A_Slc25a21
  gRNA
ccagatgatcttccgaacag

SEQ ID NO: 49038 - DNA, 20 bp, Artificial Sequence
  MKO10049038_A_Slc25a21
  gRNA
cctgatgcatcctctcgatg

SEQ ID NO: 49039 - DNA, 20 bp, Artificial Sequence
  MKO10049039_A_Slc25a21
  gRNA
ctgttacacttctctgcacc

SEQ ID NO: 49040 - DNA, 20 bp, Artificial Sequence
  MKO10049040_A_Slc25a22
  gRNA
atacatgccgaagtagccct

SEQ ID NO: 49041 - DNA, 20 bp, Artificial Sequence
  MKO10049041_A_Slc25a22
  gRNA
ctgcgtgttccccatcgacc

SEQ ID NO: 49042 - DNA, 20 bp, Artificial Sequence
  MKO10049042_A_Slc25a22
  gRNA
catcaagaccatccgctccg

SEQ ID NO: 49043 - DNA, 20 bp, Artificial Sequence
  MKO10049043_A_Slc25a23
  gRNA
ccgactcaaggtattcatgc

SEQ ID NO: 49044 - DNA, 20 bp, Artificial Sequence
  MKO10049044_A_Slc25a23
  gRNA
ggtagcgagtaaactcctcc

SEQ ID NO: 49045 - DNA, 20 bp, Artificial Sequence
  MKO10049045_A_Slc25a23
  gRNA
acctctagcatggaccgcga

SEQ ID NO: 49046 - DNA, 20 bp, Artificial Sequence
  MKO10049046_A_Slc25a24
  gRNA
atctttgttgacatcgccag

SEQ ID NO: 49047 - DNA, 20 bp, Artificial Sequence
  MKO10049047_A_Slc25a24
  gRNA
tagaacgagcaccgctcctt

SEQ ID NO: 49048 - DNA, 20 bp, Artificial Sequence
  MKO10049048_A_Slc25a24
  gRNA
agcggtgctcgttctagaga

SEQ ID NO: 49049 - DNA, 20 bp, Artificial Sequence
  MKO10049049_A_Slc25a25
  gRNA
tgaccatcgactggaacgag

SEQ ID NO: 49050 - DNA, 20 bp, Artificial Sequence
  MKO10049050_A_Slc25a25
  gRNA
cacaggtcgaatcgatgctc

SEQ ID NO: 49051 - DNA, 20 bp, Artificial Sequence
  MKO10049051_A_Slc25a25
  gRNA
ccgtcgagtgcttccagtac

SEQ ID NO: 49052 - DNA, 20 bp, Artificial Sequence
  MKO10049052_A_Slc25a26
  gRNA
aacacccttaccgttaggaa

SEQ ID NO: 49053 - DNA, 20 bp, Artificial Sequence
  MKO10049053_A_Slc25a26
  gRNA
gctcaccacttctcctgtag

SEQ ID NO: 49054 - DNA, 20 bp, Artificial Sequence
  MKO10049054_A_Slc25a26
  gRNA
gattcgagttccttctgaag

SEQ ID NO: 49055 - DNA, 20 bp, Artificial Sequence
  MKO10049055_A_Slc25a27
  gRNA
gtgcgcaccatgcccctata

SEQ ID NO: 49056 - DNA, 20 bp, Artificial Sequence
  MKO10049056_A_Slc25a27
  gRNA
gcaactaggaaatcggtcat

SEQ ID NO: 49057 - DNA, 20 bp, Artificial Sequence
  MKO10049057_A_Slc25a27
  gRNA
cccgccatttacagacacgt

SEQ ID NO: 49058 - DNA, 20 bp, Artificial Sequence
  MKO10049058_A_Slc25a28
  gRNA
gtacccgatcgactgcgtca

SEQ ID NO: 49059 - DNA, 20 bp, Artificial Sequence
  MKO10049059_A_Slc25a28
  gRNA
gccggcagcgcttcgtattc

SEQ ID NO: 49060 - DNA, 20 bp, Artificial Sequence
  MKO10049060_A_Slc25a28
  gRNA
ctgacccagccgcccgctat

SEQ ID NO: 49061 - DNA, 20 bp, Artificial Sequence
  MKO10049061_A_Slc25a29
  gRNA
ggcctgcgcggcatcaatcg

SEQ ID NO: 49062 - DNA, 20 bp, Artificial Sequence
  MKO10049062_A_Slc25a29
  gRNA
tgatgtaatgacccgcgcca

SEQ ID NO: 49063 - DNA, 20 bp, Artificial Sequence
  MKO10049063_A_Slc25a29
  gRNA
tacctccggcgcatccagcc

SEQ ID NO: 49064 - DNA, 20 bp, Artificial Sequence
  MKO10049064_A_Slc25a2
  gRNA
agggatggctcgaatcagag

SEQ ID NO: 49065 - DNA, 20 bp, Artificial Sequence
  MKO10049065_A_Slc25a2
  gRNA
ggtcccttaggcttctatcg

SEQ ID NO: 49066 - DNA, 20 bp, Artificial Sequence
  MKO10049066_A_Slc25a2
  gRNA
ctggatttaatgcagtccac

SEQ ID NO: 49067 - DNA, 20 bp, Artificial Sequence
  MKO10049067_A_Slc25a30
  gRNA
tgcacccgcaatgctgcgcc

SEQ ID NO: 49068 - DNA, 20 bp, Artificial Sequence
  MKO10049068_A_Slc25a30
  gRNA
ctggtacgtgccgatcttga

SEQ ID NO: 49069 - DNA, 20 bp, Artificial Sequence
  MKO10049069_A_Slc25a30
  gRNA
accctgaatacagcgccttc

SEQ ID NO: 49070 - DNA, 20 bp, Artificial Sequence
  MKO10049070_A_Slc25a31
  gRNA
attggtctataccaagggtt

SEQ ID NO: 49071 - DNA, 20 bp, Artificial Sequence
  MKO10049071_A_Slc25a31
  gRNA
cccgtgaactgccgctgctc

SEQ ID NO: 49072 - DNA, 20 bp, Artificial Sequence
  MKO10049072_A_Slc25a31
  gRNA
gtccttaaaagcgaagttta

SEQ ID NO: 49073 - DNA, 20 bp, Artificial Sequence
  MKO10049073_A_Slc25a32
  gRNA
tggaaagttgatggactacg

SEQ ID NO: 49074 - DNA, 20 bp, Artificial Sequence
  MKO10049074_A_Slc25a32
  gRNA
actcgccttatgttacaata

SEQ ID NO: 49075 - DNA, 20 bp, Artificial Sequence
  MKO10049075_A_Slc25a32
  gRNA
aaggagtaaccccgaatgtg

SEQ ID NO: 49076 - DNA, 20 bp, Artificial Sequence
  MKO10049076_A_Slc25a33
  gRNA
cgcgtcttaatgacttctag

SEQ ID NO: 49077 - DNA, 20 bp, Artificial Sequence
  MKO10049077_A_Slc25a33
  gRNA
agaccaacgtctgtgacgcc

SEQ ID NO: 49078 - DNA, 20 bp, Artificial Sequence
  MKO10049078_A_Slc25a33
  gRNA
ggtgcaactccaaccaaatt

SEQ ID NO: 49079 - DNA, 20 bp, Artificial Sequence
  MKO10049079_A_Slc25a34
  gRNA
gccgcgtgctgacgacgtcc

SEQ ID NO: 49080 - DNA, 20 bp, Artificial Sequence
  MKO10049080_A_Slc25a34
  gRNA
ccctggacgtcgtcagcacg

SEQ ID NO: 49081 - DNA, 20 bp, Artificial Sequence
  MKO10049081_A_Slc25a34
  gRNA
agcttcggaaactggttgcg

SEQ ID NO: 49082 - DNA, 20 bp, Artificial Sequence
  MKO10049082_A_Slc25a35
  gRNA
gggtgtcattgccacgacta

SEQ ID NO: 49083 - DNA, 20 bp, Artificial Sequence
  MKO10049083_A_Slc25a35
  gRNA
aaccaacccactgatactcg

SEQ ID NO: 49084 - DNA, 20 bp, Artificial Sequence
  MKO10049084_A_Slc25a35
  gRNA
accccactagaccatgtttc

SEQ ID NO: 49085 - DNA, 20 bp, Artificial Sequence
  MKO10049085_A_Slc25a36
  gRNA
gtgaaccgagtagtgtcccc

SEQ ID NO: 49086 - DNA, 20 bp, Artificial Sequence
  MKO10049086_A_Slc25a36
  gRNA
tggtgggggttgctccctcc

SEQ ID NO: 49087 - DNA, 20 bp, Artificial Sequence
  MKO10049087_A_Slc25a36
  gRNA
tcttacttcagacaatgaag

SEQ ID NO: 49088 - DNA, 20 bp, Artificial Sequence
  MKO10049088_A_Slc25a37
  gRNA
cgttgagctggtacaccgtc

SEQ ID NO: 49089 - DNA, 20 bp, Artificial Sequence
  MKO10049089_A_Slc25a37
  gRNA
cattggccatgcccgacagc

SEQ ID NO: 49090 - DNA, 20 bp, Artificial Sequence
  MKO10049090_A_Slc25a37
  gRNA
gggcctgaacgtgatgatga

SEQ ID NO: 49091 - DNA, 20 bp, Artificial Sequence
  MKO10049091_A_Slc25a38
  gRNA
tcccgctgatggagccgcag

SEQ ID NO: 49092 - DNA, 20 bp, Artificial Sequence
  MKO10049092_A_Slc25a38
  gRNA
agtgatcaagacacgctatg

SEQ ID NO: 49093 - DNA, 20 bp, Artificial Sequence
  MKO10049093_A_Slc25a38
  gRNA
accgcagtgctgcacggcac

SEQ ID NO: 49094 - DNA, 20 bp, Artificial Sequence
  MKO10049094_A_Slc25a39
  gRNA
gtactcaccgctggttgccg

SEQ ID NO: 49095 - DNA, 20 bp, Artificial Sequence
  MKO10049095_A_Slc25a39
  gRNA
caaggtgccagtgaaccgtg

SEQ ID NO: 49096 - DNA, 20 bp, Artificial Sequence
  MKO10049096_A_Slc25a39
  gRNA
aagtgcctcctatactgcaa

SEQ ID NO: 49097 - DNA, 20 bp, Artificial Sequence
  MKO10049097_A_Slc25a3
  gRNA
gccccgaagtgaatgtacaa

SEQ ID NO: 49098 - DNA, 20 bp, Artificial Sequence
  MKO10049098_A_Slc25a3
  gRNA
gtcagcgaagaattcagcac

SEQ ID NO: 49099 - DNA, 20 bp, Artificial Sequence
  MKO10049099_A_Slc25a3
  gRNA
aatacagtgatgtgcgccac

SEQ ID NO: 49100 - DNA, 20 bp, Artificial Sequence
  MKO10049100_A_Slc25a40
  gRNA
tatatccatagtgactcccc

SEQ ID NO: 49101 - DNA, 20 bp, Artificial Sequence
  MKO10049101_A_Slc25a40
  gRNA
tttcaacttacagagtagga

SEQ ID NO: 49102 - DNA, 20 bp, Artificial Sequence
  MKO10049102_A_Slc25a40
  gRNA
atatacatacctttggggaa

SEQ ID NO: 49103 - DNA, 20 bp, Artificial Sequence
  MKO10049103_A_Slc25a41
  gRNA
ggtacccgagccctataccg

SEQ ID NO: 49104 - DNA, 20 bp, Artificial Sequence
  MKO10049104_A_Slc25a41
  gRNA
agcctgcgacgacccgttcc

SEQ ID NO: 49105 - DNA, 20 bp, Artificial Sequence
  MKO10049105_A_Slc25a41
  gRNA
acgggtcgtcgcaggctccc

SEQ ID NO: 49106 - DNA, 20 bp, Artificial Sequence
  MKO10049106_A_Slc25a42
  gRNA
ataaggaatcactcgcacca

SEQ ID NO: 49107 - DNA, 20 bp, Artificial Sequence
  MKO10049107_A_Slc25a42
  gRNA
tggctgagttcccacgccaa

SEQ ID NO: 49108 - DNA, 20 bp, Artificial Sequence
  MKO10049108_A_Slc25a42
  gRNA
ggcttccctcacgtaccctt

SEQ ID NO: 49109 - DNA, 20 bp, Artificial Sequence
  MKO10049109_A_Slc25a43
  gRNA
gcacgttctgcaccatcaat

SEQ ID NO: 49110 - DNA, 20 bp, Artificial Sequence
  MKO10049110_A_Slc25a43
  gRNA
gttcctggccctttatcgag

SEQ ID NO: 49111 - DNA, 20 bp, Artificial Sequence
  MKO10049111_A_Slc25a43
  gRNA
ggagtagatgtccacttctc

SEQ ID NO: 49112 - DNA, 20 bp, Artificial Sequence
  MKO10049112_A_Slc25a44
  gRNA
cgatcggcaccgtgatgctc

SEQ ID NO: 49113 - DNA, 20 bp, Artificial Sequence
  MKO10049113_A_Slc25a44
  gRNA
ctcggagaccgtcagcccga

SEQ ID NO: 49114 - DNA, 20 bp, Artificial Sequence
  MKO10049114_A_Slc25a44
  gRNA
acgggttctgatgacatcca

SEQ ID NO: 49115 - DNA, 20 bp, Artificial Sequence
  MKO10049115_A_Slc25a45
  gRNA
tgttgctgtacactccgaac

SEQ ID NO: 49116 - DNA, 20 bp, Artificial Sequence
  MKO10049116_A_Slc25a45
  gRNA
gctgggcccgtcgctcctga

SEQ ID NO: 49117 - DNA, 20 bp, Artificial Sequence
  MKO10049117_A_Slc25a45
  gRNA
ttgagagacactcctacgtt

SEQ ID NO: 49118 - DNA, 20 bp, Artificial Sequence
  MKO10049118_A_Slc25a46
  gRNA
tttagggaccaagagcccta

SEQ ID NO: 49119 - DNA, 20 bp, Artificial Sequence
  MKO10049119_A_Slc25a46
  gRNA
gtgaatttacacctttaccg

SEQ ID NO: 49120 - DNA, 20 bp, Artificial Sequence
  MKO10049120_A_Slc25a46
  gRNA
tgagatggtaatgccgagca

SEQ ID NO: 49121 - DNA, 20 bp, Artificial Sequence
  MKO10049121_A_Slc25a47
  gRNA
gctcttgacgatacgtgtcc

SEQ ID NO: 49122 - DNA, 20 bp, Artificial Sequence
  MKO10049122_A_Slc25a47
  gRNA
tggcgtccgtgctgccgtac

SEQ ID NO: 49123 - DNA, 20 bp, Artificial Sequence
  MKO10049123_A_Slc25a47
  gRNA
gggacacgtatcgtcaagag

SEQ ID NO: 49124 - DNA, 20 bp, Artificial Sequence
  MKO10049124_A_Slc25a48
  gRNA
agatcagacagacttcggcc

SEQ ID NO: 49125 - DNA, 20 bp, Artificial Sequence
  MKO10049125_A_Slc25a48
  gRNA
gaacaccaccgagttataga

SEQ ID NO: 49126 - DNA, 20 bp, Artificial Sequence
  MKO10049126_A_Slc25a48
  gRNA
cacattcaactgcatccgca

SEQ ID NO: 49127 - DNA, 20 bp, Artificial Sequence
  MKO10049127_A_Slc25a4
  gRNA
gtaacctggccaacgtgatc

SEQ ID NO: 49128 - DNA, 20 bp, Artificial Sequence
  MKO10049128_A_Slc25a4
  gRNA
cgtttgacactgttcgtcgt

SEQ ID NO: 49129 - DNA, 20 bp, Artificial Sequence
  MKO10049129_A_Slc25a4
  gRNA
agtaccggatcacgttggcc

SEQ ID NO: 49130 - DNA, 20 bp, Artificial Sequence
  MKO10049130_A_Slc25a51
  gRNA
tctccttaatgggccctcga

SEQ ID NO: 49131 - DNA, 20 bp, Artificial Sequence
  MKO10049131_A_Slc25a51
  gRNA
ccagcagcgccgccacgcta

SEQ ID NO: 49132 - DNA, 20 bp, Artificial Sequence
  MKO10049132_A_Slc25a51
  gRNA
gggttccgcaacttgtaccg

SEQ ID NO: 49133 - DNA, 20 bp, Artificial Sequence
  MKO10049133_A_Slc25a53
  gRNA
atgccccggtagaagtactg

SEQ ID NO: 49134 - DNA, 20 bp, Artificial Sequence
  MKO10049134_A_Slc25a53
  gRNA
aattcaattcttacgggctc

SEQ ID NO: 49135 - DNA, 20 bp, Artificial Sequence
  MKO10049135_A_Slc25a53
  gRNA
cttctacctggtaacccagc

SEQ ID NO: 49136 - DNA, 20 bp, Artificial Sequence
  MKO10049136_A_Slc25a54
  gRNA
agtcgctgccgtgagatcat

SEQ ID NO: 49137 - DNA, 20 bp, Artificial Sequence
  MKO10049137_A_Slc25a54
  gRNA
tggaagcggttagtagcagc

SEQ ID NO: 49138 - DNA, 20 bp, Artificial Sequence
  MKO10049138_A_Slc25a54
  gRNA
acgcttgaaagtcacgatgc

SEQ ID NO: 49139 - DNA, 20 bp, Artificial Sequence
  MKO10049139_A_Slc25a5
  gRNA
cgcagccatctccaagacag

SEQ ID NO: 49140 - DNA, 20 bp, Artificial Sequence
  MKO10049140_A_Slc25a5
  gRNA
gcagctgatatcatgtacac

SEQ ID NO: 49141 - DNA, 20 bp, Artificial Sequence
  MKO10049141_A_Slc25a5
  gRNA
tgccgctgtgtccttcgcca

SEQ ID NO: 49142 - DNA, 20 bp, Artificial Sequence
  MKO10049142_A_Slc26a10
  gRNA
taaacgtgcgattccgggac

SEQ ID NO: 49143 - DNA, 20 bp, Artificial Sequence
  MKO10049143_A_Slc26a10
  gRNA
gacgtgtagagtccgaacac

SEQ ID NO: 49144 - DNA, 20 bp, Artificial Sequence
  MKO10049144_A_Slc26a10
  gRNA
caccaggctgagcgccgaga

SEQ ID NO: 49145 - DNA, 20 bp, Artificial Sequence
  MKO10049145_A_Slc26a11
  gRNA
cttgccgtgaagttcagccg

SEQ ID NO: 49146 - DNA, 20 bp, Artificial Sequence
  MKO10049146_A_Slc26a11
  gRNA
tccgctgccagcatcacaat

SEQ ID NO: 49147 - DNA, 20 bp, Artificial Sequence
  MKO10049147_A_Slc26a11
  gRNA
ggtacctggtctctccgatg

SEQ ID NO: 49148 - DNA, 20 bp, Artificial Sequence
  MKO10049148_A_Slc26a1
  gRNA
ccctcgagtcaaaccgtgta

SEQ ID NO: 49149 - DNA, 20 bp, Artificial Sequence
  MKO10049149_A_Slc26a1
  gRNA
cgccttaaggaatacctagc

SEQ ID NO: 49150 - DNA, 20 bp, Artificial Sequence
  MKO10049150_A_Slc26a1
  gRNA
tcgctaccgacaccgtctga

SEQ ID NO: 49151 - DNA, 20 bp, Artificial Sequence
  MKO10049151_A_Slc26a2
  gRNA
ttatgaagccgttgggatcc

SEQ ID NO: 49152 - DNA, 20 bp, Artificial Sequence
  MKO10049152_A_Slc26a2
  gRNA
taaatttcagaagtgcgccc

SEQ ID NO: 49153 - DNA, 20 bp, Artificial Sequence
  MKO10049153_A_Slc26a2
  gRNA
agtctgagaccggtcatggc

SEQ ID NO: 49154 - DNA, 20 bp, Artificial Sequence
  MKO10049154_A_Slc26a3
  gRNA
aaaggctgcgtacaacccgt

SEQ ID NO: 49155 - DNA, 20 bp, Artificial Sequence
  MKO10049155_A_Slc26a3
  gRNA
ctatccgagtccctaatcag

SEQ ID NO: 49156 - DNA, 20 bp, Artificial Sequence
  MKO10049156_A_Slc26a3
  gRNA
gggagttgtcgttacaagag

SEQ ID NO: 49157 - DNA, 20 bp, Artificial Sequence
  MKO10049157_A_Slc26a4
  gRNA
caatgcacttccgttaccgc

SEQ ID NO: 49158 - DNA, 20 bp, Artificial Sequence
  MKO10049158_A_Slc26a4
  gRNA
aactcgaccacgttagacac

SEQ ID NO: 49159 - DNA, 20 bp, Artificial Sequence
  MKO10049159_A_Slc26a4
  gRNA
ttccgaacacaaaatacgtc

SEQ ID NO: 49160 - DNA, 20 bp, Artificial Sequence
  MKO10049160_A_Slc26a5
  gRNA
ggtgcgaggctttaccactg

SEQ ID NO: 49161 - DNA, 20 bp, Artificial Sequence
  MKO10049161_A_Slc26a5
  gRNA
ttggtctcgggcataagcac

SEQ ID NO: 49162 - DNA, 20 bp, Artificial Sequence
  MKO10049162_A_Slc26a5
  gRNA
aggcttagccttcgccatgc

SEQ ID NO: 49163 - DNA, 20 bp, Artificial Sequence
  MKO10049163_A_Slc26a6
  gRNA
accggaaccaagttcgccac

SEQ ID NO: 49164 - DNA, 20 bp, Artificial Sequence
  MKO10049164_A_Slc26a6
  gRNA
agctgatgatgcacgcgtgc

SEQ ID NO: 49165 - DNA, 20 bp, Artificial Sequence
  MKO10049165_A_Slc26a6
  gRNA
cccggtatcctgtgcgtgaa

SEQ ID NO: 49166 - DNA, 20 bp, Artificial Sequence
  MKO10049166_A_Slc26a7
  gRNA
tgacttgtgatgtcacgaca

SEQ ID NO: 49167 - DNA, 20 bp, Artificial Sequence
  MKO10049167_A_Slc26a7
  gRNA
atgggacgccatgttgccac

SEQ ID NO: 49168 - DNA, 20 bp, Artificial Sequence
  MKO10049168_A_Slc26a7
  gRNA
cttgatatcagccaacgctg

SEQ ID NO: 49169 - DNA, 20 bp, Artificial Sequence
  MKO10049169_A_Slc26a9
  gRNA
tgtcaccaatgagacctacg

SEQ ID NO: 49170 - DNA, 20 bp, Artificial Sequence
  MKO10049170_A_Slc26a9
  gRNA
ctgaccattccctcctatac

SEQ ID NO: 49171 - DNA, 20 bp, Artificial Sequence
  MKO10049171_A_Slc26a9
  gRNA
ctttgccgttatcagcatcc

SEQ ID NO: 49172 - DNA, 20 bp, Artificial Sequence
  MKO10049172_A_Slc27a1
  gRNA
gttgtcgccgggccacagcc

SEQ ID NO: 49173 - DNA, 20 bp, Artificial Sequence
  MKO10049173_A_Slc27a1
  gRNA
ctgcgacgacaccggcgagc

SEQ ID NO: 49174 - DNA, 20 bp, Artificial Sequence
  MKO10049174_A_Slc27a1
  gRNA
tactaccgcattgctgcctt

SEQ ID NO: 49175 - DNA, 20 bp, Artificial Sequence
  MKO10049175_A_Slc27a2
  gRNA
caaccacgatgcatccgtga

SEQ ID NO: 49176 - DNA, 20 bp, Artificial Sequence
  MKO10049176_A_Slc27a2
  gRNA
cttcacggatgcatcgtggt

SEQ ID NO: 49177 - DNA, 20 bp, Artificial Sequence
  MKO10049177_A_Slc27a2
  gRNA
tcctgcagtcgtcccaaaac

SEQ ID NO: 49178 - DNA, 20 bp, Artificial Sequence
  MKO10049178_A_Slc27a3
  gRNA
tcaccgggggctggttgacg

SEQ ID NO: 49179 - DNA, 20 bp, Artificial Sequence
  MKO10049179_A_Slc27a3
  gRNA
gcagagaggtaccccggcac

SEQ ID NO: 49180 - DNA, 20 bp, Artificial Sequence
  MKO10049180_A_Slc27a3
  gRNA
gtcctcaccagtagtgccag

SEQ ID NO: 49181 - DNA, 20 bp, Artificial Sequence
  MKO10049181_A_Slc27a4
  gRNA
caaggtgcgacggtaccttc

SEQ ID NO: 49182 - DNA, 20 bp, Artificial Sequence
  MKO10049182_A_Slc27a4
  gRNA
ggcgcagggcatcccgccta

SEQ ID NO: 49183 - DNA, 20 bp, Artificial Sequence
  MKO10049183_A_Slc27a4
  gRNA
tgtactatggattccgcatg

SEQ ID NO: 49184 - DNA, 20 bp, Artificial Sequence
  MKO10049184_A_Slc27a5
  gRNA
gccttcgagctacgattaag

SEQ ID NO: 49185 - DNA, 20 bp, Artificial Sequence
  MKO10049185_A_Slc27a5
  gRNA
ggacgttacacaagtaccgc

SEQ ID NO: 49186 - DNA, 20 bp, Artificial Sequence
  MKO10049186_A_Slc27a5
  gRNA
tccacttaatcgtagctcga

SEQ ID NO: 49187 - DNA, 20 bp, Artificial Sequence
  MKO10049187_A_Slc27a6
  gRNA
caactgccaaacgtacccga

SEQ ID NO: 49188 - DNA, 20 bp, Artificial Sequence
  MKO10049188_A_Slc27a6
  gRNA
catcgggtacgtttggcagt

SEQ ID NO: 49189 - DNA, 20 bp, Artificial Sequence
  MKO10049189_A_Slc27a6
  gRNA
tctgttgggctatgggcgtt

SEQ ID NO: 49190 - DNA, 20 bp, Artificial Sequence
  MKO10049190_A_Slc28a1
  gRNA
acaccagctgttccggccgc

SEQ ID NO: 49191 - DNA, 20 bp, Artificial Sequence
  MKO10049191_A_Slc28a1
  gRNA
acgaacagcgccagcgccct

SEQ ID NO: 49192 - DNA, 20 bp, Artificial Sequence
  MKO10049192_A_Slc28a1
  gRNA
tggcctacaatctgctaaag

SEQ ID NO: 49193 - DNA, 20 bp, Artificial Sequence
  MKO10049193_A_Slc28a2
  gRNA
accgctttgcccaaagattc

SEQ ID NO: 49194 - DNA, 20 bp, Artificial Sequence
  MKO10049194_A_Slc28a2
  gRNA
tcctcctccagggtgttcgt

SEQ ID NO: 49195 - DNA, 20 bp, Artificial Sequence
  MKO10049195_A_Slc28a2
  gRNA
aaaacacccacctgaatctt

SEQ ID NO: 49196 - DNA, 20 bp, Artificial Sequence
  MKO10049196_A_Slc28a3
  gRNA
caggcagatcacgattgaac

SEQ ID NO: 49197 - DNA, 20 bp, Artificial Sequence
  MKO10049197_A_Slc28a3
  gRNA
tctgtggaagtttatcgcac

SEQ ID NO: 49198 - DNA, 20 bp, Artificial Sequence
  MKO10049198_A_Slc28a3
  gRNA
gttgtacaaagcggggaaca

SEQ ID NO: 49199 - DNA, 20 bp, Artificial Sequence
  MKO10049199_A_Slc29a1
  gRNA
gcatgattgatcagtgtccg

SEQ ID NO: 49200 - DNA, 20 bp, Artificial Sequence
  MKO10049200_A_Slc29a1
  gRNA
acagtatttcacaaaccgcc

SEQ ID NO: 49201 - DNA, 20 bp, Artificial Sequence
  MKO10049201_A_Slc29a1
  gRNA
gatgagcacaatcttgatca

SEQ ID NO: 49202 - DNA, 20 bp, Artificial Sequence
  MKO10049202_A_Slc29a2
  gRNA
gcccagaatccgcaccgact

SEQ ID NO: 49203 - DNA, 20 bp, Artificial Sequence
  MKO10049203_A_Slc29a2
  gRNA
tggtccctgctaaccgcccc

SEQ ID NO: 49204 - DNA, 20 bp, Artificial Sequence
  MKO10049204_A_Slc29a2
  gRNA
ctgtcaccatggcgtccgtc

SEQ ID NO: 49205 - DNA, 20 bp, Artificial Sequence
  MKO10049205_A_Slc29a3
  gRNA
aatgatggccatgcacgcga

SEQ ID NO: 49206 - DNA, 20 bp, Artificial Sequence
  MKO10049206_A_Slc29a3
  gRNA
cagcctcaccatcgcgtgca

SEQ ID NO: 49207 - DNA, 20 bp, Artificial Sequence
  MKO10049207_A_Slc29a3
  gRNA
gtcctccccggacgctgggc

SEQ ID NO: 49208 - DNA, 20 bp, Artificial Sequence
  MKO10049208_A_Slc29a4
  gRNA
tgtgctcctaaacaacgttg

SEQ ID NO: 49209 - DNA, 20 bp, Artificial Sequence
  MKO10049209_A_Slc29a4
  gRNA
cgccatcaacctggccgccg

SEQ ID NO: 49210 - DNA, 20 bp, Artificial Sequence
  MKO10049210_A_Slc29a4
  gRNA
ttatcagcatatgcgatgtg

SEQ ID NO: 49211 - DNA, 20 bp, Artificial Sequence
  MKO10049211_A_Slc2a10
  gRNA
ttacggcctcaactacgtcc

SEQ ID NO: 49212 - DNA, 20 bp, Artificial Sequence
  MKO10049212_A_Slc2a10
  gRNA
gcctatgccgctgaccgata

SEQ ID NO: 49213 - DNA, 20 bp, Artificial Sequence
  MKO10049213_A_Slc2a10
  gRNA
gaataccgatgcgctgccta

SEQ ID NO: 49214 - DNA, 20 bp, Artificial Sequence
  MKO10049214_A_Slc2a12
  gRNA
gtcctacacgctccttataa

SEQ ID NO: 49215 - DNA, 20 bp, Artificial Sequence
  MKO10049215_A_Slc2a12
  gRNA
attggagcccgttaggtgtc

SEQ ID NO: 49216 - DNA, 20 bp, Artificial Sequence
  MKO10049216_A_Slc2a12
  gRNA
ataccagtgtcagacctatc

SEQ ID NO: 49217 - DNA, 20 bp, Artificial Sequence
  MKO10049217_A_Slc2a13
  gRNA
gaccgtgcccgtgtacatcg

SEQ ID NO: 49218 - DNA, 20 bp, Artificial Sequence
  MKO10049218_A_Slc2a13
  gRNA
agtctggctcgtcgagaaag

SEQ ID NO: 49219 - DNA, 20 bp, Artificial Sequence
  MKO10049219_A_Slc2a13
  gRNA
aactcgccgagcgttagttg

SEQ ID NO: 49220 - DNA, 20 bp, Artificial Sequence
  MKO10049220_A_Slc2a1
  gRNA
cctgctcatcaatcgtaacg

SEQ ID NO: 49221 - DNA, 20 bp, Artificial Sequence
  MKO10049221_A_Slc2a1
  gRNA
cctcgttacgattgatgagc

SEQ ID NO: 49222 - DNA, 20 bp, Artificial Sequence
  MKO10049222_A_Slc2a1
  gRNA
atgggatgggctctccgtag

SEQ ID NO: 49223 - DNA, 20 bp, Artificial Sequence
  MKO10049223_A_Slc2a2
  gRNA
caccgatgtcatagccgaac

SEQ ID NO: 49224 - DNA, 20 bp, Artificial Sequence
  MKO10049224_A_Slc2a2
  gRNA
cattccgcccactgcaaagc

SEQ ID NO: 49225 - DNA, 20 bp, Artificial Sequence
  MKO10049225_A_Slc2a2
  gRNA
agatcgctccaaccacactc

SEQ ID NO: 49226 - DNA, 20 bp, Artificial Sequence
  MKO10049226_A_Slc2a3
  gRNA
gtgtgccaaatgcaccccga

SEQ ID NO: 49227 - DNA, 20 bp, Artificial Sequence
  MKO10049227_A_Slc2a3
  gRNA
ggactctttgtcaaccgctt

SEQ ID NO: 49228 - DNA, 20 bp, Artificial Sequence
  MKO10049228_A_Slc2a3
  gRNA
ttcaacagactccgctatct

SEQ ID NO: 49229 - DNA, 20 bp, Artificial Sequence
  MKO10049229_A_Slc2a4
  gRNA
aaatcgcccccactcatctt

SEQ ID NO: 49230 - DNA, 20 bp, Artificial Sequence
  MKO10049230_A_Slc2a4
  gRNA
aaggcaccctcactacgctc

SEQ ID NO: 49231 - DNA, 20 bp, Artificial Sequence
  MKO10049231_A_Slc2a4
  gRNA
tacctgagtaggcgccaatg

SEQ ID NO: 49232 - DNA, 20 bp, Artificial Sequence
  MKO10049232_A_Slc2a5
  gRNA
tccaggtatctcttccaacg

SEQ ID NO: 49233 - DNA, 20 bp, Artificial Sequence
  MKO10049233_A_Slc2a5
  gRNA
ccctatgtacttaggggagc

SEQ ID NO: 49234 - DNA, 20 bp, Artificial Sequence
  MKO10049234_A_Slc2a5
  gRNA
cctgcccagtttattcacca

SEQ ID NO: 49235 - DNA, 20 bp, Artificial Sequence
  MKO10049235_A_Slc2a6
  gRNA
gcaatcatggccggtgcccg

SEQ ID NO: 49236 - DNA, 20 bp, Artificial Sequence
  MKO10049236_A_Slc2a6
  gRNA
agtcgcgggcacctcgggga

SEQ ID NO: 49237 - DNA, 20 bp, Artificial Sequence
  MKO10049237_A_Slc2a6
  gRNA
cgactatgataccttccccg

SEQ ID NO: 49238 - DNA, 20 bp, Artificial Sequence
  MKO10049238_A_Slc2a7
  gRNA
cggcgatgttgtagccatac

SEQ ID NO: 49239 - DNA, 20 bp, Artificial Sequence
  MKO10049239_A_Slc2a7
  gRNA
tgccccacttattgaccatc

SEQ ID NO: 49240 - DNA, 20 bp, Artificial Sequence
  MKO10049240_A_Slc2a7
  gRNA
gacacgcactttgagcgaca

SEQ ID NO: 49241 - DNA, 20 bp, Artificial Sequence
  MKO10049241_A_Slc2a8
  gRNA
actcaccggtgccactagtg

SEQ ID NO: 49242 - DNA, 20 bp, Artificial Sequence
  MKO10049242_A_Slc2a8
  gRNA
tgcaccgtgcccttcgtgac

SEQ ID NO: 49243 - DNA, 20 bp, Artificial Sequence
  MKO10049243_A_Slc2a8
  gRNA
tgtacccgtaggactccccg

SEQ ID NO: 49244 - DNA, 20 bp, Artificial Sequence
  MKO10049244_A_Slc2a9
  gRNA
cggcgtgggcgcgttcacca

SEQ ID NO: 49245 - DNA, 20 bp, Artificial Sequence
  MKO10049245_A_Slc2a9
  gRNA
atggtccttctcgctcgtcg

SEQ ID NO: 49246 - DNA, 20 bp, Artificial Sequence
  MKO10049246_A_Slc2a9
  gRNA
catttccgcagcgttgctga

SEQ ID NO: 49247 - DNA, 20 bp, Artificial Sequence
  MKO10049247_A_Slc30a10
  gRNA
accgcgccgcgcgatgtagc

SEQ ID NO: 49248 - DNA, 20 bp, Artificial Sequence
  MKO10049248_A_Slc30a10
  gRNA
aggccgtgttgcgccttgcg

SEQ ID NO: 49249 - DNA, 20 bp, Artificial Sequence
  MKO10049249_A_Slc30a10
  gRNA
gacgtgaagacccgtgtaac

SEQ ID NO: 49250 - DNA, 20 bp, Artificial Sequence
  MKO10049250_A_Slc30a1
  gRNA
cggctcgatgaagcgctcga

SEQ ID NO: 49251 - DNA, 20 bp, Artificial Sequence
  MKO10049251_A_Slc30a1
  gRNA
cagcgtcacgcatcggggcc

SEQ ID NO: 49252 - DNA, 20 bp, Artificial Sequence
  MKO10049252_A_Slc30a1
  gRNA
cctcgccaagggcgcgcgca

SEQ ID NO: 49253 - DNA, 20 bp, Artificial Sequence
  MKO10049253_A_Slc30a2
  gRNA
tcgatgccagccgaagttca

SEQ ID NO: 49254 - DNA, 20 bp, Artificial Sequence
  MKO10049254_A_Slc30a2
  gRNA
cgatgttgcaggtgggtacc

SEQ ID NO: 49255 - DNA, 20 bp, Artificial Sequence
  MKO10049255_A_Slc30a2
  gRNA
tgtgcccgtgtccagactga

SEQ ID NO: 49256 - DNA, 20 bp, Artificial Sequence
  MKO10049256_A_Slc30a3
  gRNA
attggcacagacagcgatgc

SEQ ID NO: 49257 - DNA, 20 bp, Artificial Sequence
  MKO10049257_A_Slc30a3
  gRNA
ggtgcgggtggctggccgag

SEQ ID NO: 49258 - DNA, 20 bp, Artificial Sequence
  MKO10049258_A_Slc30a3
  gRNA
cccggacactcgtgtttccc

SEQ ID NO: 49259 - DNA, 20 bp, Artificial Sequence
  MKO10049259_A_Slc30a4
  gRNA
agctgcatttgtacacgcct

SEQ ID NO: 49260 - DNA, 20 bp, Artificial Sequence
  MKO10049260_A_Slc30a4
  gRNA
acctaggcgatgaaatccaa

SEQ ID NO: 49261 - DNA, 20 bp, Artificial Sequence
  MKO10049261_A_Slc30a4
  gRNA
tatctagtggacacaaccat

SEQ ID NO: 49262 - DNA, 20 bp, Artificial Sequence
  MKO10049262_A_Slc30a5
  gRNA
ttactctttgtggaccacta

SEQ ID NO: 49263 - DNA, 20 bp, Artificial Sequence
  MKO10049263_A_Slc30a5
  gRNA
ttagtggtccacaaagagta

SEQ ID NO: 49264 - DNA, 20 bp, Artificial Sequence
  MKO10049264_A_Slc30a5
  gRNA
ctcacctgatgctttgtaat

SEQ ID NO: 49265 - DNA, 20 bp, Artificial Sequence
  MKO10049265_A_Slc30a6
  gRNA
cgttgattgcaccgaacaga

SEQ ID NO: 49266 - DNA, 20 bp, Artificial Sequence
  MKO10049266_A_Slc30a6
  gRNA
gggcaacataccgatgctgt

SEQ ID NO: 49267 - DNA, 20 bp, Artificial Sequence
  MKO10049267_A_Slc30a6
  gRNA
ttagacttgtcgcagctgac

SEQ ID NO: 49268 - DNA, 20 bp, Artificial Sequence
  MKO10049268_A_Slc30a7
  gRNA
tccgggatgtcttgtccgac

SEQ ID NO: 49269 - DNA, 20 bp, Artificial Sequence
  MKO10049269_A_Slc30a7
  gRNA
gataatgacgctttctctta

SEQ ID NO: 49270 - DNA, 20 bp, Artificial Sequence
  MKO10049270_A_Slc30a7
  gRNA
gcccattgacaaagccagcc

SEQ ID NO: 49271 - DNA, 20 bp, Artificial Sequence
  MKO10049271_A_Slc30a8
  gRNA
acatttgggtggtatcgagc

SEQ ID NO: 49272 - DNA, 20 bp, Artificial Sequence
  MKO10049272_A_Slc30a8
  gRNA
catcgaggcccccttccaag

SEQ ID NO: 49273 - DNA, 20 bp, Artificial Sequence
  MKO10049273_A_Slc30a8
  gRNA
gcaagcaagcgcatgccaag

SEQ ID NO: 49274 - DNA, 20 bp, Artificial Sequence
  MKO10049274_A_Slc30a9
  gRNA
tactctacgaatgtccagaa

SEQ ID NO: 49275 - DNA, 20 bp, Artificial Sequence
  MKO10049275_A_Slc30a9
  gRNA
aaacgctgtacctggactta

SEQ ID NO: 49276 - DNA, 20 bp, Artificial Sequence
  MKO10049276_A_Slc30a9
  gRNA
caagaccctctccaagtaag

SEQ ID NO: 49277 - DNA, 20 bp, Artificial Sequence
  MKO10049277_A_Slc31a1
  gRNA
tggtaatgttgtcgtccgtg

SEQ ID NO: 49278 - DNA, 20 bp, Artificial Sequence
  MKO10049278_A_Slc31a1
  gRNA
tatggtggtgcatctccata

SEQ ID NO: 49279 - DNA, 20 bp, Artificial Sequence
  MKO10049279_A_Slc31a1
  gRNA
actttcgaagcagaccctct

SEQ ID NO: 49280 - DNA, 20 bp, Artificial Sequence
  MKO10049280_A_Slc31a2
  gRNA
cctattgtctgaagttgatc

SEQ ID NO: 49281 - DNA, 20 bp, Artificial Sequence
  MKO10049281_A_Slc31a2
  gRNA
tgccctcatacagtactgcc

SEQ ID NO: 49282 - DNA, 20 bp, Artificial Sequence
  MKO10049282_A_Slc31a2
  gRNA
agtagcccacagccgagccc

SEQ ID NO: 49283 - DNA, 20 bp, Artificial Sequence
  MKO10049283_A_Slc32a1
  gRNA
cgcgaagaagggcaacggat

SEQ ID NO: 49284 - DNA, 20 bp, Artificial Sequence
  MKO10049284_A_Slc32a1
  gRNA
gacgtgtatcttgtacgtcg

SEQ ID NO: 49285 - DNA, 20 bp, Artificial Sequence
  MKO10049285_A_Slc32a1
  gRNA
gtttcaggcggccaccgatg

SEQ ID NO: 49286 - DNA, 20 bp, Artificial Sequence
  MKO10049286_A_Slc33a1
  gRNA
gctgagttatgcattacatc

SEQ ID NO: 49287 - DNA, 20 bp, Artificial Sequence
  MKO10049287_A_Slc33a1
  gRNA
tcacttacttcgatagcatc

SEQ ID NO: 49288 - DNA, 20 bp, Artificial Sequence
  MKO10049288_A_Slc33a1
  gRNA
ggccttactagctgtcccaa

SEQ ID NO: 49289 - DNA, 20 bp, Artificial Sequence
  MKO10049289_A_Slc34a1
  gRNA
ctccgccattccgatcatca

SEQ ID NO: 49290 - DNA, 20 bp, Artificial Sequence
  MKO10049290_A_Slc34a1
  gRNA
aggcggagctgagcacatcc

SEQ ID NO: 49291 - DNA, 20 bp, Artificial Sequence
  MKO10049291_A_Slc34a1
  gRNA
gtagtgggtcatgacattcc

SEQ ID NO: 49292 - DNA, 20 bp, Artificial Sequence
  MKO10049292_A_Slc34a2
  gRNA
cataagcgccacgatcgtgt

SEQ ID NO: 49293 - DNA, 20 bp, Artificial Sequence
  MKO10049293_A_Slc34a2
  gRNA
ctccatcaccaacacgatcg

SEQ ID NO: 49294 - DNA, 20 bp, Artificial Sequence
  MKO10049294_A_Slc34a2
  gRNA
tctcatagaggagcatcccg

SEQ ID NO: 49295 - DNA, 20 bp, Artificial Sequence
  MKO10049295_A_Slc34a3
  gRNA
ccaatgaccaagcccgccac

SEQ ID NO: 49296 - DNA, 20 bp, Artificial Sequence
  MKO10049296_A_Slc34a3
  gRNA
tatcatcatgggcgtcaatg

SEQ ID NO: 49297 - DNA, 20 bp, Artificial Sequence
  MKO10049297_A_Slc34a3
  gRNA
gtccaaccctgtggcgggct

SEQ ID NO: 49298 - DNA, 20 bp, Artificial Sequence
  MKO10049298_A_Slc35a1
  gRNA
gcgttacttacttagctaac

SEQ ID NO: 49299 - DNA, 20 bp, Artificial Sequence
  MKO10049299_A_Slc35a1
  gRNA
gtagcgcagaatccattgtt

SEQ ID NO: 49300 - DNA, 20 bp, Artificial Sequence
  MKO10049300_A_Slc35a1
  gRNA
cttcaagctgtactgcttga

SEQ ID NO: 49301 - DNA, 20 bp, Artificial Sequence
  MKO10049301_A_Slc35a2
  gRNA
cgctacgctcgcacactgcc

SEQ ID NO: 49302 - DNA, 20 bp, Artificial Sequence
  MKO10049302_A_Slc35a2
  gRNA
cccaggttccaacgcgcccg

SEQ ID NO: 49303 - DNA, 20 bp, Artificial Sequence
  MKO10049303_A_Slc35a2
  gRNA
caggcagtgtgcgagcgtag

SEQ ID NO: 49304 - DNA, 20 bp, Artificial Sequence
  MKO10049304_A_Slc35a3
  gRNA
ctgaagctcgctatcccgtc

SEQ ID NO: 49305 - DNA, 20 bp, Artificial Sequence
  MKO10049305_A_Slc35a3
  gRNA
caaactgtgagcctgttgaa

SEQ ID NO: 49306 - DNA, 20 bp, Artificial Sequence
  MKO10049306_A_Slc35a3
  gRNA
tccctagtaattctgatggc

SEQ ID NO: 49307 - DNA, 20 bp, Artificial Sequence
  MKO10049307_A_Slc35a4
  gRNA
gaaggcgcacaacaggagct

SEQ ID NO: 49308 - DNA, 20 bp, Artificial Sequence
  MKO10049308_A_Slc35a4
  gRNA
gcatcgtctctctgcgcgtc

SEQ ID NO: 49309 - DNA, 20 bp, Artificial Sequence
  MKO10049309_A_Slc35a4
  gRNA
ccagctgctgacgcgggccc

SEQ ID NO: 49310 - DNA, 20 bp, Artificial Sequence
  MKO10049310_A_Slc35a5
  gRNA
agtctttgggagcgttccag

SEQ ID NO: 49311 - DNA, 20 bp, Artificial Sequence
  MKO10049311_A_Slc35a5
  gRNA
aagagacaattgtacatcga

SEQ ID NO: 49312 - DNA, 20 bp, Artificial Sequence
  MKO10049312_A_Slc35a5
  gRNA
ctctgagcacacgttcacag

SEQ ID NO: 49313 - DNA, 20 bp, Artificial Sequence
  MKO10049313_A_Slc35b1
  gRNA
cttgaagaagaagtacccgc

SEQ ID NO: 49314 - DNA, 20 bp, Artificial Sequence
  MKO10049314_A_Slc35b1
  gRNA
tcttcaagagcgtcactccc

SEQ ID NO: 49315 - DNA, 20 bp, Artificial Sequence
  MKO10049315_A_Slc35b1
  gRNA
gtttgtcaactatccaactc

SEQ ID NO: 49316 - DNA, 20 bp, Artificial Sequence
  MKO10049316_A_Slc35b2
  gRNA
cagcggaatccaccccgtct

SEQ ID NO: 49317 - DNA, 20 bp, Artificial Sequence
  MKO10049317_A_Slc35b2
  gRNA
tatcatcatgactctacgcc

SEQ ID NO: 49318 - DNA, 20 bp, Artificial Sequence
  MKO10049318_A_Slc35b2
  gRNA
tgaagcgtgccccctccagt

SEQ ID NO: 49319 - DNA, 20 bp, Artificial Sequence
  MKO10049319_A_Slc35b3
  gRNA
aaggctttaagccttacggc

SEQ ID NO: 49320 - DNA, 20 bp, Artificial Sequence
  MKO10049320_A_Slc35b3
  gRNA
gagtgagctgtagctcgatt

SEQ ID NO: 49321 - DNA, 20 bp, Artificial Sequence
  MKO10049321_A_Slc35b3
  gRNA
aaaactcctcctagcataac

SEQ ID NO: 49322 - DNA, 20 bp, Artificial Sequence
  MKO10049322_A_Slc35b4
  gRNA
gtgacgatgttcccgcatcc

SEQ ID NO: 49323 - DNA, 20 bp, Artificial Sequence
  MKO10049323_A_Slc35b4
  gRNA
agccaccagctatcccaata

SEQ ID NO: 49324 - DNA, 20 bp, Artificial Sequence
  MKO10049324_A_Slc35b4
  gRNA
catggcgatgttcaggttca

SEQ ID NO: 49325 - DNA, 20 bp, Artificial Sequence
  MKO10049325_A_Slc35c1
  gRNA
ctcaccaatgatgacgccgc

SEQ ID NO: 49326 - DNA, 20 bp, Artificial Sequence
  MKO10049326_A_Slc35c1
  gRNA
tgcctgacacgttatgggtc

SEQ ID NO: 49327 - DNA, 20 bp, Artificial Sequence
  MKO10049327_A_Slc35c1
  gRNA
aacctctgcctcaagtacgt

SEQ ID NO: 49328 - DNA, 20 bp, Artificial Sequence
  MKO10049328_A_Slc35c2
  gRNA
cgttcatcggtggcatccgc

SEQ ID NO: 49329 - DNA, 20 bp, Artificial Sequence
  MKO10049329_A_Slc35c2
  gRNA
actggcaacagcacttgacg

SEQ ID NO: 49330 - DNA, 20 bp, Artificial Sequence
  MKO10049330_A_Slc35c2
  gRNA
ctcctgcagaaagccgatct

SEQ ID NO: 49331 - DNA, 20 bp, Artificial Sequence
  MKO10049331_A_Slc35d1
  gRNA
tgctgaacagtcccgtgatt

SEQ ID NO: 49332 - DNA, 20 bp, Artificial Sequence
  MKO10049332_A_Slc35d1
  gRNA
cgacagaaatgtacctcgaa

SEQ ID NO: 49333 - DNA, 20 bp, Artificial Sequence
  MKO10049333_A_Slc35d1
  gRNA
gccaagtccaacacatagcg

SEQ ID NO: 49334 - DNA, 20 bp, Artificial Sequence
  MKO10049334_A_Slc35d2
  gRNA
aatcgtaaacttcctgagca

SEQ ID NO: 49335 - DNA, 20 bp, Artificial Sequence
  MKO10049335_A_Slc35d2
  gRNA
tgccgatgttcaccgtgctc

SEQ ID NO: 49336 - DNA, 20 bp, Artificial Sequence
  MKO10049336_A_Slc35d2
  gRNA
tttccctcaccaattgtact

SEQ ID NO: 49337 - DNA, 20 bp, Artificial Sequence
  MKO10049337_A_Slc35d3
  gRNA
cgaccccattgggtacgtaa

SEQ ID NO: 49338 - DNA, 20 bp, Artificial Sequence
  MKO10049338_A_Slc35d3
  gRNA
cacgcccgttacgtacccaa

SEQ ID NO: 49339 - DNA, 20 bp, Artificial Sequence
  MKO10049339_A_Slc35d3
  gRNA
gcgcgatgcggcagctgtgc

SEQ ID NO: 49340 - DNA, 20 bp, Artificial Sequence
  MKO10049340_A_Slc35e1
  gRNA
cagagctgtccttcgacgtg

SEQ ID NO: 49341 - DNA, 20 bp, Artificial Sequence
  MKO10049341_A_Slc35e1
  gRNA
tgttcttcatgatccccacg

SEQ ID NO: 49342 - DNA, 20 bp, Artificial Sequence
  MKO10049342_A_Slc35e1
  gRNA
gaccagcccccacacgtcga

SEQ ID NO: 49343 - DNA, 20 bp, Artificial Sequence
  MKO10049343_A_Slc35e2
  gRNA
tgcgttatccaccaacatta

SEQ ID NO: 49344 - DNA, 20 bp, Artificial Sequence
  MKO10049344_A_Slc35e2
  gRNA
atgctgtcaacaacgttaat

SEQ ID NO: 49345 - DNA, 20 bp, Artificial Sequence
  MKO10049345_A_Slc35e2
  gRNA
actagcgttgtgcactgcca

SEQ ID NO: 49346 - DNA, 20 bp, Artificial Sequence
  MKO10049346_A_Slc35e3
  gRNA
tacctcagctacaacatgtt

SEQ ID NO: 49347 - DNA, 20 bp, Artificial Sequence
  MKO10049347_A_Slc35e3
  gRNA
agtcacgtccctttatcaag

SEQ ID NO: 49348 - DNA, 20 bp, Artificial Sequence
  MKO10049348_A_Slc35e3
  gRNA
ttgcagattcctattactgt

SEQ ID NO: 49349 - DNA, 20 bp, Artificial Sequence
  MKO10049349_A_Slc35e4
  gRNA
gcccacgttgccgcacgcca

SEQ ID NO: 49350 - DNA, 20 bp, Artificial Sequence
  MKO10049350_A_Slc35e4
  gRNA
ctccatggcgtgcggcaacg

SEQ ID NO: 49351 - DNA, 20 bp, Artificial Sequence
  MKO10049351_A_Slc35e4
  gRNA
tgccgaacaggagccgggac

SEQ ID NO: 49352 - DNA, 20 bp, Artificial Sequence
  MKO10049352_A_Slc35f1
  gRNA
agacatttgagatcccgtac

SEQ ID NO: 49353 - DNA, 20 bp, Artificial Sequence
  MKO10049353_A_Slc35f1
  gRNA
accaccctagctgtccgaca

SEQ ID NO: 49354 - DNA, 20 bp, Artificial Sequence
  MKO10049354_A_Slc35f1
  gRNA
agctaattacctggtggtca

SEQ ID NO: 49355 - DNA, 20 bp, Artificial Sequence
  MKO10049355_A_Slc35f2
  gRNA
ggccgtgccgcaaatacaca

SEQ ID NO: 49356 - DNA, 20 bp, Artificial Sequence
  MKO10049356_A_Slc35f2
  gRNA
ccagcatcaacgtgtaaacc

SEQ ID NO: 49357 - DNA, 20 bp, Artificial Sequence
  MKO10049357_A_Slc35f2
  gRNA
tcttgcccggagaataaacc

SEQ ID NO: 49358 - DNA, 20 bp, Artificial Sequence
  MKO10049358_A_Slc35f3
  gRNA
ttcttcccattgtactacgc

SEQ ID NO: 49359 - DNA, 20 bp, Artificial Sequence
  MKO10049359_A_Slc35f3
  gRNA
gccgccatccttgccatcgc

SEQ ID NO: 49360 - DNA, 20 bp, Artificial Sequence
  MKO10049360_A_Slc35f3
  gRNA
acgcaccgttcaccctgacg

SEQ ID NO: 49361 - DNA, 20 bp, Artificial Sequence
  MKO10049361_A_Slc35f4
  gRNA
ggcaaatgccacaccgatga

SEQ ID NO: 49362 - DNA, 20 bp, Artificial Sequence
  MKO10049362_A_Slc35f4
  gRNA
actgtcccctctgtcggtca

SEQ ID NO: 49363 - DNA, 20 bp, Artificial Sequence
  MKO10049363_A_Slc35f4
  gRNA
agatggccggaataatagac

SEQ ID NO: 49364 - DNA, 20 bp, Artificial Sequence
  MKO10049364_A_Slc35f5
  gRNA
tttcagtcagcgcaggcgaa

SEQ ID NO: 49365 - DNA, 20 bp, Artificial Sequence
  MKO10049365_A_Slc35f5
  gRNA
tacaagcatgagtagttctt

SEQ ID NO: 49366 - DNA, 20 bp, Artificial Sequence
  MKO10049366_A_Slc35f5
  gRNA
ggggatagtgattctcctgc

SEQ ID NO: 49367 - DNA, 20 bp, Artificial Sequence
  MKO10049367_A_Slc35f6
  gRNA
ccagtcccgcaatagtgatc

SEQ ID NO: 49368 - DNA, 20 bp, Artificial Sequence
  MKO10049368_A_Slc35f6
  gRNA
aatgctggtacctggacgaa

SEQ ID NO: 49369 - DNA, 20 bp, Artificial Sequence
  MKO10049369_A_Slc35f6
  gRNA
cttacccacgtacatgatgc

SEQ ID NO: 49370 - DNA, 20 bp, Artificial Sequence
  MKO10049370_A_Slc35g1
  gRNA
ctggagcaaccattcgtcga

SEQ ID NO: 49371 - DNA, 20 bp, Artificial Sequence
  MKO10049371_A_Slc35g1
  gRNA
gatcagtgcgtttcgatgcg

SEQ ID NO: 49372 - DNA, 20 bp, Artificial Sequence
  MKO10049372_A_Slc35g1
  gRNA
cgtctgcgagggacgttgtc

SEQ ID NO: 49373 - DNA, 20 bp, Artificial Sequence
  MKO10049373_A_Slc35g2
  gRNA
tactatcatagaaagcgccg

SEQ ID NO: 49374 - DNA, 20 bp, Artificial Sequence
  MKO10049374_A_Slc35g2
  gRNA
aagtcgtaatctgtatccgc

SEQ ID NO: 49375 - DNA, 20 bp, Artificial Sequence
  MKO10049375_A_Slc35g2
  gRNA
ctccatgttgctccgtctaa

SEQ ID NO: 49376 - DNA, 20 bp, Artificial Sequence
  MKO10049376_A_Slc35g3
  gRNA
gcggacagtgactgcgttgc

SEQ ID NO: 49377 - DNA, 20 bp, Artificial Sequence
  MKO10049377_A_Slc35g3
  gRNA
cgtgggcccattctcccgta

SEQ ID NO: 49378 - DNA, 20 bp, Artificial Sequence
  MKO10049378_A_Slc35g3
  gRNA
accaggcaacctgacccagg

SEQ ID NO: 49379 - DNA, 20 bp, Artificial Sequence
  MKO10049379_A_Slc36a1
  gRNA
gtgctcatcacttatgtcgt

SEQ ID NO: 49380 - DNA, 20 bp, Artificial Sequence
  MKO10049380_A_Slc36a1
  gRNA
tatcgtggccgtgcactgca

SEQ ID NO: 49381 - DNA, 20 bp, Artificial Sequence
  MKO10049381_A_Slc36a1
  gRNA
gtggttccggacccaggtgc

SEQ ID NO: 49382 - DNA, 20 bp, Artificial Sequence
  MKO10049382_A_Slc36a2
  gRNA
ctcacctgtgacagaagcgc

SEQ ID NO: 49383 - DNA, 20 bp, Artificial Sequence
  MKO10049383_A_Slc36a2
  gRNA
ctgtagcgggttccagacat

SEQ ID NO: 49384 - DNA, 20 bp, Artificial Sequence
  MKO10049384_A_Slc36a2
  gRNA
tgcccgcattcttcacagcc

SEQ ID NO: 49385 - DNA, 20 bp, Artificial Sequence
  MKO10049385_A_Slc36a3
  gRNA
gtgcactgtgagcgccccga

SEQ ID NO: 49386 - DNA, 20 bp, Artificial Sequence
  MKO10049386_A_Slc36a3
  gRNA
ccagctgagtgacgatcagc

SEQ ID NO: 49387 - DNA, 20 bp, Artificial Sequence
  MKO10049387_A_Slc36a3
  gRNA
cgtttccaggctgtacattg

SEQ ID NO: 49388 - DNA, 20 bp, Artificial Sequence
  MKO10049388_A_Slc36a4
  gRNA
ataaacgagcagaatttcga

SEQ ID NO: 49389 - DNA, 20 bp, Artificial Sequence
  MKO10049389_A_Slc36a4
  gRNA
tataaagaacgcgggcatcg

SEQ ID NO: 49390 - DNA, 20 bp, Artificial Sequence
  MKO10049390_A_Slc36a4
  gRNA
actccacggactagcctcca

SEQ ID NO: 49391 - DNA, 20 bp, Artificial Sequence
  MKO10049391_A_Slc37a1
  gRNA
tggccagcatcccgaaagtc

SEQ ID NO: 49392 - DNA, 20 bp, Artificial Sequence
  MKO10049392_A_Slc37a1
  gRNA
ctgaacaatgagaccgactg

SEQ ID NO: 49393 - DNA, 20 bp, Artificial Sequence
  MKO10049393_A_Slc37a1
  gRNA
cgcacaggaaggcgtagtcc

SEQ ID NO: 49394 - DNA, 20 bp, Artificial Sequence
  MKO10049394_A_Slc37a2
  gRNA
agatcgtgggtgtcattaac

SEQ ID NO: 49395 - DNA, 20 bp, Artificial Sequence
  MKO10049395_A_Slc37a2
  gRNA
acgatctcaatgataccacc

SEQ ID NO: 49396 - DNA, 20 bp, Artificial Sequence
  MKO10049396_A_Slc37a2
  gRNA
cctcaagatgcggtcctccc

SEQ ID NO: 49397 - DNA, 20 bp, Artificial Sequence
  MKO10049397_A_Slc37a3
  gRNA
gcgatcggctgaatttgcga

SEQ ID NO: 49398 - DNA, 20 bp, Artificial Sequence
  MKO10049398_A_Slc37a3
  gRNA
ggctgcacttctacaacaag

SEQ ID NO: 49399 - DNA, 20 bp, Artificial Sequence
  MKO10049399_A_Slc37a3
  gRNA
catgtgctcttctgcattcg

SEQ ID NO: 49400 - DNA, 20 bp, Artificial Sequence
  MKO10049400_A_Slc37a4
  gRNA
gcgaggatcgttgccaagat

SEQ ID NO: 49401 - DNA, 20 bp, Artificial Sequence
  MKO10049401_A_Slc37a4
  gRNA
tctttactccgaagaccacg

SEQ ID NO: 49402 - DNA, 20 bp, Artificial Sequence
  MKO10049402_A_Slc37a4
  gRNA
cagatcagatgagcgcccgc

SEQ ID NO: 49403 - DNA, 20 bp, Artificial Sequence
  MKO10049403_A_Slc38a10
  gRNA
tctctagcgttccacgccta

SEQ ID NO: 49404 - DNA, 20 bp, Artificial Sequence
  MKO10049404_A_Slc38a10
  gRNA
gtcaccgatcacgacataga

SEQ ID NO: 49405 - DNA, 20 bp, Artificial Sequence
  MKO10049405_A_Slc38a10
  gRNA
attaccttctatgtcgtgat

SEQ ID NO: 49406 - DNA, 20 bp, Artificial Sequence
  MKO10049406_A_Slc38a11
  gRNA
tttccctccgtgttcatgtc

SEQ ID NO: 49407 - DNA, 20 bp, Artificial Sequence
  MKO10049407_A_Slc38a11
  gRNA
tgaaagggtacataaactgt

SEQ ID NO: 49408 - DNA, 20 bp, Artificial Sequence
  MKO10049408_A_Slc38a11
  gRNA
aatgtagtcaattctgttat

SEQ ID NO: 49409 - DNA, 20 bp, Artificial Sequence
  MKO10049409_A_Slc38a1
  gRNA
cccggtgttggccaaggcga

SEQ ID NO: 49410 - DNA, 20 bp, Artificial Sequence
  MKO10049410_A_Slc38a1
  gRNA
agagcaagtcttcggcacca

SEQ ID NO: 49411 - DNA, 20 bp, Artificial Sequence
  MKO10049411_A_Slc38a1
  gRNA
cttgggccttgccttcgcct

SEQ ID NO: 49412 - DNA, 20 bp, Artificial Sequence
  MKO10049412_A_Slc38a2
  gRNA
cgggatccacgtcggcataa

SEQ ID NO: 49413 - DNA, 20 bp, Artificial Sequence
  MKO10049413_A_Slc38a2
  gRNA
ttgcagccattatgccgacg

SEQ ID NO: 49414 - DNA, 20 bp, Artificial Sequence
  MKO10049414_A_Slc38a2
  gRNA
ctcctcaagactgccaacga

SEQ ID NO: 49415 - DNA, 20 bp, Artificial Sequence
  MKO10049415_A_Slc38a3
  gRNA
acggtagcccaactgctcgt

SEQ ID NO: 49416 - DNA, 20 bp, Artificial Sequence
  MKO10049416_A_Slc38a3
  gRNA
catccgtgcctacgagcagt

SEQ ID NO: 49417 - DNA, 20 bp, Artificial Sequence
  MKO10049417_A_Slc38a3
  gRNA
tctggggctcgcctacgcca

SEQ ID NO: 49418 - DNA, 20 bp, Artificial Sequence
  MKO10049418_A_Slc38a4
  gRNA
gaagaagctagccgattacg

SEQ ID NO: 49419 - DNA, 20 bp, Artificial Sequence
  MKO10049419_A_Slc38a4
  gRNA
tacatgctcatccgcgtaat

SEQ ID NO: 49420 - DNA, 20 bp, Artificial Sequence
  MKO10049420_A_Slc38a4
  gRNA
gggtagcatacctccttcct

SEQ ID NO: 49421 - DNA, 20 bp, Artificial Sequence
  MKO10049421_A_Slc38a5
  gRNA
agctacaggcaggaacgcga

SEQ ID NO: 49422 - DNA, 20 bp, Artificial Sequence
  MKO10049422_A_Slc38a5
  gRNA
tccccatgatagcgttgctg

SEQ ID NO: 49423 - DNA, 20 bp, Artificial Sequence
  MKO10049423_A_Slc38a5
  gRNA
gggaatctcacctacaacac

SEQ ID NO: 49424 - DNA, 20 bp, Artificial Sequence
  MKO10049424_A_Slc38a6
  gRNA
cgtgacgtcttacgaagatc

SEQ ID NO: 49425 - DNA, 20 bp, Artificial Sequence
  MKO10049425_A_Slc38a6
  gRNA
ccttggtttggcgtatgtga

SEQ ID NO: 49426 - DNA, 20 bp, Artificial Sequence
  MKO10049426_A_Slc38a6
  gRNA
cagatcttcgtaagacgtca

SEQ ID NO: 49427 - DNA, 20 bp, Artificial Sequence
  MKO10049427_A_Slc38a7
  gRNA
tccgaaggtatagaccgcaa

SEQ ID NO: 49428 - DNA, 20 bp, Artificial Sequence
  MKO10049428_A_Slc38a7
  gRNA
accaggtgcccacgacgctc

SEQ ID NO: 49429 - DNA, 20 bp, Artificial Sequence
  MKO10049429_A_Slc38a7
  gRNA
ccagataaagagatgcgccc

SEQ ID NO: 49430 - DNA, 20 bp, Artificial Sequence
  MKO10049430_A_Slc38a8
  gRNA
ggagctatgtggccccgcca

SEQ ID NO: 49431 - DNA, 20 bp, Artificial Sequence
  MKO10049431_A_Slc38a8
  gRNA
atagctcccggaccacaccc

SEQ ID NO: 49432 - DNA, 20 bp, Artificial Sequence
  MKO10049432_A_Slc38a8
  gRNA
ccccatacctggtgtacttc

SEQ ID NO: 49433 - DNA, 20 bp, Artificial Sequence
  MKO10049433_A_Slc38a9
  gRNA
tactcacatagtaactaagc

SEQ ID NO: 49434 - DNA, 20 bp, Artificial Sequence
  MKO10049434_A_Slc38a9
  gRNA
aaaaaggctggatttaccac

SEQ ID NO: 49435 - DNA, 20 bp, Artificial Sequence
  MKO10049435_A_Slc38a9
  gRNA
aaactcaagagttacactga

SEQ ID NO: 49436 - DNA, 20 bp, Artificial Sequence
  MKO10049436_A_Slc39a10
  gRNA
tcgatctgatacagcaatgc

SEQ ID NO: 49437 - DNA, 20 bp, Artificial Sequence
  MKO10049437_A_Slc39a10
  gRNA
ttcctactgctagtgcaaca

SEQ ID NO: 49438 - DNA, 20 bp, Artificial Sequence
  MKO10049438_A_Slc39a10
  gRNA
cacagtcatcagcatacgca

SEQ ID NO: 49439 - DNA, 20 bp, Artificial Sequence
  MKO10049439_A_Slc39a11
  gRNA
agtgaactttccatccggat

SEQ ID NO: 49440 - DNA, 20 bp, Artificial Sequence
  MKO10049440_A_Slc39a11
  gRNA
cccagtgctacctatccgga

SEQ ID NO: 49441 - DNA, 20 bp, Artificial Sequence
  MKO10049441_A_Slc39a11
  gRNA
tggtgcaagcagcgaccagt

SEQ ID NO: 49442 - DNA, 20 bp, Artificial Sequence
  MKO10049442_A_Slc39a12
  gRNA
caatcttaccagataggtgg

SEQ ID NO: 49443 - DNA, 20 bp, Artificial Sequence
  MKO10049443_A_Slc39a12
  gRNA
accaataccctccacctatc

SEQ ID NO: 49444 - DNA, 20 bp, Artificial Sequence
  MKO10049444_A_Slc39a12
  gRNA
gatgcactgttactcacagc

SEQ ID NO: 49445 - DNA, 20 bp, Artificial Sequence
  MKO10049445_A_Slc39a13
  gRNA
cccactgctgccgcgctcaa

SEQ ID NO: 49446 - DNA, 20 bp, Artificial Sequence
  MKO10049446_A_Slc39a13
  gRNA
ctcaccgggggtgatgttac

SEQ ID NO: 49447 - DNA, 20 bp, Artificial Sequence
  MKO10049447_A_Slc39a13
  gRNA
gagcagctgcctcagtcgcc

SEQ ID NO: 49448 - DNA, 20 bp, Artificial Sequence
  MKO10049448_A_Slc39a14
  gRNA
tcaagttgtgcgccgcaaag

SEQ ID NO: 49449 - DNA, 20 bp, Artificial Sequence
  MKO10049449_A_Slc39a14
  gRNA
atgaccttctcgtccgtgcc

SEQ ID NO: 49450 - DNA, 20 bp, Artificial Sequence
  MKO10049450_A_Slc39a14
  gRNA
ttgagcgagcgatctcagat

SEQ ID NO: 49451 - DNA, 20 bp, Artificial Sequence
  MKO10049451_A_Slc39a1
  gRNA
caatgcttaccgtcacatgc

SEQ ID NO: 49452 - DNA, 20 bp, Artificial Sequence
  MKO10049452_A_Slc39a1
  gRNA
gggcctcagcactggcacga

SEQ ID NO: 49453 - DNA, 20 bp, Artificial Sequence
  MKO10049453_A_Slc39a1
  gRNA
ggtgctaaccatgaagcttc

SEQ ID NO: 49454 - DNA, 20 bp, Artificial Sequence
  MKO10049454_A_Slc39a2
  gRNA
ttactcccatctacgtgaaa

SEQ ID NO: 49455 - DNA, 20 bp, Artificial Sequence
  MKO10049455_A_Slc39a2
  gRNA
cagaaggaccagggcgcgca

SEQ ID NO: 49456 - DNA, 20 bp, Artificial Sequence
  MKO10049456_A_Slc39a2
  gRNA
cgtgagggtgagggtaccgc

SEQ ID NO: 49457 - DNA, 20 bp, Artificial Sequence
  MKO10049457_A_Slc39a3
  gRNA
ggccaccagaagcttcgtca

SEQ ID NO: 49458 - DNA, 20 bp, Artificial Sequence
  MKO10049458_A_Slc39a3
  gRNA
ggagtacgagagcccgttcg

SEQ ID NO: 49459 - DNA, 20 bp, Artificial Sequence
  MKO10049459_A_Slc39a3
  gRNA
atcatgagcgtctccgccag

SEQ ID NO: 49460 - DNA, 20 bp, Artificial Sequence
  MKO10049460_A_Slc39a4
  gRNA
ctcaccatgcagcgtgatat

SEQ ID NO: 49461 - DNA, 20 bp, Artificial Sequence
  MKO10049461_A_Slc39a4
  gRNA
ctaccccactatccgtattc

SEQ ID NO: 49462 - DNA, 20 bp, Artificial Sequence
  MKO10049462_A_Slc39a4
  gRNA
cctcccaatatcacgctgca

SEQ ID NO: 49463 - DNA, 20 bp, Artificial Sequence
  MKO10049463_A_Slc39a5
  gRNA
ccaccaagcaccgacagtcc

SEQ ID NO: 49464 - DNA, 20 bp, Artificial Sequence
  MKO10049464_A_Slc39a5
  gRNA
tctgctgttggaccattcgt

SEQ ID NO: 49465 - DNA, 20 bp, Artificial Sequence
  MKO10049465_A_Slc39a5
  gRNA
cacagcagagcgaactgacg

SEQ ID NO: 49466 - DNA, 20 bp, Artificial Sequence
  MKO10049466_A_Slc39a6
  gRNA
atcgccactcagcgttccga

SEQ ID NO: 49467 - DNA, 20 bp, Artificial Sequence
  MKO10049467_A_Slc39a6
  gRNA
ctggccgtcggaacgctgag

SEQ ID NO: 49468 - DNA, 20 bp, Artificial Sequence
  MKO10049468_A_Slc39a6
  gRNA
cttctatattctgagccgac

SEQ ID NO: 49469 - DNA, 20 bp, Artificial Sequence
  MKO10049469_A_Slc39a7
  gRNA
tcacaaatttctccaccacg

SEQ ID NO: 49470 - DNA, 20 bp, Artificial Sequence
  MKO10049470_A_Slc39a7
  gRNA
aggtttcaccgggccatctc

SEQ ID NO: 49471 - DNA, 20 bp, Artificial Sequence
  MKO10049471_A_Slc39a7
  gRNA
aaatttgtgagacacgtgaa

SEQ ID NO: 49472 - DNA, 20 bp, Artificial Sequence
  MKO10049472_A_Slc39a8
  gRNA
caacgctgacagtgtcgaag

SEQ ID NO: 49473 - DNA, 20 bp, Artificial Sequence
  MKO10049473_A_Slc39a8
  gRNA
tccggtaccttcggaaagac

SEQ ID NO: 49474 - DNA, 20 bp, Artificial Sequence
  MKO10049474_A_Slc39a8
  gRNA
gtcagtgacaattatcaatc

SEQ ID NO: 49475 - DNA, 20 bp, Artificial Sequence
  MKO10049475_A_Slc39a9
  gRNA
tgcactggcggtcatcgtcc

SEQ ID NO: 49476 - DNA, 20 bp, Artificial Sequence
  MKO10049476_A_Slc39a9
  gRNA
ttgccacgaacacaattaac

SEQ ID NO: 49477 - DNA, 20 bp, Artificial Sequence
  MKO10049477_A_Slc39a9
  gRNA
tgtccagttaattgtgttcg

SEQ ID NO: 49478 - DNA, 20 bp, Artificial Sequence
  MKO10049478_A_Slc3a1
  gRNA
cgctccgtgtcctactcgat

SEQ ID NO: 49479 - DNA, 20 bp, Artificial Sequence
  MKO10049479_A_Slc3a1
  gRNA
gggtggttacaccgttgaca

SEQ ID NO: 49480 - DNA, 20 bp, Artificial Sequence
  MKO10049480_A_Slc3a1
  gRNA
agacttcagatacgctgttg

SEQ ID NO: 49481 - DNA, 20 bp, Artificial Sequence
  MKO10049481_A_Slc3a2
  gRNA
cgcccgaacgatgataacca

SEQ ID NO: 49482 - DNA, 20 bp, Artificial Sequence
  MKO10049482_A_Slc3a2
  gRNA
aagggcgccctctaccgcat

SEQ ID NO: 49483 - DNA, 20 bp, Artificial Sequence
  MKO10049483_A_Slc3a2
  gRNA
tgtgaattgggcctaacacc

SEQ ID NO: 49484 - DNA, 20 bp, Artificial Sequence
  MKO10049484_A_Slc40a1
  gRNA
ccactgcgatcacaatccaa

SEQ ID NO: 49485 - DNA, 20 bp, Artificial Sequence
  MKO10049485_A_Slc40a1
  gRNA
tctgaaccaccagtgacgtc

SEQ ID NO: 49486 - DNA, 20 bp, Artificial Sequence
  MKO10049486_A_Slc40a1
  gRNA
tgtttaagggggatcggatg

SEQ ID NO: 49487 - DNA, 20 bp, Artificial Sequence
  MKO10049487_A_Slc41a1
  gRNA
tccatcgcagccgtcgtctt

SEQ ID NO: 49488 - DNA, 20 bp, Artificial Sequence
  MKO10049488_A_Slc41a1
  gRNA
cagtggacagcctcgacgcc

SEQ ID NO: 49489 - DNA, 20 bp, Artificial Sequence
  MKO10049489_A_Slc41a1
  gRNA
cacgcccatcgccgctagcc

SEQ ID NO: 49490 - DNA, 20 bp, Artificial Sequence
  MKO10049490_A_Slc41a2
  gRNA
cccgcgcttcttggtcttaa

SEQ ID NO: 49491 - DNA, 20 bp, Artificial Sequence
  MKO10049491_A_Slc41a2
  gRNA
taactctcgccatattagct

SEQ ID NO: 49492 - DNA, 20 bp, Artificial Sequence
  MKO10049492_A_Slc41a2
  gRNA
tcctttaagaccaagaagcg

SEQ ID NO: 49493 - DNA, 20 bp, Artificial Sequence
  MKO10049493_A_Slc41a3
  gRNA
gccacccctcgtcggtctga

SEQ ID NO: 49494 - DNA, 20 bp, Artificial Sequence
  MKO10049494_A_Slc41a3
  gRNA
aaatcgatgaccgccaggag

SEQ ID NO: 49495 - DNA, 20 bp, Artificial Sequence
  MKO10049495_A_Slc41a3
  gRNA
tgtcccacgaggagttcgat

SEQ ID NO: 49496 - DNA, 20 bp, Artificial Sequence
  MKO10049496_A_Slc43a1
  gRNA
cccaggcctcttcgactggt

SEQ ID NO: 49497 - DNA, 20 bp, Artificial Sequence
  MKO10049497_A_Slc43a1
  gRNA
gaattctcatggaccgcttt

SEQ ID NO: 49498 - DNA, 20 bp, Artificial Sequence
  MKO10049498_A_Slc43a1
  gRNA
cttaacgtttacctcactca

SEQ ID NO: 49499 - DNA, 20 bp, Artificial Sequence
  MKO10049499_A_Slc43a2
  gRNA
ccgaaggtcgccgaacatat

SEQ ID NO: 49500 - DNA, 20 bp, Artificial Sequence
  MKO10049500_A_Slc43a2
  gRNA
cagcgcagagccggaacccg

SEQ ID NO: 49501 - DNA, 20 bp, Artificial Sequence
  MKO10049501_A_Slc43a2
  gRNA
tcatggacaagtatggtcca

SEQ ID NO: 49502 - DNA, 20 bp, Artificial Sequence
  MKO10049502_A_Slc43a3
  gRNA
gtattcctaccttaatgacg

SEQ ID NO: 49503 - DNA, 20 bp, Artificial Sequence
  MKO10049503_A_Slc43a3
  gRNA
agcagtgttcctcgtcatta

SEQ ID NO: 49504 - DNA, 20 bp, Artificial Sequence
  MKO10049504_A_Slc43a3
  gRNA
tctcccagatttaaaagcgc

SEQ ID NO: 49505 - DNA, 20 bp, Artificial Sequence
  MKO10049505_A_Slc44a1
  gRNA
cgtagcagcatgtcctcgac

SEQ ID NO: 49506 - DNA, 20 bp, Artificial Sequence
  MKO10049506_A_Slc44a1
  gRNA
ctggaagcaataccgaacag

SEQ ID NO: 49507 - DNA, 20 bp, Artificial Sequence
  MKO10049507_A_Slc44a1
  gRNA
ctactcacttccggtgggtg

SEQ ID NO: 49508 - DNA, 20 bp, Artificial Sequence
  MKO10049508_A_Slc44a2
  gRNA
tttgcccacagaattcgccc

SEQ ID NO: 49509 - DNA, 20 bp, Artificial Sequence
  MKO10049509_A_Slc44a2
  gRNA
gtggggtagatcaccttccg

SEQ ID NO: 49510 - DNA, 20 bp, Artificial Sequence
  MKO10049510_A_Slc44a2
  gRNA
cacagccacatagcctacga

SEQ ID NO: 49511 - DNA, 20 bp, Artificial Sequence
  MKO10049511_A_Slc44a3
  gRNA
gaaaatgcaccgatacaccg

SEQ ID NO: 49512 - DNA, 20 bp, Artificial Sequence
  MKO10049512_A_Slc44a3
  gRNA
tcagcacctaccgttgatgt

SEQ ID NO: 49513 - DNA, 20 bp, Artificial Sequence
  MKO10049513_A_Slc44a3
  gRNA
aggagcccccctctccgggc

SEQ ID NO: 49514 - DNA, 20 bp, Artificial Sequence
  MKO10049514_A_Slc44a4
  gRNA
gatgtcgaagtatagaacgt

SEQ ID NO: 49515 - DNA, 20 bp, Artificial Sequence
  MKO10049515_A_Slc44a4
  gRNA
gttgtcgcccacgccgcagt

SEQ ID NO: 49516 - DNA, 20 bp, Artificial Sequence
  MKO10049516_A_Slc44a4
  gRNA
tcgaaaggaggggtcatatt

SEQ ID NO: 49517 - DNA, 20 bp, Artificial Sequence
  MKO10049517_A_Slc44a5
  gRNA
ctacgttctgttaggactct

SEQ ID NO: 49518 - DNA, 20 bp, Artificial Sequence
  MKO10049518_A_Slc44a5
  gRNA
aaatgtccctggctgtccgt

SEQ ID NO: 49519 - DNA, 20 bp, Artificial Sequence
  MKO10049519_A_Slc44a5
  gRNA
caggaaaatggcctatccta

SEQ ID NO: 49520 - DNA, 20 bp, Artificial Sequence
  MKO10049520_A_Slc45a1
  gRNA
acagagattgcgcagcgcct

SEQ ID NO: 49521 - DNA, 20 bp, Artificial Sequence
  MKO10049521_A_Slc45a1
  gRNA
tgtgtgcggcccggtagacc

SEQ ID NO: 49522 - DNA, 20 bp, Artificial Sequence
  MKO10049522_A_Slc45a1
  gRNA
gtctctcggggatgctaatc

SEQ ID NO: 49523 - DNA, 20 bp, Artificial Sequence
  MKO10049523_A_Slc45a2
  gRNA
ctacggtgcacacaactcca

SEQ ID NO: 49524 - DNA, 20 bp, Artificial Sequence
  MKO10049524_A_Slc45a2
  gRNA
tgacgcaaaggcagcgataa

SEQ ID NO: 49525 - DNA, 20 bp, Artificial Sequence
  MKO10049525_A_Slc45a2
  gRNA
ctttgcgtcagccacctgat

SEQ ID NO: 49526 - DNA, 20 bp, Artificial Sequence
  MKO10049526_A_Slc45a3
  gRNA
gccccgtcccgtaacaaccc

SEQ ID NO: 49527 - DNA, 20 bp, Artificial Sequence
  MKO10049527_A_Slc45a3
  gRNA
ggccatagcgcccacgccac

SEQ ID NO: 49528 - DNA, 20 bp, Artificial Sequence
  MKO10049528_A_Slc45a3
  gRNA
cgatgctgcccatgccacgt

SEQ ID NO: 49529 - DNA, 20 bp, Artificial Sequence
  MKO10049529_A_Slc45a4
  gRNA
cccggcggtatcggtagcag

SEQ ID NO: 49530 - DNA, 20 bp, Artificial Sequence
  MKO10049530_A_Slc45a4
  gRNA
cccactgctaccgataccgc

SEQ ID NO: 49531 - DNA, 20 bp, Artificial Sequence
  MKO10049531_A_Slc45a4
  gRNA
gctgtacctccttgatgtca

SEQ ID NO: 49532 - DNA, 20 bp, Artificial Sequence
  MKO10049532_A_Slc46a1
  gRNA
gcaatgggcggcgacccacg

SEQ ID NO: 49533 - DNA, 20 bp, Artificial Sequence
  MKO10049533_A_Slc46a1
  gRNA
caggcgtcgtgaccaatgac

SEQ ID NO: 49534 - DNA, 20 bp, Artificial Sequence
  MKO10049534_A_Slc46a1
  gRNA
cgtgggtcgccgcccattgc

SEQ ID NO: 49535 - DNA, 20 bp, Artificial Sequence
  MKO10049535_A_Slc46a2
  gRNA
catcccgattatgatcatcg

SEQ ID NO: 49536 - DNA, 20 bp, Artificial Sequence
  MKO10049536_A_Slc46a2
  gRNA
ggagtagtcctgcgtcgtag

SEQ ID NO: 49537 - DNA, 20 bp, Artificial Sequence
  MKO10049537_A_Slc46a2
  gRNA
caagatctatcagcttacgc

SEQ ID NO: 49538 - DNA, 20 bp, Artificial Sequence
  MKO10049538_A_Slc46a3
  gRNA
ttgggaattacaccacgttc

SEQ ID NO: 49539 - DNA, 20 bp, Artificial Sequence
  MKO10049539_A_Slc46a3
  gRNA
acttcgacctctgcgtacag

SEQ ID NO: 49540 - DNA, 20 bp, Artificial Sequence
  MKO10049540_A_Slc46a3
  gRNA
gctgctcgctaaaagcatga

SEQ ID NO: 49541 - DNA, 20 bp, Artificial Sequence
  MKO10049541_A_Slc47a1
  gRNA
tgaagatcatgacgtaagtc

SEQ ID NO: 49542 - DNA, 20 bp, Artificial Sequence
  MKO10049542_A_Slc47a1
  gRNA
tgtaaactcacaggaagcgc

SEQ ID NO: 49543 - DNA, 20 bp, Artificial Sequence
  MKO10049543_A_Slc47a1
  gRNA
ggatgagtgtccccctttgc

SEQ ID NO: 49544 - DNA, 20 bp, Artificial Sequence
  MKO10049544_A_Slc47a2
  gRNA
cgtccaactcgactttgccc

SEQ ID NO: 49545 - DNA, 20 bp, Artificial Sequence
  MKO10049545_A_Slc47a2
  gRNA
tacggaaacagcgagtgtca

SEQ ID NO: 49546 - DNA, 20 bp, Artificial Sequence
  MKO10049546_A_Slc47a2
  gRNA
aggcaagaacttgaagcgcg

SEQ ID NO: 49547 - DNA, 20 bp, Artificial Sequence
  MKO10049547_A_Slc48a1
  gRNA
gcggcgatggggggtctcgc

SEQ ID NO: 49548 - DNA, 20 bp, Artificial Sequence
  MKO10049548_A_Slc48a1
  gRNA
gctgcgcggcttcttcttcg

SEQ ID NO: 49549 - DNA, 20 bp, Artificial Sequence
  MKO10049549_A_Slc48a1
  gRNA
gccggctaccgagctgaagc

SEQ ID NO: 49550 - DNA, 20 bp, Artificial Sequence
  MKO10049550_A_Slc4a10
  gRNA
atgagatttgctggcgtgaa

SEQ ID NO: 49551 - DNA, 20 bp, Artificial Sequence
  MKO10049551_A_Slc4a10
  gRNA
gaaaaagccatcgtcgtcac

SEQ ID NO: 49552 - DNA, 20 bp, Artificial Sequence
  MKO10049552_A_Slc4a10
  gRNA
cacgatgcctgtgacgacga

SEQ ID NO: 49553 - DNA, 20 bp, Artificial Sequence
  MKO10049553_A_Slc4a11
  gRNA
ggtccgtgcacaccgggacc

SEQ ID NO: 49554 - DNA, 20 bp, Artificial Sequence
  MKO10049554_A_Slc4a11
  gRNA
caaagcggtttagcatagtt

SEQ ID NO: 49555 - DNA, 20 bp, Artificial Sequence
  MKO10049555_A_Slc4a11
  gRNA
gctcttacacacctctcgca

SEQ ID NO: 49556 - DNA, 20 bp, Artificial Sequence
  MKO10049556_A_Slc4a1ap
  gRNA
caaggcttctttgaccgaga

SEQ ID NO: 49557 - DNA, 20 bp, Artificial Sequence
  MKO10049557_A_Slc4a1ap
  gRNA
agcaatggtacagtgctcgc

SEQ ID NO: 49558 - DNA, 20 bp, Artificial Sequence
  MKO10049558_A_Slc4a1ap
  gRNA
ctgccgggtccttgatacac

SEQ ID NO: 49559 - DNA, 20 bp, Artificial Sequence
  MKO10049559_A_Slc4a1
  gRNA
cccatacaccatcctctcga

SEQ ID NO: 49560 - DNA, 20 bp, Artificial Sequence
  MKO10049560_A_Slc4a1
  gRNA
tctagactgcttcatctacg

SEQ ID NO: 49561 - DNA, 20 bp, Artificial Sequence
  MKO10049561_A_Slc4a1
  gRNA
gtcctcacctgaccggagct

SEQ ID NO: 49562 - DNA, 20 bp, Artificial Sequence
  MKO10049562_A_Slc4a2
  gRNA
ccgccgtcgcaagactcccc

SEQ ID NO: 49563 - DNA, 20 bp, Artificial Sequence
  MKO10049563_A_Slc4a2
  gRNA
cctggggagtcttgcgacgg

SEQ ID NO: 49564 - DNA, 20 bp, Artificial Sequence
  MKO10049564_A_Slc4a2
  gRNA
ctcgaaccgctccacaccta

SEQ ID NO: 49565 - DNA, 20 bp, Artificial Sequence
  MKO10049565_A_Slc4a3
  gRNA
ctgggcacaatcgctcccgc

SEQ ID NO: 49566 - DNA, 20 bp, Artificial Sequence
  MKO10049566_A_Slc4a3
  gRNA
agtcccgctcgctgtagctg

SEQ ID NO: 49567 - DNA, 20 bp, Artificial Sequence
  MKO10049567_A_Slc4a3
  gRNA
actagtacctgccggagcgc

SEQ ID NO: 49568 - DNA, 20 bp, Artificial Sequence
  MKO10049568_A_Slc4a4
  gRNA
ggtcaccacacgatctacat

SEQ ID NO: 49569 - DNA, 20 bp, Artificial Sequence
  MKO10049569_A_Slc4a4
  gRNA
ggaccccaatgtagatcgtg

SEQ ID NO: 49570 - DNA, 20 bp, Artificial Sequence
  MKO10049570_A_Slc4a4
  gRNA
gcgatggagcaaaccccatg

SEQ ID NO: 49571 - DNA, 20 bp, Artificial Sequence
  MKO10049571_A_Slc4a5
  gRNA
gggtcagctacgtgctcctg

SEQ ID NO: 49572 - DNA, 20 bp, Artificial Sequence
  MKO10049572_A_Slc4a5
  gRNA
attcgacaaagcaccagcta

SEQ ID NO: 49573 - DNA, 20 bp, Artificial Sequence
  MKO10049573_A_Slc4a5
  gRNA
ccgacttcccgatgtctgca

SEQ ID NO: 49574 - DNA, 20 bp, Artificial Sequence
  MKO10049574_A_Slc4a7
  gRNA
ggtcatcgagctgtatatgt

SEQ ID NO: 49575 - DNA, 20 bp, Artificial Sequence
  MKO10049575_A_Slc4a7
  gRNA
catcgtcgtcttcagtcccg

SEQ ID NO: 49576 - DNA, 20 bp, Artificial Sequence
  MKO10049576_A_Slc4a7
  gRNA
cgggactgaagacgacgatg

SEQ ID NO: 49577 - DNA, 20 bp, Artificial Sequence
  MKO10049577_A_Slc4a8
  gRNA
catgcgtgcaagtagcatag

SEQ ID NO: 49578 - DNA, 20 bp, Artificial Sequence
  MKO10049578_A_Slc4a8
  gRNA
gggttcggatgccgctgggg

SEQ ID NO: 49579 - DNA, 20 bp, Artificial Sequence
  MKO10049579_A_Slc4a8
  gRNA
catcggcaccaccgcactca

SEQ ID NO: 49580 - DNA, 20 bp, Artificial Sequence
  MKO10049580_A_Slc4a9
  gRNA
aggattccgcagtcttacga

SEQ ID NO: 49581 - DNA, 20 bp, Artificial Sequence
  MKO10049581_A_Slc4a9
  gRNA
actgcggaatcctatagtgc

SEQ ID NO: 49582 - DNA, 20 bp, Artificial Sequence
  MKO10049582_A_Slc4a9
  gRNA
agctagacatgggcgcgggc

SEQ ID NO: 49583 - DNA, 20 bp, Artificial Sequence
  MKO10049583_A_Slc50a1
  gRNA
ccttatcatcgtcaatagcg

SEQ ID NO: 49584 - DNA, 20 bp, Artificial Sequence
  MKO10049584_A_Slc50a1
  gRNA
ccacgctattgacgatgata

SEQ ID NO: 49585 - DNA, 20 bp, Artificial Sequence
  MKO10049585_A_Slc50a1
  gRNA
tgatttagtctgaacgatct

SEQ ID NO: 49586 - DNA, 20 bp, Artificial Sequence
  MKO10049586_A_Slc51a
  gRNA
ccctttgccccatcaagaag

SEQ ID NO: 49587 - DNA, 20 bp, Artificial Sequence
  MKO10049587_A_Slc51a
  gRNA
gcccacctctcatacttacc

SEQ ID NO: 49588 - DNA, 20 bp, Artificial Sequence
  MKO10049588_A_Slc51a
  gRNA
caccccgatgagggtgcaca

SEQ ID NO: 49589 - DNA, 20 bp, Artificial Sequence
  MKO10049589_A_Slc51b
  gRNA
accaggatggaataattcca

SEQ ID NO: 49590 - DNA, 20 bp, Artificial Sequence
  MKO10049590_A_Slc51b
  gRNA
tccttggaattattccatcc

SEQ ID NO: 49591 - DNA, 20 bp, Artificial Sequence
  MKO10049591_A_Slc51b
  gRNA
tcatcaagatgcaggtcttc

SEQ ID NO: 49592 - DNA, 20 bp, Artificial Sequence
  MKO10049592_A_Slc52a2
  gRNA
atctaccgagtatttcgcag

SEQ ID NO: 49593 - DNA, 20 bp, Artificial Sequence
  MKO10049593_A_Slc52a2
  gRNA
ttcccgaagtgcctgtctac

SEQ ID NO: 49594 - DNA, 20 bp, Artificial Sequence
  MKO10049594_A_Slc52a2
  gRNA
ctaccacttggctgtcgtac

SEQ ID NO: 49595 - DNA, 20 bp, Artificial Sequence
  MKO10049595_A_Slc52a3
  gRNA
cgggtcggaagcggtgcatc

SEQ ID NO: 49596 - DNA, 20 bp, Artificial Sequence
  MKO10049596_A_Slc52a3
  gRNA
aggcagccgtgcctacgcac

SEQ ID NO: 49597 - DNA, 20 bp, Artificial Sequence
  MKO10049597_A_Slc52a3
  gRNA
gggacggcaaggctccatag

SEQ ID NO: 49598 - DNA, 20 bp, Artificial Sequence
  MKO10049598_A_Slc5a10
  gRNA
agccggccaatcctacgaag

SEQ ID NO: 49599 - DNA, 20 bp, Artificial Sequence
  MKO10049599_A_Slc5a10
  gRNA
gaatacattcagaagcgctt

SEQ ID NO: 49600 - DNA, 20 bp, Artificial Sequence
  MKO10049600_A_Slc5a10
  gRNA
cttcctggcgggccgggaca

SEQ ID NO: 49601 - DNA, 20 bp, Artificial Sequence
  MKO10049601_A_Slc5a11
  gRNA
aagcgccgccttagatattc

SEQ ID NO: 49602 - DNA, 20 bp, Artificial Sequence
  MKO10049602_A_Slc5a11
  gRNA
acctggccagcaatgtagat

SEQ ID NO: 49603 - DNA, 20 bp, Artificial Sequence
  MKO10049603_A_Slc5a11
  gRNA
tccttgttcgccagcaatgt

SEQ ID NO: 49604 - DNA, 20 bp, Artificial Sequence
  MKO10049604_A_Slc5a12
  gRNA
cgtggtctacgcccctgctc

SEQ ID NO: 49605 - DNA, 20 bp, Artificial Sequence
  MKO10049605_A_Slc5a12
  gRNA
cgtctgtacgatgtagataa

SEQ ID NO: 49606 - DNA, 20 bp, Artificial Sequence
  MKO10049606_A_Slc5a12
  gRNA
ttgcacattctactgtagtt

SEQ ID NO: 49607 - DNA, 20 bp, Artificial Sequence
  MKO10049607_A_Slc5a1
  gRNA
tatctgcggaagcggtttgg

SEQ ID NO: 49608 - DNA, 20 bp, Artificial Sequence
  MKO10049608_A_Slc5a1
  gRNA
cgtgcaggtggtgacgatgc

SEQ ID NO: 49609 - DNA, 20 bp, Artificial Sequence
  MKO10049609_A_Slc5a1
  gRNA
caggccgaagtatggtgtgg

SEQ ID NO: 49610 - DNA, 20 bp, Artificial Sequence
  MKO10049610_A_Slc5a2
  gRNA
cagtacctccgcaagcgctt

SEQ ID NO: 49611 - DNA, 20 bp, Artificial Sequence
  MKO10049611_A_Slc5a2
  gRNA
gttcccacaggcgctcttcg

SEQ ID NO: 49612 - DNA, 20 bp, Artificial Sequence
  MKO10049612_A_Slc5a2
  gRNA
atgaccgctgccgatgttgc

SEQ ID NO: 49613 - DNA, 20 bp, Artificial Sequence
  MKO10049613_A_Slc5a3
  gRNA
caatattgcttacccacgcc

SEQ ID NO: 49614 - DNA, 20 bp, Artificial Sequence
  MKO10049614_A_Slc5a3
  gRNA
cattggggcgctcacactta

SEQ ID NO: 49615 - DNA, 20 bp, Artificial Sequence
  MKO10049615_A_Slc5a3
  gRNA
ggataagtttgtacacatcg

SEQ ID NO: 49616 - DNA, 20 bp, Artificial Sequence
  MKO10049616_A_Slc5a4a
  gRNA
aagacgaaccgaagcactgt

SEQ ID NO: 49617 - DNA, 20 bp, Artificial Sequence
  MKO10049617_A_Slc5a4a
  gRNA
cagtggccacttcgtgggcc

SEQ ID NO: 49618 - DNA, 20 bp, Artificial Sequence
  MKO10049618_A_Slc5a4a
  gRNA
tggcaggtcgatctatgact

SEQ ID NO: 49619 - DNA, 20 bp, Artificial Sequence
  MKO10049619_A_Slc5a4b
  gRNA
cagcaatcacttcgtgggct

SEQ ID NO: 49620 - DNA, 20 bp, Artificial Sequence
  MKO10049620_A_Slc5a4b
  gRNA
tgaccatgccagagtatctc

SEQ ID NO: 49621 - DNA, 20 bp, Artificial Sequence
  MKO10049621_A_Slc5a4b
  gRNA
tcaatggtgagaagcaaccg

SEQ ID NO: 49622 - DNA, 20 bp, Artificial Sequence
  MKO10049622_A_Slc5a5
  gRNA
ctcggctgaagcgcagttct

SEQ ID NO: 49623 - DNA, 20 bp, Artificial Sequence
  MKO10049623_A_Slc5a5
  gRNA
acttaccacggtcgtgtaca

SEQ ID NO: 49624 - DNA, 20 bp, Artificial Sequence
  MKO10049624_A_Slc5a5
  gRNA
tggtaatgctcgtcggcttc

SEQ ID NO: 49625 - DNA, 20 bp, Artificial Sequence
  MKO10049625_A_Slc5a6
  gRNA
ggaatccttacctgcattga

SEQ ID NO: 49626 - DNA, 20 bp, Artificial Sequence
  MKO10049626_A_Slc5a6
  gRNA
catcctataggtgatataca

SEQ ID NO: 49627 - DNA, 20 bp, Artificial Sequence
  MKO10049627_A_Slc5a6
  gRNA
cttacttaatcccagagatg

SEQ ID NO: 49628 - DNA, 20 bp, Artificial Sequence
  MKO10049628_A_Slc5a7
  gRNA
tgcgaaacctatgcgttcca

SEQ ID NO: 49629 - DNA, 20 bp, Artificial Sequence
  MKO10049629_A_Slc5a7
  gRNA
aatcagttgaagtctacacc

SEQ ID NO: 49630 - DNA, 20 bp, Artificial Sequence
  MKO10049630_A_Slc5a7
  gRNA
cacagctgtgaatccgatgt

SEQ ID NO: 49631 - DNA, 20 bp, Artificial Sequence
  MKO10049631_A_Slc5a8
  gRNA
gcggtcttaaagcagttgtc

SEQ ID NO: 49632 - DNA, 20 bp, Artificial Sequence
  MKO10049632_A_Slc5a8
  gRNA
aatcgatgcattcgtctctg

SEQ ID NO: 49633 - DNA, 20 bp, Artificial Sequence
  MKO10049633_A_Slc5a8
  gRNA
ttactgtttgaacgatgaag

SEQ ID NO: 49634 - DNA, 20 bp, Artificial Sequence
  MKO10049634_A_Slc5a9
  gRNA
tcatccatccgtgcaagtcg

SEQ ID NO: 49635 - DNA, 20 bp, Artificial Sequence
  MKO10049635_A_Slc5a9
  gRNA
cagtggcttatttatcggcc

SEQ ID NO: 49636 - DNA, 20 bp, Artificial Sequence
  MKO10049636_A_Slc5a9
  gRNA
cagtacctgaagaaacgatt

SEQ ID NO: 49637 - DNA, 20 bp, Artificial Sequence
  MKO10049637_A_Slc6a11
  gRNA
tctggggcagttcacgagcg

SEQ ID NO: 49638 - DNA, 20 bp, Artificial Sequence
  MKO10049638_A_Slc6a11
  gRNA
gggtactaagtcgactggaa

SEQ ID NO: 49639 - DNA, 20 bp, Artificial Sequence
  MKO10049639_A_Slc6a11
  gRNA
actgccccagagccgtttcc

SEQ ID NO: 49640 - DNA, 20 bp, Artificial Sequence
  MKO10049640_A_Slc6a12
  gRNA
attggccacgatccttcacc

SEQ ID NO: 49641 - DNA, 20 bp, Artificial Sequence
  MKO10049641_A_Slc6a12
  gRNA
ggacaacctgcaccaactcg

SEQ ID NO: 49642 - DNA, 20 bp, Artificial Sequence
  MKO10049642_A_Slc6a12
  gRNA
gatacctgtgttccacgagt

SEQ ID NO: 49643 - DNA, 20 bp, Artificial Sequence
  MKO10049643_A_Slc6a13
  gRNA
tgtctactacatcgttgtcc

SEQ ID NO: 49644 - DNA, 20 bp, Artificial Sequence
  MKO10049644_A_Slc6a13
  gRNA
attctcggaggtcacattca

SEQ ID NO: 49645 - DNA, 20 bp, Artificial Sequence
  MKO10049645_A_Slc6a13
  gRNA
acaggaccagttcccagcgc

SEQ ID NO: 49646 - DNA, 20 bp, Artificial Sequence
  MKO10049646_A_Slc6a14
  gRNA
gaaaggcctacctccgccat

SEQ ID NO: 49647 - DNA, 20 bp, Artificial Sequence
  MKO10049647_A_Slc6a14
  gRNA
tcatccgagaacttccatgt

SEQ ID NO: 49648 - DNA, 20 bp, Artificial Sequence
  MKO10049648_A_Slc6a14
  gRNA
ttactcccaatactgttcac

SEQ ID NO: 49649 - DNA, 20 bp, Artificial Sequence
  MKO10049649_A_Slc6a15
  gRNA
gccgtatttaatactacttc

SEQ ID NO: 49650 - DNA, 20 bp, Artificial Sequence
  MKO10049650_A_Slc6a15
  gRNA
gtgggtcaaagaattcgaag

SEQ ID NO: 49651 - DNA, 20 bp, Artificial Sequence
  MKO10049651_A_Slc6a15
  gRNA
cagttctctgttcccctacg

SEQ ID NO: 49652 - DNA, 20 bp, Artificial Sequence
  MKO10049652_A_Slc6a17
  gRNA
gcactatgtgtgcccccgcc

SEQ ID NO: 49653 - DNA, 20 bp, Artificial Sequence
  MKO10049653_A_Slc6a17
  gRNA
gtgggccagaggatccgccg

SEQ ID NO: 49654 - DNA, 20 bp, Artificial Sequence
  MKO10049654_A_Slc6a17
  gRNA
tgtagtacagcccaacgaag

SEQ ID NO: 49655 - DNA, 20 bp, Artificial Sequence
  MKO10049655_A_Slc6a18
  gRNA
ggacccgcttgtggacattg

SEQ ID NO: 49656 - DNA, 20 bp, Artificial Sequence
  MKO10049656_A_Slc6a18
  gRNA
agagcgtacctacgccaccg

SEQ ID NO: 49657 - DNA, 20 bp, Artificial Sequence
  MKO10049657_A_Slc6a18
  gRNA
ctccaatgcttcccctccgt

SEQ ID NO: 49658 - DNA, 20 bp, Artificial Sequence
  MKO10049658_A_Slc6a19os
  gRNA
cagctcctctctacgcatgc

SEQ ID NO: 49659 - DNA, 20 bp, Artificial Sequence
  MKO10049659_A_Slc6a19os
  gRNA
ttggaccagcatgcgtagag

SEQ ID NO: 49660 - DNA, 20 bp, Artificial Sequence
  MKO10049660_A_Slc6a19os
  gRNA
tgttcacgatgttgaccact

SEQ ID NO: 49661 - DNA, 20 bp, Artificial Sequence
  MKO10049661_A_Slc6a19
  gRNA
cttgcgtagcctctgaccga

SEQ ID NO: 49662 - DNA, 20 bp, Artificial Sequence
  MKO10049662_A_Slc6a19
  gRNA
catcggtcagaggctacgca

SEQ ID NO: 49663 - DNA, 20 bp, Artificial Sequence
  MKO10049663_A_Slc6a19
  gRNA
cgatgatggtgttgtagtac

SEQ ID NO: 49664 - DNA, 20 bp, Artificial Sequence
  MKO10049664_A_Slc6a1
  gRNA
caccaacatgaccagcgccg

SEQ ID NO: 49665 - DNA, 20 bp, Artificial Sequence
  MKO10049665_A_Slc6a1
  gRNA
gcgccagcttccatacgccc

SEQ ID NO: 49666 - DNA, 20 bp, Artificial Sequence
  MKO10049666_A_Slc6a1
  gRNA
cacccgcaaagatgagcgtc

SEQ ID NO: 49667 - DNA, 20 bp, Artificial Sequence
  MKO10049667_A_Slc6a20a
  gRNA
actcctcatcgtagcctgtg

SEQ ID NO: 49668 - DNA, 20 bp, Artificial Sequence
  MKO10049668_A_Slc6a20a
  gRNA
acccaccttgccagtagatt

SEQ ID NO: 49669 - DNA, 20 bp, Artificial Sequence
  MKO10049669_A_Slc6a20a
  gRNA
actacaatgtcatcaatgcc

SEQ ID NO: 49670 - DNA, 20 bp, Artificial Sequence
  MKO10049670_A_Slc6a20b
  gRNA
cctttcaggcattgctagct

SEQ ID NO: 49671 - DNA, 20 bp, Artificial Sequence
  MKO10049671_A_Slc6a20b
  gRNA
cctgtgtgattactattcag

SEQ ID NO: 49672 - DNA, 20 bp, Artificial Sequence
  MKO10049672_A_Slc6a20b
  gRNA
ccactgaatagtaatcacac

SEQ ID NO: 49673 - DNA, 20 bp, Artificial Sequence
  MKO10049673_A_Slc6a2
  gRNA
tctggggcaatacaaccggg

SEQ ID NO: 49674 - DNA, 20 bp, Artificial Sequence
  MKO10049674_A_Slc6a2
  gRNA
cacccagcaccgaggcgttg

SEQ ID NO: 49675 - DNA, 20 bp, Artificial Sequence
  MKO10049675_A_Slc6a2
  gRNA
tactcataaaactccgcagc

SEQ ID NO: 49676 - DNA, 20 bp, Artificial Sequence
  MKO10049676_A_Slc6a3
  gRNA
ctgcacctccatcagagtcg

SEQ ID NO: 49677 - DNA, 20 bp, Artificial Sequence
  MKO10049677_A_Slc6a3
  gRNA
catagcagcaactctagcga

SEQ ID NO: 49678 - DNA, 20 bp, Artificial Sequence
  MKO10049678_A_Slc6a3
  gRNA
gcccctcttctacatggagc

SEQ ID NO: 49679 - DNA, 20 bp, Artificial Sequence
  MKO10049679_A_Slc6a4
  gRNA
gatgaggtagtagagcgccc

SEQ ID NO: 49680 - DNA, 20 bp, Artificial Sequence
  MKO10049680_A_Slc6a4
  gRNA
aggagtcaaaacgtctggca

SEQ ID NO: 49681 - DNA, 20 bp, Artificial Sequence
  MKO10049681_A_Slc6a4
  gRNA
ctgggccagtaccaccgaaa

SEQ ID NO: 49682 - DNA, 20 bp, Artificial Sequence
  MKO10049682_A_Slc6a5
  gRNA
tgcctatccgaacttgacaa

SEQ ID NO: 49683 - DNA, 20 bp, Artificial Sequence
  MKO10049683_A_Slc6a5
  gRNA
aagccgtacctcccccgttc

SEQ ID NO: 49684 - DNA, 20 bp, Artificial Sequence
  MKO10049684_A_Slc6a5
  gRNA
cccgctgacaaatgtcttat

SEQ ID NO: 49685 - DNA, 20 bp, Artificial Sequence
  MKO10049685_A_Slc6a6
  gRNA
agtgactctcgttcctacgc

SEQ ID NO: 49686 - DNA, 20 bp, Artificial Sequence
  MKO10049686_A_Slc6a6
  gRNA
tgacgatgtagtacacgttc

SEQ ID NO: 49687 - DNA, 20 bp, Artificial Sequence
  MKO10049687_A_Slc6a6
  gRNA
taccctgacatcagccgcct

SEQ ID NO: 49688 - DNA, 20 bp, Artificial Sequence
  MKO10049688_A_Slc6a7
  gRNA
cagccagggcatcggccgac

SEQ ID NO: 49689 - DNA, 20 bp, Artificial Sequence
  MKO10049689_A_Slc6a7
  gRNA
gcccacgcagtagccgatgc

SEQ ID NO: 49690 - DNA, 20 bp, Artificial Sequence
  MKO10049690_A_Slc6a7
  gRNA
aggttccagcgaatctcccc

SEQ ID NO: 49691 - DNA, 20 bp, Artificial Sequence
  MKO10049691_A_Slc6a8
  gRNA
gaccctagctttgaccagtc

SEQ ID NO: 49692 - DNA, 20 bp, Artificial Sequence
  MKO10049692_A_Slc6a8
  gRNA
ctcgttgtgctgctggtgcg

SEQ ID NO: 49693 - DNA, 20 bp, Artificial Sequence
  MKO10049693_A_Slc6a8
  gRNA
ggcctggggcttctattacc

SEQ ID NO: 49694 - DNA, 20 bp, Artificial Sequence
  MKO10049694_A_Slc6a9
  gRNA
tcgtcagtacaaactcgatc

SEQ ID NO: 49695 - DNA, 20 bp, Artificial Sequence
  MKO10049695_A_Slc6a9
  gRNA
cgagtttgtactgacgagcg

SEQ ID NO: 49696 - DNA, 20 bp, Artificial Sequence
  MKO10049696_A_Slc6a9
  gRNA
ggggttgttgcagtacgccc

SEQ ID NO: 49697 - DNA, 20 bp, Artificial Sequence
  MKO10049697_A_Slc7a10
  gRNA
gcgcgtggcccagcgtacgc

SEQ ID NO: 49698 - DNA, 20 bp, Artificial Sequence
  MKO10049698_A_Slc7a10
  gRNA
tgaacagctccagcgtacgc

SEQ ID NO: 49699 - DNA, 20 bp, Artificial Sequence
  MKO10049699_A_Slc7a10
  gRNA
ccaccaatgccttcgccttc

SEQ ID NO: 49700 - DNA, 20 bp, Artificial Sequence
  MKO10049700_A_Slc7a11
  gRNA
agctgacactcgtgctattt

SEQ ID NO: 49701 - DNA, 20 bp, Artificial Sequence
  MKO10049701_A_Slc7a11
  gRNA
gcttgtacctaattctgcat

SEQ ID NO: 49702 - DNA, 20 bp, Artificial Sequence
  MKO10049702_A_Slc7a11
  gRNA
taaatagcacgagtgtcagc

SEQ ID NO: 49703 - DNA, 20 bp, Artificial Sequence
  MKO10049703_A_Slc7a12
  gRNA
tgatgatcctagatatgagt

SEQ ID NO: 49704 - DNA, 20 bp, Artificial Sequence
  MKO10049704_A_Slc7a12
  gRNA
atttacctgctatgacgatg

SEQ ID NO: 49705 - DNA, 20 bp, Artificial Sequence
  MKO10049705_A_Slc7a12
  gRNA
tggcttcaagctaaccttaa

SEQ ID NO: 49706 - DNA, 20 bp, Artificial Sequence
  MKO10049706_A_Slc7a13
  gRNA
ggtaactgtcgtgtacttac

SEQ ID NO: 49707 - DNA, 20 bp, Artificial Sequence
  MKO10049707_A_Slc7a13
  gRNA
actagcttgtttctcggccc

SEQ ID NO: 49708 - DNA, 20 bp, Artificial Sequence
  MKO10049708_A_Slc7a13
  gRNA
accgttcacattcatagcgt

SEQ ID NO: 49709 - DNA, 20 bp, Artificial Sequence
  MKO10049709_A_Slc7a14
  gRNA
tctgtgtcaatggcgtaata

SEQ ID NO: 49710 - DNA, 20 bp, Artificial Sequence
  MKO10049710_A_Slc7a14
  gRNA
tgggtgttcatcatgatcgc

SEQ ID NO: 49711 - DNA, 20 bp, Artificial Sequence
  MKO10049711_A_Slc7a14
  gRNA
ttgattctggagtacctgat

SEQ ID NO: 49712 - DNA, 20 bp, Artificial Sequence
  MKO10049712_A_Slc7a15
  gRNA
agtgatgactgccgtccccc

SEQ ID NO: 49713 - DNA, 20 bp, Artificial Sequence
  MKO10049713_A_Slc7a15
  gRNA
tcgcagctgcatagcacacg

SEQ ID NO: 49714 - DNA, 20 bp, Artificial Sequence
  MKO10049714_A_Slc7a15
  gRNA
tgctatgcagctgcgagaga

SEQ ID NO: 49715 - DNA, 20 bp, Artificial Sequence
  MKO10049715_A_Slc7a1
  gRNA
ctcgtcaaaagtcgcactcc

SEQ ID NO: 49716 - DNA, 20 bp, Artificial Sequence
  MKO10049716_A_Slc7a1
  gRNA
agcgacacaaacgtgaaata

SEQ ID NO: 49717 - DNA, 20 bp, Artificial Sequence
  MKO10049717_A_Slc7a1
  gRNA
ctgacgtgagaactctccga

SEQ ID NO: 49718 - DNA, 20 bp, Artificial Sequence
  MKO10049718_A_Slc7a2
  gRNA
ctttcgcgcgatgtctgatc

SEQ ID NO: 49719 - DNA, 20 bp, Artificial Sequence
  MKO10049719_A_Slc7a2
  gRNA
gaagtcgccaaagccgattc

SEQ ID NO: 49720 - DNA, 20 bp, Artificial Sequence
  MKO10049720_A_Slc7a2
  gRNA
tttattaagaagttcgtcga

SEQ ID NO: 49721 - DNA, 20 bp, Artificial Sequence
  MKO10049721_A_Slc7a3
  gRNA
ctctaacctacaagtgccgt

SEQ ID NO: 49722 - DNA, 20 bp, Artificial Sequence
  MKO10049722_A_Slc7a3
  gRNA
ctgggagcctgcccgctact

SEQ ID NO: 49723 - DNA, 20 bp, Artificial Sequence
  MKO10049723_A_Slc7a3
  gRNA
ccacatctctcggactctga

SEQ ID NO: 49724 - DNA, 20 bp, Artificial Sequence
  MKO10049724_A_Slc7a4
  gRNA
gccgcgcattgtctacgcca

SEQ ID NO: 49725 - DNA, 20 bp, Artificial Sequence
  MKO10049725_A_Slc7a4
  gRNA
ccatggacacgtacgtgaat

SEQ ID NO: 49726 - DNA, 20 bp, Artificial Sequence
  MKO10049726_A_Slc7a4
  gRNA
ccgtgaagttgcgaatgctg

SEQ ID NO: 49727 - DNA, 20 bp, Artificial Sequence
  MKO10049727_A_Slc7a5
  gRNA
tacagcggcctcttcgccta

SEQ ID NO: 49728 - DNA, 20 bp, Artificial Sequence
  MKO10049728_A_Slc7a5
  gRNA
cagaacctaccatcctccgt

SEQ ID NO: 49729 - DNA, 20 bp, Artificial Sequence
  MKO10049729_A_Slc7a5
  gRNA
ccgtgtgcaggacgcctttg

SEQ ID NO: 49730 - DNA, 20 bp, Artificial Sequence
  MKO10049730_A_Slc7a6os
  gRNA
tccgtaaagagggccgctac

SEQ ID NO: 49731 - DNA, 20 bp, Artificial Sequence
  MKO10049731_A_Slc7a6os
  gRNA
tttacggacctcgcgcaccg

SEQ ID NO: 49732 - DNA, 20 bp, Artificial Sequence
  MKO10049732_A_Slc7a6os
  gRNA
ctgtagagttgatccgtgag

SEQ ID NO: 49733 - DNA, 20 bp, Artificial Sequence
  MKO10049733_A_Slc7a6
  gRNA
aactgaacatgccgaatgtc

SEQ ID NO: 49734 - DNA, 20 bp, Artificial Sequence
  MKO10049734_A_Slc7a6
  gRNA
tgcatttaggcccccgaagc

SEQ ID NO: 49735 - DNA, 20 bp, Artificial Sequence
  MKO10049735_A_Slc7a6
  gRNA
acgcctttaaaggttcctcg

SEQ ID NO: 49736 - DNA, 20 bp, Artificial Sequence
  MKO10049736_A_Slc7a7
  gRNA
taccacggcaacagcgtcac

SEQ ID NO: 49737 - DNA, 20 bp, Artificial Sequence
  MKO10049737_A_Slc7a7
  gRNA
caagagaatgcaaccgctac

SEQ ID NO: 49738 - DNA, 20 bp, Artificial Sequence
  MKO10049738_A_Slc7a7
  gRNA
cagcgccaacaccttagcat

SEQ ID NO: 49739 - DNA, 20 bp, Artificial Sequence
  MKO10049739_A_Slc7a8
  gRNA
ctcattgtctggatcgtgac

SEQ ID NO: 49740 - DNA, 20 bp, Artificial Sequence
  MKO10049740_A_Slc7a8
  gRNA
aggagtcgcagaccggactc

SEQ ID NO: 49741 - DNA, 20 bp, Artificial Sequence
  MKO10049741_A_Slc7a8
  gRNA
gagggcgatgacagcttggt

SEQ ID NO: 49742 - DNA, 20 bp, Artificial Sequence
  MKO10049742_A_Slc7a9
  gRNA
cagtgaatgcgctaagcgtg

SEQ ID NO: 49743 - DNA, 20 bp, Artificial Sequence
  MKO10049743_A_Slc7a9
  gRNA
gagcacttaccaaccatcgt

SEQ ID NO: 49744 - DNA, 20 bp, Artificial Sequence
  MKO10049744_A_Slc7a9
  gRNA
tgagtacccctatctgatgg

SEQ ID NO: 49745 - DNA, 20 bp, Artificial Sequence
  MKO10049745_A_Slc8a1
  gRNA
gtcgccccctctgcgcataa

SEQ ID NO: 49746 - DNA, 20 bp, Artificial Sequence
  MKO10049746_A_Slc8a1
  gRNA
ccatctgcgttgtgttcgcg

SEQ ID NO: 49747 - DNA, 20 bp, Artificial Sequence
  MKO10049747_A_Slc8a1
  gRNA
ttaggtggcttcacattaac

SEQ ID NO: 49748 - DNA, 20 bp, Artificial Sequence
  MKO10049748_A_Slc8a2
  gRNA
cgtcgatgatcccgatgcgc

SEQ ID NO: 49749 - DNA, 20 bp, Artificial Sequence
  MKO10049749_A_Slc8a2
  gRNA
ccgatgatgattccactgcg

SEQ ID NO: 49750 - DNA, 20 bp, Artificial Sequence
  MKO10049750_A_Slc8a2
  gRNA
taccgcaccgaccctcgcag

SEQ ID NO: 49751 - DNA, 20 bp, Artificial Sequence
  MKO10049751_A_Slc8a3
  gRNA
tacccgaattgtagttgtgc

SEQ ID NO: 49752 - DNA, 20 bp, Artificial Sequence
  MKO10049752_A_Slc8a3
  gRNA
cggtgagcatgccaataatg

SEQ ID NO: 49753 - DNA, 20 bp, Artificial Sequence
  MKO10049753_A_Slc8a3
  gRNA
catgctcaccgccatcatcg

SEQ ID NO: 49754 - DNA, 20 bp, Artificial Sequence
  MKO10049754_A_Slc8b1
  gRNA
ctgatactggagacggcgtc

SEQ ID NO: 49755 - DNA, 20 bp, Artificial Sequence
  MKO10049755_A_Slc8b1
  gRNA
ttctcagacccacgtactgc

SEQ ID NO: 49756 - DNA, 20 bp, Artificial Sequence
  MKO10049756_A_Slc8b1
  gRNA
gaatccggactgccgcagcg

SEQ ID NO: 49757 - DNA, 20 bp, Artificial Sequence
  MKO10049757_A_Slc9a1
  gRNA
tctctccgacgcccttgatc

SEQ ID NO: 49758 - DNA, 20 bp, Artificial Sequence
  MKO10049758_A_Slc9a1
  gRNA
tccgactcacgccatgattc

SEQ ID NO: 49759 - DNA, 20 bp, Artificial Sequence
  MKO10049759_A_Slc9a1
  gRNA
ttctccgtgaactgccgcag

SEQ ID NO: 49760 - DNA, 20 bp, Artificial Sequence
  MKO10049760_A_Slc9a2
  gRNA
catcgctaacttcttcgtcg

SEQ ID NO: 49761 - DNA, 20 bp, Artificial Sequence
  MKO10049761_A_Slc9a2
  gRNA
cagctctccggcacgattgt

SEQ ID NO: 49762 - DNA, 20 bp, Artificial Sequence
  MKO10049762_A_Slc9a2
  gRNA
ctgcctgatctggcgagcac

SEQ ID NO: 49763 - DNA, 20 bp, Artificial Sequence
  MKO10049763_A_Slc9a3r1
  gRNA
gcttagacttgtcgctgtgc

SEQ ID NO: 49764 - DNA, 20 bp, Artificial Sequence
  MKO10049764_A_Slc9a3r1
  gRNA
ggtccactgctcggatgaac

SEQ ID NO: 49765 - DNA, 20 bp, Artificial Sequence
  MKO10049765_A_Slc9a3r1
  gRNA
tgcctccagcgataccagtg

SEQ ID NO: 49766 - DNA, 20 bp, Artificial Sequence
  MKO10049766_A_Slc9a3r2
  gRNA
cgaggttgtcgccagaatca

SEQ ID NO: 49767 - DNA, 20 bp, Artificial Sequence
  MKO10049767_A_Slc9a3r2
  gRNA
tggccagtacatccgctctg

SEQ ID NO: 49768 - DNA, 20 bp, Artificial Sequence
  MKO10049768_A_Slc9a3r2
  gRNA
cctggggtccccttcgcaag

SEQ ID NO: 49769 - DNA, 20 bp, Artificial Sequence
  MKO10049769_A_Slc9a3
  gRNA
catgtgcgtatcatcgagcc

SEQ ID NO: 49770 - DNA, 20 bp, Artificial Sequence
  MKO10049770_A_Slc9a3
  gRNA
gagtgctctactcatcgttc

SEQ ID NO: 49771 - DNA, 20 bp, Artificial Sequence
  MKO10049771_A_Slc9a3
  gRNA
ctcgatgatacgcacatgct

SEQ ID NO: 49772 - DNA, 20 bp, Artificial Sequence
  MKO10049772_A_Slc9a4
  gRNA
catctcagcggtcgaccccg

SEQ ID NO: 49773 - DNA, 20 bp, Artificial Sequence
  MKO10049773_A_Slc9a4
  gRNA
cacccaccacaaatcgcctc

SEQ ID NO: 49774 - DNA, 20 bp, Artificial Sequence
  MKO10049774_A_Slc9a4
  gRNA
gcaccccacgatgacgaatc

SEQ ID NO: 49775 - DNA, 20 bp, Artificial Sequence
  MKO10049775_A_Slc9a5
  gRNA
tgccatcctcacctacgccg

SEQ ID NO: 49776 - DNA, 20 bp, Artificial Sequence
  MKO10049776_A_Slc9a5
  gRNA
ctcgatgatgcggacccgct

SEQ ID NO: 49777 - DNA, 20 bp, Artificial Sequence
  MKO10049777_A_Slc9a5
  gRNA
aatactgaccgacgcccttt

SEQ ID NO: 49778 - DNA, 20 bp, Artificial Sequence
  MKO10049778_A_Slc9a6
  gRNA
gaatgccgtaccgaagcacg

SEQ ID NO: 49779 - DNA, 20 bp, Artificial Sequence
  MKO10049779_A_Slc9a6
  gRNA
attgtttcagccaccgaccc

SEQ ID NO: 49780 - DNA, 20 bp, Artificial Sequence
  MKO10049780_A_Slc9a6
  gRNA
aaaatctcccgcgagctgcc

SEQ ID NO: 49781 - DNA, 20 bp, Artificial Sequence
  MKO10049781_A_Slc9a7
  gRNA
ccctggcaagatcaacaacg

SEQ ID NO: 49782 - DNA, 20 bp, Artificial Sequence
  MKO10049782_A_Slc9a7
  gRNA
tccacgttgttgatcttgcc

SEQ ID NO: 49783 - DNA, 20 bp, Artificial Sequence
  MKO10049783_A_Slc9a7
  gRNA
acaggtaacatttgatccag

SEQ ID NO: 49784 - DNA, 20 bp, Artificial Sequence
  MKO10049784_A_Slc9a8
  gRNA
cttattcacctaggacgagg

SEQ ID NO: 49785 - DNA, 20 bp, Artificial Sequence
  MKO10049785_A_Slc9a8
  gRNA
cgctcgactgctcctcctgc

SEQ ID NO: 49786 - DNA, 20 bp, Artificial Sequence
  MKO10049786_A_Slc9a8
  gRNA
ccacctattatctttgagtc

SEQ ID NO: 49787 - DNA, 20 bp, Artificial Sequence
  MKO10049787_A_Slc9a9
  gRNA
gcgccgactgatattgatag

SEQ ID NO: 49788 - DNA, 20 bp, Artificial Sequence
  MKO10049788_A_Slc9a9
  gRNA
atgttgactagtagagttga

SEQ ID NO: 49789 - DNA, 20 bp, Artificial Sequence
  MKO10049789_A_Slc9a9
  gRNA
cacttaccctatgaccacac

SEQ ID NO: 49790 - DNA, 20 bp, Artificial Sequence
  MKO10049790_A_Slc9b1
  gRNA
actattatcctagtacgagc

SEQ ID NO: 49791 - DNA, 20 bp, Artificial Sequence
  MKO10049791_A_Slc9b1
  gRNA
gtccaagcccagctcgtact

SEQ ID NO: 49792 - DNA, 20 bp, Artificial Sequence
  MKO10049792_A_Slc9b1
  gRNA
gagaacttcttgacctataa

SEQ ID NO: 49793 - DNA, 20 bp, Artificial Sequence
  MKO10049793_A_Slc9b2
  gRNA
cggacgctatcattgatgac

SEQ ID NO: 49794 - DNA, 20 bp, Artificial Sequence
  MKO10049794_A_Slc9b2
  gRNA
cagtcatcaatgatagcgtc

SEQ ID NO: 49795 - DNA, 20 bp, Artificial Sequence
  MKO10049795_A_Slc9b2
  gRNA
cgttcgttatcactcttgcc

SEQ ID NO: 49796 - DNA, 20 bp, Artificial Sequence
  MKO10049796_A_Slc9c1
  gRNA
gtatggcatctgcatatatc

SEQ ID NO: 49797 - DNA, 20 bp, Artificial Sequence
  MKO10049797_A_Slc9c1
  gRNA
catgtatatatccatgtcga

SEQ ID NO: 49798 - DNA, 20 bp, Artificial Sequence
  MKO10049798_A_Slc9c1
  gRNA
gtacttaccaaggtctctta

SEQ ID NO: 49799 - DNA, 20 bp, Artificial Sequence
  MKO10049799_A_Slco1a1
  gRNA
ctaataggaaatactatgcg

SEQ ID NO: 49800 - DNA, 20 bp, Artificial Sequence
  MKO10049800_A_Slco1a1
  gRNA
tacctagccaaatcactatc

SEQ ID NO: 49801 - DNA, 20 bp, Artificial Sequence
  MKO10049801_A_Slco1a1
  gRNA
ataaactcctgatagtgatt

SEQ ID NO: 49802 - DNA, 20 bp, Artificial Sequence
  MKO10049802_A_Slco1a4
  gRNA
gataagcccaactacagacg

SEQ ID NO: 49803 - DNA, 20 bp, Artificial Sequence
  MKO10049803_A_Slco1a4
  gRNA
tcgatattaagaaacacccc

SEQ ID NO: 49804 - DNA, 20 bp, Artificial Sequence
  MKO10049804_A_Slco1a4
  gRNA
aggatgtgcagttatgggcc

SEQ ID NO: 49805 - DNA, 20 bp, Artificial Sequence
  MKO10049805_A_Slco1a5
  gRNA
gatatccccacatctatagt

SEQ ID NO: 49806 - DNA, 20 bp, Artificial Sequence
  MKO10049806_A_Slco1a5
  gRNA
agaatacttaccggcccatg

SEQ ID NO: 49807 - DNA, 20 bp, Artificial Sequence
  MKO10049807_A_Slco1a5
  gRNA
aagccaacgcaagaccctgc

SEQ ID NO: 49808 - DNA, 20 bp, Artificial Sequence
  MKO10049808_A_Slco1a6
  gRNA
ccctctttcaggtaaccttt

SEQ ID NO: 49809 - DNA, 20 bp, Artificial Sequence
  MKO10049809_A_Slco1a6
  gRNA
gtgatattatgaaacaccct

SEQ ID NO: 49810 - DNA, 20 bp, Artificial Sequence
  MKO10049810_A_Slco1a6
  gRNA
gtaaactcctgatagtattt

SEQ ID NO: 49811 - DNA, 20 bp, Artificial Sequence
  MKO10049811_A_Slco1b2
  gRNA
ctacaccgaccaaagctgat

SEQ ID NO: 49812 - DNA, 20 bp, Artificial Sequence
  MKO10049812_A_Slco1b2
  gRNA
ggaacatgcttcgtgggata

SEQ ID NO: 49813 - DNA, 20 bp, Artificial Sequence
  MKO10049813_A_Slco1b2
  gRNA
gaaaccccaatagtgcccct

SEQ ID NO: 49814 - DNA, 20 bp, Artificial Sequence
  MKO10049814_A_Slco1c1
  gRNA
tagttccgaagcccatgacc

SEQ ID NO: 49815 - DNA, 20 bp, Artificial Sequence
  MKO10049815_A_Slco1c1
  gRNA
catccagataggcgatgccc

SEQ ID NO: 49816 - DNA, 20 bp, Artificial Sequence
  MKO10049816_A_Slco1c1
  gRNA
agctaacaaacgttatgacc

SEQ ID NO: 49817 - DNA, 20 bp, Artificial Sequence
  MKO10049817_A_Slco2a1
  gRNA
agttgtcgacgcgtactgat

SEQ ID NO: 49818 - DNA, 20 bp, Artificial Sequence
  MKO10049818_A_Slco2a1
  gRNA
gtgaaccgcccacggatgat

SEQ ID NO: 49819 - DNA, 20 bp, Artificial Sequence
  MKO10049819_A_Slco2a1
  gRNA
accactatcgagaagcgctt

SEQ ID NO: 49820 - DNA, 20 bp, Artificial Sequence
  MKO10049820_A_Slco2b1
  gRNA
gtgcacagaccccggatgat

SEQ ID NO: 49821 - DNA, 20 bp, Artificial Sequence
  MKO10049821_A_Slco2b1
  gRNA
gtgggcaaagtcgtcaatgt

SEQ ID NO: 49822 - DNA, 20 bp, Artificial Sequence
  MKO10049822_A_Slco2b1
  gRNA
ccgtgcataccttgatgttg

SEQ ID NO: 49823 - DNA, 20 bp, Artificial Sequence
  MKO10049823_A_Slco3a1
  gRNA
cctatattgacgaccacgtg

SEQ ID NO: 49824 - DNA, 20 bp, Artificial Sequence
  MKO10049824_A_Slco3a1
  gRNA
gggcaccgaccgcgcctcat

SEQ ID NO: 49825 - DNA, 20 bp, Artificial Sequence
  MKO10049825_A_Slco3a1
  gRNA
gggtacggtgggcgcctacc

SEQ ID NO: 49826 - DNA, 20 bp, Artificial Sequence
  MKO10049826_A_Slco4a1
  gRNA
ctctcataacaacgtagcgc

SEQ ID NO: 49827 - DNA, 20 bp, Artificial Sequence
  MKO10049827_A_Slco4a1
  gRNA
ggtctccttaccgaacaggg

SEQ ID NO: 49828 - DNA, 20 bp, Artificial Sequence
  MKO10049828_A_Slco4a1
  gRNA
cggaggcactcaagctgaac

SEQ ID NO: 49829 - DNA, 20 bp, Artificial Sequence
  MKO10049829_A_Slco4c1
  gRNA
tgtcgtagctcgatgatatc

SEQ ID NO: 49830 - DNA, 20 bp, Artificial Sequence
  MKO10049830_A_Slco4c1
  gRNA
agagaggacacaaacctcgc

SEQ ID NO: 49831 - DNA, 20 bp, Artificial Sequence
  MKO10049831_A_Slco4c1
  gRNA
ggctattctatgtcaatcct

SEQ ID NO: 49832 - DNA, 20 bp, Artificial Sequence
  MKO10049832_A_Slco5a1
  gRNA
gtcatcgtcgataacgacat

SEQ ID NO: 49833 - DNA, 20 bp, Artificial Sequence
  MKO10049833_A_Slco5a1
  gRNA
ggcacttaccccgttgtgta

SEQ ID NO: 49834 - DNA, 20 bp, Artificial Sequence
  MKO10049834_A_Slco5a1
  gRNA
tatcgacgatgacatcatca

SEQ ID NO: 49835 - DNA, 20 bp, Artificial Sequence
  MKO10049835_A_Slco6b1
  gRNA
ttgatgcgagccctactaga

SEQ ID NO: 49836 - DNA, 20 bp, Artificial Sequence
  MKO10049836_A_Slco6b1
  gRNA
gcaatacttgtagcgcacta

SEQ ID NO: 49837 - DNA, 20 bp, Artificial Sequence
  MKO10049837_A_Slco6b1
  gRNA
tactcaccaggtaaacgatg

SEQ ID NO: 49838 - DNA, 20 bp, Artificial Sequence
  MKO10049838_A_Slco6c1
  gRNA
ctattcaagtgaaccagcga

SEQ ID NO: 49839 - DNA, 20 bp, Artificial Sequence
  MKO10049839_A_Slco6c1
  gRNA
ggacattctgcatatctgat

SEQ ID NO: 49840 - DNA, 20 bp, Artificial Sequence
  MKO10049840_A_Slco6c1
  gRNA
tgtatctatttccacatcgc

SEQ ID NO: 49841 - DNA, 20 bp, Artificial Sequence
  MKO10049841_A_Slco6d1
  gRNA
actatctccatcacggatag

SEQ ID NO: 49842 - DNA, 20 bp, Artificial Sequence
  MKO10049842_A_Slco6d1
  gRNA
aagtattcctctatccgtga

SEQ ID NO: 49843 - DNA, 20 bp, Artificial Sequence
  MKO10049843_A_Slco6d1
  gRNA
ccgctaaaaacgacagagtc

SEQ ID NO: 49844 - DNA, 20 bp, Artificial Sequence
  MKO10049844_A_Slfn14
  gRNA
ctaacagaccccagttcgac

SEQ ID NO: 49845 - DNA, 20 bp, Artificial Sequence
  MKO10049845_A_Slfn14
  gRNA
gcttctgtgaccccgatggg

SEQ ID NO: 49846 - DNA, 20 bp, Artificial Sequence
  MKO10049846_A_Slfn14
  gRNA
gccatcaacttgtgcgccaa

SEQ ID NO: 49847 - DNA, 20 bp, Artificial Sequence
  MKO10049847_A_Slfn1
  gRNA
gccaggcgatgatacgcaag

SEQ ID NO: 49848 - DNA, 20 bp, Artificial Sequence
  MKO10049848_A_Slfn1
  gRNA
tcctcttgcgtatcatcgcc

SEQ ID NO: 49849 - DNA, 20 bp, Artificial Sequence
  MKO10049849_A_Slfn1
  gRNA
caaatatcccccgtcagtgt

SEQ ID NO: 49850 - DNA, 20 bp, Artificial Sequence
  MKO10049850_A_Slfn2
  gRNA
tttatatctacgtgaaatcg

SEQ ID NO: 49851 - DNA, 20 bp, Artificial Sequence
  MKO10049851_A_Slfn2
  gRNA
aatctcggagcaatcacttt

SEQ ID NO: 49852 - DNA, 20 bp, Artificial Sequence
  MKO10049852_A_Slfn2
  gRNA
tgacatgggtactagacttg

SEQ ID NO: 49853 - DNA, 20 bp, Artificial Sequence
  MKO10049853_A_Slfn3
  gRNA
ttcatcgaagtgcgcaaatc

SEQ ID NO: 49854 - DNA, 20 bp, Artificial Sequence
  MKO10049854_A_Slfn3
  gRNA
gaatccagaccaagttcacc

SEQ ID NO: 49855 - DNA, 20 bp, Artificial Sequence
  MKO10049855_A_Slfn3
  gRNA
cagatgttgttaaaccattg

SEQ ID NO: 49856 - DNA, 20 bp, Artificial Sequence
  MKO10049856_A_Slfn4
  gRNA
cctaacattaaagcagacgt

SEQ ID NO: 49857 - DNA, 20 bp, Artificial Sequence
  MKO10049857_A_Slfn4
  gRNA
aatgaacatcactgtcgatc

SEQ ID NO: 49858 - DNA, 20 bp, Artificial Sequence
  MKO10049858_A_Slfn4
  gRNA
ggaggacggcatgccaagcg

SEQ ID NO: 49859 - DNA, 20 bp, Artificial Sequence
  MKO10049859_A_Slfn5
  gRNA
tctgggtagtcacgtcgtgt

SEQ ID NO: 49860 - DNA, 20 bp, Artificial Sequence
  MKO10049860_A_Slfn5
  gRNA
accagttcccgtcctccgtt

SEQ ID NO: 49861 - DNA, 20 bp, Artificial Sequence
  MKO10049861_A_Slfn5
  gRNA
ttgccaaagcgcccgattcc

SEQ ID NO: 49862 - DNA, 20 bp, Artificial Sequence
  MKO10049862_A_Slfn8
  gRNA
gcacgaccatttcactgcta

SEQ ID NO: 49863 - DNA, 20 bp, Artificial Sequence
  MKO10049863_A_Slfn8
  gRNA
agtcacttctcctgcgtaga

SEQ ID NO: 49864 - DNA, 20 bp, Artificial Sequence
  MKO10049864_A_Slfn8
  gRNA
aaccctttagtctcttatgc

SEQ ID NO: 49865 - DNA, 20 bp, Artificial Sequence
  MKO10049865_A_Slfn9
  gRNA
gtaagaccgtttcaccacta

SEQ ID NO: 49866 - DNA, 20 bp, Artificial Sequence
  MKO10049866_A_Slfn9
  gRNA
aatcctctagtctctcatgc

SEQ ID NO: 49867 - DNA, 20 bp, Artificial Sequence
  MKO10049867_A_Slfn9
  gRNA
cctgcatagatgatcaaatc

SEQ ID NO: 49868 - DNA, 20 bp, Artificial Sequence
  MKO10049868_A_Slfnl1
  gRNA
cacatacgtagcgccgcaca

SEQ ID NO: 49869 - DNA, 20 bp, Artificial Sequence
  MKO10049869_A_Slfnl1
  gRNA
gaggtatttctaaggcgcga

SEQ ID NO: 49870 - DNA, 20 bp, Artificial Sequence
  MKO10049870_A_Slfnl1
  gRNA
cggaacatggagtttaagcg

SEQ ID NO: 49871 - DNA, 20 bp, Artificial Sequence
  MKO10049871_A_Slirp
  gRNA
cagtgcgcttagccccttta

SEQ ID NO: 49872 - DNA, 20 bp, Artificial Sequence
  MKO10049872_A_Slirp
  gRNA
agcgcactgcgttccagtac

SEQ ID NO: 49873 - DNA, 20 bp, Artificial Sequence
  MKO10049873_A_Slirp
  gRNA
ttgctctttgagcttgaacg

SEQ ID NO: 49874 - DNA, 20 bp, Artificial Sequence
  MKO10049874_A_Slit1
  gRNA
cgcgttccacagctccgatc

SEQ ID NO: 49875 - DNA, 20 bp, Artificial Sequence
  MKO10049875_A_Slit1
  gRNA
acaacactcgaagctgcttg

SEQ ID NO: 49876 - DNA, 20 bp, Artificial Sequence
  MKO10049876_A_Slit1
  gRNA
atccacaagaatgactttgc

SEQ ID NO: 49877 - DNA, 20 bp, Artificial Sequence
  MKO10049877_A_Slit2
  gRNA
acagaatcagcaccatcgag

SEQ ID NO: 49878 - DNA, 20 bp, Artificial Sequence
  MKO10049878_A_Slit2
  gRNA
gtcccgagaaacagcagctc

SEQ ID NO: 49879 - DNA, 20 bp, Artificial Sequence
  MKO10049879_A_Slit2
  gRNA
gtgtctcttagggatttgaa

SEQ ID NO: 49880 - DNA, 20 bp, Artificial Sequence
  MKO10049880_A_Slit3
  gRNA
atcccgaggaaggcgttcag

SEQ ID NO: 49881 - DNA, 20 bp, Artificial Sequence
  MKO10049881_A_Slit3
  gRNA
caagtcagcatcatcgagag

SEQ ID NO: 49882 - DNA, 20 bp, Artificial Sequence
  MKO10049882_A_Slit3
  gRNA
acgcctctgaacgccttcct

SEQ ID NO: 49883 - DNA, 20 bp, Artificial Sequence
  MKO10049883_A_Slitrk1
  gRNA
cgcagaccactcgaccgatt

SEQ ID NO: 49884 - DNA, 20 bp, Artificial Sequence
  MKO10049884_A_Slitrk1
  gRNA
cttgcatgagatcgttccgg

SEQ ID NO: 49885 - DNA, 20 bp, Artificial Sequence
  MKO10049885_A_Slitrk1
  gRNA
cccacgccaccgatagcaac

SEQ ID NO: 49886 - DNA, 20 bp, Artificial Sequence
  MKO10049886_A_Slitrk2
  gRNA
ggcctattaccgaaatctgc

SEQ ID NO: 49887 - DNA, 20 bp, Artificial Sequence
  MKO10049887_A_Slitrk2
  gRNA
taaagatgctgagcggcgtt

SEQ ID NO: 49888 - DNA, 20 bp, Artificial Sequence
  MKO10049888_A_Slitrk2
  gRNA
cagataaagtcttcgtaaac

SEQ ID NO: 49889 - DNA, 20 bp, Artificial Sequence
  MKO10049889_A_Slitrk3
  gRNA
gcaacttcttcctacgccga

SEQ ID NO: 49890 - DNA, 20 bp, Artificial Sequence
  MKO10049890_A_Slitrk3
  gRNA
gtgatggttcaccgtcacta

SEQ ID NO: 49891 - DNA, 20 bp, Artificial Sequence
  MKO10049891_A_Slitrk3
  gRNA
atactcgtacacgtgaccca

SEQ ID NO: 49892 - DNA, 20 bp, Artificial Sequence
  MKO10049892_A_Slitrk4
  gRNA
ctttaatgctaccaagtcgc

SEQ ID NO: 49893 - DNA, 20 bp, Artificial Sequence
  MKO10049893_A_Slitrk4
  gRNA
gagttcccccgactacctac

SEQ ID NO: 49894 - DNA, 20 bp, Artificial Sequence
  MKO10049894_A_Slitrk4
  gRNA
gtcctattcgaagtcctcct

SEQ ID NO: 49895 - DNA, 20 bp, Artificial Sequence
  MKO10049895_A_Slitrk5
  gRNA
tgctctcgatcttgcgctct

SEQ ID NO: 49896 - DNA, 20 bp, Artificial Sequence
  MKO10049896_A_Slitrk5
  gRNA
taggtcctctcggggctcga

SEQ ID NO: 49897 - DNA, 20 bp, Artificial Sequence
  MKO10049897_A_Slitrk5
  gRNA
gattgtacctgcgacgtggt

SEQ ID NO: 49898 - DNA, 20 bp, Artificial Sequence
  MKO10049898_A_Slitrk6
  gRNA
cgttgatgtactcacgacca

SEQ ID NO: 49899 - DNA, 20 bp, Artificial Sequence
  MKO10049899_A_Slitrk6
  gRNA
aagagggtctttccgttgta

SEQ ID NO: 49900 - DNA, 20 bp, Artificial Sequence
  MKO10049900_A_Slitrk6
  gRNA
gacaaaaaccacgatccccg

SEQ ID NO: 49901 - DNA, 20 bp, Artificial Sequence
  MKO10049901_A_Slk
  gRNA
acctgaaccccgaagagttt

SEQ ID NO: 49902 - DNA, 20 bp, Artificial Sequence
  MKO10049902_A_Slk
  gRNA
aaggttgttctcgtaataga

SEQ ID NO: 49903 - DNA, 20 bp, Artificial Sequence
  MKO10049903_A_Slk
  gRNA
tttccgtaagatcttcaagt

SEQ ID NO: 49904 - DNA, 20 bp, Artificial Sequence
  MKO10049904_A_Slmap
  gRNA
gtgacggagaatacccggaa

SEQ ID NO: 49905 - DNA, 20 bp, Artificial Sequence
  MKO10049905_A_Slmap
  gRNA
ccgccatgcgaaattctttc

SEQ ID NO: 49906 - DNA, 20 bp, Artificial Sequence
  MKO10049906_A_Slmap
  gRNA
atactcactctgaacgaagt

SEQ ID NO: 49907 - DNA, 20 bp, Artificial Sequence
  MKO10049907_A_Slmo1
  gRNA
cccgatgaacccctgcgtcg

SEQ ID NO: 49908 - DNA, 20 bp, Artificial Sequence
  MKO10049908_A_Slmo1
  gRNA
cgggttagggtacttccgca

SEQ ID NO: 49909 - DNA, 20 bp, Artificial Sequence
  MKO10049909_A_Slmo1
  gRNA
catcaaagagcgctccgtcg

SEQ ID NO: 49910 - DNA, 20 bp, Artificial Sequence
  MKO10049910_A_Slmo2
  gRNA
acgtcgacgccaaccacact

SEQ ID NO: 49911 - DNA, 20 bp, Artificial Sequence
  MKO10049911_A_Slmo2
  gRNA
aaaccccatgaacccgagtg

SEQ ID NO: 49912 - DNA, 20 bp, Artificial Sequence
  MKO10049912_A_Slmo2
  gRNA
agctccattgtcctcgttac

SEQ ID NO: 49913 - DNA, 20 bp, Artificial Sequence
  MKO10049913_A_Sln
  gRNA
gtgaggtcctaccaatactg

SEQ ID NO: 49914 - DNA, 20 bp, Artificial Sequence
  MKO10049914_A_Sln
  gRNA
tcatcaccgttctccttatg

SEQ ID NO: 49915 - DNA, 20 bp, Artificial Sequence
  MKO10049915_A_Sln
  gRNA
gaagatggagaggtctactc

SEQ ID NO: 49916 - DNA, 20 bp, Artificial Sequence
  MKO10049916_A_Slpi
  gRNA
cgtcacactgcccgtccctc

SEQ ID NO: 49917 - DNA, 20 bp, Artificial Sequence
  MKO10049917_A_Slpi
  gRNA
agccacaatgccgtactgac

SEQ ID NO: 49918 - DNA, 20 bp, Artificial Sequence
  MKO10049918_A_Slpi
  gRNA
tggctcacctggtttgcgaa

SEQ ID NO: 49919 - DNA, 20 bp, Artificial Sequence
  MKO10049919_A_Sltm
  gRNA
tctaatgtaggctattgaag

SEQ ID NO: 49920 - DNA, 20 bp, Artificial Sequence
  MKO10049920_A_Sltm
  gRNA
acttacttgagctgttagaa

SEQ ID NO: 49921 - DNA, 20 bp, Artificial Sequence
  MKO10049921_A_Sltm
  gRNA
ctcgtaacaacctttgcctt

SEQ ID NO: 49922 - DNA, 20 bp, Artificial Sequence
  MKO10049922_A_Slu7
  gRNA
gtggtacaagcgaggcgtaa

SEQ ID NO: 49923 - DNA, 20 bp, Artificial Sequence
  MKO10049923_A_Slu7
  gRNA
aatttagctccaacccgcct

SEQ ID NO: 49924 - DNA, 20 bp, Artificial Sequence
  MKO10049924_A_Slu7
  gRNA
ataactaccaagtaccgcaa

SEQ ID NO: 49925 - DNA, 20 bp, Artificial Sequence
  MKO10049925_A_Slurp1
  gRNA
gtcggtggccagacacgagc

SEQ ID NO: 49926 - DNA, 20 bp, Artificial Sequence
  MKO10049926_A_Slurp1
  gRNA
tgggcaacgccaatgccatc

SEQ ID NO: 49927 - DNA, 20 bp, Artificial Sequence
  MKO10049927_A_Slurp1
  gRNA
gctgctcacaggtatagcat

SEQ ID NO: 49928 - DNA, 20 bp, Artificial Sequence
  MKO10049928_A_Slx1b
  gRNA
gcggccccacgtgcgtcagg

SEQ ID NO: 49929 - DNA, 20 bp, Artificial Sequence
  MKO10049929_A_Slx1b
  gRNA
ttcacgccgcctgacgcacg

SEQ ID NO: 49930 - DNA, 20 bp, Artificial Sequence
  MKO10049930_A_Slx1b
  gRNA
cctggttgggcagtgccacg

SEQ ID NO: 49931 - DNA, 20 bp, Artificial Sequence
  MKO10049931_A_Slx4ip
  gRNA
gcagagagttcaccgtctcc

SEQ ID NO: 49932 - DNA, 20 bp, Artificial Sequence
  MKO10049932_A_Slx4ip
  gRNA
ggtgaactctctgcacactc

SEQ ID NO: 49933 - DNA, 20 bp, Artificial Sequence
  MKO10049933_A_Slx4ip
  gRNA
agataccttaccagtattct

SEQ ID NO: 49934 - DNA, 20 bp, Artificial Sequence
  MKO10049934_A_Slx4
  gRNA
aggaacggtttcccacatat

SEQ ID NO: 49935 - DNA, 20 bp, Artificial Sequence
  MKO10049935_A_Slx4
  gRNA
tacaccagttgtcgtgaaac

SEQ ID NO: 49936 - DNA, 20 bp, Artificial Sequence
  MKO10049936_A_Slx4
  gRNA
ccttcctgtttcacgacaac

SEQ ID NO: 49937 - DNA, 20 bp, Artificial Sequence
  MKO10049937_A_Slxl1
  gRNA
agaaaacgtaagtttctcag

SEQ ID NO: 49938 - DNA, 20 bp, Artificial Sequence
  MKO10049938_A_Slxl1
  gRNA
tagagacaccaatagaaaac

SEQ ID NO: 49939 - DNA, 20 bp, Artificial Sequence
  MKO10049939_A_Slxl1
  gRNA
gtatctccaacgatttcttc

SEQ ID NO: 49940 - DNA, 20 bp, Artificial Sequence
  MKO10049940_A_Slx
  gRNA
gtatctccaactactacttc

SEQ ID NO: 49941 - DNA, 20 bp, Artificial Sequence
  MKO10049941_A_Slx
  gRNA
gcaaatcctgaagtagtagt

SEQ ID NO: 49942 - DNA, 20 bp, Artificial Sequence
  MKO10049942_A_Slx
  gRNA
atagtaaagaggccagcatt

SEQ ID NO: 49943 - DNA, 20 bp, Artificial Sequence
  MKO10049943_A_Sly
  gRNA
agtaataagtaaccttcctt

SEQ ID NO: 49944 - DNA, 20 bp, Artificial Sequence
  MKO10049944_A_Sly
  gRNA
ctgagttcttatgagaagaa

SEQ ID NO: 49945 - DNA, 20 bp, Artificial Sequence
  MKO10049945_A_Sly
  gRNA
tcttcatctgcttctgcttg

SEQ ID NO: 49946 - DNA, 20 bp, Artificial Sequence
  MKO10049946_A_Smad1
  gRNA
catacacggtctcgaacccg

SEQ ID NO: 49947 - DNA, 20 bp, Artificial Sequence
  MKO10049947_A_Smad1
  gRNA
cctctcctccaacgtaataa

SEQ ID NO: 49948 - DNA, 20 bp, Artificial Sequence
  MKO10049948_A_Smad1
  gRNA
ctatgagctcaacaaccgtg

SEQ ID NO: 49949 - DNA, 20 bp, Artificial Sequence
  MKO10049949_A_Smad2
  gRNA
gttagaatctccgtgtgccg

SEQ ID NO: 49950 - DNA, 20 bp, Artificial Sequence
  MKO10049950_A_Smad2
  gRNA
tctaacagaactgccgcccc

SEQ ID NO: 49951 - DNA, 20 bp, Artificial Sequence
  MKO10049951_A_Smad2
  gRNA
cttcaggtttcacaccggaa

SEQ ID NO: 49952 - DNA, 20 bp, Artificial Sequence
  MKO10049952_A_Smad3
  gRNA
gctccatggcccgtaattca

SEQ ID NO: 49953 - DNA, 20 bp, Artificial Sequence
  MKO10049953_A_Smad3
  gRNA
acctacctggaatattgctc

SEQ ID NO: 49954 - DNA, 20 bp, Artificial Sequence
  MKO10049954_A_Smad3
  gRNA
gcaggtcgggccatcgccac

SEQ ID NO: 49955 - DNA, 20 bp, Artificial Sequence
  MKO10049955_A_Smad4
  gRNA
gccaagtaatcgcgcatcaa

SEQ ID NO: 49956 - DNA, 20 bp, Artificial Sequence
  MKO10049956_A_Smad4
  gRNA
tccgttgatgcgcgattact

SEQ ID NO: 49957 - DNA, 20 bp, Artificial Sequence
  MKO10049957_A_Smad4
  gRNA
acaacccgctcatagtgata

SEQ ID NO: 49958 - DNA, 20 bp, Artificial Sequence
  MKO10049958_A_Smad5
  gRNA
cttgacaaagctcattcgaa

SEQ ID NO: 49959 - DNA, 20 bp, Artificial Sequence
  MKO10049959_A_Smad5
  gRNA
ggtgttcatctatactacgt

SEQ ID NO: 49960 - DNA, 20 bp, Artificial Sequence
  MKO10049960_A_Smad5
  gRNA
ggattgaattcattgtgacg

SEQ ID NO: 49961 - DNA, 20 bp, Artificial Sequence
  MKO10049961_A_Smad6
  gRNA
ctaccgagcggacttcggag

SEQ ID NO: 49962 - DNA, 20 bp, Artificial Sequence
  MKO10049962_A_Smad6
  gRNA
gcgactttggcgaagtcgtg

SEQ ID NO: 49963 - DNA, 20 bp, Artificial Sequence
  MKO10049963_A_Smad6
  gRNA
cttcgtcaactccccgacgc

SEQ ID NO: 49964 - DNA, 20 bp, Artificial Sequence
  MKO10049964_A_Smad7
  gRNA
ccaaacgatctgcgctcgtc

SEQ ID NO: 49965 - DNA, 20 bp, Artificial Sequence
  MKO10049965_A_Smad7
  gRNA
tgtccgaattgagctgtccg

SEQ ID NO: 49966 - DNA, 20 bp, Artificial Sequence
  MKO10049966_A_Smad7
  gRNA
gagcgccttcagatccgcct

SEQ ID NO: 49967 - DNA, 20 bp, Artificial Sequence
  MKO10049967_A_Smad9
  gRNA
gtctatgagcacgctccgcg

SEQ ID NO: 49968 - DNA, 20 bp, Artificial Sequence
  MKO10049968_A_Smad9
  gRNA
tcaccgacccttccaataac

SEQ ID NO: 49969 - DNA, 20 bp, Artificial Sequence
  MKO10049969_A_Smad9
  gRNA
tgacgaagatgtgcacgatt

SEQ ID NO: 49970 - DNA, 20 bp, Artificial Sequence
  MKO10049970_A_Smagp
  gRNA
acctgcaatgagcgctgtgc

SEQ ID NO: 49971 - DNA, 20 bp, Artificial Sequence
  MKO10049971_A_Smagp
  gRNA
cttccaagttgttatcaccg

SEQ ID NO: 49972 - DNA, 20 bp, Artificial Sequence
  MKO10049972_A_Smagp
  gRNA
cccagaattgatgaccacgc

SEQ ID NO: 49973 - DNA, 20 bp, Artificial Sequence
  MKO10049973_A_Smap1
  gRNA
tccttaattaggtccccgat

SEQ ID NO: 49974 - DNA, 20 bp, Artificial Sequence
  MKO10049974_A_Smap1
  gRNA
atgtttacctgtatctgttc

SEQ ID NO: 49975 - DNA, 20 bp, Artificial Sequence
  MKO10049975_A_Smap1
  gRNA
tcgaaagttctctggaagat

SEQ ID NO: 49976 - DNA, 20 bp, Artificial Sequence
  MKO10049976_A_Smap2
  gRNA
gatgaacaccccgatgttcc

SEQ ID NO: 49977 - DNA, 20 bp, Artificial Sequence
  MKO10049977_A_Smap2
  gRNA
acgagggaatgaacccgctc

SEQ ID NO: 49978 - DNA, 20 bp, Artificial Sequence
  MKO10049978_A_Smap2
  gRNA
tcggggtgttcatctgcatt

SEQ ID NO: 49979 - DNA, 20 bp, Artificial Sequence
  MKO10049979_A_Smarca1
  gRNA
tttcacctagctatcgccac

SEQ ID NO: 49980 - DNA, 20 bp, Artificial Sequence
  MKO10049980_A_Smarca1
  gRNA
aagcagagcttgatttccgt

SEQ ID NO: 49981 - DNA, 20 bp, Artificial Sequence
  MKO10049981_A_Smarca1
  gRNA
cgagccagtttcatgttgag

SEQ ID NO: 49982 - DNA, 20 bp, Artificial Sequence
  MKO10049982_A_Smarca2
  gRNA
ggctccgatacttatgatta

SEQ ID NO: 49983 - DNA, 20 bp, Artificial Sequence
  MKO10049983_A_Smarca2
  gRNA
gaagcatgacgtctttctcc

SEQ ID NO: 49984 - DNA, 20 bp, Artificial Sequence
  MKO10049984_A_Smarca2
  gRNA
gaaaagaagaggccgccctc

SEQ ID NO: 49985 - DNA, 20 bp, Artificial Sequence
  MKO10049985_A_Smarca4
  gRNA
ccaccctcagtgtccgccac

SEQ ID NO: 49986 - DNA, 20 bp, Artificial Sequence
  MKO10049986_A_Smarca4
  gRNA
aggcatgttcagagccgccg

SEQ ID NO: 49987 - DNA, 20 bp, Artificial Sequence
  MKO10049987_A_Smarca4
  gRNA
tatggagtccatgcacgaga

SEQ ID NO: 49988 - DNA, 20 bp, Artificial Sequence
  MKO10049988_A_Smarca5
  gRNA
cagttaccgacaccgtagaa

SEQ ID NO: 49989 - DNA, 20 bp, Artificial Sequence
  MKO10049989_A_Smarca5
  gRNA
taccaggaagtatttgatca

SEQ ID NO: 49990 - DNA, 20 bp, Artificial Sequence
  MKO10049990_A_Smarca5
  gRNA
tacataccatttcatctgca

SEQ ID NO: 49991 - DNA, 20 bp, Artificial Sequence
  MKO10049991_A_Smarcad1
  gRNA
tcacttacacggtcccctcg

SEQ ID NO: 49992 - DNA, 20 bp, Artificial Sequence
  MKO10049992_A_Smarcad1
  gRNA
cagtctgtaaaacagccgcg

SEQ ID NO: 49993 - DNA, 20 bp, Artificial Sequence
  MKO10049993_A_Smarcad1
  gRNA
tcatttcttcgtgtaacaga

SEQ ID NO: 49994 - DNA, 20 bp, Artificial Sequence
  MKO10049994_A_Smarcal1
  gRNA
catctctcgagtccgcttcg

SEQ ID NO: 49995 - DNA, 20 bp, Artificial Sequence
  MKO10049995_A_Smarcal1
  gRNA
tgacatcggctattcggagg

SEQ ID NO: 49996 - DNA, 20 bp, Artificial Sequence
  MKO10049996_A_Smarcal1
  gRNA
actccggaaaggtccgcttc

SEQ ID NO: 49997 - DNA, 20 bp, Artificial Sequence
  MKO10049997_A_Smarcb1
  gRNA
aactacctgcgtatgttccg

SEQ ID NO: 49998 - DNA, 20 bp, Artificial Sequence
  MKO10049998_A_Smarcb1
  gRNA
ctagtcgccgccagagtgag

SEQ ID NO: 49999 - DNA, 20 bp, Artificial Sequence
  MKO10049999_A_Smarcb1
  gRNA
gacggggagttctacatgat

SEQ ID NO: 50000 - DNA, 20 bp, Artificial Sequence
  MKO10050000_A_Smarcc1
  gRNA
tttcaacgttacgatccatt

SEQ ID NO: 50001 - DNA, 20 bp, Artificial Sequence
  MKO10050001_A_Smarcc1
  gRNA
tcttcagaacccatcccgaa

SEQ ID NO: 50002 - DNA, 20 bp, Artificial Sequence
  MKO10050002_A_Smarcc1
  gRNA
cctaccaataaaacactagc

SEQ ID NO: 50003 - DNA, 20 bp, Artificial Sequence
  MKO10050003_A_Smarcc2
  gRNA
agagccgcacgttgtcgaac

SEQ ID NO: 50004 - DNA, 20 bp, Artificial Sequence
  MKO10050004_A_Smarcc2
  gRNA
cgcaccgcttactaaactgc

SEQ ID NO: 50005 - DNA, 20 bp, Artificial Sequence
  MKO10050005_A_Smarcc2
  gRNA
ggcctcgtagtacttcacgt

SEQ ID NO: 50006 - DNA, 20 bp, Artificial Sequence
  MKO10050006_A_Smarcd1
  gRNA
ctaagtcggacgcggaggat

SEQ ID NO: 50007 - DNA, 20 bp, Artificial Sequence
  MKO10050007_A_Smarcd1
  gRNA
tcctccgcgtccgacttagc

SEQ ID NO: 50008 - DNA, 20 bp, Artificial Sequence
  MKO10050008_A_Smarcd1
  gRNA
gccgcttcctcataatagtc

SEQ ID NO: 50009 - DNA, 20 bp, Artificial Sequence
  MKO10050009_A_Smarcd2
  gRNA
ctccatccgcttgcgagcga

SEQ ID NO: 50010 - DNA, 20 bp, Artificial Sequence
  MKO10050010_A_Smarcd2
  gRNA
aataggcttaccctcggcgc

SEQ ID NO: 50011 - DNA, 20 bp, Artificial Sequence
  MKO10050011_A_Smarcd2
  gRNA
accagaccatcgctcgcaag

SEQ ID NO: 50012 - DNA, 20 bp, Artificial Sequence
  MKO10050012_A_Smarcd3
  gRNA
actcacctgcggctccgcgc

SEQ ID NO: 50013 - DNA, 20 bp, Artificial Sequence
  MKO10050013_A_Smarcd3
  gRNA
cagcgccccgggatgccgtc

SEQ ID NO: 50014 - DNA, 20 bp, Artificial Sequence
  MKO10050014_A_Smarcd3
  gRNA
gtccacccgcttccgcatga

SEQ ID NO: 50015 - DNA, 20 bp, Artificial Sequence
  MKO10050015_A_Smarce1
  gRNA
tcctaccgtgacccggctgt

SEQ ID NO: 50016 - DNA, 20 bp, Artificial Sequence
  MKO10050016_A_Smarce1
  gRNA
aaacttactgttgcaggagc

SEQ ID NO: 50017 - DNA, 20 bp, Artificial Sequence
  MKO10050017_A_Smarce1
  gRNA
cagcaaatgcccagcacacc

SEQ ID NO: 50018 - DNA, 20 bp, Artificial Sequence
  MKO10050018_A_Smc1a
  gRNA
ggaccgctatcagcgcctga

SEQ ID NO: 50019 - DNA, 20 bp, Artificial Sequence
  MKO10050019_A_Smc1a
  gRNA
tttgaagaaattagtcgctc

SEQ ID NO: 50020 - DNA, 20 bp, Artificial Sequence
  MKO10050020_A_Smc1a
  gRNA
tcgtaacttcctcgtcttcc

SEQ ID NO: 50021 - DNA, 20 bp, Artificial Sequence
  MKO10050021_A_Smc1b
  gRNA
tacatacacagaacgactca

SEQ ID NO: 50022 - DNA, 20 bp, Artificial Sequence
  MKO10050022_A_Smc1b
  gRNA
gggtgctcagaatatcattt

SEQ ID NO: 50023 - DNA, 20 bp, Artificial Sequence
  MKO10050023_A_Smc1b
  gRNA
tccaggaaaatctaatgtaa

SEQ ID NO: 50024 - DNA, 20 bp, Artificial Sequence
  MKO10050024_A_Smc2
  gRNA
tgacaaaaagcagagtccgt

SEQ ID NO: 50025 - DNA, 20 bp, Artificial Sequence
  MKO10050025_A_Smc2
  gRNA
tcatgagcttcaaatcccaa

SEQ ID NO: 50026 - DNA, 20 bp, Artificial Sequence
  MKO10050026_A_Smc2
  gRNA
ccctcactttctcatcatgc

SEQ ID NO: 50027 - DNA, 20 bp, Artificial Sequence
  MKO10050027_A_Smc3
  gRNA
tcttcgtccagagcagcgat

SEQ ID NO: 50028 - DNA, 20 bp, Artificial Sequence
  MKO10050028_A_Smc3
  gRNA
cttaccgatgacattatgtt

SEQ ID NO: 50029 - DNA, 20 bp, Artificial Sequence
  MKO10050029_A_Smc3
  gRNA
aacaaagccaatcgctgctc

SEQ ID NO: 50030 - DNA, 20 bp, Artificial Sequence
  MKO10050030_A_Smc4
  gRNA
gcaggcagtaccttatggaa

SEQ ID NO: 50031 - DNA, 20 bp, Artificial Sequence
  MKO10050031_A_Smc4
  gRNA
atatgagttatcatgagacg

SEQ ID NO: 50032 - DNA, 20 bp, Artificial Sequence
  MKO10050032_A_Smc4
  gRNA
ctccgacacaagactttaat

SEQ ID NO: 50033 - DNA, 20 bp, Artificial Sequence
  MKO10050033_A_Smc5
  gRNA
gcctgcgagtccgaggcaaa

SEQ ID NO: 50034 - DNA, 20 bp, Artificial Sequence
  MKO10050034_A_Smc5
  gRNA
atcgtgtgtgccatttgcct

SEQ ID NO: 50035 - DNA, 20 bp, Artificial Sequence
  MKO10050035_A_Smc5
  gRNA
attgcccacttggatgttta

SEQ ID NO: 50036 - DNA, 20 bp, Artificial Sequence
  MKO10050036_A_Smc6
  gRNA
tgtgcagcaacacattagcg

SEQ ID NO: 50037 - DNA, 20 bp, Artificial Sequence
  MKO10050037_A_Smc6
  gRNA
caggcaccgtggtttctact

SEQ ID NO: 50038 - DNA, 20 bp, Artificial Sequence
  MKO10050038_A_Smc6
  gRNA
accaagaccaactatgagtg

SEQ ID NO: 50039 - DNA, 20 bp, Artificial Sequence
  MKO10050039_A_Smchd1
  gRNA
ttatctaccactgcgacagc

SEQ ID NO: 50040 - DNA, 20 bp, Artificial Sequence
  MKO10050040_A_Smchd1
  gRNA
gctgtcgcagtggtagataa

SEQ ID NO: 50041 - DNA, 20 bp, Artificial Sequence
  MKO10050041_A_Smchd1
  gRNA
tcgtcgccgtcagtagtgac

SEQ ID NO: 50042 - DNA, 20 bp, Artificial Sequence
  MKO10050042_A_Smco1
  gRNA
gatgtacatccgtcttacgt

SEQ ID NO: 50043 - DNA, 20 bp, Artificial Sequence
  MKO10050043_A_Smco1
  gRNA
actatgctgccaacgtaaga

SEQ ID NO: 50044 - DNA, 20 bp, Artificial Sequence
  MKO10050044_A_Smco1
  gRNA
tcgaagcgtcagattatcct

SEQ ID NO: 50045 - DNA, 20 bp, Artificial Sequence
  MKO10050045_A_Smco2
  gRNA
tgtttgtagcttgctaaccg

SEQ ID NO: 50046 - DNA, 20 bp, Artificial Sequence
  MKO10050046_A_Smco2
  gRNA
agccgaccacggtgactggt

SEQ ID NO: 50047 - DNA, 20 bp, Artificial Sequence
  MKO10050047_A_Smco2
  gRNA
cggctccgagttctttcatt

SEQ ID NO: 50048 - DNA, 20 bp, Artificial Sequence
  MKO10050048_A_Smco3
  gRNA
gaagattgccatcgtgcaga

SEQ ID NO: 50049 - DNA, 20 bp, Artificial Sequence
  MKO10050049_A_Smco3
  gRNA
gtaccatcatgctatcactg

SEQ ID NO: 50050 - DNA, 20 bp, Artificial Sequence
  MKO10050050_A_Smco3
  gRNA
agaaatgaccttctgcacga

SEQ ID NO: 50051 - DNA, 20 bp, Artificial Sequence
  MKO10050051_A_Smco4
  gRNA
acaaagatgcgtcaactcaa

SEQ ID NO: 50052 - DNA, 20 bp, Artificial Sequence
  MKO10050052_A_Smco4
  gRNA
tggacgtgctcactcggtga

SEQ ID NO: 50053 - DNA, 20 bp, Artificial Sequence
  MKO10050053_A_Smco4
  gRNA
gcggcagcagatcaccactg

SEQ ID NO: 50054 - DNA, 20 bp, Artificial Sequence
  MKO10050054_A_Smcp
  gRNA
taccatttcgacctaactgt

SEQ ID NO: 50055 - DNA, 20 bp, Artificial Sequence
  MKO10050055_A_Smcp
  gRNA
aatggtagcttatggttgag

SEQ ID NO: 50056 - DNA, 20 bp, Artificial Sequence
  MKO10050056_A_Smcp
  gRNA
ttaacaccgagaatcaagta

SEQ ID NO: 50057 - DNA, 20 bp, Artificial Sequence
  MKO10050057_A_Smcr8
  gRNA
ccacctcaccttgtacgacc

SEQ ID NO: 50058 - DNA, 20 bp, Artificial Sequence
  MKO10050058_A_Smcr8
  gRNA
cctaaagtgttaattagcgt

SEQ ID NO: 50059 - DNA, 20 bp, Artificial Sequence
  MKO10050059_A_Smcr8
  gRNA
ccctacgctgtcccctatac

SEQ ID NO: 50060 - DNA, 20 bp, Artificial Sequence
  MKO10050060_A_Smdt1
  gRNA
gtctcagccaggtaccgtcg

SEQ ID NO: 50061 - DNA, 20 bp, Artificial Sequence
  MKO10050061_A_Smdt1
  gRNA
tggcgatgtctacaccgtac

SEQ ID NO: 50062 - DNA, 20 bp, Artificial Sequence
  MKO10050062_A_Smdt1
  gRNA
gagtgtcccgacatagagaa

SEQ ID NO: 50063 - DNA, 20 bp, Artificial Sequence
  MKO10050063_A_Smek1
  gRNA
gcacgatgaccgacacccga

SEQ ID NO: 50064 - DNA, 20 bp, Artificial Sequence
  MKO10050064_A_Smek1
  gRNA
cgctctccgccctgacgagc

SEQ ID NO: 50065 - DNA, 20 bp, Artificial Sequence
  MKO10050065_A_Smek1
  gRNA
ctagtgcgagtttctcacgt

SEQ ID NO: 50066 - DNA, 20 bp, Artificial Sequence
  MKO10050066_A_Smek2
  gRNA
cttagttccgaatctgttat

SEQ ID NO: 50067 - DNA, 20 bp, Artificial Sequence
  MKO10050067_A_Smek2
  gRNA
ttctctcctcacctatccgt

SEQ ID NO: 50068 - DNA, 20 bp, Artificial Sequence
  MKO10050068_A_Smek2
  gRNA
agaagctgaaaactatgatc

SEQ ID NO: 50069 - DNA, 20 bp, Artificial Sequence
  MKO10050069_A_Smg1
  gRNA
ctcgactgtcgaatcttctt

SEQ ID NO: 50070 - DNA, 20 bp, Artificial Sequence
  MKO10050070_A_Smg1
  gRNA
acgactgccatgctgaacac

SEQ ID NO: 50071 - DNA, 20 bp, Artificial Sequence
  MKO10050071_A_Smg1
  gRNA
caaaggcacgatgataccag

SEQ ID NO: 50072 - DNA, 20 bp, Artificial Sequence
  MKO10050072_A_Smg5
  gRNA
aaccagagaacgttagcctg

SEQ ID NO: 50073 - DNA, 20 bp, Artificial Sequence
  MKO10050073_A_Smg5
  gRNA
gcaccttggaatgtgcctac

SEQ ID NO: 50074 - DNA, 20 bp, Artificial Sequence
  MKO10050074_A_Smg5
  gRNA
actcatctggtcgctggcat

SEQ ID NO: 50075 - DNA, 20 bp, Artificial Sequence
  MKO10050075_A_Smg6
  gRNA
gaggcactacccgccgacta

SEQ ID NO: 50076 - DNA, 20 bp, Artificial Sequence
  MKO10050076_A_Smg6
  gRNA
tggcccgatcctggcgccgc

SEQ ID NO: 50077 - DNA, 20 bp, Artificial Sequence
  MKO10050077_A_Smg6
  gRNA
cccatagtttgctgtatcgt

SEQ ID NO: 50078 - DNA, 20 bp, Artificial Sequence
  MKO10050078_A_Smg7
  gRNA
agctagcggcttctatactc

SEQ ID NO: 50079 - DNA, 20 bp, Artificial Sequence
  MKO10050079_A_Smg7
  gRNA
gaaaatgctagttactgatc

SEQ ID NO: 50080 - DNA, 20 bp, Artificial Sequence
  MKO10050080_A_Smg7
  gRNA
gcctggacttcacttcgatt

SEQ ID NO: 50081 - DNA, 20 bp, Artificial Sequence
  MKO10050081_A_Smg8
  gRNA
gcgggcaccaacaacgattc

SEQ ID NO: 50082 - DNA, 20 bp, Artificial Sequence
  MKO10050082_A_Smg8
  gRNA
agacgaccccttcgatatca

SEQ ID NO: 50083 - DNA, 20 bp, Artificial Sequence
  MKO10050083_A_Smg8
  gRNA
cgcgtttcccccgccttcag

SEQ ID NO: 50084 - DNA, 20 bp, Artificial Sequence
  MKO10050084_A_Smg9
  gRNA
tttctgcatgacgttagtgc

SEQ ID NO: 50085 - DNA, 20 bp, Artificial Sequence
  MKO10050085_A_Smg9
  gRNA
atgctgtgcttcatgcgctc

SEQ ID NO: 50086 - DNA, 20 bp, Artificial Sequence
  MKO10050086_A_Smg9
  gRNA
tccacactcacccgctcagc

SEQ ID NO: 50087 - DNA, 20 bp, Artificial Sequence
  MKO10050087_A_Smgc
  gRNA
cggtagaatacctcctactc

SEQ ID NO: 50088 - DNA, 20 bp, Artificial Sequence
  MKO10050088_A_Smgc
  gRNA
agactctcatttgaccgcct

SEQ ID NO: 50089 - DNA, 20 bp, Artificial Sequence
  MKO10050089_A_Smgc
  gRNA
ctgaatgtgaatccgttaag

SEQ ID NO: 50090 - DNA, 20 bp, Artificial Sequence
  MKO10050090_A_Smim11
  gRNA
cgggcgtgaaaatgtaccaa

SEQ ID NO: 50091 - DNA, 20 bp, Artificial Sequence
  MKO10050091_A_Smim11
  gRNA
gcccctgctgctgtatatcc

SEQ ID NO: 50092 - DNA, 20 bp, Artificial Sequence
  MKO10050092_A_Smim11
  gRNA
tattctcaccttccagttca

SEQ ID NO: 50093 - DNA, 20 bp, Artificial Sequence
  MKO10050093_A_Smim12
  gRNA
gagcatcctggagcgccgag

SEQ ID NO: 50094 - DNA, 20 bp, Artificial Sequence
  MKO10050094_A_Smim12
  gRNA
gcccacagccccgaccacaa

SEQ ID NO: 50095 - DNA, 20 bp, Artificial Sequence
  MKO10050095_A_Smim12
  gRNA
cggggctgtgggctaccacc

SEQ ID NO: 50096 - DNA, 20 bp, Artificial Sequence
  MKO10050096_A_Smim13
  gRNA
gctcagtggccggcgtcaac

SEQ ID NO: 50097 - DNA, 20 bp, Artificial Sequence
  MKO10050097_A_Smim13
  gRNA
tctcaaaatgtggcacaacg

SEQ ID NO: 50098 - DNA, 20 bp, Artificial Sequence
  MKO10050098_A_Smim13
  gRNA
gcgtggccacgaacaccagc

SEQ ID NO: 50099 - DNA, 20 bp, Artificial Sequence
  MKO10050099_A_Smim14
  gRNA
gcaccgacacagagtgcctt

SEQ ID NO: 50100 - DNA, 20 bp, Artificial Sequence
  MKO10050100_A_Smim14
  gRNA
acaccaggacgttagtccac

SEQ ID NO: 50101 - DNA, 20 bp, Artificial Sequence
  MKO10050101_A_Smim14
  gRNA
gctctcacgaacatgctatg

SEQ ID NO: 50102 - DNA, 20 bp, Artificial Sequence
  MKO10050102_A_Smim15
  gRNA
tgtgagcgccaagataactg

SEQ ID NO: 50103 - DNA, 20 bp, Artificial Sequence
  MKO10050103_A_Smim15
  gRNA
tagctagtgctgtactgtcc

SEQ ID NO: 50104 - DNA, 20 bp, Artificial Sequence
  MKO10050104_A_Smim15
  gRNA
tgcaaagatgcttgacataa

SEQ ID NO: 50105 - DNA, 20 bp, Artificial Sequence
  MKO10050105_A_Smim18
  gRNA
aggtggtggtttcgttccag

SEQ ID NO: 50106 - DNA, 20 bp, Artificial Sequence
  MKO10050106_A_Smim18
  gRNA
ccaggatggcttctggccgc

SEQ ID NO: 50107 - DNA, 20 bp, Artificial Sequence
  MKO10050107_A_Smim18
  gRNA
catcagaaaacgtgacagtg

SEQ ID NO: 50108 - DNA, 20 bp, Artificial Sequence
  MKO10050108_A_Smim19
  gRNA
gttcccatggccggaagtta

SEQ ID NO: 50109 - DNA, 20 bp, Artificial Sequence
  MKO10050109_A_Smim19
  gRNA
agccatcacaccataacttc

SEQ ID NO: 50110 - DNA, 20 bp, Artificial Sequence
  MKO10050110_A_Smim19
  gRNA
aattcgcttaagacaacaag

SEQ ID NO: 50111 - DNA, 20 bp, Artificial Sequence
  MKO10050111_A_Smim1
  gRNA
tgtagtgaacaccactctcc

SEQ ID NO: 50112 - DNA, 20 bp, Artificial Sequence
  MKO10050112_A_Smim1
  gRNA
aagaagcctcatgctatagg

SEQ ID NO: 50113 - DNA, 20 bp, Artificial Sequence
  MKO10050113_A_Smim1
  gRNA
caagctggggatagccatga

SEQ ID NO: 50114 - DNA, 20 bp, Artificial Sequence
  MKO10050114_A_Smim20
  gRNA
ctgcgcaccgcgctcatatt

SEQ ID NO: 50115 - DNA, 20 bp, Artificial Sequence
  MKO10050115_A_Smim20
  gRNA
gaagcctccgaatatgagcg

SEQ ID NO: 50116 - DNA, 20 bp, Artificial Sequence
  MKO10050116_A_Smim20
  gRNA
ctggcggttgcacatcttcc

SEQ ID NO: 50117 - DNA, 20 bp, Artificial Sequence
  MKO10050117_A_Smim22
  gRNA
cagcgacgtcccattccgac

SEQ ID NO: 50118 - DNA, 20 bp, Artificial Sequence
  MKO10050118_A_Smim22
  gRNA
atgggacgtcgctgcctttg

SEQ ID NO: 50119 - DNA, 20 bp, Artificial Sequence
  MKO10050119_A_Smim22
  gRNA
ccggaaggtgagccccggga

SEQ ID NO: 50120 - DNA, 20 bp, Artificial Sequence
  MKO10050120_A_Smim3
  gRNA
cggtcatcatctatcgaatg

SEQ ID NO: 50121 - DNA, 20 bp, Artificial Sequence
  MKO10050121_A_Smim3
  gRNA
tcgatagatgatgaccgcag

SEQ ID NO: 50122 - DNA, 20 bp, Artificial Sequence
  MKO10050122_A_Smim3
  gRNA
caggcagccccgttgagaac

SEQ ID NO: 50123 - DNA, 20 bp, Artificial Sequence
  MKO10050123_A_Smim5
  gRNA
tgtactgggacacctcttcg

SEQ ID NO: 50124 - DNA, 20 bp, Artificial Sequence
  MKO10050124_A_Smim5
  gRNA
tgaagtgcgggacccttaaa

SEQ ID NO: 50125 - DNA, 20 bp, Artificial Sequence
  MKO10050125_A_Smim5
  gRNA
cgagctccacgggctccgcc

SEQ ID NO: 50126 - DNA, 20 bp, Artificial Sequence
  MKO10050126_A_Smim6
  gRNA
cagcaaataagacgaagagc

SEQ ID NO: 50127 - DNA, 20 bp, Artificial Sequence
  MKO10050127_A_Smim6
  gRNA
ccagatttccatgggccaaa

SEQ ID NO: 50128 - DNA, 20 bp, Artificial Sequence
  MKO10050128_A_Smim6
  gRNA
tgaacaagccaatcactgtc

SEQ ID NO: 50129 - DNA, 20 bp, Artificial Sequence
  MKO10050129_A_Smim7
  gRNA
tccggatcttcatcgcactg

SEQ ID NO: 50130 - DNA, 20 bp, Artificial Sequence
  MKO10050130_A_Smim7
  gRNA
aggacgctactgatgaacgc

SEQ ID NO: 50131 - DNA, 20 bp, Artificial Sequence
  MKO10050131_A_Smim7
  gRNA
tccacagtgcgatgaagatc

SEQ ID NO: 50132 - DNA, 20 bp, Artificial Sequence
  MKO10050132_A_Smim8
  gRNA
attcacagctcgaaataagg

SEQ ID NO: 50133 - DNA, 20 bp, Artificial Sequence
  MKO10050133_A_Smim8
  gRNA
gtgtgcgcccctcggaggcc

SEQ ID NO: 50134 - DNA, 20 bp, Artificial Sequence
  MKO10050134_A_Smim8
  gRNA
ggtaaccctttcactttgtg

SEQ ID NO: 50135 - DNA, 20 bp, Artificial Sequence
  MKO10050135_A_Smim9
  gRNA
gacatcaacagacaagtctc

SEQ ID NO: 50136 - DNA, 20 bp, Artificial Sequence
  MKO10050136_A_Smim9
  gRNA
tcaattgtccattgtctatg

SEQ ID NO: 50137 - DNA, 20 bp, Artificial Sequence
  MKO10050137_A_Smim9
  gRNA
gcagaatatgaatctaatca

SEQ ID NO: 50138 - DNA, 20 bp, Artificial Sequence
  MKO10050138_A_Smlr1
  gRNA
ggggaccatgagctccgtgc

SEQ ID NO: 50139 - DNA, 20 bp, Artificial Sequence
  MKO10050139_A_Smlr1
  gRNA
cttccctgcgcaagagaatg

SEQ ID NO: 50140 - DNA, 20 bp, Artificial Sequence
  MKO10050140_A_Smlr1
  gRNA
ttcacctcattctcttgcgc

SEQ ID NO: 50141 - DNA, 20 bp, Artificial Sequence
  MKO10050141_A_Smn1
  gRNA
tcaatggacgtaatagtagc

SEQ ID NO: 50142 - DNA, 20 bp, Artificial Sequence
  MKO10050142_A_Smn1
  gRNA
tccagtataaaccacgacac

SEQ ID NO: 50143 - DNA, 20 bp, Artificial Sequence
  MKO10050143_A_Smn1
  gRNA
gcaagtccaaagctgctccg

SEQ ID NO: 50144 - DNA, 20 bp, Artificial Sequence
  MKO10050144_A_Smndc1
  gRNA
gagcttgcgagcgtctccga

SEQ ID NO: 50145 - DNA, 20 bp, Artificial Sequence
  MKO10050145_A_Smndc1
  gRNA
tctttacaggtgttacgaag

SEQ ID NO: 50146 - DNA, 20 bp, Artificial Sequence
  MKO10050146_A_Smndc1
  gRNA
gggacaagtgcatggccgtg

SEQ ID NO: 50147 - DNA, 20 bp, Artificial Sequence
  MKO10050147_A_Smoc1
  gRNA
gtccatcgaggtcgatgcaa

SEQ ID NO: 50148 - DNA, 20 bp, Artificial Sequence
  MKO10050148_A_Smoc1
  gRNA
cgtgagcagacggacgcgcg

SEQ ID NO: 50149 - DNA, 20 bp, Artificial Sequence
  MKO10050149_A_Smoc1
  gRNA
cacctttgcatcgacctcga

SEQ ID NO: 50150 - DNA, 20 bp, Artificial Sequence
  MKO10050150_A_Smoc2
  gRNA
gtgccgtcatcattgcattc

SEQ ID NO: 50151 - DNA, 20 bp, Artificial Sequence
  MKO10050151_A_Smoc2
  gRNA
gctcaccgtgggaattgcaa

SEQ ID NO: 50152 - DNA, 20 bp, Artificial Sequence
  MKO10050152_A_Smoc2
  gRNA
gtcagacctaccggggcacc

SEQ ID NO: 50153 - DNA, 20 bp, Artificial Sequence
  MKO10050153_A_Smok2a
  gRNA
ttgcaccaatactccctctt

SEQ ID NO: 50154 - DNA, 20 bp, Artificial Sequence
  MKO10050154_A_Smok2a
  gRNA
catgctcaatatgagatgct

SEQ ID NO: 50155 - DNA, 20 bp, Artificial Sequence
  MKO10050155_A_Smok2a
  gRNA
gtgcaaacctctcatgtctg

SEQ ID NO: 50156 - DNA, 20 bp, Artificial Sequence
  MKO10050156_A_Smok2b
  gRNA
tcgcctcacaggctcccatg

SEQ ID NO: 50157 - DNA, 20 bp, Artificial Sequence
  MKO10050157_A_Smok2b
  gRNA
aggctgctccaaggtgatgc

SEQ ID NO: 50158 - DNA, 20 bp, Artificial Sequence
  MKO10050158_A_Smok2b
  gRNA
tatttgcgtgtgagtacctt

SEQ ID NO: 50159 - DNA, 20 bp, Artificial Sequence
  MKO10050159_A_Smok3a
  gRNA
ggttacctcaaatgggccct

SEQ ID NO: 50160 - DNA, 20 bp, Artificial Sequence
  MKO10050160_A_Smok3a
  gRNA
ctctcctgcgaagtccgaga

SEQ ID NO: 50161 - DNA, 20 bp, Artificial Sequence
  MKO10050161_A_Smok3a
  gRNA
tatgaactactgccacaacc

SEQ ID NO: 50162 - DNA, 20 bp, Artificial Sequence
  MKO10050162_A_Smok3b
  gRNA
ggttacctcaaatgggccct

SEQ ID NO: 50163 - DNA, 20 bp, Artificial Sequence
  MKO10050163_A_Smok3b
  gRNA
ctctcctgcgaagtccgaga

SEQ ID NO: 50164 - DNA, 20 bp, Artificial Sequence
  MKO10050164_A_Smok3b
  gRNA
tatgaactactgccacaacc

SEQ ID NO: 50165 - DNA, 20 bp, Artificial Sequence
  MKO10050165_A_Smox
  gRNA
ctcggtacatctcgatgagc

SEQ ID NO: 50166 - DNA, 20 bp, Artificial Sequence
  MKO10050166_A_Smox
  gRNA
tgcggcagccacggttggta

SEQ ID NO: 50167 - DNA, 20 bp, Artificial Sequence
  MKO10050167_A_Smox
  gRNA
gtcatccgcactgtcgccac

SEQ ID NO: 50168 - DNA, 20 bp, Artificial Sequence
  MKO10050168_A_Smo
  gRNA
tccggaatgccccccgctgc

SEQ ID NO: 50169 - DNA, 20 bp, Artificial Sequence
  MKO10050169_A_Smo
  gRNA
tgtcaatgcgtgtttcttcg

SEQ ID NO: 50170 - DNA, 20 bp, Artificial Sequence
  MKO10050170_A_Smo
  gRNA
gagaccagtgaccgccccga

SEQ ID NO: 50171 - DNA, 20 bp, Artificial Sequence
  MKO10050171_A_Smpd1
  gRNA
gtaagtaccttagggtgtga

SEQ ID NO: 50172 - DNA, 20 bp, Artificial Sequence
  MKO10050172_A_Smpd1
  gRNA
agagcctacccgtgccacat

SEQ ID NO: 50173 - DNA, 20 bp, Artificial Sequence
  MKO10050173_A_Smpd1
  gRNA
acctttatcaaccttaaccc

SEQ ID NO: 50174 - DNA, 20 bp, Artificial Sequence
  MKO10050174_A_Smpd2
  gRNA
gcggaccgcatgaagcgctt

SEQ ID NO: 50175 - DNA, 20 bp, Artificial Sequence
  MKO10050175_A_Smpd2
  gRNA
cgccctatgtttgctcaggt

SEQ ID NO: 50176 - DNA, 20 bp, Artificial Sequence
  MKO10050176_A_Smpd2
  gRNA
gttctccaaacacccaatcc

SEQ ID NO: 50177 - DNA, 20 bp, Artificial Sequence
  MKO10050177_A_Smpd3
  gRNA
cacaaacggtctctatgatg

SEQ ID NO: 50178 - DNA, 20 bp, Artificial Sequence
  MKO10050178_A_Smpd3
  gRNA
agagaccgtttgtgtccagc

SEQ ID NO: 50179 - DNA, 20 bp, Artificial Sequence
  MKO10050179_A_Smpd3
  gRNA
cgatgtacccaacaattctt

SEQ ID NO: 50180 - DNA, 20 bp, Artificial Sequence
  MKO10050180_A_Smpd4
  gRNA
ttggaatctccgatgcctac

SEQ ID NO: 50181 - DNA, 20 bp, Artificial Sequence
  MKO10050181_A_Smpd4
  gRNA
atcgctgtgctgtactccac

SEQ ID NO: 50182 - DNA, 20 bp, Artificial Sequence
  MKO10050182_A_Smpd4
  gRNA
tgcacaacgttgccaagatt

SEQ ID NO: 50183 - DNA, 20 bp, Artificial Sequence
  MKO10050183_A_Smpd5
  gRNA
ggcaatggagtggcgtagca

SEQ ID NO: 50184 - DNA, 20 bp, Artificial Sequence
  MKO10050184_A_Smpd5
  gRNA
gttcctggcaaacgcctagc

SEQ ID NO: 50185 - DNA, 20 bp, Artificial Sequence
  MKO10050185_A_Smpd5
  gRNA
ctgccggctaggcgtttgcc

SEQ ID NO: 50186 - DNA, 20 bp, Artificial Sequence
  MKO10050186_A_Smpdl3a
  gRNA
cactgggcaatcatgactac

SEQ ID NO: 50187 - DNA, 20 bp, Artificial Sequence
  MKO10050187_A_Smpdl3a
  gRNA
gctgccaatagtcaccagta

SEQ ID NO: 50188 - DNA, 20 bp, Artificial Sequence
  MKO10050188_A_Smpdl3a
  gRNA
cacagcactgtagaccttac

SEQ ID NO: 50189 - DNA, 20 bp, Artificial Sequence
  MKO10050189_A_Smpdl3b
  gRNA
cagccaccggaactgctcgc

SEQ ID NO: 50190 - DNA, 20 bp, Artificial Sequence
  MKO10050190_A_Smpdl3b
  gRNA
agccggccgacgggcacacc

SEQ ID NO: 50191 - DNA, 20 bp, Artificial Sequence
  MKO10050191_A_Smpdl3b
  gRNA
gcacatctccgacctgcatc

SEQ ID NO: 50192 - DNA, 20 bp, Artificial Sequence
  MKO10050192_A_Smpx
  gRNA
ctgcccagctcccggacgaa

SEQ ID NO: 50193 - DNA, 20 bp, Artificial Sequence
  MKO10050193_A_Smpx
  gRNA
ggcgaatatcaatattccaa

SEQ ID NO: 50194 - DNA, 20 bp, Artificial Sequence
  MKO10050194_A_Smpx
  gRNA
tacctggatggctctgacgt

SEQ ID NO: 50195 - DNA, 20 bp, Artificial Sequence
  MKO10050195_A_Smr2
  gRNA
aacgatgaaggcactgtata

SEQ ID NO: 50196 - DNA, 20 bp, Artificial Sequence
  MKO10050196_A_Smr2
  gRNA
cagtctagtgagtgccaaag

SEQ ID NO: 50197 - DNA, 20 bp, Artificial Sequence
  MKO10050197_A_Smr2
  gRNA
ttgagaaatctgtacacgat

SEQ ID NO: 50198 - DNA, 20 bp, Artificial Sequence
  MKO10050198_A_Smr3a
  gRNA
tctagcagtaggagtagtta

SEQ ID NO: 50199 - DNA, 20 bp, Artificial Sequence
  MKO10050199_A_Smr3a
  gRNA
cctagaagacatgatcctag

SEQ ID NO: 50200 - DNA, 20 bp, Artificial Sequence
  MKO10050200_A_Smr3a
  gRNA
agcatcctacaagaatgcag

SEQ ID NO: 50201 - DNA, 20 bp, Artificial Sequence
  MKO10050201_A_Sms
  gRNA
acttactaacatccccgctg

SEQ ID NO: 50202 - DNA, 20 bp, Artificial Sequence
  MKO10050202_A_Sms
  gRNA
ctgtcttccagctgatggtg

SEQ ID NO: 50203 - DNA, 20 bp, Artificial Sequence
  MKO10050203_A_Sms
  gRNA
agattaccacccatagttcg

SEQ ID NO: 50204 - DNA, 20 bp, Artificial Sequence
  MKO10050204_A_Smtnl1
  gRNA
ggtgccgacactctgcgttc

SEQ ID NO: 50205 - DNA, 20 bp, Artificial Sequence
  MKO10050205_A_Smtnl1
  gRNA
cacctcgtagtttctcgtca

SEQ ID NO: 50206 - DNA, 20 bp, Artificial Sequence
  MKO10050206_A_Smtnl1
  gRNA
ggccatgacgagaaactacg

SEQ ID NO: 50207 - DNA, 20 bp, Artificial Sequence
  MKO10050207_A_Smtnl2
  gRNA
ctcgccagggagagcgtcgc

SEQ ID NO: 50208 - DNA, 20 bp, Artificial Sequence
  MKO10050208_A_Smtnl2
  gRNA
cgagtctccgagaaattctc

SEQ ID NO: 50209 - DNA, 20 bp, Artificial Sequence
  MKO10050209_A_Smtnl2
  gRNA
ttgaagcacgtctcacctca

SEQ ID NO: 50210 - DNA, 20 bp, Artificial Sequence
  MKO10050210_A_Smtn
  gRNA
ccgccctcgcacgattggca

SEQ ID NO: 50211 - DNA, 20 bp, Artificial Sequence
  MKO10050211_A_Smtn
  gRNA
catccgccgagtgcgagctc

SEQ ID NO: 50212 - DNA, 20 bp, Artificial Sequence
  MKO10050212_A_Smtn
  gRNA
ccaaacgtttccgtgctgag

SEQ ID NO: 50213 - DNA, 20 bp, Artificial Sequence
  MKO10050213_A_Smu1
  gRNA
tccagatgaatatagcgctc

SEQ ID NO: 50214 - DNA, 20 bp, Artificial Sequence
  MKO10050214_A_Smu1
  gRNA
attgatagagcttcgtgaat

SEQ ID NO: 50215 - DNA, 20 bp, Artificial Sequence
  MKO10050215_A_Smu1
  gRNA
cttgcctcgaaacaaatcga

SEQ ID NO: 50216 - DNA, 20 bp, Artificial Sequence
  MKO10050216_A_Smug1
  gRNA
cgagcccgaagagctctagc

SEQ ID NO: 50217 - DNA, 20 bp, Artificial Sequence
  MKO10050217_A_Smug1
  gRNA
gaaccctcatccgttagcag

SEQ ID NO: 50218 - DNA, 20 bp, Artificial Sequence
  MKO10050218_A_Smug1
  gRNA
tctgccttgtacacgaagct

SEQ ID NO: 50219 - DNA, 20 bp, Artificial Sequence
  MKO10050219_A_Smurf1
  gRNA
agcatcaagatccgtctgac

SEQ ID NO: 50220 - DNA, 20 bp, Artificial Sequence
  MKO10050220_A_Smurf1
  gRNA
agccgttcctacgggtcccg

SEQ ID NO: 50221 - DNA, 20 bp, Artificial Sequence
  MKO10050221_A_Smurf1
  gRNA
agagccgtccacaacaatct

SEQ ID NO: 50222 - DNA, 20 bp, Artificial Sequence
  MKO10050222_A_Smurf2
  gRNA
attcagttacgatcagcgta

SEQ ID NO: 50223 - DNA, 20 bp, Artificial Sequence
  MKO10050223_A_Smurf2
  gRNA
caatgccatcaaccgcctca

SEQ ID NO: 50224 - DNA, 20 bp, Artificial Sequence
  MKO10050224_A_Smurf2
  gRNA
tcaactaccaccttagcaaa

SEQ ID NO: 50225 - DNA, 20 bp, Artificial Sequence
  MKO10050225_A_Smyd1
  gRNA
ctgcgaccgcacgtgccaga

SEQ ID NO: 50226 - DNA, 20 bp, Artificial Sequence
  MKO10050226_A_Smyd1
  gRNA
gaaggaactccgagtagacg

SEQ ID NO: 50227 - DNA, 20 bp, Artificial Sequence
  MKO10050227_A_Smyd1
  gRNA
ggctggccgcccgcatcatg

SEQ ID NO: 50228 - DNA, 20 bp, Artificial Sequence
  MKO10050228_A_Smyd2
  gRNA
gcaggcgttctactgcgacg

SEQ ID NO: 50229 - DNA, 20 bp, Artificial Sequence
  MKO10050229_A_Smyd2
  gRNA
gtgagccgcacagtctccga

SEQ ID NO: 50230 - DNA, 20 bp, Artificial Sequence
  MKO10050230_A_Smyd2
  gRNA
ccaggtacttggagtagaac

SEQ ID NO: 50231 - DNA, 20 bp, Artificial Sequence
  MKO10050231_A_Smyd3
  gRNA
gacaactgcattcccgtctg

SEQ ID NO: 50232 - DNA, 20 bp, Artificial Sequence
  MKO10050232_A_Smyd3
  gRNA
gcccgactccgtgagacttc

SEQ ID NO: 50233 - DNA, 20 bp, Artificial Sequence
  MKO10050233_A_Smyd3
  gRNA
gcggcagctgagacgcatcc

SEQ ID NO: 50234 - DNA, 20 bp, Artificial Sequence
  MKO10050234_A_Smyd4
  gRNA
tgtcttacgcaccatcatct

SEQ ID NO: 50235 - DNA, 20 bp, Artificial Sequence
  MKO10050235_A_Smyd4
  gRNA
ggcatttgattacacaagtc

SEQ ID NO: 50236 - DNA, 20 bp, Artificial Sequence
  MKO10050236_A_Smyd4
  gRNA
actttctagtagttactcgg

SEQ ID NO: 50237 - DNA, 20 bp, Artificial Sequence
  MKO10050237_A_Smyd5
  gRNA
agagctatgcagtgtgcgta

SEQ ID NO: 50238 - DNA, 20 bp, Artificial Sequence
  MKO10050238_A_Smyd5
  gRNA
ctggctcacctgtttcaccg

SEQ ID NO: 50239 - DNA, 20 bp, Artificial Sequence
  MKO10050239_A_Smyd5
  gRNA
agcattatactcgcagtctc

SEQ ID NO: 50240 - DNA, 20 bp, Artificial Sequence
  MKO10050240_A_Snai1
  gRNA
agttgaagatcttccgcgac

SEQ ID NO: 50241 - DNA, 20 bp, Artificial Sequence
  MKO10050241_A_Snai1
  gRNA
cccaggcaaccggccgcact

SEQ ID NO: 50242 - DNA, 20 bp, Artificial Sequence
  MKO10050242_A_Snai1
  gRNA
gtcctgcagctcgctatagt

SEQ ID NO: 50243 - DNA, 20 bp, Artificial Sequence
  MKO10050243_A_Snai2
  gRNA
aagtcccattagtgacgaag

SEQ ID NO: 50244 - DNA, 20 bp, Artificial Sequence
  MKO10050244_A_Snai2
  gRNA
tttatgcagaagcgacattc

SEQ ID NO: 50245 - DNA, 20 bp, Artificial Sequence
  MKO10050245_A_Snai2
  gRNA
gaagcccaactacagcgaac

SEQ ID NO: 50246 - DNA, 20 bp, Artificial Sequence
  MKO10050246_A_Snai3
  gRNA
tgttcatttagagctccgtc

SEQ ID NO: 50247 - DNA, 20 bp, Artificial Sequence
  MKO10050247_A_Snai3
  gRNA
cacggcgcacctgtacttct

SEQ ID NO: 50248 - DNA, 20 bp, Artificial Sequence
  MKO10050248_A_Snai3
  gRNA
tgaaggcgcgcccagtcggc

SEQ ID NO: 50249 - DNA, 20 bp, Artificial Sequence
  MKO10050249_A_Snap23
  gRNA
aatcctgggtttagccattg

SEQ ID NO: 50250 - DNA, 20 bp, Artificial Sequence
  MKO10050250_A_Snap23
  gRNA
ttacctcaatggctaaaccc

SEQ ID NO: 50251 - DNA, 20 bp, Artificial Sequence
  MKO10050251_A_Snap23
  gRNA
catggataatctgtccccag

SEQ ID NO: 50252 - DNA, 20 bp, Artificial Sequence
  MKO10050252_A_Snap25
  gRNA
cacccgtcgcatgctgcagc

SEQ ID NO: 50253 - DNA, 20 bp, Artificial Sequence
  MKO10050253_A_Snap25
  gRNA
caaccagctgcagcatgcga

SEQ ID NO: 50254 - DNA, 20 bp, Artificial Sequence
  MKO10050254_A_Snap25
  gRNA
tccatcctgattattgcccc

SEQ ID NO: 50255 - DNA, 20 bp, Artificial Sequence
  MKO10050255_A_Snap29
  gRNA
gttcgaagggtcgagttctt

SEQ ID NO: 50256 - DNA, 20 bp, Artificial Sequence
  MKO10050256_A_Snap29
  gRNA
ccacctgaaggacatagcct

SEQ ID NO: 50257 - DNA, 20 bp, Artificial Sequence
  MKO10050257_A_Snap29
  gRNA
cttcaggtggcctaatccca

SEQ ID NO: 50258 - DNA, 20 bp, Artificial Sequence
  MKO10050258_A_Snap47
  gRNA
acataccctcccacgtgacc

SEQ ID NO: 50259 - DNA, 20 bp, Artificial Sequence
  MKO10050259_A_Snap47
  gRNA
agcatacgccagcgcttcat

SEQ ID NO: 50260 - DNA, 20 bp, Artificial Sequence
  MKO10050260_A_Snap47
  gRNA
ccgacctggacgtggctgac

SEQ ID NO: 50261 - DNA, 20 bp, Artificial Sequence
  MKO10050261_A_Snap91
  gRNA
cgatccgatccgtgagcgtt

SEQ ID NO: 50262 - DNA, 20 bp, Artificial Sequence
  MKO10050262_A_Snap91
  gRNA
agcgggcgacaaacagtagc

SEQ ID NO: 50263 - DNA, 20 bp, Artificial Sequence
  MKO10050263_A_Snap91
  gRNA
gccgctcagtacagcgtgac

SEQ ID NO: 50264 - DNA, 20 bp, Artificial Sequence
  MKO10050264_A_Snapc1
  gRNA
gaacgcacagcatttcgacg

SEQ ID NO: 50265 - DNA, 20 bp, Artificial Sequence
  MKO10050265_A_Snapc1
  gRNA
gctgtgccagccgaaacaaa

SEQ ID NO: 50266 - DNA, 20 bp, Artificial Sequence
  MKO10050266_A_Snapc1
  gRNA
acaaagcgccaactctgatc

SEQ ID NO: 50267 - DNA, 20 bp, Artificial Sequence
  MKO10050267_A_Snapc2
  gRNA
tgctgctgaccctactcgtg

SEQ ID NO: 50268 - DNA, 20 bp, Artificial Sequence
  MKO10050268_A_Snapc2
  gRNA
tgttccagcagggccgtgca

SEQ ID NO: 50269 - DNA, 20 bp, Artificial Sequence
  MKO10050269_A_Snapc2
  gRNA
tgcctcacctctaccggggc

SEQ ID NO: 50270 - DNA, 20 bp, Artificial Sequence
  MKO10050270_A_Snapc3
  gRNA
tgctgaattctccaccgatc

SEQ ID NO: 50271 - DNA, 20 bp, Artificial Sequence
  MKO10050271_A_Snapc3
  gRNA
cgaggcatctcagtttatca

SEQ ID NO: 50272 - DNA, 20 bp, Artificial Sequence
  MKO10050272_A_Snapc3
  gRNA
actcataccataaagtcact

SEQ ID NO: 50273 - DNA, 20 bp, Artificial Sequence
  MKO10050273_A_Snapc4
  gRNA
gaccatatttagctgcagac

SEQ ID NO: 50274 - DNA, 20 bp, Artificial Sequence
  MKO10050274_A_Snapc4
  gRNA
cttctcccgtgtttcttcgt

SEQ ID NO: 50275 - DNA, 20 bp, Artificial Sequence
  MKO10050275_A_Snapc4
  gRNA
tacagattcgctgcctgatg

SEQ ID NO: 50276 - DNA, 20 bp, Artificial Sequence
  MKO10050276_A_Snapc5
  gRNA
ggggatgttgagtcgactgc

SEQ ID NO: 50277 - DNA, 20 bp, Artificial Sequence
  MKO10050277_A_Snapc5
  gRNA
ggaaaccctgctgcgtctaa

SEQ ID NO: 50278 - DNA, 20 bp, Artificial Sequence
  MKO10050278_A_Snapc5
  gRNA
ccttcctcgagaatttatca

SEQ ID NO: 50279 - DNA, 20 bp, Artificial Sequence
  MKO10050279_A_Snapin
  gRNA
gctcgactctcacgtgcacg

SEQ ID NO: 50280 - DNA, 20 bp, Artificial Sequence
  MKO10050280_A_Snapin
  gRNA
gaccaagacaactcgtcgcc

SEQ ID NO: 50281 - DNA, 20 bp, Artificial Sequence
  MKO10050281_A_Snapin
  gRNA
cagttcgcgatggccgcggc

SEQ ID NO: 50282 - DNA, 20 bp, Artificial Sequence
  MKO10050282_A_Sncaip
  gRNA
cccgctcacgaaggtgactt

SEQ ID NO: 50283 - DNA, 20 bp, Artificial Sequence
  MKO10050283_A_Sncaip
  gRNA
tccgaagtcaccttcgtgag

SEQ ID NO: 50284 - DNA, 20 bp, Artificial Sequence
  MKO10050284_A_Sncaip
  gRNA
cttcgcccatcagtgacgtg

SEQ ID NO: 50285 - DNA, 20 bp, Artificial Sequence
  MKO10050285_A_Snca
  gRNA
gggaatatagctgctgccac

SEQ ID NO: 50286 - DNA, 20 bp, Artificial Sequence
  MKO10050286_A_Snca
  gRNA
gcagccataccttgcccatc

SEQ ID NO: 50287 - DNA, 20 bp, Artificial Sequence
  MKO10050287_A_Snca
  gRNA
gtggttcatggagtgacaac

SEQ ID NO: 50288 - DNA, 20 bp, Artificial Sequence
  MKO10050288_A_Sncb
  gRNA
tcctggaccccttacgcctc

SEQ ID NO: 50289 - DNA, 20 bp, Artificial Sequence
  MKO10050289_A_Sncb
  gRNA
cagatgcgatgcctgctcct

SEQ ID NO: 50290 - DNA, 20 bp, Artificial Sequence
  MKO10050290_A_Sncb
  gRNA
tttgatgcaggaggaatacc

SEQ ID NO: 50291 - DNA, 20 bp, Artificial Sequence
  MKO10050291_A_Sncg
  gRNA
gcttaccttgcgcaccaccc

SEQ ID NO: 50292 - DNA, 20 bp, Artificial Sequence
  MKO10050292_A_Sncg
  gRNA
cacagtggccaacaagaccg

SEQ ID NO: 50293 - DNA, 20 bp, Artificial Sequence
  MKO10050293_A_Sncg
  gRNA
ggacttggaaccccctgcac

SEQ ID NO: 50294 - DNA, 20 bp, Artificial Sequence
  MKO10050294_A_Snd1
  gRNA
gggctgccctcggacaatta

SEQ ID NO: 50295 - DNA, 20 bp, Artificial Sequence
  MKO10050295_A_Snd1
  gRNA
gcaacggttcacacaccatc

SEQ ID NO: 50296 - DNA, 20 bp, Artificial Sequence
  MKO10050296_A_Snd1
  gRNA
gcagagtcgctagttgcaga

SEQ ID NO: 50297 - DNA, 20 bp, Artificial Sequence
  MKO10050297_A_Sned1
  gRNA
catcgattctaaacgcccag

SEQ ID NO: 50298 - DNA, 20 bp, Artificial Sequence
  MKO10050298_A_Sned1
  gRNA
agtagacatcacctgcacgc

SEQ ID NO: 50299 - DNA, 20 bp, Artificial Sequence
  MKO10050299_A_Sned1
  gRNA
accaccaacgtgggcgtgcc

SEQ ID NO: 50300 - DNA, 20 bp, Artificial Sequence
  MKO10050300_A_Snf8
  gRNA
agtccctcgctccttatact

SEQ ID NO: 50301 - DNA, 20 bp, Artificial Sequence
  MKO10050301_A_Snf8
  gRNA
tccaacaggtctgataactc

SEQ ID NO: 50302 - DNA, 20 bp, Artificial Sequence
  MKO10050302_A_Snf8
  gRNA
tacctccattccgatgtttg

SEQ ID NO: 50303 - DNA, 20 bp, Artificial Sequence
  MKO10050303_A_Snhg11
  gRNA
ccagatgagcctttgccgca

SEQ ID NO: 50304 - DNA, 20 bp, Artificial Sequence
  MKO10050304_A_Snhg11
  gRNA
cgtactccccaacatcagtg

SEQ ID NO: 50305 - DNA, 20 bp, Artificial Sequence
  MKO10050305_A_Snhg11
  gRNA
tgcaggcgatcactgcgaga

SEQ ID NO: 50306 - DNA, 20 bp, Artificial Sequence
  MKO10050306_A_Snip1
  gRNA
aggcgacgctctgacgaccg

SEQ ID NO: 50307 - DNA, 20 bp, Artificial Sequence
  MKO10050307_A_Snip1
  gRNA
tcgtcagagcgtcgcctgac

SEQ ID NO: 50308 - DNA, 20 bp, Artificial Sequence
  MKO10050308_A_Snip1
  gRNA
aagccctacattatcgacct

SEQ ID NO: 50309 - DNA, 20 bp, Artificial Sequence
  MKO10050309_A_Snn
  gRNA
gacaatgaccgttaccaccc

SEQ ID NO: 50310 - DNA, 20 bp, Artificial Sequence
  MKO10050310_A_Snn
  gRNA
gctgttggcggtcatcaact

SEQ ID NO: 50311 - DNA, 20 bp, Artificial Sequence
  MKO10050311_A_Snn
  gRNA
gcagcgcatcagccagtcag

SEQ ID NO: 50312 - DNA, 20 bp, Artificial Sequence
  MKO10050312_A_Snph
  gRNA
gagcctctgccggatctcgc

SEQ ID NO: 50313 - DNA, 20 bp, Artificial Sequence
  MKO10050313_A_Snph
  gRNA
ccagggcgtccgtccgactc

SEQ ID NO: 50314 - DNA, 20 bp, Artificial Sequence
  MKO10050314_A_Snph
  gRNA
ctggagccgccactacatcg

SEQ ID NO: 50315 - DNA, 20 bp, Artificial Sequence
  MKO10050315_A_Snrk
  gRNA
cgtactctacgatggcgtct

SEQ ID NO: 50316 - DNA, 20 bp, Artificial Sequence
  MKO10050316_A_Snrk
  gRNA
gcaccggcgtgacagcagtg

SEQ ID NO: 50317 - DNA, 20 bp, Artificial Sequence
  MKO10050317_A_Snrk
  gRNA
gtcagacgacgagtttgaca

SEQ ID NO: 50318 - DNA, 20 bp, Artificial Sequence
  MKO10050318_A_Snrnp200
  gRNA
acccgccgggatgaaccgac

SEQ ID NO: 50319 - DNA, 20 bp, Artificial Sequence
  MKO10050319_A_Snrnp200
  gRNA
gctccacaaagaatatctcg

SEQ ID NO: 50320 - DNA, 20 bp, Artificial Sequence
  MKO10050320_A_Snrnp200
  gRNA
gggtccggtcaatgagagag

SEQ ID NO: 50321 - DNA, 20 bp, Artificial Sequence
  MKO10050321_A_Snrnp25
  gRNA
atggtatgtccgccatacat

SEQ ID NO: 50322 - DNA, 20 bp, Artificial Sequence
  MKO10050322_A_Snrnp25
  gRNA
ggtcgtcgtacagaatgcca

SEQ ID NO: 50323 - DNA, 20 bp, Artificial Sequence
  MKO10050323_A_Snrnp25
  gRNA
gcggcgttcagcacatcagc

SEQ ID NO: 50324 - DNA, 20 bp, Artificial Sequence
  MKO10050324_A_Snrnp27
  gRNA
tgttagaacgtaggcggtcc

SEQ ID NO: 50325 - DNA, 20 bp, Artificial Sequence
  MKO10050325_A_Snrnp27
  gRNA
ctccacaccgaagacgctcc

SEQ ID NO: 50326 - DNA, 20 bp, Artificial Sequence
  MKO10050326_A_Snrnp27
  gRNA
gatgtggatctatgtcgtct

SEQ ID NO: 50327 - DNA, 20 bp, Artificial Sequence
  MKO10050327_A_Snrnp35
  gRNA
aatccgccacccagccgccg

SEQ ID NO: 50328 - DNA, 20 bp, Artificial Sequence
  MKO10050328_A_Snrnp35
  gRNA
tgttctagagcatgagcgac

SEQ ID NO: 50329 - DNA, 20 bp, Artificial Sequence
  MKO10050329_A_Snrnp35
  gRNA
agtccacgaatatctcgtgc

SEQ ID NO: 50330 - DNA, 20 bp, Artificial Sequence
  MKO10050330_A_Snrnp40
  gRNA
tgataactatgcgacgttga

SEQ ID NO: 50331 - DNA, 20 bp, Artificial Sequence
  MKO10050331_A_Snrnp40
  gRNA
gacatttcagaacacgtacc

SEQ ID NO: 50332 - DNA, 20 bp, Artificial Sequence
  MKO10050332_A_Snrnp40
  gRNA
ctgatcgctcgtgtcattga

SEQ ID NO: 50333 - DNA, 20 bp, Artificial Sequence
  MKO10050333_A_Snrnp48
  gRNA
caaggcgatccgtttgtgtg

SEQ ID NO: 50334 - DNA, 20 bp, Artificial Sequence
  MKO10050334_A_Snrnp48
  gRNA
tagcagccaagtctacaaac

SEQ ID NO: 50335 - DNA, 20 bp, Artificial Sequence
  MKO10050335_A_Snrnp48
  gRNA
tcctagcttgtttaattatc

SEQ ID NO: 50336 - DNA, 20 bp, Artificial Sequence
  MKO10050336_A_Snrnp70
  gRNA
tgccttcaagactctgttcg

SEQ ID NO: 50337 - DNA, 20 bp, Artificial Sequence
  MKO10050337_A_Snrnp70
  gRNA
tcacaatgatcccaatgctc

SEQ ID NO: 50338 - DNA, 20 bp, Artificial Sequence
  MKO10050338_A_Snrnp70
  gRNA
ttctctccatgcgttcttcc

SEQ ID NO: 50339 - DNA, 20 bp, Artificial Sequence
  MKO10050339_A_Snrpa1
  gRNA
atagggtgatctggacccgt

SEQ ID NO: 50340 - DNA, 20 bp, Artificial Sequence
  MKO10050340_A_Snrpa1
  gRNA
gcacccagattctcaataac

SEQ ID NO: 50341 - DNA, 20 bp, Artificial Sequence
  MKO10050341_A_Snrpa1
  gRNA
aagtcgataatgcttcttat

SEQ ID NO: 50342 - DNA, 20 bp, Artificial Sequence
  MKO10050342_A_Snrpa
  gRNA
cgcatcatgcaccatatgcc

SEQ ID NO: 50343 - DNA, 20 bp, Artificial Sequence
  MKO10050343_A_Snrpa
  gRNA
ccctgcttaccggtacgggc

SEQ ID NO: 50344 - DNA, 20 bp, Artificial Sequence
  MKO10050344_A_Snrpa
  gRNA
accatgggcttgtcgtagaa

SEQ ID NO: 50345 - DNA, 20 bp, Artificial Sequence
  MKO10050345_A_Snrpb2
  gRNA
aacttactggttgaacagca

SEQ ID NO: 50346 - DNA, 20 bp, Artificial Sequence
  MKO10050346_A_Snrpb2
  gRNA
cactgcagcgccaaatcctc

SEQ ID NO: 50347 - DNA, 20 bp, Artificial Sequence
  MKO10050347_A_Snrpb2
  gRNA
ggaaacattacctgaggatt

SEQ ID NO: 50348 - DNA, 20 bp, Artificial Sequence
  MKO10050348_A_Snrpb
  gRNA
gttgcttcgaggggagaacc

SEQ ID NO: 50349 - DNA, 20 bp, Artificial Sequence
  MKO10050349_A_Snrpb
  gRNA
gctgggccagtccgaggtgt

SEQ ID NO: 50350 - DNA, 20 bp, Artificial Sequence
  MKO10050350_A_Snrpb
  gRNA
gaaggacttacatctttggg

SEQ ID NO: 50351 - DNA, 20 bp, Artificial Sequence
  MKO10050351_A_Snrpc
  gRNA
gtattgtagcgggccctcct

SEQ ID NO: 50352 - DNA, 20 bp, Artificial Sequence
  MKO10050352_A_Snrpc
  gRNA
acgtacttgtcttgtcaatc

SEQ ID NO: 50353 - DNA, 20 bp, Artificial Sequence
  MKO10050353_A_Snrpc
  gRNA
ttgaaacttacggagactgg

SEQ ID NO: 50354 - DNA, 20 bp, Artificial Sequence
  MKO10050354_A_Snrpd1
  gRNA
gtattcgaggcaataacatt

SEQ ID NO: 50355 - DNA, 20 bp, Artificial Sequence
  MKO10050355_A_Snrpd1
  gRNA
tcgctaggatgaagctcgtg

SEQ ID NO: 50356 - DNA, 20 bp, Artificial Sequence
  MKO10050356_A_Snrpd1
  gRNA
tcttacctgtgattgttcca

SEQ ID NO: 50357 - DNA, 20 bp, Artificial Sequence
  MKO10050357_A_Snrpd2
  gRNA
ccccatcaggcactgcaaca

SEQ ID NO: 50358 - DNA, 20 bp, Artificial Sequence
  MKO10050358_A_Snrpd2
  gRNA
cgatgaccgagtccccgcgc

SEQ ID NO: 50359 - DNA, 20 bp, Artificial Sequence
  MKO10050359_A_Snrpd2
  gRNA
acctgtcaaaggccttcacc

SEQ ID NO: 50360 - DNA, 20 bp, Artificial Sequence
  MKO10050360_A_Snrpd3
  gRNA
gcctcgtgcaagactttaat

SEQ ID NO: 50361 - DNA, 20 bp, Artificial Sequence
  MKO10050361_A_Snrpd3
  gRNA
gccgattaaagtcttgcacg

SEQ ID NO: 50362 - DNA, 20 bp, Artificial Sequence
  MKO10050362_A_Snrpd3
  gRNA
tttgtttcagtggccgcacg

SEQ ID NO: 50363 - DNA, 20 bp, Artificial Sequence
  MKO10050363_A_Snrpe
  gRNA
acaggtcggatcatgctaaa

SEQ ID NO: 50364 - DNA, 20 bp, Artificial Sequence
  MKO10050364_A_Snrpe
  gRNA
atttcagagatctcgaattc

SEQ ID NO: 50365 - DNA, 20 bp, Artificial Sequence
  MKO10050365_A_Snrpe
  gRNA
cttctgcatcatctaatacg

SEQ ID NO: 50366 - DNA, 20 bp, Artificial Sequence
  MKO10050366_A_Snrpf
  gRNA
ccctgtcagcccattgagaa

SEQ ID NO: 50367 - DNA, 20 bp, Artificial Sequence
  MKO10050367_A_Snrpf
  gRNA
ggatggctacatgaacatgc

SEQ ID NO: 50368 - DNA, 20 bp, Artificial Sequence
  MKO10050368_A_Snrpf
  gRNA
aatacagaagagtacataga

SEQ ID NO: 50369 - DNA, 20 bp, Artificial Sequence
  MKO10050369_A_Snrpg
  gRNA
ctctactcacttcttcagct

SEQ ID NO: 50370 - DNA, 20 bp, Artificial Sequence
  MKO10050370_A_Snrpg
  gRNA
tctcttacagtgaagttaaa

SEQ ID NO: 50371 - DNA, 20 bp, Artificial Sequence
  MKO10050371_A_Snrpg
  gRNA
aatgttgttctgttgcccac

SEQ ID NO: 50372 - DNA, 20 bp, Artificial Sequence
  MKO10050372_A_Snrpn
  gRNA
ggaactccacctccacctgt

SEQ ID NO: 50373 - DNA, 20 bp, Artificial Sequence
  MKO10050373_A_Snrpn
  gRNA
tggggaataggtacacctgc

SEQ ID NO: 50374 - DNA, 20 bp, Artificial Sequence
  MKO10050374_A_Snrpn
  gRNA
ttcacaggtcatgaccccac

SEQ ID NO: 50375 - DNA, 20 bp, Artificial Sequence
  MKO10050375_A_Snta1
  gRNA
ggcgccatccaagcgcagat

SEQ ID NO: 50376 - DNA, 20 bp, Artificial Sequence
  MKO10050376_A_Snta1
  gRNA
ctgtaccgcttcatcgtggg

SEQ ID NO: 50377 - DNA, 20 bp, Artificial Sequence
  MKO10050377_A_Snta1
  gRNA
ggttggtgccgttcccccgc

SEQ ID NO: 50378 - DNA, 20 bp, Artificial Sequence
  MKO10050378_A_Sntb1
  gRNA
agcgccattcattccaacgc

SEQ ID NO: 50379 - DNA, 20 bp, Artificial Sequence
  MKO10050379_A_Sntb1
  gRNA
ctcactgccgaaatcaccac

SEQ ID NO: 50380 - DNA, 20 bp, Artificial Sequence
  MKO10050380_A_Sntb1
  gRNA
ccctttcttcacgtaaggtg

SEQ ID NO: 50381 - DNA, 20 bp, Artificial Sequence
  MKO10050381_A_Sntb2
  gRNA
ctcatcgggatttgtcgacc

SEQ ID NO: 50382 - DNA, 20 bp, Artificial Sequence
  MKO10050382_A_Sntb2
  gRNA
atccttgcagcgtaagatca

SEQ ID NO: 50383 - DNA, 20 bp, Artificial Sequence
  MKO10050383_A_Sntb2
  gRNA
cttgctgcctcccgctgtac

SEQ ID NO: 50384 - DNA, 20 bp, Artificial Sequence
  MKO10050384_A_Sntg1
  gRNA
aggattcggattaagcataa

SEQ ID NO: 50385 - DNA, 20 bp, Artificial Sequence
  MKO10050385_A_Sntg1
  gRNA
aggtgtaaccggactttaaa

SEQ ID NO: 50386 - DNA, 20 bp, Artificial Sequence
  MKO10050386_A_Sntg1
  gRNA
tattggagatgcaattctac

SEQ ID NO: 50387 - DNA, 20 bp, Artificial Sequence
  MKO10050387_A_Sntg2
  gRNA
ggagcacttacattagcacc

SEQ ID NO: 50388 - DNA, 20 bp, Artificial Sequence
  MKO10050388_A_Sntg2
  gRNA
tggcctgggcctaagtatca

SEQ ID NO: 50389 - DNA, 20 bp, Artificial Sequence
  MKO10050389_A_Sntg2
  gRNA
cttgttgtatgacgaggggt

SEQ ID NO: 50390 - DNA, 20 bp, Artificial Sequence
  MKO10050390_A_Sntn
  gRNA
gaccacgcactccactcaag

SEQ ID NO: 50391 - DNA, 20 bp, Artificial Sequence
  MKO10050391_A_Sntn
  gRNA
cagatctgctacgaaatatg

SEQ ID NO: 50392 - DNA, 20 bp, Artificial Sequence
  MKO10050392_A_Sntn
  gRNA
ctttcccaagtttaccatca

SEQ ID NO: 50393 - DNA, 20 bp, Artificial Sequence
  MKO10050393_A_Snupn
  gRNA
tcaccctggaggccacgata

SEQ ID NO: 50394 - DNA, 20 bp, Artificial Sequence
  MKO10050394_A_Snupn
  gRNA
aattgacgtcccttcagatt

SEQ ID NO: 50395 - DNA, 20 bp, Artificial Sequence
  MKO10050395_A_Snupn
  gRNA
acttgattagcatagcgttt

SEQ ID NO: 50396 - DNA, 20 bp, Artificial Sequence
  MKO10050396_A_Snurf
  gRNA
tactgaacagcacgtgcccg

SEQ ID NO: 50397 - DNA, 20 bp, Artificial Sequence
  MKO10050397_A_Snurf
  gRNA
aggtccaggtcaaacgtcga

SEQ ID NO: 50398 - DNA, 20 bp, Artificial Sequence
  MKO10050398_A_Snurf
  gRNA
gcaacgcaatggagcgagga

SEQ ID NO: 50399 - DNA, 20 bp, Artificial Sequence
  MKO10050399_A_Snw1
  gRNA
cagcctttcctatatccgta

SEQ ID NO: 50400 - DNA, 20 bp, Artificial Sequence
  MKO10050400_A_Snw1
  gRNA
agcttgtcagctgcacgaac

SEQ ID NO: 50401 - DNA, 20 bp, Artificial Sequence
  MKO10050401_A_Snw1
  gRNA
ccataccggatatactgagc

SEQ ID NO: 50402 - DNA, 20 bp, Artificial Sequence
  MKO10050402_A_Snx10
  gRNA
gcatgtcgaccaacgccgcc

SEQ ID NO: 50403 - DNA, 20 bp, Artificial Sequence
  MKO10050403_A_Snx10
  gRNA
acaccagcaacgcgttgctt

SEQ ID NO: 50404 - DNA, 20 bp, Artificial Sequence
  MKO10050404_A_Snx10
  gRNA
actccaaagcaacgcgttgc

SEQ ID NO: 50405 - DNA, 20 bp, Artificial Sequence
  MKO10050405_A_Snx11
  gRNA
aatggcatcggacaccgtca

SEQ ID NO: 50406 - DNA, 20 bp, Artificial Sequence
  MKO10050406_A_Snx11
  gRNA
ttcattgagaagcgacgtca

SEQ ID NO: 50407 - DNA, 20 bp, Artificial Sequence
  MKO10050407_A_Snx11
  gRNA
ccgccgcacacaggacgtct

SEQ ID NO: 50408 - DNA, 20 bp, Artificial Sequence
  MKO10050408_A_Snx12
  gRNA
cacccgcatgcgaacctcat

SEQ ID NO: 50409 - DNA, 20 bp, Artificial Sequence
  MKO10050409_A_Snx12
  gRNA
gcggcccgtaagcgtcggtc

SEQ ID NO: 50410 - DNA, 20 bp, Artificial Sequence
  MKO10050410_A_Snx12
  gRNA
actatagcgtcgccgtacac

SEQ ID NO: 50411 - DNA, 20 bp, Artificial Sequence
  MKO10050411_A_Snx13
  gRNA
cgctcattcagtttgctact

SEQ ID NO: 50412 - DNA, 20 bp, Artificial Sequence
  MKO10050412_A_Snx13
  gRNA
aagaaatgaaacgcgaagcc

SEQ ID NO: 50413 - DNA, 20 bp, Artificial Sequence
  MKO10050413_A_Snx13
  gRNA
tctgtcaatctttatagtcc

SEQ ID NO: 50414 - DNA, 20 bp, Artificial Sequence
  MKO10050414_A_Snx14
  gRNA
cttcaagagttatttccgca

SEQ ID NO: 50415 - DNA, 20 bp, Artificial Sequence
  MKO10050415_A_Snx14
  gRNA
ctaccttcgaagaaactttc

SEQ ID NO: 50416 - DNA, 20 bp, Artificial Sequence
  MKO10050416_A_Snx14
  gRNA
agacctgaaagtttcttcga

SEQ ID NO: 50417 - DNA, 20 bp, Artificial Sequence
  MKO10050417_A_Snx15
  gRNA
aaacctcttccgtcgcctag

SEQ ID NO: 50418 - DNA, 20 bp, Artificial Sequence
  MKO10050418_A_Snx15
  gRNA
gcgccgctcctcgatcacag

SEQ ID NO: 50419 - DNA, 20 bp, Artificial Sequence
  MKO10050419_A_Snx15
  gRNA
tgaagtagccgggcctcatc

SEQ ID NO: 50420 - DNA, 20 bp, Artificial Sequence
  MKO10050420_A_Snx16
  gRNA
ggaagtgctaatcgaaagcc

SEQ ID NO: 50421 - DNA, 20 bp, Artificial Sequence
  MKO10050421_A_Snx16
  gRNA
tcttaagcagacgaatgtcc

SEQ ID NO: 50422 - DNA, 20 bp, Artificial Sequence
  MKO10050422_A_Snx16
  gRNA
gcggagtttcctattggcat

SEQ ID NO: 50423 - DNA, 20 bp, Artificial Sequence
  MKO10050423_A_Snx17
  gRNA
gcctataacattcacgtgaa

SEQ ID NO: 50424 - DNA, 20 bp, Artificial Sequence
  MKO10050424_A_Snx17
  gRNA
tgtagcgcacccgacagtgc

SEQ ID NO: 50425 - DNA, 20 bp, Artificial Sequence
  MKO10050425_A_Snx17
  gRNA
gttcggcaagacccattgct

SEQ ID NO: 50426 - DNA, 20 bp, Artificial Sequence
  MKO10050426_A_Snx18
  gRNA
cgctacgccaacgtgccgcc

SEQ ID NO: 50427 - DNA, 20 bp, Artificial Sequence
  MKO10050427_A_Snx18
  gRNA
gcgccggctttccctacggc

SEQ ID NO: 50428 - DNA, 20 bp, Artificial Sequence
  MKO10050428_A_Snx18
  gRNA
gtgatgaatctcggccaacg

SEQ ID NO: 50429 - DNA, 20 bp, Artificial Sequence
  MKO10050429_A_Snx19
  gRNA
acaccgtgaaccgccgctac

SEQ ID NO: 50430 - DNA, 20 bp, Artificial Sequence
  MKO10050430_A_Snx19
  gRNA
gcggcggttcacggtgtgat

SEQ ID NO: 50431 - DNA, 20 bp, Artificial Sequence
  MKO10050431_A_Snx19
  gRNA
ctctgcgccattcctgagat

SEQ ID NO: 50432 - DNA, 20 bp, Artificial Sequence
  MKO10050432_A_Snx1
  gRNA
atcaccgatcctgagaagat

SEQ ID NO: 50433 - DNA, 20 bp, Artificial Sequence
  MKO10050433_A_Snx1
  gRNA
gaagccacagccaagctatg

SEQ ID NO: 50434 - DNA, 20 bp, Artificial Sequence
  MKO10050434_A_Snx1
  gRNA
agatacttaccgatcttctc

SEQ ID NO: 50435 - DNA, 20 bp, Artificial Sequence
  MKO10050435_A_Snx20
  gRNA
tctgcttgcgcgacctcgag

SEQ ID NO: 50436 - DNA, 20 bp, Artificial Sequence
  MKO10050436_A_Snx20
  gRNA
agtcgaggaactcgcgcgag

SEQ ID NO: 50437 - DNA, 20 bp, Artificial Sequence
  MKO10050437_A_Snx20
  gRNA
agagccgctggaaacatgtc

SEQ ID NO: 50438 - DNA, 20 bp, Artificial Sequence
  MKO10050438_A_Snx21
  gRNA
gctctacaccctcgccgtga

SEQ ID NO: 50439 - DNA, 20 bp, Artificial Sequence
  MKO10050439_A_Snx21
  gRNA
ccagatctctcgccgatact

SEQ ID NO: 50440 - DNA, 20 bp, Artificial Sequence
  MKO10050440_A_Snx21
  gRNA
tgaccctgacgacgaagacg

SEQ ID NO: 50441 - DNA, 20 bp, Artificial Sequence
  MKO10050441_A_Snx22
  gRNA
gacgcagacacaccgtgccg

SEQ ID NO: 50442 - DNA, 20 bp, Artificial Sequence
  MKO10050442_A_Snx22
  gRNA
tcacccgcttgtgtagagcg

SEQ ID NO: 50443 - DNA, 20 bp, Artificial Sequence
  MKO10050443_A_Snx22
  gRNA
cctcaaaacgcctgcccaac

SEQ ID NO: 50444 - DNA, 20 bp, Artificial Sequence
  MKO10050444_A_Snx24
  gRNA
gctttcacaggccgtcattt

SEQ ID NO: 50445 - DNA, 20 bp, Artificial Sequence
  MKO10050445_A_Snx24
  gRNA
ccgccgttgttccaagactt

SEQ ID NO: 50446 - DNA, 20 bp, Artificial Sequence
  MKO10050446_A_Snx24
  gRNA
aggcctggaaacgtatttac

SEQ ID NO: 50447 - DNA, 20 bp, Artificial Sequence
  MKO10050447_A_Snx25
  gRNA
cacgtacgcgccttcctacg

SEQ ID NO: 50448 - DNA, 20 bp, Artificial Sequence
  MKO10050448_A_Snx25
  gRNA
ttgtcaagcagattcgccag

SEQ ID NO: 50449 - DNA, 20 bp, Artificial Sequence
  MKO10050449_A_Snx25
  gRNA
gagcttgataaagtcctcgt

SEQ ID NO: 50450 - DNA, 20 bp, Artificial Sequence
  MKO10050450_A_Snx27
  gRNA
ttgacaatgcgcacgacccg

SEQ ID NO: 50451 - DNA, 20 bp, Artificial Sequence
  MKO10050451_A_Snx27
  gRNA
attcttccaacccacgacgc

SEQ ID NO: 50452 - DNA, 20 bp, Artificial Sequence
  MKO10050452_A_Snx27
  gRNA
cgcattgtcaagtccgaatc

SEQ ID NO: 50453 - DNA, 20 bp, Artificial Sequence
  MKO10050453_A_Snx29
  gRNA
tcgcctcagattccgacagc

SEQ ID NO: 50454 - DNA, 20 bp, Artificial Sequence
  MKO10050454_A_Snx29
  gRNA
caccacatcacctccgatgc

SEQ ID NO: 50455 - DNA, 20 bp, Artificial Sequence
  MKO10050455_A_Snx29
  gRNA
atttagggcgcagcgcagcc

SEQ ID NO: 50456 - DNA, 20 bp, Artificial Sequence
  MKO10050456_A_Snx2
  gRNA
gtgtcagatccggaaaaagt

SEQ ID NO: 50457 - DNA, 20 bp, Artificial Sequence
  MKO10050457_A_Snx2
  gRNA
ggtgaccgcaggagacggct

SEQ ID NO: 50458 - DNA, 20 bp, Artificial Sequence
  MKO10050458_A_Snx2
  gRNA
atactctttgattcgattct

SEQ ID NO: 50459 - DNA, 20 bp, Artificial Sequence
  MKO10050459_A_Snx30
  gRNA
ccatcgatcggatagcccag

SEQ ID NO: 50460 - DNA, 20 bp, Artificial Sequence
  MKO10050460_A_Snx30
  gRNA
gagtcagtcaagcacgtcac

SEQ ID NO: 50461 - DNA, 20 bp, Artificial Sequence
  MKO10050461_A_Snx30
  gRNA
cgccgacgaacagaatattc

SEQ ID NO: 50462 - DNA, 20 bp, Artificial Sequence
  MKO10050462_A_Snx31
  gRNA
ctgcggatccccgtgtgaca

SEQ ID NO: 50463 - DNA, 20 bp, Artificial Sequence
  MKO10050463_A_Snx31
  gRNA
caccatccagaatgtcgagc

SEQ ID NO: 50464 - DNA, 20 bp, Artificial Sequence
  MKO10050464_A_Snx31
  gRNA
atacagccagctcgacattc

SEQ ID NO: 50465 - DNA, 20 bp, Artificial Sequence
  MKO10050465_A_Snx32
  gRNA
agaagttgtggtcccgacgc

SEQ ID NO: 50466 - DNA, 20 bp, Artificial Sequence
  MKO10050466_A_Snx32
  gRNA
gccagatgaactcttcgtgc

SEQ ID NO: 50467 - DNA, 20 bp, Artificial Sequence
  MKO10050467_A_Snx32
  gRNA
gtggaaaacgaagagtacgc

SEQ ID NO: 50468 - DNA, 20 bp, Artificial Sequence
  MKO10050468_A_Snx33
  gRNA
cgaagcacgagaaacgattg

SEQ ID NO: 50469 - DNA, 20 bp, Artificial Sequence
  MKO10050469_A_Snx33
  gRNA
tacgtcgagattgtccgtcc

SEQ ID NO: 50470 - DNA, 20 bp, Artificial Sequence
  MKO10050470_A_Snx33
  gRNA
cattcgcaggcgctgccgtg

SEQ ID NO: 50471 - DNA, 20 bp, Artificial Sequence
  MKO10050471_A_Snx3
  gRNA
cgtgagcaacccgcagaccg

SEQ ID NO: 50472 - DNA, 20 bp, Artificial Sequence
  MKO10050472_A_Snx3
  gRNA
gcttcaccacctacgagatc

SEQ ID NO: 50473 - DNA, 20 bp, Artificial Sequence
  MKO10050473_A_Snx3
  gRNA
attccatcgtctcctctaaa

SEQ ID NO: 50474 - DNA, 20 bp, Artificial Sequence
  MKO10050474_A_Snx4
  gRNA
cgtcgtctctccacaaagtc

SEQ ID NO: 50475 - DNA, 20 bp, Artificial Sequence
  MKO10050475_A_Snx4
  gRNA
ttacctaggcagagttcgtg

SEQ ID NO: 50476 - DNA, 20 bp, Artificial Sequence
  MKO10050476_A_Snx4
  gRNA
gtgtgctcacagactcgctg

SEQ ID NO: 50477 - DNA, 20 bp, Artificial Sequence
  MKO10050477_A_Snx5
  gRNA
caagtttacagtgcacacca

SEQ ID NO: 50478 - DNA, 20 bp, Artificial Sequence
  MKO10050478_A_Snx5
  gRNA
gaagcgatgggtcaacattc

SEQ ID NO: 50479 - DNA, 20 bp, Artificial Sequence
  MKO10050479_A_Snx5
  gRNA
tgccttgtaacagaaaactc

SEQ ID NO: 50480 - DNA, 20 bp, Artificial Sequence
  MKO10050480_A_Snx6
  gRNA
tcccgtgaagcatcaaaatc

SEQ ID NO: 50481 - DNA, 20 bp, Artificial Sequence
  MKO10050481_A_Snx6
  gRNA
ttcagtcgttcgacaacatg

SEQ ID NO: 50482 - DNA, 20 bp, Artificial Sequence
  MKO10050482_A_Snx6
  gRNA
ccagagtgacgctgctctgc

SEQ ID NO: 50483 - DNA, 20 bp, Artificial Sequence
  MKO10050483_A_Snx7
  gRNA
atgacttcattgagacccgc

SEQ ID NO: 50484 - DNA, 20 bp, Artificial Sequence
  MKO10050484_A_Snx7
  gRNA
cgctgcacaagtttctgaac

SEQ ID NO: 50485 - DNA, 20 bp, Artificial Sequence
  MKO10050485_A_Snx7
  gRNA
ccggttcttcactcctcgca

SEQ ID NO: 50486 - DNA, 20 bp, Artificial Sequence
  MKO10050486_A_Snx8
  gRNA
tcacaagttcccgtaccgca

SEQ ID NO: 50487 - DNA, 20 bp, Artificial Sequence
  MKO10050487_A_Snx8
  gRNA
tctgcattcgcccggggtcc

SEQ ID NO: 50488 - DNA, 20 bp, Artificial Sequence
  MKO10050488_A_Snx8
  gRNA
cagacgctacaatgacttcg

SEQ ID NO: 50489 - DNA, 20 bp, Artificial Sequence
  MKO10050489_A_Snx9
  gRNA
agcgctagttccgtctgtcc

SEQ ID NO: 50490 - DNA, 20 bp, Artificial Sequence
  MKO10050490_A_Snx9
  gRNA
cttacttccacgtagtcagt

SEQ ID NO: 50491 - DNA, 20 bp, Artificial Sequence
  MKO10050491_A_Snx9
  gRNA
aatgagctgaccgttactga

SEQ ID NO: 50492 - DNA, 20 bp, Artificial Sequence
  MKO10050492_A_Soat1
  gRNA
cgtcctcagcacgatcgtcg

SEQ ID NO: 50493 - DNA, 20 bp, Artificial Sequence
  MKO10050493_A_Soat1
  gRNA
agtccacgacgatcgtgctg

SEQ ID NO: 50494 - DNA, 20 bp, Artificial Sequence
  MKO10050494_A_Soat1
  gRNA
cattgaaaagtccgcatcgc

SEQ ID NO: 50495 - DNA, 20 bp, Artificial Sequence
  MKO10050495_A_Soat2
  gRNA
ggtgcaatggactcgacata

SEQ ID NO: 50496 - DNA, 20 bp, Artificial Sequence
  MKO10050496_A_Soat2
  gRNA
tgctgatgatcaggacgcat

SEQ ID NO: 50497 - DNA, 20 bp, Artificial Sequence
  MKO10050497_A_Soat2
  gRNA
gccctcatcaatgaagtcga

SEQ ID NO: 50498 - DNA, 20 bp, Artificial Sequence
  MKO10050498_A_Sobp
  gRNA
caagcgctattccctgagta

SEQ ID NO: 50499 - DNA, 20 bp, Artificial Sequence
  MKO10050499_A_Sobp
  gRNA
tagttcgcagttattcttga

SEQ ID NO: 50500 - DNA, 20 bp, Artificial Sequence
  MKO10050500_A_Sobp
  gRNA
cctttcataaagccgccagc

SEQ ID NO: 50501 - DNA, 20 bp, Artificial Sequence
  MKO10050501_A_Socs1
  gRNA
ggttaagagggatgcgcgcc

SEQ ID NO: 50502 - DNA, 20 bp, Artificial Sequence
  MKO10050502_A_Socs1
  gRNA
cgtgcgccccgtgcacgctc

SEQ ID NO: 50503 - DNA, 20 bp, Artificial Sequence
  MKO10050503_A_Socs1
  gRNA
gcgcgaagaagcagttccgt

SEQ ID NO: 50504 - DNA, 20 bp, Artificial Sequence
  MKO10050504_A_Socs2
  gRNA
tttcgccagacgcgccgcct

SEQ ID NO: 50505 - DNA, 20 bp, Artificial Sequence
  MKO10050505_A_Socs2
  gRNA
atatccgttaagacgtcagc

SEQ ID NO: 50506 - DNA, 20 bp, Artificial Sequence
  MKO10050506_A_Socs2
  gRNA
tcttaacggatatagttagt

SEQ ID NO: 50507 - DNA, 20 bp, Artificial Sequence
  MKO10050507_A_Socs3
  gRNA
ttctactggagcgccgtgac

SEQ ID NO: 50508 - DNA, 20 bp, Artificial Sequence
  MKO10050508_A_Socs3
  gRNA
ctttcttatccgcgacagct

SEQ ID NO: 50509 - DNA, 20 bp, Artificial Sequence
  MKO10050509_A_Socs3
  gRNA
cgagctgtcgcggataagaa

SEQ ID NO: 50510 - DNA, 20 bp, Artificial Sequence
  MKO10050510_A_Socs4
  gRNA
tgtaattgtacgacttacga

SEQ ID NO: 50511 - DNA, 20 bp, Artificial Sequence
  MKO10050511_A_Socs4
  gRNA
ggcagtggacgtagtcgatc

SEQ ID NO: 50512 - DNA, 20 bp, Artificial Sequence
  MKO10050512_A_Socs4
  gRNA
tagctgttcgtccattgagt

SEQ ID NO: 50513 - DNA, 20 bp, Artificial Sequence
  MKO10050513_A_Socs5
  gRNA
cctactcgcggcacgccccg

SEQ ID NO: 50514 - DNA, 20 bp, Artificial Sequence
  MKO10050514_A_Socs5
  gRNA
cccgctaccgtcgatgttac

SEQ ID NO: 50515 - DNA, 20 bp, Artificial Sequence
  MKO10050515_A_Socs5
  gRNA
ccacgcgcacgttagcagac

SEQ ID NO: 50516 - DNA, 20 bp, Artificial Sequence
  MKO10050516_A_Socs6
  gRNA
tattcaagatctcgattgcc

SEQ ID NO: 50517 - DNA, 20 bp, Artificial Sequence
  MKO10050517_A_Socs6
  gRNA
acttaatcgagcattcaatc

SEQ ID NO: 50518 - DNA, 20 bp, Artificial Sequence
  MKO10050518_A_Socs6
  gRNA
tccagtgtcacgattcatgc

SEQ ID NO: 50519 - DNA, 20 bp, Artificial Sequence
  MKO10050519_A_Socs7
  gRNA
aggtgagacagtatcgcttg

SEQ ID NO: 50520 - DNA, 20 bp, Artificial Sequence
  MKO10050520_A_Socs7
  gRNA
gctaagctaacctggggcgt

SEQ ID NO: 50521 - DNA, 20 bp, Artificial Sequence
  MKO10050521_A_Socs7
  gRNA
acgctctgatgggagcaatt

SEQ ID NO: 50522 - DNA, 20 bp, Artificial Sequence
  MKO10050522_A_Sod1
  gRNA
taaataggctgtaccagtgc

SEQ ID NO: 50523 - DNA, 20 bp, Artificial Sequence
  MKO10050523_A_Sod1
  gRNA
aaaaacttaccaccattgta

SEQ ID NO: 50524 - DNA, 20 bp, Artificial Sequence
  MKO10050524_A_Sod1
  gRNA
tgttaggcatgttggagacc

SEQ ID NO: 50525 - DNA, 20 bp, Artificial Sequence
  MKO10050525_A_Sod2
  gRNA
tccagcgcgccatagtcgta

SEQ ID NO: 50526 - DNA, 20 bp, Artificial Sequence
  MKO10050526_A_Sod2
  gRNA
gaacaatctcaacgccaccg

SEQ ID NO: 50527 - DNA, 20 bp, Artificial Sequence
  MKO10050527_A_Sod2
  gRNA
gataggccttattccgctgc

SEQ ID NO: 50528 - DNA, 20 bp, Artificial Sequence
  MKO10050528_A_Sod3
  gRNA
gtgcggtccggccagcgacg

SEQ ID NO: 50529 - DNA, 20 bp, Artificial Sequence
  MKO10050529_A_Sod3
  gRNA
cgtcggcctgaccgcgtcgc

SEQ ID NO: 50530 - DNA, 20 bp, Artificial Sequence
  MKO10050530_A_Sod3
  gRNA
gccgcactacaacccgatgg

SEQ ID NO: 50531 - DNA, 20 bp, Artificial Sequence
  MKO10050531_A_Soga1
  gRNA
tgtcgtccatctcggctcgc

SEQ ID NO: 50532 - DNA, 20 bp, Artificial Sequence
  MKO10050532_A_Soga1
  gRNA
ataccgctcggagcacgagc

SEQ ID NO: 50533 - DNA, 20 bp, Artificial Sequence
  MKO10050533_A_Soga1
  gRNA
agaacgaggggcttcgacag

SEQ ID NO: 50534 - DNA, 20 bp, Artificial Sequence
  MKO10050534_A_Soga2
  gRNA
ctacaccgctgcgtcgggag

SEQ ID NO: 50535 - DNA, 20 bp, Artificial Sequence
  MKO10050535_A_Soga2
  gRNA
ggtcgcctctcccgacgcag

SEQ ID NO: 50536 - DNA, 20 bp, Artificial Sequence
  MKO10050536_A_Soga2
  gRNA
acaccacgaactcgagaccg

SEQ ID NO: 50537 - DNA, 20 bp, Artificial Sequence
  MKO10050537_A_Soga3
  gRNA
ccgcgagctgtcatggccgc

SEQ ID NO: 50538 - DNA, 20 bp, Artificial Sequence
  MKO10050538_A_Soga3
  gRNA
gtctgcgatgagccgatcga

SEQ ID NO: 50539 - DNA, 20 bp, Artificial Sequence
  MKO10050539_A_Soga3
  gRNA
tccgcaaagccgagcgcaaa

SEQ ID NO: 50540 - DNA, 20 bp, Artificial Sequence
  MKO10050540_A_Sohlh1
  gRNA
gaccacgtttctccgaagac

SEQ ID NO: 50541 - DNA, 20 bp, Artificial Sequence
  MKO10050541_A_Sohlh1
  gRNA
tggtcagcgagagagaacgc

SEQ ID NO: 50542 - DNA, 20 bp, Artificial Sequence
  MKO10050542_A_Sohlh1
  gRNA
cactgaatgacaacgcgctc

SEQ ID NO: 50543 - DNA, 20 bp, Artificial Sequence
  MKO10050543_A_Sohlh2
  gRNA
cagacgtcccgcagtgaact

SEQ ID NO: 50544 - DNA, 20 bp, Artificial Sequence
  MKO10050544_A_Sohlh2
  gRNA
aacgccctccgagttcactg

SEQ ID NO: 50545 - DNA, 20 bp, Artificial Sequence
  MKO10050545_A_Sohlh2
  gRNA
tgaacacggtgatacactac

SEQ ID NO: 50546 - DNA, 20 bp, Artificial Sequence
  MKO10050546_A_Son
  gRNA
cagaccgtgatcttctccga

SEQ ID NO: 50547 - DNA, 20 bp, Artificial Sequence
  MKO10050547_A_Son
  gRNA
ctcggagtcgaaccccgagt

SEQ ID NO: 50548 - DNA, 20 bp, Artificial Sequence
  MKO10050548_A_Son
  gRNA
cctgaaaacctgctcgatgt

SEQ ID NO: 50549 - DNA, 20 bp, Artificial Sequence
  MKO10050549_A_Sorbs1
  gRNA
ggagggctgggcgttgccat

SEQ ID NO: 50550 - DNA, 20 bp, Artificial Sequence
  MKO10050550_A_Sorbs1
  gRNA
ggttcccctgtaggaagacg

SEQ ID NO: 50551 - DNA, 20 bp, Artificial Sequence
  MKO10050551_A_Sorbs1
  gRNA
ccgaagcatgaaagcaagtc

SEQ ID NO: 50552 - DNA, 20 bp, Artificial Sequence
  MKO10050552_A_Sorbs2
  gRNA
agacaaaagatcaccgaccc

SEQ ID NO: 50553 - DNA, 20 bp, Artificial Sequence
  MKO10050553_A_Sorbs2
  gRNA
gcatctccgttcagtgtctc

SEQ ID NO: 50554 - DNA, 20 bp, Artificial Sequence
  MKO10050554_A_Sorbs2
  gRNA
acgttatacctgcagccaat

SEQ ID NO: 50555 - DNA, 20 bp, Artificial Sequence
  MKO10050555_A_Sorbs3
  gRNA
caagcgctgggtgaagtacg

SEQ ID NO: 50556 - DNA, 20 bp, Artificial Sequence
  MKO10050556_A_Sorbs3
  gRNA
gagccaccattccggatcac

SEQ ID NO: 50557 - DNA, 20 bp, Artificial Sequence
  MKO10050557_A_Sorbs3
  gRNA
ggtcacctccgaacccatat

SEQ ID NO: 50558 - DNA, 20 bp, Artificial Sequence
  MKO10050558_A_Sorcs1
  gRNA
cggggaccgtgcgctgtttc

SEQ ID NO: 50559 - DNA, 20 bp, Artificial Sequence
  MKO10050559_A_Sorcs1
  gRNA
aattacaggtcaaccgatta

SEQ ID NO: 50560 - DNA, 20 bp, Artificial Sequence
  MKO10050560_A_Sorcs1
  gRNA
ccgctgcacgctctggccgt

SEQ ID NO: 50561 - DNA, 20 bp, Artificial Sequence
  MKO10050561_A_Sorcs2
  gRNA
gtaggttgtcccaaaatctg

SEQ ID NO: 50562 - DNA, 20 bp, Artificial Sequence
  MKO10050562_A_Sorcs2
  gRNA
caaggtgctggcctacacca

SEQ ID NO: 50563 - DNA, 20 bp, Artificial Sequence
  MKO10050563_A_Sorcs2
  gRNA
caccgagggatgagctcacc

SEQ ID NO: 50564 - DNA, 20 bp, Artificial Sequence
  MKO10050564_A_Sorcs3
  gRNA
atgaacgcatcacgcccaac

SEQ ID NO: 50565 - DNA, 20 bp, Artificial Sequence
  MKO10050565_A_Sorcs3
  gRNA
ccatcgtctgccgaagtcca

SEQ ID NO: 50566 - DNA, 20 bp, Artificial Sequence
  MKO10050566_A_Sorcs3
  gRNA
tactgcaggtcagtagatta

SEQ ID NO: 50567 - DNA, 20 bp, Artificial Sequence
  MKO10050567_A_Sord
  gRNA
ctaccatttgggccgagctc

SEQ ID NO: 50568 - DNA, 20 bp, Artificial Sequence
  MKO10050568_A_Sord
  gRNA
tcttaccagcgccacacaca

SEQ ID NO: 50569 - DNA, 20 bp, Artificial Sequence
  MKO10050569_A_Sord
  gRNA
cagcattgtgcttgtagaat

SEQ ID NO: 50570 - DNA, 20 bp, Artificial Sequence
  MKO10050570_A_Sorl1
  gRNA
atgcttacgcccaatacctc

SEQ ID NO: 50571 - DNA, 20 bp, Artificial Sequence
  MKO10050571_A_Sorl1
  gRNA
aggagatcagccgcccggaa

SEQ ID NO: 50572 - DNA, 20 bp, Artificial Sequence
  MKO10050572_A_Sorl1
  gRNA
gtgtatgtgtcttacgacta

SEQ ID NO: 50573 - DNA, 20 bp, Artificial Sequence
  MKO10050573_A_Sort1
  gRNA
gccaaattccgtccgaatga

SEQ ID NO: 50574 - DNA, 20 bp, Artificial Sequence
  MKO10050574_A_Sort1
  gRNA
gtctcaccttcgatacaact

SEQ ID NO: 50575 - DNA, 20 bp, Artificial Sequence
  MKO10050575_A_Sort1
  gRNA
acggaatttggcatggctat

SEQ ID NO: 50576 - DNA, 20 bp, Artificial Sequence
  MKO10050576_A_Sos1
  gRNA
gatgaagagccttccacctc

SEQ ID NO: 50577 - DNA, 20 bp, Artificial Sequence
  MKO10050577_A_Sos1
  gRNA
cggttataaaattgaccacc

SEQ ID NO: 50578 - DNA, 20 bp, Artificial Sequence
  MKO10050578_A_Sos1
  gRNA
ttcctcatccaattgataag

SEQ ID NO: 50579 - DNA, 20 bp, Artificial Sequence
  MKO10050579_A_Sos2
  gRNA
taaactattatgacctcgtc

SEQ ID NO: 50580 - DNA, 20 bp, Artificial Sequence
  MKO10050580_A_Sos2
  gRNA
tttgatggacatgttcgatc

SEQ ID NO: 50581 - DNA, 20 bp, Artificial Sequence
  MKO10050581_A_Sos2
  gRNA
gctgcttaataagctatgca

SEQ ID NO: 50582 - DNA, 20 bp, Artificial Sequence
  MKO10050582_A_Sostdc1
  gRNA
gcgcacctacaaaatcaccg

SEQ ID NO: 50583 - DNA, 20 bp, Artificial Sequence
  MKO10050583_A_Sostdc1
  gRNA
tcacggcgtgcaagtgcaag

SEQ ID NO: 50584 - DNA, 20 bp, Artificial Sequence
  MKO10050584_A_Sostdc1
  gRNA
acagcaccctgaatcaagcc

SEQ ID NO: 50585 - DNA, 20 bp, Artificial Sequence
  MKO10050585_A_Sost
  gRNA
ccaccacttcacgcgcccga

SEQ ID NO: 50586 - DNA, 20 bp, Artificial Sequence
  MKO10050586_A_Sost
  gRNA
gtgaagtggtggcgcccgaa

SEQ ID NO: 50587 - DNA, 20 bp, Artificial Sequence
  MKO10050587_A_Sost
  gRNA
tcccgtacctttggcgtcat

SEQ ID NO: 50588 - DNA, 20 bp, Artificial Sequence
  MKO10050588_A_Sowaha
  gRNA
cagtaaacgcctcagcgcgt

SEQ ID NO: 50589 - DNA, 20 bp, Artificial Sequence
  MKO10050589_A_Sowaha
  gRNA
cacgccggccgctgtagtcg

SEQ ID NO: 50590 - DNA, 20 bp, Artificial Sequence
  MKO10050590_A_Sowaha
  gRNA
agagcgcgcgttcacgtcca

SEQ ID NO: 50591 - DNA, 20 bp, Artificial Sequence
  MKO10050591_A_Sowahb
  gRNA
gcagctctgcgttacgcact

SEQ ID NO: 50592 - DNA, 20 bp, Artificial Sequence
  MKO10050592_A_Sowahb
  gRNA
ttcgggctgtcctccgggct

SEQ ID NO: 50593 - DNA, 20 bp, Artificial Sequence
  MKO10050593_A_Sowahb
  gRNA
cgcgaccctcacgtgtctcc

SEQ ID NO: 50594 - DNA, 20 bp, Artificial Sequence
  MKO10050594_A_Sowahc
  gRNA
ccgggcgggacactcggaat

SEQ ID NO: 50595 - DNA, 20 bp, Artificial Sequence
  MKO10050595_A_Sowahc
  gRNA
ccgagagcccccgcgtatcg

SEQ ID NO: 50596 - DNA, 20 bp, Artificial Sequence
  MKO10050596_A_Sowahc
  gRNA
caccgtgcgcaccgatcccg

SEQ ID NO: 50597 - DNA, 20 bp, Artificial Sequence
  MKO10050597_A_Sowahd
  gRNA
gccactgtgatctcgacgcg

SEQ ID NO: 50598 - DNA, 20 bp, Artificial Sequence
  MKO10050598_A_Sowahd
  gRNA
ccgtttgatgtgagcgcccc

SEQ ID NO: 50599 - DNA, 20 bp, Artificial Sequence
  MKO10050599_A_Sowahd
  gRNA
gtcgctgggcgcctccgact

SEQ ID NO: 50600 - DNA, 20 bp, Artificial Sequence
  MKO10050600_A_Sox10
  gRNA
gggaagccccacatcgactt

SEQ ID NO: 50601 - DNA, 20 bp, Artificial Sequence
  MKO10050601_A_Sox10
  gRNA
cccagcgacggcgcgctgcc

SEQ ID NO: 50602 - DNA, 20 bp, Artificial Sequence
  MKO10050602_A_Sox10
  gRNA
cgggatagagtcgtatatac

SEQ ID NO: 50603 - DNA, 20 bp, Artificial Sequence
  MKO10050603_A_Sox11
  gRNA
ccgcgcgcacttcgtcgtac

SEQ ID NO: 50604 - DNA, 20 bp, Artificial Sequence
  MKO10050604_A_Sox11
  gRNA
cctgtacgacgaagtgcgcg

SEQ ID NO: 50605 - DNA, 20 bp, Artificial Sequence
  MKO10050605_A_Sox11
  gRNA
ggtccttatccaccagcgac

SEQ ID NO: 50606 - DNA, 20 bp, Artificial Sequence
  MKO10050606_A_Sox12
  gRNA
ctcgtctagtatcgccgacc

SEQ ID NO: 50607 - DNA, 20 bp, Artificial Sequence
  MKO10050607_A_Sox12
  gRNA
ccgcttaatgtggccgctcg

SEQ ID NO: 50608 - DNA, 20 bp, Artificial Sequence
  MKO10050608_A_Sox12
  gRNA
tcgaaatgtgacgtgcccga

SEQ ID NO: 50609 - DNA, 20 bp, Artificial Sequence
  MKO10050609_A_Sox13
  gRNA
cttcaaccgcaacttacagg

SEQ ID NO: 50610 - DNA, 20 bp, Artificial Sequence
  MKO10050610_A_Sox13
  gRNA
ccgtaaggagctggtcccga

SEQ ID NO: 50611 - DNA, 20 bp, Artificial Sequence
  MKO10050611_A_Sox13
  gRNA
gcctaccctcctgtaagttg

SEQ ID NO: 50612 - DNA, 20 bp, Artificial Sequence
  MKO10050612_A_Sox14
  gRNA
ggggttacatggccgtagcg

SEQ ID NO: 50613 - DNA, 20 bp, Artificial Sequence
  MKO10050613_A_Sox14
  gRNA
cctgggccatcttgcgccgc

SEQ ID NO: 50614 - DNA, 20 bp, Artificial Sequence
  MKO10050614_A_Sox14
  gRNA
tgagcgcgcccgagaaagcc

SEQ ID NO: 50615 - DNA, 20 bp, Artificial Sequence
  MKO10050615_A_Sox15
  gRNA
acttgtagtcgggatagtcg

SEQ ID NO: 50616 - DNA, 20 bp, Artificial Sequence
  MKO10050616_A_Sox15
  gRNA
ctctgttcagcgccgccaga

SEQ ID NO: 50617 - DNA, 20 bp, Artificial Sequence
  MKO10050617_A_Sox15
  gRNA
gccagttaaaggtgggttac

SEQ ID NO: 50618 - DNA, 20 bp, Artificial Sequence
  MKO10050618_A_Sox17
  gRNA
ccggatgcgagactccgctt

SEQ ID NO: 50619 - DNA, 20 bp, Artificial Sequence
  MKO10050619_A_Sox17
  gRNA
gaaaccgcgccccgcacttg

SEQ ID NO: 50620 - DNA, 20 bp, Artificial Sequence
  MKO10050620_A_Sox17
  gRNA
ctgggcgctcccgcgctcga

SEQ ID NO: 50621 - DNA, 20 bp, Artificial Sequence
  MKO10050621_A_Sox18
  gRNA
ccgccgaatgcgcaactcgt

SEQ ID NO: 50622 - DNA, 20 bp, Artificial Sequence
  MKO10050622_A_Sox18
  gRNA
ctgccgacgagttgcgcatt

SEQ ID NO: 50623 - DNA, 20 bp, Artificial Sequence
  MKO10050623_A_Sox18
  gRNA
ccgcaaaaaacaggcgcgca

SEQ ID NO: 50624 - DNA, 20 bp, Artificial Sequence
  MKO10050624_A_Sox1
  gRNA
ggagccgagcggcagtccgc

SEQ ID NO: 50625 - DNA, 20 bp, Artificial Sequence
  MKO10050625_A_Sox1
  gRNA
cgcggcgctagatgtgcgtc

SEQ ID NO: 50626 - DNA, 20 bp, Artificial Sequence
  MKO10050626_A_Sox1
  gRNA
cggcatcccttacggcgccg

SEQ ID NO: 50627 - DNA, 20 bp, Artificial Sequence
  MKO10050627_A_Sox21
  gRNA
gggtcatagcgcggcagcgt

SEQ ID NO: 50628 - DNA, 20 bp, Artificial Sequence
  MKO10050628_A_Sox21
  gRNA
taccccagcgacgacgcgta

SEQ ID NO: 50629 - DNA, 20 bp, Artificial Sequence
  MKO10050629_A_Sox21
  gRNA
cctgccgtacgcgtcgtcgc

SEQ ID NO: 50630 - DNA, 20 bp, Artificial Sequence
  MKO10050630_A_Sox2
  gRNA
ggtgggcgagccgttcatgt

SEQ ID NO: 50631 - DNA, 20 bp, Artificial Sequence
  MKO10050631_A_Sox2
  gRNA
gctacgcgcacatgaacggc

SEQ ID NO: 50632 - DNA, 20 bp, Artificial Sequence
  MKO10050632_A_Sox2
  gRNA
aaagtttccactccgcgccc

SEQ ID NO: 50633 - DNA, 20 bp, Artificial Sequence
  MKO10050633_A_Sox30
  gRNA
ccgaagcactccgatacccc

SEQ ID NO: 50634 - DNA, 20 bp, Artificial Sequence
  MKO10050634_A_Sox30
  gRNA
caatgtcactgacagcgacg

SEQ ID NO: 50635 - DNA, 20 bp, Artificial Sequence
  MKO10050635_A_Sox30
  gRNA
taccttgacgggaagtaatg

SEQ ID NO: 50636 - DNA, 20 bp, Artificial Sequence
  MKO10050636_A_Sox3
  gRNA
gagttcccgccgactttgcg

SEQ ID NO: 50637 - DNA, 20 bp, Artificial Sequence
  MKO10050637_A_Sox3
  gRNA
gcgctgcgagtgcgaagcga

SEQ ID NO: 50638 - DNA, 20 bp, Artificial Sequence
  MKO10050638_A_Sox3
  gRNA
cgaagggctccgcgcaaagt

SEQ ID NO: 50639 - DNA, 20 bp, Artificial Sequence
  MKO10050639_A_Sox4
  gRNA
gctcctcatcggcgctcgat

SEQ ID NO: 50640 - DNA, 20 bp, Artificial Sequence
  MKO10050640_A_Sox4
  gRNA
cgccttgccgcccgtcgacg

SEQ ID NO: 50641 - DNA, 20 bp, Artificial Sequence
  MKO10050641_A_Sox4
  gRNA
gggagtccgcaccttgtaga

SEQ ID NO: 50642 - DNA, 20 bp, Artificial Sequence
  MKO10050642_A_Sox5
  gRNA
aagcgaccagcctctccgta

SEQ ID NO: 50643 - DNA, 20 bp, Artificial Sequence
  MKO10050643_A_Sox5
  gRNA
taagctgcccttgcgccgct

SEQ ID NO: 50644 - DNA, 20 bp, Artificial Sequence
  MKO10050644_A_Sox5
  gRNA
gtccgtgtcgagcgcagccc

SEQ ID NO: 50645 - DNA, 20 bp, Artificial Sequence
  MKO10050645_A_Sox6
  gRNA
aggctccctttgcggcgttc

SEQ ID NO: 50646 - DNA, 20 bp, Artificial Sequence
  MKO10050646_A_Sox6
  gRNA
gtggtgaggtagacgtattt

SEQ ID NO: 50647 - DNA, 20 bp, Artificial Sequence
  MKO10050647_A_Sox6
  gRNA
ctaaatacgagtgaacttct

SEQ ID NO: 50648 - DNA, 20 bp, Artificial Sequence
  MKO10050648_A_Sox7
  gRNA
caagcgcctctgcaagcgcg

SEQ ID NO: 50649 - DNA, 20 bp, Artificial Sequence
  MKO10050649_A_Sox7
  gRNA
ctatccgtggaccgagggac

SEQ ID NO: 50650 - DNA, 20 bp, Artificial Sequence
  MKO10050650_A_Sox7
  gRNA
ctgcacagctgctaccgcga

SEQ ID NO: 50651 - DNA, 20 bp, Artificial Sequence
  MKO10050651_A_Sox8
  gRNA
acaggcggcgcgccgcaagc

SEQ ID NO: 50652 - DNA, 20 bp, Artificial Sequence
  MKO10050652_A_Sox8
  gRNA
cctatgcctgtgcgcggcgg

SEQ ID NO: 50653 - DNA, 20 bp, Artificial Sequence
  MKO10050653_A_Sox8
  gRNA
catgtgactggtcgttgtag

SEQ ID NO: 50654 - DNA, 20 bp, Artificial Sequence
  MKO10050654_A_Sox9
  gRNA
cagcgtagtcgtattgcgag

SEQ ID NO: 50655 - DNA, 20 bp, Artificial Sequence
  MKO10050655_A_Sox9
  gRNA
ccgtcttgatgtgcgttcgc

SEQ ID NO: 50656 - DNA, 20 bp, Artificial Sequence
  MKO10050656_A_Sox9
  gRNA
ggtgttctccgtgtccgagc

SEQ ID NO: 50657 - DNA, 20 bp, Artificial Sequence
  MKO10050657_A_Sp100
  gRNA
aatctcattcgtagaagctt

SEQ ID NO: 50658 - DNA, 20 bp, Artificial Sequence
  MKO10050658_A_Sp100
  gRNA
taccttgttcaagacttagc

SEQ ID NO: 50659 - DNA, 20 bp, Artificial Sequence
  MKO10050659_A_Sp100
  gRNA
agatctaaggatgacccatt

SEQ ID NO: 50660 - DNA, 20 bp, Artificial Sequence
  MKO10050660_A_Sp110
  gRNA
gtacttccctggccatttcc

SEQ ID NO: 50661 - DNA, 20 bp, Artificial Sequence
  MKO10050661_A_Sp110
  gRNA
ccccgagctgtgcctctcct

SEQ ID NO: 50662 - DNA, 20 bp, Artificial Sequence
  MKO10050662_A_Sp110
  gRNA
tctggaagcctgtcaaaatc

SEQ ID NO: 50663 - DNA, 20 bp, Artificial Sequence
  MKO10050663_A_Sp140
  gRNA
acaaacaagacaagagcccc

SEQ ID NO: 50664 - DNA, 20 bp, Artificial Sequence
  MKO10050664_A_Sp140
  gRNA
tctgctccgagatgaagtct

SEQ ID NO: 50665 - DNA, 20 bp, Artificial Sequence
  MKO10050665_A_Sp140
  gRNA
gtcccctaggacaatcccag

SEQ ID NO: 50666 - DNA, 20 bp, Artificial Sequence
  MKO10050666_A_Sp1
  gRNA
atctccgagcacacttgcgc

SEQ ID NO: 50667 - DNA, 20 bp, Artificial Sequence
  MKO10050667_A_Sp1
  gRNA
catatactttgccgcatcct

SEQ ID NO: 50668 - DNA, 20 bp, Artificial Sequence
  MKO10050668_A_Sp1
  gRNA
ggttggtgtccgaatgatga

SEQ ID NO: 50669 - DNA, 20 bp, Artificial Sequence
  MKO10050669_A_Sp2
  gRNA
atgcgccgccgtttctcccc

SEQ ID NO: 50670 - DNA, 20 bp, Artificial Sequence
  MKO10050670_A_Sp2
  gRNA
ctgaccgtgcagaacgtttc

SEQ ID NO: 50671 - DNA, 20 bp, Artificial Sequence
  MKO10050671_A_Sp2
  gRNA
caatatcgctggtgttcacc

SEQ ID NO: 50672 - DNA, 20 bp, Artificial Sequence
  MKO10050672_A_Sp3
  gRNA
cgaaaagcccgtgaaacaag

SEQ ID NO: 50673 - DNA, 20 bp, Artificial Sequence
  MKO10050673_A_Sp3
  gRNA
gctgctgtagatactcgccg

SEQ ID NO: 50674 - DNA, 20 bp, Artificial Sequence
  MKO10050674_A_Sp3
  gRNA
atcgccgggcgacgacgacg

SEQ ID NO: 50675 - DNA, 20 bp, Artificial Sequence
  MKO10050675_A_Sp4
  gRNA
gggcgattcaggcatagtac

SEQ ID NO: 50676 - DNA, 20 bp, Artificial Sequence
  MKO10050676_A_Sp4
  gRNA
gggattgctaatgcgacaat

SEQ ID NO: 50677 - DNA, 20 bp, Artificial Sequence
  MKO10050677_A_Sp4
  gRNA
aatggtgcgttcagaactac

SEQ ID NO: 50678 - DNA, 20 bp, Artificial Sequence
  MKO10050678_A_Sp5
  gRNA
agcatcccgcaatcgggcgc

SEQ ID NO: 50679 - DNA, 20 bp, Artificial Sequence
  MKO10050679_A_Sp5
  gRNA
ccaacactagaccccgttgc

SEQ ID NO: 50680 - DNA, 20 bp, Artificial Sequence
  MKO10050680_A_Sp5
  gRNA
cctccggaacgactcactgc

SEQ ID NO: 50681 - DNA, 20 bp, Artificial Sequence
  MKO10050681_A_Sp6
  gRNA
gccggaaccacgattcatag

SEQ ID NO: 50682 - DNA, 20 bp, Artificial Sequence
  MKO10050682_A_Sp6
  gRNA
ctcgcaggttacccgcgagg

SEQ ID NO: 50683 - DNA, 20 bp, Artificial Sequence
  MKO10050683_A_Sp6
  gRNA
cggtgaagcgtgaggcgcgt

SEQ ID NO: 50684 - DNA, 20 bp, Artificial Sequence
  MKO10050684_A_Sp7
  gRNA
cccgggtgtgagtgcgcacg

SEQ ID NO: 50685 - DNA, 20 bp, Artificial Sequence
  MKO10050685_A_Sp7
  gRNA
gttcactcgctctgacgagc

SEQ ID NO: 50686 - DNA, 20 bp, Artificial Sequence
  MKO10050686_A_Sp7
  gRNA
gatggcgtcctctctgcttg

SEQ ID NO: 50687 - DNA, 20 bp, Artificial Sequence
  MKO10050687_A_Sp8
  gRNA
ggacccccctaactgcgccg

SEQ ID NO: 50688 - DNA, 20 bp, Artificial Sequence
  MKO10050688_A_Sp8
  gRNA
gctatcctgcgagtgcgctc

SEQ ID NO: 50689 - DNA, 20 bp, Artificial Sequence
  MKO10050689_A_Sp8
  gRNA
cagcggcgacggggcggaat

SEQ ID NO: 50690 - DNA, 20 bp, Artificial Sequence
  MKO10050690_A_Sp9
  gRNA
ccacgatgacgccgcgccgt

SEQ ID NO: 50691 - DNA, 20 bp, Artificial Sequence
  MKO10050691_A_Sp9
  gRNA
cgcccgccgctagggtcgag

SEQ ID NO: 50692 - DNA, 20 bp, Artificial Sequence
  MKO10050692_A_Sp9
  gRNA
acttaccccaagtatagacg

SEQ ID NO: 50693 - DNA, 20 bp, Artificial Sequence
  MKO10050693_A_Spa17
  gRNA
aagactataccttgaatgcg

SEQ ID NO: 50694 - DNA, 20 bp, Artificial Sequence
  MKO10050694_A_Spa17
  gRNA
aaatacgctgcggcaaaagc

SEQ ID NO: 50695 - DNA, 20 bp, Artificial Sequence
  MKO10050695_A_Spa17
  gRNA
acccactaccgaattccaca

SEQ ID NO: 50696 - DNA, 20 bp, Artificial Sequence
  MKO10050696_A_Spaca1
  gRNA
aacgagagaaattcgtcctc

SEQ ID NO: 50697 - DNA, 20 bp, Artificial Sequence
  MKO10050697_A_Spaca1
  gRNA
aacttacagccacaatcaac

SEQ ID NO: 50698 - DNA, 20 bp, Artificial Sequence
  MKO10050698_A_Spaca1
  gRNA
tgccgtggacctgttgattg

SEQ ID NO: 50699 - DNA, 20 bp, Artificial Sequence
  MKO10050699_A_Spaca3
  gRNA
tggctaccggggttataacc

SEQ ID NO: 50700 - DNA, 20 bp, Artificial Sequence
  MKO10050700_A_Spaca3
  gRNA
tgcagaaccctcgcctcgaa

SEQ ID NO: 50701 - DNA, 20 bp, Artificial Sequence
  MKO10050701_A_Spaca3
  gRNA
agagatgcatgacttcggtc

SEQ ID NO: 50702 - DNA, 20 bp, Artificial Sequence
  MKO10050702_A_Spaca4
  gRNA
gatgacgaagattgcttcac

SEQ ID NO: 50703 - DNA, 20 bp, Artificial Sequence
  MKO10050703_A_Spaca4
  gRNA
tgtagctgatgggttcctcg

SEQ ID NO: 50704 - DNA, 20 bp, Artificial Sequence
  MKO10050704_A_Spaca4
  gRNA
cacctttgcaataagggcac

SEQ ID NO: 50705 - DNA, 20 bp, Artificial Sequence
  MKO10050705_A_Spaca5
  gRNA
ctctgcaacatcgattgtaa

SEQ ID NO: 50706 - DNA, 20 bp, Artificial Sequence
  MKO10050706_A_Spaca5
  gRNA
cattacaatcgatgttgcag

SEQ ID NO: 50707 - DNA, 20 bp, Artificial Sequence
  MKO10050707_A_Spaca5
  gRNA
cctgctcaaccgccatattc

SEQ ID NO: 50708 - DNA, 20 bp, Artificial Sequence
  MKO10050708_A_Spaca6
  gRNA
ctctcacctggacaatcgag

SEQ ID NO: 50709 - DNA, 20 bp, Artificial Sequence
  MKO10050709_A_Spaca6
  gRNA
gatctgcctctcgattgtcc

SEQ ID NO: 50710 - DNA, 20 bp, Artificial Sequence
  MKO10050710_A_Spaca6
  gRNA
taccttcagactatgatgag

SEQ ID NO: 50711 - DNA, 20 bp, Artificial Sequence
  MKO10050711_A_Spaca7
  gRNA
gttgtcagtatcgatgatct

SEQ ID NO: 50712 - DNA, 20 bp, Artificial Sequence
  MKO10050712_A_Spaca7
  gRNA
gagccaccctcgtctcctga

SEQ ID NO: 50713 - DNA, 20 bp, Artificial Sequence
  MKO10050713_A_Spaca7
  gRNA
gaaaacatacccgaagcatt

SEQ ID NO: 50714 - DNA, 20 bp, Artificial Sequence
  MKO10050714_A_Spag11a
  gRNA
caccgtgtgcctcatgcaac

SEQ ID NO: 50715 - DNA, 20 bp, Artificial Sequence
  MKO10050715_A_Spag11a
  gRNA
gggatatctgctccgacccc

SEQ ID NO: 50716 - DNA, 20 bp, Artificial Sequence
  MKO10050716_A_Spag11a
  gRNA
gacatttacctgagtttcct

SEQ ID NO: 50717 - DNA, 20 bp, Artificial Sequence
  MKO10050717_A_Spag11b
  gRNA
gcttgacttaccgtggtaag

SEQ ID NO: 50718 - DNA, 20 bp, Artificial Sequence
  MKO10050718_A_Spag11b
  gRNA
gacccatttactcctcgagc

SEQ ID NO: 50719 - DNA, 20 bp, Artificial Sequence
  MKO10050719_A_Spag11b
  gRNA
tcagaacggatgtaagcagc

SEQ ID NO: 50720 - DNA, 20 bp, Artificial Sequence
  MKO10050720_A_Spag16
  gRNA
taatggtttaccactcggcc

SEQ ID NO: 50721 - DNA, 20 bp, Artificial Sequence
  MKO10050721_A_Spag16
  gRNA
tgttcccgatgtctacagcc

SEQ ID NO: 50722 - DNA, 20 bp, Artificial Sequence
  MKO10050722_A_Spag16
  gRNA
atcttccgatgtttccgtta

SEQ ID NO: 50723 - DNA, 20 bp, Artificial Sequence
  MKO10050723_A_Spag17
  gRNA
acactgaccgatataggatt

SEQ ID NO: 50724 - DNA, 20 bp, Artificial Sequence
  MKO10050724_A_Spag17
  gRNA
ttactcacctcgtaatgtaa

SEQ ID NO: 50725 - DNA, 20 bp, Artificial Sequence
  MKO10050725_A_Spag17
  gRNA
caatttaccgttacattacg

SEQ ID NO: 50726 - DNA, 20 bp, Artificial Sequence
  MKO10050726_A_Spag1
  gRNA
ccactcttccgctgaaaagc

SEQ ID NO: 50727 - DNA, 20 bp, Artificial Sequence
  MKO10050727_A_Spag1
  gRNA
tcgcaaaattccgtgagttc

SEQ ID NO: 50728 - DNA, 20 bp, Artificial Sequence
  MKO10050728_A_Spag1
  gRNA
cagcaggtggagccgcggac

SEQ ID NO: 50729 - DNA, 20 bp, Artificial Sequence
  MKO10050729_A_Spag4
  gRNA
agaccagcccatcgactgcc

SEQ ID NO: 50730 - DNA, 20 bp, Artificial Sequence
  MKO10050730_A_Spag4
  gRNA
actcaaccttctcccgatcc

SEQ ID NO: 50731 - DNA, 20 bp, Artificial Sequence
  MKO10050731_A_Spag4
  gRNA
ggcaggagatgcctaccccg

SEQ ID NO: 50732 - DNA, 20 bp, Artificial Sequence
  MKO10050732_A_Spag5
  gRNA
gacctttccctgaatcggcg

SEQ ID NO: 50733 - DNA, 20 bp, Artificial Sequence
  MKO10050733_A_Spag5
  gRNA
taccttgtcccgacacgact

SEQ ID NO: 50734 - DNA, 20 bp, Artificial Sequence
  MKO10050734_A_Spag5
  gRNA
caagcttctatgtgcgttga

SEQ ID NO: 50735 - DNA, 20 bp, Artificial Sequence
  MKO10050735_A_Spag6
  gRNA
ccatctgcacgaattgcgtc

SEQ ID NO: 50736 - DNA, 20 bp, Artificial Sequence
  MKO10050736_A_Spag6
  gRNA
tctgcagcgtttcgatgttt

SEQ ID NO: 50737 - DNA, 20 bp, Artificial Sequence
  MKO10050737_A_Spag6
  gRNA
tgcaatgtatccgagtgccc

SEQ ID NO: 50738 - DNA, 20 bp, Artificial Sequence
  MKO10050738_A_Spag7
  gRNA
gagctagactcctaccgtca

SEQ ID NO: 50739 - DNA, 20 bp, Artificial Sequence
  MKO10050739_A_Spag7
  gRNA
ctccgctctatcttgttcat

SEQ ID NO: 50740 - DNA, 20 bp, Artificial Sequence
  MKO10050740_A_Spag7
  gRNA
tctgatttcatccaggacag

SEQ ID NO: 50741 - DNA, 20 bp, Artificial Sequence
  MKO10050741_A_Spag8
  gRNA
cccgtaaagactgtcagaag

SEQ ID NO: 50742 - DNA, 20 bp, Artificial Sequence
  MKO10050742_A_Spag8
  gRNA
gctgaggtctgccatattac

SEQ ID NO: 50743 - DNA, 20 bp, Artificial Sequence
  MKO10050743_A_Spag8
  gRNA
gaagctctttgagaccgagt

SEQ ID NO: 50744 - DNA, 20 bp, Artificial Sequence
  MKO10050744_A_Spag9
  gRNA
cattgaatccactcctgaat

SEQ ID NO: 50745 - DNA, 20 bp, Artificial Sequence
  MKO10050745_A_Spag9
  gRNA
ttcaggctggtatgagaacg

SEQ ID NO: 50746 - DNA, 20 bp, Artificial Sequence
  MKO10050746_A_Spag9
  gRNA
tcctcctgatactccgtcaa

SEQ ID NO: 50747 - DNA, 20 bp, Artificial Sequence
  MKO10050747_A_Spam1
  gRNA
gctaagcccaatttgtcgtc

SEQ ID NO: 50748 - DNA, 20 bp, Artificial Sequence
  MKO10050748_A_Spam1
  gRNA
ctatgtccgctaccgagttg

SEQ ID NO: 50749 - DNA, 20 bp, Artificial Sequence
  MKO10050749_A_Spam1
  gRNA
gtactgactagtgtcttccg

SEQ ID NO: 50750 - DNA, 20 bp, Artificial Sequence
  MKO10050750_A_Sparcl1
  gRNA
cctcgccgccgccatatttg

SEQ ID NO: 50751 - DNA, 20 bp, Artificial Sequence
  MKO10050751_A_Sparcl1
  gRNA
cctttgtgatgtttgcgcgt

SEQ ID NO: 50752 - DNA, 20 bp, Artificial Sequence
  MKO10050752_A_Sparcl1
  gRNA
atggggactgtagcgtcttc

SEQ ID NO: 50753 - DNA, 20 bp, Artificial Sequence
  MKO10050753_A_Sparc
  gRNA
taccttctcaaactcgccaa

SEQ ID NO: 50754 - DNA, 20 bp, Artificial Sequence
  MKO10050754_A_Sparc
  gRNA
tgcagaggaaacggtcgagg

SEQ ID NO: 50755 - DNA, 20 bp, Artificial Sequence
  MKO10050755_A_Sparc
  gRNA
gaagggccacaagctccacc

SEQ ID NO: 50756 - DNA, 20 bp, Artificial Sequence
  MKO10050756_A_Spast
  gRNA
cactgcaactaggcgccctg

SEQ ID NO: 50757 - DNA, 20 bp, Artificial Sequence
  MKO10050757_A_Spast
  gRNA
actaacctgacatgccgcaa

SEQ ID NO: 50758 - DNA, 20 bp, Artificial Sequence
  MKO10050758_A_Spast
  gRNA
atagacgtccgtctgtgact

SEQ ID NO: 50759 - DNA, 20 bp, Artificial Sequence
  MKO10050759_A_Spata13
  gRNA
tgcggagtcttcggccttag

SEQ ID NO: 50760 - DNA, 20 bp, Artificial Sequence
  MKO10050760_A_Spata13
  gRNA
aggcgacctatatctgtgat

SEQ ID NO: 50761 - DNA, 20 bp, Artificial Sequence
  MKO10050761_A_Spata13
  gRNA
ggggctcgggacgccgcacc

SEQ ID NO: 50762 - DNA, 20 bp, Artificial Sequence
  MKO10050762_A_Spata16
  gRNA
ggtcaggcttccgcatacgt

SEQ ID NO: 50763 - DNA, 20 bp, Artificial Sequence
  MKO10050763_A_Spata16
  gRNA
tttccgaaaccatcttcgtc

SEQ ID NO: 50764 - DNA, 20 bp, Artificial Sequence
  MKO10050764_A_Spata16
  gRNA
cgctgtcagccttccgttta

SEQ ID NO: 50765 - DNA, 20 bp, Artificial Sequence
  MKO10050765_A_Spata17
  gRNA
gccaagtccgggcctatatg

SEQ ID NO: 50766 - DNA, 20 bp, Artificial Sequence
  MKO10050766_A_Spata17
  gRNA
tagccatgtccttcaactcc

SEQ ID NO: 50767 - DNA, 20 bp, Artificial Sequence
  MKO10050767_A_Spata17
  gRNA
ctagcgccgttgattcattt

SEQ ID NO: 50768 - DNA, 20 bp, Artificial Sequence
  MKO10050768_A_Spata18
  gRNA
ggatatggttgatccgttct

SEQ ID NO: 50769 - DNA, 20 bp, Artificial Sequence
  MKO10050769_A_Spata18
  gRNA
cctcttactcgtcttgaacc

SEQ ID NO: 50770 - DNA, 20 bp, Artificial Sequence
  MKO10050770_A_Spata18
  gRNA
cgaacaagttgctaaagtgc

SEQ ID NO: 50771 - DNA, 20 bp, Artificial Sequence
  MKO10050771_A_Spata19
  gRNA
ctgtatccgttgtgcagcac

SEQ ID NO: 50772 - DNA, 20 bp, Artificial Sequence
  MKO10050772_A_Spata19
  gRNA
gaatagatcaagtgagacga

SEQ ID NO: 50773 - DNA, 20 bp, Artificial Sequence
  MKO10050773_A_Spata19
  gRNA
caaggatccagtttataaga

SEQ ID NO: 50774 - DNA, 20 bp, Artificial Sequence
  MKO10050774_A_Spata1
  gRNA
ttatagttccacgatccttc

SEQ ID NO: 50775 - DNA, 20 bp, Artificial Sequence
  MKO10050775_A_Spata1
  gRNA
aatgatactacggagattaa

SEQ ID NO: 50776 - DNA, 20 bp, Artificial Sequence
  MKO10050776_A_Spata1
  gRNA
acgctccctcagagcttgta

SEQ ID NO: 50777 - DNA, 20 bp, Artificial Sequence
  MKO10050777_A_Spata20
  gRNA
aagtaggtgcccccaacgaa

SEQ ID NO: 50778 - DNA, 20 bp, Artificial Sequence
  MKO10050778_A_Spata20
  gRNA
atggctctcaccaatccacc

SEQ ID NO: 50779 - DNA, 20 bp, Artificial Sequence
  MKO10050779_A_Spata20
  gRNA
ctcattgatcaggcgattga

SEQ ID NO: 50780 - DNA, 20 bp, Artificial Sequence
  MKO10050780_A_Spata21
  gRNA
aggagccctcagcaagaccg

SEQ ID NO: 50781 - DNA, 20 bp, Artificial Sequence
  MKO10050781_A_Spata21
  gRNA
gactcacaaggacaaccccc

SEQ ID NO: 50782 - DNA, 20 bp, Artificial Sequence
  MKO10050782_A_Spata21
  gRNA
caagagccgatgccagcgcc

SEQ ID NO: 50783 - DNA, 20 bp, Artificial Sequence
  MKO10050783_A_Spata22
  gRNA
ctgaactcactgtttgccgc

SEQ ID NO: 50784 - DNA, 20 bp, Artificial Sequence
  MKO10050784_A_Spata22
  gRNA
tgttgagctcccaaattcac

SEQ ID NO: 50785 - DNA, 20 bp, Artificial Sequence
  MKO10050785_A_Spata22
  gRNA
atacttctgagattgggcgt

SEQ ID NO: 50786 - DNA, 20 bp, Artificial Sequence
  MKO10050786_A_Spata24
  gRNA
gtctcgccttcgatcaactg

SEQ ID NO: 50787 - DNA, 20 bp, Artificial Sequence
  MKO10050787_A_Spata24
  gRNA
cacgtcccgcagttgatcga

SEQ ID NO: 50788 - DNA, 20 bp, Artificial Sequence
  MKO10050788_A_Spata24
  gRNA
ctcccgcctaccattgcact

SEQ ID NO: 50789 - DNA, 20 bp, Artificial Sequence
  MKO10050789_A_Spata25
  gRNA
gtcccaaattgccccccatg

SEQ ID NO: 50790 - DNA, 20 bp, Artificial Sequence
  MKO10050790_A_Spata25
  gRNA
ggttctgccaatatcctccg

SEQ ID NO: 50791 - DNA, 20 bp, Artificial Sequence
  MKO10050791_A_Spata25
  gRNA
cgtgtctccacaaagtcatc

SEQ ID NO: 50792 - DNA, 20 bp, Artificial Sequence
  MKO10050792_A_Spata2l
  gRNA
cagggacaaccaccgcctaa

SEQ ID NO: 50793 - DNA, 20 bp, Artificial Sequence
  MKO10050793_A_Spata2l
  gRNA
ggtcgccgcaaacgcccgcg

SEQ ID NO: 50794 - DNA, 20 bp, Artificial Sequence
  MKO10050794_A_Spata2l
  gRNA
cgcggccgcgcgggcgtttg

SEQ ID NO: 50795 - DNA, 20 bp, Artificial Sequence
  MKO10050795_A_Spata2
  gRNA
atcagccgaaatcgatataa

SEQ ID NO: 50796 - DNA, 20 bp, Artificial Sequence
  MKO10050796_A_Spata2
  gRNA
aggcctatctgtacacgagc

SEQ ID NO: 50797 - DNA, 20 bp, Artificial Sequence
  MKO10050797_A_Spata2
  gRNA
tgggttctgaatccgtatac

SEQ ID NO: 50798 - DNA, 20 bp, Artificial Sequence
  MKO10050798_A_Spata31d1a
  gRNA
tagcgcttgccgaaagcccg

SEQ ID NO: 50799 - DNA, 20 bp, Artificial Sequence
  MKO10050799_A_Spata31d1a
  gRNA
ctttgttacatacgcgacaa

SEQ ID NO: 50800 - DNA, 20 bp, Artificial Sequence
  MKO10050800_A_Spata31d1a
  gRNA
tacagcggcagaacagcatc

SEQ ID NO: 50801 - DNA, 20 bp, Artificial Sequence
  MKO10050801_A_Spata31d1b
  gRNA
gcctgcccatacgactcttc

SEQ ID NO: 50802 - DNA, 20 bp, Artificial Sequence
  MKO10050802_A_Spata31d1b
  gRNA
ctcgaaatcggatgcctaga

SEQ ID NO: 50803 - DNA, 20 bp, Artificial Sequence
  MKO10050803_A_Spata31d1b
  gRNA
cgttggcagctatgggagaa

SEQ ID NO: 50804 - DNA, 20 bp, Artificial Sequence
  MKO10050804_A_Spata31d1c
  gRNA
gctagtgatctgacgctcaa

SEQ ID NO: 50805 - DNA, 20 bp, Artificial Sequence
  MKO10050805_A_Spata31d1c
  gRNA
acacagtagttgccgaaaat

SEQ ID NO: 50806 - DNA, 20 bp, Artificial Sequence
  MKO10050806_A_Spata31d1c
  gRNA
aggctttggatcagcattct

SEQ ID NO: 50807 - DNA, 20 bp, Artificial Sequence
  MKO10050807_A_Spata31d1d
  gRNA
tgcgcaggatagcccgaccc

SEQ ID NO: 50808 - DNA, 20 bp, Artificial Sequence
  MKO10050808_A_Spata31d1d
  gRNA
aacactgtgtcgaaccaatc

SEQ ID NO: 50809 - DNA, 20 bp, Artificial Sequence
  MKO10050809_A_Spata31d1d
  gRNA
ctccattctaactagcgcta

SEQ ID NO: 50810 - DNA, 20 bp, Artificial Sequence
  MKO10050810_A_Spata31
  gRNA
ggcatgctcctggaacgttt

SEQ ID NO: 50811 - DNA, 20 bp, Artificial Sequence
  MKO10050811_A_Spata31
  gRNA
aagctgcgttacgggacaag

SEQ ID NO: 50812 - DNA, 20 bp, Artificial Sequence
  MKO10050812_A_Spata31
  gRNA
tgagcctcagctccactata

SEQ ID NO: 50813 - DNA, 20 bp, Artificial Sequence
  MKO10050813_A_Spata32
  gRNA
gtagactgtgctccgacgcc

SEQ ID NO: 50814 - DNA, 20 bp, Artificial Sequence
  MKO10050814_A_Spata32
  gRNA
cgatgcgaagttgatcagat

SEQ ID NO: 50815 - DNA, 20 bp, Artificial Sequence
  MKO10050815_A_Spata32
  gRNA
ttgtgttgcagctcggtgcc

SEQ ID NO: 50816 - DNA, 20 bp, Artificial Sequence
  MKO10050816_A_Spata33
  gRNA
gcttggatgtcgcgaacaac

SEQ ID NO: 50817 - DNA, 20 bp, Artificial Sequence
  MKO10050817_A_Spata33
  gRNA
ggggtccttaccaccgacac

SEQ ID NO: 50818 - DNA, 20 bp, Artificial Sequence
  MKO10050818_A_Spata33
  gRNA
gtagctgattagcgtctcgt

SEQ ID NO: 50819 - DNA, 20 bp, Artificial Sequence
  MKO10050819_A_Spata3
  gRNA
ctccgcttgctggcatcgtc

SEQ ID NO: 50820 - DNA, 20 bp, Artificial Sequence
  MKO10050820_A_Spata3
  gRNA
tgctgttgcggtttaggctc

SEQ ID NO: 50821 - DNA, 20 bp, Artificial Sequence
  MKO10050821_A_Spata3
  gRNA
tgctttgtagaaaaccgtca

SEQ ID NO: 50822 - DNA, 20 bp, Artificial Sequence
  MKO10050822_A_Spata4
  gRNA
ttaccaaatgcgtttgcccc

SEQ ID NO: 50823 - DNA, 20 bp, Artificial Sequence
  MKO10050823_A_Spata4
  gRNA
tgtatctgcgcttatagcta

SEQ ID NO: 50824 - DNA, 20 bp, Artificial Sequence
  MKO10050824_A_Spata4
  gRNA
aagcgcagatacaagtcaag

SEQ ID NO: 50825 - DNA, 20 bp, Artificial Sequence
  MKO10050825_A_Spata5l1
  gRNA
ggtgagcgccccggcgttgc

SEQ ID NO: 50826 - DNA, 20 bp, Artificial Sequence
  MKO10050826_A_Spata5l1
  gRNA
gatgcgccgcacgttctcct

SEQ ID NO: 50827 - DNA, 20 bp, Artificial Sequence
  MKO10050827_A_Spata5l1
  gRNA
agccaaccgtcatttctgcc

SEQ ID NO: 50828 - DNA, 20 bp, Artificial Sequence
  MKO10050828_A_Spata5
  gRNA
cggctgggcgaaaggagtcg

SEQ ID NO: 50829 - DNA, 20 bp, Artificial Sequence
  MKO10050829_A_Spata5
  gRNA
tcctttcgcccagccgagcc

SEQ ID NO: 50830 - DNA, 20 bp, Artificial Sequence
  MKO10050830_A_Spata5
  gRNA
ctcctgctttccatccaaac

SEQ ID NO: 50831 - DNA, 20 bp, Artificial Sequence
  MKO10050831_A_Spata6
  gRNA
acaccatgattcaaaccgcc

SEQ ID NO: 50832 - DNA, 20 bp, Artificial Sequence
  MKO10050832_A_Spata6
  gRNA
taacctggcggtttgaatca

SEQ ID NO: 50833 - DNA, 20 bp, Artificial Sequence
  MKO10050833_A_Spata6
  gRNA
ttcccggaagcagtagaccc

SEQ ID NO: 50834 - DNA, 20 bp, Artificial Sequence
  MKO10050834_A_Spata7
  gRNA
cgctcacttaccgttgctct

SEQ ID NO: 50835 - DNA, 20 bp, Artificial Sequence
  MKO10050835_A_Spata7
  gRNA
agccctccatgcttgtttac

SEQ ID NO: 50836 - DNA, 20 bp, Artificial Sequence
  MKO10050836_A_Spata7
  gRNA
cacgtttacctttggctgaa

SEQ ID NO: 50837 - DNA, 20 bp, Artificial Sequence
  MKO10050837_A_Spata9
  gRNA
gccttagccaagatcaaccg

SEQ ID NO: 50838 - DNA, 20 bp, Artificial Sequence
  MKO10050838_A_Spata9
  gRNA
ttctctggcaacgacctgta

SEQ ID NO: 50839 - DNA, 20 bp, Artificial Sequence
  MKO10050839_A_Spata9
  gRNA
ggttgatctaaaaggttgtc

SEQ ID NO: 50840 - DNA, 20 bp, Artificial Sequence
  MKO10050840_A_Spatc1l
  gRNA
ctacagccgcgaagtgcacc

SEQ ID NO: 50841 - DNA, 20 bp, Artificial Sequence
  MKO10050841_A_Spatc1l
  gRNA
atccgcgagtgtagttctga

SEQ ID NO: 50842 - DNA, 20 bp, Artificial Sequence
  MKO10050842_A_Spatc1l
  gRNA
gagaaggatggccgaatcgt

SEQ ID NO: 50843 - DNA, 20 bp, Artificial Sequence
  MKO10050843_A_Spatc1
  gRNA
gttccatcacgcgtgaaccc

SEQ ID NO: 50844 - DNA, 20 bp, Artificial Sequence
  MKO10050844_A_Spatc1
  gRNA
cgtaacgctgtgtgagcgtc

SEQ ID NO: 50845 - DNA, 20 bp, Artificial Sequence
  MKO10050845_A_Spatc1
  gRNA
ccgtagagacgtacgcgctc

SEQ ID NO: 50846 - DNA, 20 bp, Artificial Sequence
  MKO10050846_A_Spats1
  gRNA
aacatgtacggattatcccc

SEQ ID NO: 50847 - DNA, 20 bp, Artificial Sequence
  MKO10050847_A_Spats1
  gRNA
ttccagcacggctgcggagc

SEQ ID NO: 50848 - DNA, 20 bp, Artificial Sequence
  MKO10050848_A_Spats1
  gRNA
ctgttccgtcagaagacgag

SEQ ID NO: 50849 - DNA, 20 bp, Artificial Sequence
  MKO10050849_A_Spats2l
  gRNA
tgagaaaaagatctcgatac

SEQ ID NO: 50850 - DNA, 20 bp, Artificial Sequence
  MKO10050850_A_Spats2l
  gRNA
taaagccgtacaggcctttg

SEQ ID NO: 50851 - DNA, 20 bp, Artificial Sequence
  MKO10050851_A_Spats2l
  gRNA
cgtatacctaccatccacaa

SEQ ID NO: 50852 - DNA, 20 bp, Artificial Sequence
  MKO10050852_A_Spats2
  gRNA
cgttgatggcaccgtttacg

SEQ ID NO: 50853 - DNA, 20 bp, Artificial Sequence
  MKO10050853_A_Spats2
  gRNA
catcaacgatgccgagtctg

SEQ ID NO: 50854 - DNA, 20 bp, Artificial Sequence
  MKO10050854_A_Spats2
  gRNA
caaaacagtgcaagcgttca

SEQ ID NO: 50855 - DNA, 20 bp, Artificial Sequence
  MKO10050855_A_Spc24
  gRNA
actgaaagaatgtacgcgcc

SEQ ID NO: 50856 - DNA, 20 bp, Artificial Sequence
  MKO10050856_A_Spc24
  gRNA
atgcgagccagggatgatca

SEQ ID NO: 50857 - DNA, 20 bp, Artificial Sequence
  MKO10050857_A_Spc24
  gRNA
tcgtagcctagcctgcacac

SEQ ID NO: 50858 - DNA, 20 bp, Artificial Sequence
  MKO10050858_A_Spc25
  gRNA
gatctgtatagagattacct

SEQ ID NO: 50859 - DNA, 20 bp, Artificial Sequence
  MKO10050859_A_Spc25
  gRNA
agctcaaggaagagtacgct

SEQ ID NO: 50860 - DNA, 20 bp, Artificial Sequence
  MKO10050860_A_Spc25
  gRNA
cgtactcttccttgagctcc

SEQ ID NO: 50861 - DNA, 20 bp, Artificial Sequence
  MKO10050861_A_Spcs1
  gRNA
gtccgtttcgttgtcggtat

SEQ ID NO: 50862 - DNA, 20 bp, Artificial Sequence
  MKO10050862_A_Spcs1
  gRNA
cccttgtcgatggcgcgggg

SEQ ID NO: 50863 - DNA, 20 bp, Artificial Sequence
  MKO10050863_A_Spcs1
  gRNA
ttcgtccctaggattacaag

SEQ ID NO: 50864 - DNA, 20 bp, Artificial Sequence
  MKO10050864_A_Spcs2
  gRNA
ccatgaccaatgtcccgctg

SEQ ID NO: 50865 - DNA, 20 bp, Artificial Sequence
  MKO10050865_A_Spcs2
  gRNA
catatgaacctgaaatatcc

SEQ ID NO: 50866 - DNA, 20 bp, Artificial Sequence
  MKO10050866_A_Spcs2
  gRNA
agagaagagcatcttccttg

SEQ ID NO: 50867 - DNA, 20 bp, Artificial Sequence
  MKO10050867_A_Spcs3
  gRNA
agcgtttggtacaacgttcc

SEQ ID NO: 50868 - DNA, 20 bp, Artificial Sequence
  MKO10050868_A_Spcs3
  gRNA
atgtcactctgacgctctcc

SEQ ID NO: 50869 - DNA, 20 bp, Artificial Sequence
  MKO10050869_A_Spcs3
  gRNA
ccctagagaaagaagtgacc

SEQ ID NO: 50870 - DNA, 20 bp, Artificial Sequence
  MKO10050870_A_Spdef
  gRNA
catccgccagtattacaaga

SEQ ID NO: 50871 - DNA, 20 bp, Artificial Sequence
  MKO10050871_A_Spdef
  gRNA
gttccgtcagcgtgcaccct

SEQ ID NO: 50872 - DNA, 20 bp, Artificial Sequence
  MKO10050872_A_Spdef
  gRNA
agccacttctgcacgttacc

SEQ ID NO: 50873 - DNA, 20 bp, Artificial Sequence
  MKO10050873_A_Spdl1
  gRNA
cggcggaccccaatagcaaa

SEQ ID NO: 50874 - DNA, 20 bp, Artificial Sequence
  MKO10050874_A_Spdl1
  gRNA
cagcgagttccctttgctat

SEQ ID NO: 50875 - DNA, 20 bp, Artificial Sequence
  MKO10050875_A_Spdl1
  gRNA
agctagaggtgcagctacat

SEQ ID NO: 50876 - DNA, 20 bp, Artificial Sequence
  MKO10050876_A_Spdya
  gRNA
ttgtctaatcatacagcgcc

SEQ ID NO: 50877 - DNA, 20 bp, Artificial Sequence
  MKO10050877_A_Spdya
  gRNA
tgttaggtatctggctaata

SEQ ID NO: 50878 - DNA, 20 bp, Artificial Sequence
  MKO10050878_A_Spdya
  gRNA
ctgctgcaagattgcagaca

SEQ ID NO: 50879 - DNA, 20 bp, Artificial Sequence
  MKO10050879_A_Spdyb
  gRNA
gcgtctcttaccgagcagct

SEQ ID NO: 50880 - DNA, 20 bp, Artificial Sequence
  MKO10050880_A_Spdyb
  gRNA
ggcgacgtgtgtctacagtg

SEQ ID NO: 50881 - DNA, 20 bp, Artificial Sequence
  MKO10050881_A_Spdyb
  gRNA
aactgcgctttcagttcatt

SEQ ID NO: 50882 - DNA, 20 bp, Artificial Sequence
  MKO10050882_A_Specc1l
  gRNA
accagccgaagtactccgtt

SEQ ID NO: 50883 - DNA, 20 bp, Artificial Sequence
  MKO10050883_A_Specc1l
  gRNA
gatagagatgaatcgcttga

SEQ ID NO: 50884 - DNA, 20 bp, Artificial Sequence
  MKO10050884_A_Specc1l
  gRNA
tgtcatgcagcttcacggcg

SEQ ID NO: 50885 - DNA, 20 bp, Artificial Sequence
  MKO10050885_A_Specc1
  gRNA
agcctcacacttgatgtcgt

SEQ ID NO: 50886 - DNA, 20 bp, Artificial Sequence
  MKO10050886_A_Specc1
  gRNA
ctgccagaagttctcgtacc

SEQ ID NO: 50887 - DNA, 20 bp, Artificial Sequence
  MKO10050887_A_Specc1
  gRNA
taatcatgtctatagcgcct

SEQ ID NO: 50888 - DNA, 20 bp, Artificial Sequence
  MKO10050888_A_Speer2
  gRNA
tttctaactcattctcgatt

SEQ ID NO: 50889 - DNA, 20 bp, Artificial Sequence
  MKO10050889_A_Speer2
  gRNA
catctgtaacttgtgcagag

SEQ ID NO: 50890 - DNA, 20 bp, Artificial Sequence
  MKO10050890_A_Speer2
  gRNA
atttagcttctgtaagggcc

SEQ ID NO: 50891 - DNA, 20 bp, Artificial Sequence
  MKO10050891_A_Speer3
  gRNA
tgtacgtgacctaagtgaga

SEQ ID NO: 50892 - DNA, 20 bp, Artificial Sequence
  MKO10050892_A_Speer3
  gRNA
aatgatagttgttcatagaa

SEQ ID NO: 50893 - DNA, 20 bp, Artificial Sequence
  MKO10050893_A_Speer3
  gRNA
tacagtgggtgatatctttc

SEQ ID NO: 50894 - DNA, 20 bp, Artificial Sequence
  MKO10050894_A_Speer4a
  gRNA
ggccatcattcaagaacgtt

SEQ ID NO: 50895 - DNA, 20 bp, Artificial Sequence
  MKO10050895_A_Speer4a
  gRNA
caccaaacgttcttgaatga

SEQ ID NO: 50896 - DNA, 20 bp, Artificial Sequence
  MKO10050896_A_Speer4a
  gRNA
cttatagcacatgtcctgcg

SEQ ID NO: 50897 - DNA, 20 bp, Artificial Sequence
  MKO10050897_A_Speer4b
  gRNA
gttagggcctattcccagga

SEQ ID NO: 50898 - DNA, 20 bp, Artificial Sequence
  MKO10050898_A_Speer4b
  gRNA
ggccatcattcatcaatgtt

SEQ ID NO: 50899 - DNA, 20 bp, Artificial Sequence
  MKO10050899_A_Speer4b
  gRNA
cctgatgttcttgagtcttc

SEQ ID NO: 50900 - DNA, 20 bp, Artificial Sequence
  MKO10050900_A_Speer4c
  gRNA
ttatgaaaaactgaagttaa

SEQ ID NO: 50901 - DNA, 20 bp, Artificial Sequence
  MKO10050901_A_Speer4c
  gRNA
aagcaagaagcagtttgaga

SEQ ID NO: 50902 - DNA, 20 bp, Artificial Sequence
  MKO10050902_A_Speer4c
  gRNA
caatgtatacctcttgttca

SEQ ID NO: 50903 - DNA, 20 bp, Artificial Sequence
  MKO10050903_A_Speer4d
  gRNA
ccagcacctacaatcatcct

SEQ ID NO: 50904 - DNA, 20 bp, Artificial Sequence
  MKO10050904_A_Speer4d
  gRNA
atgattgtaggtgctggaga

SEQ ID NO: 50905 - DNA, 20 bp, Artificial Sequence
  MKO10050905_A_Speer4d
  gRNA
agagatccagctcactacca

SEQ ID NO: 50906 - DNA, 20 bp, Artificial Sequence
  MKO10050906_A_Speer4e
  gRNA
catcattcaccaatgtttgt

SEQ ID NO: 50907 - DNA, 20 bp, Artificial Sequence
  MKO10050907_A_Speer4e
  gRNA
caacaaacattggtgaatga

SEQ ID NO: 50908 - DNA, 20 bp, Artificial Sequence
  MKO10050908_A_Speer4e
  gRNA
aagcaagaagcagtttgaga

SEQ ID NO: 50909 - DNA, 20 bp, Artificial Sequence
  MKO10050909_A_Speer4f
  gRNA
caacgtatacctcatgatct

SEQ ID NO: 50910 - DNA, 20 bp, Artificial Sequence
  MKO10050910_A_Speer4f
  gRNA
ttataagattgttctccatt

SEQ ID NO: 50911 - DNA, 20 bp, Artificial Sequence
  MKO10050911_A_Speer4f
  gRNA
gaacagcatccttgacactc

SEQ ID NO: 50912 - DNA, 20 bp, Artificial Sequence
  MKO10050912_A_Spef1
  gRNA
atcttccgcatcacatcgtc

SEQ ID NO: 50913 - DNA, 20 bp, Artificial Sequence
  MKO10050913_A_Spef1
  gRNA
acttgataagctctgcaacc

SEQ ID NO: 50914 - DNA, 20 bp, Artificial Sequence
  MKO10050914_A_Spef1
  gRNA
agcactagctccactactcc

SEQ ID NO: 50915 - DNA, 20 bp, Artificial Sequence
  MKO10050915_A_Spef2
  gRNA
ccgtactttgaaagctattg

SEQ ID NO: 50916 - DNA, 20 bp, Artificial Sequence
  MKO10050916_A_Spef2
  gRNA
gcgggagaaattgttaagct

SEQ ID NO: 50917 - DNA, 20 bp, Artificial Sequence
  MKO10050917_A_Spef2
  gRNA
aggcttggggatctgtataa

SEQ ID NO: 50918 - DNA, 20 bp, Artificial Sequence
  MKO10050918_A_Speg
  gRNA
cggtcaacgaatatggcgct

SEQ ID NO: 50919 - DNA, 20 bp, Artificial Sequence
  MKO10050919_A_Speg
  gRNA
agcccgtgcgcccagaccag

SEQ ID NO: 50920 - DNA, 20 bp, Artificial Sequence
  MKO10050920_A_Speg
  gRNA
cttgaccttctctcaccgat

SEQ ID NO: 50921 - DNA, 20 bp, Artificial Sequence
  MKO10050921_A_Spem1
  gRNA
cggtaacgacgacgagtggg

SEQ ID NO: 50922 - DNA, 20 bp, Artificial Sequence
  MKO10050922_A_Spem1
  gRNA
ggcctctcaaatcggaaatc

SEQ ID NO: 50923 - DNA, 20 bp, Artificial Sequence
  MKO10050923_A_Spem1
  gRNA
acattcggtgtaagaggatg

SEQ ID NO: 50924 - DNA, 20 bp, Artificial Sequence
  MKO10050924_A_Spen
  gRNA
tataatccgtgcggaggtct

SEQ ID NO: 50925 - DNA, 20 bp, Artificial Sequence
  MKO10050925_A_Spen
  gRNA
catagcgtctcgtagtagag

SEQ ID NO: 50926 - DNA, 20 bp, Artificial Sequence
  MKO10050926_A_Spen
  gRNA
atgacccccgatacgaacct

SEQ ID NO: 50927 - DNA, 20 bp, Artificial Sequence
  MKO10050927_A_Spert
  gRNA
ccttacctcggatgagccgc

SEQ ID NO: 50928 - DNA, 20 bp, Artificial Sequence
  MKO10050928_A_Spert
  gRNA
gagggttgtagtctagttcc

SEQ ID NO: 50929 - DNA, 20 bp, Artificial Sequence
  MKO10050929_A_Spert
  gRNA
atcctacatttcaccccctc

SEQ ID NO: 50930 - DNA, 20 bp, Artificial Sequence
  MKO10050930_A_Spesp1
  gRNA
acgacaaattcccgtactag

SEQ ID NO: 50931 - DNA, 20 bp, Artificial Sequence
  MKO10050931_A_Spesp1
  gRNA
gaatttgtcgtttcatcgac

SEQ ID NO: 50932 - DNA, 20 bp, Artificial Sequence
  MKO10050932_A_Spesp1
  gRNA
ggatacgccagcagtgacga

SEQ ID NO: 50933 - DNA, 20 bp, Artificial Sequence
  MKO10050933_A_Spg11
  gRNA
tccccggaaacacaacgcgt

SEQ ID NO: 50934 - DNA, 20 bp, Artificial Sequence
  MKO10050934_A_Spg11
  gRNA
tggcacgcaggtagcgcaag

SEQ ID NO: 50935 - DNA, 20 bp, Artificial Sequence
  MKO10050935_A_Spg11
  gRNA
agacactctcagcgatgtaa

SEQ ID NO: 50936 - DNA, 20 bp, Artificial Sequence
  MKO10050936_A_Spg20
  gRNA
tcccatcgacttcagcacgc

SEQ ID NO: 50937 - DNA, 20 bp, Artificial Sequence
  MKO10050937_A_Spg20
  gRNA
gacttcttgcacgcgtcttt

SEQ ID NO: 50938 - DNA, 20 bp, Artificial Sequence
  MKO10050938_A_Spg20
  gRNA
gataccatgttacaagctgc

SEQ ID NO: 50939 - DNA, 20 bp, Artificial Sequence
  MKO10050939_A_Spg21
  gRNA
tcagccatcatcgggtctac

SEQ ID NO: 50940 - DNA, 20 bp, Artificial Sequence
  MKO10050940_A_Spg21
  gRNA
tggcccagtagacccgatga

SEQ ID NO: 50941 - DNA, 20 bp, Artificial Sequence
  MKO10050941_A_Spg21
  gRNA
acatctgcagttccgctgac

SEQ ID NO: 50942 - DNA, 20 bp, Artificial Sequence
  MKO10050942_A_Spg7
  gRNA
caacctgcatccgatacatc

SEQ ID NO: 50943 - DNA, 20 bp, Artificial Sequence
  MKO10050943_A_Spg7
  gRNA
ggtgcccgagagtgatgtgg

SEQ ID NO: 50944 - DNA, 20 bp, Artificial Sequence
  MKO10050944_A_Spg7
  gRNA
tgactttgtcaacgagatgc

SEQ ID NO: 50945 - DNA, 20 bp, Artificial Sequence
  MKO10050945_A_Sphk1
  gRNA
gcatctgttctacgtacgtg

SEQ ID NO: 50946 - DNA, 20 bp, Artificial Sequence
  MKO10050946_A_Sphk1
  gRNA
tttgtagtagaatgccctcg

SEQ ID NO: 50947 - DNA, 20 bp, Artificial Sequence
  MKO10050947_A_Sphk1
  gRNA
gcctgtacttctcactctcg

SEQ ID NO: 50948 - DNA, 20 bp, Artificial Sequence
  MKO10050948_A_Sphk2
  gRNA
agtcaacgtacccgccatga

SEQ ID NO: 50949 - DNA, 20 bp, Artificial Sequence
  MKO10050949_A_Sphk2
  gRNA
gtgtgaatcgagcgctgccc

SEQ ID NO: 50950 - DNA, 20 bp, Artificial Sequence
  MKO10050950_A_Sphk2
  gRNA
cttgaaccactcacgcctcg

SEQ ID NO: 50951 - DNA, 20 bp, Artificial Sequence
  MKO10050951_A_Sphkap
  gRNA
tcttcgaagcaatagcttgc

SEQ ID NO: 50952 - DNA, 20 bp, Artificial Sequence
  MKO10050952_A_Sphkap
  gRNA
gaatcaccactgatgcatga

SEQ ID NO: 50953 - DNA, 20 bp, Artificial Sequence
  MKO10050953_A_Sphkap
  gRNA
catcttccacaaacccaatc

SEQ ID NO: 50954 - DNA, 20 bp, Artificial Sequence
  MKO10050954_A_Spi1
  gRNA
gctgcgcagcggcgacatga

SEQ ID NO: 50955 - DNA, 20 bp, Artificial Sequence
  MKO10050955_A_Spi1
  gRNA
gcagcgcgcgcgccatcttc

SEQ ID NO: 50956 - DNA, 20 bp, Artificial Sequence
  MKO10050956_A_Spi1
  gRNA
agtagtcatgcattggacgt

SEQ ID NO: 50957 - DNA, 20 bp, Artificial Sequence
  MKO10050957_A_Spib
  gRNA
ggggtacggagcataagcca

SEQ ID NO: 50958 - DNA, 20 bp, Artificial Sequence
  MKO10050958_A_Spib
  gRNA
ctcggacagtgagtcagacg

SEQ ID NO: 50959 - DNA, 20 bp, Artificial Sequence
  MKO10050959_A_Spib
  gRNA
agaaggagtcttctacgacc

SEQ ID NO: 50960 - DNA, 20 bp, Artificial Sequence
  MKO10050960_A_Spice1
  gRNA
gatgttcctcgtaagcgcac

SEQ ID NO: 50961 - DNA, 20 bp, Artificial Sequence
  MKO10050961_A_Spice1
  gRNA
cgcttacctgtgcgcttacg

SEQ ID NO: 50962 - DNA, 20 bp, Artificial Sequence
  MKO10050962_A_Spice1
  gRNA
ggtcaacttactagatcttc

SEQ ID NO: 50963 - DNA, 20 bp, Artificial Sequence
  MKO10050963_A_Spic
  gRNA
aacccttatcctcacgtcag

SEQ ID NO: 50964 - DNA, 20 bp, Artificial Sequence
  MKO10050964_A_Spic
  gRNA
cagagaaccccctctatgac

SEQ ID NO: 50965 - DNA, 20 bp, Artificial Sequence
  MKO10050965_A_Spic
  gRNA
acttgctccagctaactacc

SEQ ID NO: 50966 - DNA, 20 bp, Artificial Sequence
  MKO10050966_A_Spidr
  gRNA
accttcaatgtcttcgtctt

SEQ ID NO: 50967 - DNA, 20 bp, Artificial Sequence
  MKO10050967_A_Spidr
  gRNA
acccatcctttcgagaagag

SEQ ID NO: 50968 - DNA, 20 bp, Artificial Sequence
  MKO10050968_A_Spidr
  gRNA
ggcatggccctagagccgac

SEQ ID NO: 50969 - DNA, 20 bp, Artificial Sequence
  MKO10050969_A_Spin1
  gRNA
cagaaaacatcggaccagtg

SEQ ID NO: 50970 - DNA, 20 bp, Artificial Sequence
  MKO10050970_A_Spin1
  gRNA
ccatatttacgtctacgatt

SEQ ID NO: 50971 - DNA, 20 bp, Artificial Sequence
  MKO10050971_A_Spin1
  gRNA
cacaatgatcggcaaagcag

SEQ ID NO: 50972 - DNA, 20 bp, Artificial Sequence
  MKO10050972_A_Spin2-ps1
  gRNA
ccaagtgagtgacatgtatg

SEQ ID NO: 50973 - DNA, 20 bp, Artificial Sequence
  MKO10050973_A_Spin2-ps1
  gRNA
cttggagccccccaggaccc

SEQ ID NO: 50974 - DNA, 20 bp, Artificial Sequence
  MKO10050974_A_Spin2-ps1
  gRNA
cagctttgttgatgccatag

SEQ ID NO: 50975 - DNA, 20 bp, Artificial Sequence
  MKO10050975_A_Spin2c
  gRNA
aagcgcctatcatgaacgcc

SEQ ID NO: 50976 - DNA, 20 bp, Artificial Sequence
  MKO10050976_A_Spin2c
  gRNA
tcatgataggcgcttgagcc

SEQ ID NO: 50977 - DNA, 20 bp, Artificial Sequence
  MKO10050977_A_Spin2c
  gRNA
tacagcccacgatgctccta

SEQ ID NO: 50978 - DNA, 20 bp, Artificial Sequence
  MKO10050978_A_Spin2d
  gRNA
ccctaaaagttatctccaag

SEQ ID NO: 50979 - DNA, 20 bp, Artificial Sequence
  MKO10050979_A_Spin2d
  gRNA
aagctgaccaagaaaagagc

SEQ ID NO: 50980 - DNA, 20 bp, Artificial Sequence
  MKO10050980_A_Spin2d
  gRNA
ccaagtgagtgacatgtata

SEQ ID NO: 50981 - DNA, 20 bp, Artificial Sequence
  MKO10050981_A_Spin4
  gRNA
gttggcgcgagcccccatca

SEQ ID NO: 50982 - DNA, 20 bp, Artificial Sequence
  MKO10050982_A_Spin4
  gRNA
gtgggctgccgcattcaaca

SEQ ID NO: 50983 - DNA, 20 bp, Artificial Sequence
  MKO10050983_A_Spin4
  gRNA
tcctcgcattgactctcgcc

SEQ ID NO: 50984 - DNA, 20 bp, Artificial Sequence
  MKO10050984_A_Spink10
  gRNA
ttccaaagaagctcgacgtc

SEQ ID NO: 50985 - DNA, 20 bp, Artificial Sequence
  MKO10050985_A_Spink10
  gRNA
tacctgacgtcgagcttctt

SEQ ID NO: 50986 - DNA, 20 bp, Artificial Sequence
  MKO10050986_A_Spink10
  gRNA
gatagactgtagaccatatc

SEQ ID NO: 50987 - DNA, 20 bp, Artificial Sequence
  MKO10050987_A_Spink11
  gRNA
gtcagattcactcttataca

SEQ ID NO: 50988 - DNA, 20 bp, Artificial Sequence
  MKO10050988_A_Spink11
  gRNA
atttgattatctgcacaaac

SEQ ID NO: 50989 - DNA, 20 bp, Artificial Sequence
  MKO10050989_A_Spink11
  gRNA
attctttagtacaaatacca

SEQ ID NO: 50990 - DNA, 20 bp, Artificial Sequence
  MKO10050990_A_Spink12
  gRNA
tcatggcgctgagaatcttg

SEQ ID NO: 50991 - DNA, 20 bp, Artificial Sequence
  MKO10050991_A_Spink12
  gRNA
tacatacctgaaagcctcct

SEQ ID NO: 50992 - DNA, 20 bp, Artificial Sequence
  MKO10050992_A_Spink12
  gRNA
ctcagcgccatgaagccagc

SEQ ID NO: 50993 - DNA, 20 bp, Artificial Sequence
  MKO10050993_A_Spink13
  gRNA
gtgtccaagtcaaaagtacg

SEQ ID NO: 50994 - DNA, 20 bp, Artificial Sequence
  MKO10050994_A_Spink13
  gRNA
gcttcataatcagggtctat

SEQ ID NO: 50995 - DNA, 20 bp, Artificial Sequence
  MKO10050995_A_Spink13
  gRNA
cacatccagtttgtcaaata

SEQ ID NO: 50996 - DNA, 20 bp, Artificial Sequence
  MKO10050996_A_Spink14
  gRNA
tagctccaggtgctcgagtt

SEQ ID NO: 50997 - DNA, 20 bp, Artificial Sequence
  MKO10050997_A_Spink14
  gRNA
gcctacacatggacttatta

SEQ ID NO: 50998 - DNA, 20 bp, Artificial Sequence
  MKO10050998_A_Spink14
  gRNA
gctctcaacacacaagatgc

SEQ ID NO: 50999 - DNA, 20 bp, Artificial Sequence
  MKO10050999_A_Spink2
  gRNA
ttcatatccgttccgcacac

SEQ ID NO: 51000 - DNA, 20 bp, Artificial Sequence
  MKO10051000_A_Spink2
  gRNA
gtaccctgtgcatgaaaatc

SEQ ID NO: 51001 - DNA, 20 bp, Artificial Sequence
  MKO10051001_A_Spink2
  gRNA
agagtcgagagtctcatgag

SEQ ID NO: 51002 - DNA, 20 bp, Artificial Sequence
  MKO10051002_A_Spink3
  gRNA
acctacctgctaaactcagc

SEQ ID NO: 51003 - DNA, 20 bp, Artificial Sequence
  MKO10051003_A_Spink3
  gRNA
gagcctgtcctcattcgaaa

SEQ ID NO: 51004 - DNA, 20 bp, Artificial Sequence
  MKO10051004_A_Spink3
  gRNA
gacatcccgccactgcatca

SEQ ID NO: 51005 - DNA, 20 bp, Artificial Sequence
  MKO10051005_A_Spink4
  gRNA
gcccatccgtgccacagatc

SEQ ID NO: 51006 - DNA, 20 bp, Artificial Sequence
  MKO10051006_A_Spink4
  gRNA
aagaaacttacatccgggtc

SEQ ID NO: 51007 - DNA, 20 bp, Artificial Sequence
  MKO10051007_A_Spink4
  gRNA
gcagcatggctatgcatctg

SEQ ID NO: 51008 - DNA, 20 bp, Artificial Sequence
  MKO10051008_A_Spink5
  gRNA
ttgagaagaattgttgcctt

SEQ ID NO: 51009 - DNA, 20 bp, Artificial Sequence
  MKO10051009_A_Spink5
  gRNA
aaccttcacattcatgatct

SEQ ID NO: 51010 - DNA, 20 bp, Artificial Sequence
  MKO10051010_A_Spink5
  gRNA
tgcacaagatgcattcactt

SEQ ID NO: 51011 - DNA, 20 bp, Artificial Sequence
  MKO10051011_A_Spink6
  gRNA
agatcagagggccgatttcc

SEQ ID NO: 51012 - DNA, 20 bp, Artificial Sequence
  MKO10051012_A_Spink6
  gRNA
aagatcaacctgaagcatcg

SEQ ID NO: 51013 - DNA, 20 bp, Artificial Sequence
  MKO10051013_A_Spink6
  gRNA
cacatttattcccatatgtc

SEQ ID NO: 51014 - DNA, 20 bp, Artificial Sequence
  MKO10051014_A_Spink7
  gRNA
aacatacttactgttgctga

SEQ ID NO: 51015 - DNA, 20 bp, Artificial Sequence
  MKO10051015_A_Spink7
  gRNA
attgtaaacataccagtttg

SEQ ID NO: 51016 - DNA, 20 bp, Artificial Sequence
  MKO10051016_A_Spink7
  gRNA
gagaccaccaacaagcttca

SEQ ID NO: 51017 - DNA, 20 bp, Artificial Sequence
  MKO10051017_A_Spink8
  gRNA
actcgccctcgtaggtcact

SEQ ID NO: 51018 - DNA, 20 bp, Artificial Sequence
  MKO10051018_A_Spink8
  gRNA
cagcaaccaagtgacctacg

SEQ ID NO: 51019 - DNA, 20 bp, Artificial Sequence
  MKO10051019_A_Spink8
  gRNA
tcagtgttcagactcatccg

SEQ ID NO: 51020 - DNA, 20 bp, Artificial Sequence
  MKO10051020_A_Spinkl
  gRNA
acctctttaataacattctc

SEQ ID NO: 51021 - DNA, 20 bp, Artificial Sequence
  MKO10051021_A_Spinkl
  gRNA
gagtggaaaaacttaaatat

SEQ ID NO: 51022 - DNA, 20 bp, Artificial Sequence
  MKO10051022_A_Spinkl
  gRNA
tccagagaatgttattaaag

SEQ ID NO: 51023 - DNA, 20 bp, Artificial Sequence
  MKO10051023_A_Spint1
  gRNA
ggtcccggatccctcgaatc

SEQ ID NO: 51024 - DNA, 20 bp, Artificial Sequence
  MKO10051024_A_Spint1
  gRNA
caagaacaactaccttcgtg

SEQ ID NO: 51025 - DNA, 20 bp, Artificial Sequence
  MKO10051025_A_Spint1
  gRNA
ccctaggaatctcaccgaaa

SEQ ID NO: 51026 - DNA, 20 bp, Artificial Sequence
  MKO10051026_A_Spint2
  gRNA
gggccgggcgctcctcgcct

SEQ ID NO: 51027 - DNA, 20 bp, Artificial Sequence
  MKO10051027_A_Spint2
  gRNA
tgcgcggcacggcccagtga

SEQ ID NO: 51028 - DNA, 20 bp, Artificial Sequence
  MKO10051028_A_Spint2
  gRNA
caccgtggacgtctagttct

SEQ ID NO: 51029 - DNA, 20 bp, Artificial Sequence
  MKO10051029_A_Spint3
  gRNA
ctttgcgcagaaccaaataa

SEQ ID NO: 51030 - DNA, 20 bp, Artificial Sequence
  MKO10051030_A_Spint3
  gRNA
cataggcggtaaggacttcc

SEQ ID NO: 51031 - DNA, 20 bp, Artificial Sequence
  MKO10051031_A_Spint3
  gRNA
ttggttctgcgcaaagctct

SEQ ID NO: 51032 - DNA, 20 bp, Artificial Sequence
  MKO10051032_A_Spint4
  gRNA
attacaatagcggcgataag

SEQ ID NO: 51033 - DNA, 20 bp, Artificial Sequence
  MKO10051033_A_Spint4
  gRNA
tcaatctccaatccgtagca

SEQ ID NO: 51034 - DNA, 20 bp, Artificial Sequence
  MKO10051034_A_Spint4
  gRNA
attccttacctcggcagcgg

SEQ ID NO: 51035 - DNA, 20 bp, Artificial Sequence
  MKO10051035_A_Spint5
  gRNA
actcacatagggccgattct

SEQ ID NO: 51036 - DNA, 20 bp, Artificial Sequence
  MKO10051036_A_Spint5
  gRNA
agtccgttgcattcacgtag

SEQ ID NO: 51037 - DNA, 20 bp, Artificial Sequence
  MKO10051037_A_Spint5
  gRNA
cgctttcgcagagttgactt

SEQ ID NO: 51038 - DNA, 20 bp, Artificial Sequence
  MKO10051038_A_Spire1
  gRNA
ggttcttacaggcccggttc

SEQ ID NO: 51039 - DNA, 20 bp, Artificial Sequence
  MKO10051039_A_Spire1
  gRNA
aagctacgtactggatttaa

SEQ ID NO: 51040 - DNA, 20 bp, Artificial Sequence
  MKO10051040_A_Spire1
  gRNA
taaatggtgacgtcccccct

SEQ ID NO: 51041 - DNA, 20 bp, Artificial Sequence
  MKO10051041_A_Spire2
  gRNA
ctttgccatttaccgtgcgc

SEQ ID NO: 51042 - DNA, 20 bp, Artificial Sequence
  MKO10051042_A_Spire2
  gRNA
ctcatgcgggagctccgtca

SEQ ID NO: 51043 - DNA, 20 bp, Artificial Sequence
  MKO10051043_A_Spire2
  gRNA
gctgtcttcgcagtcgctgt

SEQ ID NO: 51044 - DNA, 20 bp, Artificial Sequence
  MKO10051044_A_Spns1
  gRNA
tactgagcatccgactccgc

SEQ ID NO: 51045 - DNA, 20 bp, Artificial Sequence
  MKO10051045_A_Spns1
  gRNA
ccacgaagaggtcggcgatc

SEQ ID NO: 51046 - DNA, 20 bp, Artificial Sequence
  MKO10051046_A_Spns1
  gRNA
aatcgaaagtacctcatgtg

SEQ ID NO: 51047 - DNA, 20 bp, Artificial Sequence
  MKO10051047_A_Spns2
  gRNA
ttctattgaagcggtcgccc

SEQ ID NO: 51048 - DNA, 20 bp, Artificial Sequence
  MKO10051048_A_Spns2
  gRNA
aaacaagtcgccaatgatgg

SEQ ID NO: 51049 - DNA, 20 bp, Artificial Sequence
  MKO10051049_A_Spns2
  gRNA
ggcgccggcttgctgcagtc

SEQ ID NO: 51050 - DNA, 20 bp, Artificial Sequence
  MKO10051050_A_Spns3
  gRNA
tccgctggtccttcacgaag

SEQ ID NO: 51051 - DNA, 20 bp, Artificial Sequence
  MKO10051051_A_Spns3
  gRNA
caccggtacccacgaatccc

SEQ ID NO: 51052 - DNA, 20 bp, Artificial Sequence
  MKO10051052_A_Spns3
  gRNA
tcaactgtggcggagctgac

SEQ ID NO: 51053 - DNA, 20 bp, Artificial Sequence
  MKO10051053_A_Spn
  gRNA
gggccctcgagtgagatgca

SEQ ID NO: 51054 - DNA, 20 bp, Artificial Sequence
  MKO10051054_A_Spn
  gRNA
acaacagcagtagcgccacg

SEQ ID NO: 51055 - DNA, 20 bp, Artificial Sequence
  MKO10051055_A_Spn
  gRNA
gctgaagaacgtagtgagcg

SEQ ID NO: 51056 - DNA, 20 bp, Artificial Sequence
  MKO10051056_A_Spo11
  gRNA
cattatggcgttcgcgccta

SEQ ID NO: 51057 - DNA, 20 bp, Artificial Sequence
  MKO10051057_A_Spo11
  gRNA
ggcctcgttcttcgacgccc

SEQ ID NO: 51058 - DNA, 20 bp, Artificial Sequence
  MKO10051058_A_Spo11
  gRNA
gcgacacttatgcaaccaag

SEQ ID NO: 51059 - DNA, 20 bp, Artificial Sequence
  MKO10051059_A_Spock1
  gRNA
caaccttggacgtgtacgtg

SEQ ID NO: 51060 - DNA, 20 bp, Artificial Sequence
  MKO10051060_A_Spock1
  gRNA
taagtgcaagccttgccccg

SEQ ID NO: 51061 - DNA, 20 bp, Artificial Sequence
  MKO10051061_A_Spock1
  gRNA
gaattccacgcttgttctac

SEQ ID NO: 51062 - DNA, 20 bp, Artificial Sequence
  MKO10051062_A_Spock2
  gRNA
gtgcatcagccgcaagaagt

SEQ ID NO: 51063 - DNA, 20 bp, Artificial Sequence
  MKO10051063_A_Spock2
  gRNA
ggtgaagtgcagtcgccaca

SEQ ID NO: 51064 - DNA, 20 bp, Artificial Sequence
  MKO10051064_A_Spock2
  gRNA
cgtctgcaagccctgtcata

SEQ ID NO: 51065 - DNA, 20 bp, Artificial Sequence
  MKO10051065_A_Spock3
  gRNA
ccacaaagtttgcattacgc

SEQ ID NO: 51066 - DNA, 20 bp, Artificial Sequence
  MKO10051066_A_Spock3
  gRNA
accgccgtccgaccgccccc

SEQ ID NO: 51067 - DNA, 20 bp, Artificial Sequence
  MKO10051067_A_Spock3
  gRNA
aggatgattatttccgcact

SEQ ID NO: 51068 - DNA, 20 bp, Artificial Sequence
  MKO10051068_A_Spon1
  gRNA
tactcacgagggtaatcctt

SEQ ID NO: 51069 - DNA, 20 bp, Artificial Sequence
  MKO10051069_A_Spon1
  gRNA
gtccgagaagactcatccga

SEQ ID NO: 51070 - DNA, 20 bp, Artificial Sequence
  MKO10051070_A_Spon1
  gRNA
tggatccgtgtcctcctccg

SEQ ID NO: 51071 - DNA, 20 bp, Artificial Sequence
  MKO10051071_A_Spon2
  gRNA
actctgctgtagccgcacga

SEQ ID NO: 51072 - DNA, 20 bp, Artificial Sequence
  MKO10051072_A_Spon2
  gRNA
ggggacaatgcgtaccacga

SEQ ID NO: 51073 - DNA, 20 bp, Artificial Sequence
  MKO10051073_A_Spon2
  gRNA
gatctttatccacacgatgc

SEQ ID NO: 51074 - DNA, 20 bp, Artificial Sequence
  MKO10051074_A_Spopl
  gRNA
tgtcgactagcagaagattt

SEQ ID NO: 51075 - DNA, 20 bp, Artificial Sequence
  MKO10051075_A_Spopl
  gRNA
ctttcgtcatctaatccctt

SEQ ID NO: 51076 - DNA, 20 bp, Artificial Sequence
  MKO10051076_A_Spopl
  gRNA
caagcttacgttattctgtg

SEQ ID NO: 51077 - DNA, 20 bp, Artificial Sequence
  MKO10051077_A_Spop
  gRNA
tgtttgcgagtaaacccgaa

SEQ ID NO: 51078 - DNA, 20 bp, Artificial Sequence
  MKO10051078_A_Spop
  gRNA
cagagagtcagcgagcttat

SEQ ID NO: 51079 - DNA, 20 bp, Artificial Sequence
  MKO10051079_A_Spop
  gRNA
ctaagatagccttgtgagcc

SEQ ID NO: 51080 - DNA, 20 bp, Artificial Sequence
  MKO10051080_A_Spp1
  gRNA
gcagaatctccttgcgccac

SEQ ID NO: 51081 - DNA, 20 bp, Artificial Sequence
  MKO10051081_A_Spp1
  gRNA
aacacaatacctgtggcgca

SEQ ID NO: 51082 - DNA, 20 bp, Artificial Sequence
  MKO10051082_A_Spp1
  gRNA
aaggtgaaagtgactgattc

SEQ ID NO: 51083 - DNA, 20 bp, Artificial Sequence
  MKO10051083_A_Spp2
  gRNA
aagggtcgtagtcgtacacc

SEQ ID NO: 51084 - DNA, 20 bp, Artificial Sequence
  MKO10051084_A_Spp2
  gRNA
ctttgtgaaggtcaacgtcc

SEQ ID NO: 51085 - DNA, 20 bp, Artificial Sequence
  MKO10051085_A_Spp2
  gRNA
gataatcatttcttcgtctg

SEQ ID NO: 51086 - DNA, 20 bp, Artificial Sequence
  MKO10051086_A_Sppl2a
  gRNA
ataatacatgcagtagtcct

SEQ ID NO: 51087 - DNA, 20 bp, Artificial Sequence
  MKO10051087_A_Sppl2a
  gRNA
tccactccagtatcctccta

SEQ ID NO: 51088 - DNA, 20 bp, Artificial Sequence
  MKO10051088_A_Sppl2a
  gRNA
accaccttcctgtgcaattc

SEQ ID NO: 51089 - DNA, 20 bp, Artificial Sequence
  MKO10051089_A_Sppl2b
  gRNA
tcgaagcacgccgaactcac

SEQ ID NO: 51090 - DNA, 20 bp, Artificial Sequence
  MKO10051090_A_Sppl2b
  gRNA
cccgggccaccagtgcgatt

SEQ ID NO: 51091 - DNA, 20 bp, Artificial Sequence
  MKO10051091_A_Sppl2b
  gRNA
gtgggcaccgtcgccatcgg

SEQ ID NO: 51092 - DNA, 20 bp, Artificial Sequence
  MKO10051092_A_Sppl2c
  gRNA
catcggtgtcaccgtaagtg

SEQ ID NO: 51093 - DNA, 20 bp, Artificial Sequence
  MKO10051093_A_Sppl2c
  gRNA
catgcaagtccaatctcgcc

SEQ ID NO: 51094 - DNA, 20 bp, Artificial Sequence
  MKO10051094_A_Sppl2c
  gRNA
gttcacacaaaatcttcctc

SEQ ID NO: 51095 - DNA, 20 bp, Artificial Sequence
  MKO10051095_A_Sppl3
  gRNA
caagcactgttcctcccgat

SEQ ID NO: 51096 - DNA, 20 bp, Artificial Sequence
  MKO10051096_A_Sppl3
  gRNA
cagaaatgtcgacacttgac

SEQ ID NO: 51097 - DNA, 20 bp, Artificial Sequence
  MKO10051097_A_Sppl3
  gRNA
tttctctagggcctattccc

SEQ ID NO: 51098 - DNA, 20 bp, Artificial Sequence
  MKO10051098_A_Spred1
  gRNA
ttatgcacgagtgcgagctg

SEQ ID NO: 51099 - DNA, 20 bp, Artificial Sequence
  MKO10051099_A_Spred1
  gRNA
gtgcccagcgtcaaaaactg

SEQ ID NO: 51100 - DNA, 20 bp, Artificial Sequence
  MKO10051100_A_Spred1
  gRNA
ctcagtccgctccctccgag

SEQ ID NO: 51101 - DNA, 20 bp, Artificial Sequence
  MKO10051101_A_Spred2
  gRNA
ataaatcttccggtgctcac

SEQ ID NO: 51102 - DNA, 20 bp, Artificial Sequence
  MKO10051102_A_Spred2
  gRNA
ctccgagctcagcttcgtta

SEQ ID NO: 51103 - DNA, 20 bp, Artificial Sequence
  MKO10051103_A_Spred2
  gRNA
tgtctttctgtcgctcgcca

SEQ ID NO: 51104 - DNA, 20 bp, Artificial Sequence
  MKO10051104_A_Spred3
  gRNA
caggtcgcctgctagtgcgc

SEQ ID NO: 51105 - DNA, 20 bp, Artificial Sequence
  MKO10051105_A_Spred3
  gRNA
tatgaggactaccggcgatc

SEQ ID NO: 51106 - DNA, 20 bp, Artificial Sequence
  MKO10051106_A_Spred3
  gRNA
agcttgggggactgcaagtt

SEQ ID NO: 51107 - DNA, 20 bp, Artificial Sequence
  MKO10051107_A_Sprn
  gRNA
atcaagagtacgcgtaaggc

SEQ ID NO: 51108 - DNA, 20 bp, Artificial Sequence
  MKO10051108_A_Sprn
  gRNA
tgcagccgccacgcgcagag

SEQ ID NO: 51109 - DNA, 20 bp, Artificial Sequence
  MKO10051109_A_Sprn
  gRNA
ggaggcaacggaaccgaccg

SEQ ID NO: 51110 - DNA, 20 bp, Artificial Sequence
  MKO10051110_A_Sprr1a
  gRNA
ggcagggctcgggaacaaca

SEQ ID NO: 51111 - DNA, 20 bp, Artificial Sequence
  MKO10051111_A_Sprr1a
  gRNA
accttgtgcccccaaaacca

SEQ ID NO: 51112 - DNA, 20 bp, Artificial Sequence
  MKO10051112_A_Sprr1a
  gRNA
cttctgctggtgggaactca

SEQ ID NO: 51113 - DNA, 20 bp, Artificial Sequence
  MKO10051113_A_Sprr1b
  gRNA
ctcaggaaccttggtgtcac

SEQ ID NO: 51114 - DNA, 20 bp, Artificial Sequence
  MKO10051114_A_Sprr1b
  gRNA
acttgttgctcatgcaactg

SEQ ID NO: 51115 - DNA, 20 bp, Artificial Sequence
  MKO10051115_A_Sprr1b
  gRNA
caagacaccctgtgacacca

SEQ ID NO: 51116 - DNA, 20 bp, Artificial Sequence
  MKO10051116_A_Sprr2a1
  gRNA
tgttgggtggtcacttctgc

SEQ ID NO: 51117 - DNA, 20 bp, Artificial Sequence
  MKO10051117_A_Sprr2a1
  gRNA
agcagtgcaatcagccgtgc

SEQ ID NO: 51118 - DNA, 20 bp, Artificial Sequence
  MKO10051118_A_Sprr2a1
  gRNA
acggctgattgcactgctgc

SEQ ID NO: 51119 - DNA, 20 bp, Artificial Sequence
  MKO10051119_A_Sprr2a2
  gRNA
tgttgggtggtcacttctgc

SEQ ID NO: 51120 - DNA, 20 bp, Artificial Sequence
  MKO10051120_A_Sprr2a2
  gRNA
agcagtgcaatcagccgtgc

SEQ ID NO: 51121 - DNA, 20 bp, Artificial Sequence
  MKO10051121_A_Sprr2a2
  gRNA
acggctgattgcactgctgc

SEQ ID NO: 51122 - DNA, 20 bp, Artificial Sequence
  MKO10051122_A_Sprr2b
  gRNA
aattgcacaggagggcattt

SEQ ID NO: 51123 - DNA, 20 bp, Artificial Sequence
  MKO10051123_A_Sprr2b
  gRNA
tgccatggctgaggggggca

SEQ ID NO: 51124 - DNA, 20 bp, Artificial Sequence
  MKO10051124_A_Sprr2b
  gRNA
tgtccacccaagaataaatg

SEQ ID NO: 51125 - DNA, 20 bp, Artificial Sequence
  MKO10051125_A_Sprr2d
  gRNA
caaggctcaggacactttag

SEQ ID NO: 51126 - DNA, 20 bp, Artificial Sequence
  MKO10051126_A_Sprr2d
  gRNA
tgcccacctaagagcaagtg

SEQ ID NO: 51127 - DNA, 20 bp, Artificial Sequence
  MKO10051127_A_Sprr2d
  gRNA
tgaagacctcacttgctctt

SEQ ID NO: 51128 - DNA, 20 bp, Artificial Sequence
  MKO10051128_A_Sprr2e
  gRNA
gggcacttctgttgacatgg

SEQ ID NO: 51129 - DNA, 20 bp, Artificial Sequence
  MKO10051129_A_Sprr2e
  gRNA
ctgaatccctcacttgctct

SEQ ID NO: 51130 - DNA, 20 bp, Artificial Sequence
  MKO10051130_A_Sprr2e
  gRNA
ggacaaggctcaggacactg

SEQ ID NO: 51131 - DNA, 20 bp, Artificial Sequence
  MKO10051131_A_Sprr2f
  gRNA
ctgaagacttcacttgctct

SEQ ID NO: 51132 - DNA, 20 bp, Artificial Sequence
  MKO10051132_A_Sprr2f
  gRNA
acaaggctcagggcacaccg

SEQ ID NO: 51133 - DNA, 20 bp, Artificial Sequence
  MKO10051133_A_Sprr2f
  gRNA
gttgcttgcactgctgttct

SEQ ID NO: 51134 - DNA, 20 bp, Artificial Sequence
  MKO10051134_A_Sprr2h
  gRNA
tgtccacccaagaacaaatg

SEQ ID NO: 51135 - DNA, 20 bp, Artificial Sequence
  MKO10051135_A_Sprr2h
  gRNA
ggacacttctgttgacatgg

SEQ ID NO: 51136 - DNA, 20 bp, Artificial Sequence
  MKO10051136_A_Sprr2h
  gRNA
ctgaggacctcatttgttct

SEQ ID NO: 51137 - DNA, 20 bp, Artificial Sequence
  MKO10051137_A_Sprr2i
  gRNA
ctgaggcattcacttgcttt

SEQ ID NO: 51138 - DNA, 20 bp, Artificial Sequence
  MKO10051138_A_Sprr2i
  gRNA
ggacaaggttcaggacactg

SEQ ID NO: 51139 - DNA, 20 bp, Artificial Sequence
  MKO10051139_A_Sprr2i
  gRNA
gagggagggggacatgactc

SEQ ID NO: 51140 - DNA, 20 bp, Artificial Sequence
  MKO10051140_A_Sprr2k
  gRNA
tctgctggcatggtgcctcc

SEQ ID NO: 51141 - DNA, 20 bp, Artificial Sequence
  MKO10051141_A_Sprr2k
  gRNA
gccctcctcagccatgccag

SEQ ID NO: 51142 - DNA, 20 bp, Artificial Sequence
  MKO10051142_A_Sprr2k
  gRNA
ggagggcatttccgctggca

SEQ ID NO: 51143 - DNA, 20 bp, Artificial Sequence
  MKO10051143_A_Sprr3
  gRNA
ccagatcgtaccgtggttcc

SEQ ID NO: 51144 - DNA, 20 bp, Artificial Sequence
  MKO10051144_A_Sprr3
  gRNA
tctatcaatgttcgtgaacc

SEQ ID NO: 51145 - DNA, 20 bp, Artificial Sequence
  MKO10051145_A_Sprr3
  gRNA
ccagattatactacgatgcc

SEQ ID NO: 51146 - DNA, 20 bp, Artificial Sequence
  MKO10051146_A_Sprr4
  gRNA
acctcctaccaaatgtcaag

SEQ ID NO: 51147 - DNA, 20 bp, Artificial Sequence
  MKO10051147_A_Sprr4
  gRNA
gcaggacacttctcttgagc

SEQ ID NO: 51148 - DNA, 20 bp, Artificial Sequence
  MKO10051148_A_Sprr4
  gRNA
ccaaaaaacaatgcccagcg

SEQ ID NO: 51149 - DNA, 20 bp, Artificial Sequence
  MKO10051149_A_Sprtn
  gRNA
atccgcaaccatatcccgag

SEQ ID NO: 51150 - DNA, 20 bp, Artificial Sequence
  MKO10051150_A_Sprtn
  gRNA
acgcttcacatagccgtagt

SEQ ID NO: 51151 - DNA, 20 bp, Artificial Sequence
  MKO10051151_A_Sprtn
  gRNA
tggatgagtatcgccggcac

SEQ ID NO: 51152 - DNA, 20 bp, Artificial Sequence
  MKO10051152_A_Spry1
  gRNA
taggacggtctccgcccacc

SEQ ID NO: 51153 - DNA, 20 bp, Artificial Sequence
  MKO10051153_A_Spry1
  gRNA
tgggcggagaccgtcctaat

SEQ ID NO: 51154 - DNA, 20 bp, Artificial Sequence
  MKO10051154_A_Spry1
  gRNA
acccgatctgacctatgacc

SEQ ID NO: 51155 - DNA, 20 bp, Artificial Sequence
  MKO10051155_A_Spry2
  gRNA
aatccgagtgcagcctaaat

SEQ ID NO: 51156 - DNA, 20 bp, Artificial Sequence
  MKO10051156_A_Spry2
  gRNA
ctgaccatcgcgtacaacaa

SEQ ID NO: 51157 - DNA, 20 bp, Artificial Sequence
  MKO10051157_A_Spry2
  gRNA
agtcccattgttgtacgcga

SEQ ID NO: 51158 - DNA, 20 bp, Artificial Sequence
  MKO10051158_A_Spry3
  gRNA
tatgatagcctccgtcgacc

SEQ ID NO: 51159 - DNA, 20 bp, Artificial Sequence
  MKO10051159_A_Spry3
  gRNA
agagggcgaaccgctgtgca

SEQ ID NO: 51160 - DNA, 20 bp, Artificial Sequence
  MKO10051160_A_Spry3
  gRNA
gactcctgtacctagaaaac

SEQ ID NO: 51161 - DNA, 20 bp, Artificial Sequence
  MKO10051161_A_Spry4
  gRNA
tacgaccgcctgagacgccc

SEQ ID NO: 51162 - DNA, 20 bp, Artificial Sequence
  MKO10051162_A_Spry4
  gRNA
tcaggcggtcgtagcctcgc

SEQ ID NO: 51163 - DNA, 20 bp, Artificial Sequence
  MKO10051163_A_Spry4
  gRNA
tcacatggctccaccgcccg

SEQ ID NO: 51164 - DNA, 20 bp, Artificial Sequence
  MKO10051164_A_Spryd3
  gRNA
ggcgtctcgacccctgacca

SEQ ID NO: 51165 - DNA, 20 bp, Artificial Sequence
  MKO10051165_A_Spryd3
  gRNA
agttgcactttgacccgaac

SEQ ID NO: 51166 - DNA, 20 bp, Artificial Sequence
  MKO10051166_A_Spryd3
  gRNA
cgtccggggcaccattgctg

SEQ ID NO: 51167 - DNA, 20 bp, Artificial Sequence
  MKO10051167_A_Spryd4
  gRNA
ccctgaatttggagcgcttc

SEQ ID NO: 51168 - DNA, 20 bp, Artificial Sequence
  MKO10051168_A_Spryd4
  gRNA
ggcgacacgggtgtcaaata

SEQ ID NO: 51169 - DNA, 20 bp, Artificial Sequence
  MKO10051169_A_Spryd4
  gRNA
cgctgccctttgcacgctgt

SEQ ID NO: 51170 - DNA, 20 bp, Artificial Sequence
  MKO10051170_A_Spryd7
  gRNA
agttgacgacagtgcaattc

SEQ ID NO: 51171 - DNA, 20 bp, Artificial Sequence
  MKO10051171_A_Spryd7
  gRNA
ctatgcatgtctcggccaag

SEQ ID NO: 51172 - DNA, 20 bp, Artificial Sequence
  MKO10051172_A_Spryd7
  gRNA
ctgagcttaccatatacaac

SEQ ID NO: 51173 - DNA, 20 bp, Artificial Sequence
  MKO10051173_A_Spr
  gRNA
gcgcagtacgcgagctcccg

SEQ ID NO: 51174 - DNA, 20 bp, Artificial Sequence
  MKO10051174_A_Spr
  gRNA
ccagggcgcgaccaaagccc

SEQ ID NO: 51175 - DNA, 20 bp, Artificial Sequence
  MKO10051175_A_Spr
  gRNA
atggggcgctggtggactgt

SEQ ID NO: 51176 - DNA, 20 bp, Artificial Sequence
  MKO10051176_A_Spsb1
  gRNA
gtccgttcaagtagcgcatg

SEQ ID NO: 51177 - DNA, 20 bp, Artificial Sequence
  MKO10051177_A_Spsb1
  gRNA
gcaacgaggcacgcatgccg

SEQ ID NO: 51178 - DNA, 20 bp, Artificial Sequence
  MKO10051178_A_Spsb1
  gRNA
gcgctaggcgcaccgaacgc

SEQ ID NO: 51179 - DNA, 20 bp, Artificial Sequence
  MKO10051179_A_Spsb2
  gRNA
tgcccaaaagcgccgcatag

SEQ ID NO: 51180 - DNA, 20 bp, Artificial Sequence
  MKO10051180_A_Spsb2
  gRNA
gggaaacggggctattcgag

SEQ ID NO: 51181 - DNA, 20 bp, Artificial Sequence
  MKO10051181_A_Spsb2
  gRNA
gtagagcagatagcgcttca

SEQ ID NO: 51182 - DNA, 20 bp, Artificial Sequence
  MKO10051182_A_Spsb3
  gRNA
cccggcgtacacggagtagc

SEQ ID NO: 51183 - DNA, 20 bp, Artificial Sequence
  MKO10051183_A_Spsb3
  gRNA
tatctcggcgggctgcgctc

SEQ ID NO: 51184 - DNA, 20 bp, Artificial Sequence
  MKO10051184_A_Spsb3
  gRNA
taggggatggccaacacttc

SEQ ID NO: 51185 - DNA, 20 bp, Artificial Sequence
  MKO10051185_A_Spsb4
  gRNA
cgacagcgcctgcgtgacat

SEQ ID NO: 51186 - DNA, 20 bp, Artificial Sequence
  MKO10051186_A_Spsb4
  gRNA
gcagggagccgatgtcacgc

SEQ ID NO: 51187 - DNA, 20 bp, Artificial Sequence
  MKO10051187_A_Spsb4
  gRNA
aaggccgttgatgtagcgca

SEQ ID NO: 51188 - DNA, 20 bp, Artificial Sequence
  MKO10051188_A_Spt1
  gRNA
ttcttcttcgactgaatcag

SEQ ID NO: 51189 - DNA, 20 bp, Artificial Sequence
  MKO10051189_A_Spt1
  gRNA
ctaaagaatttcttacaacg

SEQ ID NO: 51190 - DNA, 20 bp, Artificial Sequence
  MKO10051190_A_Spt1
  gRNA
aacgccactgttctgatcag

SEQ ID NO: 51191 - DNA, 20 bp, Artificial Sequence
  MKO10051191_A_Spta1
  gRNA
tcaaggatcgcgttgccgag

SEQ ID NO: 51192 - DNA, 20 bp, Artificial Sequence
  MKO10051192_A_Spta1
  gRNA
caacgcgatccttgaacctc

SEQ ID NO: 51193 - DNA, 20 bp, Artificial Sequence
  MKO10051193_A_Spta1
  gRNA
cgatgactgggagcgaactg

SEQ ID NO: 51194 - DNA, 20 bp, Artificial Sequence
  MKO10051194_A_Sptan1
  gRNA
ctccagcttctgacgccgta

SEQ ID NO: 51195 - DNA, 20 bp, Artificial Sequence
  MKO10051195_A_Sptan1
  gRNA
tagagagctccttgaagcgg

SEQ ID NO: 51196 - DNA, 20 bp, Artificial Sequence
  MKO10051196_A_Sptan1
  gRNA
gtagcacctctacatgctcc

SEQ ID NO: 51197 - DNA, 20 bp, Artificial Sequence
  MKO10051197_A_Sptbn1
  gRNA
atccgcatccgtcccttagt

SEQ ID NO: 51198 - DNA, 20 bp, Artificial Sequence
  MKO10051198_A_Sptbn1
  gRNA
acggatgcggatccactgtc

SEQ ID NO: 51199 - DNA, 20 bp, Artificial Sequence
  MKO10051199_A_Sptbn1
  gRNA
tgagcatccgtccatctcga

SEQ ID NO: 51200 - DNA, 20 bp, Artificial Sequence
  MKO10051200_A_Sptbn2
  gRNA
ccgaatgcggattcactgcc

SEQ ID NO: 51201 - DNA, 20 bp, Artificial Sequence
  MKO10051201_A_Sptbn2
  gRNA
ggaggttgcgcccgtcccgc

SEQ ID NO: 51202 - DNA, 20 bp, Artificial Sequence
  MKO10051202_A_Sptbn2
  gRNA
gtgaatccgcattcggccct

SEQ ID NO: 51203 - DNA, 20 bp, Artificial Sequence
  MKO10051203_A_Sptbn4
  gRNA
aagcggcgtcgctcctgcaa

SEQ ID NO: 51204 - DNA, 20 bp, Artificial Sequence
  MKO10051204_A_Sptbn4
  gRNA
ggagcgacgccgcttgttgc

SEQ ID NO: 51205 - DNA, 20 bp, Artificial Sequence
  MKO10051205_A_Sptbn4
  gRNA
ccgcgaagctctgcactagc

SEQ ID NO: 51206 - DNA, 20 bp, Artificial Sequence
  MKO10051206_A_Sptb
  gRNA
tgagcatccgtccgtcccgc

SEQ ID NO: 51207 - DNA, 20 bp, Artificial Sequence
  MKO10051207_A_Sptb
  gRNA
cccttagccaaggccgacca

SEQ ID NO: 51208 - DNA, 20 bp, Artificial Sequence
  MKO10051208_A_Sptb
  gRNA
tgtggatggtaaccaccgcc

SEQ ID NO: 51209 - DNA, 20 bp, Artificial Sequence
  MKO10051209_A_Sptlc1
  gRNA
gctggccaaccctcgagtta

SEQ ID NO: 51210 - DNA, 20 bp, Artificial Sequence
  MKO10051210_A_Sptlc1
  gRNA
ttgttactcaccttaactcg

SEQ ID NO: 51211 - DNA, 20 bp, Artificial Sequence
  MKO10051211_A_Sptlc1
  gRNA
ctcaactacaacatcgtgtc

SEQ ID NO: 51212 - DNA, 20 bp, Artificial Sequence
  MKO10051212_A_Sptlc2
  gRNA
cgacctatctgtagtgtgcc

SEQ ID NO: 51213 - DNA, 20 bp, Artificial Sequence
  MKO10051213_A_Sptlc2
  gRNA
gatatcttcgagatttcttg

SEQ ID NO: 51214 - DNA, 20 bp, Artificial Sequence
  MKO10051214_A_Sptlc2
  gRNA
aggggtgtgcagcactcgtc

SEQ ID NO: 51215 - DNA, 20 bp, Artificial Sequence
  MKO10051215_A_Sptlc3
  gRNA
agtctctgagatagccgaat

SEQ ID NO: 51216 - DNA, 20 bp, Artificial Sequence
  MKO10051216_A_Sptlc3
  gRNA
aagtgactgatgactataac

SEQ ID NO: 51217 - DNA, 20 bp, Artificial Sequence
  MKO10051217_A_Sptlc3
  gRNA
ggactttgtgccgctgtatc

SEQ ID NO: 51218 - DNA, 20 bp, Artificial Sequence
  MKO10051218_A_Sptssa
  gRNA
ccatcacgcagattcgatgc

SEQ ID NO: 51219 - DNA, 20 bp, Artificial Sequence
  MKO10051219_A_Sptssa
  gRNA
actgaacacggttcgctccc

SEQ ID NO: 51220 - DNA, 20 bp, Artificial Sequence
  MKO10051220_A_Sptssa
  gRNA
gcagaatagccatgatgtgc

SEQ ID NO: 51221 - DNA, 20 bp, Artificial Sequence
  MKO10051221_A_Sptssb
  gRNA
catggatttcaagcgcgtga

SEQ ID NO: 51222 - DNA, 20 bp, Artificial Sequence
  MKO10051222_A_Sptssb
  gRNA
cttcacgcgcttgaaatcca

SEQ ID NO: 51223 - DNA, 20 bp, Artificial Sequence
  MKO10051223_A_Sptssb
  gRNA
actgtcatagccacatattt

SEQ ID NO: 51224 - DNA, 20 bp, Artificial Sequence
  MKO10051224_A_Spty2d1
  gRNA
gatttctgagtcccgctagc

SEQ ID NO: 51225 - DNA, 20 bp, Artificial Sequence
  MKO10051225_A_Spty2d1
  gRNA
gctggacgaactgtcaattc

SEQ ID NO: 51226 - DNA, 20 bp, Artificial Sequence
  MKO10051226_A_Spty2d1
  gRNA
tgactatgccttacgttaca

SEQ ID NO: 51227 - DNA, 20 bp, Artificial Sequence
  MKO10051227_A_Spz1
  gRNA
acgaactcagcgaactaatg

SEQ ID NO: 51228 - DNA, 20 bp, Artificial Sequence
  MKO10051228_A_Spz1
  gRNA
cgtgccttccgttgccctcg

SEQ ID NO: 51229 - DNA, 20 bp, Artificial Sequence
  MKO10051229_A_Spz1
  gRNA
ctgcgatcaaatgcagcgcg

SEQ ID NO: 51230 - DNA, 20 bp, Artificial Sequence
  MKO10051230_A_Sqle
  gRNA
agtgtcgacctcgttcgtga

SEQ ID NO: 51231 - DNA, 20 bp, Artificial Sequence
  MKO10051231_A_Sqle
  gRNA
cacgaacgaggtcgacactg

SEQ ID NO: 51232 - DNA, 20 bp, Artificial Sequence
  MKO10051232_A_Sqle
  gRNA
tgtaatcggcgtgcaataca

SEQ ID NO: 51233 - DNA, 20 bp, Artificial Sequence
  MKO10051233_A_Sqrdl
  gRNA
tgtcaggtcggacctcaata

SEQ ID NO: 51234 - DNA, 20 bp, Artificial Sequence
  MKO10051234_A_Sqrdl
  gRNA
agcgatgataaggtatctgt

SEQ ID NO: 51235 - DNA, 20 bp, Artificial Sequence
  MKO10051235_A_Sqrdl
  gRNA
ggaatcacatgcgtctcccc

SEQ ID NO: 51236 - DNA, 20 bp, Artificial Sequence
  MKO10051236_A_Sqstm1
  gRNA
gggcggccatcccctgcacg

SEQ ID NO: 51237 - DNA, 20 bp, Artificial Sequence
  MKO10051237_A_Sqstm1
  gRNA
cgacctgtgcagcgtgtgcg

SEQ ID NO: 51238 - DNA, 20 bp, Artificial Sequence
  MKO10051238_A_Sqstm1
  gRNA
ttatagcgagttcccaccac

SEQ ID NO: 51239 - DNA, 20 bp, Artificial Sequence
  MKO10051239_A_Sra1
  gRNA
ggccgcgaccctcttagtaa

SEQ ID NO: 51240 - DNA, 20 bp, Artificial Sequence
  MKO10051240_A_Sra1
  gRNA
ctcgaagcagcgccaagcgt

SEQ ID NO: 51241 - DNA, 20 bp, Artificial Sequence
  MKO10051241_A_Sra1
  gRNA
aacgcactccccttactaag

SEQ ID NO: 51242 - DNA, 20 bp, Artificial Sequence
  MKO10051242_A_Srbd1
  gRNA
aatgaactgggacgtagtac

SEQ ID NO: 51243 - DNA, 20 bp, Artificial Sequence
  MKO10051243_A_Srbd1
  gRNA
gttgaactgtaaaacgttcg

SEQ ID NO: 51244 - DNA, 20 bp, Artificial Sequence
  MKO10051244_A_Srbd1
  gRNA
ggctttatagaacagcccgg

SEQ ID NO: 51245 - DNA, 20 bp, Artificial Sequence
  MKO10051245_A_Srcin1
  gRNA
ccgcaagcgagatgcgttca

SEQ ID NO: 51246 - DNA, 20 bp, Artificial Sequence
  MKO10051246_A_Srcin1
  gRNA
ccgcagctcgcgccatactc

SEQ ID NO: 51247 - DNA, 20 bp, Artificial Sequence
  MKO10051247_A_Srcin1
  gRNA
ccggtactcccgagggtact

SEQ ID NO: 51248 - DNA, 20 bp, Artificial Sequence
  MKO10051248_A_Srcrb4d
  gRNA
atcgtcgcaaacgctgcccc

SEQ ID NO: 51249 - DNA, 20 bp, Artificial Sequence
  MKO10051249_A_Srcrb4d
  gRNA
cgcctcgaggtcatgcatag

SEQ ID NO: 51250 - DNA, 20 bp, Artificial Sequence
  MKO10051250_A_Srcrb4d
  gRNA
cccggtaccatagccgaaaa

SEQ ID NO: 51251 - DNA, 20 bp, Artificial Sequence
  MKO10051251_A_Src
  gRNA
ctcggccgcgggcggcacga

SEQ ID NO: 51252 - DNA, 20 bp, Artificial Sequence
  MKO10051252_A_Src
  gRNA
ctcaacgccgagaacccgag

SEQ ID NO: 51253 - DNA, 20 bp, Artificial Sequence
  MKO10051253_A_Src
  gRNA
cgccgccttcgtgccgcccg

SEQ ID NO: 51254 - DNA, 20 bp, Artificial Sequence
  MKO10051254_A_Srd5a1
  gRNA
cacgagctccccaaaatagt

SEQ ID NO: 51255 - DNA, 20 bp, Artificial Sequence
  MKO10051255_A_Srd5a1
  gRNA
ggtaatcttcaaacttctcg

SEQ ID NO: 51256 - DNA, 20 bp, Artificial Sequence
  MKO10051256_A_Srd5a1
  gRNA
ttctcagattccgcaggatg

SEQ ID NO: 51257 - DNA, 20 bp, Artificial Sequence
  MKO10051257_A_Srd5a2
  gRNA
acagacatgcggtttagcgt

SEQ ID NO: 51258 - DNA, 20 bp, Artificial Sequence
  MKO10051258_A_Srd5a2
  gRNA
cgcgcaataaaccaggtaat

SEQ ID NO: 51259 - DNA, 20 bp, Artificial Sequence
  MKO10051259_A_Srd5a2
  gRNA
tccattcaataatctcgccc

SEQ ID NO: 51260 - DNA, 20 bp, Artificial Sequence
  MKO10051260_A_Srd5a3
  gRNA
cacgttgtgcagtactgttt

SEQ ID NO: 51261 - DNA, 20 bp, Artificial Sequence
  MKO10051261_A_Srd5a3
  gRNA
agcactcaaagagtctccga

SEQ ID NO: 51262 - DNA, 20 bp, Artificial Sequence
  MKO10051262_A_Srd5a3
  gRNA
tgacgtggcatttatactga

SEQ ID NO: 51263 - DNA, 20 bp, Artificial Sequence
  MKO10051263_A_Srebf1
  gRNA
cccatccaccgactcgcagc

SEQ ID NO: 51264 - DNA, 20 bp, Artificial Sequence
  MKO10051264_A_Srebf1
  gRNA
ctgtttgacgccccctatgc

SEQ ID NO: 51265 - DNA, 20 bp, Artificial Sequence
  MKO10051265_A_Srebf1
  gRNA
ggtgacggctgtggcgctgc

SEQ ID NO: 51266 - DNA, 20 bp, Artificial Sequence
  MKO10051266_A_Srebf2
  gRNA
aagcctcgtgacgtccccgc

SEQ ID NO: 51267 - DNA, 20 bp, Artificial Sequence
  MKO10051267_A_Srebf2
  gRNA
tcagcaccgctccgcagacg

SEQ ID NO: 51268 - DNA, 20 bp, Artificial Sequence
  MKO10051268_A_Srebf2
  gRNA
acagacggtcgctgcgccac

SEQ ID NO: 51269 - DNA, 20 bp, Artificial Sequence
  MKO10051269_A_Srek1ip1
  gRNA
gatctacccggagaaaattg

SEQ ID NO: 51270 - DNA, 20 bp, Artificial Sequence
  MKO10051270_A_Srek1ip1
  gRNA
cgtcagcagcaccagtagtg

SEQ ID NO: 51271 - DNA, 20 bp, Artificial Sequence
  MKO10051271_A_Srek1ip1
  gRNA
ttgtatttcaggttgcaaca

SEQ ID NO: 51272 - DNA, 20 bp, Artificial Sequence
  MKO10051272_A_Srek1
  gRNA
acctggactttgagcgagtg

SEQ ID NO: 51273 - DNA, 20 bp, Artificial Sequence
  MKO10051273_A_Srek1
  gRNA
tccacaaaagcaaaccgagt

SEQ ID NO: 51274 - DNA, 20 bp, Artificial Sequence
  MKO10051274_A_Srek1
  gRNA
ggatccacatttcccataag

SEQ ID NO: 51275 - DNA, 20 bp, Artificial Sequence
  MKO10051275_A_Srfbp1
  gRNA
agtgaagcgaatccgagttc

SEQ ID NO: 51276 - DNA, 20 bp, Artificial Sequence
  MKO10051276_A_Srfbp1
  gRNA
cgaaaacttgtcaggagtgt

SEQ ID NO: 51277 - DNA, 20 bp, Artificial Sequence
  MKO10051277_A_Srfbp1
  gRNA
gcaacctttgggctcgcctt

SEQ ID NO: 51278 - DNA, 20 bp, Artificial Sequence
  MKO10051278_A_Srf
  gRNA
aagagttatacctgtcccgc

SEQ ID NO: 51279 - DNA, 20 bp, Artificial Sequence
  MKO10051279_A_Srf
  gRNA
actcttgagcacagtcccgt

SEQ ID NO: 51280 - DNA, 20 bp, Artificial Sequence
  MKO10051280_A_Srf
  gRNA
tctgagcggggcggagagtc

SEQ ID NO: 51281 - DNA, 20 bp, Artificial Sequence
  MKO10051281_A_Srgap1
  gRNA
gattgcgttccagcttcacg

SEQ ID NO: 51282 - DNA, 20 bp, Artificial Sequence
  MKO10051282_A_Srgap1
  gRNA
caccccgagcagattcaaga

SEQ ID NO: 51283 - DNA, 20 bp, Artificial Sequence
  MKO10051283_A_Srgap1
  gRNA
ggccaaaacaagaagcacta

SEQ ID NO: 51284 - DNA, 20 bp, Artificial Sequence
  MKO10051284_A_Srgap2
  gRNA
tcgatttgttcaagtcagcg

SEQ ID NO: 51285 - DNA, 20 bp, Artificial Sequence
  MKO10051285_A_Srgap2
  gRNA
cacagccaatgtccgcattg

SEQ ID NO: 51286 - DNA, 20 bp, Artificial Sequence
  MKO10051286_A_Srgap2
  gRNA
agtcctgaacgagctttact

SEQ ID NO: 51287 - DNA, 20 bp, Artificial Sequence
  MKO10051287_A_Srgap3
  gRNA
tcctctcgcccgtgaactgt

SEQ ID NO: 51288 - DNA, 20 bp, Artificial Sequence
  MKO10051288_A_Srgap3
  gRNA
tggagcagcagtccgagtcg

SEQ ID NO: 51289 - DNA, 20 bp, Artificial Sequence
  MKO10051289_A_Srgap3
  gRNA
gctggggtctgtcctcgtgc

SEQ ID NO: 51290 - DNA, 20 bp, Artificial Sequence
  MKO10051290_A_Srgn
  gRNA
gcagcggacccactggtacc

SEQ ID NO: 51291 - DNA, 20 bp, Artificial Sequence
  MKO10051291_A_Srgn
  gRNA
tgggtccgctgcaaaccgaa

SEQ ID NO: 51292 - DNA, 20 bp, Artificial Sequence
  MKO10051292_A_Srgn
  gRNA
gtcaggatgcaggttcccgt

SEQ ID NO: 51293 - DNA, 20 bp, Artificial Sequence
  MKO10051293_A_Sri
  gRNA
tcatcagtttcgatagcgat

SEQ ID NO: 51294 - DNA, 20 bp, Artificial Sequence
  MKO10051294_A_Sri
  gRNA
gacacaaacccatagtcgtc

SEQ ID NO: 51295 - DNA, 20 bp, Artificial Sequence
  MKO10051295_A_Sri
  gRNA
tgagtttgtccagggaacgc

SEQ ID NO: 51296 - DNA, 20 bp, Artificial Sequence
  MKO10051296_A_Srl
  gRNA
aagccagctgacgattactc

SEQ ID NO: 51297 - DNA, 20 bp, Artificial Sequence
  MKO10051297_A_Srl
  gRNA
cgattcatctccggcaggta

SEQ ID NO: 51298 - DNA, 20 bp, Artificial Sequence
  MKO10051298_A_Srl
  gRNA
ttacctgagtaatcgtcagc

SEQ ID NO: 51299 - DNA, 20 bp, Artificial Sequence
  MKO10051299_A_Srms
  gRNA
gggaacatatagcgtgcagc

SEQ ID NO: 51300 - DNA, 20 bp, Artificial Sequence
  MKO10051300_A_Srms
  gRNA
agttcagtaacgatgtacac

SEQ ID NO: 51301 - DNA, 20 bp, Artificial Sequence
  MKO10051301_A_Srms
  gRNA
tggcttactacaagaccaac

SEQ ID NO: 51302 - DNA, 20 bp, Artificial Sequence
  MKO10051302_A_Srm
  gRNA
atgcggtaccttccgcgggt

SEQ ID NO: 51303 - DNA, 20 bp, Artificial Sequence
  MKO10051303_A_Srm
  gRNA
tctgcccgcagtaaaaccta

SEQ ID NO: 51304 - DNA, 20 bp, Artificial Sequence
  MKO10051304_A_Srm
  gRNA
ccacctcatcaatctcgcac

SEQ ID NO: 51305 - DNA, 20 bp, Artificial Sequence
  MKO10051305_A_Srp14
  gRNA
tgaacacgctgcccgacgag

SEQ ID NO: 51306 - DNA, 20 bp, Artificial Sequence
  MKO10051306_A_Srp14
  gRNA
cttccagaagtgccgctcgt

SEQ ID NO: 51307 - DNA, 20 bp, Artificial Sequence
  MKO10051307_A_Srp14
  gRNA
gtcgcaccaaacctatcccg

SEQ ID NO: 51308 - DNA, 20 bp, Artificial Sequence
  MKO10051308_A_Srp19
  gRNA
cagctactcaccttacttat

SEQ ID NO: 51309 - DNA, 20 bp, Artificial Sequence
  MKO10051309_A_Srp19
  gRNA
gccgacccaagtcttcagca

SEQ ID NO: 51310 - DNA, 20 bp, Artificial Sequence
  MKO10051310_A_Srp19
  gRNA
aaccgtgatgttcagtttcg

SEQ ID NO: 51311 - DNA, 20 bp, Artificial Sequence
  MKO10051311_A_Srp54a
  gRNA
agaagtatgtacagcattat

SEQ ID NO: 51312 - DNA, 20 bp, Artificial Sequence
  MKO10051312_A_Srp54a
  gRNA
tgcaattgatcttgaagaga

SEQ ID NO: 51313 - DNA, 20 bp, Artificial Sequence
  MKO10051313_A_Srp54a
  gRNA
tgtatttaaagaacttgtaa

SEQ ID NO: 51314 - DNA, 20 bp, Artificial Sequence
  MKO10051314_A_Srp54b
  gRNA
agaagtatgtacagcattat

SEQ ID NO: 51315 - DNA, 20 bp, Artificial Sequence
  MKO10051315_A_Srp54b
  gRNA
tgcaattgatcttgaagaga

SEQ ID NO: 51316 - DNA, 20 bp, Artificial Sequence
  MKO10051316_A_Srp54b
  gRNA
tgtatttaaagaacttgtaa

SEQ ID NO: 51317 - DNA, 20 bp, Artificial Sequence
  MKO10051317_A_Srp54c
  gRNA
agaagtatgtacagcattat

SEQ ID NO: 51318 - DNA, 20 bp, Artificial Sequence
  MKO10051318_A_Srp54c
  gRNA
tgcaattgatcttgaagaga

SEQ ID NO: 51319 - DNA, 20 bp, Artificial Sequence
  MKO10051319_A_Srp54c
  gRNA
tgtatttaaagaacttgtaa

SEQ ID NO: 51320 - DNA, 20 bp, Artificial Sequence
  MKO10051320_A_Srp68
  gRNA
ccaacaccgagccgcggaaa

SEQ ID NO: 51321 - DNA, 20 bp, Artificial Sequence
  MKO10051321_A_Srp68
  gRNA
ctcgaagacaaagacgcctc

SEQ ID NO: 51322 - DNA, 20 bp, Artificial Sequence
  MKO10051322_A_Srp68
  gRNA
agcaagtgaaaccgtttccg

SEQ ID NO: 51323 - DNA, 20 bp, Artificial Sequence
  MKO10051323_A_Srp72
  gRNA
agcactcatcgtagcgttcc

SEQ ID NO: 51324 - DNA, 20 bp, Artificial Sequence
  MKO10051324_A_Srp72
  gRNA
tcgttgccgctcagagcaac

SEQ ID NO: 51325 - DNA, 20 bp, Artificial Sequence
  MKO10051325_A_Srp72
  gRNA
ggcaaactactttacagtgc

SEQ ID NO: 51326 - DNA, 20 bp, Artificial Sequence
  MKO10051326_A_Srp9
  gRNA
tcaccttcatggggtccgcc

SEQ ID NO: 51327 - DNA, 20 bp, Artificial Sequence
  MKO10051327_A_Srp9
  gRNA
cgatgcctcagttccagacc

SEQ ID NO: 51328 - DNA, 20 bp, Artificial Sequence
  MKO10051328_A_Srp9
  gRNA
tacgggtggttctcaaatac

SEQ ID NO: 51329 - DNA, 20 bp, Artificial Sequence
  MKO10051329_A_Srpk1
  gRNA
tcccgcagtgctcgcgctcc

SEQ ID NO: 51330 - DNA, 20 bp, Artificial Sequence
  MKO10051330_A_Srpk1
  gRNA
agggtctgacgatgacgagc

SEQ ID NO: 51331 - DNA, 20 bp, Artificial Sequence
  MKO10051331_A_Srpk1
  gRNA
gaccccaatgactactgtaa

SEQ ID NO: 51332 - DNA, 20 bp, Artificial Sequence
  MKO10051332_A_Srpk2
  gRNA
gagtagtttaatttcatcca

SEQ ID NO: 51333 - DNA, 20 bp, Artificial Sequence
  MKO10051333_A_Srpk2
  gRNA
ggctatcatccagtgaaaat

SEQ ID NO: 51334 - DNA, 20 bp, Artificial Sequence
  MKO10051334_A_Srpk2
  gRNA
attgatgacttcaagatctc

SEQ ID NO: 51335 - DNA, 20 bp, Artificial Sequence
  MKO10051335_A_Srpk3
  gRNA
ttacaggcgcaagcgctttg

SEQ ID NO: 51336 - DNA, 20 bp, Artificial Sequence
  MKO10051336_A_Srpk3
  gRNA
gtcatcgataagttgaacaa

SEQ ID NO: 51337 - DNA, 20 bp, Artificial Sequence
  MKO10051337_A_Srpk3
  gRNA
ttcaacttatcgatgacttc

SEQ ID NO: 51338 - DNA, 20 bp, Artificial Sequence
  MKO10051338_A_Srprb
  gRNA
tggacagtgcggcgttccag

SEQ ID NO: 51339 - DNA, 20 bp, Artificial Sequence
  MKO10051339_A_Srprb
  gRNA
tgtggccgaatttctgtacc

SEQ ID NO: 51340 - DNA, 20 bp, Artificial Sequence
  MKO10051340_A_Srprb
  gRNA
atcgctttaagtcttcagct

SEQ ID NO: 51341 - DNA, 20 bp, Artificial Sequence
  MKO10051341_A_Srpr
  gRNA
cctctcaccgaaggagccgc

SEQ ID NO: 51342 - DNA, 20 bp, Artificial Sequence
  MKO10051342_A_Srpr
  gRNA
ccaaagaggagctgatccgt

SEQ ID NO: 51343 - DNA, 20 bp, Artificial Sequence
  MKO10051343_A_Srpr
  gRNA
taacaactctttcactcatg

SEQ ID NO: 51344 - DNA, 20 bp, Artificial Sequence
  MKO10051344_A_Srpx2
  gRNA
gttccagaccaacgccggct

SEQ ID NO: 51345 - DNA, 20 bp, Artificial Sequence
  MKO10051345_A_Srpx2
  gRNA
actggtcatcatcgtcgaca

SEQ ID NO: 51346 - DNA, 20 bp, Artificial Sequence
  MKO10051346_A_Srpx2
  gRNA
agagctcacaacgtgtgcct

SEQ ID NO: 51347 - DNA, 20 bp, Artificial Sequence
  MKO10051347_A_Srpx
  gRNA
atgtgacattcgctgccgaa

SEQ ID NO: 51348 - DNA, 20 bp, Artificial Sequence
  MKO10051348_A_Srpx
  gRNA
ctgaccagcgcttgtttgac

SEQ ID NO: 51349 - DNA, 20 bp, Artificial Sequence
  MKO10051349_A_Srpx
  gRNA
gactcaccactagaagacga

SEQ ID NO: 51350 - DNA, 20 bp, Artificial Sequence
  MKO10051350_A_Srrd
  gRNA
atcgttgcctagtgcgtcac

SEQ ID NO: 51351 - DNA, 20 bp, Artificial Sequence
  MKO10051351_A_Srrd
  gRNA
gttcccgatgatgagcaccc

SEQ ID NO: 51352 - DNA, 20 bp, Artificial Sequence
  MKO10051352_A_Srrd
  gRNA
tgatttctgcagttcggcac

SEQ ID NO: 51353 - DNA, 20 bp, Artificial Sequence
  MKO10051353_A_Srrm1
  gRNA
caacatcatcttcgaatcca

SEQ ID NO: 51354 - DNA, 20 bp, Artificial Sequence
  MKO10051354_A_Srrm1
  gRNA
gtcataccttcacttccagc

SEQ ID NO: 51355 - DNA, 20 bp, Artificial Sequence
  MKO10051355_A_Srrm1
  gRNA
tttcttgtgcactcaacagc

SEQ ID NO: 51356 - DNA, 20 bp, Artificial Sequence
  MKO10051356_A_Srrm2
  gRNA
gcagttctcctcgacgagag

SEQ ID NO: 51357 - DNA, 20 bp, Artificial Sequence
  MKO10051357_A_Srrm2
  gRNA
gcttctcgagcacgtctctg

SEQ ID NO: 51358 - DNA, 20 bp, Artificial Sequence
  MKO10051358_A_Srrm2
  gRNA
gaacgactccgtgctgcctt

SEQ ID NO: 51359 - DNA, 20 bp, Artificial Sequence
  MKO10051359_A_Srrm3
  gRNA
cgggccgtcgtcctcatcga

SEQ ID NO: 51360 - DNA, 20 bp, Artificial Sequence
  MKO10051360_A_Srrm3
  gRNA
ggcagagaccccgcgacgaa

SEQ ID NO: 51361 - DNA, 20 bp, Artificial Sequence
  MKO10051361_A_Srrm3
  gRNA
ggcagaaggtcgggaccttc

SEQ ID NO: 51362 - DNA, 20 bp, Artificial Sequence
  MKO10051362_A_Srrm4
  gRNA
ccaagaaacataagcgacac

SEQ ID NO: 51363 - DNA, 20 bp, Artificial Sequence
  MKO10051363_A_Srrm4
  gRNA
tctgaaggtccatcctgatc

SEQ ID NO: 51364 - DNA, 20 bp, Artificial Sequence
  MKO10051364_A_Srrm4
  gRNA
cctgtgtcgcttatgtttct

SEQ ID NO: 51365 - DNA, 20 bp, Artificial Sequence
  MKO10051365_A_Srrt
  gRNA
gtgaatatcgagactacgac

SEQ ID NO: 51366 - DNA, 20 bp, Artificial Sequence
  MKO10051366_A_Srrt
  gRNA
ggggggcttagttcgtgtcg

SEQ ID NO: 51367 - DNA, 20 bp, Artificial Sequence
  MKO10051367_A_Srrt
  gRNA
cgacgctttcccacctcatc

SEQ ID NO: 51368 - DNA, 20 bp, Artificial Sequence
  MKO10051368_A_Srr
  gRNA
gctttctgtacctcgtcact

SEQ ID NO: 51369 - DNA, 20 bp, Artificial Sequence
  MKO10051369_A_Srr
  gRNA
atactgtgacccaagtgacg

SEQ ID NO: 51370 - DNA, 20 bp, Artificial Sequence
  MKO10051370_A_Srr
  gRNA
catcttggtccatcccaacc

SEQ ID NO: 51371 - DNA, 20 bp, Artificial Sequence
  MKO10051371_A_Srsf10
  gRNA
ttaggtctgaagatttacgt

SEQ ID NO: 51372 - DNA, 20 bp, Artificial Sequence
  MKO10051372_A_Srsf10
  gRNA
ctaacacgtctctgttcgtc

SEQ ID NO: 51373 - DNA, 20 bp, Artificial Sequence
  MKO10051373_A_Srsf10
  gRNA
ctgacgaacagagacgtgtt

SEQ ID NO: 51374 - DNA, 20 bp, Artificial Sequence
  MKO10051374_A_Srsf11
  gRNA
atttctgccgctattgagcc

SEQ ID NO: 51375 - DNA, 20 bp, Artificial Sequence
  MKO10051375_A_Srsf11
  gRNA
ggcttcacgcactctcttca

SEQ ID NO: 51376 - DNA, 20 bp, Artificial Sequence
  MKO10051376_A_Srsf11
  gRNA
attggcaccagctaatgcag

SEQ ID NO: 51377 - DNA, 20 bp, Artificial Sequence
  MKO10051377_A_Srsf12
  gRNA
atccgatcccccatcgctgc

SEQ ID NO: 51378 - DNA, 20 bp, Artificial Sequence
  MKO10051378_A_Srsf12
  gRNA
ggatcggatctattccctag

SEQ ID NO: 51379 - DNA, 20 bp, Artificial Sequence
  MKO10051379_A_Srsf12
  gRNA
cgcgcagccggagttcttca

SEQ ID NO: 51380 - DNA, 20 bp, Artificial Sequence
  MKO10051380_A_Srsf1
  gRNA
cgcgacggctacgactacga

SEQ ID NO: 51381 - DNA, 20 bp, Artificial Sequence
  MKO10051381_A_Srsf1
  gRNA
cttcaggtcgatgtcgcgga

SEQ ID NO: 51382 - DNA, 20 bp, Artificial Sequence
  MKO10051382_A_Srsf1
  gRNA
cgggtcctcgaactcaacga

SEQ ID NO: 51383 - DNA, 20 bp, Artificial Sequence
  MKO10051383_A_Srsf2
  gRNA
ttcgagaaatacgggcgcgt

SEQ ID NO: 51384 - DNA, 20 bp, Artificial Sequence
  MKO10051384_A_Srsf2
  gRNA
cttcggcgtcgcgcttgtcg

SEQ ID NO: 51385 - DNA, 20 bp, Artificial Sequence
  MKO10051385_A_Srsf2
  gRNA
ttcgcgacctggaccgactc

SEQ ID NO: 51386 - DNA, 20 bp, Artificial Sequence
  MKO10051386_A_Srsf3
  gRNA
ctcaagtacctgcgccgagg

SEQ ID NO: 51387 - DNA, 20 bp, Artificial Sequence
  MKO10051387_A_Srsf3
  gRNA
ggagtcctccacctcggcgc

SEQ ID NO: 51388 - DNA, 20 bp, Artificial Sequence
  MKO10051388_A_Srsf3
  gRNA
acatttacctgctccggctt

SEQ ID NO: 51389 - DNA, 20 bp, Artificial Sequence
  MKO10051389_A_Srsf4
  gRNA
gtcattgttgagcacgctcg

SEQ ID NO: 51390 - DNA, 20 bp, Artificial Sequence
  MKO10051390_A_Srsf4
  gRNA
caatgactcgctcgccacac

SEQ ID NO: 51391 - DNA, 20 bp, Artificial Sequence
  MKO10051391_A_Srsf4
  gRNA
gaccggcgccgcctagaacc

SEQ ID NO: 51392 - DNA, 20 bp, Artificial Sequence
  MKO10051392_A_Srsf5
  gRNA
ttccacctcgagaccgagcc

SEQ ID NO: 51393 - DNA, 20 bp, Artificial Sequence
  MKO10051393_A_Srsf5
  gRNA
gcagacctcgaaatgataga

SEQ ID NO: 51394 - DNA, 20 bp, Artificial Sequence
  MKO10051394_A_Srsf5
  gRNA
gcttacccttcatttagttt

SEQ ID NO: 51395 - DNA, 20 bp, Artificial Sequence
  MKO10051395_A_Srsf6
  gRNA
cctccgcaggtacggtttcg

SEQ ID NO: 51396 - DNA, 20 bp, Artificial Sequence
  MKO10051396_A_Srsf6
  gRNA
ggcccgcgccgcgaccgcga

SEQ ID NO: 51397 - DNA, 20 bp, Artificial Sequence
  MKO10051397_A_Srsf6
  gRNA
gtatctcaaaaagtcgctcc

SEQ ID NO: 51398 - DNA, 20 bp, Artificial Sequence
  MKO10051398_A_Srsf7
  gRNA
gatactctcgctcccgcagc

SEQ ID NO: 51399 - DNA, 20 bp, Artificial Sequence
  MKO10051399_A_Srsf7
  gRNA
cagcatctcctcgccgatca

SEQ ID NO: 51400 - DNA, 20 bp, Artificial Sequence
  MKO10051400_A_Srsf7
  gRNA
ctggttctataataggatcg

SEQ ID NO: 51401 - DNA, 20 bp, Artificial Sequence
  MKO10051401_A_Srsf9
  gRNA
tccgtccgacgtgcgcgaga

SEQ ID NO: 51402 - DNA, 20 bp, Artificial Sequence
  MKO10051402_A_Srsf9
  gRNA
tccttctcgcgcacgtcgga

SEQ ID NO: 51403 - DNA, 20 bp, Artificial Sequence
  MKO10051403_A_Srsf9
  gRNA
gtatggcgagtcgcggcccc

SEQ ID NO: 51404 - DNA, 20 bp, Artificial Sequence
  MKO10051404_A_Srxn1
  gRNA
gtaaagaggccgggcggcac

SEQ ID NO: 51405 - DNA, 20 bp, Artificial Sequence
  MKO10051405_A_Srxn1
  gRNA
gattggtacgttgtgcaccg

SEQ ID NO: 51406 - DNA, 20 bp, Artificial Sequence
  MKO10051406_A_Srxn1
  gRNA
tttgatccagaggacgtcga

SEQ ID NO: 51407 - DNA, 20 bp, Artificial Sequence
  MKO10051407_A_Sry
  gRNA
gacactttagccctccgatg

SEQ ID NO: 51408 - DNA, 20 bp, Artificial Sequence
  MKO10051408_A_Sry
  gRNA
cagcctgttgatatccccac

SEQ ID NO: 51409 - DNA, 20 bp, Artificial Sequence
  MKO10051409_A_Sry
  gRNA
gccttacagaagccgaaaaa

SEQ ID NO: 51410 - DNA, 20 bp, Artificial Sequence
  MKO10051410_A_Ss18l1
  gRNA
cctgctcaccgttaccgatc

SEQ ID NO: 51411 - DNA, 20 bp, Artificial Sequence
  MKO10051411_A_Ss18l1
  gRNA
ttgcatggggacactctgcg

SEQ ID NO: 51412 - DNA, 20 bp, Artificial Sequence
  MKO10051412_A_Ss18l1
  gRNA
ctcagcgataccgtcagcac

SEQ ID NO: 51413 - DNA, 20 bp, Artificial Sequence
  MKO10051413_A_Ss18
  gRNA
cacgcccgccgccatccaga

SEQ ID NO: 51414 - DNA, 20 bp, Artificial Sequence
  MKO10051414_A_Ss18
  gRNA
ccggctcaccttctggatgg

SEQ ID NO: 51415 - DNA, 20 bp, Artificial Sequence
  MKO10051415_A_Ss18
  gRNA
gtcttactgcgagcactccg

SEQ ID NO: 51416 - DNA, 20 bp, Artificial Sequence
  MKO10051416_A_Ssbp1
  gRNA
agaatatcagtgtttcgacc

SEQ ID NO: 51417 - DNA, 20 bp, Artificial Sequence
  MKO10051417_A_Ssbp1
  gRNA
aaagtgactacctgtaacac

SEQ ID NO: 51418 - DNA, 20 bp, Artificial Sequence
  MKO10051418_A_Ssbp1
  gRNA
acgttagtcagaagacgacg

SEQ ID NO: 51419 - DNA, 20 bp, Artificial Sequence
  MKO10051419_A_Ssbp2
  gRNA
cgccgtcccgtccgacagcc

SEQ ID NO: 51420 - DNA, 20 bp, Artificial Sequence
  MKO10051420_A_Ssbp2
  gRNA
agcttcgctcgagtgttcac

SEQ ID NO: 51421 - DNA, 20 bp, Artificial Sequence
  MKO10051421_A_Ssbp2
  gRNA
cgcccggattcttacattct

SEQ ID NO: 51422 - DNA, 20 bp, Artificial Sequence
  MKO10051422_A_Ssbp3
  gRNA
caaaggctcggcggtgccct

SEQ ID NO: 51423 - DNA, 20 bp, Artificial Sequence
  MKO10051423_A_Ssbp3
  gRNA
ttcccgagcctgcccgtccg

SEQ ID NO: 51424 - DNA, 20 bp, Artificial Sequence
  MKO10051424_A_Ssbp3
  gRNA
tacgaatatttactgcacgt

SEQ ID NO: 51425 - DNA, 20 bp, Artificial Sequence
  MKO10051425_A_Ssbp4
  gRNA
catgaccccaaacgatgcaa

SEQ ID NO: 51426 - DNA, 20 bp, Artificial Sequence
  MKO10051426_A_Ssbp4
  gRNA
cctgctgccattgcatcgtt

SEQ ID NO: 51427 - DNA, 20 bp, Artificial Sequence
  MKO10051427_A_Ssbp4
  gRNA
atatgagtatctactgcatg

SEQ ID NO: 51428 - DNA, 20 bp, Artificial Sequence
  MKO10051428_A_Ssb
  gRNA
ttatactcatccgtcacttc

SEQ ID NO: 51429 - DNA, 20 bp, Artificial Sequence
  MKO10051429_A_Ssb
  gRNA
cttacttaaagagtattagc

SEQ ID NO: 51430 - DNA, 20 bp, Artificial Sequence
  MKO10051430_A_Ssb
  gRNA
cagaccactccctgaagtga

SEQ ID NO: 51431 - DNA, 20 bp, Artificial Sequence
  MKO10051431_A_Ssc5d
  gRNA
gacgcaggcgtcgtctgtgt

SEQ ID NO: 51432 - DNA, 20 bp, Artificial Sequence
  MKO10051432_A_Ssc5d
  gRNA
tccctcagagcgactccgcc

SEQ ID NO: 51433 - DNA, 20 bp, Artificial Sequence
  MKO10051433_A_Ssc5d
  gRNA
ttgtgctcaccgtgagttat

SEQ ID NO: 51434 - DNA, 20 bp, Artificial Sequence
  MKO10051434_A_Ssfa2
  gRNA
ccatatcgcgatcttctcgt

SEQ ID NO: 51435 - DNA, 20 bp, Artificial Sequence
  MKO10051435_A_Ssfa2
  gRNA
ccaacgagaagatcgcgata

SEQ ID NO: 51436 - DNA, 20 bp, Artificial Sequence
  MKO10051436_A_Ssfa2
  gRNA
ctgatgctcaagttgaaaac

SEQ ID NO: 51437 - DNA, 20 bp, Artificial Sequence
  MKO10051437_A_Ssh1
  gRNA
ccgtgcgcctagagagtgtc

SEQ ID NO: 51438 - DNA, 20 bp, Artificial Sequence
  MKO10051438_A_Ssh1
  gRNA
ccgtgtccgctacatggtcg

SEQ ID NO: 51439 - DNA, 20 bp, Artificial Sequence
  MKO10051439_A_Ssh1
  gRNA
tgattctgtcttcacaacgc

SEQ ID NO: 51440 - DNA, 20 bp, Artificial Sequence
  MKO10051440_A_Ssh2
  gRNA
gtagacgagccattccctcg

SEQ ID NO: 51441 - DNA, 20 bp, Artificial Sequence
  MKO10051441_A_Ssh2
  gRNA
ccacgaccatatagcgtgtt

SEQ ID NO: 51442 - DNA, 20 bp, Artificial Sequence
  MKO10051442_A_Ssh2
  gRNA
ccaaaaccgaacacgctata

SEQ ID NO: 51443 - DNA, 20 bp, Artificial Sequence
  MKO10051443_A_Ssh3
  gRNA
cctcttacccatcgccgtcc

SEQ ID NO: 51444 - DNA, 20 bp, Artificial Sequence
  MKO10051444_A_Ssh3
  gRNA
taccagcaggtagcgaagtc

SEQ ID NO: 51445 - DNA, 20 bp, Artificial Sequence
  MKO10051445_A_Ssh3
  gRNA
ccccagacttcgctacctgc

SEQ ID NO: 51446 - DNA, 20 bp, Artificial Sequence
  MKO10051446_A_Ssmem1
  gRNA
cgaactccggagcgtcctcc

SEQ ID NO: 51447 - DNA, 20 bp, Artificial Sequence
  MKO10051447_A_Ssmem1
  gRNA
ttccacagtaaccgattccg

SEQ ID NO: 51448 - DNA, 20 bp, Artificial Sequence
  MKO10051448_A_Ssmem1
  gRNA
tcttctctcgcgcttccgtc

SEQ ID NO: 51449 - DNA, 20 bp, Artificial Sequence
  MKO10051449_A_Ssna1
  gRNA
gagaggcgatcttgcgcgcc

SEQ ID NO: 51450 - DNA, 20 bp, Artificial Sequence
  MKO10051450_A_Ssna1
  gRNA
aaccgaggccgcctacctca

SEQ ID NO: 51451 - DNA, 20 bp, Artificial Sequence
  MKO10051451_A_Ssna1
  gRNA
tctgcagcgccgcgccctgt

SEQ ID NO: 51452 - DNA, 20 bp, Artificial Sequence
  MKO10051452_A_Sspn
  gRNA
cgcaggtaaactgcgcaagc

SEQ ID NO: 51453 - DNA, 20 bp, Artificial Sequence
  MKO10051453_A_Sspn
  gRNA
tagtcagagatactccgttc

SEQ ID NO: 51454 - DNA, 20 bp, Artificial Sequence
  MKO10051454_A_Sspn
  gRNA
tctcataccaagttgacgag

SEQ ID NO: 51455 - DNA, 20 bp, Artificial Sequence
  MKO10051455_A_Sspo
  gRNA
agaggaagtaacgcctcgtc

SEQ ID NO: 51456 - DNA, 20 bp, Artificial Sequence
  MKO10051456_A_Sspo
  gRNA
ttgtaccattatagccgcct

SEQ ID NO: 51457 - DNA, 20 bp, Artificial Sequence
  MKO10051457_A_Sspo
  gRNA
agtgatgtccgtcaaaagtt

SEQ ID NO: 51458 - DNA, 20 bp, Artificial Sequence
  MKO10051458_A_Ssr1
  gRNA
gtcctgaggataacggaacg

SEQ ID NO: 51459 - DNA, 20 bp, Artificial Sequence
  MKO10051459_A_Ssr1
  gRNA
tgcctcgttccgttatcctc

SEQ ID NO: 51460 - DNA, 20 bp, Artificial Sequence
  MKO10051460_A_Ssr1
  gRNA
taaacagggcaatgtattcc

SEQ ID NO: 51461 - DNA, 20 bp, Artificial Sequence
  MKO10051461_A_Ssr2
  gRNA
ccggtatgctcaatgtcaaa

SEQ ID NO: 51462 - DNA, 20 bp, Artificial Sequence
  MKO10051462_A_Ssr2
  gRNA
ttctgccacgattacttacc

SEQ ID NO: 51463 - DNA, 20 bp, Artificial Sequence
  MKO10051463_A_Ssr2
  gRNA
attggctccaccagcgcccc

SEQ ID NO: 51464 - DNA, 20 bp, Artificial Sequence
  MKO10051464_A_Ssr3
  gRNA
aagctttcgagtcacttctt

SEQ ID NO: 51465 - DNA, 20 bp, Artificial Sequence
  MKO10051465_A_Ssr3
  gRNA
ctcatcgccctcttgtctac

SEQ ID NO: 51466 - DNA, 20 bp, Artificial Sequence
  MKO10051466_A_Ssr3
  gRNA
ttgtccataagtgcttcatc

SEQ ID NO: 51467 - DNA, 20 bp, Artificial Sequence
  MKO10051467_A_Ssr4
  gRNA
gctctttatgccgacgttag

SEQ ID NO: 51468 - DNA, 20 bp, Artificial Sequence
  MKO10051468_A_Ssr4
  gRNA
ccaggatgtgggtcgatatc

SEQ ID NO: 51469 - DNA, 20 bp, Artificial Sequence
  MKO10051469_A_Ssr4
  gRNA
cgctcatgcgggcacctatg

SEQ ID NO: 51470 - DNA, 20 bp, Artificial Sequence
  MKO10051470_A_Ssrp1
  gRNA
gtacgatggcttccgcgaat

SEQ ID NO: 51471 - DNA, 20 bp, Artificial Sequence
  MKO10051471_A_Ssrp1
  gRNA
gatgcagatggcgtctccgg

SEQ ID NO: 51472 - DNA, 20 bp, Artificial Sequence
  MKO10051472_A_Ssrp1
  gRNA
tgacagaaggcatctggcgt

SEQ ID NO: 51473 - DNA, 20 bp, Artificial Sequence
  MKO10051473_A_Sssca1
  gRNA
ggatcgcatctcccgtctga

SEQ ID NO: 51474 - DNA, 20 bp, Artificial Sequence
  MKO10051474_A_Sssca1
  gRNA
gcgacacgtgcgccgactgc

SEQ ID NO: 51475 - DNA, 20 bp, Artificial Sequence
  MKO10051475_A_Sssca1
  gRNA
gcgcatacctgcaccgttca

SEQ ID NO: 51476 - DNA, 20 bp, Artificial Sequence
  MKO10051476_A_Sstr1
  gRNA
ttccatgccgtccgcagcgc

SEQ ID NO: 51477 - DNA, 20 bp, Artificial Sequence
  MKO10051477_A_Sstr1
  gRNA
cttccacgctgttgcgccac

SEQ ID NO: 51478 - DNA, 20 bp, Artificial Sequence
  MKO10051478_A_Sstr1
  gRNA
gcagtggcatagtagtcgac

SEQ ID NO: 51479 - DNA, 20 bp, Artificial Sequence
  MKO10051479_A_Sstr2
  gRNA
ccgcatggtgtccatcgtag

SEQ ID NO: 51480 - DNA, 20 bp, Artificial Sequence
  MKO10051480_A_Sstr2
  gRNA
ttgcccatcatgatatacgc

SEQ ID NO: 51481 - DNA, 20 bp, Artificial Sequence
  MKO10051481_A_Sstr2
  gRNA
ggcaatgatgtcttccgctc

SEQ ID NO: 51482 - DNA, 20 bp, Artificial Sequence
  MKO10051482_A_Sstr3
  gRNA
taagaccatcacgtcgcatt

SEQ ID NO: 51483 - DNA, 20 bp, Artificial Sequence
  MKO10051483_A_Sstr3
  gRNA
tggctccgaatgcgacgtga

SEQ ID NO: 51484 - DNA, 20 bp, Artificial Sequence
  MKO10051484_A_Sstr3
  gRNA
acggcacatgagagatccga

SEQ ID NO: 51485 - DNA, 20 bp, Artificial Sequence
  MKO10051485_A_Sstr4
  gRNA
ctctgcgcgccgccacctac

SEQ ID NO: 51486 - DNA, 20 bp, Artificial Sequence
  MKO10051486_A_Sstr4
  gRNA
cataatccgatggccagaac

SEQ ID NO: 51487 - DNA, 20 bp, Artificial Sequence
  MKO10051487_A_Sstr4
  gRNA
gtgtcgcgcagtgcttagcg

SEQ ID NO: 51488 - DNA, 20 bp, Artificial Sequence
  MKO10051488_A_Sstr5
  gRNA
ccacaccgtatcctctacgt

SEQ ID NO: 51489 - DNA, 20 bp, Artificial Sequence
  MKO10051489_A_Sstr5
  gRNA
gcggaggcgctcagaacgca

SEQ ID NO: 51490 - DNA, 20 bp, Artificial Sequence
  MKO10051490_A_Sstr5
  gRNA
tgtggccgcccactcttgtc

SEQ ID NO: 51491 - DNA, 20 bp, Artificial Sequence
  MKO10051491_A_Ssty1
  gRNA
gtacctgcaagctgtgaaat

SEQ ID NO: 51492 - DNA, 20 bp, Artificial Sequence
  MKO10051492_A_Ssty1
  gRNA
tagaagatgtaacttctaaa

SEQ ID NO: 51493 - DNA, 20 bp, Artificial Sequence
  MKO10051493_A_Ssty1
  gRNA
caggcaatatcttcaatcca

SEQ ID NO: 51494 - DNA, 20 bp, Artificial Sequence
  MKO10051494_A_Ssty2
  gRNA
gttctcttagagaagagtct

SEQ ID NO: 51495 - DNA, 20 bp, Artificial Sequence
  MKO10051495_A_Ssty2
  gRNA
gtaatgagcctgtcacccat

SEQ ID NO: 51496 - DNA, 20 bp, Artificial Sequence
  MKO10051496_A_Ssty2
  gRNA
tgagttcactatcttcacag

SEQ ID NO: 51497 - DNA, 20 bp, Artificial Sequence
  MKO10051497_A_Sst
  gRNA
cggtgtcaccggcgcgccct

SEQ ID NO: 51498 - DNA, 20 bp, Artificial Sequence
  MKO10051498_A_Sst
  gRNA
tgccattgctgggttcgagt

SEQ ID NO: 51499 - DNA, 20 bp, Artificial Sequence
  MKO10051499_A_Sst
  gRNA
ggacgatgcagagcgcagcc

SEQ ID NO: 51500 - DNA, 20 bp, Artificial Sequence
  MKO10051500_A_Ssu2
  gRNA
cgaagctgagtagggcctca

SEQ ID NO: 51501 - DNA, 20 bp, Artificial Sequence
  MKO10051501_A_Ssu2
  gRNA
aggggttgcccagctatgac

SEQ ID NO: 51502 - DNA, 20 bp, Artificial Sequence
  MKO10051502_A_Ssu2
  gRNA
gcgaatccagagtcagcgag

SEQ ID NO: 51503 - DNA, 20 bp, Artificial Sequence
  MKO10051503_A_Ssu72
  gRNA
tgaaatcgacgagctgctgc

SEQ ID NO: 51504 - DNA, 20 bp, Artificial Sequence
  MKO10051504_A_Ssu72
  gRNA
actggcagagctcgcagata

SEQ ID NO: 51505 - DNA, 20 bp, Artificial Sequence
  MKO10051505_A_Ssu72
  gRNA
caaacaggtccgtgcagttc

SEQ ID NO: 51506 - DNA, 20 bp, Artificial Sequence
  MKO10051506_A_Ssx2ip
  gRNA
aagcccgatcatctcccgcc

SEQ ID NO: 51507 - DNA, 20 bp, Artificial Sequence
  MKO10051507_A_Ssx2ip
  gRNA
cctttatccaaaaacgtgca

SEQ ID NO: 51508 - DNA, 20 bp, Artificial Sequence
  MKO10051508_A_Ssx2ip
  gRNA
gagctgctacgccaaactta

SEQ ID NO: 51509 - DNA, 20 bp, Artificial Sequence
  MKO10051509_A_Ssx9
  gRNA
gccaagcaatccctgttcga

SEQ ID NO: 51510 - DNA, 20 bp, Artificial Sequence
  MKO10051510_A_Ssx9
  gRNA
gaacttcaatgccttcgaac

SEQ ID NO: 51511 - DNA, 20 bp, Artificial Sequence
  MKO10051511_A_Ssx9
  gRNA
gataccgagaaaacgaatga

SEQ ID NO: 51512 - DNA, 20 bp, Artificial Sequence
  MKO10051512_A_Ssxb10
  gRNA
gacaccgagaaaaagaatga

SEQ ID NO: 51513 - DNA, 20 bp, Artificial Sequence
  MKO10051513_A_Ssxb10
  gRNA
tacatcagaatgaccgacct

SEQ ID NO: 51514 - DNA, 20 bp, Artificial Sequence
  MKO10051514_A_Ssxb10
  gRNA
catacttctctgatgaagag

SEQ ID NO: 51515 - DNA, 20 bp, Artificial Sequence
  MKO10051515_A_Ssxb1
  gRNA
tggagagaatgattgcaact

SEQ ID NO: 51516 - DNA, 20 bp, Artificial Sequence
  MKO10051516_A_Ssxb1
  gRNA
aatcattctctccagatgca

SEQ ID NO: 51517 - DNA, 20 bp, Artificial Sequence
  MKO10051517_A_Ssxb1
  gRNA
catacttctctgatgaagag

SEQ ID NO: 51518 - DNA, 20 bp, Artificial Sequence
  MKO10051518_A_Ssxb2
  gRNA
ttcctgtgaaaagaacccca

SEQ ID NO: 51519 - DNA, 20 bp, Artificial Sequence
  MKO10051519_A_Ssxb2
  gRNA
tttcatgcgtggtaaggagc

SEQ ID NO: 51520 - DNA, 20 bp, Artificial Sequence
  MKO10051520_A_Ssxb2
  gRNA
tccttaccacgcatgaaaac

SEQ ID NO: 51521 - DNA, 20 bp, Artificial Sequence
  MKO10051521_A_Ssxb3
  gRNA
aatcattctttccagaggca

SEQ ID NO: 51522 - DNA, 20 bp, Artificial Sequence
  MKO10051522_A_Ssxb3
  gRNA
ggagcaggaaaagcaatccc

SEQ ID NO: 51523 - DNA, 20 bp, Artificial Sequence
  MKO10051523_A_Ssxb3
  gRNA
tggaaagaatgattccaact

SEQ ID NO: 51524 - DNA, 20 bp, Artificial Sequence
  MKO10051524_A_Ssxb5
  gRNA
ggagcaggccaagcaattcc

SEQ ID NO: 51525 - DNA, 20 bp, Artificial Sequence
  MKO10051525_A_Ssxb5
  gRNA
ttgtagccaacctgccaagt

SEQ ID NO: 51526 - DNA, 20 bp, Artificial Sequence
  MKO10051526_A_Ssxb5
  gRNA
catacttctctgatgaagag

SEQ ID NO: 51527 - DNA, 20 bp, Artificial Sequence
  MKO10051527_A_Ssxb6
  gRNA
tggagagaatgattcaaact

SEQ ID NO: 51528 - DNA, 20 bp, Artificial Sequence
  MKO10051528_A_Ssxb6
  gRNA
aatcattctctccagagtca

SEQ ID NO: 51529 - DNA, 20 bp, Artificial Sequence
  MKO10051529_A_Ssxb6
  gRNA
gaatttcaatgccttcgacc

SEQ ID NO: 51530 - DNA, 20 bp, Artificial Sequence
  MKO10051530_A_Ssxb8
  gRNA
ttatgaatacttattgtcac

SEQ ID NO: 51531 - DNA, 20 bp, Artificial Sequence
  MKO10051531_A_Ssxb8
  gRNA
gacaccgataaaacaaatga

SEQ ID NO: 51532 - DNA, 20 bp, Artificial Sequence
  MKO10051532_A_Ssxb8
  gRNA
aattattctctccagatgca

SEQ ID NO: 51533 - DNA, 20 bp, Artificial Sequence
  MKO10051533_A_Ssxb9
  gRNA
aatcattctttacagaggca

SEQ ID NO: 51534 - DNA, 20 bp, Artificial Sequence
  MKO10051534_A_Ssxb9
  gRNA
tgtaaagaatgattccaact

SEQ ID NO: 51535 - DNA, 20 bp, Artificial Sequence
  MKO10051535_A_Ssxb9
  gRNA
catacttctctgatgaagag

SEQ ID NO: 51536 - DNA, 20 bp, Artificial Sequence
  MKO10051536_A_St13
  gRNA
gacagaggagctatcaagcg

SEQ ID NO: 51537 - DNA, 20 bp, Artificial Sequence
  MKO10051537_A_St13
  gRNA
gccattgaagccctaaatga

SEQ ID NO: 51538 - DNA, 20 bp, Artificial Sequence
  MKO10051538_A_St13
  gRNA
accagacactgatgcccctc

SEQ ID NO: 51539 - DNA, 20 bp, Artificial Sequence
  MKO10051539_A_St14
  gRNA
agaagaggttgatcgcgcca

SEQ ID NO: 51540 - DNA, 20 bp, Artificial Sequence
  MKO10051540_A_St14
  gRNA
taacattgccaccccgagca

SEQ ID NO: 51541 - DNA, 20 bp, Artificial Sequence
  MKO10051541_A_St14
  gRNA
cagttacagccgacttcttg

SEQ ID NO: 51542 - DNA, 20 bp, Artificial Sequence
  MKO10051542_A_St18
  gRNA
cgggagttccaattaacaag

SEQ ID NO: 51543 - DNA, 20 bp, Artificial Sequence
  MKO10051543_A_St18
  gRNA
ccacaaagtgcgagttcctc

SEQ ID NO: 51544 - DNA, 20 bp, Artificial Sequence
  MKO10051544_A_St18
  gRNA
gatggcacggggcacgtaac

SEQ ID NO: 51545 - DNA, 20 bp, Artificial Sequence
  MKO10051545_A_St3gal1
  gRNA
ttcctacaactgcacagcgt

SEQ ID NO: 51546 - DNA, 20 bp, Artificial Sequence
  MKO10051546_A_St3gal1
  gRNA
catgggcggtatccatcgac

SEQ ID NO: 51547 - DNA, 20 bp, Artificial Sequence
  MKO10051547_A_St3gal1
  gRNA
tgccgacgctgtgcagttgt

SEQ ID NO: 51548 - DNA, 20 bp, Artificial Sequence
  MKO10051548_A_St3gal2
  gRNA
cacgggcgctacccttccac

SEQ ID NO: 51549 - DNA, 20 bp, Artificial Sequence
  MKO10051549_A_St3gal2
  gRNA
tcttcaagtacattcacgac

SEQ ID NO: 51550 - DNA, 20 bp, Artificial Sequence
  MKO10051550_A_St3gal2
  gRNA
cgagaacccctaccgcttcc

SEQ ID NO: 51551 - DNA, 20 bp, Artificial Sequence
  MKO10051551_A_St3gal3
  gRNA
gatcctagcccacttgcgaa

SEQ ID NO: 51552 - DNA, 20 bp, Artificial Sequence
  MKO10051552_A_St3gal3
  gRNA
catcatggctgaagcgtagc

SEQ ID NO: 51553 - DNA, 20 bp, Artificial Sequence
  MKO10051553_A_St3gal3
  gRNA
ctcggaaaagtttgcgtact

SEQ ID NO: 51554 - DNA, 20 bp, Artificial Sequence
  MKO10051554_A_St3gal4
  gRNA
ctatacctgagagcataaag

SEQ ID NO: 51555 - DNA, 20 bp, Artificial Sequence
  MKO10051555_A_St3gal4
  gRNA
accacttcctttagtcccaa

SEQ ID NO: 51556 - DNA, 20 bp, Artificial Sequence
  MKO10051556_A_St3gal4
  gRNA
ccttacctctttatgctctc

SEQ ID NO: 51557 - DNA, 20 bp, Artificial Sequence
  MKO10051557_A_St3gal5
  gRNA
tagtattcaacgtccgacag

SEQ ID NO: 51558 - DNA, 20 bp, Artificial Sequence
  MKO10051558_A_St3gal5
  gRNA
cgccctcaaccagttcgatg

SEQ ID NO: 51559 - DNA, 20 bp, Artificial Sequence
  MKO10051559_A_St3gal5
  gRNA
tagctcacctttatccggtc

SEQ ID NO: 51560 - DNA, 20 bp, Artificial Sequence
  MKO10051560_A_St3gal6
  gRNA
caacggaaaattattggtac

SEQ ID NO: 51561 - DNA, 20 bp, Artificial Sequence
  MKO10051561_A_St3gal6
  gRNA
cagctttcgccaatcttctg

SEQ ID NO: 51562 - DNA, 20 bp, Artificial Sequence
  MKO10051562_A_St3gal6
  gRNA
actcctatgatgtaataata

SEQ ID NO: 51563 - DNA, 20 bp, Artificial Sequence
  MKO10051563_A_St5
  gRNA
ccggaggcactaaggcccct

SEQ ID NO: 51564 - DNA, 20 bp, Artificial Sequence
  MKO10051564_A_St5
  gRNA
gtttgccacgattacccaag

SEQ ID NO: 51565 - DNA, 20 bp, Artificial Sequence
  MKO10051565_A_St5
  gRNA
tccggttccatgagtgatgc

SEQ ID NO: 51566 - DNA, 20 bp, Artificial Sequence
  MKO10051566_A_St6gal1
  gRNA
ggattcggctgaatcagatc

SEQ ID NO: 51567 - DNA, 20 bp, Artificial Sequence
  MKO10051567_A_St6gal1
  gRNA
gcacacatctgtcttgcgct

SEQ ID NO: 51568 - DNA, 20 bp, Artificial Sequence
  MKO10051568_A_St6gal1
  gRNA
gtatcatgcagacattccgc

SEQ ID NO: 51569 - DNA, 20 bp, Artificial Sequence
  MKO10051569_A_St6gal2
  gRNA
ttccggcgatgctggatata

SEQ ID NO: 51570 - DNA, 20 bp, Artificial Sequence
  MKO10051570_A_St6gal2
  gRNA
cccccttccagagccggtac

SEQ ID NO: 51571 - DNA, 20 bp, Artificial Sequence
  MKO10051571_A_St6gal2
  gRNA
ggtcatcatgggcgctttgc

SEQ ID NO: 51572 - DNA, 20 bp, Artificial Sequence
  MKO10051572_A_St6galnac1
  gRNA
tgtgcaggtgccagttcata

SEQ ID NO: 51573 - DNA, 20 bp, Artificial Sequence
  MKO10051573_A_St6galnac1
  gRNA
cgtcattcttccatatgaac

SEQ ID NO: 51574 - DNA, 20 bp, Artificial Sequence
  MKO10051574_A_St6galnac1
  gRNA
atacacttggagtacccagt

SEQ ID NO: 51575 - DNA, 20 bp, Artificial Sequence
  MKO10051575_A_St6galnac2
  gRNA
gttcacggtgaaaccgtaga

SEQ ID NO: 51576 - DNA, 20 bp, Artificial Sequence
  MKO10051576_A_St6galnac2
  gRNA
ctcaatggcgccataaccga

SEQ ID NO: 51577 - DNA, 20 bp, Artificial Sequence
  MKO10051577_A_St6galnac2
  gRNA
tgaccccaaaccaccgaatt

SEQ ID NO: 51578 - DNA, 20 bp, Artificial Sequence
  MKO10051578_A_St6galnac3
  gRNA
catttatcatcccgtagacg

SEQ ID NO: 51579 - DNA, 20 bp, Artificial Sequence
  MKO10051579_A_St6galnac3
  gRNA
tgtgccatcgtgtcaaattc

SEQ ID NO: 51580 - DNA, 20 bp, Artificial Sequence
  MKO10051580_A_St6galnac3
  gRNA
ctccatgaacatgccccgta

SEQ ID NO: 51581 - DNA, 20 bp, Artificial Sequence
  MKO10051581_A_St6galnac4
  gRNA
cgcactctgcgccatcgatc

SEQ ID NO: 51582 - DNA, 20 bp, Artificial Sequence
  MKO10051582_A_St6galnac4
  gRNA
tcacgcgcagagtgctgcgc

SEQ ID NO: 51583 - DNA, 20 bp, Artificial Sequence
  MKO10051583_A_St6galnac4
  gRNA
gaacacgatgggtcgcttct

SEQ ID NO: 51584 - DNA, 20 bp, Artificial Sequence
  MKO10051584_A_St6galnac5
  gRNA
atgtacctctctcacgagcg

SEQ ID NO: 51585 - DNA, 20 bp, Artificial Sequence
  MKO10051585_A_St6galnac5
  gRNA
cggcagctcgaaggatacct

SEQ ID NO: 51586 - DNA, 20 bp, Artificial Sequence
  MKO10051586_A_St6galnac5
  gRNA
accctcggcatgattcacag

SEQ ID NO: 51587 - DNA, 20 bp, Artificial Sequence
  MKO10051587_A_St6galnac6
  gRNA
caaaaccaccttccgcgtag

SEQ ID NO: 51588 - DNA, 20 bp, Artificial Sequence
  MKO10051588_A_St6galnac6
  gRNA
atgggccactacgcggaagg

SEQ ID NO: 51589 - DNA, 20 bp, Artificial Sequence
  MKO10051589_A_St6galnac6
  gRNA
gccgtagtggaagacctcgt

SEQ ID NO: 51590 - DNA, 20 bp, Artificial Sequence
  MKO10051590_A_St7l
  gRNA
ggcggacggagactacttcg

SEQ ID NO: 51591 - DNA, 20 bp, Artificial Sequence
  MKO10051591_A_St7l
  gRNA
gggacaccccacggcccgcg

SEQ ID NO: 51592 - DNA, 20 bp, Artificial Sequence
  MKO10051592_A_St7l
  gRNA
accaaacacctgatagatgg

SEQ ID NO: 51593 - DNA, 20 bp, Artificial Sequence
  MKO10051593_A_St7
  gRNA
aataagtcccgatattagcg

SEQ ID NO: 51594 - DNA, 20 bp, Artificial Sequence
  MKO10051594_A_St7
  gRNA
gttaaccccaaagttctacg

SEQ ID NO: 51595 - DNA, 20 bp, Artificial Sequence
  MKO10051595_A_St7
  gRNA
aagccacttgcgcccccttc

SEQ ID NO: 51596 - DNA, 20 bp, Artificial Sequence
  MKO10051596_A_St8sia1
  gRNA
ttcacaaaatcggcgcgctg

SEQ ID NO: 51597 - DNA, 20 bp, Artificial Sequence
  MKO10051597_A_St8sia1
  gRNA
cacgccaagcgcttgtctac

SEQ ID NO: 51598 - DNA, 20 bp, Artificial Sequence
  MKO10051598_A_St8sia1
  gRNA
accccagcataattcgccag

SEQ ID NO: 51599 - DNA, 20 bp, Artificial Sequence
  MKO10051599_A_St8sia2
  gRNA
aagccgtgcgcacgttcaca

SEQ ID NO: 51600 - DNA, 20 bp, Artificial Sequence
  MKO10051600_A_St8sia2
  gRNA
gacccccgagttgcccacga

SEQ ID NO: 51601 - DNA, 20 bp, Artificial Sequence
  MKO10051601_A_St8sia2
  gRNA
gcaccatgtgaacgtgcgca

SEQ ID NO: 51602 - DNA, 20 bp, Artificial Sequence
  MKO10051602_A_St8sia3
  gRNA
atgtacattcggggcgcccc

SEQ ID NO: 51603 - DNA, 20 bp, Artificial Sequence
  MKO10051603_A_St8sia3
  gRNA
cactcccaagtacgccagcc

SEQ ID NO: 51604 - DNA, 20 bp, Artificial Sequence
  MKO10051604_A_St8sia3
  gRNA
tctcgattagcaataacttc

SEQ ID NO: 51605 - DNA, 20 bp, Artificial Sequence
  MKO10051605_A_St8sia4
  gRNA
tttcaccaatgaaaaaccgc

SEQ ID NO: 51606 - DNA, 20 bp, Artificial Sequence
  MKO10051606_A_St8sia4
  gRNA
tgatgtcatacactatgtgc

SEQ ID NO: 51607 - DNA, 20 bp, Artificial Sequence
  MKO10051607_A_St8sia4
  gRNA
tgctgaatgacagcgtcctt

SEQ ID NO: 51608 - DNA, 20 bp, Artificial Sequence
  MKO10051608_A_St8sia5
  gRNA
ggcgacgtacttgaagaggc

SEQ ID NO: 51609 - DNA, 20 bp, Artificial Sequence
  MKO10051609_A_St8sia5
  gRNA
cggcttatatcacatcgacc

SEQ ID NO: 51610 - DNA, 20 bp, Artificial Sequence
  MKO10051610_A_St8sia5
  gRNA
gtttaactccacgagatgcc

SEQ ID NO: 51611 - DNA, 20 bp, Artificial Sequence
  MKO10051611_A_St8sia6
  gRNA
gactaacatgagctacgagg

SEQ ID NO: 51612 - DNA, 20 bp, Artificial Sequence
  MKO10051612_A_St8sia6
  gRNA
cgatgccattcaagacttcg

SEQ ID NO: 51613 - DNA, 20 bp, Artificial Sequence
  MKO10051613_A_St8sia6
  gRNA
caaccccggtaccacgcacc

SEQ ID NO: 51614 - DNA, 20 bp, Artificial Sequence
  MKO10051614_A_Stab1
  gRNA
gatagctgcacacgccgtac

SEQ ID NO: 51615 - DNA, 20 bp, Artificial Sequence
  MKO10051615_A_Stab1
  gRNA
caggtcccgtggccactaca

SEQ ID NO: 51616 - DNA, 20 bp, Artificial Sequence
  MKO10051616_A_Stab1
  gRNA
gcgacaccgtgtagtggcca

SEQ ID NO: 51617 - DNA, 20 bp, Artificial Sequence
  MKO10051617_A_Stab2
  gRNA
gactgcaatgttaaccgagc

SEQ ID NO: 51618 - DNA, 20 bp, Artificial Sequence
  MKO10051618_A_Stab2
  gRNA
catcgcttacccatgcagtc

SEQ ID NO: 51619 - DNA, 20 bp, Artificial Sequence
  MKO10051619_A_Stab2
  gRNA
ggtaatccttcctacagata

SEQ ID NO: 51620 - DNA, 20 bp, Artificial Sequence
  MKO10051620_A_Stac2
  gRNA
agagggagcgcttaaatcgc

SEQ ID NO: 51621 - DNA, 20 bp, Artificial Sequence
  MKO10051621_A_Stac2
  gRNA
gtttatgagacgctgcgcta

SEQ ID NO: 51622 - DNA, 20 bp, Artificial Sequence
  MKO10051622_A_Stac2
  gRNA
gtgcccagtccctcgcccct

SEQ ID NO: 51623 - DNA, 20 bp, Artificial Sequence
  MKO10051623_A_Stac3
  gRNA
gtgtttgaaaccctgcgcgt

SEQ ID NO: 51624 - DNA, 20 bp, Artificial Sequence
  MKO10051624_A_Stac3
  gRNA
ccatgatcaccccgacgcgc

SEQ ID NO: 51625 - DNA, 20 bp, Artificial Sequence
  MKO10051625_A_Stac3
  gRNA
ggcttgtcgttgacgagctt

SEQ ID NO: 51626 - DNA, 20 bp, Artificial Sequence
  MKO10051626_A_Stac
  gRNA
gggtcttacccacgatcatg

SEQ ID NO: 51627 - DNA, 20 bp, Artificial Sequence
  MKO10051627_A_Stac
  gRNA
ccagggacgtgccgaaccgg

SEQ ID NO: 51628 - DNA, 20 bp, Artificial Sequence
  MKO10051628_A_Stac
  gRNA
tagtaacgccgaaatccctt

SEQ ID NO: 51629 - DNA, 20 bp, Artificial Sequence
  MKO10051629_A_Stag1
  gRNA
gatccccgtcgccgttctgt

SEQ ID NO: 51630 - DNA, 20 bp, Artificial Sequence
  MKO10051630_A_Stag1
  gRNA
tatagtccgtggtggatgac

SEQ ID NO: 51631 - DNA, 20 bp, Artificial Sequence
  MKO10051631_A_Stag1
  gRNA
cacccccaacagaacggcga

SEQ ID NO: 51632 - DNA, 20 bp, Artificial Sequence
  MKO10051632_A_Stag2
  gRNA
tcgagtcctacaagcatgac

SEQ ID NO: 51633 - DNA, 20 bp, Artificial Sequence
  MKO10051633_A_Stag2
  gRNA
tctagtcggtggtagatgac

SEQ ID NO: 51634 - DNA, 20 bp, Artificial Sequence
  MKO10051634_A_Stag2
  gRNA
gttgttcgaagttgttaaaa

SEQ ID NO: 51635 - DNA, 20 bp, Artificial Sequence
  MKO10051635_A_Stag3
  gRNA
gtcgctgtcttcgttagttg

SEQ ID NO: 51636 - DNA, 20 bp, Artificial Sequence
  MKO10051636_A_Stag3
  gRNA
cctcattaaactcttccgtt

SEQ ID NO: 51637 - DNA, 20 bp, Artificial Sequence
  MKO10051637_A_Stag3
  gRNA
cagtcccgaatagtatctag

SEQ ID NO: 51638 - DNA, 20 bp, Artificial Sequence
  MKO10051638_A_Stam2
  gRNA
gtacttccgttgcaaaatca

SEQ ID NO: 51639 - DNA, 20 bp, Artificial Sequence
  MKO10051639_A_Stam2
  gRNA
ttgcagatatcagactaaat

SEQ ID NO: 51640 - DNA, 20 bp, Artificial Sequence
  MKO10051640_A_Stam2
  gRNA
ggtccctcacgttgctctgc

SEQ ID NO: 51641 - DNA, 20 bp, Artificial Sequence
  MKO10051641_A_Stambpl1
  gRNA
tcaccccacgccgttacttc

SEQ ID NO: 51642 - DNA, 20 bp, Artificial Sequence
  MKO10051642_A_Stambpl1
  gRNA
gtccgcgccctaagcaaact

SEQ ID NO: 51643 - DNA, 20 bp, Artificial Sequence
  MKO10051643_A_Stambpl1
  gRNA
ttggctcgaggccagattcg

SEQ ID NO: 51644 - DNA, 20 bp, Artificial Sequence
  MKO10051644_A_Stambp
  gRNA
tctatgacgcttaacgctcc

SEQ ID NO: 51645 - DNA, 20 bp, Artificial Sequence
  MKO10051645_A_Stambp
  gRNA
gagcgtcgctttccctaaag

SEQ ID NO: 51646 - DNA, 20 bp, Artificial Sequence
  MKO10051646_A_Stambp
  gRNA
gccagtgccaataccgccaa

SEQ ID NO: 51647 - DNA, 20 bp, Artificial Sequence
  MKO10051647_A_Stam
  gRNA
acactcaccctgtgcgagat

SEQ ID NO: 51648 - DNA, 20 bp, Artificial Sequence
  MKO10051648_A_Stam
  gRNA
gccgatatcagactaagctg

SEQ ID NO: 51649 - DNA, 20 bp, Artificial Sequence
  MKO10051649_A_Stam
  gRNA
ggagcatgtgtatcaaactg

SEQ ID NO: 51650 - DNA, 20 bp, Artificial Sequence
  MKO10051650_A_Stap1
  gRNA
acatccgcatagtcttgtac

SEQ ID NO: 51651 - DNA, 20 bp, Artificial Sequence
  MKO10051651_A_Stap1
  gRNA
tgcagtctaatcacttgccc

SEQ ID NO: 51652 - DNA, 20 bp, Artificial Sequence
  MKO10051652_A_Stap1
  gRNA
atagacctcgtgtgccttac

SEQ ID NO: 51653 - DNA, 20 bp, Artificial Sequence
  MKO10051653_A_Stap2
  gRNA
ggacctcggccatcatgtac

SEQ ID NO: 51654 - DNA, 20 bp, Artificial Sequence
  MKO10051654_A_Stap2
  gRNA
tgccctccgtacctcctctt

SEQ ID NO: 51655 - DNA, 20 bp, Artificial Sequence
  MKO10051655_A_Stap2
  gRNA
gcgccagcccctggaaaagc

SEQ ID NO: 51656 - DNA, 20 bp, Artificial Sequence
  MKO10051656_A_Stard10
  gRNA
ttgactgtcaacgctgacgt

SEQ ID NO: 51657 - DNA, 20 bp, Artificial Sequence
  MKO10051657_A_Stard10
  gRNA
acatcgtagagcgtctcagc

SEQ ID NO: 51658 - DNA, 20 bp, Artificial Sequence
  MKO10051658_A_Stard10
  gRNA
gctcggaccaagtctttccg

SEQ ID NO: 51659 - DNA, 20 bp, Artificial Sequence
  MKO10051659_A_Stard13
  gRNA
taggatccggctcatcctgt

SEQ ID NO: 51660 - DNA, 20 bp, Artificial Sequence
  MKO10051660_A_Stard13
  gRNA
tcatacagctgagcgtactg

SEQ ID NO: 51661 - DNA, 20 bp, Artificial Sequence
  MKO10051661_A_Stard13
  gRNA
caaatcgcaagtacatctcc

SEQ ID NO: 51662 - DNA, 20 bp, Artificial Sequence
  MKO10051662_A_Stard3nl
  gRNA
ctgtatgcagattgcgccat

SEQ ID NO: 51663 - DNA, 20 bp, Artificial Sequence
  MKO10051663_A_Stard3nl
  gRNA
caggaaccacgtctcaatcc

SEQ ID NO: 51664 - DNA, 20 bp, Artificial Sequence
  MKO10051664_A_Stard3nl
  gRNA
tcaccgctattgcccaccaa

SEQ ID NO: 51665 - DNA, 20 bp, Artificial Sequence
  MKO10051665_A_Stard3
  gRNA
agatgtcgaagaacgagctc

SEQ ID NO: 51666 - DNA, 20 bp, Artificial Sequence
  MKO10051666_A_Stard3
  gRNA
ccccattgtctctttcgtcc

SEQ ID NO: 51667 - DNA, 20 bp, Artificial Sequence
  MKO10051667_A_Stard3
  gRNA
ccgcaatcacccaccagtgc

SEQ ID NO: 51668 - DNA, 20 bp, Artificial Sequence
  MKO10051668_A_Stard4
  gRNA
gtaatagaccatatccgccc

SEQ ID NO: 51669 - DNA, 20 bp, Artificial Sequence
  MKO10051669_A_Stard4
  gRNA
ccggtcccagtccaagcgcc

SEQ ID NO: 51670 - DNA, 20 bp, Artificial Sequence
  MKO10051670_A_Stard4
  gRNA
tctagaaagatgtgaccgtt

SEQ ID NO: 51671 - DNA, 20 bp, Artificial Sequence
  MKO10051671_A_Stard5
  gRNA
cacttacatccgtgatgctc

SEQ ID NO: 51672 - DNA, 20 bp, Artificial Sequence
  MKO10051672_A_Stard5
  gRNA
cattctaggtaccgaggaga

SEQ ID NO: 51673 - DNA, 20 bp, Artificial Sequence
  MKO10051673_A_Stard5
  gRNA
gacacaatggatgttccaca

SEQ ID NO: 51674 - DNA, 20 bp, Artificial Sequence
  MKO10051674_A_Stard6
  gRNA
aaccatagataccgcgttga

SEQ ID NO: 51675 - DNA, 20 bp, Artificial Sequence
  MKO10051675_A_Stard6
  gRNA
gatgtactcacaggtttccg

SEQ ID NO: 51676 - DNA, 20 bp, Artificial Sequence
  MKO10051676_A_Stard6
  gRNA
ttaaatcacagctaaaagtg

SEQ ID NO: 51677 - DNA, 20 bp, Artificial Sequence
  MKO10051677_A_Stard7
  gRNA
tgcccttgtgatcaagctag

SEQ ID NO: 51678 - DNA, 20 bp, Artificial Sequence
  MKO10051678_A_Stard7
  gRNA
gctcacctcggtactggtaa

SEQ ID NO: 51679 - DNA, 20 bp, Artificial Sequence
  MKO10051679_A_Stard7
  gRNA
acataatcacgagagtacat

SEQ ID NO: 51680 - DNA, 20 bp, Artificial Sequence
  MKO10051680_A_Stard8
  gRNA
ccccgtgaacgtcgtgactc

SEQ ID NO: 51681 - DNA, 20 bp, Artificial Sequence
  MKO10051681_A_Stard8
  gRNA
cccaaatgtggtcgaaccat

SEQ ID NO: 51682 - DNA, 20 bp, Artificial Sequence
  MKO10051682_A_Stard8
  gRNA
ctcattcatgtgcagcgcac

SEQ ID NO: 51683 - DNA, 20 bp, Artificial Sequence
  MKO10051683_A_Star
  gRNA
cgcacgctcacgaagtctcg

SEQ ID NO: 51684 - DNA, 20 bp, Artificial Sequence
  MKO10051684_A_Star
  gRNA
ggatgggtcaagttcgacgt

SEQ ID NO: 51685 - DNA, 20 bp, Artificial Sequence
  MKO10051685_A_Star
  gRNA
gtgcgctgtaccaagcgcag

SEQ ID NO: 51686 - DNA, 20 bp, Artificial Sequence
  MKO10051686_A_Stat1
  gRNA
ggtcgcaaacgagacatcat

SEQ ID NO: 51687 - DNA, 20 bp, Artificial Sequence
  MKO10051687_A_Stat1
  gRNA
caagtacctgattaaatctt

SEQ ID NO: 51688 - DNA, 20 bp, Artificial Sequence
  MKO10051688_A_Stat1
  gRNA
actggtcgtccagctgtgag

SEQ ID NO: 51689 - DNA, 20 bp, Artificial Sequence
  MKO10051689_A_Stat2
  gRNA
tgagattgaaaatcgaatcc

SEQ ID NO: 51690 - DNA, 20 bp, Artificial Sequence
  MKO10051690_A_Stat2
  gRNA
tccacaactgcttcgggggc

SEQ ID NO: 51691 - DNA, 20 bp, Artificial Sequence
  MKO10051691_A_Stat2
  gRNA
ctgagctgtagtggtcccac

SEQ ID NO: 51692 - DNA, 20 bp, Artificial Sequence
  MKO10051692_A_Stat3
  gRNA
cgattacctgcactcgcttc

SEQ ID NO: 51693 - DNA, 20 bp, Artificial Sequence
  MKO10051693_A_Stat3
  gRNA
gcagctggacacacgctacc

SEQ ID NO: 51694 - DNA, 20 bp, Artificial Sequence
  MKO10051694_A_Stat3
  gRNA
gaaactgcttgattcttcga

SEQ ID NO: 51695 - DNA, 20 bp, Artificial Sequence
  MKO10051695_A_Stat4
  gRNA
attaccacagctacatgcat

SEQ ID NO: 51696 - DNA, 20 bp, Artificial Sequence
  MKO10051696_A_Stat4
  gRNA
tgcaagatgagtttgactac

SEQ ID NO: 51697 - DNA, 20 bp, Artificial Sequence
  MKO10051697_A_Stat4
  gRNA
tggtacctggataggcatgt

SEQ ID NO: 51698 - DNA, 20 bp, Artificial Sequence
  MKO10051698_A_Stat5a
  gRNA
acggctggctctcgatccac

SEQ ID NO: 51699 - DNA, 20 bp, Artificial Sequence
  MKO10051699_A_Stat5a
  gRNA
caggtagtgccggacctcga

SEQ ID NO: 51700 - DNA, 20 bp, Artificial Sequence
  MKO10051700_A_Stat5a
  gRNA
agcaccttcagatcaaccaa

SEQ ID NO: 51701 - DNA, 20 bp, Artificial Sequence
  MKO10051701_A_Stat5b
  gRNA
cacgtacgaccgctgcccca

SEQ ID NO: 51702 - DNA, 20 bp, Artificial Sequence
  MKO10051702_A_Stat5b
  gRNA
cagcctcaccttggatccgc

SEQ ID NO: 51703 - DNA, 20 bp, Artificial Sequence
  MKO10051703_A_Stat5b
  gRNA
tcagatcaaccaaacgtttg

SEQ ID NO: 51704 - DNA, 20 bp, Artificial Sequence
  MKO10051704_A_Stat6
  gRNA
ttactcacctcacttggacc

SEQ ID NO: 51705 - DNA, 20 bp, Artificial Sequence
  MKO10051705_A_Stat6
  gRNA
agaaagcatctgaaccgacc

SEQ ID NO: 51706 - DNA, 20 bp, Artificial Sequence
  MKO10051706_A_Stat6
  gRNA
aaggcttcagcatcgagtaa

SEQ ID NO: 51707 - DNA, 20 bp, Artificial Sequence
  MKO10051707_A_Stau1
  gRNA
attaaactgctgtccgccca

SEQ ID NO: 51708 - DNA, 20 bp, Artificial Sequence
  MKO10051708_A_Stau1
  gRNA
ctaccaagttgagctctccg

SEQ ID NO: 51709 - DNA, 20 bp, Artificial Sequence
  MKO10051709_A_Stau1
  gRNA
gtggaggtgcctatcccccc

SEQ ID NO: 51710 - DNA, 20 bp, Artificial Sequence
  MKO10051710_A_Stau2
  gRNA
tgaatgggctcgctatgaaa

SEQ ID NO: 51711 - DNA, 20 bp, Artificial Sequence
  MKO10051711_A_Stau2
  gRNA
acctctgattgtacatgccc

SEQ ID NO: 51712 - DNA, 20 bp, Artificial Sequence
  MKO10051712_A_Stau2
  gRNA
gagcagacatgggaatccga

SEQ ID NO: 51713 - DNA, 20 bp, Artificial Sequence
  MKO10051713_A_Stbd1
  gRNA
tctcagccatgggcgccgtc

SEQ ID NO: 51714 - DNA, 20 bp, Artificial Sequence
  MKO10051714_A_Stbd1
  gRNA
tcagccctgctggtcggcgg

SEQ ID NO: 51715 - DNA, 20 bp, Artificial Sequence
  MKO10051715_A_Stbd1
  gRNA
tgtttgtggtgtagtgcacc

SEQ ID NO: 51716 - DNA, 20 bp, Artificial Sequence
  MKO10051716_A_Stc1
  gRNA
tttccagaggatgatcgccg

SEQ ID NO: 51717 - DNA, 20 bp, Artificial Sequence
  MKO10051717_A_Stc1
  gRNA
gaaagtcgaacacctccgaa

SEQ ID NO: 51718 - DNA, 20 bp, Artificial Sequence
  MKO10051718_A_Stc1
  gRNA
tccctgcttacgcactctct

SEQ ID NO: 51719 - DNA, 20 bp, Artificial Sequence
  MKO10051719_A_Stc2
  gRNA
acgctactcactcatgcagc

SEQ ID NO: 51720 - DNA, 20 bp, Artificial Sequence
  MKO10051720_A_Stc2
  gRNA
cacccgaatgcccatgctcg

SEQ ID NO: 51721 - DNA, 20 bp, Artificial Sequence
  MKO10051721_A_Stc2
  gRNA
aaccggtggccagagcgctc

SEQ ID NO: 51722 - DNA, 20 bp, Artificial Sequence
  MKO10051722_A_Steap1
  gRNA
atgatggcagcgactttcac

SEQ ID NO: 51723 - DNA, 20 bp, Artificial Sequence
  MKO10051723_A_Steap1
  gRNA
ctgtgagcgactctttaacc

SEQ ID NO: 51724 - DNA, 20 bp, Artificial Sequence
  MKO10051724_A_Steap1
  gRNA
tgctgcaagtgcgagagccc

SEQ ID NO: 51725 - DNA, 20 bp, Artificial Sequence
  MKO10051725_A_Steap2
  gRNA
atgccaatattgagaacgcg

SEQ ID NO: 51726 - DNA, 20 bp, Artificial Sequence
  MKO10051726_A_Steap2
  gRNA
tccatccgtaaattaacacg

SEQ ID NO: 51727 - DNA, 20 bp, Artificial Sequence
  MKO10051727_A_Steap2
  gRNA
tattagatgtggctaccacg

SEQ ID NO: 51728 - DNA, 20 bp, Artificial Sequence
  MKO10051728_A_Steap3
  gRNA
gagccgtaaccccaaacgca

SEQ ID NO: 51729 - DNA, 20 bp, Artificial Sequence
  MKO10051729_A_Steap3
  gRNA
ccgctcccaccgctacgacc

SEQ ID NO: 51730 - DNA, 20 bp, Artificial Sequence
  MKO10051730_A_Steap3
  gRNA
attagcaatggacgggagcg

SEQ ID NO: 51731 - DNA, 20 bp, Artificial Sequence
  MKO10051731_A_Steap4
  gRNA
aacagatgctacgtaccgcc

SEQ ID NO: 51732 - DNA, 20 bp, Artificial Sequence
  MKO10051732_A_Steap4
  gRNA
ctatccgttactatgttcga

SEQ ID NO: 51733 - DNA, 20 bp, Artificial Sequence
  MKO10051733_A_Steap4
  gRNA
gaccctcactcgcatccgcc

SEQ ID NO: 51734 - DNA, 20 bp, Artificial Sequence
  MKO10051734_A_Stfa1
  gRNA
cgcatcaagatgagtcttgg

SEQ ID NO: 51735 - DNA, 20 bp, Artificial Sequence
  MKO10051735_A_Stfa1
  gRNA
gtaggtcagctcttcatcca

SEQ ID NO: 51736 - DNA, 20 bp, Artificial Sequence
  MKO10051736_A_Stfa1
  gRNA
tcaccttgttagcaatcatc

SEQ ID NO: 51737 - DNA, 20 bp, Artificial Sequence
  MKO10051737_A_Stfa2l1
  gRNA
tatttccagtgaaaacgact

SEQ ID NO: 51738 - DNA, 20 bp, Artificial Sequence
  MKO10051738_A_Stfa2l1
  gRNA
taccacttaagacatttatg

SEQ ID NO: 51739 - DNA, 20 bp, Artificial Sequence
  MKO10051739_A_Stfa2l1
  gRNA
acctgccacatcagaaattc

SEQ ID NO: 51740 - DNA, 20 bp, Artificial Sequence
  MKO10051740_A_Stfa2
  gRNA
taccacttaagacgtttatg

SEQ ID NO: 51741 - DNA, 20 bp, Artificial Sequence
  MKO10051741_A_Stfa2
  gRNA
gaatacaccatagaaataat

SEQ ID NO: 51742 - DNA, 20 bp, Artificial Sequence
  MKO10051742_A_Stfa2
  gRNA
tatttccagtgaaaacgatt

SEQ ID NO: 51743 - DNA, 20 bp, Artificial Sequence
  MKO10051743_A_Stfa3
  gRNA
ctctgaagactttcatgtga

SEQ ID NO: 51744 - DNA, 20 bp, Artificial Sequence
  MKO10051744_A_Stfa3
  gRNA
tataaatctcaagtcgttgc

SEQ ID NO: 51745 - DNA, 20 bp, Artificial Sequence
  MKO10051745_A_Stfa3
  gRNA
tcaaatcatcttctccagaa

SEQ ID NO: 51746 - DNA, 20 bp, Artificial Sequence
  MKO10051746_A_Stil
  gRNA
accatagatcgctttgatcc

SEQ ID NO: 51747 - DNA, 20 bp, Artificial Sequence
  MKO10051747_A_Stil
  gRNA
tacgagcccaaatcaccccc

SEQ ID NO: 51748 - DNA, 20 bp, Artificial Sequence
  MKO10051748_A_Stil
  gRNA
cattcaggtatttctcgacc

SEQ ID NO: 51749 - DNA, 20 bp, Artificial Sequence
  MKO10051749_A_Stim1
  gRNA
tgaggataagcttatcagcg

SEQ ID NO: 51750 - DNA, 20 bp, Artificial Sequence
  MKO10051750_A_Stim1
  gRNA
ttactggccacgccatgcca

SEQ ID NO: 51751 - DNA, 20 bp, Artificial Sequence
  MKO10051751_A_Stim1
  gRNA
acagtggctcattacgtatg

SEQ ID NO: 51752 - DNA, 20 bp, Artificial Sequence
  MKO10051752_A_Stim2
  gRNA
caaggacggcgggatcgaag

SEQ ID NO: 51753 - DNA, 20 bp, Artificial Sequence
  MKO10051753_A_Stim2
  gRNA
tgaagggaacaacactcccc

SEQ ID NO: 51754 - DNA, 20 bp, Artificial Sequence
  MKO10051754_A_Stim2
  gRNA
agttcacaattggacacttg

SEQ ID NO: 51755 - DNA, 20 bp, Artificial Sequence
  MKO10051755_A_Stip1
  gRNA
tctgcagcctacgccaagaa

SEQ ID NO: 51756 - DNA, 20 bp, Artificial Sequence
  MKO10051756_A_Stip1
  gRNA
agtcttgcagccgtcctcat

SEQ ID NO: 51757 - DNA, 20 bp, Artificial Sequence
  MKO10051757_A_Stip1
  gRNA
gccaaacgaacctatgaaga

SEQ ID NO: 51758 - DNA, 20 bp, Artificial Sequence
  MKO10051758_A_Stk10
  gRNA
cgtatgccgccagatgttgg

SEQ ID NO: 51759 - DNA, 20 bp, Artificial Sequence
  MKO10051759_A_Stk10
  gRNA
cccgtatatcgtgaagctcc

SEQ ID NO: 51760 - DNA, 20 bp, Artificial Sequence
  MKO10051760_A_Stk10
  gRNA
cccaggagcttcacgatata

SEQ ID NO: 51761 - DNA, 20 bp, Artificial Sequence
  MKO10051761_A_Stk11ip
  gRNA
acttcagctacaatgcgctc

SEQ ID NO: 51762 - DNA, 20 bp, Artificial Sequence
  MKO10051762_A_Stk11ip
  gRNA
gcaggcgatgcggttctctc

SEQ ID NO: 51763 - DNA, 20 bp, Artificial Sequence
  MKO10051763_A_Stk11ip
  gRNA
gaaggccaacaccagggata

SEQ ID NO: 51764 - DNA, 20 bp, Artificial Sequence
  MKO10051764_A_Stk11
  gRNA
gcgccctacgtatatggtga

SEQ ID NO: 51765 - DNA, 20 bp, Artificial Sequence
  MKO10051765_A_Stk11
  gRNA
tgtacagcacgtccacaagc

SEQ ID NO: 51766 - DNA, 20 bp, Artificial Sequence
  MKO10051766_A_Stk11
  gRNA
attccaggccgtcaatcagc

SEQ ID NO: 51767 - DNA, 20 bp, Artificial Sequence
  MKO10051767_A_Stk16
  gRNA
tcccaacatccttcgcctca

SEQ ID NO: 51768 - DNA, 20 bp, Artificial Sequence
  MKO10051768_A_Stk16
  gRNA
tcgccaggcactagctcttc

SEQ ID NO: 51769 - DNA, 20 bp, Artificial Sequence
  MKO10051769_A_Stk16
  gRNA
tgacctgtgtgcataacctt

SEQ ID NO: 51770 - DNA, 20 bp, Artificial Sequence
  MKO10051770_A_Stk17b
  gRNA
cctcatgcagattaatcacg

SEQ ID NO: 51771 - DNA, 20 bp, Artificial Sequence
  MKO10051771_A_Stk17b
  gRNA
tttacctgagttagccgaaa

SEQ ID NO: 51772 - DNA, 20 bp, Artificial Sequence
  MKO10051772_A_Stk17b
  gRNA
tctcatgcagaatttccgcc

SEQ ID NO: 51773 - DNA, 20 bp, Artificial Sequence
  MKO10051773_A_Stk19
  gRNA
cgctgccgcccatcgcgctg

SEQ ID NO: 51774 - DNA, 20 bp, Artificial Sequence
  MKO10051774_A_Stk19
  gRNA
caccacaggctcggcgcgcg

SEQ ID NO: 51775 - DNA, 20 bp, Artificial Sequence
  MKO10051775_A_Stk19
  gRNA
ccacatctcacgtgatctcc

SEQ ID NO: 51776 - DNA, 20 bp, Artificial Sequence
  MKO10051776_A_Stk24
  gRNA
gcagtcagcctacgactcaa

SEQ ID NO: 51777 - DNA, 20 bp, Artificial Sequence
  MKO10051777_A_Stk24
  gRNA
ccctacgtcaccaagtacta

SEQ ID NO: 51778 - DNA, 20 bp, Artificial Sequence
  MKO10051778_A_Stk24
  gRNA
gtctgcaggatactaagttg

SEQ ID NO: 51779 - DNA, 20 bp, Artificial Sequence
  MKO10051779_A_Stk25
  gRNA
tttcaggatctcccgcaaga

SEQ ID NO: 51780 - DNA, 20 bp, Artificial Sequence
  MKO10051780_A_Stk25
  gRNA
ccttatatcacccgctactt

SEQ ID NO: 51781 - DNA, 20 bp, Artificial Sequence
  MKO10051781_A_Stk25
  gRNA
ttcaccaagcttgaccgcat

SEQ ID NO: 51782 - DNA, 20 bp, Artificial Sequence
  MKO10051782_A_Stk30
  gRNA
gtatcagctgtgcaaatcgc

SEQ ID NO: 51783 - DNA, 20 bp, Artificial Sequence
  MKO10051783_A_Stk30
  gRNA
aaactacttcgtgcagtgca

SEQ ID NO: 51784 - DNA, 20 bp, Artificial Sequence
  MKO10051784_A_Stk30
  gRNA
ccgccccatacctgtgcatg

SEQ ID NO: 51785 - DNA, 20 bp, Artificial Sequence
  MKO10051785_A_Stk31
  gRNA
aaaaactatcagcgatgata

SEQ ID NO: 51786 - DNA, 20 bp, Artificial Sequence
  MKO10051786_A_Stk31
  gRNA
ccaaaaactgaattagcaag

SEQ ID NO: 51787 - DNA, 20 bp, Artificial Sequence
  MKO10051787_A_Stk31
  gRNA
tagaagatgcagtaacattt

SEQ ID NO: 51788 - DNA, 20 bp, Artificial Sequence
  MKO10051788_A_Stk32a
  gRNA
tctgctgcaggtgataacgc

SEQ ID NO: 51789 - DNA, 20 bp, Artificial Sequence
  MKO10051789_A_Stk32a
  gRNA
ctgacctgtgaatgatgcgc

SEQ ID NO: 51790 - DNA, 20 bp, Artificial Sequence
  MKO10051790_A_Stk32a
  gRNA
gctccaggccctgcatgatc

SEQ ID NO: 51791 - DNA, 20 bp, Artificial Sequence
  MKO10051791_A_Stk32b
  gRNA
atgaggtgcggaacgtgttc

SEQ ID NO: 51792 - DNA, 20 bp, Artificial Sequence
  MKO10051792_A_Stk32b
  gRNA
gggattagagcaccccttcc

SEQ ID NO: 51793 - DNA, 20 bp, Artificial Sequence
  MKO10051793_A_Stk32b
  gRNA
actcaccatgctcatccagt

SEQ ID NO: 51794 - DNA, 20 bp, Artificial Sequence
  MKO10051794_A_Stk32c
  gRNA
tggcttacccatgtacggtt

SEQ ID NO: 51795 - DNA, 20 bp, Artificial Sequence
  MKO10051795_A_Stk32c
  gRNA
ggaaatcgagcatgtcttcc

SEQ ID NO: 51796 - DNA, 20 bp, Artificial Sequence
  MKO10051796_A_Stk32c
  gRNA
gagagggcgacagctttagc

SEQ ID NO: 51797 - DNA, 20 bp, Artificial Sequence
  MKO10051797_A_Stk33
  gRNA
ccatcgtccattcttatgtg

SEQ ID NO: 51798 - DNA, 20 bp, Artificial Sequence
  MKO10051798_A_Stk33
  gRNA
agtcggagcaatgtcacagt

SEQ ID NO: 51799 - DNA, 20 bp, Artificial Sequence
  MKO10051799_A_Stk33
  gRNA
acaagtgtttgagtcgcctc

SEQ ID NO: 51800 - DNA, 20 bp, Artificial Sequence
  MKO10051800_A_Stk35
  gRNA
aacggaccatcctccggcgc

SEQ ID NO: 51801 - DNA, 20 bp, Artificial Sequence
  MKO10051801_A_Stk35
  gRNA
gctgagcgtgtagcgcgtcg

SEQ ID NO: 51802 - DNA, 20 bp, Artificial Sequence
  MKO10051802_A_Stk35
  gRNA
ctgcgacgctcccgagaacg

SEQ ID NO: 51803 - DNA, 20 bp, Artificial Sequence
  MKO10051803_A_Stk36
  gRNA
tgttctgcggtttcatgtcg

SEQ ID NO: 51804 - DNA, 20 bp, Artificial Sequence
  MKO10051804_A_Stk36
  gRNA
gcagaacattcttctcgcca

SEQ ID NO: 51805 - DNA, 20 bp, Artificial Sequence
  MKO10051805_A_Stk36
  gRNA
gtcgagcatatgcacaatgt

SEQ ID NO: 51806 - DNA, 20 bp, Artificial Sequence
  MKO10051806_A_Stk38l
  gRNA
agatgactttgagtctctga

SEQ ID NO: 51807 - DNA, 20 bp, Artificial Sequence
  MKO10051807_A_Stk38l
  gRNA
tcagagactcaaagtcatct

SEQ ID NO: 51808 - DNA, 20 bp, Artificial Sequence
  MKO10051808_A_Stk38l
  gRNA
aaggcagaagaagttagaag

SEQ ID NO: 51809 - DNA, 20 bp, Artificial Sequence
  MKO10051809_A_Stk38
  gRNA
tgtcacgctccgcacgaatg

SEQ ID NO: 51810 - DNA, 20 bp, Artificial Sequence
  MKO10051810_A_Stk38
  gRNA
tgtttccttccgagcgtgcg

SEQ ID NO: 51811 - DNA, 20 bp, Artificial Sequence
  MKO10051811_A_Stk38
  gRNA
tcagaagatccgcgcacgct

SEQ ID NO: 51812 - DNA, 20 bp, Artificial Sequence
  MKO10051812_A_Stk39
  gRNA
atcaaatacatcgttaatcg

SEQ ID NO: 51813 - DNA, 20 bp, Artificial Sequence
  MKO10051813_A_Stk39
  gRNA
aagaacgcgtagccataaag

SEQ ID NO: 51814 - DNA, 20 bp, Artificial Sequence
  MKO10051814_A_Stk39
  gRNA
ggtgtaataagtcactacgt

SEQ ID NO: 51815 - DNA, 20 bp, Artificial Sequence
  MKO10051815_A_Stk3
  gRNA
ccataatgcaacaatgtgac

SEQ ID NO: 51816 - DNA, 20 bp, Artificial Sequence
  MKO10051816_A_Stk3
  gRNA
ccatatgttgtgaagtacta

SEQ ID NO: 51817 - DNA, 20 bp, Artificial Sequence
  MKO10051817_A_Stk3
  gRNA
ccatagtacttcacaacata

SEQ ID NO: 51818 - DNA, 20 bp, Artificial Sequence
  MKO10051818_A_Stk40
  gRNA
tgtgtcctcgaccgcttcac

SEQ ID NO: 51819 - DNA, 20 bp, Artificial Sequence
  MKO10051819_A_Stk40
  gRNA
gtgtgccgtaggtccccgcc

SEQ ID NO: 51820 - DNA, 20 bp, Artificial Sequence
  MKO10051820_A_Stk40
  gRNA
gctcagtgagcgcgagactg

SEQ ID NO: 51821 - DNA, 20 bp, Artificial Sequence
  MKO10051821_A_Stk4
  gRNA
tagtttaaccaagcagcccg

SEQ ID NO: 51822 - DNA, 20 bp, Artificial Sequence
  MKO10051822_A_Stk4
  gRNA
tatctgatatcattcggcta

SEQ ID NO: 51823 - DNA, 20 bp, Artificial Sequence
  MKO10051823_A_Stk4
  gRNA
ccataatacttgactacgtg

SEQ ID NO: 51824 - DNA, 20 bp, Artificial Sequence
  MKO10051824_A_Stmn1
  gRNA
ctgttcgacatggcatcttc

SEQ ID NO: 51825 - DNA, 20 bp, Artificial Sequence
  MKO10051825_A_Stmn1
  gRNA
tttcttccaggacaagcacg

SEQ ID NO: 51826 - DNA, 20 bp, Artificial Sequence
  MKO10051826_A_Stmn1
  gRNA
agctgcagaagaaagacgca

SEQ ID NO: 51827 - DNA, 20 bp, Artificial Sequence
  MKO10051827_A_Stmn2
  gRNA
atcaacatctacacctacga

SEQ ID NO: 51828 - DNA, 20 bp, Artificial Sequence
  MKO10051828_A_Stmn2
  gRNA
tgctatcattgaacgtctgc

SEQ ID NO: 51829 - DNA, 20 bp, Artificial Sequence
  MKO10051829_A_Stmn2
  gRNA
gtgtagatgttgatgttgcg

SEQ ID NO: 51830 - DNA, 20 bp, Artificial Sequence
  MKO10051830_A_Stmn3
  gRNA
acttggcagcgctgcgcgag

SEQ ID NO: 51831 - DNA, 20 bp, Artificial Sequence
  MKO10051831_A_Stmn3
  gRNA
gcgctgccaagtgcgcctcg

SEQ ID NO: 51832 - DNA, 20 bp, Artificial Sequence
  MKO10051832_A_Stmn3
  gRNA
ccgaacaccatctaccagta

SEQ ID NO: 51833 - DNA, 20 bp, Artificial Sequence
  MKO10051833_A_Stmn4
  gRNA
cgtgctctcgtttctccgcg

SEQ ID NO: 51834 - DNA, 20 bp, Artificial Sequence
  MKO10051834_A_Stmn4
  gRNA
gtccaataaggagaaccggg

SEQ ID NO: 51835 - DNA, 20 bp, Artificial Sequence
  MKO10051835_A_Stmn4
  gRNA
aaactcaggcaccccgtcaa

SEQ ID NO: 51836 - DNA, 20 bp, Artificial Sequence
  MKO10051836_A_Stmnd1
  gRNA
gggtttgttggtcaatccat

SEQ ID NO: 51837 - DNA, 20 bp, Artificial Sequence
  MKO10051837_A_Stmnd1
  gRNA
catagacaacgccaaaagtc

SEQ ID NO: 51838 - DNA, 20 bp, Artificial Sequence
  MKO10051838_A_Stmnd1
  gRNA
ggtggttcagcttcgtctga

SEQ ID NO: 51839 - DNA, 20 bp, Artificial Sequence
  MKO10051839_A_Stoml1
  gRNA
ggaggtcgaccgtgtagagc

SEQ ID NO: 51840 - DNA, 20 bp, Artificial Sequence
  MKO10051840_A_Stoml1
  gRNA
ctgatgtccagttccgcatc

SEQ ID NO: 51841 - DNA, 20 bp, Artificial Sequence
  MKO10051841_A_Stoml1
  gRNA
tgattgtgtttcgactgggc

SEQ ID NO: 51842 - DNA, 20 bp, Artificial Sequence
  MKO10051842_A_Stoml2
  gRNA
gttccgcgccgcgcctcctc

SEQ ID NO: 51843 - DNA, 20 bp, Artificial Sequence
  MKO10051843_A_Stoml2
  gRNA
gagcagtcagccgtaactct

SEQ ID NO: 51844 - DNA, 20 bp, Artificial Sequence
  MKO10051844_A_Stoml2
  gRNA
atcgctctcaccaagagtta

SEQ ID NO: 51845 - DNA, 20 bp, Artificial Sequence
  MKO10051845_A_Stoml3
  gRNA
ctacagcgccgtctcagccg

SEQ ID NO: 51846 - DNA, 20 bp, Artificial Sequence
  MKO10051846_A_Stoml3
  gRNA
gcgcgctgttgtcttcagac

SEQ ID NO: 51847 - DNA, 20 bp, Artificial Sequence
  MKO10051847_A_Stoml3
  gRNA
tgtcaaagtagatcttcgaa

SEQ ID NO: 51848 - DNA, 20 bp, Artificial Sequence
  MKO10051848_A_Stom
  gRNA
aactaccctcaggaatgcgc

SEQ ID NO: 51849 - DNA, 20 bp, Artificial Sequence
  MKO10051849_A_Stom
  gRNA
agattcagcaacccgtcttt

SEQ ID NO: 51850 - DNA, 20 bp, Artificial Sequence
  MKO10051850_A_Stom
  gRNA
gaactgctcacctcctgcgg

SEQ ID NO: 51851 - DNA, 20 bp, Artificial Sequence
  MKO10051851_A_Ston1
  gRNA
gagctcacccgcttcgtacg

SEQ ID NO: 51852 - DNA, 20 bp, Artificial Sequence
  MKO10051852_A_Ston1
  gRNA
aatagcattcgtcccgtttc

SEQ ID NO: 51853 - DNA, 20 bp, Artificial Sequence
  MKO10051853_A_Ston1
  gRNA
gcgagcttgctacaacatcc

SEQ ID NO: 51854 - DNA, 20 bp, Artificial Sequence
  MKO10051854_A_Ston2
  gRNA
cgcagcgagcattaacgggg

SEQ ID NO: 51855 - DNA, 20 bp, Artificial Sequence
  MKO10051855_A_Ston2
  gRNA
cctgttcccgttccgctgcg

SEQ ID NO: 51856 - DNA, 20 bp, Artificial Sequence
  MKO10051856_A_Ston2
  gRNA
caactgctctccgacgtcaa

SEQ ID NO: 51857 - DNA, 20 bp, Artificial Sequence
  MKO10051857_A_Stox1
  gRNA
tgaagcccaaccgccgtatc

SEQ ID NO: 51858 - DNA, 20 bp, Artificial Sequence
  MKO10051858_A_Stox1
  gRNA
attgttccggatacggcggt

SEQ ID NO: 51859 - DNA, 20 bp, Artificial Sequence
  MKO10051859_A_Stox1
  gRNA
gttccagaagcagcgcgcgt

SEQ ID NO: 51860 - DNA, 20 bp, Artificial Sequence
  MKO10051860_A_Stox2
  gRNA
tgatgaccaatcgtttgcgc

SEQ ID NO: 51861 - DNA, 20 bp, Artificial Sequence
  MKO10051861_A_Stox2
  gRNA
tcgggggatccgtactggcg

SEQ ID NO: 51862 - DNA, 20 bp, Artificial Sequence
  MKO10051862_A_Stox2
  gRNA
tccttcggatggctcgcatc

SEQ ID NO: 51863 - DNA, 20 bp, Artificial Sequence
  MKO10051863_A_Stpg1
  gRNA
aacaatgtctgcgctcgagc

SEQ ID NO: 51864 - DNA, 20 bp, Artificial Sequence
  MKO10051864_A_Stpg1
  gRNA
tttctgtcgaaaacgccgag

SEQ ID NO: 51865 - DNA, 20 bp, Artificial Sequence
  MKO10051865_A_Stpg1
  gRNA
atggtatacgcgttggcagc

SEQ ID NO: 51866 - DNA, 20 bp, Artificial Sequence
  MKO10051866_A_Stpg2
  gRNA
tgtgatacgttgtagtgtgc

SEQ ID NO: 51867 - DNA, 20 bp, Artificial Sequence
  MKO10051867_A_Stpg2
  gRNA
aactgaggattgtagtacgc

SEQ ID NO: 51868 - DNA, 20 bp, Artificial Sequence
  MKO10051868_A_Stpg2
  gRNA
ctacaacgtatcacaagcac

SEQ ID NO: 51869 - DNA, 20 bp, Artificial Sequence
  MKO10051869_A_Stra13
  gRNA
ttcctgaggatcttcgtact

SEQ ID NO: 51870 - DNA, 20 bp, Artificial Sequence
  MKO10051870_A_Stra13
  gRNA
cacctagtacgaagatcctc

SEQ ID NO: 51871 - DNA, 20 bp, Artificial Sequence
  MKO10051871_A_Stra13
  gRNA
tgcaatccctgaagtgcaaa

SEQ ID NO: 51872 - DNA, 20 bp, Artificial Sequence
  MKO10051872_A_Stra6
  gRNA
agtccgcgatgaccacagcg

SEQ ID NO: 51873 - DNA, 20 bp, Artificial Sequence
  MKO10051873_A_Stra6
  gRNA
ccttgctggtgagacggcgc

SEQ ID NO: 51874 - DNA, 20 bp, Artificial Sequence
  MKO10051874_A_Stra6
  gRNA
aaaggcagtgggttctcatc

SEQ ID NO: 51875 - DNA, 20 bp, Artificial Sequence
  MKO10051875_A_Stra8
  gRNA
cgccttcgcagacctcaccg

SEQ ID NO: 51876 - DNA, 20 bp, Artificial Sequence
  MKO10051876_A_Stra8
  gRNA
cttaccgttcaaattccatg

SEQ ID NO: 51877 - DNA, 20 bp, Artificial Sequence
  MKO10051877_A_Stra8
  gRNA
ccagcgagcagctcgctccc

SEQ ID NO: 51878 - DNA, 20 bp, Artificial Sequence
  MKO10051878_A_Strada
  gRNA
ggctcgatacggtactatat

SEQ ID NO: 51879 - DNA, 20 bp, Artificial Sequence
  MKO10051879_A_Strada
  gRNA
gtcacatcatttatggcgta

SEQ ID NO: 51880 - DNA, 20 bp, Artificial Sequence
  MKO10051880_A_Strada
  gRNA
actgtcacatactctcccgt

SEQ ID NO: 51881 - DNA, 20 bp, Artificial Sequence
  MKO10051881_A_Stradb
  gRNA
ttcttaccgtaggccataaa

SEQ ID NO: 51882 - DNA, 20 bp, Artificial Sequence
  MKO10051882_A_Stradb
  gRNA
ttcatagtgagacacgtcag

SEQ ID NO: 51883 - DNA, 20 bp, Artificial Sequence
  MKO10051883_A_Stradb
  gRNA
tgtccaataagttgtaatat

SEQ ID NO: 51884 - DNA, 20 bp, Artificial Sequence
  MKO10051884_A_Strap
  gRNA
ttggggtgcaacattgaata

SEQ ID NO: 51885 - DNA, 20 bp, Artificial Sequence
  MKO10051885_A_Strap
  gRNA
cgataaacagatcctttcag

SEQ ID NO: 51886 - DNA, 20 bp, Artificial Sequence
  MKO10051886_A_Strap
  gRNA
tggcaagcccatgctccgcc

SEQ ID NO: 51887 - DNA, 20 bp, Artificial Sequence
  MKO10051887_A_Strbp
  gRNA
caatgatgatcgccatgtta

SEQ ID NO: 51888 - DNA, 20 bp, Artificial Sequence
  MKO10051888_A_Strbp
  gRNA
gcaaaaatgcctgaatgcct

SEQ ID NO: 51889 - DNA, 20 bp, Artificial Sequence
  MKO10051889_A_Strbp
  gRNA
agcgccaacctggaaccatt

SEQ ID NO: 51890 - DNA, 20 bp, Artificial Sequence
  MKO10051890_A_Strc
  gRNA
gagatggctcgccgctgtcg

SEQ ID NO: 51891 - DNA, 20 bp, Artificial Sequence
  MKO10051891_A_Strc
  gRNA
gtaggcgcaggaggtaatgt

SEQ ID NO: 51892 - DNA, 20 bp, Artificial Sequence
  MKO10051892_A_Strc
  gRNA
aaatcatgaagtcgaagtgc

SEQ ID NO: 51893 - DNA, 20 bp, Artificial Sequence
  MKO10051893_A_Strip1
  gRNA
ctattccgaatctccagacc

SEQ ID NO: 51894 - DNA, 20 bp, Artificial Sequence
  MKO10051894_A_Strip1
  gRNA
cattgaacgtgcccacctcc

SEQ ID NO: 51895 - DNA, 20 bp, Artificial Sequence
  MKO10051895_A_Strip1
  gRNA
ggtgggcacgttcaatgcct

SEQ ID NO: 51896 - DNA, 20 bp, Artificial Sequence
  MKO10051896_A_Strip2
  gRNA
ccgaggtcgatgtgctacac

SEQ ID NO: 51897 - DNA, 20 bp, Artificial Sequence
  MKO10051897_A_Strip2
  gRNA
ccagtgtagcacatcgacct

SEQ ID NO: 51898 - DNA, 20 bp, Artificial Sequence
  MKO10051898_A_Strip2
  gRNA
catcctagtgcaagacacta

SEQ ID NO: 51899 - DNA, 20 bp, Artificial Sequence
  MKO10051899_A_Strn3
  gRNA
tcgagatggagcgggcgcac

SEQ ID NO: 51900 - DNA, 20 bp, Artificial Sequence
  MKO10051900_A_Strn3
  gRNA
ccgcaacagtacacgatccc

SEQ ID NO: 51901 - DNA, 20 bp, Artificial Sequence
  MKO10051901_A_Strn3
  gRNA
catgttagttgactattctg

SEQ ID NO: 51902 - DNA, 20 bp, Artificial Sequence
  MKO10051902_A_Strn4
  gRNA
ggtgcggcggatcaagatgc

SEQ ID NO: 51903 - DNA, 20 bp, Artificial Sequence
  MKO10051903_A_Strn4
  gRNA
gcatcttgatccgccgcacc

SEQ ID NO: 51904 - DNA, 20 bp, Artificial Sequence
  MKO10051904_A_Strn4
  gRNA
tcgaagccgagaaggcccgc

SEQ ID NO: 51905 - DNA, 20 bp, Artificial Sequence
  MKO10051905_A_Strn
  gRNA
aacttaccagagtcatagct

SEQ ID NO: 51906 - DNA, 20 bp, Artificial Sequence
  MKO10051906_A_Strn
  gRNA
ctgtcccatatttcaacttg

SEQ ID NO: 51907 - DNA, 20 bp, Artificial Sequence
  MKO10051907_A_Strn
  gRNA
tttgtgcaggtatctccagg

SEQ ID NO: 51908 - DNA, 20 bp, Artificial Sequence
  MKO10051908_A_Stt3a
  gRNA
cccggtcatcaaaccagtta

SEQ ID NO: 51909 - DNA, 20 bp, Artificial Sequence
  MKO10051909_A_Stt3a
  gRNA
aaggtggtacgtaacgatgg

SEQ ID NO: 51910 - DNA, 20 bp, Artificial Sequence
  MKO10051910_A_Stt3a
  gRNA
tgaccgggcttggtaccctt

SEQ ID NO: 51911 - DNA, 20 bp, Artificial Sequence
  MKO10051911_A_Stt3b
  gRNA
tgcttcattgctatcgtacc

SEQ ID NO: 51912 - DNA, 20 bp, Artificial Sequence
  MKO10051912_A_Stt3b
  gRNA
gtacatatctcggtcagtgg

SEQ ID NO: 51913 - DNA, 20 bp, Artificial Sequence
  MKO10051913_A_Stt3b
  gRNA
acacatcatcttgcatctca

SEQ ID NO: 51914 - DNA, 20 bp, Artificial Sequence
  MKO10051914_A_Stub1
  gRNA
gccattgccaatctgcagcg

SEQ ID NO: 51915 - DNA, 20 bp, Artificial Sequence
  MKO10051915_A_Stub1
  gRNA
cgaggaacggcgcatccacc

SEQ ID NO: 51916 - DNA, 20 bp, Artificial Sequence
  MKO10051916_A_Stub1
  gRNA
cactcccctagcctatagtt

SEQ ID NO: 51917 - DNA, 20 bp, Artificial Sequence
  MKO10051917_A_Stx11
  gRNA
catcgcgaatgcgaccctcc

SEQ ID NO: 51918 - DNA, 20 bp, Artificial Sequence
  MKO10051918_A_Stx11
  gRNA
acacgcgcagtacagcgcgc

SEQ ID NO: 51919 - DNA, 20 bp, Artificial Sequence
  MKO10051919_A_Stx11
  gRNA
gttcgagaccgaccacatcc

SEQ ID NO: 51920 - DNA, 20 bp, Artificial Sequence
  MKO10051920_A_Stx12
  gRNA
gctcatgaatgacttctcgt

SEQ ID NO: 51921 - DNA, 20 bp, Artificial Sequence
  MKO10051921_A_Stx12
  gRNA
acttacagaaagacgagatc

SEQ ID NO: 51922 - DNA, 20 bp, Artificial Sequence
  MKO10051922_A_Stx12
  gRNA
agcagctcgtctcatttgac

SEQ ID NO: 51923 - DNA, 20 bp, Artificial Sequence
  MKO10051923_A_Stx16
  gRNA
gtagcttgctgatgaccgca

SEQ ID NO: 51924 - DNA, 20 bp, Artificial Sequence
  MKO10051924_A_Stx16
  gRNA
agagcggctactgcggaacg

SEQ ID NO: 51925 - DNA, 20 bp, Artificial Sequence
  MKO10051925_A_Stx16
  gRNA
acgaagggcctgctcggagc

SEQ ID NO: 51926 - DNA, 20 bp, Artificial Sequence
  MKO10051926_A_Stx17
  gRNA
gcgctccaatatccgagaaa

SEQ ID NO: 51927 - DNA, 20 bp, Artificial Sequence
  MKO10051927_A_Stx17
  gRNA
cacgaagagcacatcaacgc

SEQ ID NO: 51928 - DNA, 20 bp, Artificial Sequence
  MKO10051928_A_Stx17
  gRNA
agtatcagcggtgcagaatt

SEQ ID NO: 51929 - DNA, 20 bp, Artificial Sequence
  MKO10051929_A_Stx18
  gRNA
agccatccgagtgaagcgcg

SEQ ID NO: 51930 - DNA, 20 bp, Artificial Sequence
  MKO10051930_A_Stx18
  gRNA
tgtccaccacgcgcttcact

SEQ ID NO: 51931 - DNA, 20 bp, Artificial Sequence
  MKO10051931_A_Stx18
  gRNA
atcgtcaacgaaatccaaaa

SEQ ID NO: 51932 - DNA, 20 bp, Artificial Sequence
  MKO10051932_A_Stx19
  gRNA
agaactctctcgggacggtc

SEQ ID NO: 51933 - DNA, 20 bp, Artificial Sequence
  MKO10051933_A_Stx19
  gRNA
gtggatgatgttcaacgatt

SEQ ID NO: 51934 - DNA, 20 bp, Artificial Sequence
  MKO10051934_A_Stx19
  gRNA
ctttatttggagccacagcg

SEQ ID NO: 51935 - DNA, 20 bp, Artificial Sequence
  MKO10051935_A_Stx1a
  gRNA
tgacaagattgccgaaaacg

SEQ ID NO: 51936 - DNA, 20 bp, Artificial Sequence
  MKO10051936_A_Stx1a
  gRNA
gtcgtcgtcatcgctgtcct

SEQ ID NO: 51937 - DNA, 20 bp, Artificial Sequence
  MKO10051937_A_Stx1a
  gRNA
gggcgacttactctttagct

SEQ ID NO: 51938 - DNA, 20 bp, Artificial Sequence
  MKO10051938_A_Stx1b
  gRNA
gatcgagcaaagcattgagc

SEQ ID NO: 51939 - DNA, 20 bp, Artificial Sequence
  MKO10051939_A_Stx1b
  gRNA
cgaagaactcatccataaag

SEQ ID NO: 51940 - DNA, 20 bp, Artificial Sequence
  MKO10051940_A_Stx1b
  gRNA
gtgagcctacctgggtctta

SEQ ID NO: 51941 - DNA, 20 bp, Artificial Sequence
  MKO10051941_A_Stx2
  gRNA
cagtgtaggacaaacgacga

SEQ ID NO: 51942 - DNA, 20 bp, Artificial Sequence
  MKO10051942_A_Stx2
  gRNA
gaatgggaaccgaacttcag

SEQ ID NO: 51943 - DNA, 20 bp, Artificial Sequence
  MKO10051943_A_Stx2
  gRNA
agacactgctgtcgtcattg

SEQ ID NO: 51944 - DNA, 20 bp, Artificial Sequence
  MKO10051944_A_Stx3
  gRNA
cctgggactttcgtatccga

SEQ ID NO: 51945 - DNA, 20 bp, Artificial Sequence
  MKO10051945_A_Stx3
  gRNA
cttgtagaagcagctgacgc

SEQ ID NO: 51946 - DNA, 20 bp, Artificial Sequence
  MKO10051946_A_Stx3
  gRNA
agagaagaactcgtccatga

SEQ ID NO: 51947 - DNA, 20 bp, Artificial Sequence
  MKO10051947_A_Stx4a
  gRNA
gaggtccgggcgcagctaaa

SEQ ID NO: 51948 - DNA, 20 bp, Artificial Sequence
  MKO10051948_A_Stx4a
  gRNA
cgcttactctcctcgggaag

SEQ ID NO: 51949 - DNA, 20 bp, Artificial Sequence
  MKO10051949_A_Stx4a
  gRNA
ttctggaagaactcgtcgtc

SEQ ID NO: 51950 - DNA, 20 bp, Artificial Sequence
  MKO10051950_A_Stx5a
  gRNA
gacccattctaacaccattg

SEQ ID NO: 51951 - DNA, 20 bp, Artificial Sequence
  MKO10051951_A_Stx5a
  gRNA
cagcaatacatttgccaagc

SEQ ID NO: 51952 - DNA, 20 bp, Artificial Sequence
  MKO10051952_A_Stx5a
  gRNA
cacctgcaacgaaaccacaa

SEQ ID NO: 51953 - DNA, 20 bp, Artificial Sequence
  MKO10051953_A_Stx6
  gRNA
ggatattgatggtttcatcg

SEQ ID NO: 51954 - DNA, 20 bp, Artificial Sequence
  MKO10051954_A_Stx6
  gRNA
attgttcctcagctcgttgg

SEQ ID NO: 51955 - DNA, 20 bp, Artificial Sequence
  MKO10051955_A_Stx6
  gRNA
ttgccgagtacttgtgatga

SEQ ID NO: 51956 - DNA, 20 bp, Artificial Sequence
  MKO10051956_A_Stx7
  gRNA
ctcgagtgcgagccagctcc

SEQ ID NO: 51957 - DNA, 20 bp, Artificial Sequence
  MKO10051957_A_Stx7
  gRNA
gatacagaaagaccgattag

SEQ ID NO: 51958 - DNA, 20 bp, Artificial Sequence
  MKO10051958_A_Stx7
  gRNA
aaactgcatacctgctcact

SEQ ID NO: 51959 - DNA, 20 bp, Artificial Sequence
  MKO10051959_A_Stx8
  gRNA
ctgacacgtagaatcgtatg

SEQ ID NO: 51960 - DNA, 20 bp, Artificial Sequence
  MKO10051960_A_Stx8
  gRNA
cctcattcttaaacgatgcc

SEQ ID NO: 51961 - DNA, 20 bp, Artificial Sequence
  MKO10051961_A_Stx8
  gRNA
gcagtctctctcgggtgaca

SEQ ID NO: 51962 - DNA, 20 bp, Artificial Sequence
  MKO10051962_A_Stxbp1
  gRNA
tctctccgaccaccgccttg

SEQ ID NO: 51963 - DNA, 20 bp, Artificial Sequence
  MKO10051963_A_Stxbp1
  gRNA
acagcatcctcatgcttaac

SEQ ID NO: 51964 - DNA, 20 bp, Artificial Sequence
  MKO10051964_A_Stxbp1
  gRNA
tgatgaggtacacggcctcc

SEQ ID NO: 51965 - DNA, 20 bp, Artificial Sequence
  MKO10051965_A_Stxbp2
  gRNA
attataggtaccttctccgt

SEQ ID NO: 51966 - DNA, 20 bp, Artificial Sequence
  MKO10051966_A_Stxbp2
  gRNA
cgtcatccggagcgttaaga

SEQ ID NO: 51967 - DNA, 20 bp, Artificial Sequence
  MKO10051967_A_Stxbp2
  gRNA
cgccatccttcttaacgctc

SEQ ID NO: 51968 - DNA, 20 bp, Artificial Sequence
  MKO10051968_A_Stxbp3a
  gRNA
cagccgtgttcgatgactgc

SEQ ID NO: 51969 - DNA, 20 bp, Artificial Sequence
  MKO10051969_A_Stxbp3a
  gRNA
ccttccattcgccttctttc

SEQ ID NO: 51970 - DNA, 20 bp, Artificial Sequence
  MKO10051970_A_Stxbp3a
  gRNA
caaaatgacagaccttctag

SEQ ID NO: 51971 - DNA, 20 bp, Artificial Sequence
  MKO10051971_A_Stxbp4
  gRNA
agtaactgtaatcacccgaa

SEQ ID NO: 51972 - DNA, 20 bp, Artificial Sequence
  MKO10051972_A_Stxbp4
  gRNA
acttcgtgaatatacaccag

SEQ ID NO: 51973 - DNA, 20 bp, Artificial Sequence
  MKO10051973_A_Stxbp4
  gRNA
cccttcttgtaaagcaattc

SEQ ID NO: 51974 - DNA, 20 bp, Artificial Sequence
  MKO10051974_A_Stxbp5l
  gRNA
ctctttcagacagttcggca

SEQ ID NO: 51975 - DNA, 20 bp, Artificial Sequence
  MKO10051975_A_Stxbp5l
  gRNA
gactgcagggcttccgagag

SEQ ID NO: 51976 - DNA, 20 bp, Artificial Sequence
  MKO10051976_A_Stxbp5l
  gRNA
caaaacttaccttgcaaatc

SEQ ID NO: 51977 - DNA, 20 bp, Artificial Sequence
  MKO10051977_A_Stxbp5
  gRNA
ctgctgctccgctgtcgtgc

SEQ ID NO: 51978 - DNA, 20 bp, Artificial Sequence
  MKO10051978_A_Stxbp5
  gRNA
gacgtaaattccataagtgt

SEQ ID NO: 51979 - DNA, 20 bp, Artificial Sequence
  MKO10051979_A_Stxbp5
  gRNA
tgttattgccagcacgacag

SEQ ID NO: 51980 - DNA, 20 bp, Artificial Sequence
  MKO10051980_A_Stxbp6
  gRNA
ccgttccccacgctcgttca

SEQ ID NO: 51981 - DNA, 20 bp, Artificial Sequence
  MKO10051981_A_Stxbp6
  gRNA
cattcgtccgaagatcccaa

SEQ ID NO: 51982 - DNA, 20 bp, Artificial Sequence
  MKO10051982_A_Stxbp6
  gRNA
taggatcaataccattaact

SEQ ID NO: 51983 - DNA, 20 bp, Artificial Sequence
  MKO10051983_A_Styk1
  gRNA
ggatgagaaagccgccaacc

SEQ ID NO: 51984 - DNA, 20 bp, Artificial Sequence
  MKO10051984_A_Styk1
  gRNA
tgagccttacctcggggtcc

SEQ ID NO: 51985 - DNA, 20 bp, Artificial Sequence
  MKO10051985_A_Styk1
  gRNA
agcagccctccagctgtacc

SEQ ID NO: 51986 - DNA, 20 bp, Artificial Sequence
  MKO10051986_A_Styxl1
  gRNA
agcattcatagccccctctg

SEQ ID NO: 51987 - DNA, 20 bp, Artificial Sequence
  MKO10051987_A_Styxl1
  gRNA
gctgtgcatacggcggcagc

SEQ ID NO: 51988 - DNA, 20 bp, Artificial Sequence
  MKO10051988_A_Styxl1
  gRNA
gttggcgggtaaagtgaatg

SEQ ID NO: 51989 - DNA, 20 bp, Artificial Sequence
  MKO10051989_A_Styx
  gRNA
acctgcatctctcgtctcat

SEQ ID NO: 51990 - DNA, 20 bp, Artificial Sequence
  MKO10051990_A_Styx
  gRNA
caaactttcaacaattattt

SEQ ID NO: 51991 - DNA, 20 bp, Artificial Sequence
  MKO10051991_A_Styx
  gRNA
ctcttctgctatgaaaagca

SEQ ID NO: 51992 - DNA, 20 bp, Artificial Sequence
  MKO10051992_A_Sub1
  gRNA
tgcttcttcacgggcttctc

SEQ ID NO: 51993 - DNA, 20 bp, Artificial Sequence
  MKO10051993_A_Sub1
  gRNA
ggacagcgaagttgaaaaaa

SEQ ID NO: 51994 - DNA, 20 bp, Artificial Sequence
  MKO10051994_A_Sub1
  gRNA
cagagatgacaacatgttcc

SEQ ID NO: 51995 - DNA, 20 bp, Artificial Sequence
  MKO10051995_A_Sucla2
  gRNA
tctgtgagcgcaaatatccc

SEQ ID NO: 51996 - DNA, 20 bp, Artificial Sequence
  MKO10051996_A_Sucla2
  gRNA
atgccctccactatatcaat

SEQ ID NO: 51997 - DNA, 20 bp, Artificial Sequence
  MKO10051997_A_Sucla2
  gRNA
tcaagtattcatgcagcgaa

SEQ ID NO: 51998 - DNA, 20 bp, Artificial Sequence
  MKO10051998_A_Suclg1
  gRNA
cgcgtcgattgcttcattaa

SEQ ID NO: 51999 - DNA, 20 bp, Artificial Sequence
  MKO10051999_A_Suclg1
  gRNA
tacactcacgttgatgacgc

SEQ ID NO: 52000 - DNA, 20 bp, Artificial Sequence
  MKO10052000_A_Suclg1
  gRNA
ggagtacggcaccaaactcg

SEQ ID NO: 52001 - DNA, 20 bp, Artificial Sequence
  MKO10052001_A_Suclg2
  gRNA
ccctcctagccctaaagtag

SEQ ID NO: 52002 - DNA, 20 bp, Artificial Sequence
  MKO10052002_A_Suclg2
  gRNA
gaacaacttactcaatctct

SEQ ID NO: 52003 - DNA, 20 bp, Artificial Sequence
  MKO10052003_A_Suclg2
  gRNA
tgtgatagtgggcagtcctc

SEQ ID NO: 52004 - DNA, 20 bp, Artificial Sequence
  MKO10052004_A_Sucnr1
  gRNA
tcgcctcacgcctggatagt

SEQ ID NO: 52005 - DNA, 20 bp, Artificial Sequence
  MKO10052005_A_Sucnr1
  gRNA
atcatatcatgcgcaatttg

SEQ ID NO: 52006 - DNA, 20 bp, Artificial Sequence
  MKO10052006_A_Sucnr1
  gRNA
caaattgcgcatgatatgat

SEQ ID NO: 52007 - DNA, 20 bp, Artificial Sequence
  MKO10052007_A_Suco
  gRNA
gtgtctgcaggcttccgagt

SEQ ID NO: 52008 - DNA, 20 bp, Artificial Sequence
  MKO10052008_A_Suco
  gRNA
aacgaagttaagcctccctg

SEQ ID NO: 52009 - DNA, 20 bp, Artificial Sequence
  MKO10052009_A_Suco
  gRNA
cctgatagctcagcattact

SEQ ID NO: 52010 - DNA, 20 bp, Artificial Sequence
  MKO10052010_A_Suds3
  gRNA
ccgcaccttcgtcggactct

SEQ ID NO: 52011 - DNA, 20 bp, Artificial Sequence
  MKO10052011_A_Suds3
  gRNA
cggggccgagagtccgacga

SEQ ID NO: 52012 - DNA, 20 bp, Artificial Sequence
  MKO10052012_A_Suds3
  gRNA
agcagtaccgagagcggatc

SEQ ID NO: 52013 - DNA, 20 bp, Artificial Sequence
  MKO10052013_A_Sufu
  gRNA
ttaccgctatcgtcaagtac

SEQ ID NO: 52014 - DNA, 20 bp, Artificial Sequence
  MKO10052014_A_Sufu
  gRNA
taacctggagcgggttcggc

SEQ ID NO: 52015 - DNA, 20 bp, Artificial Sequence
  MKO10052015_A_Sufu
  gRNA
cacatggtccccgctacaga

SEQ ID NO: 52016 - DNA, 20 bp, Artificial Sequence
  MKO10052016_A_Sugp1
  gRNA
acactcgggcggtgtgcaac

SEQ ID NO: 52017 - DNA, 20 bp, Artificial Sequence
  MKO10052017_A_Sugp1
  gRNA
tgccatcccaaaccaccgat

SEQ ID NO: 52018 - DNA, 20 bp, Artificial Sequence
  MKO10052018_A_Sugp1
  gRNA
tccaacaagtttgccaatga

SEQ ID NO: 52019 - DNA, 20 bp, Artificial Sequence
  MKO10052019_A_Sugp2
  gRNA
accgcacactgtgcgggcgt

SEQ ID NO: 52020 - DNA, 20 bp, Artificial Sequence
  MKO10052020_A_Sugp2
  gRNA
gtactcccttccgaacaaag

SEQ ID NO: 52021 - DNA, 20 bp, Artificial Sequence
  MKO10052021_A_Sugp2
  gRNA
ggcccgtctcctcggccaac

SEQ ID NO: 52022 - DNA, 20 bp, Artificial Sequence
  MKO10052022_A_Sugt1
  gRNA
cagtaatactgtgcgtcatc

SEQ ID NO: 52023 - DNA, 20 bp, Artificial Sequence
  MKO10052023_A_Sugt1
  gRNA
ttctcagatgctctgatcga

SEQ ID NO: 52024 - DNA, 20 bp, Artificial Sequence
  MKO10052024_A_Sugt1
  gRNA
ggatccccaggcagcattag

SEQ ID NO: 52025 - DNA, 20 bp, Artificial Sequence
  MKO10052025_A_Sulf1
  gRNA
cagttgacgactctgtcgag

SEQ ID NO: 52026 - DNA, 20 bp, Artificial Sequence
  MKO10052026_A_Sulf1
  gRNA
ccgagccattctcgccatcc

SEQ ID NO: 52027 - DNA, 20 bp, Artificial Sequence
  MKO10052027_A_Sulf1
  gRNA
ctataactatgcaccgaaca

SEQ ID NO: 52028 - DNA, 20 bp, Artificial Sequence
  MKO10052028_A_Sulf2
  gRNA
cgaaggtgcggctctcgtgc

SEQ ID NO: 52029 - DNA, 20 bp, Artificial Sequence
  MKO10052029_A_Sulf2
  gRNA
gtggttgtggacgtacttgc

SEQ ID NO: 52030 - DNA, 20 bp, Artificial Sequence
  MKO10052030_A_Sulf2
  gRNA
atacgtgccgcccggctgga

SEQ ID NO: 52031 - DNA, 20 bp, Artificial Sequence
  MKO10052031_A_Sult1a1
  gRNA
tccgcaaagtatttgatgag

SEQ ID NO: 52032 - DNA, 20 bp, Artificial Sequence
  MKO10052032_A_Sult1a1
  gRNA
atcagcacgtacccaaagtc

SEQ ID NO: 52033 - DNA, 20 bp, Artificial Sequence
  MKO10052033_A_Sult1a1
  gRNA
ggtggcaagctagataagtg

SEQ ID NO: 52034 - DNA, 20 bp, Artificial Sequence
  MKO10052034_A_Sult1b1
  gRNA
aatagtattaatcctcttcc

SEQ ID NO: 52035 - DNA, 20 bp, Artificial Sequence
  MKO10052035_A_Sult1b1
  gRNA
catccttgccatttcgagca

SEQ ID NO: 52036 - DNA, 20 bp, Artificial Sequence
  MKO10052036_A_Sult1b1
  gRNA
agatgtgtctttattatccg

SEQ ID NO: 52037 - DNA, 20 bp, Artificial Sequence
  MKO10052037_A_Sult1c1
  gRNA
ggtcataggtattggcccgc

SEQ ID NO: 52038 - DNA, 20 bp, Artificial Sequence
  MKO10052038_A_Sult1c1
  gRNA
gggaaactcacctgagttga

SEQ ID NO: 52039 - DNA, 20 bp, Artificial Sequence
  MKO10052039_A_Sult1c1
  gRNA
ttacctcctaggtctggatc

SEQ ID NO: 52040 - DNA, 20 bp, Artificial Sequence
  MKO10052040_A_Sult1c2
  gRNA
tagcatttcgagctacataa

SEQ ID NO: 52041 - DNA, 20 bp, Artificial Sequence
  MKO10052041_A_Sult1c2
  gRNA
tcgaaatgctaaagactgca

SEQ ID NO: 52042 - DNA, 20 bp, Artificial Sequence
  MKO10052042_A_Sult1c2
  gRNA
ggccgtgcccactcaataaa

SEQ ID NO: 52043 - DNA, 20 bp, Artificial Sequence
  MKO10052043_A_Sult1d1
  gRNA
ctacaaacgagtaccattca

SEQ ID NO: 52044 - DNA, 20 bp, Artificial Sequence
  MKO10052044_A_Sult1d1
  gRNA
gctcttcacatgatcatacc

SEQ ID NO: 52045 - DNA, 20 bp, Artificial Sequence
  MKO10052045_A_Sult1d1
  gRNA
gtccatacagattatttatg

SEQ ID NO: 52046 - DNA, 20 bp, Artificial Sequence
  MKO10052046_A_Sult1e1
  gRNA
tctagatgatctatctttgc

SEQ ID NO: 52047 - DNA, 20 bp, Artificial Sequence
  MKO10052047_A_Sult1e1
  gRNA
tcgtttctgcactccaaata

SEQ ID NO: 52048 - DNA, 20 bp, Artificial Sequence
  MKO10052048_A_Sult1e1
  gRNA
tttcagttccgtatggttcc

SEQ ID NO: 52049 - DNA, 20 bp, Artificial Sequence
  MKO10052049_A_Sult2a1
  gRNA
acacagttctattcggatca

SEQ ID NO: 52050 - DNA, 20 bp, Artificial Sequence
  MKO10052050_A_Sult2a1
  gRNA
gtactatgaagacataaaaa

SEQ ID NO: 52051 - DNA, 20 bp, Artificial Sequence
  MKO10052051_A_Sult2a1
  gRNA
ttccttaatgagactaaaat

SEQ ID NO: 52052 - DNA, 20 bp, Artificial Sequence
  MKO10052052_A_Sult2a2
  gRNA
ccctggatagagactgaaat

SEQ ID NO: 52053 - DNA, 20 bp, Artificial Sequence
  MKO10052053_A_Sult2a2
  gRNA
ccttccttattgattattgc

SEQ ID NO: 52054 - DNA, 20 bp, Artificial Sequence
  MKO10052054_A_Sult2a2
  gRNA
tttactcaccatttccttgg

SEQ ID NO: 52055 - DNA, 20 bp, Artificial Sequence
  MKO10052055_A_Sult2a3
  gRNA
agcgaagatatgattactaa

SEQ ID NO: 52056 - DNA, 20 bp, Artificial Sequence
  MKO10052056_A_Sult2a3
  gRNA
aaataagttctgagtgatcc

SEQ ID NO: 52057 - DNA, 20 bp, Artificial Sequence
  MKO10052057_A_Sult2a3
  gRNA
agatgagaggaaatgagtcg

SEQ ID NO: 52058 - DNA, 20 bp, Artificial Sequence
  MKO10052058_A_Sult2a4
  gRNA
ccctggctagagactaatag

SEQ ID NO: 52059 - DNA, 20 bp, Artificial Sequence
  MKO10052059_A_Sult2a4
  gRNA
ggtcctgaatggacacagtt

SEQ ID NO: 52060 - DNA, 20 bp, Artificial Sequence
  MKO10052060_A_Sult2a4
  gRNA
cccagagatattcttctttc

SEQ ID NO: 52061 - DNA, 20 bp, Artificial Sequence
  MKO10052061_A_Sult2a5
  gRNA
tcattcaggaacaaactggt

SEQ ID NO: 52062 - DNA, 20 bp, Artificial Sequence
  MKO10052062_A_Sult2a5
  gRNA
aaataagttccaaaagaccc

SEQ ID NO: 52063 - DNA, 20 bp, Artificial Sequence
  MKO10052063_A_Sult2a5
  gRNA
aagacaagatccagctcatc

SEQ ID NO: 52064 - DNA, 20 bp, Artificial Sequence
  MKO10052064_A_Sult2a6
  gRNA
gagtcgtggtccttccttac

SEQ ID NO: 52065 - DNA, 20 bp, Artificial Sequence
  MKO10052065_A_Sult2a6
  gRNA
gttcccaattaggcacagat

SEQ ID NO: 52066 - DNA, 20 bp, Artificial Sequence
  MKO10052066_A_Sult2a6
  gRNA
accagacactagaacatctc

SEQ ID NO: 52067 - DNA, 20 bp, Artificial Sequence
  MKO10052067_A_Sult2a7
  gRNA
tgttcaaaccatgatccata

SEQ ID NO: 52068 - DNA, 20 bp, Artificial Sequence
  MKO10052068_A_Sult2a7
  gRNA
gcagacaatctcaacaagcc

SEQ ID NO: 52069 - DNA, 20 bp, Artificial Sequence
  MKO10052069_A_Sult2a7
  gRNA
ggatccaatctgtgcccatc

SEQ ID NO: 52070 - DNA, 20 bp, Artificial Sequence
  MKO10052070_A_Sult2b1
  gRNA
ccatctggcaacgtgcgccc

SEQ ID NO: 52071 - DNA, 20 bp, Artificial Sequence
  MKO10052071_A_Sult2b1
  gRNA
ccggaacccccgcgatgtcg

SEQ ID NO: 52072 - DNA, 20 bp, Artificial Sequence
  MKO10052072_A_Sult2b1
  gRNA
ggatccctcgtggatccgat

SEQ ID NO: 52073 - DNA, 20 bp, Artificial Sequence
  MKO10052073_A_Sult3a1
  gRNA
atgggaagtttccttcgcaa

SEQ ID NO: 52074 - DNA, 20 bp, Artificial Sequence
  MKO10052074_A_Sult3a1
  gRNA
aaggatctgctgggtccaga

SEQ ID NO: 52075 - DNA, 20 bp, Artificial Sequence
  MKO10052075_A_Sult3a1
  gRNA
gatgcgaggtgatggcattt

SEQ ID NO: 52076 - DNA, 20 bp, Artificial Sequence
  MKO10052076_A_Sult4a1
  gRNA
atcagttccaccgctcgctg

SEQ ID NO: 52077 - DNA, 20 bp, Artificial Sequence
  MKO10052077_A_Sult4a1
  gRNA
gctgctcgtcaatgttcatc

SEQ ID NO: 52078 - DNA, 20 bp, Artificial Sequence
  MKO10052078_A_Sult4a1
  gRNA
tttcatcagggtcggcaccc

SEQ ID NO: 52079 - DNA, 20 bp, Artificial Sequence
  MKO10052079_A_Sult5a1
  gRNA
acctcccacttgaacgccaa

SEQ ID NO: 52080 - DNA, 20 bp, Artificial Sequence
  MKO10052080_A_Sult5a1
  gRNA
ccgcaagttaagtgaattcc

SEQ ID NO: 52081 - DNA, 20 bp, Artificial Sequence
  MKO10052081_A_Sult5a1
  gRNA
gttcaggcttcttcggctcc

SEQ ID NO: 52082 - DNA, 20 bp, Artificial Sequence
  MKO10052082_A_Sult6b1
  gRNA
ggtgatatttcgaaacccta

SEQ ID NO: 52083 - DNA, 20 bp, Artificial Sequence
  MKO10052083_A_Sult6b1
  gRNA
cctgaagaattcatcccatg

SEQ ID NO: 52084 - DNA, 20 bp, Artificial Sequence
  MKO10052084_A_Sult6b1
  gRNA
actgaggtagcttgtcatag

SEQ ID NO: 52085 - DNA, 20 bp, Artificial Sequence
  MKO10052085_A_Sumf1
  gRNA
agtgaaaacgcatatccacc

SEQ ID NO: 52086 - DNA, 20 bp, Artificial Sequence
  MKO10052086_A_Sumf1
  gRNA
gggcaagaggttgcctactg

SEQ ID NO: 52087 - DNA, 20 bp, Artificial Sequence
  MKO10052087_A_Sumf1
  gRNA
cctctctaggtcaaatcatc

SEQ ID NO: 52088 - DNA, 20 bp, Artificial Sequence
  MKO10052088_A_Sumf2
  gRNA
ttcccgtggtacacgtgagc

SEQ ID NO: 52089 - DNA, 20 bp, Artificial Sequence
  MKO10052089_A_Sumf2
  gRNA
cgggtggagcttcgtctttg

SEQ ID NO: 52090 - DNA, 20 bp, Artificial Sequence
  MKO10052090_A_Sumf2
  gRNA
tttactgtcacttcccgggc

SEQ ID NO: 52091 - DNA, 20 bp, Artificial Sequence
  MKO10052091_A_Sumo1
  gRNA
tttcttccagctgggaatgg

SEQ ID NO: 52092 - DNA, 20 bp, Artificial Sequence
  MKO10052092_A_Sumo1
  gRNA
ggaggcaaaaccttcaactg

SEQ ID NO: 52093 - DNA, 20 bp, Artificial Sequence
  MKO10052093_A_Sumo1
  gRNA
tcgcctaagtcctcagttga

SEQ ID NO: 52094 - DNA, 20 bp, Artificial Sequence
  MKO10052094_A_Sumo2
  gRNA
cctcacctgccgttcacaat

SEQ ID NO: 52095 - DNA, 20 bp, Artificial Sequence
  MKO10052095_A_Sumo2
  gRNA
gctcaccttgggtttctcgt

SEQ ID NO: 52096 - DNA, 20 bp, Artificial Sequence
  MKO10052096_A_Sumo2
  gRNA
cttgttagggtttgtcaatg

SEQ ID NO: 52097 - DNA, 20 bp, Artificial Sequence
  MKO10052097_A_Sumo3
  gRNA
ttccccagggcttgtcaatg

SEQ ID NO: 52098 - DNA, 20 bp, Artificial Sequence
  MKO10052098_A_Sumo3
  gRNA
tggtcactgctcaatagcac

SEQ ID NO: 52099 - DNA, 20 bp, Artificial Sequence
  MKO10052099_A_Sumo3
  gRNA
acttgactagctggagatgg

SEQ ID NO: 52100 - DNA, 20 bp, Artificial Sequence
  MKO10052100_A_Sun1
  gRNA
ctggctacacttacgcactc

SEQ ID NO: 52101 - DNA, 20 bp, Artificial Sequence
  MKO10052101_A_Sun1
  gRNA
gcagcaccgtggcactccgc

SEQ ID NO: 52102 - DNA, 20 bp, Artificial Sequence
  MKO10052102_A_Sun1
  gRNA
gtcccgccgcagcttgcgtc

SEQ ID NO: 52103 - DNA, 20 bp, Artificial Sequence
  MKO10052103_A_Sun2
  gRNA
gcgcctcactcgctactctc

SEQ ID NO: 52104 - DNA, 20 bp, Artificial Sequence
  MKO10052104_A_Sun2
  gRNA
gctctccgcggtgagcccat

SEQ ID NO: 52105 - DNA, 20 bp, Artificial Sequence
  MKO10052105_A_Sun2
  gRNA
agcccgggggctgccgatgt

SEQ ID NO: 52106 - DNA, 20 bp, Artificial Sequence
  MKO10052106_A_Sun3
  gRNA
acatcctgattaagctcgcc

SEQ ID NO: 52107 - DNA, 20 bp, Artificial Sequence
  MKO10052107_A_Sun3
  gRNA
ctcatctagaacgtcagtag

SEQ ID NO: 52108 - DNA, 20 bp, Artificial Sequence
  MKO10052108_A_Sun3
  gRNA
tcggagaaggtgtccccttc

SEQ ID NO: 52109 - DNA, 20 bp, Artificial Sequence
  MKO10052109_A_Sun5
  gRNA
ctgtttacctgcaggtgtta

SEQ ID NO: 52110 - DNA, 20 bp, Artificial Sequence
  MKO10052110_A_Sun5
  gRNA
gcaggctaggtaggtgagcc

SEQ ID NO: 52111 - DNA, 20 bp, Artificial Sequence
  MKO10052111_A_Sun5
  gRNA
gagactcaccaaaaacacag

SEQ ID NO: 52112 - DNA, 20 bp, Artificial Sequence
  MKO10052112_A_Suox
  gRNA
ccggcgctccgaaatgagta

SEQ ID NO: 52113 - DNA, 20 bp, Artificial Sequence
  MKO10052113_A_Suox
  gRNA
cattgctgagtacgccccga

SEQ ID NO: 52114 - DNA, 20 bp, Artificial Sequence
  MKO10052114_A_Suox
  gRNA
gagtcaagtcaacccccttg

SEQ ID NO: 52115 - DNA, 20 bp, Artificial Sequence
  MKO10052115_A_Supt16
  gRNA
tgccaagtcaactgccttac

SEQ ID NO: 52116 - DNA, 20 bp, Artificial Sequence
  MKO10052116_A_Supt16
  gRNA
tttccatagacgtggctctt

SEQ ID NO: 52117 - DNA, 20 bp, Artificial Sequence
  MKO10052117_A_Supt16
  gRNA
aacacccaccgatacaacaa

SEQ ID NO: 52118 - DNA, 20 bp, Artificial Sequence
  MKO10052118_A_Supt20
  gRNA
agtcataccttccactagac

SEQ ID NO: 52119 - DNA, 20 bp, Artificial Sequence
  MKO10052119_A_Supt20
  gRNA
ttagtagtcaatctgtaccc

SEQ ID NO: 52120 - DNA, 20 bp, Artificial Sequence
  MKO10052120_A_Supt20
  gRNA
gttagagaagcttgttatgc

SEQ ID NO: 52121 - DNA, 20 bp, Artificial Sequence
  MKO10052121_A_Supt3
  gRNA
cgagcttgatgatgtcaaac

SEQ ID NO: 52122 - DNA, 20 bp, Artificial Sequence
  MKO10052122_A_Supt3
  gRNA
caagagacagaagatcgctc

SEQ ID NO: 52123 - DNA, 20 bp, Artificial Sequence
  MKO10052123_A_Supt3
  gRNA
tcatacacaactaattaacc

SEQ ID NO: 52124 - DNA, 20 bp, Artificial Sequence
  MKO10052124_A_Supt4a
  gRNA
ttctgtcataggaatcgtgc

SEQ ID NO: 52125 - DNA, 20 bp, Artificial Sequence
  MKO10052125_A_Supt4a
  gRNA
cacacccatcatattcgaac

SEQ ID NO: 52126 - DNA, 20 bp, Artificial Sequence
  MKO10052126_A_Supt4a
  gRNA
tcctcaggtaactttaagcc

SEQ ID NO: 52127 - DNA, 20 bp, Artificial Sequence
  MKO10052127_A_Supt5
  gRNA
cagcacaacgttatcaatat

SEQ ID NO: 52128 - DNA, 20 bp, Artificial Sequence
  MKO10052128_A_Supt5
  gRNA
caatattgataacgttgtgc

SEQ ID NO: 52129 - DNA, 20 bp, Artificial Sequence
  MKO10052129_A_Supt5
  gRNA
cactgcctgcagcacttcgc

SEQ ID NO: 52130 - DNA, 20 bp, Artificial Sequence
  MKO10052130_A_Supt6
  gRNA
acttacgcatctgtatatcc

SEQ ID NO: 52131 - DNA, 20 bp, Artificial Sequence
  MKO10052131_A_Supt6
  gRNA
cgtcattgataaagtctttg

SEQ ID NO: 52132 - DNA, 20 bp, Artificial Sequence
  MKO10052132_A_Supt6
  gRNA
ccccatggcccctcctgacg

SEQ ID NO: 52133 - DNA, 20 bp, Artificial Sequence
  MKO10052133_A_Supt7l
  gRNA
ttgtggcgactgcttgatag

SEQ ID NO: 52134 - DNA, 20 bp, Artificial Sequence
  MKO10052134_A_Supt7l
  gRNA
ggagagataccaataccgtc

SEQ ID NO: 52135 - DNA, 20 bp, Artificial Sequence
  MKO10052135_A_Supt7l
  gRNA
gccgaagccccccacgatgc

SEQ ID NO: 52136 - DNA, 20 bp, Artificial Sequence
  MKO10052136_A_Supv3l1
  gRNA
acacgccagaggtcgctgac

SEQ ID NO: 52137 - DNA, 20 bp, Artificial Sequence
  MKO10052137_A_Supv3l1
  gRNA
tatcttccgctgtctcgctc

SEQ ID NO: 52138 - DNA, 20 bp, Artificial Sequence
  MKO10052138_A_Supv3l1
  gRNA
cacagctcgtctcttccacc

SEQ ID NO: 52139 - DNA, 20 bp, Artificial Sequence
  MKO10052139_A_Surf1
  gRNA
tcagcttccatttccgacgt

SEQ ID NO: 52140 - DNA, 20 bp, Artificial Sequence
  MKO10052140_A_Surf1
  gRNA
tgccagcatctcgcgcctct

SEQ ID NO: 52141 - DNA, 20 bp, Artificial Sequence
  MKO10052141_A_Surf1
  gRNA
agaattagagtctcgagtca

SEQ ID NO: 52142 - DNA, 20 bp, Artificial Sequence
  MKO10052142_A_Surf2
  gRNA
tgcgtaatcgaagttagaga

SEQ ID NO: 52143 - DNA, 20 bp, Artificial Sequence
  MKO10052143_A_Surf2
  gRNA
tacgtaccgattctttgtgc

SEQ ID NO: 52144 - DNA, 20 bp, Artificial Sequence
  MKO10052144_A_Surf2
  gRNA
tcagtttacgacccctcttg

SEQ ID NO: 52145 - DNA, 20 bp, Artificial Sequence
  MKO10052145_A_Surf4
  gRNA
ttcgtgcagtatgcctgctt

SEQ ID NO: 52146 - DNA, 20 bp, Artificial Sequence
  MKO10052146_A_Surf4
  gRNA
ggtactgcttggtgactcga

SEQ ID NO: 52147 - DNA, 20 bp, Artificial Sequence
  MKO10052147_A_Surf4
  gRNA
gtttggaatcatcgcactgc

SEQ ID NO: 52148 - DNA, 20 bp, Artificial Sequence
  MKO10052148_A_Surf6
  gRNA
cctggacgagcttcgtgatc

SEQ ID NO: 52149 - DNA, 20 bp, Artificial Sequence
  MKO10052149_A_Surf6
  gRNA
cctgatcacgaagctcgtcc

SEQ ID NO: 52150 - DNA, 20 bp, Artificial Sequence
  MKO10052150_A_Surf6
  gRNA
acttacctttaggggacccc

SEQ ID NO: 52151 - DNA, 20 bp, Artificial Sequence
  MKO10052151_A_Susd1
  gRNA
cttcccacgacgtagccctc

SEQ ID NO: 52152 - DNA, 20 bp, Artificial Sequence
  MKO10052152_A_Susd1
  gRNA
gaacgtctcgttgttatttg

SEQ ID NO: 52153 - DNA, 20 bp, Artificial Sequence
  MKO10052153_A_Susd1
  gRNA
cccaccttggcaatgtaact

SEQ ID NO: 52154 - DNA, 20 bp, Artificial Sequence
  MKO10052154_A_Susd2
  gRNA
tccgggcagactccgtagcc

SEQ ID NO: 52155 - DNA, 20 bp, Artificial Sequence
  MKO10052155_A_Susd2
  gRNA
tactgaggtgatgcgggttt

SEQ ID NO: 52156 - DNA, 20 bp, Artificial Sequence
  MKO10052156_A_Susd2
  gRNA
ccaggccagtgcgtgatcgt

SEQ ID NO: 52157 - DNA, 20 bp, Artificial Sequence
  MKO10052157_A_Susd3
  gRNA
gtccacgcgttgaactctgc

SEQ ID NO: 52158 - DNA, 20 bp, Artificial Sequence
  MKO10052158_A_Susd3
  gRNA
gccctgcagagttcaacgcg

SEQ ID NO: 52159 - DNA, 20 bp, Artificial Sequence
  MKO10052159_A_Susd3
  gRNA
ttgcaagtcgtccgtggaga

SEQ ID NO: 52160 - DNA, 20 bp, Artificial Sequence
  MKO10052160_A_Susd4
  gRNA
tttcgttatgccgtgacgat

SEQ ID NO: 52161 - DNA, 20 bp, Artificial Sequence
  MKO10052161_A_Susd4
  gRNA
aaatctccgtgacttaccat

SEQ ID NO: 52162 - DNA, 20 bp, Artificial Sequence
  MKO10052162_A_Susd4
  gRNA
ttcgaagaaaactcctccgc

SEQ ID NO: 52163 - DNA, 20 bp, Artificial Sequence
  MKO10052163_A_Susd5
  gRNA
acacggctcccgcgactacc

SEQ ID NO: 52164 - DNA, 20 bp, Artificial Sequence
  MKO10052164_A_Susd5
  gRNA
aatgctcgacgtagaagctc

SEQ ID NO: 52165 - DNA, 20 bp, Artificial Sequence
  MKO10052165_A_Susd5
  gRNA
aggacgaccgtgtgtagcaa

SEQ ID NO: 52166 - DNA, 20 bp, Artificial Sequence
  MKO10052166_A_Suv39h1
  gRNA
agcttgtccgacgacaccgc

SEQ ID NO: 52167 - DNA, 20 bp, Artificial Sequence
  MKO10052167_A_Suv39h1
  gRNA
cgtggaagacgtatataccg

SEQ ID NO: 52168 - DNA, 20 bp, Artificial Sequence
  MKO10052168_A_Suv39h1
  gRNA
atacgtcttccacgtagtcc

SEQ ID NO: 52169 - DNA, 20 bp, Artificial Sequence
  MKO10052169_A_Suv39h2
  gRNA
tctactacattaacgagtac

SEQ ID NO: 52170 - DNA, 20 bp, Artificial Sequence
  MKO10052170_A_Suv39h2
  gRNA
ccttgagttgcattcgtaga

SEQ ID NO: 52171 - DNA, 20 bp, Artificial Sequence
  MKO10052171_A_Suv39h2
  gRNA
atagaactgtccccgtctct

SEQ ID NO: 52172 - DNA, 20 bp, Artificial Sequence
  MKO10052172_A_Suv420h1
  gRNA
agccgctatgtgccgtcctc

SEQ ID NO: 52173 - DNA, 20 bp, Artificial Sequence
  MKO10052173_A_Suv420h1
  gRNA
ccggcagaaacgccgttgag

SEQ ID NO: 52174 - DNA, 20 bp, Artificial Sequence
  MKO10052174_A_Suv420h1
  gRNA
ttccagaggacggcacatag

SEQ ID NO: 52175 - DNA, 20 bp, Artificial Sequence
  MKO10052175_A_Suv420h2
  gRNA
tggtgttgtcgtcgcaaggt

SEQ ID NO: 52176 - DNA, 20 bp, Artificial Sequence
  MKO10052176_A_Suv420h2
  gRNA
tttcctaaggcaacgggacc

SEQ ID NO: 52177 - DNA, 20 bp, Artificial Sequence
  MKO10052177_A_Suv420h2
  gRNA
agattgtgtctacccgtgct

SEQ ID NO: 52178 - DNA, 20 bp, Artificial Sequence
  MKO10052178_A_Suz12
  gRNA
cggcttcgggggttcggcgg

SEQ ID NO: 52179 - DNA, 20 bp, Artificial Sequence
  MKO10052179_A_Suz12
  gRNA
gccggtgaagaagccgaaaa

SEQ ID NO: 52180 - DNA, 20 bp, Artificial Sequence
  MKO10052180_A_Suz12
  gRNA
catttgcaacttacatttac

SEQ ID NO: 52181 - DNA, 20 bp, Artificial Sequence
  MKO10052181_A_Sv2a
  gRNA
cttactgagaagacgcgctc

SEQ ID NO: 52182 - DNA, 20 bp, Artificial Sequence
  MKO10052182_A_Sv2a
  gRNA
tccgacccagccgatcagcc

SEQ ID NO: 52183 - DNA, 20 bp, Artificial Sequence
  MKO10052183_A_Sv2a
  gRNA
cgccagaaactccgaaaaat

SEQ ID NO: 52184 - DNA, 20 bp, Artificial Sequence
  MKO10052184_A_Sv2b
  gRNA
ggctccatatccctgcacga

SEQ ID NO: 52185 - DNA, 20 bp, Artificial Sequence
  MKO10052185_A_Sv2b
  gRNA
gaccccggaaaaggtgttca

SEQ ID NO: 52186 - DNA, 20 bp, Artificial Sequence
  MKO10052186_A_Sv2b
  gRNA
gcctggctgataaactggga

SEQ ID NO: 52187 - DNA, 20 bp, Artificial Sequence
  MKO10052187_A_Sv2c
  gRNA
tgacgaagacgcgccagctg

SEQ ID NO: 52188 - DNA, 20 bp, Artificial Sequence
  MKO10052188_A_Sv2c
  gRNA
cggcatctacgcctccgcca

SEQ ID NO: 52189 - DNA, 20 bp, Artificial Sequence
  MKO10052189_A_Sv2c
  gRNA
acgcccccaccatcatcccg

SEQ ID NO: 52190 - DNA, 20 bp, Artificial Sequence
  MKO10052190_A_Sval1
  gRNA
ttacctattatcctgaccag

SEQ ID NO: 52191 - DNA, 20 bp, Artificial Sequence
  MKO10052191_A_Sval1
  gRNA
ttgcctctggtcaggataat

SEQ ID NO: 52192 - DNA, 20 bp, Artificial Sequence
  MKO10052192_A_Sval1
  gRNA
agcagaagttgtttcagcta

SEQ ID NO: 52193 - DNA, 20 bp, Artificial Sequence
  MKO10052193_A_Sval2
  gRNA
ttgtgtagcagtttctacgt

SEQ ID NO: 52194 - DNA, 20 bp, Artificial Sequence
  MKO10052194_A_Sval2
  gRNA
gcagtgcaaacaaatacttc

SEQ ID NO: 52195 - DNA, 20 bp, Artificial Sequence
  MKO10052195_A_Sval2
  gRNA
ctccttatggtcaggaaaat

SEQ ID NO: 52196 - DNA, 20 bp, Artificial Sequence
  MKO10052196_A_Sval3
  gRNA
ctgcctatggtcaagacaat

SEQ ID NO: 52197 - DNA, 20 bp, Artificial Sequence
  MKO10052197_A_Sval3
  gRNA
acaagtcactttcactcaac

SEQ ID NO: 52198 - DNA, 20 bp, Artificial Sequence
  MKO10052198_A_Sval3
  gRNA
acctagtaactatctacctc

SEQ ID NO: 52199 - DNA, 20 bp, Artificial Sequence
  MKO10052199_A_Sva
  gRNA
tctgacgaaccactactata

SEQ ID NO: 52200 - DNA, 20 bp, Artificial Sequence
  MKO10052200_A_Sva
  gRNA
taagagtcgccatatagtag

SEQ ID NO: 52201 - DNA, 20 bp, Artificial Sequence
  MKO10052201_A_Sva
  gRNA
gtaccattagcgatttcttc

SEQ ID NO: 52202 - DNA, 20 bp, Artificial Sequence
  MKO10052202_A_Svep1
  gRNA
cgggcgacatcggaccccac

SEQ ID NO: 52203 - DNA, 20 bp, Artificial Sequence
  MKO10052203_A_Svep1
  gRNA
tccgccattggaatagccgt

SEQ ID NO: 52204 - DNA, 20 bp, Artificial Sequence
  MKO10052204_A_Svep1
  gRNA
gacctattgcagcatcgctt

SEQ ID NO: 52205 - DNA, 20 bp, Artificial Sequence
  MKO10052205_A_Svil
  gRNA
cggcagctggccgaaaagta

SEQ ID NO: 52206 - DNA, 20 bp, Artificial Sequence
  MKO10052206_A_Svil
  gRNA
atgccaattcccggcactcc

SEQ ID NO: 52207 - DNA, 20 bp, Artificial Sequence
  MKO10052207_A_Svil
  gRNA
gaccctgcaagccctcatat

SEQ ID NO: 52208 - DNA, 20 bp, Artificial Sequence
  MKO10052208_A_Svip
  gRNA
actctaagtccccctgccgt

SEQ ID NO: 52209 - DNA, 20 bp, Artificial Sequence
  MKO10052209_A_Svip
  gRNA
acatcggggccaccaacggc

SEQ ID NO: 52210 - DNA, 20 bp, Artificial Sequence
  MKO10052210_A_Svip
  gRNA
ctactcaccgggctcgggga

SEQ ID NO: 52211 - DNA, 20 bp, Artificial Sequence
  MKO10052211_A_Svopl
  gRNA
gtggaagcgcccgaagccga

SEQ ID NO: 52212 - DNA, 20 bp, Artificial Sequence
  MKO10052212_A_Svopl
  gRNA
gtctttctgcggacgatggt

SEQ ID NO: 52213 - DNA, 20 bp, Artificial Sequence
  MKO10052213_A_Svopl
  gRNA
ctcctgttatccgatgtgaa

SEQ ID NO: 52214 - DNA, 20 bp, Artificial Sequence
  MKO10052214_A_Svop
  gRNA
ggaaacatctcggaccagta

SEQ ID NO: 52215 - DNA, 20 bp, Artificial Sequence
  MKO10052215_A_Svop
  gRNA
gggcctagaagccatcgagc

SEQ ID NO: 52216 - DNA, 20 bp, Artificial Sequence
  MKO10052216_A_Svop
  gRNA
gtggtgaaattccgacgcac

SEQ ID NO: 52217 - DNA, 20 bp, Artificial Sequence
  MKO10052217_A_Svs1
  gRNA
agacctccccggctttcacg

SEQ ID NO: 52218 - DNA, 20 bp, Artificial Sequence
  MKO10052218_A_Svs1
  gRNA
aagaatcccgccgagttccc

SEQ ID NO: 52219 - DNA, 20 bp, Artificial Sequence
  MKO10052219_A_Svs1
  gRNA
tgggcagagtctgccggaag

SEQ ID NO: 52220 - DNA, 20 bp, Artificial Sequence
  MKO10052220_A_Svs2
  gRNA
gagcgctcacaatcctataa

SEQ ID NO: 52221 - DNA, 20 bp, Artificial Sequence
  MKO10052221_A_Svs2
  gRNA
ttgtccattacgacaaagtg

SEQ ID NO: 52222 - DNA, 20 bp, Artificial Sequence
  MKO10052222_A_Svs2
  gRNA
tcagctgtggttggacaata

SEQ ID NO: 52223 - DNA, 20 bp, Artificial Sequence
  MKO10052223_A_Svs3a
  gRNA
ccagctaaagaccatagggc

SEQ ID NO: 52224 - DNA, 20 bp, Artificial Sequence
  MKO10052224_A_Svs3a
  gRNA
cagattaaggcgtgctttga

SEQ ID NO: 52225 - DNA, 20 bp, Artificial Sequence
  MKO10052225_A_Svs3a
  gRNA
cagctgctttcttctccaga

SEQ ID NO: 52226 - DNA, 20 bp, Artificial Sequence
  MKO10052226_A_Svs3b
  gRNA
cagattaaggcgtgctttgt

SEQ ID NO: 52227 - DNA, 20 bp, Artificial Sequence
  MKO10052227_A_Svs3b
  gRNA
caaactaagcaccatgcata

SEQ ID NO: 52228 - DNA, 20 bp, Artificial Sequence
  MKO10052228_A_Svs3b
  gRNA
cctttctctgctcctccttc

SEQ ID NO: 52229 - DNA, 20 bp, Artificial Sequence
  MKO10052229_A_Svs4
  gRNA
ctcagaagcttcgtcaccga

SEQ ID NO: 52230 - DNA, 20 bp, Artificial Sequence
  MKO10052230_A_Svs4
  gRNA
tgtcagagagagcttctcga

SEQ ID NO: 52231 - DNA, 20 bp, Artificial Sequence
  MKO10052231_A_Svs4
  gRNA
agccattgggaagaaaacta

SEQ ID NO: 52232 - DNA, 20 bp, Artificial Sequence
  MKO10052232_A_Svs5
  gRNA
gaacacgttatttgagtatc

SEQ ID NO: 52233 - DNA, 20 bp, Artificial Sequence
  MKO10052233_A_Svs5
  gRNA
agcagcgaaatgagtagttc

SEQ ID NO: 52234 - DNA, 20 bp, Artificial Sequence
  MKO10052234_A_Svs5
  gRNA
ccttacattgctcctcgttc

SEQ ID NO: 52235 - DNA, 20 bp, Artificial Sequence
  MKO10052235_A_Svs6
  gRNA
agatagagcggtcttacttg

SEQ ID NO: 52236 - DNA, 20 bp, Artificial Sequence
  MKO10052236_A_Svs6
  gRNA
ccttacaatgctccttgttc

SEQ ID NO: 52237 - DNA, 20 bp, Artificial Sequence
  MKO10052237_A_Svs6
  gRNA
tttcctcataaacctcctca

SEQ ID NO: 52238 - DNA, 20 bp, Artificial Sequence
  MKO10052238_A_Swap70
  gRNA
cagatcctcgctcacatagt

SEQ ID NO: 52239 - DNA, 20 bp, Artificial Sequence
  MKO10052239_A_Swap70
  gRNA
ctcattgaagacttcgttaa

SEQ ID NO: 52240 - DNA, 20 bp, Artificial Sequence
  MKO10052240_A_Swap70
  gRNA
tcttctggcacaataattag

SEQ ID NO: 52241 - DNA, 20 bp, Artificial Sequence
  MKO10052241_A_Swi5
  gRNA
tgagaataacgatgtcagcg

SEQ ID NO: 52242 - DNA, 20 bp, Artificial Sequence
  MKO10052242_A_Swi5
  gRNA
gaagcatgacatgctggaca

SEQ ID NO: 52243 - DNA, 20 bp, Artificial Sequence
  MKO10052243_A_Swi5
  gRNA
tttctttcagctgtgactcg

SEQ ID NO: 52244 - DNA, 20 bp, Artificial Sequence
  MKO10052244_A_Swsap1
  gRNA
ccgtcctcttcgtgacgcga

SEQ ID NO: 52245 - DNA, 20 bp, Artificial Sequence
  MKO10052245_A_Swsap1
  gRNA
cgcttaagtaatggcagatg

SEQ ID NO: 52246 - DNA, 20 bp, Artificial Sequence
  MKO10052246_A_Swsap1
  gRNA
ccttcgcgtcacgaagagga

SEQ ID NO: 52247 - DNA, 20 bp, Artificial Sequence
  MKO10052247_A_Swt1
  gRNA
aacgagtagttccgattcta

SEQ ID NO: 52248 - DNA, 20 bp, Artificial Sequence
  MKO10052248_A_Swt1
  gRNA
tatttaaatatgataccgct

SEQ ID NO: 52249 - DNA, 20 bp, Artificial Sequence
  MKO10052249_A_Swt1
  gRNA
ggttctactagttcagaaca

SEQ ID NO: 52250 - DNA, 20 bp, Artificial Sequence
  MKO10052250_A_Syap1
  gRNA
tcagacaatcaagaaatccg

SEQ ID NO: 52251 - DNA, 20 bp, Artificial Sequence
  MKO10052251_A_Syap1
  gRNA
aagttaaactgcacaccagc

SEQ ID NO: 52252 - DNA, 20 bp, Artificial Sequence
  MKO10052252_A_Syap1
  gRNA
aatagatgatatccttgaca

SEQ ID NO: 52253 - DNA, 20 bp, Artificial Sequence
  MKO10052253_A_Sybu
  gRNA
tcttcacaggcgataccgac

SEQ ID NO: 52254 - DNA, 20 bp, Artificial Sequence
  MKO10052254_A_Sybu
  gRNA
ctgagcgccgactccatgag

SEQ ID NO: 52255 - DNA, 20 bp, Artificial Sequence
  MKO10052255_A_Sybu
  gRNA
gctccattgctccgcccatg

SEQ ID NO: 52256 - DNA, 20 bp, Artificial Sequence
  MKO10052256_A_Syce1l
  gRNA
ggccgcatctctgaatacga

SEQ ID NO: 52257 - DNA, 20 bp, Artificial Sequence
  MKO10052257_A_Syce1l
  gRNA
gcctttgatggcggagtggc

SEQ ID NO: 52258 - DNA, 20 bp, Artificial Sequence
  MKO10052258_A_Syce1l
  gRNA
cttgctgcagctcattaatg

SEQ ID NO: 52259 - DNA, 20 bp, Artificial Sequence
  MKO10052259_A_Syce1
  gRNA
ttaatcaggacctcaatccg

SEQ ID NO: 52260 - DNA, 20 bp, Artificial Sequence
  MKO10052260_A_Syce1
  gRNA
cctgattaaccgtattaatg

SEQ ID NO: 52261 - DNA, 20 bp, Artificial Sequence
  MKO10052261_A_Syce1
  gRNA
tgaagagaaagtacgtctga

SEQ ID NO: 52262 - DNA, 20 bp, Artificial Sequence
  MKO10052262_A_Syce2
  gRNA
aaagacggaatggagcgcca

SEQ ID NO: 52263 - DNA, 20 bp, Artificial Sequence
  MKO10052263_A_Syce2
  gRNA
tctccgctctccacaatcgc

SEQ ID NO: 52264 - DNA, 20 bp, Artificial Sequence
  MKO10052264_A_Syce2
  gRNA
gcaggtggccgcgcctcccg

SEQ ID NO: 52265 - DNA, 20 bp, Artificial Sequence
  MKO10052265_A_Syce3
  gRNA
ggcgtcttctagccggcgca

SEQ ID NO: 52266 - DNA, 20 bp, Artificial Sequence
  MKO10052266_A_Syce3
  gRNA
tagatggctgattccgatcc

SEQ ID NO: 52267 - DNA, 20 bp, Artificial Sequence
  MKO10052267_A_Syce3
  gRNA
cactagcagagtccatgcgc

SEQ ID NO: 52268 - DNA, 20 bp, Artificial Sequence
  MKO10052268_A_Sycn
  gRNA
cgcctggaagagtaccgcaa

SEQ ID NO: 52269 - DNA, 20 bp, Artificial Sequence
  MKO10052269_A_Sycn
  gRNA
gtctaacactgcatcgtctc

SEQ ID NO: 52270 - DNA, 20 bp, Artificial Sequence
  MKO10052270_A_Sycn
  gRNA
cgggcaccgggcaattgcca

SEQ ID NO: 52271 - DNA, 20 bp, Artificial Sequence
  MKO10052271_A_Sycp1
  gRNA
cttactaacctgttcgagca

SEQ ID NO: 52272 - DNA, 20 bp, Artificial Sequence
  MKO10052272_A_Sycp1
  gRNA
agcccagcgaaaagccattc

SEQ ID NO: 52273 - DNA, 20 bp, Artificial Sequence
  MKO10052273_A_Sycp1
  gRNA
ttatacctgaagttcctgaa

SEQ ID NO: 52274 - DNA, 20 bp, Artificial Sequence
  MKO10052274_A_Sycp2
  gRNA
caaacaattcctccgcaagt

SEQ ID NO: 52275 - DNA, 20 bp, Artificial Sequence
  MKO10052275_A_Sycp2
  gRNA
atttgtaaaagtgccaacaa

SEQ ID NO: 52276 - DNA, 20 bp, Artificial Sequence
  MKO10052276_A_Sycp2
  gRNA
tcaagcatcttgatatctat

SEQ ID NO: 52277 - DNA, 20 bp, Artificial Sequence
  MKO10052277_A_Sycp3
  gRNA
gctgggataattgaagatgt

SEQ ID NO: 52278 - DNA, 20 bp, Artificial Sequence
  MKO10052278_A_Sycp3
  gRNA
gaaatctgggaagccacctt

SEQ ID NO: 52279 - DNA, 20 bp, Artificial Sequence
  MKO10052279_A_Sycp3
  gRNA
gctccagtaattgataaaca

SEQ ID NO: 52280 - DNA, 20 bp, Artificial Sequence
  MKO10052280_A_Syde1
  gRNA
ttacgccaagctaacattgt

SEQ ID NO: 52281 - DNA, 20 bp, Artificial Sequence
  MKO10052281_A_Syde1
  gRNA
aagtctggtccgcttcgaag

SEQ ID NO: 52282 - DNA, 20 bp, Artificial Sequence
  MKO10052282_A_Syde1
  gRNA
agcctaagaagtactcgcac

SEQ ID NO: 52283 - DNA, 20 bp, Artificial Sequence
  MKO10052283_A_Syde2
  gRNA
cgcatcattgtcctcgctaa

SEQ ID NO: 52284 - DNA, 20 bp, Artificial Sequence
  MKO10052284_A_Syde2
  gRNA
gtaccggcttatcacgttcc

SEQ ID NO: 52285 - DNA, 20 bp, Artificial Sequence
  MKO10052285_A_Syde2
  gRNA
ctccgaacatcaccgcttcg

SEQ ID NO: 52286 - DNA, 20 bp, Artificial Sequence
  MKO10052286_A_Syf2
  gRNA
gcttggtcagccggtgatac

SEQ ID NO: 52287 - DNA, 20 bp, Artificial Sequence
  MKO10052287_A_Syf2
  gRNA
tgatcgcaggtccccgcgga

SEQ ID NO: 52288 - DNA, 20 bp, Artificial Sequence
  MKO10052288_A_Syf2
  gRNA
agctcgtaagctgaatcacc

SEQ ID NO: 52289 - DNA, 20 bp, Artificial Sequence
  MKO10052289_A_Syk
  gRNA
tattgcactaccgcattgac

SEQ ID NO: 52290 - DNA, 20 bp, Artificial Sequence
  MKO10052290_A_Syk
  gRNA
aagcccaaatgcccatcccg

SEQ ID NO: 52291 - DNA, 20 bp, Artificial Sequence
  MKO10052291_A_Syk
  gRNA
ataggagccgctgttgtctc

SEQ ID NO: 52292 - DNA, 20 bp, Artificial Sequence
  MKO10052292_A_Sympk
  gRNA
catcccgcaatagcatgttg

SEQ ID NO: 52293 - DNA, 20 bp, Artificial Sequence
  MKO10052293_A_Sympk
  gRNA
gaagtgcgcaagtttgtcat

SEQ ID NO: 52294 - DNA, 20 bp, Artificial Sequence
  MKO10052294_A_Sympk
  gRNA
ccaacctcaacatgctattg

SEQ ID NO: 52295 - DNA, 20 bp, Artificial Sequence
  MKO10052295_A_Syn1
  gRNA
cttctcgtcgctgtctaacg

SEQ ID NO: 52296 - DNA, 20 bp, Artificial Sequence
  MKO10052296_A_Syn1
  gRNA
ccatgaagttgctgtccgac

SEQ ID NO: 52297 - DNA, 20 bp, Artificial Sequence
  MKO10052297_A_Syn1
  gRNA
taatggagactaccgaagtt

SEQ ID NO: 52298 - DNA, 20 bp, Artificial Sequence
  MKO10052298_A_Syn2
  gRNA
ccccggtgccgctacggcgt

SEQ ID NO: 52299 - DNA, 20 bp, Artificial Sequence
  MKO10052299_A_Syn2
  gRNA
cttcagctcgctgtcgcaag

SEQ ID NO: 52300 - DNA, 20 bp, Artificial Sequence
  MKO10052300_A_Syn2
  gRNA
ggtacttcggaatggcacaa

SEQ ID NO: 52301 - DNA, 20 bp, Artificial Sequence
  MKO10052301_A_Syn3
  gRNA
atcgataaccaacaagatcc

SEQ ID NO: 52302 - DNA, 20 bp, Artificial Sequence
  MKO10052302_A_Syn3
  gRNA
taccacgtacctgttccact

SEQ ID NO: 52303 - DNA, 20 bp, Artificial Sequence
  MKO10052303_A_Syn3
  gRNA
tggcgacattgagatccgag

SEQ ID NO: 52304 - DNA, 20 bp, Artificial Sequence
  MKO10052304_A_Syna
  gRNA
tcgaattgtccggctcgaat

SEQ ID NO: 52305 - DNA, 20 bp, Artificial Sequence
  MKO10052305_A_Syna
  gRNA
ctatgcattcgccccattaa

SEQ ID NO: 52306 - DNA, 20 bp, Artificial Sequence
  MKO10052306_A_Syna
  gRNA
tacccgcgatgcctaacccc

SEQ ID NO: 52307 - DNA, 20 bp, Artificial Sequence
  MKO10052307_A_Synb
  gRNA
aaagcaccatgacaggcttt

SEQ ID NO: 52308 - DNA, 20 bp, Artificial Sequence
  MKO10052308_A_Synb
  gRNA
aatctgcccaacgccctctc

SEQ ID NO: 52309 - DNA, 20 bp, Artificial Sequence
  MKO10052309_A_Synb
  gRNA
cgagttcagatgctcgttct

SEQ ID NO: 52310 - DNA, 20 bp, Artificial Sequence
  MKO10052310_A_Syncrip
  gRNA
cagtgatctctctcatgttc

SEQ ID NO: 52311 - DNA, 20 bp, Artificial Sequence
  MKO10052311_A_Syncrip
  gRNA
tttacctcagtgccaacaga

SEQ ID NO: 52312 - DNA, 20 bp, Artificial Sequence
  MKO10052312_A_Syncrip
  gRNA
accttaatctttgcctcatc

SEQ ID NO: 52313 - DNA, 20 bp, Artificial Sequence
  MKO10052313_A_Sync
  gRNA
cactgtttatcgacgaatcg

SEQ ID NO: 52314 - DNA, 20 bp, Artificial Sequence
  MKO10052314_A_Sync
  gRNA
tcaaccgattcccaacaccg

SEQ ID NO: 52315 - DNA, 20 bp, Artificial Sequence
  MKO10052315_A_Sync
  gRNA
ggagtcgaggcacaatcccc

SEQ ID NO: 52316 - DNA, 20 bp, Artificial Sequence
  MKO10052316_A_Syndig1l
  gRNA
tcctctgcaggtcccgctaa

SEQ ID NO: 52317 - DNA, 20 bp, Artificial Sequence
  MKO10052317_A_Syndig1l
  gRNA
caactcctcttgaaccccgt

SEQ ID NO: 52318 - DNA, 20 bp, Artificial Sequence
  MKO10052318_A_Syndig1l
  gRNA
gtcttcacactcactctcgc

SEQ ID NO: 52319 - DNA, 20 bp, Artificial Sequence
  MKO10052319_A_Syndig1
  gRNA
ctagtggccagtgcggcacc

SEQ ID NO: 52320 - DNA, 20 bp, Artificial Sequence
  MKO10052320_A_Syndig1
  gRNA
gcagtcctgtccattactat

SEQ ID NO: 52321 - DNA, 20 bp, Artificial Sequence
  MKO10052321_A_Syndig1
  gRNA
gatgccagttccaatagtaa

SEQ ID NO: 52322 - DNA, 20 bp, Artificial Sequence
  MKO10052322_A_Syne1
  gRNA
cagcatgaatacgcttcacc

SEQ ID NO: 52323 - DNA, 20 bp, Artificial Sequence
  MKO10052323_A_Syne1
  gRNA
aaccggtgatcctctgtaca

SEQ ID NO: 52324 - DNA, 20 bp, Artificial Sequence
  MKO10052324_A_Syne1
  gRNA
ggtgaagcgtattcatgctg

SEQ ID NO: 52325 - DNA, 20 bp, Artificial Sequence
  MKO10052325_A_Syne2
  gRNA
gtattagatcctttatcccg

SEQ ID NO: 52326 - DNA, 20 bp, Artificial Sequence
  MKO10052326_A_Syne2
  gRNA
ttaccaactgctgtcccgag

SEQ ID NO: 52327 - DNA, 20 bp, Artificial Sequence
  MKO10052327_A_Syne2
  gRNA
ccattatccttggcctgatc

SEQ ID NO: 52328 - DNA, 20 bp, Artificial Sequence
  MKO10052328_A_Syne3
  gRNA
acttcgtctctctacgctgc

SEQ ID NO: 52329 - DNA, 20 bp, Artificial Sequence
  MKO10052329_A_Syne3
  gRNA
catcccacagtcgcatcgag

SEQ ID NO: 52330 - DNA, 20 bp, Artificial Sequence
  MKO10052330_A_Syne3
  gRNA
ggctgagtacgatgccgtga

SEQ ID NO: 52331 - DNA, 20 bp, Artificial Sequence
  MKO10052331_A_Syne4
  gRNA
caatgcatccacgcgctcag

SEQ ID NO: 52332 - DNA, 20 bp, Artificial Sequence
  MKO10052332_A_Syne4
  gRNA
aggccttgggtcttggacgc

SEQ ID NO: 52333 - DNA, 20 bp, Artificial Sequence
  MKO10052333_A_Syne4
  gRNA
gcatctggacaatcctgttg

SEQ ID NO: 52334 - DNA, 20 bp, Artificial Sequence
  MKO10052334_A_Syngap1
  gRNA
acccccttctgatccgcgac

SEQ ID NO: 52335 - DNA, 20 bp, Artificial Sequence
  MKO10052335_A_Syngap1
  gRNA
cattccccgtacgatcgtcc

SEQ ID NO: 52336 - DNA, 20 bp, Artificial Sequence
  MKO10052336_A_Syngap1
  gRNA
ttccagccaggacgatcgta

SEQ ID NO: 52337 - DNA, 20 bp, Artificial Sequence
  MKO10052337_A_Syngr1
  gRNA
cttcggctctatcgtgaacg

SEQ ID NO: 52338 - DNA, 20 bp, Artificial Sequence
  MKO10052338_A_Syngr1
  gRNA
ttacccaagacacgacgcgc

SEQ ID NO: 52339 - DNA, 20 bp, Artificial Sequence
  MKO10052339_A_Syngr1
  gRNA
gtaggggtcgaaggcgcccc

SEQ ID NO: 52340 - DNA, 20 bp, Artificial Sequence
  MKO10052340_A_Syngr2
  gRNA
tgccgctacggcagcgccat

SEQ ID NO: 52341 - DNA, 20 bp, Artificial Sequence
  MKO10052341_A_Syngr2
  gRNA
gcctatggcgcggccaacgc

SEQ ID NO: 52342 - DNA, 20 bp, Artificial Sequence
  MKO10052342_A_Syngr2
  gRNA
gtagccctcgccgaagatgc

SEQ ID NO: 52343 - DNA, 20 bp, Artificial Sequence
  MKO10052343_A_Syngr3
  gRNA
gttcggaccgattgtcaacg

SEQ ID NO: 52344 - DNA, 20 bp, Artificial Sequence
  MKO10052344_A_Syngr3
  gRNA
acgtagccctcgttgacaat

SEQ ID NO: 52345 - DNA, 20 bp, Artificial Sequence
  MKO10052345_A_Syngr3
  gRNA
ccaggtggcgctcaccgtga

SEQ ID NO: 52346 - DNA, 20 bp, Artificial Sequence
  MKO10052346_A_Syngr4
  gRNA
agtcccctacaagcgctccc

SEQ ID NO: 52347 - DNA, 20 bp, Artificial Sequence
  MKO10052347_A_Syngr4
  gRNA
tcttaaagcgggtgcccacg

SEQ ID NO: 52348 - DNA, 20 bp, Artificial Sequence
  MKO10052348_A_Syngr4
  gRNA
cccctacatgacgactccaa

SEQ ID NO: 52349 - DNA, 20 bp, Artificial Sequence
  MKO10052349_A_Synj1
  gRNA
gtccggggaaccaacgatga

SEQ ID NO: 52350 - DNA, 20 bp, Artificial Sequence
  MKO10052350_A_Synj1
  gRNA
acggtgggggatccaatttg

SEQ ID NO: 52351 - DNA, 20 bp, Artificial Sequence
  MKO10052351_A_Synj1
  gRNA
aagagcacacaaccgacaat

SEQ ID NO: 52352 - DNA, 20 bp, Artificial Sequence
  MKO10052352_A_Synj2bp
  gRNA
ctacgtcagccgtatcaaag

SEQ ID NO: 52353 - DNA, 20 bp, Artificial Sequence
  MKO10052353_A_Synj2bp
  gRNA
cagtatgtctccaacgacag

SEQ ID NO: 52354 - DNA, 20 bp, Artificial Sequence
  MKO10052354_A_Synj2bp
  gRNA
ctaccctgtgctgtactctc

SEQ ID NO: 52355 - DNA, 20 bp, Artificial Sequence
  MKO10052355_A_Synj2
  gRNA
cgcatcagctgtgaacgcgc

SEQ ID NO: 52356 - DNA, 20 bp, Artificial Sequence
  MKO10052356_A_Synj2
  gRNA
acccgtggtgtgaacgatga

SEQ ID NO: 52357 - DNA, 20 bp, Artificial Sequence
  MKO10052357_A_Synj2
  gRNA
tgtgctgcagacgatttaca

SEQ ID NO: 52358 - DNA, 20 bp, Artificial Sequence
  MKO10052358_A_Synm
  gRNA
gggctcgtagatctcgcact

SEQ ID NO: 52359 - DNA, 20 bp, Artificial Sequence
  MKO10052359_A_Synm
  gRNA
cagcgcgtcgcgctcgccct

SEQ ID NO: 52360 - DNA, 20 bp, Artificial Sequence
  MKO10052360_A_Synm
  gRNA
gctcacggcgtgtctcaccg

SEQ ID NO: 52361 - DNA, 20 bp, Artificial Sequence
  MKO10052361_A_Synpo2l
  gRNA
gatgcgctgctcccgaacgc

SEQ ID NO: 52362 - DNA, 20 bp, Artificial Sequence
  MKO10052362_A_Synpo2l
  gRNA
actaagaaactctgcgcgcc

SEQ ID NO: 52363 - DNA, 20 bp, Artificial Sequence
  MKO10052363_A_Synpo2l
  gRNA
gacgccctgaggcgtcgatg

SEQ ID NO: 52364 - DNA, 20 bp, Artificial Sequence
  MKO10052364_A_Synpo2
  gRNA
gacttgtcacactccgcgtt

SEQ ID NO: 52365 - DNA, 20 bp, Artificial Sequence
  MKO10052365_A_Synpo2
  gRNA
gcgtcatccactagaccgag

SEQ ID NO: 52366 - DNA, 20 bp, Artificial Sequence
  MKO10052366_A_Synpo2
  gRNA
acttacgagcatggcgtgca

SEQ ID NO: 52367 - DNA, 20 bp, Artificial Sequence
  MKO10052367_A_Synpo
  gRNA
cgacgtgtctctcgactccg

SEQ ID NO: 52368 - DNA, 20 bp, Artificial Sequence
  MKO10052368_A_Synpo
  gRNA
gacggagcgctcgctccacg

SEQ ID NO: 52369 - DNA, 20 bp, Artificial Sequence
  MKO10052369_A_Synpo
  gRNA
gaagaatctatggcacgccg

SEQ ID NO: 52370 - DNA, 20 bp, Artificial Sequence
  MKO10052370_A_Synpr
  gRNA
tagcgtttgcgtacccattc

SEQ ID NO: 52371 - DNA, 20 bp, Artificial Sequence
  MKO10052371_A_Synpr
  gRNA
tgtacacgaccgtggcagcc

SEQ ID NO: 52372 - DNA, 20 bp, Artificial Sequence
  MKO10052372_A_Synpr
  gRNA
acaagtaccgcgaaaacaac

SEQ ID NO: 52373 - DNA, 20 bp, Artificial Sequence
  MKO10052373_A_Synrg
  gRNA
gcaagtacctgcattgcaat

SEQ ID NO: 52374 - DNA, 20 bp, Artificial Sequence
  MKO10052374_A_Synrg
  gRNA
ggtctcattccgcctgcaac

SEQ ID NO: 52375 - DNA, 20 bp, Artificial Sequence
  MKO10052375_A_Synrg
  gRNA
ttcttgagcatgcgtcctgc

SEQ ID NO: 52376 - DNA, 20 bp, Artificial Sequence
  MKO10052376_A_Sypl2
  gRNA
ctccccgctgtaagagccgc

SEQ ID NO: 52377 - DNA, 20 bp, Artificial Sequence
  MKO10052377_A_Sypl2
  gRNA
agagaacaaacgcttcccgt

SEQ ID NO: 52378 - DNA, 20 bp, Artificial Sequence
  MKO10052378_A_Sypl2
  gRNA
gtcctgcggctcttacagcg

SEQ ID NO: 52379 - DNA, 20 bp, Artificial Sequence
  MKO10052379_A_Sypl
  gRNA
cacttaccacggatacattc

SEQ ID NO: 52380 - DNA, 20 bp, Artificial Sequence
  MKO10052380_A_Sypl
  gRNA
taacatgacactcctgattc

SEQ ID NO: 52381 - DNA, 20 bp, Artificial Sequence
  MKO10052381_A_Sypl
  gRNA
gatcaacctcaacccgctca

SEQ ID NO: 52382 - DNA, 20 bp, Artificial Sequence
  MKO10052382_A_Syp
  gRNA
tcgaatttgagtacccattc

SEQ ID NO: 52383 - DNA, 20 bp, Artificial Sequence
  MKO10052383_A_Syp
  gRNA
agtgccccctttaacgcagg

SEQ ID NO: 52384 - DNA, 20 bp, Artificial Sequence
  MKO10052384_A_Syp
  gRNA
gtagctgccgcacgtagcaa

SEQ ID NO: 52385 - DNA, 20 bp, Artificial Sequence
  MKO10052385_A_Sys1
  gRNA
gcatgagtacgatctgcgac

SEQ ID NO: 52386 - DNA, 20 bp, Artificial Sequence
  MKO10052386_A_Sys1
  gRNA
ttacctccgcgtcgaacatc

SEQ ID NO: 52387 - DNA, 20 bp, Artificial Sequence
  MKO10052387_A_Sys1
  gRNA
ggagtacctgtgcatgcgga

SEQ ID NO: 52388 - DNA, 20 bp, Artificial Sequence
  MKO10052388_A_Syt10
  gRNA
aaacgagaacgagcatcggg

SEQ ID NO: 52389 - DNA, 20 bp, Artificial Sequence
  MKO10052389_A_Syt10
  gRNA
ttaaagtcttccggtgcacg

SEQ ID NO: 52390 - DNA, 20 bp, Artificial Sequence
  MKO10052390_A_Syt10
  gRNA
ccgagcctacgtcttcatcc

SEQ ID NO: 52391 - DNA, 20 bp, Artificial Sequence
  MKO10052391_A_Syt11
  gRNA
ttcactcgatgccgcttgtc

SEQ ID NO: 52392 - DNA, 20 bp, Artificial Sequence
  MKO10052392_A_Syt11
  gRNA
ccgatgaggccagccgctac

SEQ ID NO: 52393 - DNA, 20 bp, Artificial Sequence
  MKO10052393_A_Syt11
  gRNA
cgatcgcactactaagaatg

SEQ ID NO: 52394 - DNA, 20 bp, Artificial Sequence
  MKO10052394_A_Syt12
  gRNA
atgcccacgatctgttcgtc

SEQ ID NO: 52395 - DNA, 20 bp, Artificial Sequence
  MKO10052395_A_Syt12
  gRNA
cgttccctaattacgactac

SEQ ID NO: 52396 - DNA, 20 bp, Artificial Sequence
  MKO10052396_A_Syt12
  gRNA
gtccccgagtagtggtccgc

SEQ ID NO: 52397 - DNA, 20 bp, Artificial Sequence
  MKO10052397_A_Syt13
  gRNA
tggtccccggccagccgtga

SEQ ID NO: 52398 - DNA, 20 bp, Artificial Sequence
  MKO10052398_A_Syt13
  gRNA
caactacgcagactacacct

SEQ ID NO: 52399 - DNA, 20 bp, Artificial Sequence
  MKO10052399_A_Syt13
  gRNA
agaagcggtcacaggtgcgc

SEQ ID NO: 52400 - DNA, 20 bp, Artificial Sequence
  MKO10052400_A_Syt14
  gRNA
acccgtcgtactctgcagac

SEQ ID NO: 52401 - DNA, 20 bp, Artificial Sequence
  MKO10052401_A_Syt14
  gRNA
cccctgtctgcagagtacga

SEQ ID NO: 52402 - DNA, 20 bp, Artificial Sequence
  MKO10052402_A_Syt14
  gRNA
ccgccttaccaagacgacag

SEQ ID NO: 52403 - DNA, 20 bp, Artificial Sequence
  MKO10052403_A_Syt15
  gRNA
tggaggaagcgccgttcatc

SEQ ID NO: 52404 - DNA, 20 bp, Artificial Sequence
  MKO10052404_A_Syt15
  gRNA
ttgcgccaccttcacctatg

SEQ ID NO: 52405 - DNA, 20 bp, Artificial Sequence
  MKO10052405_A_Syt15
  gRNA
cttctcaccaaggtcgagac

SEQ ID NO: 52406 - DNA, 20 bp, Artificial Sequence
  MKO10052406_A_Syt16
  gRNA
catctgcacaaggacgaccg

SEQ ID NO: 52407 - DNA, 20 bp, Artificial Sequence
  MKO10052407_A_Syt16
  gRNA
catccatacccggagcaacg

SEQ ID NO: 52408 - DNA, 20 bp, Artificial Sequence
  MKO10052408_A_Syt16
  gRNA
atgggcatggtccgaagcct

SEQ ID NO: 52409 - DNA, 20 bp, Artificial Sequence
  MKO10052409_A_Syt17
  gRNA
agtcatcgggcgtgtaggtc

SEQ ID NO: 52410 - DNA, 20 bp, Artificial Sequence
  MKO10052410_A_Syt17
  gRNA
cctcgatcaccctcacggtg

SEQ ID NO: 52411 - DNA, 20 bp, Artificial Sequence
  MKO10052411_A_Syt17
  gRNA
aattaacccacctcgttcag

SEQ ID NO: 52412 - DNA, 20 bp, Artificial Sequence
  MKO10052412_A_Syt1
  gRNA
cgcgccactcctcggtgacg

SEQ ID NO: 52413 - DNA, 20 bp, Artificial Sequence
  MKO10052413_A_Syt1
  gRNA
gactagaaggaccgcaacta

SEQ ID NO: 52414 - DNA, 20 bp, Artificial Sequence
  MKO10052414_A_Syt1
  gRNA
ttggccacgtcaccgaggag

SEQ ID NO: 52415 - DNA, 20 bp, Artificial Sequence
  MKO10052415_A_Syt2
  gRNA
ttggccagcccatcgaggaa

SEQ ID NO: 52416 - DNA, 20 bp, Artificial Sequence
  MKO10052416_A_Syt2
  gRNA
tgtgtcggcagtgcccccct

SEQ ID NO: 52417 - DNA, 20 bp, Artificial Sequence
  MKO10052417_A_Syt2
  gRNA
ctctccattcctcgatgggc

SEQ ID NO: 52418 - DNA, 20 bp, Artificial Sequence
  MKO10052418_A_Syt3
  gRNA
gtaggatccgcaccacgagc

SEQ ID NO: 52419 - DNA, 20 bp, Artificial Sequence
  MKO10052419_A_Syt3
  gRNA
actggacccggtggtcggcg

SEQ ID NO: 52420 - DNA, 20 bp, Artificial Sequence
  MKO10052420_A_Syt3
  gRNA
ctgcgcaaagacttagcccc

SEQ ID NO: 52421 - DNA, 20 bp, Artificial Sequence
  MKO10052421_A_Syt4
  gRNA
cttgctcaccgaattccacg

SEQ ID NO: 52422 - DNA, 20 bp, Artificial Sequence
  MKO10052422_A_Syt4
  gRNA
gtacaggttcactttgacgt

SEQ ID NO: 52423 - DNA, 20 bp, Artificial Sequence
  MKO10052423_A_Syt4
  gRNA
ggtcatggattgctcgtcca

SEQ ID NO: 52424 - DNA, 20 bp, Artificial Sequence
  MKO10052424_A_Syt5
  gRNA
cctccccgatggcatcgttg

SEQ ID NO: 52425 - DNA, 20 bp, Artificial Sequence
  MKO10052425_A_Syt5
  gRNA
ttctcccgcaacgatgccat

SEQ ID NO: 52426 - DNA, 20 bp, Artificial Sequence
  MKO10052426_A_Syt5
  gRNA
tccgtctccgacagcgcttc

SEQ ID NO: 52427 - DNA, 20 bp, Artificial Sequence
  MKO10052427_A_Syt6
  gRNA
ccacttccccgtgccctacg

SEQ ID NO: 52428 - DNA, 20 bp, Artificial Sequence
  MKO10052428_A_Syt6
  gRNA
tattgtgtgtggcgtggccc

SEQ ID NO: 52429 - DNA, 20 bp, Artificial Sequence
  MKO10052429_A_Syt6
  gRNA
cttgatacggccaatactgg

SEQ ID NO: 52430 - DNA, 20 bp, Artificial Sequence
  MKO10052430_A_Syt7
  gRNA
cgatgagtctgaccgcagaa

SEQ ID NO: 52431 - DNA, 20 bp, Artificial Sequence
  MKO10052431_A_Syt7
  gRNA
ccactggtgtcagcgcaaac

SEQ ID NO: 52432 - DNA, 20 bp, Artificial Sequence
  MKO10052432_A_Syt7
  gRNA
gacggtgggcacgccagact

SEQ ID NO: 52433 - DNA, 20 bp, Artificial Sequence
  MKO10052433_A_Syt8
  gRNA
tgctattacgggcactgccc

SEQ ID NO: 52434 - DNA, 20 bp, Artificial Sequence
  MKO10052434_A_Syt8
  gRNA
gttgaaggtccacggtgccc

SEQ ID NO: 52435 - DNA, 20 bp, Artificial Sequence
  MKO10052435_A_Syt8
  gRNA
catgagacaaaggtgcaccg

SEQ ID NO: 52436 - DNA, 20 bp, Artificial Sequence
  MKO10052436_A_Syt9
  gRNA
acagctcaacctgtcgaacc

SEQ ID NO: 52437 - DNA, 20 bp, Artificial Sequence
  MKO10052437_A_Syt9
  gRNA
tattaaagtccgggttcgac

SEQ ID NO: 52438 - DNA, 20 bp, Artificial Sequence
  MKO10052438_A_Syt9
  gRNA
gtggatctggtcgatgctct

SEQ ID NO: 52439 - DNA, 20 bp, Artificial Sequence
  MKO10052439_A_Sytl1
  gRNA
tccaagaagcgcgttcccag

SEQ ID NO: 52440 - DNA, 20 bp, Artificial Sequence
  MKO10052440_A_Sytl1
  gRNA
gcctctgggaacgcgcttct

SEQ ID NO: 52441 - DNA, 20 bp, Artificial Sequence
  MKO10052441_A_Sytl1
  gRNA
ctcaccatatgtaccctcaa

SEQ ID NO: 52442 - DNA, 20 bp, Artificial Sequence
  MKO10052442_A_Sytl2
  gRNA
gaagatgacacagatcccgc

SEQ ID NO: 52443 - DNA, 20 bp, Artificial Sequence
  MKO10052443_A_Sytl2
  gRNA
ggagcaagacgccatcttaa

SEQ ID NO: 52444 - DNA, 20 bp, Artificial Sequence
  MKO10052444_A_Sytl2
  gRNA
cagtgtgattgatatgtccc

SEQ ID NO: 52445 - DNA, 20 bp, Artificial Sequence
  MKO10052445_A_Sytl3
  gRNA
ttcaaggtttcctcgaaagt

SEQ ID NO: 52446 - DNA, 20 bp, Artificial Sequence
  MKO10052446_A_Sytl3
  gRNA
acgagtccaaaagaacacgc

SEQ ID NO: 52447 - DNA, 20 bp, Artificial Sequence
  MKO10052447_A_Sytl3
  gRNA
ggtgtttgggatcttcttga

SEQ ID NO: 52448 - DNA, 20 bp, Artificial Sequence
  MKO10052448_A_Sytl4
  gRNA
aatcgctttgattaccgaac

SEQ ID NO: 52449 - DNA, 20 bp, Artificial Sequence
  MKO10052449_A_Sytl4
  gRNA
aggttcgatcactatagtgt

SEQ ID NO: 52450 - DNA, 20 bp, Artificial Sequence
  MKO10052450_A_Sytl4
  gRNA
gtgccgagaatgccgagttc

SEQ ID NO: 52451 - DNA, 20 bp, Artificial Sequence
  MKO10052451_A_Sytl5
  gRNA
tgcagtgagtgtcgagtcac

SEQ ID NO: 52452 - DNA, 20 bp, Artificial Sequence
  MKO10052452_A_Sytl5
  gRNA
gatctccccggtcaaagatg

SEQ ID NO: 52453 - DNA, 20 bp, Artificial Sequence
  MKO10052453_A_Sytl5
  gRNA
aggcagctaaggattataag

SEQ ID NO: 52454 - DNA, 20 bp, Artificial Sequence
  MKO10052454_A_Syvn1
  gRNA
gtaaagagcgccacaaagcg

SEQ ID NO: 52455 - DNA, 20 bp, Artificial Sequence
  MKO10052455_A_Syvn1
  gRNA
acttacagacgatgcggcag

SEQ ID NO: 52456 - DNA, 20 bp, Artificial Sequence
  MKO10052456_A_Syvn1
  gRNA
agtctcagtaacagcgtacc

SEQ ID NO: 52457 - DNA, 20 bp, Artificial Sequence
  MKO10052457_A_Szrd1
  gRNA
ttgaagccttgtgacccgtc

SEQ ID NO: 52458 - DNA, 20 bp, Artificial Sequence
  MKO10052458_A_Szrd1
  gRNA
gctgctgaccacaccgttgc

SEQ ID NO: 52459 - DNA, 20 bp, Artificial Sequence
  MKO10052459_A_Szrd1
  gRNA
ctcttgaggatgcggatctg

SEQ ID NO: 52460 - DNA, 20 bp, Artificial Sequence
  MKO10052460_A_Szt2
  gRNA
ttgtcacgtagatctccggc

SEQ ID NO: 52461 - DNA, 20 bp, Artificial Sequence
  MKO10052461_A_Szt2
  gRNA
cttcggccgtttcgagtgcc

SEQ ID NO: 52462 - DNA, 20 bp, Artificial Sequence
  MKO10052462_A_Szt2
  gRNA
aatctcccgaaatgttcgcc

SEQ ID NO: 52463 - DNA, 20 bp, Artificial Sequence
  MKO10052463_A_T2
  gRNA
gaagaacatgagcgacgacg

SEQ ID NO: 52464 - DNA, 20 bp, Artificial Sequence
  MKO10052464_A_T2
  gRNA
tgcagtcgcagcccgaagct

SEQ ID NO: 52465 - DNA, 20 bp, Artificial Sequence
  MKO10052465_A_T2
  gRNA
ttggatccacccaagcatcg

SEQ ID NO: 52466 - DNA, 20 bp, Artificial Sequence
  MKO10052466_A_Taar1
  gRNA
ctctgaatgacgcactgtat

SEQ ID NO: 52467 - DNA, 20 bp, Artificial Sequence
  MKO10052467_A_Taar1
  gRNA
ggaagagctgtatcgcagtc

SEQ ID NO: 52468 - DNA, 20 bp, Artificial Sequence
  MKO10052468_A_Taar1
  gRNA
aatcgtacgaatgttcaagt

SEQ ID NO: 52469 - DNA, 20 bp, Artificial Sequence
  MKO10052469_A_Taar2
  gRNA
gcatcaggtcgaagctataa

SEQ ID NO: 52470 - DNA, 20 bp, Artificial Sequence
  MKO10052470_A_Taar2
  gRNA
agctgccatgtactcgttga

SEQ ID NO: 52471 - DNA, 20 bp, Artificial Sequence
  MKO10052471_A_Taar2
  gRNA
agcagcagccgcctaacgac

SEQ ID NO: 52472 - DNA, 20 bp, Artificial Sequence
  MKO10052472_A_Taar3
  gRNA
ataaaaccggtcgatcgcga

SEQ ID NO: 52473 - DNA, 20 bp, Artificial Sequence
  MKO10052473_A_Taar3
  gRNA
gcggacacggaaagagcgat

SEQ ID NO: 52474 - DNA, 20 bp, Artificial Sequence
  MKO10052474_A_Taar3
  gRNA
tgtgctccatcgcgatcgac

SEQ ID NO: 52475 - DNA, 20 bp, Artificial Sequence
  MKO10052475_A_Taar4
  gRNA
acgtcacccaaatcacgacc

SEQ ID NO: 52476 - DNA, 20 bp, Artificial Sequence
  MKO10052476_A_Taar4
  gRNA
gaagtaccagcatgactcga

SEQ ID NO: 52477 - DNA, 20 bp, Artificial Sequence
  MKO10052477_A_Taar4
  gRNA
cgatgaatacacccgacccc

SEQ ID NO: 52478 - DNA, 20 bp, Artificial Sequence
  MKO10052478_A_Taar5
  gRNA
gcctacagcgttctgctacc

SEQ ID NO: 52479 - DNA, 20 bp, Artificial Sequence
  MKO10052479_A_Taar5
  gRNA
catccaggtcgtcatctatc

SEQ ID NO: 52480 - DNA, 20 bp, Artificial Sequence
  MKO10052480_A_Taar5
  gRNA
cgtgtggagcactttaaagt

SEQ ID NO: 52481 - DNA, 20 bp, Artificial Sequence
  MKO10052481_A_Taar6
  gRNA
gacagccccctacgcagttg

SEQ ID NO: 52482 - DNA, 20 bp, Artificial Sequence
  MKO10052482_A_Taar6
  gRNA
agcggcgctgtgttctacac

SEQ ID NO: 52483 - DNA, 20 bp, Artificial Sequence
  MKO10052483_A_Taar6
  gRNA
gtgaaaaccccctactctcc

SEQ ID NO: 52484 - DNA, 20 bp, Artificial Sequence
  MKO10052484_A_Taar7a
  gRNA
atcctccagcccagcttcgt

SEQ ID NO: 52485 - DNA, 20 bp, Artificial Sequence
  MKO10052485_A_Taar7a
  gRNA
agtaatatacatggacaaat

SEQ ID NO: 52486 - DNA, 20 bp, Artificial Sequence
  MKO10052486_A_Taar7a
  gRNA
gccagtgacaatgagcttga

SEQ ID NO: 52487 - DNA, 20 bp, Artificial Sequence
  MKO10052487_A_Taar7b
  gRNA
aaaacccataaatggtggac

SEQ ID NO: 52488 - DNA, 20 bp, Artificial Sequence
  MKO10052488_A_Taar7b
  gRNA
cagagaacatatcactgctc

SEQ ID NO: 52489 - DNA, 20 bp, Artificial Sequence
  MKO10052489_A_Taar7b
  gRNA
gtcaggagcccatattcccc

SEQ ID NO: 52490 - DNA, 20 bp, Artificial Sequence
  MKO10052490_A_Taar7d
  gRNA
atgacccttcaaagcaagaa

SEQ ID NO: 52491 - DNA, 20 bp, Artificial Sequence
  MKO10052491_A_Taar7d
  gRNA
atcctccagcccagcatcat

SEQ ID NO: 52492 - DNA, 20 bp, Artificial Sequence
  MKO10052492_A_Taar7d
  gRNA
tcctgacacaggatctgttc

SEQ ID NO: 52493 - DNA, 20 bp, Artificial Sequence
  MKO10052493_A_Taar7e
  gRNA
cacttgctcctgtgtaaata

SEQ ID NO: 52494 - DNA, 20 bp, Artificial Sequence
  MKO10052494_A_Taar7e
  gRNA
atagctgatggacagaagcc

SEQ ID NO: 52495 - DNA, 20 bp, Artificial Sequence
  MKO10052495_A_Taar7e
  gRNA
acaagtgcatcactttctcc

SEQ ID NO: 52496 - DNA, 20 bp, Artificial Sequence
  MKO10052496_A_Taar7f
  gRNA
tattgcagtcagtgaccccc

SEQ ID NO: 52497 - DNA, 20 bp, Artificial Sequence
  MKO10052497_A_Taar7f
  gRNA
aaaacccatagctgatggac

SEQ ID NO: 52498 - DNA, 20 bp, Artificial Sequence
  MKO10052498_A_Taar7f
  gRNA
tgagaagttgataaagaccc

SEQ ID NO: 52499 - DNA, 20 bp, Artificial Sequence
  MKO10052499_A_Taar8a
  gRNA
agtcttgattgataacaatt

SEQ ID NO: 52500 - DNA, 20 bp, Artificial Sequence
  MKO10052500_A_Taar8a
  gRNA
cccatacacaattgacgcat

SEQ ID NO: 52501 - DNA, 20 bp, Artificial Sequence
  MKO10052501_A_Taar8a
  gRNA
gtaagtgctctaaattgtgt

SEQ ID NO: 52502 - DNA, 20 bp, Artificial Sequence
  MKO10052502_A_Taar8b
  gRNA
agtcttgattgacaacgatt

SEQ ID NO: 52503 - DNA, 20 bp, Artificial Sequence
  MKO10052503_A_Taar8b
  gRNA
aaatcgttgtcaatcaagac

SEQ ID NO: 52504 - DNA, 20 bp, Artificial Sequence
  MKO10052504_A_Taar8b
  gRNA
cccatacacaattgactcat

SEQ ID NO: 52505 - DNA, 20 bp, Artificial Sequence
  MKO10052505_A_Taar8c
  gRNA
cccatacacaattgatgcat

SEQ ID NO: 52506 - DNA, 20 bp, Artificial Sequence
  MKO10052506_A_Taar8c
  gRNA
agtcttgattgacaacaact

SEQ ID NO: 52507 - DNA, 20 bp, Artificial Sequence
  MKO10052507_A_Taar8c
  gRNA
aagttgttgtcaatcaagac

SEQ ID NO: 52508 - DNA, 20 bp, Artificial Sequence
  MKO10052508_A_Taar9
  gRNA
aatatctcatagacgtacgc

SEQ ID NO: 52509 - DNA, 20 bp, Artificial Sequence
  MKO10052509_A_Taar9
  gRNA
gctgccatacattattgatg

SEQ ID NO: 52510 - DNA, 20 bp, Artificial Sequence
  MKO10052510_A_Taar9
  gRNA
ttaaaagctcttacgcaccc

SEQ ID NO: 52511 - DNA, 20 bp, Artificial Sequence
  MKO10052511_A_Tab1
  gRNA
caaccgcgtgaccaactttg

SEQ ID NO: 52512 - DNA, 20 bp, Artificial Sequence
  MKO10052512_A_Tab1
  gRNA
agccattgaagaccccgtac

SEQ ID NO: 52513 - DNA, 20 bp, Artificial Sequence
  MKO10052513_A_Tab1
  gRNA
agttgtttacctccggcagc

SEQ ID NO: 52514 - DNA, 20 bp, Artificial Sequence
  MKO10052514_A_Tab2
  gRNA
taacacttactgacggtatc

SEQ ID NO: 52515 - DNA, 20 bp, Artificial Sequence
  MKO10052515_A_Tab2
  gRNA
ggagtagttggcgaactgat

SEQ ID NO: 52516 - DNA, 20 bp, Artificial Sequence
  MKO10052516_A_Tab2
  gRNA
ctctgcaacgtctcctcgag

SEQ ID NO: 52517 - DNA, 20 bp, Artificial Sequence
  MKO10052517_A_Tab3
  gRNA
ttcggtggtacaactgggcc

SEQ ID NO: 52518 - DNA, 20 bp, Artificial Sequence
  MKO10052518_A_Tab3
  gRNA
ccagtgtccgaccaccatta

SEQ ID NO: 52519 - DNA, 20 bp, Artificial Sequence
  MKO10052519_A_Tab3
  gRNA
tttggtatcacccgaggaga

SEQ ID NO: 52520 - DNA, 20 bp, Artificial Sequence
  MKO10052520_A_Tac1
  gRNA
ttaatgggcaagcgggatgc

SEQ ID NO: 52521 - DNA, 20 bp, Artificial Sequence
  MKO10052521_A_Tac1
  gRNA
taccataaagagcctttaac

SEQ ID NO: 52522 - DNA, 20 bp, Artificial Sequence
  MKO10052522_A_Tac1
  gRNA
tttgcccattagtccaacaa

SEQ ID NO: 52523 - DNA, 20 bp, Artificial Sequence
  MKO10052523_A_Tac2
  gRNA
tgtcgtagagtctccgaagc

SEQ ID NO: 52524 - DNA, 20 bp, Artificial Sequence
  MKO10052524_A_Tac2
  gRNA
cccagacactcccaccgacg

SEQ ID NO: 52525 - DNA, 20 bp, Artificial Sequence
  MKO10052525_A_Tac2
  gRNA
tgacatgcacgacttctttg

SEQ ID NO: 52526 - DNA, 20 bp, Artificial Sequence
  MKO10052526_A_Tac4
  gRNA
tggacaaacctctcgtgcca

SEQ ID NO: 52527 - DNA, 20 bp, Artificial Sequence
  MKO10052527_A_Tac4
  gRNA
ggcagagtgctacacgttgc

SEQ ID NO: 52528 - DNA, 20 bp, Artificial Sequence
  MKO10052528_A_Tac4
  gRNA
ttgactcgccgcctgtctgc

SEQ ID NO: 52529 - DNA, 20 bp, Artificial Sequence
  MKO10052529_A_Tacc1
  gRNA
gaacacgcgtccaaatcgag

SEQ ID NO: 52530 - DNA, 20 bp, Artificial Sequence
  MKO10052530_A_Tacc1
  gRNA
cttctgagcacacgacgacg

SEQ ID NO: 52531 - DNA, 20 bp, Artificial Sequence
  MKO10052531_A_Tacc1
  gRNA
aggtcccgagggcgaccccg

SEQ ID NO: 52532 - DNA, 20 bp, Artificial Sequence
  MKO10052532_A_Tacc2
  gRNA
gctaagcgaacgggacagcg

SEQ ID NO: 52533 - DNA, 20 bp, Artificial Sequence
  MKO10052533_A_Tacc2
  gRNA
gtcttcatcgaacaccgccg

SEQ ID NO: 52534 - DNA, 20 bp, Artificial Sequence
  MKO10052534_A_Tacc2
  gRNA
cgttgactcgggggtctcaa

SEQ ID NO: 52535 - DNA, 20 bp, Artificial Sequence
  MKO10052535_A_Tacc3
  gRNA
aaaaggagcctcacgcttat

SEQ ID NO: 52536 - DNA, 20 bp, Artificial Sequence
  MKO10052536_A_Tacc3
  gRNA
ccctcctatcgagcctttgc

SEQ ID NO: 52537 - DNA, 20 bp, Artificial Sequence
  MKO10052537_A_Tacc3
  gRNA
tcttcctttagatccacgac

SEQ ID NO: 52538 - DNA, 20 bp, Artificial Sequence
  MKO10052538_A_Taco1
  gRNA
cctagagcgtgccctagaac

SEQ ID NO: 52539 - DNA, 20 bp, Artificial Sequence
  MKO10052539_A_Taco1
  gRNA
cctcatagttgttaagcgcc

SEQ ID NO: 52540 - DNA, 20 bp, Artificial Sequence
  MKO10052540_A_Taco1
  gRNA
ccagttctagggcacgctct

SEQ ID NO: 52541 - DNA, 20 bp, Artificial Sequence
  MKO10052541_A_Tacr1
  gRNA
ggtcttcgagttgcttcgag

SEQ ID NO: 52542 - DNA, 20 bp, Artificial Sequence
  MKO10052542_A_Tacr1
  gRNA
gtcggccactgctaccaaag

SEQ ID NO: 52543 - DNA, 20 bp, Artificial Sequence
  MKO10052543_A_Tacr1
  gRNA
tgaccttgtacacgctgctc

SEQ ID NO: 52544 - DNA, 20 bp, Artificial Sequence
  MKO10052544_A_Tacr2
  gRNA
ctaccgcaagtttatccagc

SEQ ID NO: 52545 - DNA, 20 bp, Artificial Sequence
  MKO10052545_A_Tacr2
  gRNA
acgcgccgtacccagacacc

SEQ ID NO: 52546 - DNA, 20 bp, Artificial Sequence
  MKO10052546_A_Tacr2
  gRNA
accctcggcaggtttcgctc

SEQ ID NO: 52547 - DNA, 20 bp, Artificial Sequence
  MKO10052547_A_Tacr3
  gRNA
gagctccagctcatcgtagc

SEQ ID NO: 52548 - DNA, 20 bp, Artificial Sequence
  MKO10052548_A_Tacr3
  gRNA
acttccgatgacaatcttag

SEQ ID NO: 52549 - DNA, 20 bp, Artificial Sequence
  MKO10052549_A_Tacr3
  gRNA
cgagcttatgaaacttgatg

SEQ ID NO: 52550 - DNA, 20 bp, Artificial Sequence
  MKO10052550_A_Tacstd2
  gRNA
gcaccacttcgtcgcagcgc

SEQ ID NO: 52551 - DNA, 20 bp, Artificial Sequence
  MKO10052551_A_Tacstd2
  gRNA
gcggacgctcatctactacc

SEQ ID NO: 52552 - DNA, 20 bp, Artificial Sequence
  MKO10052552_A_Tacstd2
  gRNA
gccgagcgagcacgcgatac

SEQ ID NO: 52553 - DNA, 20 bp, Artificial Sequence
  MKO10052553_A_Tada1
  gRNA
gtctgccgtggtctatgccg

SEQ ID NO: 52554 - DNA, 20 bp, Artificial Sequence
  MKO10052554_A_Tada1
  gRNA
gtttcaagtcgtcatcaccc

SEQ ID NO: 52555 - DNA, 20 bp, Artificial Sequence
  MKO10052555_A_Tada1
  gRNA
ccaaaatctgacaacgtgtg

SEQ ID NO: 52556 - DNA, 20 bp, Artificial Sequence
  MKO10052556_A_Tada2a
  gRNA
tctgataagccgccctgcag

SEQ ID NO: 52557 - DNA, 20 bp, Artificial Sequence
  MKO10052557_A_Tada2a
  gRNA
tgatcacacttacgaaataa

SEQ ID NO: 52558 - DNA, 20 bp, Artificial Sequence
  MKO10052558_A_Tada2a
  gRNA
tggccgcctcagcttgcttc

SEQ ID NO: 52559 - DNA, 20 bp, Artificial Sequence
  MKO10052559_A_Tada2b
  gRNA
gccgaagccgaactgctcga

SEQ ID NO: 52560 - DNA, 20 bp, Artificial Sequence
  MKO10052560_A_Tada2b
  gRNA
cgcgccggccgagaagcact

SEQ ID NO: 52561 - DNA, 20 bp, Artificial Sequence
  MKO10052561_A_Tada2b
  gRNA
ttcgagagctgcagcgctac

SEQ ID NO: 52562 - DNA, 20 bp, Artificial Sequence
  MKO10052562_A_Tada3
  gRNA
ttgctgcagattccccccct

SEQ ID NO: 52563 - DNA, 20 bp, Artificial Sequence
  MKO10052563_A_Tada3
  gRNA
tggggggagcaccgagctcg

SEQ ID NO: 52564 - DNA, 20 bp, Artificial Sequence
  MKO10052564_A_Tada3
  gRNA
ctcggtgctccccccaaaca

SEQ ID NO: 52565 - DNA, 20 bp, Artificial Sequence
  MKO10052565_A_Taf10
  gRNA
ggtttacgccctaccgagcg

SEQ ID NO: 52566 - DNA, 20 bp, Artificial Sequence
  MKO10052566_A_Taf10
  gRNA
tccttcagcttcggtggcag

SEQ ID NO: 52567 - DNA, 20 bp, Artificial Sequence
  MKO10052567_A_Taf10
  gRNA
ctcacaccttgctcttgctc

SEQ ID NO: 52568 - DNA, 20 bp, Artificial Sequence
  MKO10052568_A_Taf11
  gRNA
accgttatgaaatgtatcgc

SEQ ID NO: 52569 - DNA, 20 bp, Artificial Sequence
  MKO10052569_A_Taf11
  gRNA
cccatttctcacacacgtcc

SEQ ID NO: 52570 - DNA, 20 bp, Artificial Sequence
  MKO10052570_A_Taf11
  gRNA
acctgcgatacatttcataa

SEQ ID NO: 52571 - DNA, 20 bp, Artificial Sequence
  MKO10052571_A_Taf12
  gRNA
cccacatacctagatgcagc

SEQ ID NO: 52572 - DNA, 20 bp, Artificial Sequence
  MKO10052572_A_Taf12
  gRNA
acttgcggtgccgagcaagc

SEQ ID NO: 52573 - DNA, 20 bp, Artificial Sequence
  MKO10052573_A_Taf12
  gRNA
ttcagagaatggcactgatc

SEQ ID NO: 52574 - DNA, 20 bp, Artificial Sequence
  MKO10052574_A_Taf13
  gRNA
atgtccacggactccgtgta

SEQ ID NO: 52575 - DNA, 20 bp, Artificial Sequence
  MKO10052575_A_Taf13
  gRNA
ggacgaccagaatccttaca

SEQ ID NO: 52576 - DNA, 20 bp, Artificial Sequence
  MKO10052576_A_Taf13
  gRNA
agcagctagcatggcagatg

SEQ ID NO: 52577 - DNA, 20 bp, Artificial Sequence
  MKO10052577_A_Taf15
  gRNA
caaacgactgattcttcgta

SEQ ID NO: 52578 - DNA, 20 bp, Artificial Sequence
  MKO10052578_A_Taf15
  gRNA
ttaggttattcacagtcgta

SEQ ID NO: 52579 - DNA, 20 bp, Artificial Sequence
  MKO10052579_A_Taf15
  gRNA
caacaaaacacggagtcatc

SEQ ID NO: 52580 - DNA, 20 bp, Artificial Sequence
  MKO10052580_A_Taf1a
  gRNA
ctccacgttgttcgccgccc

SEQ ID NO: 52581 - DNA, 20 bp, Artificial Sequence
  MKO10052581_A_Taf1a
  gRNA
ttagagagcaccgacgtttc

SEQ ID NO: 52582 - DNA, 20 bp, Artificial Sequence
  MKO10052582_A_Taf1a
  gRNA
ccttgcgctttcagtgaaac

SEQ ID NO: 52583 - DNA, 20 bp, Artificial Sequence
  MKO10052583_A_Taf1b
  gRNA
tacttacatctgtgacattg

SEQ ID NO: 52584 - DNA, 20 bp, Artificial Sequence
  MKO10052584_A_Taf1b
  gRNA
acagtaatatttgccttcat

SEQ ID NO: 52585 - DNA, 20 bp, Artificial Sequence
  MKO10052585_A_Taf1b
  gRNA
tagcttcttacctttagttc

SEQ ID NO: 52586 - DNA, 20 bp, Artificial Sequence
  MKO10052586_A_Taf1c
  gRNA
ggacatagccttcgcacccc

SEQ ID NO: 52587 - DNA, 20 bp, Artificial Sequence
  MKO10052587_A_Taf1c
  gRNA
acctcggcggacaccaaccc

SEQ ID NO: 52588 - DNA, 20 bp, Artificial Sequence
  MKO10052588_A_Taf1c
  gRNA
gtgcgaaggctatgtcccca

SEQ ID NO: 52589 - DNA, 20 bp, Artificial Sequence
  MKO10052589_A_Taf1d
  gRNA
ctagtgatcctcgttcccga

SEQ ID NO: 52590 - DNA, 20 bp, Artificial Sequence
  MKO10052590_A_Taf1d
  gRNA
ttgcagcaagctgttgcaag

SEQ ID NO: 52591 - DNA, 20 bp, Artificial Sequence
  MKO10052591_A_Taf1d
  gRNA
ttgatatcacattcagcctg

SEQ ID NO: 52592 - DNA, 20 bp, Artificial Sequence
  MKO10052592_A_Taf1
  gRNA
ggtgccctggtaaatgatga

SEQ ID NO: 52593 - DNA, 20 bp, Artificial Sequence
  MKO10052593_A_Taf1
  gRNA
ggagtgcaagaagcatcttg

SEQ ID NO: 52594 - DNA, 20 bp, Artificial Sequence
  MKO10052594_A_Taf1
  gRNA
gacacttggcaacagcttcg

SEQ ID NO: 52595 - DNA, 20 bp, Artificial Sequence
  MKO10052595_A_Taf2
  gRNA
ccaagtcattgatccggact

SEQ ID NO: 52596 - DNA, 20 bp, Artificial Sequence
  MKO10052596_A_Taf2
  gRNA
agtgtagaatataccgagtc

SEQ ID NO: 52597 - DNA, 20 bp, Artificial Sequence
  MKO10052597_A_Taf2
  gRNA
agttctccattccccgcatc

SEQ ID NO: 52598 - DNA, 20 bp, Artificial Sequence
  MKO10052598_A_Taf3
  gRNA
gtctccttccgattccgatc

SEQ ID NO: 52599 - DNA, 20 bp, Artificial Sequence
  MKO10052599_A_Taf3
  gRNA
acgtgcgatcacagcatcga

SEQ ID NO: 52600 - DNA, 20 bp, Artificial Sequence
  MKO10052600_A_Taf3
  gRNA
ctcagtcacgacgctcctca

SEQ ID NO: 52601 - DNA, 20 bp, Artificial Sequence
  MKO10052601_A_Taf4a
  gRNA
gcccattctcactccgcacg

SEQ ID NO: 52602 - DNA, 20 bp, Artificial Sequence
  MKO10052602_A_Taf4a
  gRNA
acaaccctacagcgatctcc

SEQ ID NO: 52603 - DNA, 20 bp, Artificial Sequence
  MKO10052603_A_Taf4a
  gRNA
ccccaggaatggtcctcgtg

SEQ ID NO: 52604 - DNA, 20 bp, Artificial Sequence
  MKO10052604_A_Taf4b
  gRNA
tttgagacgtgcgtcatttg

SEQ ID NO: 52605 - DNA, 20 bp, Artificial Sequence
  MKO10052605_A_Taf4b
  gRNA
acagtattcaccagctttgc

SEQ ID NO: 52606 - DNA, 20 bp, Artificial Sequence
  MKO10052606_A_Taf4b
  gRNA
tcgcctcagcaagctgtaac

SEQ ID NO: 52607 - DNA, 20 bp, Artificial Sequence
  MKO10052607_A_Taf5l
  gRNA
ggtcatgaaacgagtgcgca

SEQ ID NO: 52608 - DNA, 20 bp, Artificial Sequence
  MKO10052608_A_Taf5l
  gRNA
caagtatgtcgtccgtctcc

SEQ ID NO: 52609 - DNA, 20 bp, Artificial Sequence
  MKO10052609_A_Taf5l
  gRNA
ggtaattgtagctatcttcc

SEQ ID NO: 52610 - DNA, 20 bp, Artificial Sequence
  MKO10052610_A_Taf5
  gRNA
actcgtccgaaagtccagca

SEQ ID NO: 52611 - DNA, 20 bp, Artificial Sequence
  MKO10052611_A_Taf5
  gRNA
cgtcgaagatgtcgatgtag

SEQ ID NO: 52612 - DNA, 20 bp, Artificial Sequence
  MKO10052612_A_Taf5
  gRNA
tggcccgaggcgcactcgtt

SEQ ID NO: 52613 - DNA, 20 bp, Artificial Sequence
  MKO10052613_A_Taf6l
  gRNA
gggtgatctctacttcccgg

SEQ ID NO: 52614 - DNA, 20 bp, Artificial Sequence
  MKO10052614_A_Taf6l
  gRNA
tgtgtgctaccgtctccgag

SEQ ID NO: 52615 - DNA, 20 bp, Artificial Sequence
  MKO10052615_A_Taf6l
  gRNA
tagagatcaccctcccttgc

SEQ ID NO: 52616 - DNA, 20 bp, Artificial Sequence
  MKO10052616_A_Taf6
  gRNA
gctcattggctaagcatcga

SEQ ID NO: 52617 - DNA, 20 bp, Artificial Sequence
  MKO10052617_A_Taf6
  gRNA
ccgccagaggcaaaccggaa

SEQ ID NO: 52618 - DNA, 20 bp, Artificial Sequence
  MKO10052618_A_Taf6
  gRNA
ttacctgggggtggattctc

SEQ ID NO: 52619 - DNA, 20 bp, Artificial Sequence
  MKO10052619_A_Taf7l
  gRNA
tgtctacttgaacaaccgca

SEQ ID NO: 52620 - DNA, 20 bp, Artificial Sequence
  MKO10052620_A_Taf7l
  gRNA
ggcagattaaccagtttagc

SEQ ID NO: 52621 - DNA, 20 bp, Artificial Sequence
  MKO10052621_A_Taf7l
  gRNA
gtttatattgcgtctgcctc

SEQ ID NO: 52622 - DNA, 20 bp, Artificial Sequence
  MKO10052622_A_Taf7
  gRNA
acaatgccgtgacgcccatc

SEQ ID NO: 52623 - DNA, 20 bp, Artificial Sequence
  MKO10052623_A_Taf7
  gRNA
ggggcagtcgtaagataaac

SEQ ID NO: 52624 - DNA, 20 bp, Artificial Sequence
  MKO10052624_A_Taf7
  gRNA
gcgtcacggcattgtcagag

SEQ ID NO: 52625 - DNA, 20 bp, Artificial Sequence
  MKO10052625_A_Taf8
  gRNA
gaccacgatgtccgacagtg

SEQ ID NO: 52626 - DNA, 20 bp, Artificial Sequence
  MKO10052626_A_Taf8
  gRNA
gcccacactgtcggacatcg

SEQ ID NO: 52627 - DNA, 20 bp, Artificial Sequence
  MKO10052627_A_Taf8
  gRNA
gagtgccgagaaagcgtctg

SEQ ID NO: 52628 - DNA, 20 bp, Artificial Sequence
  MKO10052628_A_Taf9b
  gRNA
tgatgccgatgacgtgagac

SEQ ID NO: 52629 - DNA, 20 bp, Artificial Sequence
  MKO10052629_A_Taf9b
  gRNA
gcgcttaccaaggcatctct

SEQ ID NO: 52630 - DNA, 20 bp, Artificial Sequence
  MKO10052630_A_Taf9b
  gRNA
ccgctgattaagccatatgc

SEQ ID NO: 52631 - DNA, 20 bp, Artificial Sequence
  MKO10052631_A_Taf9
  gRNA
agtcagcaaatgcactgaaa

SEQ ID NO: 52632 - DNA, 20 bp, Artificial Sequence
  MKO10052632_A_Taf9
  gRNA
ctagaattgttgtcacatat

SEQ ID NO: 52633 - DNA, 20 bp, Artificial Sequence
  MKO10052633_A_Taf9
  gRNA
atatctaataagaaatctct

SEQ ID NO: 52634 - DNA, 20 bp, Artificial Sequence
  MKO10052634_A_Tagap1
  gRNA
agcttgactcacaggtgtcc

SEQ ID NO: 52635 - DNA, 20 bp, Artificial Sequence
  MKO10052635_A_Tagap1
  gRNA
acagggggcaccgctgtgct

SEQ ID NO: 52636 - DNA, 20 bp, Artificial Sequence
  MKO10052636_A_Tagap1
  gRNA
gatggcggcgactaccgccg

SEQ ID NO: 52637 - DNA, 20 bp, Artificial Sequence
  MKO10052637_A_Tagap
  gRNA
ctgaatatcccttccgttga

SEQ ID NO: 52638 - DNA, 20 bp, Artificial Sequence
  MKO10052638_A_Tagap
  gRNA
cttcaacggaagggatattc

SEQ ID NO: 52639 - DNA, 20 bp, Artificial Sequence
  MKO10052639_A_Tagap
  gRNA
caacccttgtcgatcatctg

SEQ ID NO: 52640 - DNA, 20 bp, Artificial Sequence
  MKO10052640_A_Tagln2
  gRNA
gattgagaagcagtacgacg

SEQ ID NO: 52641 - DNA, 20 bp, Artificial Sequence
  MKO10052641_A_Tagln2
  gRNA
gcgctatggcattaacacca

SEQ ID NO: 52642 - DNA, 20 bp, Artificial Sequence
  MKO10052642_A_Tagln2
  gRNA
caccaaccgtggagcatctc

SEQ ID NO: 52643 - DNA, 20 bp, Artificial Sequence
  MKO10052643_A_Tagln3
  gRNA
cgtaccccgtcatgcccgcc

SEQ ID NO: 52644 - DNA, 20 bp, Artificial Sequence
  MKO10052644_A_Tagln3
  gRNA
ggatatagagcacccgcccc

SEQ ID NO: 52645 - DNA, 20 bp, Artificial Sequence
  MKO10052645_A_Tagln3
  gRNA
gagctatggcttaagccgag

SEQ ID NO: 52646 - DNA, 20 bp, Artificial Sequence
  MKO10052646_A_Tagln
  gRNA
ccgcccagatcgtgggcgcc

SEQ ID NO: 52647 - DNA, 20 bp, Artificial Sequence
  MKO10052647_A_Tagln
  gRNA
actaccgtggagatcccaac

SEQ ID NO: 52648 - DNA, 20 bp, Artificial Sequence
  MKO10052648_A_Tagln
  gRNA
tgacaggctatgggcgaccc

SEQ ID NO: 52649 - DNA, 20 bp, Artificial Sequence
  MKO10052649_A_Tal1
  gRNA
ccttggcgacgccgttgagc

SEQ ID NO: 52650 - DNA, 20 bp, Artificial Sequence
  MKO10052650_A_Tal1
  gRNA
tagcagccgaagctcgcctt

SEQ ID NO: 52651 - DNA, 20 bp, Artificial Sequence
  MKO10052651_A_Tal1
  gRNA
tcaccaacagccgggaacga

SEQ ID NO: 52652 - DNA, 20 bp, Artificial Sequence
  MKO10052652_A_Tal2
  gRNA
caagaacgagacgcttcgct

SEQ ID NO: 52653 - DNA, 20 bp, Artificial Sequence
  MKO10052653_A_Tal2
  gRNA
cagcgactcctgtttgatgc

SEQ ID NO: 52654 - DNA, 20 bp, Artificial Sequence
  MKO10052654_A_Tal2
  gRNA
caccaccttagggagccccg

SEQ ID NO: 52655 - DNA, 20 bp, Artificial Sequence
  MKO10052655_A_Taldo1
  gRNA
gcgcatccttgattggcatg

SEQ ID NO: 52656 - DNA, 20 bp, Artificial Sequence
  MKO10052656_A_Taldo1
  gRNA
cgtcacgcccgcctcagcac

SEQ ID NO: 52657 - DNA, 20 bp, Artificial Sequence
  MKO10052657_A_Taldo1
  gRNA
cttctttgtaaagctcgatg

SEQ ID NO: 52658 - DNA, 20 bp, Artificial Sequence
  MKO10052658_A_Tamm41
  gRNA
aacatcgtgaagcccaacgt

SEQ ID NO: 52659 - DNA, 20 bp, Artificial Sequence
  MKO10052659_A_Tamm41
  gRNA
taacttaggtgacttccgca

SEQ ID NO: 52660 - DNA, 20 bp, Artificial Sequence
  MKO10052660_A_Tamm41
  gRNA
gctacctgaaagcttctccg

SEQ ID NO: 52661 - DNA, 20 bp, Artificial Sequence
  MKO10052661_A_Tanc1
  gRNA
ggtactcttaccagtcgcac

SEQ ID NO: 52662 - DNA, 20 bp, Artificial Sequence
  MKO10052662_A_Tanc1
  gRNA
gatccagttatgatcccgtt

SEQ ID NO: 52663 - DNA, 20 bp, Artificial Sequence
  MKO10052663_A_Tanc1
  gRNA
ggggctgctaatggtctcgc

SEQ ID NO: 52664 - DNA, 20 bp, Artificial Sequence
  MKO10052664_A_Tanc2
  gRNA
acactcgactgtcttcgatc

SEQ ID NO: 52665 - DNA, 20 bp, Artificial Sequence
  MKO10052665_A_Tanc2
  gRNA
gattctcgccaaagccgctc

SEQ ID NO: 52666 - DNA, 20 bp, Artificial Sequence
  MKO10052666_A_Tanc2
  gRNA
aaacacactcatgactcgtc

SEQ ID NO: 52667 - DNA, 20 bp, Artificial Sequence
  MKO10052667_A_Tango2
  gRNA
atctgctgtagggctcgaca

SEQ ID NO: 52668 - DNA, 20 bp, Artificial Sequence
  MKO10052668_A_Tango2
  gRNA
gagccagacgcccgtggtag

SEQ ID NO: 52669 - DNA, 20 bp, Artificial Sequence
  MKO10052669_A_Tango2
  gRNA
tgatgttaaagccgttatac

SEQ ID NO: 52670 - DNA, 20 bp, Artificial Sequence
  MKO10052670_A_Tango6
  gRNA
cactactgcctgaacgccgt

SEQ ID NO: 52671 - DNA, 20 bp, Artificial Sequence
  MKO10052671_A_Tango6
  gRNA
gatgagacccaacggcgttc

SEQ ID NO: 52672 - DNA, 20 bp, Artificial Sequence
  MKO10052672_A_Tango6
  gRNA
gtacctggcgtggtcctccc

SEQ ID NO: 52673 - DNA, 20 bp, Artificial Sequence
  MKO10052673_A_Tank
  gRNA
agcatatgaagccttccgac

SEQ ID NO: 52674 - DNA, 20 bp, Artificial Sequence
  MKO10052674_A_Tank
  gRNA
aacgacctttcgtgatgcag

SEQ ID NO: 52675 - DNA, 20 bp, Artificial Sequence
  MKO10052675_A_Tank
  gRNA
acaaagaatacgcgagcaac

SEQ ID NO: 52676 - DNA, 20 bp, Artificial Sequence
  MKO10052676_A_Taok1
  gRNA
tctgcttcagatttattaga

SEQ ID NO: 52677 - DNA, 20 bp, Artificial Sequence
  MKO10052677_A_Taok1
  gRNA
gctatttccacttcttgtaa

SEQ ID NO: 52678 - DNA, 20 bp, Artificial Sequence
  MKO10052678_A_Taok1
  gRNA
aattacacatggtgctctcc

SEQ ID NO: 52679 - DNA, 20 bp, Artificial Sequence
  MKO10052679_A_Taok2
  gRNA
ccccggtactgaatggtatt

SEQ ID NO: 52680 - DNA, 20 bp, Artificial Sequence
  MKO10052680_A_Taok2
  gRNA
gagatcggccatggcagctt

SEQ ID NO: 52681 - DNA, 20 bp, Artificial Sequence
  MKO10052681_A_Taok2
  gRNA
tcctctaggcccgggatgtc

SEQ ID NO: 52682 - DNA, 20 bp, Artificial Sequence
  MKO10052682_A_Taok3
  gRNA
ataacagcctttgtactcga

SEQ ID NO: 52683 - DNA, 20 bp, Artificial Sequence
  MKO10052683_A_Taok3
  gRNA
gacaaatgcgcacaccaacg

SEQ ID NO: 52684 - DNA, 20 bp, Artificial Sequence
  MKO10052684_A_Taok3
  gRNA
cctaacaccatcgagtacaa

SEQ ID NO: 52685 - DNA, 20 bp, Artificial Sequence
  MKO10052685_A_Tap1
  gRNA
actaatggactcgcacacgt

SEQ ID NO: 52686 - DNA, 20 bp, Artificial Sequence
  MKO10052686_A_Tap1
  gRNA
gctcgatggctgcgcacgtc

SEQ ID NO: 52687 - DNA, 20 bp, Artificial Sequence
  MKO10052687_A_Tap1
  gRNA
tccagcgtccctgttgccgc

SEQ ID NO: 52688 - DNA, 20 bp, Artificial Sequence
  MKO10052688_A_Tap2
  gRNA
attacacgacccgaatagcg

SEQ ID NO: 52689 - DNA, 20 bp, Artificial Sequence
  MKO10052689_A_Tap2
  gRNA
gacattaatccctcgctatt

SEQ ID NO: 52690 - DNA, 20 bp, Artificial Sequence
  MKO10052690_A_Tap2
  gRNA
tctttgttgcgccaagacct

SEQ ID NO: 52691 - DNA, 20 bp, Artificial Sequence
  MKO10052691_A_Tapbpl
  gRNA
tccctcgtctgcagcattgc

SEQ ID NO: 52692 - DNA, 20 bp, Artificial Sequence
  MKO10052692_A_Tapbpl
  gRNA
ctgttgagcttgatacagag

SEQ ID NO: 52693 - DNA, 20 bp, Artificial Sequence
  MKO10052693_A_Tapbpl
  gRNA
ggacttggtacagattcccc

SEQ ID NO: 52694 - DNA, 20 bp, Artificial Sequence
  MKO10052694_A_Tapbp
  gRNA
aaccagcactcgatcgcctc

SEQ ID NO: 52695 - DNA, 20 bp, Artificial Sequence
  MKO10052695_A_Tapbp
  gRNA
acttctagcccacttcgccg

SEQ ID NO: 52696 - DNA, 20 bp, Artificial Sequence
  MKO10052696_A_Tapbp
  gRNA
gaccagaggcgatcgagtgc

SEQ ID NO: 52697 - DNA, 20 bp, Artificial Sequence
  MKO10052697_A_Tapt1
  gRNA
gatcgtctgttctcctcgtt

SEQ ID NO: 52698 - DNA, 20 bp, Artificial Sequence
  MKO10052698_A_Tapt1
  gRNA
atatcttagatgctctctac

SEQ ID NO: 52699 - DNA, 20 bp, Artificial Sequence
  MKO10052699_A_Tapt1
  gRNA
ctgtagaactgtcattattg

SEQ ID NO: 52700 - DNA, 20 bp, Artificial Sequence
  MKO10052700_A_Tarbp2
  gRNA
cagggctccggcactactac

SEQ ID NO: 52701 - DNA, 20 bp, Artificial Sequence
  MKO10052701_A_Tarbp2
  gRNA
cagtctgagtgcaaccccgt

SEQ ID NO: 52702 - DNA, 20 bp, Artificial Sequence
  MKO10052702_A_Tarbp2
  gRNA
cccgcagcctgtagtagtgc

SEQ ID NO: 52703 - DNA, 20 bp, Artificial Sequence
  MKO10052703_A_Tardbp
  gRNA
tagcgcaggccgcatgcccc

SEQ ID NO: 52704 - DNA, 20 bp, Artificial Sequence
  MKO10052704_A_Tardbp
  gRNA
gggcaagataccttagagtt

SEQ ID NO: 52705 - DNA, 20 bp, Artificial Sequence
  MKO10052705_A_Tardbp
  gRNA
tatgttgtcaactatcccaa

SEQ ID NO: 52706 - DNA, 20 bp, Artificial Sequence
  MKO10052706_A_Tarm1
  gRNA
accgacctacgacagaatga

SEQ ID NO: 52707 - DNA, 20 bp, Artificial Sequence
  MKO10052707_A_Tarm1
  gRNA
gtccgccatcattctgtcgt

SEQ ID NO: 52708 - DNA, 20 bp, Artificial Sequence
  MKO10052708_A_Tarm1
  gRNA
aaggctccctatcgggcctc

SEQ ID NO: 52709 - DNA, 20 bp, Artificial Sequence
  MKO10052709_A_Tars2
  gRNA
ggcgtacctcacgcacggtg

SEQ ID NO: 52710 - DNA, 20 bp, Artificial Sequence
  MKO10052710_A_Tars2
  gRNA
cgagctccacaccgtgcgtg

SEQ ID NO: 52711 - DNA, 20 bp, Artificial Sequence
  MKO10052711_A_Tars2
  gRNA
ggcccaacggcaacagtgta

SEQ ID NO: 52712 - DNA, 20 bp, Artificial Sequence
  MKO10052712_A_Tarsl2
  gRNA
gtgggatctggaccgcccgt

SEQ ID NO: 52713 - DNA, 20 bp, Artificial Sequence
  MKO10052713_A_Tarsl2
  gRNA
cgggccttacctaattccag

SEQ ID NO: 52714 - DNA, 20 bp, Artificial Sequence
  MKO10052714_A_Tarsl2
  gRNA
ccacaatacaccgttcactt

SEQ ID NO: 52715 - DNA, 20 bp, Artificial Sequence
  MKO10052715_A_Tars
  gRNA
acgccgtatcagattgcttg

SEQ ID NO: 52716 - DNA, 20 bp, Artificial Sequence
  MKO10052716_A_Tars
  gRNA
gaacaaagtcgtttgggacc

SEQ ID NO: 52717 - DNA, 20 bp, Artificial Sequence
  MKO10052717_A_Tars
  gRNA
ttctttccgcttctcctcgc

SEQ ID NO: 52718 - DNA, 20 bp, Artificial Sequence
  MKO10052718_A_Tas1r1
  gRNA
agccaggaccaccgtggtcg

SEQ ID NO: 52719 - DNA, 20 bp, Artificial Sequence
  MKO10052719_A_Tas1r1
  gRNA
ctcctcaacggtgaaccgca

SEQ ID NO: 52720 - DNA, 20 bp, Artificial Sequence
  MKO10052720_A_Tas1r1
  gRNA
gactgtagcattcgatgaca

SEQ ID NO: 52721 - DNA, 20 bp, Artificial Sequence
  MKO10052721_A_Tas1r2
  gRNA
cgtgctgctcggctacgaga

SEQ ID NO: 52722 - DNA, 20 bp, Artificial Sequence
  MKO10052722_A_Tas1r2
  gRNA
tatcaccaccacacgcgccg

SEQ ID NO: 52723 - DNA, 20 bp, Artificial Sequence
  MKO10052723_A_Tas1r2
  gRNA
acctacctcaaccgatcagt

SEQ ID NO: 52724 - DNA, 20 bp, Artificial Sequence
  MKO10052724_A_Tas1r3
  gRNA
agccctttactcggcgaacc

SEQ ID NO: 52725 - DNA, 20 bp, Artificial Sequence
  MKO10052725_A_Tas1r3
  gRNA
gtcacttagccgatccatgc

SEQ ID NO: 52726 - DNA, 20 bp, Artificial Sequence
  MKO10052726_A_Tas1r3
  gRNA
gtagtgtcaagtctcgagca

SEQ ID NO: 52727 - DNA, 20 bp, Artificial Sequence
  MKO10052727_A_Tas2r102
  gRNA
ataacagcgtcgcctgtccc

SEQ ID NO: 52728 - DNA, 20 bp, Artificial Sequence
  MKO10052728_A_Tas2r102
  gRNA
ctccacgtatattagtacag

SEQ ID NO: 52729 - DNA, 20 bp, Artificial Sequence
  MKO10052729_A_Tas2r102
  gRNA
tgccactgtactaatatacg

SEQ ID NO: 52730 - DNA, 20 bp, Artificial Sequence
  MKO10052730_A_Tas2r103
  gRNA
attattggacccagctttat

SEQ ID NO: 52731 - DNA, 20 bp, Artificial Sequence
  MKO10052731_A_Tas2r103
  gRNA
gtttccaagaatcagtacac

SEQ ID NO: 52732 - DNA, 20 bp, Artificial Sequence
  MKO10052732_A_Tas2r103
  gRNA
ctctcgtgaacatcatagac

SEQ ID NO: 52733 - DNA, 20 bp, Artificial Sequence
  MKO10052733_A_Tas2r104
  gRNA
ttattaaccatctgagcgtt

SEQ ID NO: 52734 - DNA, 20 bp, Artificial Sequence
  MKO10052734_A_Tas2r104
  gRNA
tgctaaaccaaacgctcaga

SEQ ID NO: 52735 - DNA, 20 bp, Artificial Sequence
  MKO10052735_A_Tas2r104
  gRNA
gctccctgcttgttagaatt

SEQ ID NO: 52736 - DNA, 20 bp, Artificial Sequence
  MKO10052736_A_Tas2r105
  gRNA
agggaacacatttattgcac

SEQ ID NO: 52737 - DNA, 20 bp, Artificial Sequence
  MKO10052737_A_Tas2r105
  gRNA
tttctcccagtacatctccg

SEQ ID NO: 52738 - DNA, 20 bp, Artificial Sequence
  MKO10052738_A_Tas2r105
  gRNA
tcatcggcttagcaacttcc

SEQ ID NO: 52739 - DNA, 20 bp, Artificial Sequence
  MKO10052739_A_Tas2r106
  gRNA
gcatcagaggcaaccatatg

SEQ ID NO: 52740 - DNA, 20 bp, Artificial Sequence
  MKO10052740_A_Tas2r106
  gRNA
agttaatgtagtttgcatgc

SEQ ID NO: 52741 - DNA, 20 bp, Artificial Sequence
  MKO10052741_A_Tas2r106
  gRNA
aagccacattcttctcaacc

SEQ ID NO: 52742 - DNA, 20 bp, Artificial Sequence
  MKO10052742_A_Tas2r107
  gRNA
tacgatgattgagtgaccgc

SEQ ID NO: 52743 - DNA, 20 bp, Artificial Sequence
  MKO10052743_A_Tas2r107
  gRNA
tatccatacaacaccaattc

SEQ ID NO: 52744 - DNA, 20 bp, Artificial Sequence
  MKO10052744_A_Tas2r107
  gRNA
tttccacacatgcttacctc

SEQ ID NO: 52745 - DNA, 20 bp, Artificial Sequence
  MKO10052745_A_Tas2r108
  gRNA
tagagatagtccgtttcaac

SEQ ID NO: 52746 - DNA, 20 bp, Artificial Sequence
  MKO10052746_A_Tas2r108
  gRNA
cacccatgtgagcctccgtc

SEQ ID NO: 52747 - DNA, 20 bp, Artificial Sequence
  MKO10052747_A_Tas2r108
  gRNA
cagtcgcagaattgcctctc

SEQ ID NO: 52748 - DNA, 20 bp, Artificial Sequence
  MKO10052748_A_Tas2r109
  gRNA
tagctaaccatattagtgtc

SEQ ID NO: 52749 - DNA, 20 bp, Artificial Sequence
  MKO10052749_A_Tas2r109
  gRNA
tacagttcactagtactcta

SEQ ID NO: 52750 - DNA, 20 bp, Artificial Sequence
  MKO10052750_A_Tas2r109
  gRNA
agtagtttcagttacattac

SEQ ID NO: 52751 - DNA, 20 bp, Artificial Sequence
  MKO10052751_A_Tas2r110
  gRNA
tgaataaccatttcagcgtt

SEQ ID NO: 52752 - DNA, 20 bp, Artificial Sequence
  MKO10052752_A_Tas2r110
  gRNA
atgttgagccttaggttgat

SEQ ID NO: 52753 - DNA, 20 bp, Artificial Sequence
  MKO10052753_A_Tas2r110
  gRNA
tggcaagccaaacgctgaaa

SEQ ID NO: 52754 - DNA, 20 bp, Artificial Sequence
  MKO10052754_A_Tas2r113
  gRNA
ttagcagaatcgctctaatt

SEQ ID NO: 52755 - DNA, 20 bp, Artificial Sequence
  MKO10052755_A_Tas2r113
  gRNA
acaatgattgatcaccgtcc

SEQ ID NO: 52756 - DNA, 20 bp, Artificial Sequence
  MKO10052756_A_Tas2r113
  gRNA
gaacagacacccaccaatct

SEQ ID NO: 52757 - DNA, 20 bp, Artificial Sequence
  MKO10052757_A_Tas2r114
  gRNA
ttaaccatcttcgcaacaac

SEQ ID NO: 52758 - DNA, 20 bp, Artificial Sequence
  MKO10052758_A_Tas2r114
  gRNA
tttcccagttgttgcgaaga

SEQ ID NO: 52759 - DNA, 20 bp, Artificial Sequence
  MKO10052759_A_Tas2r114
  gRNA
cctttcagtttcaactagtg

SEQ ID NO: 52760 - DNA, 20 bp, Artificial Sequence
  MKO10052760_A_Tas2r115
  gRNA
atgttcacattagtaccctt

SEQ ID NO: 52761 - DNA, 20 bp, Artificial Sequence
  MKO10052761_A_Tas2r115
  gRNA
catagctctggtacaatgca

SEQ ID NO: 52762 - DNA, 20 bp, Artificial Sequence
  MKO10052762_A_Tas2r115
  gRNA
aagatgcagtactacaccaa

SEQ ID NO: 52763 - DNA, 20 bp, Artificial Sequence
  MKO10052763_A_Tas2r116
  gRNA
caacctgtgtgatcaaaagc

SEQ ID NO: 52764 - DNA, 20 bp, Artificial Sequence
  MKO10052764_A_Tas2r116
  gRNA
catagcggtggtgaacataa

SEQ ID NO: 52765 - DNA, 20 bp, Artificial Sequence
  MKO10052765_A_Tas2r116
  gRNA
gaagatgaatggtgtcctac

SEQ ID NO: 52766 - DNA, 20 bp, Artificial Sequence
  MKO10052766_A_Tas2r117
  gRNA
catggtcctggtccactgta

SEQ ID NO: 52767 - DNA, 20 bp, Artificial Sequence
  MKO10052767_A_Tas2r117
  gRNA
tcttaacccagtccatacag

SEQ ID NO: 52768 - DNA, 20 bp, Artificial Sequence
  MKO10052768_A_Tas2r117
  gRNA
tacaagtcatgtacaatgct

SEQ ID NO: 52769 - DNA, 20 bp, Artificial Sequence
  MKO10052769_A_Tas2r118
  gRNA
ctgatgagaatcgtctccac

SEQ ID NO: 52770 - DNA, 20 bp, Artificial Sequence
  MKO10052770_A_Tas2r118
  gRNA
ggagacgattctcatcagcc

SEQ ID NO: 52771 - DNA, 20 bp, Artificial Sequence
  MKO10052771_A_Tas2r118
  gRNA
gatgactatagtcagaaaat

SEQ ID NO: 52772 - DNA, 20 bp, Artificial Sequence
  MKO10052772_A_Tas2r119
  gRNA
cttccacatgatcaagtcga

SEQ ID NO: 52773 - DNA, 20 bp, Artificial Sequence
  MKO10052773_A_Tas2r119
  gRNA
atgccatcgacttgatcatg

SEQ ID NO: 52774 - DNA, 20 bp, Artificial Sequence
  MKO10052774_A_Tas2r119
  gRNA
gaatgattcgagaagttgcc

SEQ ID NO: 52775 - DNA, 20 bp, Artificial Sequence
  MKO10052775_A_Tas2r120
  gRNA
agttataattcgatcagctg

SEQ ID NO: 52776 - DNA, 20 bp, Artificial Sequence
  MKO10052776_A_Tas2r120
  gRNA
tgtgggcaatgttaacgaac

SEQ ID NO: 52777 - DNA, 20 bp, Artificial Sequence
  MKO10052777_A_Tas2r120
  gRNA
gtcattcttgtatcttgatt

SEQ ID NO: 52778 - DNA, 20 bp, Artificial Sequence
  MKO10052778_A_Tas2r121
  gRNA
tacggggtatcatgtttacc

SEQ ID NO: 52779 - DNA, 20 bp, Artificial Sequence
  MKO10052779_A_Tas2r121
  gRNA
cttatgtttagcataactgt

SEQ ID NO: 52780 - DNA, 20 bp, Artificial Sequence
  MKO10052780_A_Tas2r121
  gRNA
atatgtcatcacccaaagac

SEQ ID NO: 52781 - DNA, 20 bp, Artificial Sequence
  MKO10052781_A_Tas2r122
  gRNA
aaacgacatgtcgagcctac

SEQ ID NO: 52782 - DNA, 20 bp, Artificial Sequence
  MKO10052782_A_Tas2r122
  gRNA
gacactgatgcacgttgtac

SEQ ID NO: 52783 - DNA, 20 bp, Artificial Sequence
  MKO10052783_A_Tas2r122
  gRNA
gagaattcatgcagtacttc

SEQ ID NO: 52784 - DNA, 20 bp, Artificial Sequence
  MKO10052784_A_Tas2r123
  gRNA
ttggactggcaccttagaca

SEQ ID NO: 52785 - DNA, 20 bp, Artificial Sequence
  MKO10052785_A_Tas2r123
  gRNA
gtaacgggaatcttaggaca

SEQ ID NO: 52786 - DNA, 20 bp, Artificial Sequence
  MKO10052786_A_Tas2r123
  gRNA
cgttactatttccacataca

SEQ ID NO: 52787 - DNA, 20 bp, Artificial Sequence
  MKO10052787_A_Tas2r124
  gRNA
tcagaatacctaattgctac

SEQ ID NO: 52788 - DNA, 20 bp, Artificial Sequence
  MKO10052788_A_Tas2r124
  gRNA
gtttggctgccttatgtagt

SEQ ID NO: 52789 - DNA, 20 bp, Artificial Sequence
  MKO10052789_A_Tas2r124
  gRNA
ctatctcctctagaattgag

SEQ ID NO: 52790 - DNA, 20 bp, Artificial Sequence
  MKO10052790_A_Tas2r125
  gRNA
aaccaacatccgtacatctt

SEQ ID NO: 52791 - DNA, 20 bp, Artificial Sequence
  MKO10052791_A_Tas2r125
  gRNA
agctgcccataagatatcta

SEQ ID NO: 52792 - DNA, 20 bp, Artificial Sequence
  MKO10052792_A_Tas2r125
  gRNA
accatgcaatactatgctaa

SEQ ID NO: 52793 - DNA, 20 bp, Artificial Sequence
  MKO10052793_A_Tas2r126
  gRNA
tcccggagtactcaaccaga

SEQ ID NO: 52794 - DNA, 20 bp, Artificial Sequence
  MKO10052794_A_Tas2r126
  gRNA
cttgcaagaccccaacgtcc

SEQ ID NO: 52795 - DNA, 20 bp, Artificial Sequence
  MKO10052795_A_Tas2r126
  gRNA
gccgcggaacctgagattat

SEQ ID NO: 52796 - DNA, 20 bp, Artificial Sequence
  MKO10052796_A_Tas2r129
  gRNA
tacgctatacacacacgtgt

SEQ ID NO: 52797 - DNA, 20 bp, Artificial Sequence
  MKO10052797_A_Tas2r129
  gRNA
ctctggtgaactgcatacac

SEQ ID NO: 52798 - DNA, 20 bp, Artificial Sequence
  MKO10052798_A_Tas2r129
  gRNA
tgaagaacattctttacgtt

SEQ ID NO: 52799 - DNA, 20 bp, Artificial Sequence
  MKO10052799_A_Tas2r130
  gRNA
tgaggaccgttgacttcttc

SEQ ID NO: 52800 - DNA, 20 bp, Artificial Sequence
  MKO10052800_A_Tas2r130
  gRNA
attacagctaattcactctc

SEQ ID NO: 52801 - DNA, 20 bp, Artificial Sequence
  MKO10052801_A_Tas2r130
  gRNA
tgtcaaggtaaatctcaact

SEQ ID NO: 52802 - DNA, 20 bp, Artificial Sequence
  MKO10052802_A_Tas2r131
  gRNA
atgaggcgctagttcttgta

SEQ ID NO: 52803 - DNA, 20 bp, Artificial Sequence
  MKO10052803_A_Tas2r131
  gRNA
gtcgaagattgctatttccc

SEQ ID NO: 52804 - DNA, 20 bp, Artificial Sequence
  MKO10052804_A_Tas2r131
  gRNA
gctgttcctctagtaaagac

SEQ ID NO: 52805 - DNA, 20 bp, Artificial Sequence
  MKO10052805_A_Tas2r134
  gRNA
agccgtcctaaacaactttc

SEQ ID NO: 52806 - DNA, 20 bp, Artificial Sequence
  MKO10052806_A_Tas2r134
  gRNA
catgtgcaacagataccgta

SEQ ID NO: 52807 - DNA, 20 bp, Artificial Sequence
  MKO10052807_A_Tas2r134
  gRNA
ctgacagtccaccaatgatc

SEQ ID NO: 52808 - DNA, 20 bp, Artificial Sequence
  MKO10052808_A_Tas2r135
  gRNA
gagtttgctcctcgtatctt

SEQ ID NO: 52809 - DNA, 20 bp, Artificial Sequence
  MKO10052809_A_Tas2r135
  gRNA
tgtgtcttaccaaagatacg

SEQ ID NO: 52810 - DNA, 20 bp, Artificial Sequence
  MKO10052810_A_Tas2r135
  gRNA
tttcagaacttcgggatgtc

SEQ ID NO: 52811 - DNA, 20 bp, Artificial Sequence
  MKO10052811_A_Tas2r136
  gRNA
cattgcatccattgcaatgc

SEQ ID NO: 52812 - DNA, 20 bp, Artificial Sequence
  MKO10052812_A_Tas2r136
  gRNA
accaatccacctgatttgcc

SEQ ID NO: 52813 - DNA, 20 bp, Artificial Sequence
  MKO10052813_A_Tas2r136
  gRNA
gagtgaaagtcatagctata

SEQ ID NO: 52814 - DNA, 20 bp, Artificial Sequence
  MKO10052814_A_Tas2r137
  gRNA
gtcgtttcctaccagaaacc

SEQ ID NO: 52815 - DNA, 20 bp, Artificial Sequence
  MKO10052815_A_Tas2r137
  gRNA
ggtttctggtaggaaacgac

SEQ ID NO: 52816 - DNA, 20 bp, Artificial Sequence
  MKO10052816_A_Tas2r137
  gRNA
attcattgaaggggtgttcc

SEQ ID NO: 52817 - DNA, 20 bp, Artificial Sequence
  MKO10052817_A_Tas2r138
  gRNA
gtgagagaagcggacaatct

SEQ ID NO: 52818 - DNA, 20 bp, Artificial Sequence
  MKO10052818_A_Tas2r138
  gRNA
ggccaacgccttcattgtct

SEQ ID NO: 52819 - DNA, 20 bp, Artificial Sequence
  MKO10052819_A_Tas2r138
  gRNA
gcttagcattgcctgatatc

SEQ ID NO: 52820 - DNA, 20 bp, Artificial Sequence
  MKO10052820_A_Tas2r139
  gRNA
ctgcatatgagcctctatgc

SEQ ID NO: 52821 - DNA, 20 bp, Artificial Sequence
  MKO10052821_A_Tas2r139
  gRNA
ttacgttgttgagaccaatg

SEQ ID NO: 52822 - DNA, 20 bp, Artificial Sequence
  MKO10052822_A_Tas2r139
  gRNA
tagtcgatgctagtctcttc

SEQ ID NO: 52823 - DNA, 20 bp, Artificial Sequence
  MKO10052823_A_Tas2r140
  gRNA
ccactcttgtgtcctaattc

SEQ ID NO: 52824 - DNA, 20 bp, Artificial Sequence
  MKO10052824_A_Tas2r140
  gRNA
gaaaggtgaccatcatttgc

SEQ ID NO: 52825 - DNA, 20 bp, Artificial Sequence
  MKO10052825_A_Tas2r140
  gRNA
gagttctgcagcattaaaac

SEQ ID NO: 52826 - DNA, 20 bp, Artificial Sequence
  MKO10052826_A_Tas2r143
  gRNA
tgttaccaagcgaaccttat

SEQ ID NO: 52827 - DNA, 20 bp, Artificial Sequence
  MKO10052827_A_Tas2r143
  gRNA
accggcagctgacatgattg

SEQ ID NO: 52828 - DNA, 20 bp, Artificial Sequence
  MKO10052828_A_Tas2r143
  gRNA
gtttggggttgctaaacagc

SEQ ID NO: 52829 - DNA, 20 bp, Artificial Sequence
  MKO10052829_A_Tas2r144
  gRNA
atggtgctgaaaccgcctcc

SEQ ID NO: 52830 - DNA, 20 bp, Artificial Sequence
  MKO10052830_A_Tas2r144
  gRNA
catattgtagagaccacgaa

SEQ ID NO: 52831 - DNA, 20 bp, Artificial Sequence
  MKO10052831_A_Tas2r144
  gRNA
tgaagtcataatccctttcg

SEQ ID NO: 52832 - DNA, 20 bp, Artificial Sequence
  MKO10052832_A_Tasp1
  gRNA
gaaacgagggggctttgtgc

SEQ ID NO: 52833 - DNA, 20 bp, Artificial Sequence
  MKO10052833_A_Tasp1
  gRNA
ggactttccatccattatgc

SEQ ID NO: 52834 - DNA, 20 bp, Artificial Sequence
  MKO10052834_A_Tasp1
  gRNA
tccttaaactttggagccgt

SEQ ID NO: 52835 - DNA, 20 bp, Artificial Sequence
  MKO10052835_A_Tatdn1
  gRNA
ctcaaactcatcacatctcg

SEQ ID NO: 52836 - DNA, 20 bp, Artificial Sequence
  MKO10052836_A_Tatdn1
  gRNA
aatcctgctaagtactgatc

SEQ ID NO: 52837 - DNA, 20 bp, Artificial Sequence
  MKO10052837_A_Tatdn1
  gRNA
ccatttcagtttatgatcac

SEQ ID NO: 52838 - DNA, 20 bp, Artificial Sequence
  MKO10052838_A_Tatdn2
  gRNA
agggacggaccgtccaggag

SEQ ID NO: 52839 - DNA, 20 bp, Artificial Sequence
  MKO10052839_A_Tatdn2
  gRNA
tgctgacctactcttccgcc

SEQ ID NO: 52840 - DNA, 20 bp, Artificial Sequence
  MKO10052840_A_Tatdn2
  gRNA
agaactggtcaagagcgttg

SEQ ID NO: 52841 - DNA, 20 bp, Artificial Sequence
  MKO10052841_A_Tatdn3
  gRNA
acctttaatgtcacgcttct

SEQ ID NO: 52842 - DNA, 20 bp, Artificial Sequence
  MKO10052842_A_Tatdn3
  gRNA
acatacgttgtcaaagtccg

SEQ ID NO: 52843 - DNA, 20 bp, Artificial Sequence
  MKO10052843_A_Tatdn3
  gRNA
accaagaagcgtgacattaa

SEQ ID NO: 52844 - DNA, 20 bp, Artificial Sequence
  MKO10052844_A_Tat
  gRNA
ggcaagcttaccgatagatg

SEQ ID NO: 52845 - DNA, 20 bp, Artificial Sequence
  MKO10052845_A_Tat
  gRNA
ctggactccgggaagtacaa

SEQ ID NO: 52846 - DNA, 20 bp, Artificial Sequence
  MKO10052846_A_Tat
  gRNA
cgacctcctcccgactggat

SEQ ID NO: 52847 - DNA, 20 bp, Artificial Sequence
  MKO10052847_A_Tax1bp1
  gRNA
ctccacgaatttcaccctta

SEQ ID NO: 52848 - DNA, 20 bp, Artificial Sequence
  MKO10052848_A_Tax1bp1
  gRNA
tgaaggcaattccgatatgt

SEQ ID NO: 52849 - DNA, 20 bp, Artificial Sequence
  MKO10052849_A_Tax1bp1
  gRNA
agggcggtgtgagcaattgc

SEQ ID NO: 52850 - DNA, 20 bp, Artificial Sequence
  MKO10052850_A_Tax1bp3
  gRNA
ccagcctgtcaccgccgtag

SEQ ID NO: 52851 - DNA, 20 bp, Artificial Sequence
  MKO10052851_A_Tax1bp3
  gRNA
ctcaccactacggcggtgac

SEQ ID NO: 52852 - DNA, 20 bp, Artificial Sequence
  MKO10052852_A_Tax1bp3
  gRNA
ccttgggctaggtgaatggc

SEQ ID NO: 52853 - DNA, 20 bp, Artificial Sequence
  MKO10052853_A_Taz
  gRNA
tcctaaaactccgccacatc

SEQ ID NO: 52854 - DNA, 20 bp, Artificial Sequence
  MKO10052854_A_Taz
  gRNA
taggcccatgacgacgctgc

SEQ ID NO: 52855 - DNA, 20 bp, Artificial Sequence
  MKO10052855_A_Taz
  gRNA
tctagccagcagcgtcgtca

SEQ ID NO: 52856 - DNA, 20 bp, Artificial Sequence
  MKO10052856_A_Tbata
  gRNA
aggggagtttagcacctcgt

SEQ ID NO: 52857 - DNA, 20 bp, Artificial Sequence
  MKO10052857_A_Tbata
  gRNA
tcgtccctgaccacgcagac

SEQ ID NO: 52858 - DNA, 20 bp, Artificial Sequence
  MKO10052858_A_Tbata
  gRNA
ctagtcacctcatccctacg

SEQ ID NO: 52859 - DNA, 20 bp, Artificial Sequence
  MKO10052859_A_Tbc1d10a
  gRNA
ctacacgctgtaccgccctg

SEQ ID NO: 52860 - DNA, 20 bp, Artificial Sequence
  MKO10052860_A_Tbc1d10a
  gRNA
catgagatgttcgtgtcccg

SEQ ID NO: 52861 - DNA, 20 bp, Artificial Sequence
  MKO10052861_A_Tbc1d10a
  gRNA
gattcgtcttcgatgccaga

SEQ ID NO: 52862 - DNA, 20 bp, Artificial Sequence
  MKO10052862_A_Tbc1d10b
  gRNA
ccagccacttgagctcccgc

SEQ ID NO: 52863 - DNA, 20 bp, Artificial Sequence
  MKO10052863_A_Tbc1d10b
  gRNA
gcctgacagtagccctcgtc

SEQ ID NO: 52864 - DNA, 20 bp, Artificial Sequence
  MKO10052864_A_Tbc1d10b
  gRNA
taccatctacaggcctgacg

SEQ ID NO: 52865 - DNA, 20 bp, Artificial Sequence
  MKO10052865_A_Tbc1d10c
  gRNA
catgtcccgacgatacaaga

SEQ ID NO: 52866 - DNA, 20 bp, Artificial Sequence
  MKO10052866_A_Tbc1d10c
  gRNA
acggtgcaagtctctgccaa

SEQ ID NO: 52867 - DNA, 20 bp, Artificial Sequence
  MKO10052867_A_Tbc1d10c
  gRNA
ggtaaagatccagtgccgca

SEQ ID NO: 52868 - DNA, 20 bp, Artificial Sequence
  MKO10052868_A_Tbc1d12
  gRNA
taggagtacgaagctcgcac

SEQ ID NO: 52869 - DNA, 20 bp, Artificial Sequence
  MKO10052869_A_Tbc1d12
  gRNA
acgacgcaagagctttgcgc

SEQ ID NO: 52870 - DNA, 20 bp, Artificial Sequence
  MKO10052870_A_Tbc1d12
  gRNA
agaagcgctgcgtcaccggc

SEQ ID NO: 52871 - DNA, 20 bp, Artificial Sequence
  MKO10052871_A_Tbc1d13
  gRNA
agcctcgtggacttccatcc

SEQ ID NO: 52872 - DNA, 20 bp, Artificial Sequence
  MKO10052872_A_Tbc1d13
  gRNA
aggccaacatgggtgtattc

SEQ ID NO: 52873 - DNA, 20 bp, Artificial Sequence
  MKO10052873_A_Tbc1d13
  gRNA
ctccctgaatacacccatgt

SEQ ID NO: 52874 - DNA, 20 bp, Artificial Sequence
  MKO10052874_A_Tbc1d14
  gRNA
gatgttcaactcgttgccaa

SEQ ID NO: 52875 - DNA, 20 bp, Artificial Sequence
  MKO10052875_A_Tbc1d14
  gRNA
ctcacgcaggtctgtcctcg

SEQ ID NO: 52876 - DNA, 20 bp, Artificial Sequence
  MKO10052876_A_Tbc1d14
  gRNA
tgccacagtacctcgtttct

SEQ ID NO: 52877 - DNA, 20 bp, Artificial Sequence
  MKO10052877_A_Tbc1d15
  gRNA
gggcatgggctggtcgtacc

SEQ ID NO: 52878 - DNA, 20 bp, Artificial Sequence
  MKO10052878_A_Tbc1d15
  gRNA
agtccactctacgactgagc

SEQ ID NO: 52879 - DNA, 20 bp, Artificial Sequence
  MKO10052879_A_Tbc1d15
  gRNA
atggtcgttcctgttcagcc

SEQ ID NO: 52880 - DNA, 20 bp, Artificial Sequence
  MKO10052880_A_Tbc1d16
  gRNA
gctatccctgctcacgccat

SEQ ID NO: 52881 - DNA, 20 bp, Artificial Sequence
  MKO10052881_A_Tbc1d16
  gRNA
cttgtggtgcgccgccgccg

SEQ ID NO: 52882 - DNA, 20 bp, Artificial Sequence
  MKO10052882_A_Tbc1d16
  gRNA
acacgtccagcctccggtac

SEQ ID NO: 52883 - DNA, 20 bp, Artificial Sequence
  MKO10052883_A_Tbc1d17
  gRNA
atcggctaaggactcggagc

SEQ ID NO: 52884 - DNA, 20 bp, Artificial Sequence
  MKO10052884_A_Tbc1d17
  gRNA
cgatgagcgagtctggatcc

SEQ ID NO: 52885 - DNA, 20 bp, Artificial Sequence
  MKO10052885_A_Tbc1d17
  gRNA
acagcgacgtctttctgcac

SEQ ID NO: 52886 - DNA, 20 bp, Artificial Sequence
  MKO10052886_A_Tbc1d19
  gRNA
taatgtacctttcgtgctag

SEQ ID NO: 52887 - DNA, 20 bp, Artificial Sequence
  MKO10052887_A_Tbc1d19
  gRNA
gagtatcccactagcacgaa

SEQ ID NO: 52888 - DNA, 20 bp, Artificial Sequence
  MKO10052888_A_Tbc1d19
  gRNA
gagtgattcgagtctgatct

SEQ ID NO: 52889 - DNA, 20 bp, Artificial Sequence
  MKO10052889_A_Tbc1d1
  gRNA
aatcttcccggcctgccgga

SEQ ID NO: 52890 - DNA, 20 bp, Artificial Sequence
  MKO10052890_A_Tbc1d1
  gRNA
taccttcgccaaaaagttcg

SEQ ID NO: 52891 - DNA, 20 bp, Artificial Sequence
  MKO10052891_A_Tbc1d1
  gRNA
attcatctgccgagagtgct

SEQ ID NO: 52892 - DNA, 20 bp, Artificial Sequence
  MKO10052892_A_Tbc1d20
  gRNA
gctcccttacttgacacagg

SEQ ID NO: 52893 - DNA, 20 bp, Artificial Sequence
  MKO10052893_A_Tbc1d20
  gRNA
ccgacgaatggctatcagtg

SEQ ID NO: 52894 - DNA, 20 bp, Artificial Sequence
  MKO10052894_A_Tbc1d20
  gRNA
gaaatgtgaccacgatgtca

SEQ ID NO: 52895 - DNA, 20 bp, Artificial Sequence
  MKO10052895_A_Tbc1d21
  gRNA
gccacgagtagtagcctgtg

SEQ ID NO: 52896 - DNA, 20 bp, Artificial Sequence
  MKO10052896_A_Tbc1d21
  gRNA
gatctttatcatacagcctc

SEQ ID NO: 52897 - DNA, 20 bp, Artificial Sequence
  MKO10052897_A_Tbc1d21
  gRNA
agggactacaccccttcgtg

SEQ ID NO: 52898 - DNA, 20 bp, Artificial Sequence
  MKO10052898_A_Tbc1d22a
  gRNA
ccgtttgatccgctgttaca

SEQ ID NO: 52899 - DNA, 20 bp, Artificial Sequence
  MKO10052899_A_Tbc1d22a
  gRNA
acttacgtgccatgtaacag

SEQ ID NO: 52900 - DNA, 20 bp, Artificial Sequence
  MKO10052900_A_Tbc1d22a
  gRNA
tttgaacttgtccagccgag

SEQ ID NO: 52901 - DNA, 20 bp, Artificial Sequence
  MKO10052901_A_Tbc1d22b
  gRNA
tggtattccgcgcaaactcg

SEQ ID NO: 52902 - DNA, 20 bp, Artificial Sequence
  MKO10052902_A_Tbc1d22b
  gRNA
ccagtttccacgagtttgcg

SEQ ID NO: 52903 - DNA, 20 bp, Artificial Sequence
  MKO10052903_A_Tbc1d22b
  gRNA
cgaacttccctgggaacgcc

SEQ ID NO: 52904 - DNA, 20 bp, Artificial Sequence
  MKO10052904_A_Tbc1d23
  gRNA
cagttgtataggtcgctgcg

SEQ ID NO: 52905 - DNA, 20 bp, Artificial Sequence
  MKO10052905_A_Tbc1d23
  gRNA
cagattgctctgaacgttgc

SEQ ID NO: 52906 - DNA, 20 bp, Artificial Sequence
  MKO10052906_A_Tbc1d23
  gRNA
gatgaaatggcctccccttc

SEQ ID NO: 52907 - DNA, 20 bp, Artificial Sequence
  MKO10052907_A_Tbc1d24
  gRNA
agcgagaggactaaattcgg

SEQ ID NO: 52908 - DNA, 20 bp, Artificial Sequence
  MKO10052908_A_Tbc1d24
  gRNA
aagtgtaccagcgcctgatc

SEQ ID NO: 52909 - DNA, 20 bp, Artificial Sequence
  MKO10052909_A_Tbc1d24
  gRNA
ggatgtcccggatcaggcgc

SEQ ID NO: 52910 - DNA, 20 bp, Artificial Sequence
  MKO10052910_A_Tbc1d25
  gRNA
gtcctagccggtctcgagcc

SEQ ID NO: 52911 - DNA, 20 bp, Artificial Sequence
  MKO10052911_A_Tbc1d25
  gRNA
ggatcctcagatcacctcgc

SEQ ID NO: 52912 - DNA, 20 bp, Artificial Sequence
  MKO10052912_A_Tbc1d25
  gRNA
gcctgggcacctccgacggg

SEQ ID NO: 52913 - DNA, 20 bp, Artificial Sequence
  MKO10052913_A_Tbc1d2b
  gRNA
tttggacggaacccttacaa

SEQ ID NO: 52914 - DNA, 20 bp, Artificial Sequence
  MKO10052914_A_Tbc1d2b
  gRNA
gtcgccgttccctcgagcaa

SEQ ID NO: 52915 - DNA, 20 bp, Artificial Sequence
  MKO10052915_A_Tbc1d2b
  gRNA
ccgatgcctgagggcagtaa

SEQ ID NO: 52916 - DNA, 20 bp, Artificial Sequence
  MKO10052916_A_Tbc1d2
  gRNA
gccagtccatcggaaaagaa

SEQ ID NO: 52917 - DNA, 20 bp, Artificial Sequence
  MKO10052917_A_Tbc1d2
  gRNA
tgccgcacccacgagtccag

SEQ ID NO: 52918 - DNA, 20 bp, Artificial Sequence
  MKO10052918_A_Tbc1d2
  gRNA
gaaggtgttgctttgccgct

SEQ ID NO: 52919 - DNA, 20 bp, Artificial Sequence
  MKO10052919_A_Tbc1d30
  gRNA
tgctattggcttacgcccgg

SEQ ID NO: 52920 - DNA, 20 bp, Artificial Sequence
  MKO10052920_A_Tbc1d30
  gRNA
gtgcagataatgatccgcca

SEQ ID NO: 52921 - DNA, 20 bp, Artificial Sequence
  MKO10052921_A_Tbc1d30
  gRNA
acccgacgttcttgttccac

SEQ ID NO: 52922 - DNA, 20 bp, Artificial Sequence
  MKO10052922_A_Tbc1d31
  gRNA
ccttctgtatgcccaccgac

SEQ ID NO: 52923 - DNA, 20 bp, Artificial Sequence
  MKO10052923_A_Tbc1d31
  gRNA
aataatcagctaacgccaca

SEQ ID NO: 52924 - DNA, 20 bp, Artificial Sequence
  MKO10052924_A_Tbc1d31
  gRNA
aaagctgaacatccgccagt

SEQ ID NO: 52925 - DNA, 20 bp, Artificial Sequence
  MKO10052925_A_Tbc1d32
  gRNA
gcatgttaccaaaagaacgc

SEQ ID NO: 52926 - DNA, 20 bp, Artificial Sequence
  MKO10052926_A_Tbc1d32
  gRNA
ggcgatgatcaacaagtttg

SEQ ID NO: 52927 - DNA, 20 bp, Artificial Sequence
  MKO10052927_A_Tbc1d32
  gRNA
acagcccacctgattgaagg

SEQ ID NO: 52928 - DNA, 20 bp, Artificial Sequence
  MKO10052928_A_Tbc1d4
  gRNA
cgacactaaatcagtcgtgc

SEQ ID NO: 52929 - DNA, 20 bp, Artificial Sequence
  MKO10052929_A_Tbc1d4
  gRNA
ccagtgcgccaacgaatctc

SEQ ID NO: 52930 - DNA, 20 bp, Artificial Sequence
  MKO10052930_A_Tbc1d4
  gRNA
tgacgctgctgcaccgagat

SEQ ID NO: 52931 - DNA, 20 bp, Artificial Sequence
  MKO10052931_A_Tbc1d5
  gRNA
gatcaacaaccccctatcac

SEQ ID NO: 52932 - DNA, 20 bp, Artificial Sequence
  MKO10052932_A_Tbc1d5
  gRNA
gcaggttccgcagcatttgc

SEQ ID NO: 52933 - DNA, 20 bp, Artificial Sequence
  MKO10052933_A_Tbc1d5
  gRNA
gtactccttcatcctgtgat

SEQ ID NO: 52934 - DNA, 20 bp, Artificial Sequence
  MKO10052934_A_Tbc1d7
  gRNA
ccataccaacgcgcgataca

SEQ ID NO: 52935 - DNA, 20 bp, Artificial Sequence
  MKO10052935_A_Tbc1d7
  gRNA
cccatccatgtatcgcgcgt

SEQ ID NO: 52936 - DNA, 20 bp, Artificial Sequence
  MKO10052936_A_Tbc1d7
  gRNA
gaatgagtgtcatggtgcgg

SEQ ID NO: 52937 - DNA, 20 bp, Artificial Sequence
  MKO10052937_A_Tbc1d8b
  gRNA
ctagggactaatcgctgaag

SEQ ID NO: 52938 - DNA, 20 bp, Artificial Sequence
  MKO10052938_A_Tbc1d8b
  gRNA
gtctggtgtaggatgcgaaa

SEQ ID NO: 52939 - DNA, 20 bp, Artificial Sequence
  MKO10052939_A_Tbc1d8b
  gRNA
ccgtcctctccagtaactgc

SEQ ID NO: 52940 - DNA, 20 bp, Artificial Sequence
  MKO10052940_A_Tbc1d8
  gRNA
tgatcttgaccccgacctgc

SEQ ID NO: 52941 - DNA, 20 bp, Artificial Sequence
  MKO10052941_A_Tbc1d8
  gRNA
tggaatccagcaccgcgtcc

SEQ ID NO: 52942 - DNA, 20 bp, Artificial Sequence
  MKO10052942_A_Tbc1d8
  gRNA
gacatcgccagctttgtcaa

SEQ ID NO: 52943 - DNA, 20 bp, Artificial Sequence
  MKO10052943_A_Tbc1d9b
  gRNA
aagggccgcgtgccgcgcca

SEQ ID NO: 52944 - DNA, 20 bp, Artificial Sequence
  MKO10052944_A_Tbc1d9b
  gRNA
gctgtccagcagttgtcgca

SEQ ID NO: 52945 - DNA, 20 bp, Artificial Sequence
  MKO10052945_A_Tbc1d9b
  gRNA
actgtccatcttcgacaacg

SEQ ID NO: 52946 - DNA, 20 bp, Artificial Sequence
  MKO10052946_A_Tbc1d9
  gRNA
tgtctttcaagttcgcgaac

SEQ ID NO: 52947 - DNA, 20 bp, Artificial Sequence
  MKO10052947_A_Tbc1d9
  gRNA
ctcggtgatccacagcgcgt

SEQ ID NO: 52948 - DNA, 20 bp, Artificial Sequence
  MKO10052948_A_Tbc1d9
  gRNA
gtacggtgcgactcgggcac

SEQ ID NO: 52949 - DNA, 20 bp, Artificial Sequence
  MKO10052949_A_Tbca
  gRNA
tccttaccgcctcactactc

SEQ ID NO: 52950 - DNA, 20 bp, Artificial Sequence
  MKO10052950_A_Tbca
  gRNA
atcttgatctgcctcacgcg

SEQ ID NO: 52951 - DNA, 20 bp, Artificial Sequence
  MKO10052951_A_Tbca
  gRNA
cggctttacctgcttcttaa

SEQ ID NO: 52952 - DNA, 20 bp, Artificial Sequence
  MKO10052952_A_Tbcb
  gRNA
cgtccggctcggagagtatg

SEQ ID NO: 52953 - DNA, 20 bp, Artificial Sequence
  MKO10052953_A_Tbcb
  gRNA
tctcaccagaagcttacgaa

SEQ ID NO: 52954 - DNA, 20 bp, Artificial Sequence
  MKO10052954_A_Tbcb
  gRNA
atgcgacagccgtcatccac

SEQ ID NO: 52955 - DNA, 20 bp, Artificial Sequence
  MKO10052955_A_Tbccd1
  gRNA
tcctcggttgcaccgcatcg

SEQ ID NO: 52956 - DNA, 20 bp, Artificial Sequence
  MKO10052956_A_Tbccd1
  gRNA
accacgatgcggtgcaaccg

SEQ ID NO: 52957 - DNA, 20 bp, Artificial Sequence
  MKO10052957_A_Tbccd1
  gRNA
tctttgaccacaaatccgtt

SEQ ID NO: 52958 - DNA, 20 bp, Artificial Sequence
  MKO10052958_A_Tbcc
  gRNA
tgtcctaacggaacgtcgcc

SEQ ID NO: 52959 - DNA, 20 bp, Artificial Sequence
  MKO10052959_A_Tbcc
  gRNA
caacaccttgcggcttgcga

SEQ ID NO: 52960 - DNA, 20 bp, Artificial Sequence
  MKO10052960_A_Tbcc
  gRNA
cgctcaaaaggacgtcgcgc

SEQ ID NO: 52961 - DNA, 20 bp, Artificial Sequence
  MKO10052961_A_Tbcd
  gRNA
gcgtctgtttcctcacgaag

SEQ ID NO: 52962 - DNA, 20 bp, Artificial Sequence
  MKO10052962_A_Tbcd
  gRNA
tctgcccgaccttgtccatc

SEQ ID NO: 52963 - DNA, 20 bp, Artificial Sequence
  MKO10052963_A_Tbcd
  gRNA
gcttaccaaggtgtggatcc

SEQ ID NO: 52964 - DNA, 20 bp, Artificial Sequence
  MKO10052964_A_Tbcel
  gRNA
tctacagccgtataccaccg

SEQ ID NO: 52965 - DNA, 20 bp, Artificial Sequence
  MKO10052965_A_Tbcel
  gRNA
ctgttcaacacgagcacgct

SEQ ID NO: 52966 - DNA, 20 bp, Artificial Sequence
  MKO10052966_A_Tbcel
  gRNA
gtgctcgtgttgaacagctg

SEQ ID NO: 52967 - DNA, 20 bp, Artificial Sequence
  MKO10052967_A_Tbce
  gRNA
cgagcacatagcgcttctta

SEQ ID NO: 52968 - DNA, 20 bp, Artificial Sequence
  MKO10052968_A_Tbce
  gRNA
aagcgctatgtgctcgaaga

SEQ ID NO: 52969 - DNA, 20 bp, Artificial Sequence
  MKO10052969_A_Tbce
  gRNA
aagcatgacgggagccacga

SEQ ID NO: 52970 - DNA, 20 bp, Artificial Sequence
  MKO10052970_A_Tbck
  gRNA
aagttaccttccgatccaac

SEQ ID NO: 52971 - DNA, 20 bp, Artificial Sequence
  MKO10052971_A_Tbck
  gRNA
ggagcactgtgagcgcagtt

SEQ ID NO: 52972 - DNA, 20 bp, Artificial Sequence
  MKO10052972_A_Tbck
  gRNA
attgtagggccatattaaac

SEQ ID NO: 52973 - DNA, 20 bp, Artificial Sequence
  MKO10052973_A_Tbk1
  gRNA
caacatcatgcgcgtcatag

SEQ ID NO: 52974 - DNA, 20 bp, Artificial Sequence
  MKO10052974_A_Tbk1
  gRNA
ggtgcactatgccgttctct

SEQ ID NO: 52975 - DNA, 20 bp, Artificial Sequence
  MKO10052975_A_Tbk1
  gRNA
gctgccgtttagacccttcg

SEQ ID NO: 52976 - DNA, 20 bp, Artificial Sequence
  MKO10052976_A_Tbkbp1
  gRNA
gccgtagatgagtctctacc

SEQ ID NO: 52977 - DNA, 20 bp, Artificial Sequence
  MKO10052977_A_Tbkbp1
  gRNA
gaagtctctcgcattccgcc

SEQ ID NO: 52978 - DNA, 20 bp, Artificial Sequence
  MKO10052978_A_Tbkbp1
  gRNA
gtgcgtggagaaaagcgact

SEQ ID NO: 52979 - DNA, 20 bp, Artificial Sequence
  MKO10052979_A_Tbl1xr1
  gRNA
agacgtgacatccttgttac

SEQ ID NO: 52980 - DNA, 20 bp, Artificial Sequence
  MKO10052980_A_Tbl1xr1
  gRNA
ccgaagcacaaccgctttat

SEQ ID NO: 52981 - DNA, 20 bp, Artificial Sequence
  MKO10052981_A_Tbl1xr1
  gRNA
tgtctaagcacgagctgcgt

SEQ ID NO: 52982 - DNA, 20 bp, Artificial Sequence
  MKO10052982_A_Tbl1x
  gRNA
tcacagcatcaattaacgat

SEQ ID NO: 52983 - DNA, 20 bp, Artificial Sequence
  MKO10052983_A_Tbl1x
  gRNA
actttcgatcccaaacgtga

SEQ ID NO: 52984 - DNA, 20 bp, Artificial Sequence
  MKO10052984_A_Tbl1x
  gRNA
cactagtgtaccattgatgt

SEQ ID NO: 52985 - DNA, 20 bp, Artificial Sequence
  MKO10052985_A_Tbl2
  gRNA
agtgcggtcatccgcacagg

SEQ ID NO: 52986 - DNA, 20 bp, Artificial Sequence
  MKO10052986_A_Tbl2
  gRNA
tgaagcgtaccaaggtggca

SEQ ID NO: 52987 - DNA, 20 bp, Artificial Sequence
  MKO10052987_A_Tbl2
  gRNA
aaagcccccatcttcccgct

SEQ ID NO: 52988 - DNA, 20 bp, Artificial Sequence
  MKO10052988_A_Tbl3
  gRNA
aggggctttgcttcggagcc

SEQ ID NO: 52989 - DNA, 20 bp, Artificial Sequence
  MKO10052989_A_Tbl3
  gRNA
agccagccgcgcactgctgc

SEQ ID NO: 52990 - DNA, 20 bp, Artificial Sequence
  MKO10052990_A_Tbl3
  gRNA
agtgacagtgccttcccgcc

SEQ ID NO: 52991 - DNA, 20 bp, Artificial Sequence
  MKO10052991_A_Tbpl1
  gRNA
gcccgtagtctgcagaaact

SEQ ID NO: 52992 - DNA, 20 bp, Artificial Sequence
  MKO10052992_A_Tbpl1
  gRNA
agactttatccgatagcaca

SEQ ID NO: 52993 - DNA, 20 bp, Artificial Sequence
  MKO10052993_A_Tbpl1
  gRNA
ttcatcctgccgtgtgctat

SEQ ID NO: 52994 - DNA, 20 bp, Artificial Sequence
  MKO10052994_A_Tbpl2
  gRNA
agcgagaaagtatgctcgtg

SEQ ID NO: 52995 - DNA, 20 bp, Artificial Sequence
  MKO10052995_A_Tbpl2
  gRNA
catacctactgaactgccga

SEQ ID NO: 52996 - DNA, 20 bp, Artificial Sequence
  MKO10052996_A_Tbpl2
  gRNA
tgtagtttccactgcaaatc

SEQ ID NO: 52997 - DNA, 20 bp, Artificial Sequence
  MKO10052997_A_Tbp
  gRNA
ggagtaagtcctgtgccgta

SEQ ID NO: 52998 - DNA, 20 bp, Artificial Sequence
  MKO10052998_A_Tbp
  gRNA
aaaatcaacgcagttgtccg

SEQ ID NO: 52999 - DNA, 20 bp, Artificial Sequence
  MKO10052999_A_Tbp
  gRNA
attgtatctaccgtgaatct

SEQ ID NO: 53000 - DNA, 20 bp, Artificial Sequence
  MKO10053000_A_Tbr1
  gRNA
gcctccttacatccgtgttc

SEQ ID NO: 53001 - DNA, 20 bp, Artificial Sequence
  MKO10053001_A_Tbr1
  gRNA
gtaccagccccgtctgcacg

SEQ ID NO: 53002 - DNA, 20 bp, Artificial Sequence
  MKO10053002_A_Tbr1
  gRNA
aaaccgggtctatatgcatc

SEQ ID NO: 53003 - DNA, 20 bp, Artificial Sequence
  MKO10053003_A_Tbrg1
  gRNA
accgccgtccttgatctgac

SEQ ID NO: 53004 - DNA, 20 bp, Artificial Sequence
  MKO10053004_A_Tbrg1
  gRNA
tgtcagaccccctagtccga

SEQ ID NO: 53005 - DNA, 20 bp, Artificial Sequence
  MKO10053005_A_Tbrg1
  gRNA
actggttcgacccattgccc

SEQ ID NO: 53006 - DNA, 20 bp, Artificial Sequence
  MKO10053006_A_Tbrg4
  gRNA
gatcaacgacagccgtacat

SEQ ID NO: 53007 - DNA, 20 bp, Artificial Sequence
  MKO10053007_A_Tbrg4
  gRNA
ctggacctggcctacgccta

SEQ ID NO: 53008 - DNA, 20 bp, Artificial Sequence
  MKO10053008_A_Tbrg4
  gRNA
gcagcaagggcaccgaccgc

SEQ ID NO: 53009 - DNA, 20 bp, Artificial Sequence
  MKO10053009_A_Tbx10
  gRNA
cgtggccattgtcgtccatc

SEQ ID NO: 53010 - DNA, 20 bp, Artificial Sequence
  MKO10053010_A_Tbx10
  gRNA
gtgggtccacgaagaccacg

SEQ ID NO: 53011 - DNA, 20 bp, Artificial Sequence
  MKO10053011_A_Tbx10
  gRNA
ttatcagccccgtttccacg

SEQ ID NO: 53012 - DNA, 20 bp, Artificial Sequence
  MKO10053012_A_Tbx15
  gRNA
tcatctctgttccgatatca

SEQ ID NO: 53013 - DNA, 20 bp, Artificial Sequence
  MKO10053013_A_Tbx15
  gRNA
gccatgagagtgaaaatcac

SEQ ID NO: 53014 - DNA, 20 bp, Artificial Sequence
  MKO10053014_A_Tbx15
  gRNA
ggtccgctcggtgagcacct

SEQ ID NO: 53015 - DNA, 20 bp, Artificial Sequence
  MKO10053015_A_Tbx18
  gRNA
cggtcgtgccaagccaggta

SEQ ID NO: 53016 - DNA, 20 bp, Artificial Sequence
  MKO10053016_A_Tbx18
  gRNA
ccaacggggaggcgccctgc

SEQ ID NO: 53017 - DNA, 20 bp, Artificial Sequence
  MKO10053017_A_Tbx18
  gRNA
gagatcttcacccgcattgc

SEQ ID NO: 53018 - DNA, 20 bp, Artificial Sequence
  MKO10053018_A_Tbx19
  gRNA
tccggaccgacagtcaccgc

SEQ ID NO: 53019 - DNA, 20 bp, Artificial Sequence
  MKO10053019_A_Tbx19
  gRNA
cggtccggacgaagtccagt

SEQ ID NO: 53020 - DNA, 20 bp, Artificial Sequence
  MKO10053020_A_Tbx19
  gRNA
caagtacaaccctttcgcca

SEQ ID NO: 53021 - DNA, 20 bp, Artificial Sequence
  MKO10053021_A_Tbx1
  gRNA
ccgtagatgacaagcgctac

SEQ ID NO: 53022 - DNA, 20 bp, Artificial Sequence
  MKO10053022_A_Tbx1
  gRNA
ccggtagcgcttgtcatcta

SEQ ID NO: 53023 - DNA, 20 bp, Artificial Sequence
  MKO10053023_A_Tbx1
  gRNA
acactaccacccggactcgc

SEQ ID NO: 53024 - DNA, 20 bp, Artificial Sequence
  MKO10053024_A_Tbx20
  gRNA
atcgccgcgcttatgtccag

SEQ ID NO: 53025 - DNA, 20 bp, Artificial Sequence
  MKO10053025_A_Tbx20
  gRNA
ccaccgggacgatgtccatc

SEQ ID NO: 53026 - DNA, 20 bp, Artificial Sequence
  MKO10053026_A_Tbx20
  gRNA
gccgccgctggacataagcg

SEQ ID NO: 53027 - DNA, 20 bp, Artificial Sequence
  MKO10053027_A_Tbx21
  gRNA
caccactggcggtaccagag

SEQ ID NO: 53028 - DNA, 20 bp, Artificial Sequence
  MKO10053028_A_Tbx21
  gRNA
atgcgccaggaagtttcatt

SEQ ID NO: 53029 - DNA, 20 bp, Artificial Sequence
  MKO10053029_A_Tbx21
  gRNA
ccgggctcacctctgcgttc

SEQ ID NO: 53030 - DNA, 20 bp, Artificial Sequence
  MKO10053030_A_Tbx22
  gRNA
tcgcgcgcacgccttctccg

SEQ ID NO: 53031 - DNA, 20 bp, Artificial Sequence
  MKO10053031_A_Tbx22
  gRNA
accaagttacctatagcgtt

SEQ ID NO: 53032 - DNA, 20 bp, Artificial Sequence
  MKO10053032_A_Tbx22
  gRNA
cggtggattccaaacgctat

SEQ ID NO: 53033 - DNA, 20 bp, Artificial Sequence
  MKO10053033_A_Tbx2
  gRNA
gagggcggtggttctcgcgc

SEQ ID NO: 53034 - DNA, 20 bp, Artificial Sequence
  MKO10053034_A_Tbx2
  gRNA
cactgtaagccggagcgtga

SEQ ID NO: 53035 - DNA, 20 bp, Artificial Sequence
  MKO10053035_A_Tbx2
  gRNA
aaacttatagcggcagtcat

SEQ ID NO: 53036 - DNA, 20 bp, Artificial Sequence
  MKO10053036_A_Tbx3
  gRNA
gccccgctacgggggagcaa

SEQ ID NO: 53037 - DNA, 20 bp, Artificial Sequence
  MKO10053037_A_Tbx3
  gRNA
catccattgctcccccgtag

SEQ ID NO: 53038 - DNA, 20 bp, Artificial Sequence
  MKO10053038_A_Tbx3
  gRNA
ctgtaccccgcttgtgaaac

SEQ ID NO: 53039 - DNA, 20 bp, Artificial Sequence
  MKO10053039_A_Tbx4
  gRNA
gccaaaagcattgttctcgt

SEQ ID NO: 53040 - DNA, 20 bp, Artificial Sequence
  MKO10053040_A_Tbx4
  gRNA
gccgacgagaacaatgcttt

SEQ ID NO: 53041 - DNA, 20 bp, Artificial Sequence
  MKO10053041_A_Tbx4
  gRNA
ttcgttggcaggatggtcgc

SEQ ID NO: 53042 - DNA, 20 bp, Artificial Sequence
  MKO10053042_A_Tbx5
  gRNA
cacgtaaaggcgccccggca

SEQ ID NO: 53043 - DNA, 20 bp, Artificial Sequence
  MKO10053043_A_Tbx5
  gRNA
ccttcatgtaggtccgtaac

SEQ ID NO: 53044 - DNA, 20 bp, Artificial Sequence
  MKO10053044_A_Tbx5
  gRNA
ctgctttcacgatgtgtaat

SEQ ID NO: 53045 - DNA, 20 bp, Artificial Sequence
  MKO10053045_A_Tbx6
  gRNA
tggatggggcccgataccgc

SEQ ID NO: 53046 - DNA, 20 bp, Artificial Sequence
  MKO10053046_A_Tbx6
  gRNA
tgttggtgagcttaacacga

SEQ ID NO: 53047 - DNA, 20 bp, Artificial Sequence
  MKO10053047_A_Tbx6
  gRNA
gtaccagcctcgcatccacc

SEQ ID NO: 53048 - DNA, 20 bp, Artificial Sequence
  MKO10053048_A_Tbxa2r
  gRNA
agcgtgttgcgacgccacga

SEQ ID NO: 53049 - DNA, 20 bp, Artificial Sequence
  MKO10053049_A_Tbxa2r
  gRNA
agcgaaccatggcgacgcga

SEQ ID NO: 53050 - DNA, 20 bp, Artificial Sequence
  MKO10053050_A_Tbxa2r
  gRNA
tctttcgccggtctgtgctc

SEQ ID NO: 53051 - DNA, 20 bp, Artificial Sequence
  MKO10053051_A_Tbxas1
  gRNA
acagaggcccgtatcgctct

SEQ ID NO: 53052 - DNA, 20 bp, Artificial Sequence
  MKO10053052_A_Tbxas1
  gRNA
atcttctgtcacgtaacaac

SEQ ID NO: 53053 - DNA, 20 bp, Artificial Sequence
  MKO10053053_A_Tbxas1
  gRNA
gagcgatacgggcctctgtg

SEQ ID NO: 53054 - DNA, 20 bp, Artificial Sequence
  MKO10053054_A_Tc2n
  gRNA
agaaagcgcctacttaaatc

SEQ ID NO: 53055 - DNA, 20 bp, Artificial Sequence
  MKO10053055_A_Tc2n
  gRNA
gttctagtaaagcctcaagt

SEQ ID NO: 53056 - DNA, 20 bp, Artificial Sequence
  MKO10053056_A_Tc2n
  gRNA
ttcatctcagcgattcatcc

SEQ ID NO: 53057 - DNA, 20 bp, Artificial Sequence
  MKO10053057_A_Tcaim
  gRNA
caggagcctatcagtactac

SEQ ID NO: 53058 - DNA, 20 bp, Artificial Sequence
  MKO10053058_A_Tcaim
  gRNA
cgatccagctccttccgaag

SEQ ID NO: 53059 - DNA, 20 bp, Artificial Sequence
  MKO10053059_A_Tcaim
  gRNA
cactactctcgagctttatc

SEQ ID NO: 53060 - DNA, 20 bp, Artificial Sequence
  MKO10053060_A_Tcam1
  gRNA
taagaaggtctcgattccac

SEQ ID NO: 53061 - DNA, 20 bp, Artificial Sequence
  MKO10053061_A_Tcam1
  gRNA
cacgtgtcatgtacctagtg

SEQ ID NO: 53062 - DNA, 20 bp, Artificial Sequence
  MKO10053062_A_Tcam1
  gRNA
ttaacgtccgtccctgccag

SEQ ID NO: 53063 - DNA, 20 bp, Artificial Sequence
  MKO10053063_A_Tcap
  gRNA
atcgagacagggtacggcgc

SEQ ID NO: 53064 - DNA, 20 bp, Artificial Sequence
  MKO10053064_A_Tcap
  gRNA
tttcagatgctccttgcacg

SEQ ID NO: 53065 - DNA, 20 bp, Artificial Sequence
  MKO10053065_A_Tcap
  gRNA
acactcacccctcttccggc

SEQ ID NO: 53066 - DNA, 20 bp, Artificial Sequence
  MKO10053066_A_Tcea1
  gRNA
gccttgcagtccacaagaat

SEQ ID NO: 53067 - DNA, 20 bp, Artificial Sequence
  MKO10053067_A_Tcea1
  gRNA
catctgtgctctgcttgcga

SEQ ID NO: 53068 - DNA, 20 bp, Artificial Sequence
  MKO10053068_A_Tcea1
  gRNA
catgaccctagaattgctac

SEQ ID NO: 53069 - DNA, 20 bp, Artificial Sequence
  MKO10053069_A_Tcea2
  gRNA
aacactcacggtcagtttgc

SEQ ID NO: 53070 - DNA, 20 bp, Artificial Sequence
  MKO10053070_A_Tcea2
  gRNA
gtcttgcagtccacccgtgt

SEQ ID NO: 53071 - DNA, 20 bp, Artificial Sequence
  MKO10053071_A_Tcea2
  gRNA
cctgagatccgtagtccttg

SEQ ID NO: 53072 - DNA, 20 bp, Artificial Sequence
  MKO10053072_A_Tcea3
  gRNA
gttgactgccactccgatcc

SEQ ID NO: 53073 - DNA, 20 bp, Artificial Sequence
  MKO10053073_A_Tcea3
  gRNA
gactcccccagaaccaccaa

SEQ ID NO: 53074 - DNA, 20 bp, Artificial Sequence
  MKO10053074_A_Tcea3
  gRNA
gagggggagagcccaaaact

SEQ ID NO: 53075 - DNA, 20 bp, Artificial Sequence
  MKO10053075_A_Tceal1
  gRNA
cgtatccgccctcaattcat

SEQ ID NO: 53076 - DNA, 20 bp, Artificial Sequence
  MKO10053076_A_Tceal1
  gRNA
gttcgaagaccgtattccca

SEQ ID NO: 53077 - DNA, 20 bp, Artificial Sequence
  MKO10053077_A_Tceal1
  gRNA
gtctgaagatcgtcctccgc

SEQ ID NO: 53078 - DNA, 20 bp, Artificial Sequence
  MKO10053078_A_Tceal3
  gRNA
cttgacatggaagaagttcg

SEQ ID NO: 53079 - DNA, 20 bp, Artificial Sequence
  MKO10053079_A_Tceal3
  gRNA
ctcacccccctgactccccg

SEQ ID NO: 53080 - DNA, 20 bp, Artificial Sequence
  MKO10053080_A_Tceal3
  gRNA
tcatcttgcccttgctcatc

SEQ ID NO: 53081 - DNA, 20 bp, Artificial Sequence
  MKO10053081_A_Tceal5
  gRNA
agcacgccagggcaagctag

SEQ ID NO: 53082 - DNA, 20 bp, Artificial Sequence
  MKO10053082_A_Tceal5
  gRNA
cctccacctctagcttgccc

SEQ ID NO: 53083 - DNA, 20 bp, Artificial Sequence
  MKO10053083_A_Tceal5
  gRNA
ggctgaaggcattaaacaaa

SEQ ID NO: 53084 - DNA, 20 bp, Artificial Sequence
  MKO10053084_A_Tceal6
  gRNA
cttgacatggaagaagtccg

SEQ ID NO: 53085 - DNA, 20 bp, Artificial Sequence
  MKO10053085_A_Tceal6
  gRNA
tcatcttgcccctgctcatc

SEQ ID NO: 53086 - DNA, 20 bp, Artificial Sequence
  MKO10053086_A_Tceal6
  gRNA
gagagtgcacagatatgact

SEQ ID NO: 53087 - DNA, 20 bp, Artificial Sequence
  MKO10053087_A_Tceal7
  gRNA
caaccctgcggagcacttga

SEQ ID NO: 53088 - DNA, 20 bp, Artificial Sequence
  MKO10053088_A_Tceal7
  gRNA
attctaaccgtacccattct

SEQ ID NO: 53089 - DNA, 20 bp, Artificial Sequence
  MKO10053089_A_Tceal7
  gRNA
tgaaattgccttccagtcgc

SEQ ID NO: 53090 - DNA, 20 bp, Artificial Sequence
  MKO10053090_A_Tceal8
  gRNA
ccttgcgggagtgtcctctt

SEQ ID NO: 53091 - DNA, 20 bp, Artificial Sequence
  MKO10053091_A_Tceal8
  gRNA
tacgcctcttatcacttctt

SEQ ID NO: 53092 - DNA, 20 bp, Artificial Sequence
  MKO10053092_A_Tceal8
  gRNA
gtccttaccctgtgtgcttc

SEQ ID NO: 53093 - DNA, 20 bp, Artificial Sequence
  MKO10053093_A_Tceanc2
  gRNA
aattcgtcattcgaacgcct

SEQ ID NO: 53094 - DNA, 20 bp, Artificial Sequence
  MKO10053094_A_Tceanc2
  gRNA
tcgctccggacttcaataga

SEQ ID NO: 53095 - DNA, 20 bp, Artificial Sequence
  MKO10053095_A_Tceanc2
  gRNA
tcattaacgggccctaccgg

SEQ ID NO: 53096 - DNA, 20 bp, Artificial Sequence
  MKO10053096_A_Tceanc
  gRNA
gaatgcactcgcaagagctc

SEQ ID NO: 53097 - DNA, 20 bp, Artificial Sequence
  MKO10053097_A_Tceanc
  gRNA
ctctagccatagtgagatca

SEQ ID NO: 53098 - DNA, 20 bp, Artificial Sequence
  MKO10053098_A_Tceanc
  gRNA
tccatgtgccatcaactgat

SEQ ID NO: 53099 - DNA, 20 bp, Artificial Sequence
  MKO10053099_A_Tceb1
  gRNA
gatggagaggagaagaccta

SEQ ID NO: 53100 - DNA, 20 bp, Artificial Sequence
  MKO10053100_A_Tceb1
  gRNA
acaataaaggctatgttgag

SEQ ID NO: 53101 - DNA, 20 bp, Artificial Sequence
  MKO10053101_A_Tceb1
  gRNA
tgctgagaatgaaaccaacg

SEQ ID NO: 53102 - DNA, 20 bp, Artificial Sequence
  MKO10053102_A_Tceb2
  gRNA
cgaactgaagcgcatcgtcg

SEQ ID NO: 53103 - DNA, 20 bp, Artificial Sequence
  MKO10053103_A_Tceb2
  gRNA
agccatcttacctgctcgga

SEQ ID NO: 53104 - DNA, 20 bp, Artificial Sequence
  MKO10053104_A_Tceb2
  gRNA
aggacgtgtttctcatgatc

SEQ ID NO: 53105 - DNA, 20 bp, Artificial Sequence
  MKO10053105_A_Tceb3
  gRNA
gggccggtagttggcatgaa

SEQ ID NO: 53106 - DNA, 20 bp, Artificial Sequence
  MKO10053106_A_Tceb3
  gRNA
cagagttacctttcgaggcc

SEQ ID NO: 53107 - DNA, 20 bp, Artificial Sequence
  MKO10053107_A_Tceb3
  gRNA
cgaacccaccaggcctcgaa

SEQ ID NO: 53108 - DNA, 20 bp, Artificial Sequence
  MKO10053108_A_Tcerg1l
  gRNA
tggaagagtaccgattcctc

SEQ ID NO: 53109 - DNA, 20 bp, Artificial Sequence
  MKO10053109_A_Tcerg1l
  gRNA
tgatgctacgtgccccagag

SEQ ID NO: 53110 - DNA, 20 bp, Artificial Sequence
  MKO10053110_A_Tcerg1l
  gRNA
ctgtagaccccgaggaactc

SEQ ID NO: 53111 - DNA, 20 bp, Artificial Sequence
  MKO10053111_A_Tcerg1
  gRNA
ccaccaaatgccgtgatgcg

SEQ ID NO: 53112 - DNA, 20 bp, Artificial Sequence
  MKO10053112_A_Tcerg1
  gRNA
ggctggggtacggtttgcac

SEQ ID NO: 53113 - DNA, 20 bp, Artificial Sequence
  MKO10053113_A_Tcerg1
  gRNA
tatgggcccacctcacctac

SEQ ID NO: 53114 - DNA, 20 bp, Artificial Sequence
  MKO10053114_A_Tcf12
  gRNA
agtagtcagttcagcgggtc

SEQ ID NO: 53115 - DNA, 20 bp, Artificial Sequence
  MKO10053115_A_Tcf12
  gRNA
cacttgaatgacagtcgatt

SEQ ID NO: 53116 - DNA, 20 bp, Artificial Sequence
  MKO10053116_A_Tcf12
  gRNA
tgttggggacaagccttcgt

SEQ ID NO: 53117 - DNA, 20 bp, Artificial Sequence
  MKO10053117_A_Tcf15
  gRNA
gcgcggctgacggccgtcgg

SEQ ID NO: 53118 - DNA, 20 bp, Artificial Sequence
  MKO10053118_A_Tcf15
  gRNA
cagtcgttcggctgctgcga

SEQ ID NO: 53119 - DNA, 20 bp, Artificial Sequence
  MKO10053119_A_Tcf15
  gRNA
gcagggcagccgtcgtgacc

SEQ ID NO: 53120 - DNA, 20 bp, Artificial Sequence
  MKO10053120_A_Tcf19
  gRNA
cgccccctatacgcagcagc

SEQ ID NO: 53121 - DNA, 20 bp, Artificial Sequence
  MKO10053121_A_Tcf19
  gRNA
gcacctatcgattgggctgc

SEQ ID NO: 53122 - DNA, 20 bp, Artificial Sequence
  MKO10053122_A_Tcf19
  gRNA
ttgcagccataaccgtccct

SEQ ID NO: 53123 - DNA, 20 bp, Artificial Sequence
  MKO10053123_A_Tcf20
  gRNA
acccgccttcgcatgattaa

SEQ ID NO: 53124 - DNA, 20 bp, Artificial Sequence
  MKO10053124_A_Tcf20
  gRNA
agccgtaacatgacgttact

SEQ ID NO: 53125 - DNA, 20 bp, Artificial Sequence
  MKO10053125_A_Tcf20
  gRNA
gtccaacttacctgcgtcaa

SEQ ID NO: 53126 - DNA, 20 bp, Artificial Sequence
  MKO10053126_A_Tcf21
  gRNA
gagcattggccgcgttgcgc

SEQ ID NO: 53127 - DNA, 20 bp, Artificial Sequence
  MKO10053127_A_Tcf21
  gRNA
acgcggccaatgctcgtgag

SEQ ID NO: 53128 - DNA, 20 bp, Artificial Sequence
  MKO10053128_A_Tcf21
  gRNA
gtgaccgccaaccgcttgtg

SEQ ID NO: 53129 - DNA, 20 bp, Artificial Sequence
  MKO10053129_A_Tcf23
  gRNA
tccaccacagctatcacgac

SEQ ID NO: 53130 - DNA, 20 bp, Artificial Sequence
  MKO10053130_A_Tcf23
  gRNA
acgcagcacgggaacggact

SEQ ID NO: 53131 - DNA, 20 bp, Artificial Sequence
  MKO10053131_A_Tcf23
  gRNA
gacgcttcgtcaggcctttc

SEQ ID NO: 53132 - DNA, 20 bp, Artificial Sequence
  MKO10053132_A_Tcf24
  gRNA
agcgggacggccgcgctcca

SEQ ID NO: 53133 - DNA, 20 bp, Artificial Sequence
  MKO10053133_A_Tcf24
  gRNA
accgacgcgcccggagaccc

SEQ ID NO: 53134 - DNA, 20 bp, Artificial Sequence
  MKO10053134_A_Tcf24
  gRNA
ttcggactaagtggatcatt

SEQ ID NO: 53135 - DNA, 20 bp, Artificial Sequence
  MKO10053135_A_Tcf25
  gRNA
tgtcgggtcctatgtcgcgc

SEQ ID NO: 53136 - DNA, 20 bp, Artificial Sequence
  MKO10053136_A_Tcf25
  gRNA
acatcgatcgcatcttagag

SEQ ID NO: 53137 - DNA, 20 bp, Artificial Sequence
  MKO10053137_A_Tcf25
  gRNA
aggacaaacttcaaggcgtc

SEQ ID NO: 53138 - DNA, 20 bp, Artificial Sequence
  MKO10053138_A_Tcf3
  gRNA
ttcccccgagggaggcgggc

SEQ ID NO: 53139 - DNA, 20 bp, Artificial Sequence
  MKO10053139_A_Tcf3
  gRNA
ctgccgccttccacgttcct

SEQ ID NO: 53140 - DNA, 20 bp, Artificial Sequence
  MKO10053140_A_Tcf3
  gRNA
acagatgttcccgctacctg

SEQ ID NO: 53141 - DNA, 20 bp, Artificial Sequence
  MKO10053141_A_Tcf4
  gRNA
tgtccactcgccaaagaagt

SEQ ID NO: 53142 - DNA, 20 bp, Artificial Sequence
  MKO10053142_A_Tcf4
  gRNA
atacttaccctggacgggct

SEQ ID NO: 53143 - DNA, 20 bp, Artificial Sequence
  MKO10053143_A_Tcf4
  gRNA
cctatgaccacatgactagc

SEQ ID NO: 53144 - DNA, 20 bp, Artificial Sequence
  MKO10053144_A_Tcf7l1
  gRNA
ccttcggcgaaatagtcgcg

SEQ ID NO: 53145 - DNA, 20 bp, Artificial Sequence
  MKO10053145_A_Tcf7l1
  gRNA
ccgcgcgactatttcgccga

SEQ ID NO: 53146 - DNA, 20 bp, Artificial Sequence
  MKO10053146_A_Tcf7l1
  gRNA
tcagctcgtcgttcgctccg

SEQ ID NO: 53147 - DNA, 20 bp, Artificial Sequence
  MKO10053147_A_Tcf7l2
  gRNA
aaacagctcctccgattccg

SEQ ID NO: 53148 - DNA, 20 bp, Artificial Sequence
  MKO10053148_A_Tcf7l2
  gRNA
gcgagagcgatccgttgggg

SEQ ID NO: 53149 - DNA, 20 bp, Artificial Sequence
  MKO10053149_A_Tcf7l2
  gRNA
acggcgaacgagcatccttg

SEQ ID NO: 53150 - DNA, 20 bp, Artificial Sequence
  MKO10053150_A_Tcf7
  gRNA
ctgctgaaatgttcgtagag

SEQ ID NO: 53151 - DNA, 20 bp, Artificial Sequence
  MKO10053151_A_Tcf7
  gRNA
gaagtgctgtctatatccgc

SEQ ID NO: 53152 - DNA, 20 bp, Artificial Sequence
  MKO10053152_A_Tcf7
  gRNA
agctcccccatactgtgagc

SEQ ID NO: 53153 - DNA, 20 bp, Artificial Sequence
  MKO10053153_A_Tcfl5
  gRNA
tcggagtagaatccgccagc

SEQ ID NO: 53154 - DNA, 20 bp, Artificial Sequence
  MKO10053154_A_Tcfl5
  gRNA
ataaccgaatggaacgagat

SEQ ID NO: 53155 - DNA, 20 bp, Artificial Sequence
  MKO10053155_A_Tcfl5
  gRNA
agcattcctgaagtacattc

SEQ ID NO: 53156 - DNA, 20 bp, Artificial Sequence
  MKO10053156_A_Tchhl1
  gRNA
attccacaagtacgccattg

SEQ ID NO: 53157 - DNA, 20 bp, Artificial Sequence
  MKO10053157_A_Tchhl1
  gRNA
catcctcaatggcgtacttg

SEQ ID NO: 53158 - DNA, 20 bp, Artificial Sequence
  MKO10053158_A_Tchhl1
  gRNA
tgtcagtagtagctgctacc

SEQ ID NO: 53159 - DNA, 20 bp, Artificial Sequence
  MKO10053159_A_Tchh
  gRNA
gcgccgtcatgaggagttcg

SEQ ID NO: 53160 - DNA, 20 bp, Artificial Sequence
  MKO10053160_A_Tchh
  gRNA
aggcgcgccagcgcaaccag

SEQ ID NO: 53161 - DNA, 20 bp, Artificial Sequence
  MKO10053161_A_Tchh
  gRNA
tcgacaatgcttcttataag

SEQ ID NO: 53162 - DNA, 20 bp, Artificial Sequence
  MKO10053162_A_Tchp
  gRNA
accagtacgcagcagcccgc

SEQ ID NO: 53163 - DNA, 20 bp, Artificial Sequence
  MKO10053163_A_Tchp
  gRNA
cgttctcacctctcgaagtt

SEQ ID NO: 53164 - DNA, 20 bp, Artificial Sequence
  MKO10053164_A_Tchp
  gRNA
gaacaaccccaaacttcgag

SEQ ID NO: 53165 - DNA, 20 bp, Artificial Sequence
  MKO10053165_A_Tcirg1
  gRNA
cgccttccagagacgcttcg

SEQ ID NO: 53166 - DNA, 20 bp, Artificial Sequence
  MKO10053166_A_Tcirg1
  gRNA
cgtctaccacgaagcgtctc

SEQ ID NO: 53167 - DNA, 20 bp, Artificial Sequence
  MKO10053167_A_Tcirg1
  gRNA
atgcgcagcaggtctcgggg

SEQ ID NO: 53168 - DNA, 20 bp, Artificial Sequence
  MKO10053168_A_Tcl1b1
  gRNA
ctacctggtctccgttagac

SEQ ID NO: 53169 - DNA, 20 bp, Artificial Sequence
  MKO10053169_A_Tcl1b1
  gRNA
acgactttctacccacgacg

SEQ ID NO: 53170 - DNA, 20 bp, Artificial Sequence
  MKO10053170_A_Tcl1b1
  gRNA
tgttgcccagtatatgttcc

SEQ ID NO: 53171 - DNA, 20 bp, Artificial Sequence
  MKO10053171_A_Tcl1b2
  gRNA
gattgtagggagcaggctcc

SEQ ID NO: 53172 - DNA, 20 bp, Artificial Sequence
  MKO10053172_A_Tcl1b2
  gRNA
acaactttctacccatgacg

SEQ ID NO: 53173 - DNA, 20 bp, Artificial Sequence
  MKO10053173_A_Tcl1b2
  gRNA
ccacaagttctgatctccac

SEQ ID NO: 53174 - DNA, 20 bp, Artificial Sequence
  MKO10053174_A_Tcl1b3
  gRNA
cgacacattgcaactgatcc

SEQ ID NO: 53175 - DNA, 20 bp, Artificial Sequence
  MKO10053175_A_Tcl1b3
  gRNA
gaaacttctcgttcaccata

SEQ ID NO: 53176 - DNA, 20 bp, Artificial Sequence
  MKO10053176_A_Tcl1b3
  gRNA
cctcgcatattactatgtcc

SEQ ID NO: 53177 - DNA, 20 bp, Artificial Sequence
  MKO10053177_A_Tcl1b4
  gRNA
gttaccttgaatccagcatc

SEQ ID NO: 53178 - DNA, 20 bp, Artificial Sequence
  MKO10053178_A_Tcl1b4
  gRNA
tggtcctgatgctggattca

SEQ ID NO: 53179 - DNA, 20 bp, Artificial Sequence
  MKO10053179_A_Tcl1b4
  gRNA
gcaaggtgggaatggcatac

SEQ ID NO: 53180 - DNA, 20 bp, Artificial Sequence
  MKO10053180_A_Tcl1b5
  gRNA
cctcgcctattattatgtcc

SEQ ID NO: 53181 - DNA, 20 bp, Artificial Sequence
  MKO10053181_A_Tcl1b5
  gRNA
cgacacagtgcaactgaccc

SEQ ID NO: 53182 - DNA, 20 bp, Artificial Sequence
  MKO10053182_A_Tcl1b5
  gRNA
gcatatgaccacactccccc

SEQ ID NO: 53183 - DNA, 20 bp, Artificial Sequence
  MKO10053183_A_Tcl1
  gRNA
aatacatggagtcgcagctt

SEQ ID NO: 53184 - DNA, 20 bp, Artificial Sequence
  MKO10053184_A_Tcl1
  gRNA
ctggctgcccgtagtcatca

SEQ ID NO: 53185 - DNA, 20 bp, Artificial Sequence
  MKO10053185_A_Tcl1
  gRNA
ctgcacaccccaaccgcctg

SEQ ID NO: 53186 - DNA, 20 bp, Artificial Sequence
  MKO10053186_A_Tcn2
  gRNA
cgaattcttcgggagccgaa

SEQ ID NO: 53187 - DNA, 20 bp, Artificial Sequence
  MKO10053187_A_Tcn2
  gRNA
gcaactactgttatcatcgc

SEQ ID NO: 53188 - DNA, 20 bp, Artificial Sequence
  MKO10053188_A_Tcn2
  gRNA
gaaattgaatcgctccaaac

SEQ ID NO: 53189 - DNA, 20 bp, Artificial Sequence
  MKO10053189_A_Tcof1
  gRNA
cctttacttcccgcgccgcg

SEQ ID NO: 53190 - DNA, 20 bp, Artificial Sequence
  MKO10053190_A_Tcof1
  gRNA
ccgcgcggcgcgggaagtaa

SEQ ID NO: 53191 - DNA, 20 bp, Artificial Sequence
  MKO10053191_A_Tcof1
  gRNA
ctcgagacttcttagcctga

SEQ ID NO: 53192 - DNA, 20 bp, Artificial Sequence
  MKO10053192_A_Tcp10a
  gRNA
caaatttctgcaaagaagct

SEQ ID NO: 53193 - DNA, 20 bp, Artificial Sequence
  MKO10053193_A_Tcp10a
  gRNA
caagcttctttgcagaaatt

SEQ ID NO: 53194 - DNA, 20 bp, Artificial Sequence
  MKO10053194_A_Tcp10a
  gRNA
taaaagacagcatttcatcc

SEQ ID NO: 53195 - DNA, 20 bp, Artificial Sequence
  MKO10053195_A_Tcp10b
  gRNA
ccctctatctttacgtacac

SEQ ID NO: 53196 - DNA, 20 bp, Artificial Sequence
  MKO10053196_A_Tcp10b
  gRNA
gccagtgtacgtaaagatag

SEQ ID NO: 53197 - DNA, 20 bp, Artificial Sequence
  MKO10053197_A_Tcp10b
  gRNA
gggtgagcctatacaggctt

SEQ ID NO: 53198 - DNA, 20 bp, Artificial Sequence
  MKO10053198_A_Tcp10c
  gRNA
agtgttgcttgctcttgccg

SEQ ID NO: 53199 - DNA, 20 bp, Artificial Sequence
  MKO10053199_A_Tcp10c
  gRNA
cagaagcagatctgtgacct

SEQ ID NO: 53200 - DNA, 20 bp, Artificial Sequence
  MKO10053200_A_Tcp10c
  gRNA
taaaagacagcctttcatcc

SEQ ID NO: 53201 - DNA, 20 bp, Artificial Sequence
  MKO10053201_A_Tcp11l1
  gRNA
ctaattcaacagcgttaatc

SEQ ID NO: 53202 - DNA, 20 bp, Artificial Sequence
  MKO10053202_A_Tcp11l1
  gRNA
aacgctgttgaattagccga

SEQ ID NO: 53203 - DNA, 20 bp, Artificial Sequence
  MKO10053203_A_Tcp11l1
  gRNA
gatccaagacttccgttatc

SEQ ID NO: 53204 - DNA, 20 bp, Artificial Sequence
  MKO10053204_A_Tcp11l2
  gRNA
aaaatgctctccccgagaac

SEQ ID NO: 53205 - DNA, 20 bp, Artificial Sequence
  MKO10053205_A_Tcp11l2
  gRNA
caacaggttacctgttctcg

SEQ ID NO: 53206 - DNA, 20 bp, Artificial Sequence
  MKO10053206_A_Tcp11l2
  gRNA
agtgaagcgtgttgtccacc

SEQ ID NO: 53207 - DNA, 20 bp, Artificial Sequence
  MKO10053207_A_Tcp11
  gRNA
acctacacgatcggtgcccc

SEQ ID NO: 53208 - DNA, 20 bp, Artificial Sequence
  MKO10053208_A_Tcp11
  gRNA
gtgtgcgccaatccgagacg

SEQ ID NO: 53209 - DNA, 20 bp, Artificial Sequence
  MKO10053209_A_Tcp11
  gRNA
agcgcctcccgtgaatcccg

SEQ ID NO: 53210 - DNA, 20 bp, Artificial Sequence
  MKO10053210_A_Tcp1
  gRNA
ggtggcaccatcgttagtaa

SEQ ID NO: 53211 - DNA, 20 bp, Artificial Sequence
  MKO10053211_A_Tcp1
  gRNA
gatgtaaccattactaacga

SEQ ID NO: 53212 - DNA, 20 bp, Artificial Sequence
  MKO10053212_A_Tcp1
  gRNA
attattaacacagacgaact

SEQ ID NO: 53213 - DNA, 20 bp, Artificial Sequence
  MKO10053213_A_Tcstv1
  gRNA
agggcagtctccaccgtcac

SEQ ID NO: 53214 - DNA, 20 bp, Artificial Sequence
  MKO10053214_A_Tcstv1
  gRNA
gctgctgggcatggtttcaa

SEQ ID NO: 53215 - DNA, 20 bp, Artificial Sequence
  MKO10053215_A_Tcstv1
  gRNA
aattctgaggcactttgttt

SEQ ID NO: 53216 - DNA, 20 bp, Artificial Sequence
  MKO10053216_A_Tcstv3
  gRNA
atcctgcatcttatagtgcc

SEQ ID NO: 53217 - DNA, 20 bp, Artificial Sequence
  MKO10053217_A_Tcstv3
  gRNA
tgcctggcactataagatgc

SEQ ID NO: 53218 - DNA, 20 bp, Artificial Sequence
  MKO10053218_A_Tcstv3
  gRNA
tcaatctgcggtaggatttc

SEQ ID NO: 53219 - DNA, 20 bp, Artificial Sequence
  MKO10053219_A_Tcta
  gRNA
gcagcgactttctgcgggag

SEQ ID NO: 53220 - DNA, 20 bp, Artificial Sequence
  MKO10053220_A_Tcta
  gRNA
gcccagcgctccgagcaccg

SEQ ID NO: 53221 - DNA, 20 bp, Artificial Sequence
  MKO10053221_A_Tcta
  gRNA
catcaggtgtggatccattc

SEQ ID NO: 53222 - DNA, 20 bp, Artificial Sequence
  MKO10053222_A_Tcte1
  gRNA
caaatgtccgtcgcatgcgc

SEQ ID NO: 53223 - DNA, 20 bp, Artificial Sequence
  MKO10053223_A_Tcte1
  gRNA
agcggggtcggcatccgcac

SEQ ID NO: 53224 - DNA, 20 bp, Artificial Sequence
  MKO10053224_A_Tcte1
  gRNA
gggatacatctgacagtcgc

SEQ ID NO: 53225 - DNA, 20 bp, Artificial Sequence
  MKO10053225_A_Tcte2
  gRNA
gacaatctcagtcgctaacc

SEQ ID NO: 53226 - DNA, 20 bp, Artificial Sequence
  MKO10053226_A_Tcte2
  gRNA
agtcacgtcgaagccttccc

SEQ ID NO: 53227 - DNA, 20 bp, Artificial Sequence
  MKO10053227_A_Tcte2
  gRNA
cagtagctgctatctccttg

SEQ ID NO: 53228 - DNA, 20 bp, Artificial Sequence
  MKO10053228_A_Tcte3
  gRNA
ccgatcaagatggagcggcg

SEQ ID NO: 53229 - DNA, 20 bp, Artificial Sequence
  MKO10053229_A_Tcte3
  gRNA
gactccttctcgaacatgct

SEQ ID NO: 53230 - DNA, 20 bp, Artificial Sequence
  MKO10053230_A_Tcte3
  gRNA
taattacctttaatatctgc

SEQ ID NO: 53231 - DNA, 20 bp, Artificial Sequence
  MKO10053231_A_Tctex1d1
  gRNA
aagcagcgcacctaactggt

SEQ ID NO: 53232 - DNA, 20 bp, Artificial Sequence
  MKO10053232_A_Tctex1d1
  gRNA
tttctaggttattaagaccc

SEQ ID NO: 53233 - DNA, 20 bp, Artificial Sequence
  MKO10053233_A_Tctex1d1
  gRNA
atggaaaacacctaccagtt

SEQ ID NO: 53234 - DNA, 20 bp, Artificial Sequence
  MKO10053234_A_Tctex1d2
  gRNA
gtctagaattgggatatgac

SEQ ID NO: 53235 - DNA, 20 bp, Artificial Sequence
  MKO10053235_A_Tctex1d2
  gRNA
acttaggtttagaccctctg

SEQ ID NO: 53236 - DNA, 20 bp, Artificial Sequence
  MKO10053236_A_Tctex1d2
  gRNA
gtaggacagcttattctgtg

SEQ ID NO: 53237 - DNA, 20 bp, Artificial Sequence
  MKO10053237_A_Tctex1d4
  gRNA
atcattcccagtagaccgcg

SEQ ID NO: 53238 - DNA, 20 bp, Artificial Sequence
  MKO10053238_A_Tctex1d4
  gRNA
cgccggttctaagcggtatg

SEQ ID NO: 53239 - DNA, 20 bp, Artificial Sequence
  MKO10053239_A_Tctex1d4
  gRNA
accctcataccgcttagaac

SEQ ID NO: 53240 - DNA, 20 bp, Artificial Sequence
  MKO10053240_A_Tctn1
  gRNA
ttggctcacctcgtatttag

SEQ ID NO: 53241 - DNA, 20 bp, Artificial Sequence
  MKO10053241_A_Tctn1
  gRNA
cgtatgcttacgtgacaact

SEQ ID NO: 53242 - DNA, 20 bp, Artificial Sequence
  MKO10053242_A_Tctn1
  gRNA
tgtgcagatcagaaccccgc

SEQ ID NO: 53243 - DNA, 20 bp, Artificial Sequence
  MKO10053243_A_Tctn2
  gRNA
cggccgccgcaatgagacag

SEQ ID NO: 53244 - DNA, 20 bp, Artificial Sequence
  MKO10053244_A_Tctn2
  gRNA
cggccgccacaagtaggaac

SEQ ID NO: 53245 - DNA, 20 bp, Artificial Sequence
  MKO10053245_A_Tctn2
  gRNA
tctgtaacccacaacgcatc

SEQ ID NO: 53246 - DNA, 20 bp, Artificial Sequence
  MKO10053246_A_Tctn3
  gRNA
tcctgacctactacccgagc

SEQ ID NO: 53247 - DNA, 20 bp, Artificial Sequence
  MKO10053247_A_Tctn3
  gRNA
agccgccagtactattctat

SEQ ID NO: 53248 - DNA, 20 bp, Artificial Sequence
  MKO10053248_A_Tctn3
  gRNA
acagcagcagtttaaatcgc

SEQ ID NO: 53249 - DNA, 20 bp, Artificial Sequence
  MKO10053249_A_Tdgf1
  gRNA
gggtccaaattcaaacgcac

SEQ ID NO: 53250 - DNA, 20 bp, Artificial Sequence
  MKO10053250_A_Tdgf1
  gRNA
cttaccacagccaggtagaa

SEQ ID NO: 53251 - DNA, 20 bp, Artificial Sequence
  MKO10053251_A_Tdgf1
  gRNA
atttccagtgcgtttgaatt

SEQ ID NO: 53252 - DNA, 20 bp, Artificial Sequence
  MKO10053252_A_Tdg
  gRNA
tttctagattggcattaacc

SEQ ID NO: 53253 - DNA, 20 bp, Artificial Sequence
  MKO10053253_A_Tdg
  gRNA
aactacctggtgcaggttcc

SEQ ID NO: 53254 - DNA, 20 bp, Artificial Sequence
  MKO10053254_A_Tdg
  gRNA
gcccgaagacgctcctgtcc

SEQ ID NO: 53255 - DNA, 20 bp, Artificial Sequence
  MKO10053255_A_Tdh
  gRNA
ttgtttgtgcccagcacgat

SEQ ID NO: 53256 - DNA, 20 bp, Artificial Sequence
  MKO10053256_A_Tdh
  gRNA
tttccctacaggaaacgatt

SEQ ID NO: 53257 - DNA, 20 bp, Artificial Sequence
  MKO10053257_A_Tdh
  gRNA
ccggggagaggtaggtccaa

SEQ ID NO: 53258 - DNA, 20 bp, Artificial Sequence
  MKO10053258_A_Tdo2
  gRNA
cactttgaaaaacgtatcta

SEQ ID NO: 53259 - DNA, 20 bp, Artificial Sequence
  MKO10053259_A_Tdo2
  gRNA
acatgctcaaggtgatagct

SEQ ID NO: 53260 - DNA, 20 bp, Artificial Sequence
  MKO10053260_A_Tdo2
  gRNA
tatctatggcaattacttgc

SEQ ID NO: 53261 - DNA, 20 bp, Artificial Sequence
  MKO10053261_A_Tdp1
  gRNA
gtttaactactgctttgacg

SEQ ID NO: 53262 - DNA, 20 bp, Artificial Sequence
  MKO10053262_A_Tdp1
  gRNA
aggactcacctgaattccgg

SEQ ID NO: 53263 - DNA, 20 bp, Artificial Sequence
  MKO10053263_A_Tdp1
  gRNA
gcagagggaaatgttcgcat

SEQ ID NO: 53264 - DNA, 20 bp, Artificial Sequence
  MKO10053264_A_Tdp2
  gRNA
atggatgcaatctgcccgag

SEQ ID NO: 53265 - DNA, 20 bp, Artificial Sequence
  MKO10053265_A_Tdp2
  gRNA
aacttacatttacgcatagc

SEQ ID NO: 53266 - DNA, 20 bp, Artificial Sequence
  MKO10053266_A_Tdp2
  gRNA
cagtgttgatctaaccaacg

SEQ ID NO: 53267 - DNA, 20 bp, Artificial Sequence
  MKO10053267_A_Tdpoz1
  gRNA
ctcagagtggaagtcgatat

SEQ ID NO: 53268 - DNA, 20 bp, Artificial Sequence
  MKO10053268_A_Tdpoz1
  gRNA
tgtcagaaagcattccacag

SEQ ID NO: 53269 - DNA, 20 bp, Artificial Sequence
  MKO10053269_A_Tdpoz1
  gRNA
aaaaataaagagccccactg

SEQ ID NO: 53270 - DNA, 20 bp, Artificial Sequence
  MKO10053270_A_Tdpoz2
  gRNA
cattcaagctctgcgtatat

SEQ ID NO: 53271 - DNA, 20 bp, Artificial Sequence
  MKO10053271_A_Tdpoz2
  gRNA
ctttcttcatcaaacccgtt

SEQ ID NO: 53272 - DNA, 20 bp, Artificial Sequence
  MKO10053272_A_Tdpoz2
  gRNA
gctagtctctcttccatttg

SEQ ID NO: 53273 - DNA, 20 bp, Artificial Sequence
  MKO10053273_A_Tdpoz3
  gRNA
gcaggtgtcctcttctgtac

SEQ ID NO: 53274 - DNA, 20 bp, Artificial Sequence
  MKO10053274_A_Tdpoz3
  gRNA
ctctaatgagaacactgggc

SEQ ID NO: 53275 - DNA, 20 bp, Artificial Sequence
  MKO10053275_A_Tdpoz3
  gRNA
ttgacatgcctgtacagaag

SEQ ID NO: 53276 - DNA, 20 bp, Artificial Sequence
  MKO10053276_A_Tdpoz4
  gRNA
tgcacattggaaaatgacgt

SEQ ID NO: 53277 - DNA, 20 bp, Artificial Sequence
  MKO10053277_A_Tdpoz4
  gRNA
acatgaccatcaagtcctcc

SEQ ID NO: 53278 - DNA, 20 bp, Artificial Sequence
  MKO10053278_A_Tdpoz4
  gRNA
agaaataatgtcaggggaac

SEQ ID NO: 53279 - DNA, 20 bp, Artificial Sequence
  MKO10053279_A_Tdpoz5
  gRNA
agcagaaatgtcagaggaca

SEQ ID NO: 53280 - DNA, 20 bp, Artificial Sequence
  MKO10053280_A_Tdpoz5
  gRNA
gaatgcttcagccaaccaag

SEQ ID NO: 53281 - DNA, 20 bp, Artificial Sequence
  MKO10053281_A_Tdpoz5
  gRNA
atccaggtcatggatctcag

SEQ ID NO: 53282 - DNA, 20 bp, Artificial Sequence
  MKO10053282_A_Tdrd12
  gRNA
taaaagactctactgcaact

SEQ ID NO: 53283 - DNA, 20 bp, Artificial Sequence
  MKO10053283_A_Tdrd12
  gRNA
tatacttggcaaaatcgacc

SEQ ID NO: 53284 - DNA, 20 bp, Artificial Sequence
  MKO10053284_A_Tdrd12
  gRNA
gttccagacctgccacaaaa

SEQ ID NO: 53285 - DNA, 20 bp, Artificial Sequence
  MKO10053285_A_Tdrd1
  gRNA
ccagcactcttcaactcgtt

SEQ ID NO: 53286 - DNA, 20 bp, Artificial Sequence
  MKO10053286_A_Tdrd1
  gRNA
cctaacgagttgaagagtgc

SEQ ID NO: 53287 - DNA, 20 bp, Artificial Sequence
  MKO10053287_A_Tdrd1
  gRNA
agtagtacgtctgcttgcac

SEQ ID NO: 53288 - DNA, 20 bp, Artificial Sequence
  MKO10053288_A_Tdrd3
  gRNA
ccgcgttgtcccaggcgggt

SEQ ID NO: 53289 - DNA, 20 bp, Artificial Sequence
  MKO10053289_A_Tdrd3
  gRNA
ccgcaatgttgctgcgccaa

SEQ ID NO: 53290 - DNA, 20 bp, Artificial Sequence
  MKO10053290_A_Tdrd3
  gRNA
gcccatccgtcatctgcacg

SEQ ID NO: 53291 - DNA, 20 bp, Artificial Sequence
  MKO10053291_A_Tdrd5
  gRNA
aaatgatcgtccaaaacgcc

SEQ ID NO: 53292 - DNA, 20 bp, Artificial Sequence
  MKO10053292_A_Tdrd5
  gRNA
agcctccacagaattaaacg

SEQ ID NO: 53293 - DNA, 20 bp, Artificial Sequence
  MKO10053293_A_Tdrd5
  gRNA
ggtccgaaactccatgccaa

SEQ ID NO: 53294 - DNA, 20 bp, Artificial Sequence
  MKO10053294_A_Tdrd6
  gRNA
cccgagcttctcgttgatac

SEQ ID NO: 53295 - DNA, 20 bp, Artificial Sequence
  MKO10053295_A_Tdrd6
  gRNA
gcgggttcatcgatagcgct

SEQ ID NO: 53296 - DNA, 20 bp, Artificial Sequence
  MKO10053296_A_Tdrd6
  gRNA
tcggatcgaaatgcgtcgtg

SEQ ID NO: 53297 - DNA, 20 bp, Artificial Sequence
  MKO10053297_A_Tdrd7
  gRNA
tgaggttcaaaaccgcataa

SEQ ID NO: 53298 - DNA, 20 bp, Artificial Sequence
  MKO10053298_A_Tdrd7
  gRNA
aacataccattgacttccgt

SEQ ID NO: 53299 - DNA, 20 bp, Artificial Sequence
  MKO10053299_A_Tdrd7
  gRNA
cttgggagttaaggctgacg

SEQ ID NO: 53300 - DNA, 20 bp, Artificial Sequence
  MKO10053300_A_Tdrd9
  gRNA
acatcgtagtcacccagccg

SEQ ID NO: 53301 - DNA, 20 bp, Artificial Sequence
  MKO10053301_A_Tdrd9
  gRNA
agatgtgcgtgaactccatc

SEQ ID NO: 53302 - DNA, 20 bp, Artificial Sequence
  MKO10053302_A_Tdrd9
  gRNA
tagtggtctagcacgtactg

SEQ ID NO: 53303 - DNA, 20 bp, Artificial Sequence
  MKO10053303_A_Tdrkh
  gRNA
gatagagatgcgagtccccc

SEQ ID NO: 53304 - DNA, 20 bp, Artificial Sequence
  MKO10053304_A_Tdrkh
  gRNA
gacgattcgttctatctgta

SEQ ID NO: 53305 - DNA, 20 bp, Artificial Sequence
  MKO10053305_A_Tdrkh
  gRNA
aagctcatcattggtcgaca

SEQ ID NO: 53306 - DNA, 20 bp, Artificial Sequence
  MKO10053306_A_Tdrp
  gRNA
cgtccagaagcactcgactt

SEQ ID NO: 53307 - DNA, 20 bp, Artificial Sequence
  MKO10053307_A_Tdrp
  gRNA
gagccgaagtcgagtgcttc

SEQ ID NO: 53308 - DNA, 20 bp, Artificial Sequence
  MKO10053308_A_Tdrp
  gRNA
tgaccagctttcccgctgac

SEQ ID NO: 53309 - DNA, 20 bp, Artificial Sequence
  MKO10053309_A_Tead1
  gRNA
ccctccgcgtcgttgtcaat

SEQ ID NO: 53310 - DNA, 20 bp, Artificial Sequence
  MKO10053310_A_Tead1
  gRNA
ctggctatctatccgccgtg

SEQ ID NO: 53311 - DNA, 20 bp, Artificial Sequence
  MKO10053311_A_Tead1
  gRNA
taacttacccccggaccccc

SEQ ID NO: 53312 - DNA, 20 bp, Artificial Sequence
  MKO10053312_A_Tead2
  gRNA
gaagacgagaacgcgaaagc

SEQ ID NO: 53313 - DNA, 20 bp, Artificial Sequence
  MKO10053313_A_Tead2
  gRNA
ttcgagccaaaacctgaata

SEQ ID NO: 53314 - DNA, 20 bp, Artificial Sequence
  MKO10053314_A_Tead2
  gRNA
gacgatggccaccatgtctt

SEQ ID NO: 53315 - DNA, 20 bp, Artificial Sequence
  MKO10053315_A_Tead3
  gRNA
atgatcttgcgccgtccgca

SEQ ID NO: 53316 - DNA, 20 bp, Artificial Sequence
  MKO10053316_A_Tead3
  gRNA
aacgtaccttaatgccaacc

SEQ ID NO: 53317 - DNA, 20 bp, Artificial Sequence
  MKO10053317_A_Tead3
  gRNA
caagggtctggacaacgatg

SEQ ID NO: 53318 - DNA, 20 bp, Artificial Sequence
  MKO10053318_A_Tead4
  gRNA
tgcttgcccgtcgaaaagcc

SEQ ID NO: 53319 - DNA, 20 bp, Artificial Sequence
  MKO10053319_A_Tead4
  gRNA
gtcgggagagctccactcgt

SEQ ID NO: 53320 - DNA, 20 bp, Artificial Sequence
  MKO10053320_A_Tead4
  gRNA
cgaaattgagcgaagcttcc

SEQ ID NO: 53321 - DNA, 20 bp, Artificial Sequence
  MKO10053321_A_Tecpr1
  gRNA
gtggcccatataaggtcgtg

SEQ ID NO: 53322 - DNA, 20 bp, Artificial Sequence
  MKO10053322_A_Tecpr1
  gRNA
agctcctgccgagcgaccgc

SEQ ID NO: 53323 - DNA, 20 bp, Artificial Sequence
  MKO10053323_A_Tecpr1
  gRNA
tcaggggtggacatacgcta

SEQ ID NO: 53324 - DNA, 20 bp, Artificial Sequence
  MKO10053324_A_Tecpr2
  gRNA
gccgtcctccattgtgcagc

SEQ ID NO: 53325 - DNA, 20 bp, Artificial Sequence
  MKO10053325_A_Tecpr2
  gRNA
ccacgccagcgctgtgatgc

SEQ ID NO: 53326 - DNA, 20 bp, Artificial Sequence
  MKO10053326_A_Tecpr2
  gRNA
atgtggcttgaacggtccca

SEQ ID NO: 53327 - DNA, 20 bp, Artificial Sequence
  MKO10053327_A_Tecrl
  gRNA
aagtggtacccttctcgaat

SEQ ID NO: 53328 - DNA, 20 bp, Artificial Sequence
  MKO10053328_A_Tecrl
  gRNA
ctttaggtggcccatatttg

SEQ ID NO: 53329 - DNA, 20 bp, Artificial Sequence
  MKO10053329_A_Tecrl
  gRNA
attcgagaagggtaccactt

SEQ ID NO: 53330 - DNA, 20 bp, Artificial Sequence
  MKO10053330_A_Tecr
  gRNA
gcttacctcgtagtgcttca

SEQ ID NO: 53331 - DNA, 20 bp, Artificial Sequence
  MKO10053331_A_Tecr
  gRNA
tttcctttaggtagagcctc

SEQ ID NO: 53332 - DNA, 20 bp, Artificial Sequence
  MKO10053332_A_Tecr
  gRNA
actcacgtgtcttggtgaaa

SEQ ID NO: 53333 - DNA, 20 bp, Artificial Sequence
  MKO10053333_A_Tecta
  gRNA
tgttagagggtcgccaccgc

SEQ ID NO: 53334 - DNA, 20 bp, Artificial Sequence
  MKO10053334_A_Tecta
  gRNA
tgaaggccctcccgtccgtc

SEQ ID NO: 53335 - DNA, 20 bp, Artificial Sequence
  MKO10053335_A_Tecta
  gRNA
aaggaaattgacccggccaa

SEQ ID NO: 53336 - DNA, 20 bp, Artificial Sequence
  MKO10053336_A_Tectb
  gRNA
cccgttcttgacgtgaacag

SEQ ID NO: 53337 - DNA, 20 bp, Artificial Sequence
  MKO10053337_A_Tectb
  gRNA
aaacagatctgagccgattt

SEQ ID NO: 53338 - DNA, 20 bp, Artificial Sequence
  MKO10053338_A_Tectb
  gRNA
aagggacttaccgaacgctt

SEQ ID NO: 53339 - DNA, 20 bp, Artificial Sequence
  MKO10053339_A_Tec
  gRNA
atccgtgttgagctactatg

SEQ ID NO: 53340 - DNA, 20 bp, Artificial Sequence
  MKO10053340_A_Tec
  gRNA
ttgcacctagtccacaaagc

SEQ ID NO: 53341 - DNA, 20 bp, Artificial Sequence
  MKO10053341_A_Tec
  gRNA
aagattgtacttctcacatc

SEQ ID NO: 53342 - DNA, 20 bp, Artificial Sequence
  MKO10053342_A_Teddm1
  gRNA
tgatctcataaacgatcaag

SEQ ID NO: 53343 - DNA, 20 bp, Artificial Sequence
  MKO10053343_A_Teddm1
  gRNA
taacgtgagacactagcagc

SEQ ID NO: 53344 - DNA, 20 bp, Artificial Sequence
  MKO10053344_A_Teddm1
  gRNA
ggtattctaggcccggtcac

SEQ ID NO: 53345 - DNA, 20 bp, Artificial Sequence
  MKO10053345_A_Tefm
  gRNA
tcctcgtgtcgccgatcatc

SEQ ID NO: 53346 - DNA, 20 bp, Artificial Sequence
  MKO10053346_A_Tefm
  gRNA
ttgcatgggctcaccttgac

SEQ ID NO: 53347 - DNA, 20 bp, Artificial Sequence
  MKO10053347_A_Tefm
  gRNA
tcctgtgggaagaacacccg

SEQ ID NO: 53348 - DNA, 20 bp, Artificial Sequence
  MKO10053348_A_Tef
  gRNA
tggaaggactcgccatcgta

SEQ ID NO: 53349 - DNA, 20 bp, Artificial Sequence
  MKO10053349_A_Tef
  gRNA
ggaggttgccgagcttcgca

SEQ ID NO: 53350 - DNA, 20 bp, Artificial Sequence
  MKO10053350_A_Tef
  gRNA
gcagggcacgatgtccgacg

SEQ ID NO: 53351 - DNA, 20 bp, Artificial Sequence
  MKO10053351_A_Tekt1
  gRNA
gcagacgtcatcgatagtta

SEQ ID NO: 53352 - DNA, 20 bp, Artificial Sequence
  MKO10053352_A_Tekt1
  gRNA
gaacctgcttatccgcacgc

SEQ ID NO: 53353 - DNA, 20 bp, Artificial Sequence
  MKO10053353_A_Tekt1
  gRNA
ccgctctgccaagtacaatc

SEQ ID NO: 53354 - DNA, 20 bp, Artificial Sequence
  MKO10053354_A_Tekt2
  gRNA
tcgcagagtcaggcactcga

SEQ ID NO: 53355 - DNA, 20 bp, Artificial Sequence
  MKO10053355_A_Tekt2
  gRNA
tcaccacatcaatgtctcgc

SEQ ID NO: 53356 - DNA, 20 bp, Artificial Sequence
  MKO10053356_A_Tekt2
  gRNA
cagtgtcgatcctctcagcc

SEQ ID NO: 53357 - DNA, 20 bp, Artificial Sequence
  MKO10053357_A_Tekt3
  gRNA
cgccctcggaagtgttgcgc

SEQ ID NO: 53358 - DNA, 20 bp, Artificial Sequence
  MKO10053358_A_Tekt3
  gRNA
gattcacactcacttaacga

SEQ ID NO: 53359 - DNA, 20 bp, Artificial Sequence
  MKO10053359_A_Tekt3
  gRNA
aacattgtcatccgtaaact

SEQ ID NO: 53360 - DNA, 20 bp, Artificial Sequence
  MKO10053360_A_Tekt4
  gRNA
tgcttcgagccgagcgcgag

SEQ ID NO: 53361 - DNA, 20 bp, Artificial Sequence
  MKO10053361_A_Tekt4
  gRNA
cgaggctagccgctcgcgct

SEQ ID NO: 53362 - DNA, 20 bp, Artificial Sequence
  MKO10053362_A_Tekt4
  gRNA
cattgggccggtgtgaccgc

SEQ ID NO: 53363 - DNA, 20 bp, Artificial Sequence
  MKO10053363_A_Tekt5
  gRNA
cgtcaaacttctccacgccg

SEQ ID NO: 53364 - DNA, 20 bp, Artificial Sequence
  MKO10053364_A_Tekt5
  gRNA
ctccatccggctgcgggaag

SEQ ID NO: 53365 - DNA, 20 bp, Artificial Sequence
  MKO10053365_A_Tekt5
  gRNA
ctcagagatgcgagcgttga

SEQ ID NO: 53366 - DNA, 20 bp, Artificial Sequence
  MKO10053366_A_Tek
  gRNA
atgctggtgtgtactcggcc

SEQ ID NO: 53367 - DNA, 20 bp, Artificial Sequence
  MKO10053367_A_Tek
  gRNA
cttactccgaacaatcagcc

SEQ ID NO: 53368 - DNA, 20 bp, Artificial Sequence
  MKO10053368_A_Tek
  gRNA
tcatagttaaagtagcaggt

SEQ ID NO: 53369 - DNA, 20 bp, Artificial Sequence
  MKO10053369_A_Telo2
  gRNA
cccaagaactcgagatacga

SEQ ID NO: 53370 - DNA, 20 bp, Artificial Sequence
  MKO10053370_A_Telo2
  gRNA
gaagtcctgtcacgactact

SEQ ID NO: 53371 - DNA, 20 bp, Artificial Sequence
  MKO10053371_A_Telo2
  gRNA
actactcactctttcggccc

SEQ ID NO: 53372 - DNA, 20 bp, Artificial Sequence
  MKO10053372_A_Ten1
  gRNA
agtgacggccatgtccccga

SEQ ID NO: 53373 - DNA, 20 bp, Artificial Sequence
  MKO10053373_A_Ten1
  gRNA
aaggtgctggcgtctcctat

SEQ ID NO: 53374 - DNA, 20 bp, Artificial Sequence
  MKO10053374_A_Ten1
  gRNA
gcacactgcgaacatttggc

SEQ ID NO: 53375 - DNA, 20 bp, Artificial Sequence
  MKO10053375_A_Tenc1
  gRNA
ttaccaggtgttctatgcgc

SEQ ID NO: 53376 - DNA, 20 bp, Artificial Sequence
  MKO10053376_A_Tenc1
  gRNA
gggaccggtgtctcctgccg

SEQ ID NO: 53377 - DNA, 20 bp, Artificial Sequence
  MKO10053377_A_Tenc1
  gRNA
aacacactcaccagctccgc

SEQ ID NO: 53378 - DNA, 20 bp, Artificial Sequence
  MKO10053378_A_Tenm1
  gRNA
tgaccgacactgatcatgaa

SEQ ID NO: 53379 - DNA, 20 bp, Artificial Sequence
  MKO10053379_A_Tenm1
  gRNA
ttgccttgagccgaatcagc

SEQ ID NO: 53380 - DNA, 20 bp, Artificial Sequence
  MKO10053380_A_Tenm1
  gRNA
gctccagctgattcggctca

SEQ ID NO: 53381 - DNA, 20 bp, Artificial Sequence
  MKO10053381_A_Tenm2
  gRNA
agctcctgcgcccaacgacc

SEQ ID NO: 53382 - DNA, 20 bp, Artificial Sequence
  MKO10053382_A_Tenm2
  gRNA
aacagtaaccacttcggtgt

SEQ ID NO: 53383 - DNA, 20 bp, Artificial Sequence
  MKO10053383_A_Tenm2
  gRNA
gtggatttgactccgccgat

SEQ ID NO: 53384 - DNA, 20 bp, Artificial Sequence
  MKO10053384_A_Tenm3
  gRNA
tgtgaatccgcaactcgaag

SEQ ID NO: 53385 - DNA, 20 bp, Artificial Sequence
  MKO10053385_A_Tenm3
  gRNA
tgccactcctcttcgagttg

SEQ ID NO: 53386 - DNA, 20 bp, Artificial Sequence
  MKO10053386_A_Tenm3
  gRNA
tttctaggaagtggccgggt

SEQ ID NO: 53387 - DNA, 20 bp, Artificial Sequence
  MKO10053387_A_Tenm4
  gRNA
ggcgctcagcatcgcgacgc

SEQ ID NO: 53388 - DNA, 20 bp, Artificial Sequence
  MKO10053388_A_Tenm4
  gRNA
agccctatcgctcgctgacc

SEQ ID NO: 53389 - DNA, 20 bp, Artificial Sequence
  MKO10053389_A_Tenm4
  gRNA
ggagagatgacgccccctca

SEQ ID NO: 53390 - DNA, 20 bp, Artificial Sequence
  MKO10053390_A_Tep1
  gRNA
cggagtaataccgtcgtaca

SEQ ID NO: 53391 - DNA, 20 bp, Artificial Sequence
  MKO10053391_A_Tep1
  gRNA
cctgccgcccccatgtacga

SEQ ID NO: 53392 - DNA, 20 bp, Artificial Sequence
  MKO10053392_A_Tep1
  gRNA
gtgggttgtacttagctagc

SEQ ID NO: 53393 - DNA, 20 bp, Artificial Sequence
  MKO10053393_A_Tepp
  gRNA
tcacgcgtgccatcgaagat

SEQ ID NO: 53394 - DNA, 20 bp, Artificial Sequence
  MKO10053394_A_Tepp
  gRNA
cgcggtgcggtacttgaagc

SEQ ID NO: 53395 - DNA, 20 bp, Artificial Sequence
  MKO10053395_A_Tepp
  gRNA
aagatgattcccatcgcgcc

SEQ ID NO: 53396 - DNA, 20 bp, Artificial Sequence
  MKO10053396_A_Terf1
  gRNA
tgatgagcgtattacaccct

SEQ ID NO: 53397 - DNA, 20 bp, Artificial Sequence
  MKO10053397_A_Terf1
  gRNA
gatttggaactcaattgaaa

SEQ ID NO: 53398 - DNA, 20 bp, Artificial Sequence
  MKO10053398_A_Terf1
  gRNA
cttcagctatagctgcatga

SEQ ID NO: 53399 - DNA, 20 bp, Artificial Sequence
  MKO10053399_A_Terf2ip
  gRNA
gcgcatcgcctacaccgacg

SEQ ID NO: 53400 - DNA, 20 bp, Artificial Sequence
  MKO10053400_A_Terf2ip
  gRNA
gcggtccttgagcgactgcc

SEQ ID NO: 53401 - DNA, 20 bp, Artificial Sequence
  MKO10053401_A_Terf2ip
  gRNA
gacccgacggttatcccatt

SEQ ID NO: 53402 - DNA, 20 bp, Artificial Sequence
  MKO10053402_A_Terf2
  gRNA
cgccgctgcgcgatgcccgt

SEQ ID NO: 53403 - DNA, 20 bp, Artificial Sequence
  MKO10053403_A_Terf2
  gRNA
gtcacgcacaacgcccgggc

SEQ ID NO: 53404 - DNA, 20 bp, Artificial Sequence
  MKO10053404_A_Terf2
  gRNA
tgtctgtcgcgcattgaaga

SEQ ID NO: 53405 - DNA, 20 bp, Artificial Sequence
  MKO10053405_A_Tert
  gRNA
gccagtatcgacgcgataga

SEQ ID NO: 53406 - DNA, 20 bp, Artificial Sequence
  MKO10053406_A_Tert
  gRNA
gcgcaacgagagaaacgtgc

SEQ ID NO: 53407 - DNA, 20 bp, Artificial Sequence
  MKO10053407_A_Tert
  gRNA
ccgctgcagagcaccgtctg

SEQ ID NO: 53408 - DNA, 20 bp, Artificial Sequence
  MKO10053408_A_Tescl
  gRNA
taatgatcccatcgccgtcc

SEQ ID NO: 53409 - DNA, 20 bp, Artificial Sequence
  MKO10053409_A_Tescl
  gRNA
cggacgatcctggagcggat

SEQ ID NO: 53410 - DNA, 20 bp, Artificial Sequence
  MKO10053410_A_Tescl
  gRNA
agttcaatccgatccgctcc

SEQ ID NO: 53411 - DNA, 20 bp, Artificial Sequence
  MKO10053411_A_Tesc
  gRNA
ggtgtcgatgggccggaagt

SEQ ID NO: 53412 - DNA, 20 bp, Artificial Sequence
  MKO10053412_A_Tesc
  gRNA
gaccgctggatccctttcgc

SEQ ID NO: 53413 - DNA, 20 bp, Artificial Sequence
  MKO10053413_A_Tesc
  gRNA
agcacacctgttgtcgaaga

SEQ ID NO: 53414 - DNA, 20 bp, Artificial Sequence
  MKO10053414_A_Tesk1
  gRNA
ctacggtacctacacgccaa

SEQ ID NO: 53415 - DNA, 20 bp, Artificial Sequence
  MKO10053415_A_Tesk1
  gRNA
ccaggttcggcaccgacagt

SEQ ID NO: 53416 - DNA, 20 bp, Artificial Sequence
  MKO10053416_A_Tesk1
  gRNA
gtaggccttgtgcaatgtcc

SEQ ID NO: 53417 - DNA, 20 bp, Artificial Sequence
  MKO10053417_A_Tesk2
  gRNA
gggttactcacctagcgtca

SEQ ID NO: 53418 - DNA, 20 bp, Artificial Sequence
  MKO10053418_A_Tesk2
  gRNA
acagtgacttgtatttaccg

SEQ ID NO: 53419 - DNA, 20 bp, Artificial Sequence
  MKO10053419_A_Tesk2
  gRNA
ccatcgggacctcacatcaa

SEQ ID NO: 53420 - DNA, 20 bp, Artificial Sequence
  MKO10053420_A_Tespa1
  gRNA
gaatccaatcaataagattg

SEQ ID NO: 53421 - DNA, 20 bp, Artificial Sequence
  MKO10053421_A_Tespa1
  gRNA
tcagggcaatctaactacag

SEQ ID NO: 53422 - DNA, 20 bp, Artificial Sequence
  MKO10053422_A_Tespa1
  gRNA
cagtcctcaatcttattgat

SEQ ID NO: 53423 - DNA, 20 bp, Artificial Sequence
  MKO10053423_A_Tes
  gRNA
acttcacgtcacccacgccc

SEQ ID NO: 53424 - DNA, 20 bp, Artificial Sequence
  MKO10053424_A_Tes
  gRNA
cataacgttgcgtttgtaca

SEQ ID NO: 53425 - DNA, 20 bp, Artificial Sequence
  MKO10053425_A_Tes
  gRNA
tatgatcttgaccaatccag

SEQ ID NO: 53426 - DNA, 20 bp, Artificial Sequence
  MKO10053426_A_Tet1
  gRNA
tcgatcccgattcattcggg

SEQ ID NO: 53427 - DNA, 20 bp, Artificial Sequence
  MKO10053427_A_Tet1
  gRNA
ccggctcgcgtcagaaaact

SEQ ID NO: 53428 - DNA, 20 bp, Artificial Sequence
  MKO10053428_A_Tet1
  gRNA
ataccaccaccgacgttgcc

SEQ ID NO: 53429 - DNA, 20 bp, Artificial Sequence
  MKO10053429_A_Tet2
  gRNA
ggtatatcggagatcgagtg

SEQ ID NO: 53430 - DNA, 20 bp, Artificial Sequence
  MKO10053430_A_Tet2
  gRNA
agttctgatgcgagtagctt

SEQ ID NO: 53431 - DNA, 20 bp, Artificial Sequence
  MKO10053431_A_Tet2
  gRNA
gctcctagatgggtataata

SEQ ID NO: 53432 - DNA, 20 bp, Artificial Sequence
  MKO10053432_A_Tet3
  gRNA
gccgttgaagtacatgctcc

SEQ ID NO: 53433 - DNA, 20 bp, Artificial Sequence
  MKO10053433_A_Tet3
  gRNA
gccacgaaagttccgcctca

SEQ ID NO: 53434 - DNA, 20 bp, Artificial Sequence
  MKO10053434_A_Tet3
  gRNA
gaaagctatccggattgaga

SEQ ID NO: 53435 - DNA, 20 bp, Artificial Sequence
  MKO10053435_A_Tex101
  gRNA
cagtctgcagccgatcgtag

SEQ ID NO: 53436 - DNA, 20 bp, Artificial Sequence
  MKO10053436_A_Tex101
  gRNA
tggaaccaggaccgtcgttt

SEQ ID NO: 53437 - DNA, 20 bp, Artificial Sequence
  MKO10053437_A_Tex101
  gRNA
gacgccaccgtgcaagttaa

SEQ ID NO: 53438 - DNA, 20 bp, Artificial Sequence
  MKO10053438_A_Tex10
  gRNA
tgagaagtgactctccgatt

SEQ ID NO: 53439 - DNA, 20 bp, Artificial Sequence
  MKO10053439_A_Tex10
  gRNA
aatgtgttcagttcgtattt

SEQ ID NO: 53440 - DNA, 20 bp, Artificial Sequence
  MKO10053440_A_Tex10
  gRNA
tacctctgtttggttgcatc

SEQ ID NO: 53441 - DNA, 20 bp, Artificial Sequence
  MKO10053441_A_Tex11
  gRNA
tatacgtacgtttagctgcc

SEQ ID NO: 53442 - DNA, 20 bp, Artificial Sequence
  MKO10053442_A_Tex11
  gRNA
gtgttatattgcttgcaagc

SEQ ID NO: 53443 - DNA, 20 bp, Artificial Sequence
  MKO10053443_A_Tex11
  gRNA
gttaaaaccctgatcataac

SEQ ID NO: 53444 - DNA, 20 bp, Artificial Sequence
  MKO10053444_A_Tex12
  gRNA
tcaggtgtctgatagtccac

SEQ ID NO: 53445 - DNA, 20 bp, Artificial Sequence
  MKO10053445_A_Tex12
  gRNA
cataggcacattacttgtgt

SEQ ID NO: 53446 - DNA, 20 bp, Artificial Sequence
  MKO10053446_A_Tex12
  gRNA
tcttacatcgatgagataga

SEQ ID NO: 53447 - DNA, 20 bp, Artificial Sequence
  MKO10053447_A_Tex13a
  gRNA
tgggtgtgcgcttcgctcac

SEQ ID NO: 53448 - DNA, 20 bp, Artificial Sequence
  MKO10053448_A_Tex13a
  gRNA
acattgacaccttgctatgc

SEQ ID NO: 53449 - DNA, 20 bp, Artificial Sequence
  MKO10053449_A_Tex13a
  gRNA
gtctttctgtggtcggtagt

SEQ ID NO: 53450 - DNA, 20 bp, Artificial Sequence
  MKO10053450_A_Tex13
  gRNA
cgaggtgcctcgggatgttc

SEQ ID NO: 53451 - DNA, 20 bp, Artificial Sequence
  MKO10053451_A_Tex13
  gRNA
tgggggttcgcttcgctttc

SEQ ID NO: 53452 - DNA, 20 bp, Artificial Sequence
  MKO10053452_A_Tex13
  gRNA
agtctcgcacaactctcata

SEQ ID NO: 53453 - DNA, 20 bp, Artificial Sequence
  MKO10053453_A_Tex14
  gRNA
cccaaccgacagcttaaacc

SEQ ID NO: 53454 - DNA, 20 bp, Artificial Sequence
  MKO10053454_A_Tex14
  gRNA
gactctcctcagcgactcat

SEQ ID NO: 53455 - DNA, 20 bp, Artificial Sequence
  MKO10053455_A_Tex14
  gRNA
ctgcaacaaagagcgctgac

SEQ ID NO: 53456 - DNA, 20 bp, Artificial Sequence
  MKO10053456_A_Tex15
  gRNA
ctgcacaaccagagatttcg

SEQ ID NO: 53457 - DNA, 20 bp, Artificial Sequence
  MKO10053457_A_Tex15
  gRNA
tatccttatccgcctaaccc

SEQ ID NO: 53458 - DNA, 20 bp, Artificial Sequence
  MKO10053458_A_Tex15
  gRNA
ccctaatactatgtgttgta

SEQ ID NO: 53459 - DNA, 20 bp, Artificial Sequence
  MKO10053459_A_Tex16
  gRNA
agacctaacagcactagtac

SEQ ID NO: 53460 - DNA, 20 bp, Artificial Sequence
  MKO10053460_A_Tex16
  gRNA
atagtacctcaagagagcgt

SEQ ID NO: 53461 - DNA, 20 bp, Artificial Sequence
  MKO10053461_A_Tex16
  gRNA
ccctagtttcgatgttatag

SEQ ID NO: 53462 - DNA, 20 bp, Artificial Sequence
  MKO10053462_A_Tex19.1
  gRNA
tgctgtcaatgcgtgtccgc

SEQ ID NO: 53463 - DNA, 20 bp, Artificial Sequence
  MKO10053463_A_Tex19.1
  gRNA
cctattgaataaactctacc

SEQ ID NO: 53464 - DNA, 20 bp, Artificial Sequence
  MKO10053464_A_Tex19.1
  gRNA
cctgagtccttacgacccag

SEQ ID NO: 53465 - DNA, 20 bp, Artificial Sequence
  MKO10053465_A_Tex19.2
  gRNA
ccagcatgttcttaacgacg

SEQ ID NO: 53466 - DNA, 20 bp, Artificial Sequence
  MKO10053466_A_Tex19.2
  gRNA
aggtgcattcgtatttgccc

SEQ ID NO: 53467 - DNA, 20 bp, Artificial Sequence
  MKO10053467_A_Tex19.2
  gRNA
ggtacagccacgccccatag

SEQ ID NO: 53468 - DNA, 20 bp, Artificial Sequence
  MKO10053468_A_Tex21
  gRNA
tcgccctatatgaatctgaa

SEQ ID NO: 53469 - DNA, 20 bp, Artificial Sequence
  MKO10053469_A_Tex21
  gRNA
tagatctagagaaccgttta

SEQ ID NO: 53470 - DNA, 20 bp, Artificial Sequence
  MKO10053470_A_Tex21
  gRNA
aggtgtggtttcccagccgc

SEQ ID NO: 53471 - DNA, 20 bp, Artificial Sequence
  MKO10053471_A_Tex22
  gRNA
acacatgcgcgatgtcctgc

SEQ ID NO: 53472 - DNA, 20 bp, Artificial Sequence
  MKO10053472_A_Tex22
  gRNA
atggggaggtttcggtctgc

SEQ ID NO: 53473 - DNA, 20 bp, Artificial Sequence
  MKO10053473_A_Tex22
  gRNA
tgggtctgcaagtcgtcctg

SEQ ID NO: 53474 - DNA, 20 bp, Artificial Sequence
  MKO10053474_A_Tex24
  gRNA
atctgtgatcaaagggcccg

SEQ ID NO: 53475 - DNA, 20 bp, Artificial Sequence
  MKO10053475_A_Tex24
  gRNA
agacgtttgcagcacctgaa

SEQ ID NO: 53476 - DNA, 20 bp, Artificial Sequence
  MKO10053476_A_Tex24
  gRNA
tctacaggctcagaaacatt

SEQ ID NO: 53477 - DNA, 20 bp, Artificial Sequence
  MKO10053477_A_Tex261
  gRNA
ggaaacgctcaaagacgtag

SEQ ID NO: 53478 - DNA, 20 bp, Artificial Sequence
  MKO10053478_A_Tex261
  gRNA
ttcaccaacctcgtctactt

SEQ ID NO: 53479 - DNA, 20 bp, Artificial Sequence
  MKO10053479_A_Tex261
  gRNA
gaatcatcaaatacatgatc

SEQ ID NO: 53480 - DNA, 20 bp, Artificial Sequence
  MKO10053480_A_Tex264
  gRNA
catgccggatctcctactac

SEQ ID NO: 53481 - DNA, 20 bp, Artificial Sequence
  MKO10053481_A_Tex264
  gRNA
gttgtcatagtagacagcga

SEQ ID NO: 53482 - DNA, 20 bp, Artificial Sequence
  MKO10053482_A_Tex264
  gRNA
tggtacctgtgccatccgtc

SEQ ID NO: 53483 - DNA, 20 bp, Artificial Sequence
  MKO10053483_A_Tex26
  gRNA
cgacacctaccgtattaaat

SEQ ID NO: 53484 - DNA, 20 bp, Artificial Sequence
  MKO10053484_A_Tex26
  gRNA
ccgggacttcaagaggagta

SEQ ID NO: 53485 - DNA, 20 bp, Artificial Sequence
  MKO10053485_A_Tex26
  gRNA
gctctatccaagggagcttt

SEQ ID NO: 53486 - DNA, 20 bp, Artificial Sequence
  MKO10053486_A_Tex28
  gRNA
atccaaagctgaccggcacc

SEQ ID NO: 53487 - DNA, 20 bp, Artificial Sequence
  MKO10053487_A_Tex28
  gRNA
taaatacaatgaagatgcgc

SEQ ID NO: 53488 - DNA, 20 bp, Artificial Sequence
  MKO10053488_A_Tex28
  gRNA
tgagcttgcccgcaatgtga

SEQ ID NO: 53489 - DNA, 20 bp, Artificial Sequence
  MKO10053489_A_Tex29
  gRNA
cttcactctgatttggttcg

SEQ ID NO: 53490 - DNA, 20 bp, Artificial Sequence
  MKO10053490_A_Tex29
  gRNA
gagcacccacctataaatga

SEQ ID NO: 53491 - DNA, 20 bp, Artificial Sequence
  MKO10053491_A_Tex29
  gRNA
gtctcgactgctgtttctac

SEQ ID NO: 53492 - DNA, 20 bp, Artificial Sequence
  MKO10053492_A_Tex2
  gRNA
ctgagtgcgtcaaagtcgcg

SEQ ID NO: 53493 - DNA, 20 bp, Artificial Sequence
  MKO10053493_A_Tex2
  gRNA
tgtgggggcttcggttgtcc

SEQ ID NO: 53494 - DNA, 20 bp, Artificial Sequence
  MKO10053494_A_Tex2
  gRNA
cagccccacagcttcgaaga

SEQ ID NO: 53495 - DNA, 20 bp, Artificial Sequence
  MKO10053495_A_Tex30
  gRNA
cgaagatctctttcgtataa

SEQ ID NO: 53496 - DNA, 20 bp, Artificial Sequence
  MKO10053496_A_Tex30
  gRNA
agaccgtcctttcactgcca

SEQ ID NO: 53497 - DNA, 20 bp, Artificial Sequence
  MKO10053497_A_Tex30
  gRNA
attactggatgccgtttgtt

SEQ ID NO: 53498 - DNA, 20 bp, Artificial Sequence
  MKO10053498_A_Tex33
  gRNA
gagaacatccgccacaaatt

SEQ ID NO: 53499 - DNA, 20 bp, Artificial Sequence
  MKO10053499_A_Tex33
  gRNA
gaaggcttcctacacgcccg

SEQ ID NO: 53500 - DNA, 20 bp, Artificial Sequence
  MKO10053500_A_Tex33
  gRNA
ccaaatttaagtaccatgca

SEQ ID NO: 53501 - DNA, 20 bp, Artificial Sequence
  MKO10053501_A_Tex35
  gRNA
tatttccccagaacgaactc

SEQ ID NO: 53502 - DNA, 20 bp, Artificial Sequence
  MKO10053502_A_Tex35
  gRNA
ccacagatatatgatttcaa

SEQ ID NO: 53503 - DNA, 20 bp, Artificial Sequence
  MKO10053503_A_Tex35
  gRNA
cagcttacttgtgtcagctt

SEQ ID NO: 53504 - DNA, 20 bp, Artificial Sequence
  MKO10053504_A_Tex36
  gRNA
gagtctttatgaccgcctga

SEQ ID NO: 53505 - DNA, 20 bp, Artificial Sequence
  MKO10053505_A_Tex36
  gRNA
catcacgtgtacttccctga

SEQ ID NO: 53506 - DNA, 20 bp, Artificial Sequence
  MKO10053506_A_Tex36
  gRNA
cttcagggaagtacacgtga

SEQ ID NO: 53507 - DNA, 20 bp, Artificial Sequence
  MKO10053507_A_Tex37
  gRNA
ctagtagttacccgttcttg

SEQ ID NO: 53508 - DNA, 20 bp, Artificial Sequence
  MKO10053508_A_Tex37
  gRNA
tcacacgtctactggtaaaa

SEQ ID NO: 53509 - DNA, 20 bp, Artificial Sequence
  MKO10053509_A_Tex37
  gRNA
gggtctcaccacacgtgcca

SEQ ID NO: 53510 - DNA, 20 bp, Artificial Sequence
  MKO10053510_A_Tex38
  gRNA
ataaacaagcggcgttacca

SEQ ID NO: 53511 - DNA, 20 bp, Artificial Sequence
  MKO10053511_A_Tex38
  gRNA
aacattcctttcagggcggt

SEQ ID NO: 53512 - DNA, 20 bp, Artificial Sequence
  MKO10053512_A_Tex38
  gRNA
cattaaagcagtttgttccg

SEQ ID NO: 53513 - DNA, 20 bp, Artificial Sequence
  MKO10053513_A_Tex40
  gRNA
ggtcacgaacatctccgtac

SEQ ID NO: 53514 - DNA, 20 bp, Artificial Sequence
  MKO10053514_A_Tex40
  gRNA
ctgcgaggacttcgacgaag

SEQ ID NO: 53515 - DNA, 20 bp, Artificial Sequence
  MKO10053515_A_Tex40
  gRNA
ctagcatataggtccacgat

SEQ ID NO: 53516 - DNA, 20 bp, Artificial Sequence
  MKO10053516_A_Tex9
  gRNA
ctgcaagctgcccgcgcgac

SEQ ID NO: 53517 - DNA, 20 bp, Artificial Sequence
  MKO10053517_A_Tex9
  gRNA
tgatctggttcgacaagctg

SEQ ID NO: 53518 - DNA, 20 bp, Artificial Sequence
  MKO10053518_A_Tex9
  gRNA
tcgcgcgggcagcttgcagc

SEQ ID NO: 53519 - DNA, 20 bp, Artificial Sequence
  MKO10053519_A_Tfam
  gRNA
taaatgttatatgctgaacg

SEQ ID NO: 53520 - DNA, 20 bp, Artificial Sequence
  MKO10053520_A_Tfam
  gRNA
ggcaaaggatgattcggctc

SEQ ID NO: 53521 - DNA, 20 bp, Artificial Sequence
  MKO10053521_A_Tfam
  gRNA
gctgttctgtggaaaatcga

SEQ ID NO: 53522 - DNA, 20 bp, Artificial Sequence
  MKO10053522_A_Tfap2a
  gRNA
caaccgtgccgtcccgttgc

SEQ ID NO: 53523 - DNA, 20 bp, Artificial Sequence
  MKO10053523_A_Tfap2a
  gRNA
tgccgccgatagtccctgcg

SEQ ID NO: 53524 - DNA, 20 bp, Artificial Sequence
  MKO10053524_A_Tfap2a
  gRNA
gtgtcttaacgcgtcgctcc

SEQ ID NO: 53525 - DNA, 20 bp, Artificial Sequence
  MKO10053525_A_Tfap2b
  gRNA
cagcggcggggcgcttgagt

SEQ ID NO: 53526 - DNA, 20 bp, Artificial Sequence
  MKO10053526_A_Tfap2b
  gRNA
ggcgacagcctctcgttgca

SEQ ID NO: 53527 - DNA, 20 bp, Artificial Sequence
  MKO10053527_A_Tfap2b
  gRNA
taggttcatgccgctgttat

SEQ ID NO: 53528 - DNA, 20 bp, Artificial Sequence
  MKO10053528_A_Tfap2c
  gRNA
accggcggtagacttcccgc

SEQ ID NO: 53529 - DNA, 20 bp, Artificial Sequence
  MKO10053529_A_Tfap2c
  gRNA
cgccgaccattactcgcatc

SEQ ID NO: 53530 - DNA, 20 bp, Artificial Sequence
  MKO10053530_A_Tfap2c
  gRNA
agcgaggcgtttaggcattc

SEQ ID NO: 53531 - DNA, 20 bp, Artificial Sequence
  MKO10053531_A_Tfap2d
  gRNA
taaagtcggtgggctccccg

SEQ ID NO: 53532 - DNA, 20 bp, Artificial Sequence
  MKO10053532_A_Tfap2d
  gRNA
tccttccagatacgtcacga

SEQ ID NO: 53533 - DNA, 20 bp, Artificial Sequence
  MKO10053533_A_Tfap2d
  gRNA
gattgttctcaacggccaag

SEQ ID NO: 53534 - DNA, 20 bp, Artificial Sequence
  MKO10053534_A_Tfap2e
  gRNA
gcgccgagactacgccgccg

SEQ ID NO: 53535 - DNA, 20 bp, Artificial Sequence
  MKO10053535_A_Tfap2e
  gRNA
ccaggattggcggagccgcc

SEQ ID NO: 53536 - DNA, 20 bp, Artificial Sequence
  MKO10053536_A_Tfap2e
  gRNA
tacctttcttgatcaccgat

SEQ ID NO: 53537 - DNA, 20 bp, Artificial Sequence
  MKO10053537_A_Tfap4
  gRNA
cgcgtcgaatccgcctttcc

SEQ ID NO: 53538 - DNA, 20 bp, Artificial Sequence
  MKO10053538_A_Tfap4
  gRNA
gcgctccgtgcggatgatgc

SEQ ID NO: 53539 - DNA, 20 bp, Artificial Sequence
  MKO10053539_A_Tfap4
  gRNA
gcgcctccgctcgttgctgt

SEQ ID NO: 53540 - DNA, 20 bp, Artificial Sequence
  MKO10053540_A_Tfb1m
  gRNA
gatgacgttaacgtttcaaa

SEQ ID NO: 53541 - DNA, 20 bp, Artificial Sequence
  MKO10053541_A_Tfb1m
  gRNA
tgccaacgttgctgagcttc

SEQ ID NO: 53542 - DNA, 20 bp, Artificial Sequence
  MKO10053542_A_Tfb1m
  gRNA
gaacacctctttacaatccc

SEQ ID NO: 53543 - DNA, 20 bp, Artificial Sequence
  MKO10053543_A_Tfb2m
  gRNA
tgaaaattacctgctgacca

SEQ ID NO: 53544 - DNA, 20 bp, Artificial Sequence
  MKO10053544_A_Tfb2m
  gRNA
taaaaatatacctccaaatg

SEQ ID NO: 53545 - DNA, 20 bp, Artificial Sequence
  MKO10053545_A_Tfb2m
  gRNA
tgtctctttagcccttacag

SEQ ID NO: 53546 - DNA, 20 bp, Artificial Sequence
  MKO10053546_A_Tfcp2l1
  gRNA
caggtcagtcgtatgaaatc

SEQ ID NO: 53547 - DNA, 20 bp, Artificial Sequence
  MKO10053547_A_Tfcp2l1
  gRNA
actctgtgtactgcagccgg

SEQ ID NO: 53548 - DNA, 20 bp, Artificial Sequence
  MKO10053548_A_Tfcp2l1
  gRNA
tcttcatgtagcttcaccgc

SEQ ID NO: 53549 - DNA, 20 bp, Artificial Sequence
  MKO10053549_A_Tfcp2
  gRNA
tccgcgtagtgttccacgac

SEQ ID NO: 53550 - DNA, 20 bp, Artificial Sequence
  MKO10053550_A_Tfcp2
  gRNA
tgtactgcagtcgcctgtcg

SEQ ID NO: 53551 - DNA, 20 bp, Artificial Sequence
  MKO10053551_A_Tfcp2
  gRNA
tcgtcgtggagcttcaccgc

SEQ ID NO: 53552 - DNA, 20 bp, Artificial Sequence
  MKO10053552_A_Tfdp1
  gRNA
ggtgtttaaggaagcggaac

SEQ ID NO: 53553 - DNA, 20 bp, Artificial Sequence
  MKO10053553_A_Tfdp1
  gRNA
agaacacttactgattcgtt

SEQ ID NO: 53554 - DNA, 20 bp, Artificial Sequence
  MKO10053554_A_Tfdp1
  gRNA
ggtgctcacccagcagacca

SEQ ID NO: 53555 - DNA, 20 bp, Artificial Sequence
  MKO10053555_A_Tfdp2
  gRNA
aggcacaacgtcatacaatg

SEQ ID NO: 53556 - DNA, 20 bp, Artificial Sequence
  MKO10053556_A_Tfdp2
  gRNA
taccaactcaaataaccatc

SEQ ID NO: 53557 - DNA, 20 bp, Artificial Sequence
  MKO10053557_A_Tfdp2
  gRNA
gctacaagaacttctccttc

SEQ ID NO: 53558 - DNA, 20 bp, Artificial Sequence
  MKO10053558_A_Tfe3
  gRNA
tacggcgtcccgagctggct

SEQ ID NO: 53559 - DNA, 20 bp, Artificial Sequence
  MKO10053559_A_Tfe3
  gRNA
tcgagccgtgttcctgctat

SEQ ID NO: 53560 - DNA, 20 bp, Artificial Sequence
  MKO10053560_A_Tfe3
  gRNA
gacagtcgtacctggagcgg

SEQ ID NO: 53561 - DNA, 20 bp, Artificial Sequence
  MKO10053561_A_Tfeb
  gRNA
cagcccgatgcgtgacgcca

SEQ ID NO: 53562 - DNA, 20 bp, Artificial Sequence
  MKO10053562_A_Tfeb
  gRNA
gctgccatggcgtcacgcat

SEQ ID NO: 53563 - DNA, 20 bp, Artificial Sequence
  MKO10053563_A_Tfeb
  gRNA
cattgacaacattatgcgcc

SEQ ID NO: 53564 - DNA, 20 bp, Artificial Sequence
  MKO10053564_A_Tfec
  gRNA
taatattaattaccgaatca

SEQ ID NO: 53565 - DNA, 20 bp, Artificial Sequence
  MKO10053565_A_Tfec
  gRNA
ccttcttcagtgatatgcgc

SEQ ID NO: 53566 - DNA, 20 bp, Artificial Sequence
  MKO10053566_A_Tfec
  gRNA
gaatccggagcctaagctga

SEQ ID NO: 53567 - DNA, 20 bp, Artificial Sequence
  MKO10053567_A_Tff1
  gRNA
ccccgggagaggataaattg

SEQ ID NO: 53568 - DNA, 20 bp, Artificial Sequence
  MKO10053568_A_Tff1
  gRNA
accttcttgagtgttctcga

SEQ ID NO: 53569 - DNA, 20 bp, Artificial Sequence
  MKO10053569_A_Tff1
  gRNA
cctcgctgtggtcctcatgc

SEQ ID NO: 53570 - DNA, 20 bp, Artificial Sequence
  MKO10053570_A_Tff2
  gRNA
gtacccgggcatcagtcccg

SEQ ID NO: 53571 - DNA, 20 bp, Artificial Sequence
  MKO10053571_A_Tff2
  gRNA
tgctttgactctagcgtcgc

SEQ ID NO: 53572 - DNA, 20 bp, Artificial Sequence
  MKO10053572_A_Tff2
  gRNA
ggagcagacatgcgacctcg

SEQ ID NO: 53573 - DNA, 20 bp, Artificial Sequence
  MKO10053573_A_Tff3
  gRNA
tcggagcagtgtaacaaccg

SEQ ID NO: 53574 - DNA, 20 bp, Artificial Sequence
  MKO10053574_A_Tff3
  gRNA
gggatagctgcagattacgt

SEQ ID NO: 53575 - DNA, 20 bp, Artificial Sequence
  MKO10053575_A_Tff3
  gRNA
ccaccaacagcattagccag

SEQ ID NO: 53576 - DNA, 20 bp, Artificial Sequence
  MKO10053576_A_Tfg
  gRNA
gcccctacagaagaccgctc

SEQ ID NO: 53577 - DNA, 20 bp, Artificial Sequence
  MKO10053577_A_Tfg
  gRNA
gttccggagcggtcttctgt
